United States Patent Application Publication US 2022/0267853 A1 - sequence listing, part 4

SEQ ID NO: 78 - DNA, 81704 bp, Homo sapiens
gcagcctccgccaatgggcatggccaggcggggcctcagcgccagccgagccctgctgcccggggcttgttgcgaattctcagggcccccgcaggcctgggagcggcctgtgataactggtgtatctggcaggagtagcagctgccccttggcgcgactgctggagccgcgaactagagaaacacagacacgcctcatagagcaacagcgtctctcggagcgtggagcccgccaaggtaactccgggaattgagtggagtggaggctgcactgaggcccccttctggctcctctctggtcgaaaaggctcccccgctagagagagccctgctgcttttggaagccttcaggtgttagttgctttgcaccgaagctgctgactgctggggttctgcgccgattgccaggctcaagtttattttgggggctgctgagcagactttgcccttctgtgctgttatcagcttctgtcgctgtccgtccacgcccgctatatccatccactctccgttctgtctccagcaggcaactccccctaccctgccccattttctgggtcataggggtatttgaaataaacctttaagggaaaagcaatgccaaaactggaaagacttatttccacgaattattaataactaatgtttatgatatccttgttataccatacatatgcaggcacattatgtattaattaaatctcacagcagtctattaacgctcagtttacagatgagggattagaggcaaagagtgaggttaagtaaccaaaccaaggttggaagacctgatagcaggtatttacaaaacaaggagtgggcagggctggcgggtggctcacccctgtaatcacagcactttgggaggttgaggcgagtggctctcttgagtccacaagttcgagactagcctgggcatcatggtgaaaccctgtctctacaaaaattagccagatgtggtggtgtactcctgtagtctcagctactcaggaggctgaggtgggaggacggatgacttgagcccaggaggtggaggctacagtgagacatgatcgaaccactgcactctagtccaggcaacagagtgagaccctgtctcaagaaaaaaaaaggtgaggggtggggtagtgaacaattcgggctcaaaccctcaccagggagaactggggtgcctttgtgctctggcattttaacactgaggaaaatattctcatgtactcaggtagcctttgttctaagtaggcatgaacagtgctattaattttattacctaagagtttcatagcagaggcctcaatcttgtttttcttgttcttaggcggatgagagaagagctaagaacaaattagtcaacataccagtccaaggcacccacttttataatacatatggatgactttgcagagaaggaacaccacggagagtggaataggtgaaagttgaaagcgagggagatttatgccaattttccataacaagccttaaaacttagacttctttttgtttgcttgtttgtttgtttggcttggtttggttttttttgagacggagtctcgctctgtcgcccaggctggagtgcagtggcgcgatctcggctcactgcaagctccgcctcctgggttcacgccattctcctgcctcagcctcccgagtagctgggactacaggcgccccccaccacgcccggctaattttttgtatttttttttttagtagagatggggtttcaccgtgttaaccagcatgctctcaatctcctgacctcgtgatccgcctacctcggcctcccaaagggctgggattacaggcgtgagccacctagcccggcccaaaacttagacttctatttaaacgttttctttggatttccaacttaaaattttgtctttatcaaaaattagtaatgatggtaaacgtgatctatggtgcttattttttatttaacaaacacttggatagcatttactatgtggcaagcactattctaatctctttgtaaatatttgctttataaatcttcatgaaaatcctgtaaggtagatactactacccccactttacagctgaggaaatggaggcacacaaagattgagtaactggcctatgcacacataaccagtaagtgtggaaccaagatgctaaccaagaaagctgggcttcaagtatgtgctcttaacccatttggtaattggacattaaaaaacaaaacagactttaaaaaatgtatctttattgaatttcagttgcatattaaggtctactttaggtaagaggcattttgttgtagttcttgcttttcaattctgaaaataaagagaaaaaattcagaaaaaaaatatttaaactcatttaagaccactgcttttccagtttaaatgttgcctagcagaaatttataatatgtattttccttcattgataatttctagatgactttggggaataccgttatagtaccacacactgtctttaatgacataaagttgggggatatttattcccccgcaaaatcatgttgtttgtttaactaaaagaagagcattaaaaaaatctccaactagcccattctttgattctaggaaaattactcttctgactcaaaaattagaatgcgataataactgagaccctctaaaatgccaacttctgttttattggtctttgtgctaggacacttagacccaggggtgatggtcaaaataaataatgattagtagagccttagggcctcaagggacaaggccacaggtctttcgagcttggggaggtctgggagggttcctggtgtgtcaaggttaacccctgagttgctacattgtagggaggtctgtggtttctggggcaaggaataagatgactagacaagaggggtggtagctggggagtagaaaccacctttgcaaaaattatatcactgagaaaattttaacagtaagctgagtaattcatcctccatcttgcctttcccttaattattcctgggttattgagttgtgaaagaaaatcaatagtggagcccccaaatcactaagctaaagggaaaagtgaagcttggaactgcttagggccaacctgcctcccattctattcaaactcacacctctgctcactgacatatctgatcgcctcctttggagaggctagtcagaaactcaaaataatgcaaccatttgtctcttatctacctatgacctggaaagccccgtccctggttccagtattcctgcctttgctttgagttgtcccgtctttccagacagaaccaatgttcatcttgcatatgttgattgatgtctcatgtgtccctagaatgtataaaacccaactgtgctctgaccaccttgggcacatgtcatcaggacctcctgaggctgtgtcatggggttgtgttatcaaccttggcaaaataaactgtaaattcactgagacctgtctcaaatttttggggttcacattttggtaaccacagagggattctgagtggagatgcccctgacctttggcaaacctcttatcagtgcttggtaccagcatgagctaattttacagctcaaaccaataggacaatttgctgaggtctgagagcaccccctccagagaatccctgatttccccaaatttggtcaagatctaaagtttattttgctgtacaacttctcttttttggagttttacttgcttctatcaagaaagacaaattttctgtttccatgacgttggagtttggctcacttccaacagggaaaaggagtgtttttttttttgttttgttttgtttttcctgcttcttgaatggtagagagcagtctatagccagagactcgtccctaggtaagtaactgaattggggtttgtcttggttaaagttaagattaacgaccaactggtcttaatttctccttaccattagagcactcagttatcatataaattgtgccattgtttgttttgcctaactgttttttgttgttgttgtctgttttttattgttgttttggtctttttcccattgggtttgatcaactctatccaacttgatcagggtttgatcaactctatccaacttgatcaaatccaaaggaaagttccaaattatggggaagaaggcctgagaagtggctaaattctaaaaaaaaaaaaaaaaaaaaaaaaaaaaaaaaagatggtgtggtggggaggaaaatggccagcaaaaggaaaaagaggaaggatttttgattttgactactaaaggggctttgtttacataacaccaccctttttgttaggccaaactgaaagcaatggctgtcctcccacactgctaaggtcccacccgatagctaaggttgtgcctttgttttttttcctaccaaaacagccctgggtttggttcctaaatcaagccctttctggtttgatacttggtacttctgaaatagcagcaatttgtcctagctgaaatatagtaaggactaaactgatttttttatcttgcccaaattcctatctaaggtgtctggggagtcatgccctacaaatcataaattctcatcagaagggttttatttaagccaatatatcatgagttattttccaacttgactctgacatagcattatgagacaaggaagaaaagcaaaattattttaccctaaaacatgtttctttgccatatcttgaagtggccctgcaaagctgttctttgtaggggagaatttgcatctttaaagaatctctgttaacatagctagatctttttcttccagatcctcccaatcctaaagcgattaactaagatctgaataggaaacattttcatctattgtctttaagggccgccactattaagacttcaaaagaactttggtctccacaatctttatcttaatccgaacattccctttctatgaatcccgtgtctttaggcaaactcaaccaattgtcaaccagaaaatgtttaaatttgcctacagcctggaagccccccacacccacctggttttaaattgtcccacctttctggaccaaaccaatatatttcttaaatgtatttaattgatgtcttgtgcctctctaaaacgtgtaaaaccaagcctcaccctgaccaccttgggcacacgttctcaggacctcctgagggctgtgtcatgcgccatgatcagtcatatttggctcagaataaagctcttcaaatattttagagttcaactcttttcactgacaatagtaatgagattttaaaagatttttttaaaaaaggaactcaatggttaaaagtcagcttaattaaaagctaacatccaagatgtgtgtgtgtgtgtgtgtatgtgtgcatgtgtgtgcatgtgtgcatgtgtgtatttaaaagaccttcatgttttgttttgttttttttctctcccaggaccttgtcttttttttttttagtaattttttttcttcttagttgactgaattctgtgttcttcattaatatctattgcaactgagagacacgactagctggatttcctaggccgactaaggaatccccaagcctagctgggaaagtgaccgcttccacctttaaacatgggacttgcaacttagctcacacccgaccaatcagatagtaaggagagctcactaaaatgctaattaggcaaaaacaggaggtaaagaaatagccatctgctgcctgagagcacagcaggagggacaatgatcaggatataaacccaggcattcgagccagcaatggcaaccccctttgggtcccctccctttgtacgggagctctgttttcactgtgtttcactctattaaatcttgcaactgcactcttctggtccatgtttgttacagctcgagctgagctttcgcttgccgtccaccactgcccaccactgtcgtttgctgccatcgcagacctgctgctgacttccatccctctggatccggcaaggtgtgtgctgtgctcctgatccagcaaggtgcccattgccagtcccgattgggctaaaggcttgccattgttcctgcacggctaagtgcctgggttcatcctaatcgagctgaacactagtcactgggttctacggttctcttccatgacccacggcttctaatagagctataacactcaccacatggcctaagattccattccttggaatccgtgaggccaagaaccccaggtcagagaacacgaggcttgccaccatcttggaagcgacccaccaccatcttggaagtggctcgccaccatcttgggagctctgtgagcaaggacccctggtaacacaaccgaggcttctctggggtttttaaggaagagtatagtttaggcacttagaaatgtctttgtttttaaagtgcactgtaaaagcatcatgtggtctaaccttaaaataattctctttttgaagacccaggattcagtgtgggctctgcccagagcttagagatccagttaaaaaataaatagtccctatctaaataaaattggtctccttatacaatcctatgatagatttctataattttatgtttgatttggcatccatcatcaatctccctctagcagtaccagactttttctttatataccttatgatgtaaattttgctatttgattttcacctgtgttgtttcatttaatatctaaatttatggctatttagctgacaactgcctagtgttgtgaaacaggttatcaaatatctgaaagtctaagatagaaaaaaaaaggtctttatgaatctataagatgtacttctatcggcatgcctaatatgtctatgtatttgtgtgttgagtacataatgtttcactactgaaaatatataaaagagctctaattaattggcttaaagaaaaatagaagcacttaaatcaaataccttcttaaaaaaaagggaagactagtcgaatgctttttctttttctttttttgagatggagcttcgctcctgtcgcccaggctggagtgcaatggcatgatcttggctgaatacaacctctgtctcttgggtttaagcaattctcctgcctcagcctcccatgtagttggcattacaggcaagcaccaccacacatggctaatttttgtatttttagtagagatggggttttgccatgttggtcagggtggtcttgaattcctgacctcaggtgatctgcccaccttggcctcccaaagtgctgagactatagcatgagccactgtgcgtggctgtccaatgctttttcaagtttacatgatttaagtaaagtcctttttttttttttttttgagacagactctggctctgttgcccaggctggagtgcagtggcatgatatcagctcactgcaacctctgcttcccgggttcaagtgattctcctgcctcagcttcggagtagctgggattacaggtgcacagcaccaccctcggctaatttttcgtatttctggtagagatggggtttcaccatgttagccaggctggtctcgatctcctgacctcatgatccacccacctaggcctcccaaagtgctgggattacaggtgtgagccactgtgcccagctgtaaaatctttactaaataagctagctttaaaattactgataaagtaatattagaaatgtcttaagcattgccagcatacatttttgtttgcatttattaatcaagcaatttcatacttatccctgccaaatactataaggtgtcaaaatttggcataggggttacaaacctataaacccagcccaagattgctttcataatctttaataaataagacattgctattggtttaatgaaaacagctatattttgaattatttagtaaaattaccataacttctgatattgtggcattaggcagtgtaatccacaggcagcaaggaagtttgtttgggggaaaggactattactgtctttgtttcaaagctaaaatataaattaaattccttctaaagtttgggaataagcaaggacagcttggaggttagaagcaagatggagtcagttaggtcctgtctttttcactgtctcagaattttgcaaaggtgagtttcataactttaattgatgactatcacagttttcataaataatgtaggtaaatgaataaaataaaatagacagatgtaatgggataaatacttgtaggcaaacttgtcataatttagaatctaaagttatactaaaatatttcattatttaggtattttccaataaaaatatattgtaggaaaacattctttctagaaaaaagtgtccttttaaaaaaggtggacaatttttttctaattcaaagcttaaaggttgtgtacaaaacaaggtaagaggagccaggaaataagagagatgtaaagaaacttatagaaataaagaggtatattttggtaagaaagcttaaagagaaataattttatatgagaaagaatattacatggtaaatttagacctagaataaaatgactggttgtttaagaaagggatgttcaggacaaaccagaaagtccaagcatgtcatgaatggtctgggtaagtcacaatgaaagaatttatttaaaaaaaaccccaaaacttatatgatcaagttgtctgtagttaaagggaaattacaatggtctttccagagacttggtttgatgtaaaaaaacccaaaaacatttatatagtaaagaattgattagaacaataaaagttccttagggtattgatttactcttaataaattataagagattttatttatatcttaacccaaagttaaacttctattgcatcttgctgtttttggttttctctccccttttaaaaggagtgaaataataatggtttccttcaactcatataagtttttgtttcctcaacttctgtttgttgtggcctgatgctaacaatattcttaaagatctgaaggaaatgttttcttccaacataatgttctgtacactgcagaagggtttttcttttgccttttggtaactggcctaacagattttaggttttataaaaataattcctatgccattattattaagttttgatttgcttaggaaaaaaactgagattaaatttttttttttaagttaaggttattacatccatgtatctttctgtatgtgattttaaagtacttgtgacattaagttacagggctttgactcctgggtctaaaaaggacaccaagtcctgctaagtcttaaaacaccgacagcaattaaaacctcatcttcaggccctcttgattggcatcagaatatgccaatcaaaataaactgcattcctgagacacaaggtcagaagttaaagccattcaacgcctcaaattccagggactattgtggaagcggtgggcatgtgggattgtaagggctgattttaagagataaaataagttcaatttctctataaattaaccagtaatgtcaaagacactcttattcaagaccagcatatggaccgctgtgtcagattaacaagattttcttgaagcattaaccaactccttaataaaggttataaaggttataaaaggcttatggaagttaaattttatgaccaatattaagattttatagattatttataaaattttgaaaaacaaatttatttggcttcatgctgtttttattagagctaattgtttagaaagttaagtgtcctctcttaaagaattaaggttttcactttttttttttcaaacccttgagttatcactctggttaaatgaatgacttattttacaataacctgtaatcctattttgtgatatcaagtgtaaacctttgatatttgacaaactttccaaaatcaaaattataaattatgtcttttttttggctgggcacatacctgtaattcaagcattttgggaggccaaggagggaggatcgtttgaggtcaagagtttgagaccagcctggccaacatggtgaaactctgtctctaccaaaaaatacaaaaattagctgggcatggtggcacacacctgtaatcacaactactggggaggctgaggcaggagaatcacttgaacccaggagatggaggttgcagtgagctgagatcatgccactgcactccagcctgggtgacagagcgagactctgtctcaaaaaaaaattatgtctttttttgaactaattaatcctttaagatattattaataggttccctaatgtcaaaaaatgacatatttggttatttggtataaaaattatacaggaaacaccatcaaataagaaatggtgtttggttttctttgggctgtatttgtataaaaatgttattggtatgtattctaaaattatgggaaacttctataattctgatacgacttagtgtacattatcagtaataattataattgttatgttaaattattgtgtgcaacagaggtaacaaatttcctcatcaattgtgtctttgactatggctgccctaaaactttttgtcatccacagacaattattgtctttttttggttctctttagaaggtagttttataaaactctaacaggtgctcttgaacacaggtttctgataacattggagattgtgacatcagaatagatgaaaaactttcaggactcatggagagataaaatattcatgaatatcaagcagaataggaattaacttcatggattaaactaatagaagtctgaagtaatctgtttaactttttgcctaaaatggtgctgattcttttgtttttcaaagtcaagaaaatgtttaagctatttacagattctaacaattgagtaagtatactcctatgaataaaatttggagcatatttctttctctgtacctgatttctacagaatttggaaactatttgtgagtattcttaacttacgacaatacagttatttgcataaatgcaataagaatctgttttcatttgtaacaggacacaattggagaaactagttactttaccgaggctctttactgggatggtgtgctttgctttaaggaatcaaacttggcttatggaatcaatacaagccccttgggaaaactggcctcatacttttgtctatacagtccctgtacagggttcctgacctgtggtaagtaaagaatgtcactttctgacaggtccaggagccccaggtttatcttggaacctcaacaggaaaggaatttacccaactcataggtatttgatggtacaaatccatggctgggtttgactttaaaaaagtcttatgtgagatttcttctatggaataaagtaccatcaaagccaatttaaaagcctatgtaaaaaaattatttttgttgcactgtaaacaaataatcaggccaagtataataaagcaagtcagggccgggcgtggtggctcacacctgtaatcccagcactttggaagtccaaggtggatggatcatgagttcaggagttcgagaccagcctggccaagatggagaaaccccatctctactaaaaatacaaaaattagccaggcgtggtggcacatgcctgtaatcccagctactcaggaggccgaggcaggataattgcttgaacctcggaggcggaggttgcagtgagctgagatcacacctctgcactccatcctggcaacaagagcaagactccatctcaaataaataaataaataaataaataaataataaaaaagcaaatcagtccaaccacgatttgtctttagtaaaaatgggaaactggagaggaaaaattatgtttcaaaaactatagtacacctgttcttagattccagtcttgcctaatgtttttcaacttttattattttctacagtttggactgagttctaatttttcttggctacaagccttcaaaatattgctttcagtttcttttccttctttacccccacccccactcccccatttatcctaatttggagtcactgaaaactaagctgtgcattcataaagccctgtgaacagaagctagacaacttaaacttcagaagaaaataacaacaacctatttacatacataagccacttactgcctgtctattgatatgtggacttcagagtagtgtggcctatatgcattttccaggattgttcctttgtttgttcttgtttttctcccttcctcctcctattttctctttataggacatgagactttacagcctgctaaaagtgagccttcctaaataacttgggacctacccatctaggaataaaccatcctagccatgagagatcggacaaaacctcagactagagacgcattttcttctaaaatgctttctccaaaggattttttaaaagaaaagtgtagggtccagccccacagggtcggtgggttttctcctcgtgtgcagagatgagagagtgtagaaataaaggcacaagacaaagagattaaaaaaagacagctgggcctgggggaccactaccacaaagacgcggagaccggtagtggccctgaatgccaggctgcgctgatatttattggatacaagacaaaggggcagggtaaggagtgtgagccatctccaatgataggtaaggccacatgggtcacgtgtccactggacagggggccctttcctgcctggcagctgaggcagagagagagaggagaaagagagaaacagcttacattattatttctgcttctcagagacttagtactttcactaatttgctactgctaactaaacggcagagccaggtgtacaagatggaacatgaaggcggactagaagcatgaccactgaagcacagcatcacagagagatggttaggcctctggataactgcgggcgggcctgactaatgtcaggccttccacaagaggtggaggatagagtcttttctaaactcccctggggaaagggagactccctttcctggtctgctaagtagcaggtgtttttccttgacactaatgctaccactagaccacggtccacttggcaaagggcatcttcccagatgctggcattactgctagaccaaggagccctctggtggccctgtctgggcataacagaaggttcacactcttgtcttctggtcacttctcccaatgtctcctcagctcctatctctgtatggcctggtttttcctaggttatgattatagagcgagggttgttataatattggaataaagagtaattgctacaaactaatgattaataatattcatatataatcatatctaagatctatatctggtataactattcttattttatattttattatactggaacagctcgtgtccttggtctcttgcctcggcacctgggtgacttgctgcccacagaaaaggggggaaaatgtgaaaggaaaatatatcttggggctcctaagtcactaagctaaagaaaaaagttaagttggtaactgcttagggccaaactgcctcccattctattcaaagtcagccctctgctcactgggataaatgcatatctgattgcctcctttggagaggttaatcagaaactcaaaataatgcaactatttgtctcttatctacctatgacctgaaagccccctccctgcttccaatcttcctgcttttgctttgagttatcctgcctttccagacagaaccagtgttcaccttacatatgttgattgatgtctcatgtgtccctagaatgtataaaacccagtgatgctctgaccaccttgggcacatgtcatcaggacctcctgaggctgtgtcatggggttgtgttctcaaccttggcaaaataaattttgtaaattaactgagacatgtctcagattttcagggttcacaggaccaagctaactttgaaagatatttaggctatggtttaaatgataataagtcttatcctaaaactcattcacttttataaagctaatgggaggccatcaggctgtggggaggaggggagcctgagtcctgctaaggtgcagacataaaccattgccagccattattccggaggttataagatatgagcttccccaattactcctgcaaataacatcaatattgtagaacctaacactggccttttgagatatcttttcagggttttttgtttttgttttttttttttttttgcatgtctgacacccacggctccacctggaccagccaacccagctcctatggtcccacccagaagcaattcagcccacagaagggcagctttgacgcctatttcatctccaccccagtcaatcaacagcaagcacctattacctggccaccccctcccttcccccaaactgcctttgaaaaacccctgacctaagacctttggaggagatcatttgagtacaaactccatttcccatgtggcatgactagtcttgtatctattaaactttctctactacagtgttgtggtctgtctttacagagtggggcttgaggctttttgcaaaaatgttgctgtccagcctagtactgtacctagcttatacttggtaatctttttctcaatcagtctagttaggaggttttcaattttatgaatctttataagaactagctcttacctttattgattttccttacctatttttaaattttaattgatatctactcttatttttattacctccttccttctacttggagtttaatttgctatcctttttccagtttctaaggtgaaagtttagactttgattttaaacctttattctctttcactacaaatgtttaaagctaacatttgcctccaaatactgctttagctccatcccacaaattttgatatattgtgtttattaataatgtttattatcatttagttcaaaatattttaaagttttctttgcaatttcttctttgacccatgggttatgaaggaatgtgttccttgatttccagataactgcagcttttccagatatccttctgttattggttatcagtttaatcctcttttggacacagagcatattctgaacaataatagttctttgaaatgtgttgagatttggtttatggcccagcatatgatctgtcttggtggatgttccaagttaaatagaaaagaatgtgtattctgcagttgctgggtgtagtgttttagaaatgtcaattgggttaagttgcttgctctaaatgtagtttattgccaatttttaaatttgtttaacttggtcattagatacaaacacaagtaggattattatgtctccttaattaatagacaattttatcattattaaatgtccctgtttattctggtaatactttctgatttggaatttactttgtctgatattaatatagctaaatcagctgtgttattagcatttttttaaacagagtcttgctctgtcacccaggctggagtgcagtggtgcaattttggctcactgcaacctccacctcccagattcaagtgattctcttacctcagcctcccaagtagctgggattacaggtgcatgccaccacacctggctaatttttgtatgtttagtagagatggggtttcaacatgttggtgaacaggctggtctcgaactcctgacctcaagagatccacctgctttggcctttcaaagtgctgggattacaggcctgagccaccgtgcccagcctattaacatttattattatgacatgccttttttttccctttacatctaacctatctgtgtctttttatttaaagcttatttctcataaatgacatttagttgcattttacttttgtaaccaatctgaaaatctttgcttttaattagccttttagtctgagtacatattttataaaaattgatgtggttagattcaaggctaaagattggtacctttgatatttcctataatgtagatttgctggcaataagttctcccagtttttgtttgtttgaaaaagatgtattttgcctttattttcaaaagctattttccctaggtacaaaagtataaattaacagtatttctttactttcagcacattaaaaatactactttgttatattctaagcttacattgtttctcatttacaagtctgtgattatccttcccacccccccgcttcccccactgtatgtaatgtgcctactttctccctctggctgtttaatttttttaaaaaatcacttattgttgctgggcacggtggctcacacctgtgttcacagcactttgggaggctgaggtgggcagatcacctgaggtcgggagttcaagaccagcctaaccaatctggagaagccccgtatctactaaaaatacaaaattagctggggtggtggcacatgcctgtaatcccacctacttgggaggctgaggcatgagaatcgcttgaaactgggaggcggaggttgcggtgagccgagatcatgccattgcactccagcctgggcaacaagagcgaaactctgtctcaaaaaaaaaaaacacttattgttagtaattgggcttttatttgctttgaagtgattttatttgtttttattctgcttggggttcattgaaattcttgaatatgtaattttatacttttcatcaaatttggaaaattattggacattatttcttcaaatatttgtttttacctccttgcttctagggtaccaattacacatgttgatccaattaatatggttccatgagttactaagattccaatgttttatctctttttgctttattttggcagcttcaattgctatgtcttcacattcactgattttatcatctacattttctattctactgaacagacatctaataaatttttaatttcagatattttaatttctagaagttctgttattttttcctgtgttttaaatttgtttgttgattatataaatgatttattttgaattcttgagcatatttataatacatattttaatgtccttgtttgctaatccattattattattattagttttgaaatgaaatctctctctgtcaccaggctggagagtgcaggagcatgatcttggctcactacaacctctgcctcctgggttcaagtgattctcctacctcagcctcctgggtagccgggactacaggcgagtgccaccacacctggctaatttttgaagttttagtagagacgggatttcaccattttggccaggctggtttcaaactcctgacctcaggtgatccacctgcctcggcctcccaaagtgctgtgattacaggtgtgagctactgttcccagacatatgccatgatttctgtcacttctgggtatgcagctattgactgatttttttcctgattatgggtcacattttcctgcttctttatgtgtctagtaatttctgattgaatgccagacattattagtccatattgtgaagtgtttggattttattgcctccttaaaagaggggaaggaatttgaattatttgcaaattagtttgatcctttatgagcttcttttaagacttatatggcagattgaaagtatcatagctctcttttatctgcagggaatatgttccaagacccccagggggtgcctgaaaccatggacagtaccaaattttatatacactatgtatttttgcctatgataaaattcaatttataaattaggcatggaaagagattaacacctgataataaaattgaacaattataacaatatactttaagaaaagttatgtgaatgtggtctctctctctttctctcaaaacatcttatactatattcaccttttttgtgatgatatgagatgatacaatgcctatgtgatgagacgaaggaggtgaatgacttggcattgtgaaatagcatcaggctactattgaccttctgataatatgtcaaacttatgaattgtttatttttggaattttgcattaaatattttaagaccatgctcaaccacaagtaaataaagttgttgaaagtaaaaccacaaataagggggtactgtatcctttaacctagagttaggttagccctgctattgaagtgtggcttttcatgtaagcatttaaattttttatttatttatttatttttgagatggagtctcgctctgttgcccaactggagtgcagcagtgtgatctctgctcactgcaacttccacctctgaggttcaagcgattctcttgcctcagcctcctgagtagctgggactgcaggcatgtgccaccttgcccagctaattttttttgtatttttagtagagacgggttttcaccatgttggtcaggctggtctcgaactcttgacctcaaatgatctgcccatctcagcctaccaaagtgctgggattaaaggcatgagccactgtgccaagtccatgtaagcattattaatgcctgaggtcttcactgaatctctccagtctacaggtagtaacttgaatatctccaaggtctgtgtgagttttgggattatttaactgttaataccttggaagttattctttgtccagtctgtggaattttcatttatgcatgtccagattagcattccacaaagactggaaaagacctctctgcagatttctggttctttctctacattgcttcctcttctctagtactttgctctgaaaattctggctacttcaatctccaaggtcatatttctgactccttagctaaacaagactgctgggctgtgcttggtttatttttctcatgtcacagattaaaaatggtctttggacagggttcaactcatttttcccccatttctctaatgccatacttctgttgttgttttgtgcattttgtccagtttgaagtcaagctactttttcatgagcaaaaacttagactacagtatacagatgttcctttacttatgatggttcatcttatgatttttctactttatggtgggtgtattggggtattaaatgccttttcaacttatgattatttcaatttatgataggtttattgggacataatcacattttaagtcaagaagcatctattgttgatttgtgggagcccactgcaatgtttgaatataatatttaaaattcatgatttatttgtgaagctgtctcattttataaattgtgttgagacaatgcaaagtttgtacaagtaggaatttataaaaattactacaatctgtaatgactcaaagcgttgtgaaacagcactaccaccaaataatgtaaaatcttgattatcacaatatatttagtatttttctgagaaggcagaaaagtaaattatatataatacataataacttacatttatgtatatctctattttattactaatatgagtacccctgacccatcaacagacctaaccagacatgtacaataataattaaatccagttgtctttgacattttgctaggttttaatcatattaaaatcattgctttatagatttttaatattttggttatgaaggtttgtttttcaaggtgaggacaaaaactcattttaacagctcattagtttgattttaaatatttagtaatgtagtacatagatatccatttgttttcttgccccagttctgttaatgttaggggtaggcctgtggaagaagtggcagcagcaacaaaagttaggaggcttatatcacatagataatttgtcatgtctgagaaagctaaattgaaagccagttttggggaagggtaataagcaacaatatttccactatggactctgcaaaagtcttcaggtatatttaaggcacaacattatataggttagcgtgatttcatatttacctaagtttttgttttttttcagacagaatctcactctgttgcccaggctggagtcaagtggcacaatcttggctcactgcaacctccacctcctgggttcaagtgattctcctgcctcagcctcctgagtagctgggggactacagatgtgtgccaagcccagctaattttttaaattttcgtagggatgcaggtttcaccatgttggccaggctgatctcaaactcctgacctcaggtgatccactcacctcggcctcccaaagtgctaggattacaggcatgagtcactgtgcccagcccctaaaagacttaaaatcttaaaattttcaggtacaaccatactctcttccccaataattttttttccttactctggatttctttgagccctttgtatttgattatgttatttaaccagaaacttaatacaattacaatgaattatttaataataagctccaggaactatctcacaggaaaataataataatcttaatatttactgtaattaaggactcaatttgtgccaggcctggtgtgaagagttttatgtcaatcatttctatttaccataccttgattagaagaatctattcccattatgctaataaaaaatggcaacaacaaggttcagggcagttaaataattttcccaaggctacagtgctgtcagaaattagcaaaccaggatgcaaatctaaattagcaaaccaggatgcaaaatctaaaccaggatgcaaatctcaagtccactaaatttccaatattccaaggagctatcaacatcagttgcaagtctctgaggccaccccaatcatgctgagggctggaggacttactccctaagaggagggatcatggtggatgggaggcaggactagattgcagctctgactcagatagacagagcagtgtgtggaggctcgtgtcatgaatttttgcaccagaatgactgtaggaataaatcaggaaacctgggagtacccagagacctctctgaaggaagtggattgctccttcaggacccaggaaacactccaaatactgtactggtatccccagatgagagacccacagatggtttatgtaacaggactctgtgcagacaacccctagtaccagcccagagcctggtagacttgctgggtggctagatccagaagagagataataatcactacagcttggctctcaggaagctacatccataggaaaagggtgagagtactacatcaagggaacaccctgtggggcaaaagaatctgaacaacagccttcagccctagacctttcctttgatagagccaacccaaatgagaaggaaccagaaaaccaactctggtaatataaaaaaacaatgttctttaacaccccccaaaaatcacactagctcaccagcaatggatccaagctgagaagaacccctgatttacctgaaaatgaattcagggggttagttattaagctaatcagggagacaccacagaaagatgaagcccaatttaaggaaataaaaaaaaatgatacaagaagtgaagggagaaataatgaaatagatagcaagaataaaaagcaatcaaaacttcaggaaacaatggacacacttagagcaatgcaaaatgctctggaaaatctcagcaacataattaaacaagtagaagaaagaaatttagagcttgaagacagggtctttgcattaatccaatccaacaaagacaaaaaagaataagaaaatatgaacaaagcctccaacaagtctggcattatgttaaccaaccaaatctaagaattctaaaagtttggaaaacatatttgggagaagaatctaggaaaatttccatggccttgctagagacctagacatccaaatacaagaagcacaaagaacacctaggaaattcatcacaaaaagatcatcacctaggcacattgtcatcaggttatctaaaattaagacaaaggaaagaatcttaagagctgtgagacaaaagcaccaggtagcctataaaggaaagcctatcagattaatagcagatttctcagcagaaactgtacaagctagaagggattctatctatcttcagcctcctcaaacaaaacaattatcagccaacaattgtgtatccagtgaagccaagcttcatatatgaaggaaagatacagtctttttcagataaacaaaagctgaaagaattcaccactaccaagtcaccactacaagaactgctaaaaagagctctaaatattgaaacaaatcctgggaacacatcaaacagaacctctttaaagcatatatctcacagaacctataaaacaaaaatacaatttaaaaaacaaaaaaccaaagtatatgggcaacaagtagtacaatgaatggaatggcacctcacatctcaatactaacattgaatgtaaatggccaaaatgctccacttaaaagataaagaattacagaatggataagaattcaccaaccaactgtctgttgccttcaggagactcacctaacacataaggactcacataaacttaagataaaggggtggaaaaagacgtttcatgcaaaatgacaccaaaagcaggcaggattcttacatcagataaaacaaactttaaagcaacagcagttaaaaagacaaagaggaacattatataatgataaaaggccttgtccaacaggaaactatcacaatcctaaacatatatgcgcctaacactggagctcccaaatttataaagcaattactaatagacttaagaaatgagatagacagcaacaccatagtagtgggagacttcagtactccactgacagcactagacaggtcatcaagacagaaagtcaacaaagaaacaatggatttaaactataccctggcacaaatggacttaacagatatatacagaacattccttccaacaactgcagaatatacattctatttgacagtgcatggaactttctccaagatagacaatatgataggccacaaaatgagcctcaataaatttaagaaaattgaaattatatcaggcactctcagaccacagtgaaacaaaaccggaaatcaactccaaaagaaaccttcaaaaccatgcaaatcatggaaattaaataacctgctcctgaatgatcactgggtcaaaagtgaaatcaagatggaaatttgaaaattctttgaactgaacgacaatagtgacacaatctatcaaaacatctgggatacagcaaaggtggtgctaacaggaaattcaaagccccaaacacatcagaaagtctgaaagagcacaaacagacaatctaaggtcacacctcaaggaactagagaaacaagaaaaaaaccaaacccaaaaccagcagaagtaaggaaataagcaagatcagagcataaataaatgaaattgaacccccaatacaaaagataaatgaaacaaaaaactgattctttgaaaaaataaataaaattgatagaccatgagcaagattaaccaagaaaagaagagagaaaatccaaaaaagctcaataagaaatgaaatgagagatattacaactgacatcacagaaatacaaaagattattcgaggctactatgaacgcctttacacacataaaccaggatacctagaagagatggataaattcctggaaagacagaaccctgctagcttaaatcaggaagaattagataacctgaacagaccaataacaagcagtgagattgaaatggtaacttaaaaattaccaacaacaaaaaagtccagaaccagacagattcacagaagattcctaccaaacattcaaagaattggtaccaattctactgacactattccacaagatagagaatgagggaaccctccctaaatcattctatgtagccagcatcaacctaataccaaaaccaggaaaggatataaccaaaaaagaaaactacagaccaatatccctgatgaacgtagatgctaaaattaacaaaatactagctaaccgaatccaacaacatatgaaaaagataatccaccctgatcaagttggtttcataccagggatgtagggatggtttaacatatgcaagtcaataaatgtgatacaccacataaagagaattaagaacaaaaatcacatgatcatcttaatagatgcagaaaaagcattcaacaaaatccaacatccttttatgattaaaactctcagcaaaatcagcatacaagggaaatacctcaatgtaataaaagccatctatgacaaacccacagccaacataatactgaatggggaaaagttgaaagtattccctctgagaactggaacaagacaaggatgcccactctcaccactcctcttcaacatagcactggaactcctagccagagcaatcagactaaataaataaataaataaataaataaataaataataaatggcatccaaatcagtaaagatgaagtcaaactgtcactgtttgctgatggtatgattgtttacctagaaaatcctaaagactcctccagaaaactcatagaactgataaaagaattcagcaaaattgccggatacaaaattaatgtacacaaatcagtagctctgctatgcaccaacagcaaccaagctgagaatcaaatcaagaactcaaacttttttttacaatagctgcaaaaaaaccaaaatacttaggaatatacctaaccaaagagttgaaagaactctacaaggaaaactacaaaacactgttgaaagaaatcatagatgacacaaacaaatggaaacacatcccatgctcatggatgggtagaatcaatattgtgaaaatgaccacactatcaaaagcaagctacaaatttaatgcaattcccatcaaaataccaccatcattcttcatagaactataaaaaaattctaaaattcatatggaaccaaaaaagagcccttatagccaaagcaagactaagcaaaaagagcaagtctagaggcatcacattacctgatttcaaactatactataaggccatagtcaccaaaacagcatgatactggcataaaaataggcacatagaccaatggaacagaatagaaaacccagaaataagcctaaatacttgcagccaactgatcttcaacaaagcaaacaaaaacataaagtggggaaagggcatccttttcaacaaatggtgcttggataattggctagccacatgtaggagaataaaagttcatcctcatctcccaccttatataaaaatcaactcaagatggattaaagacttaaacctaagacctgaaactatacaaattctagaagataacattgaaaaaatccttctagacattggcttaggcagagttttcatgaccaagaacttaaaagcaaatgcaataaaaacaaagataaatagttgggacttaattaaactaaagtgcttttacctggcaaaaggaacagtcagcagagtaaacagacaacccacagagtgggaggaaatcttcacaatctatacatctgacaaaggactaatatccagaatctacaatgaagtcaaacaaatcagcaagaaaaaaacaaacaattccatcaaaaagtgggctaagaacatgaatagacaattctcaaaagaagatatacaaatggcaaacaaacatatgaaaaaatgctcaacatcacgaatgatcagggaaatgcaaatcaaaaccacaatgcgaaatgcaataccatcttactcctgcaagaatggccataatcaaaatatcagaaaatagtagatgtttgcatggatgcggtgaagagggaacatttctacactgctggtgggaatgtaaattagtgcaatcactatggaagacagtgtggagattccttaaagaaataaaagtagaactgccatttgatccagcaatcccagtactcggtatctacccaggggaaaagaagttgttatacaaaaaggatacttgcacactcatgcttatagcagcacaatttgcaattgcaaaaaacatagaatcagtccaaatgcccatgaatcaatgagtggataaagagatcatggtgtatatacatgtatatatatataatggaatactactcaaccataaaaaggaatgaattaatgacattcatggctacctagatgagattagtgactattattctaagtgaagtaactcaggaatgggaaaccaaatattgtatattctcgctcgtaagtgggagctaagctatgaggatgcaaaagcataagaatgttttgggggaaccagcccccatatttcaacgtaggttctttctattttccctaagtgttggctggtctgagaaataaagaaaaagagtacaaagagagaaattttacagctgggcctccgggagtgccatcacatattagtaggaccatgatggtgacgccgagccgcaaaatcagcaagtttttattagggattttagaaagggagggggtgtacaaacagggagtaggtcacaaggattacatgcttcaacgggcaataaagatcacaaggcaaggcaaaattagaaatactgatggaggtctatgtcccactgtgcatgcattgtcttgataaacatcttaacaggaaacagggttcgaaagcagagaactggtctgactagaatttaccaggctggaattttccaatcccagtaagcctgagggtactgcaagagaccagggcgtatttcagcccttatctcaaccgcataagacagacactcccagagtggccatctatagacctccccccaagaatgcattccttccccaggtttattccttgctgagaaaagaattcagtgatatttctcctactcgctttctgcagaaagaaaaatatggctgtattctgcctgaccccacaggcagtcagacctttatcctccctcgttccctgaaaatcactgttattctgttctttttcagggtgcactgatttcatattgttcaaacacccatgttttacaatcagtttcatattgttcaaacacatatgttttacacacaatttgtaccgttaatgcaatcatcacagggtcctgaggcaacacacatcctcagcttatgaagatgatgggattaagagattaaagtaagacaggcataagaaattataaaagtattaattctgggaactaataaatgtccatgaaatcttcacaatttatgttcttctgctgcagcttcagctggtccctccgtttggggttcttgacttcccgcaataagaatgacacaatggacttggggaatcagggggaaagggtgggaagggggtgagggagcaaagactacaaatagggttcagtgtatactgcttgggcaatgggtgcaatgaaatctcacaaatcaccacaaaagaacttactcatgtaaccaaacaccaccagcttccccaataacctacggaaacaaaaaaaatttttttttaaatcaggtgctaaattttgattatttaacttttcttagatctttaagactgaccaaaattttatcagttttcaaggtcatttaaattcagacacaataataaataatttacttattttataatggttagtaatttatgagggggcttgaaatttcagttaccgtagaatgatggtaccctggtaagtgtacaactcccagaggtagaattgtgtgtgatcaaaattttattttatttacttgttcagtgattaagggattctggacagatttcatataaaattaactttcaagggtctggttttacagattggatgctcatgttctgtaactaatgagtttccctgtaaacaaatctacctgagaagttaaattataaccaaagatagtttgctcattagcaggaatctaaccatagatggagcacctcatttttggcagtttacacattagattgatcatttaattaagaaatcatgaaggacgtaacttgacctaagtaacacagctaagcaagtagaaaatttgaaattttaaccaaagtttgtctaatgtcccaaggtgatactcttgactaggcaaattgcttttcacagtaggggatctaatgaacactcccttgcccagtgtctagcatgtaatatcctttttttttttaaaactaagaacaatagcattttcttaatcctgtacattctatttaaagttgacccttgaacaacttgggcttgaactacatgggtccgcttatatgtggatttttttcaaccaaaccgatcaccacgtatacctagggatgactgtactgtggactcaaattgaggtcttttaatgaggaagagttaataggtactaaataaatgtacactgaatgaatgaatatattgactcacattagctattttgaggaggcaatttgatgaattgtctcagaaaagaacacacttgtatatatttactaaattatgatattatactaaattacaatattatactaaatataatatcattgagtcctggacccccagactttgccagtgaaatctgtatgagaacttttgcactcaaagagctgtggaaggcagtgttgtttatttcattattattattttttcctcaacccatttaaggtggagtttatctcattattaatgttgctactctgagagctgtatagcctccatttcctcttgtttggaatcctaagtaaaaaaaatacagaagtgtttaattcattcattccaatgaatattactgaggcactgacgtgtacaatgccttattttcctttttctttattttcctgttttttgtgagagaaaaaagcctacaatgccttatttttcaaatagaactcctaattcccctctaccccaagcttgcttttccttatgtccttcctgtctcatcaaattgcaacctcttttttagtagctttaagtaagaaaatctacagtcatccttgacttcactgtttcacacacaccccacaaacaatcaatcaccaaatcttattgcctctgtcttaaaaatatatcaagaatctgacccgttctcaccgcttccacctgtaccaacctggtctgaaccatgctcacctctcactgaatgaattactacagttgcctcctgactgttctccacctgatctatcttctaagaccttaactctttaaatccctcttccccttgcttcctctaacttagccacagtggcttctctgcttttcattaaacacaccaacacagttctgtctttgcacatgttgttttcttgctgggcaaactcttcccttggaagtgggcatggctacctctgtgtctatattcaggtctctgctaaatgaggcctttcctgaaaaccccatctaagatagtcctgccccaccccatatcattttctatttctttcccttgttttcttctttatcatatcaataatcaacatctgagtgcttatatatttattactttatttattgtctttcccatcttattagagtgtatgctccacaagggcagaaattagttttgttacctattgactctgcaatgcttagaagagagcctgtcatttaatatttacatatttgttgaatgaatgactatgcatagtatcaaactgaatgctagagatacggtaatggacaagtaatgggcaacatagacacggttcctgatctcatgacatttacagttcctacaggggaaatagatataaacaattaattacataacgtttaattattatggttataaacatgaaggcatcattgaccactctggctgaaggtcttggtgtgtaggaagacagactatcaaatatttaataacttaggatcaagagccagaatccctcaaatcatataatttttgaataaaaatacagagaatcagtgtcatgcaaatgagcatctatagttagaggtaggttaaataggattatgaagatttagagggagctgacaaagcaagacagggaacaagattaaaagtagcctactaaatagataatccaatgcagctatgttctatcagtcaaggttactgcaggtacccggaaaagaaatccagtgataggtatacagggtcaagctaatcatgctttggaggggaaaacacaacacaacacaactcaacacaacacaacacaacacaacacaatactcttatccttttaaacttggataaatcagaaaaatattgtagtatgtaagttttatatatgcacatgaaattccaacttaccttcaatttcagcaaaaagataatcttcccaaagccttccagttcagttcctttcctccccaaatttttgggctccttgtatgtaatctctcagccctttatcacactgttttgtaatcatctctctttctctctctcttttttttatttttttgtttgcctgtgtcctgcctctgtggagtctctgaggaaggaacttttctttgtgcctcgtagaaaagtgcccagcacaccgtagatactcaagaattatatgtgaaatgaatgtacaaacatttgagcaaattttatgcctttatgaaggattattattttgcattgttaaacactctacacacatgaaaacacagattctcattaaaaatgaaaatattgaatgaaaattgaaaataaattgaaattacttcacctggttatattttgctagaattatataataaattacttagaaacaaggtataaaaatggctttgtgtcttttttttttttgaaatagagtctcactctgtcacccaggctggcagtggtgcaatctcggcttactgcaactccgcctcctgggtttaagtcattctcctgcctcagcctcccaaatagctgggattatgggcatgcaccatcatgccttgctcatttttgtattttagtagagatggggtttcaccatagtgaccaggctggtctcgaactcctgacctcaagtgatccgcccacctctgcctcccaaagtgattacaagtgtgagccactgcacctggcacaagttaattacttagcagccacagatatctgcttatgaaaactcccattgcagcataatgggtacagttaagccctcagcaatatgctgcaaagctccagtttaggtgctccacactttagaaggaaggaaaaggaagagagagcacaattatgaagtgtcctctttatatactgacagtgtgtgaaatgctaaatccatttaagtctcagaaaaacctaatgaggtaggtgttatttccattttacaaataaggaaattgaaccttgaaaaagctaagtaattttctcaagaccacacaactaatccacatgatcccaggaatccgtaatatttagttcattcttaaatatggttttttttgggggggtgggggaagatagacgaaggaagtgtgagagctagtaaagaaagcaataatttgctttatttttgagataaatcaaatcagttatttggaatatggagagagagagtgtgtgtgtatgtgagattcattgtggaagagctgttttataatgacaagttctatgaagtttcatgatattgaccaagatttaagttggctgaaggaagaaaggtttactataatcattaccctgttttatttaattcattaaaatcatttaagaaagtttcaagtaacaagcaaaccatgaagaaaataaacattcatggctacctatgggagcgaattctggatcttgtcattttgatttctttttagatatgtttattataatcacatcatctgtgtatgaggtaggtaggactgcaagaagattgctctaattaaccctggtatattttctaaccagaaaatatatcttccacttttaaaaagaaaccatgtaaatttattgcaatgcaattattgtaaaacaaagtttaactttgatatttgtctttttaaaattgatagcctcttctcaagtatttacaatgctttaggaacagtaataaatgcttcatattactatgtctcatttaatcctcacaataaacctactagatattattatgctcatttcatgaaaactgcaactgagacccagcagttcattatcatgctccaaatcccagagctagtgaacagcagagctgagattcaaactcagtcctgggactacaaaacccatatatttaagctcagtgtgatatcgtagaaaactcccccaaagtggataacaacagttggcattagagaggctaaagtaaagtgaacactgaatgtaaaaacaaaaaggtcttccacattcaacaacaggcagtcattttctgaagatcttaactccccaagaagcaatattaagttgaaaatattaaggagacccacagaggtctggtctgagtactttcatgaatgctagatccaaattgggtaattaaaaaacatttcttagatgtgagggacaattatatatattatatatatatgtgtgtgtgtgtgtgtgtgtgtgtgtgtgtatatatatatatatattttttttatttgtttgtttgtttttttgagatggagtctcaatgccttgcccaggctggagtactgcagtagcactatcttggctcactgcaacctctgcctcctgggttcaagcaattctcctgcctcagcctcctgagtagctgggattacaggcgtgcaccaccatgcctgcctaatttttgtatttttagtaaagacggggtttcaccatgttggccaggctggtctcaaaattctgaccttgtgtgatccacctgcctccacctcccaaagtgccgtgattacaggtgtgagccaccacaccgggcctcaagggacaagaatattataaaaagtaatagtgggcattatcaaattttgcatttgtatgcaggtaaagtgctaaggggtttacaggtgcattcaatgtaaagatgaggaaattgaataacagttgatgaaaaacgtttttctgtagaagaattctttgctatcactgttagaggcaatttgctgaaataggcgacttgactaattttccatgtttttaccttccagatgtcaaaagtagtgtggtgctctgaagtcagataggcctagacatagaggtatcagataaaacacagactacccagttaaatttgaatttcagatttaaaaaacccaatttttaaaataagtttgtctcatgcaatatttgatatatacttatactgtacttttagttgccaaatctagtaaccctctctgggtgtgaatcacagctaactctgatatggtagcagccattgtgactctggacaaatgacctcatctcccagccttcattttcttcttcaaaagatgaagtagataccttttctacttcacagaattgttttaggatttgaagaaagttaagttcattctcttgataatttctttgtgtgtctgttgattacttcatgggtttccaaatatttaccattaatttcatagagatagacttaagacactgccatggtattcaaggcaaggggcttattctctttttctttttctttttcttttactttttttttgttgttgttgtttttgagacaaagtctcgctctgtcgcccaggctggagtgcagtggtgtgatctcggctcactgcaacctctgcctcctgggttcaagtgattctccgacctcagcctcctgagtagctgggattacaggcactgtaccaccacgcccagctagtttttgtatttttagtagagacagggtttcctcatgttggtcaggctggtctcaaactcctgactttgtgatctacccgcctcagcctcccaaagtgctgggattacaggcgtgagccacgacgccccgccaaggggcttattttcttaagcagattaggtagtctagagagaagcatgatataaaaggatggacacaataacattttagcataaagctaaattgtggcacaagagaccacatgtgttaatacacttttttagatccagtgatctaatttctaagtaaacactaatcacagaggtacataatgaagagtaagaatattcattttgaggctgggctcagtggctcacgcctgtaatcctagcactttgggaggcccaggtgggcggatcatttgaggccaggagtttgagaccagcctggccaacatggcgaaaccccatctctactaaaaatacaaaaatttctgggcttggtagcacacatctgtaatcccagctacttgggaggctgaggcaggagaattgcttgaacctgggagatggaggctgcagtgagccgcgatggcaccactgcactccagcctgggcgaaagagcgagactccatcttaaaaaaaagaatgttcattttgaaatgttttagaccagaggaaaaaatatccaataataggaaaatgaatcaatgaattatggtataatgaaatacaatagaagattatgtaatcttaaaaagaacgcattagatagatatttagcgatataaatattatcataatataatattacataaaatcagaataattttaatttaagaatataatggtaggtataaggaaaatgttaatattggttatgccaaaatagtaagactatgtttccattttcttttctttctttctgtaatatctttttatgaagcatgttttatattagaaatatgaatttaatttttacaattctggaactcagaagtcaatcttcctaaggtacacagtactcctctaattttctctgctaggcatcttgaggtgcctcctctcttgagagcctcctacgctactggagctgaaaccattcaactgaggcaataagtgttactcggttgttcattgttcagcaagaaaaatattgcaaatactggagaatgcatgatgtatttttggagctaatagatggaaataaaggcagttttgctaaatggaaacagtatttatttcatgtcattctgattttcagccataagcaaaagttttgtgagtatgtagcctgtcatatattgcataaaagagttcttagggaaatttacttttaggttattagagtaacactgagacactaactgaaatattgtgatgatttttatacatctaaagcatgaatttttctttcaggcaagctcagctttatcctattttatttcttgactaggtatctgtcaaatatgcaattcctccataaaatagacaattaaaagatcaatgactaatgaagtgcatcctactaatattttaaataacttttaatatcatggcactgtatttgaaaatgtaattatactttgtaaaaaacctagacgctattttcaagatgataaccctgggtgaagttggaggtataattttaataaaattcatcaggcaatagtacatgtggtttactttcaaatttgttgagagatgtagctttgagaacccctcttttatttctaactctcattcatattaataggctcagactcaagcaaaggataatgatgttgctgttattttcatccatgtgtaaatccgcaaatccaatgccgagtcatgaaaatcctactttgacaatgcgacgaactgtttatttccctgggaataattttgaaaactagccatttgtgtatctttgaggaaagggaaaaaatcagcatgtttattatttttaaaaaattagggcctggattttgacaatgtcaagatttaccgtatatccctgtttgtttggatacaccagtgacgtccacttctagaagacaaagttatattacttaaacaaccaaaggtaagaacccagtgataacgataattagagttatatttttcacaaatgcttatacttctgttttgactctttaaagtttcagcttttgctttgcttttcatgtgatgtgctctctagatacagctatgattgtatttttattaacttctctgtctttttgacagataagtgaatactctacctggcaatatgattctgctaatctgaatatcacaaaatagtaaatgctacctgcttttcacaaattttagttttatttttagaagtcaaaaacaatacctttgacaggtatgtttttccccaaaggaagtgtcatatactgatttttctttctaaaatttggagataggacactatcaaactcatgtaaatcttaaagaattcactcctaaaaataagagctccaactcactggaaacttaagtatcagatactttatcaacattattataacaacctgcatatcccctttcagagatgaataagtggtctgaagagattaagtgcctcgcccgaggatacaatactactctatgaaggagctagaatttaaatcaccttgccttcttttaaataactgtgataagcgtgtatattttaatcagaaaaaacagttattggctgggcctggtagctcacacctgtaatcccagcactctgggaggctggagtaggtagatccttgagcccaacagttggagaccagcctgggcaatatggcaaaaccttgtctctaaaaaaatgcaaaaattagcccaggtgtggtggcatgtgtttgtagtcccagctactcaggaggctgaggtgggaggatcacttgagcccaggaggttgaggttgcagtgagccgagatcacaccactgcactccagcctgagtgaaagagagagacgctgtatcaaaaaaaaaaaaaaaaaaaagaaagaaagaaaaataaaaaactgttatcaattactgtcatgtttttctttaattaaaaaatgcgtactgcattcatcatgtaataagattacatgtttcaaaatatcagtgatttcattctatattggaaagttgaacagtcttaaaacaagattttaaaatgtttctatcaataaagatacctcttaaaacgggctttttacattttgactttttgtttatatatcctttaatcagtttgttcaattacactcattctttcacttggctaacacccataaacaccaatcactcatttcattgtcattttcccactcagcaaataaaagagggtagggagtgaagtattagggtgtcaatgaaattaaaaggcctattatttacctgttgtaccttatgtcccctagagaatacgccctcttttctccattctggaatcatttacaaacattgttaacaaaaataatctcagtaaagcaaaaaactatacaggccacagtcaaagttagaaattaatgaggaaagtgtaaataacagaccctagtccttagagaaaaaaattttttcaaaaaggaaaagaaacctctttaattgaagatatcaacaaaacagccattgcagatcactctctttttcttggaggtaattttttaagttagaaagttaatgtgttgaaaactaaaaagtttgggtaaaataaattattttgtagaaaaacaaatgtcaaatttaaattaagaatcaagagttaagttgactacaaatcatgagcaaaattttaaaaagtgtctaagaactacctccaaaaaagctactgcatcctaaatattttttacttattaatttattcaacaaatatttatttagttcctactctaacgctaggcattttcctaggcagaaactttcctttgttttctactatatccccatcaataggtcaaaggagtaaatccataggatgctacagccatttacctcaggtgatagtatgtggtatctgggctactatattttataagttttgggtatggcattaagcaaaatttacacagctggtcctttcttacatatccttaaagtagaaatataatgtcctttcccatgagcagacaacccttgtgccaagatttttttttttttttttttttgagatggagtgttgctctgttgcccaggctgaagtgcactggtgcgatcttggctcactgcaacctccgcctcttgggctcaagcgatcctcccgcctcagcttcctgagtatctgggattacaggcatgagccacctcactcagcgaatttttgtattttttgtggagacggggttttgccatgttgcccaggctggtctcaaactcctgagctcaagctatcctcccatgtctgcctcccaaagtgctgggattacaggtgtgagccaccatgcccagcctgtgccaagattttgaacaatgctaatatagctacttgatagtctgggacaagtgcttacagttataggtaatggttctcaaatgttacctttccaaagtacaaatcaacttgagctttaacaatttttatagctttagttgataaaaaggtaattgattaaatgcaatgatatagtcttgataaaacagaaaattttttataaagaaatttctttgacaaaataagaaaaatttatctgaaattaatgggcaaaataggagaaattctagagactgaaacaagaagtcaaggagtgcctgatagaatatctattatttaacattgttctataaattctacccaacacaataaaacaagaaaaaagaataagatatatactttgaagagagaaaattatcattacctgtggttaatatgattgtttatccagaaaacccaaatggatcaatttaaaactatattaaaactgacaagatacttaggaagatgataggctacaaaataaatatataagtagttttcctctagaccagtaataattattaatagttagacggtataatacaacagattttatttagaaataacaaatttaaatacatagagtacatttaataagaaatgtgcctagcttatttaataaaaattacaaagacatacaaggtaaattttaagaagtaaattagtaaatgagaagacatcccttgtcatgtgataaaaatttaatatgttaacatgttgattctcccaaaattaatccaaaaattaaaaaaatctctttaaagtacgttgtgagagtttatttttaggggacttgataaaattattctaaaggcaactggcaataataaatgtatacactgtactgtcataggaataaataatcattaaataggataaaaatcacttagggctgggcgcggtggctcacgcctgtaatcacagcactttgggaggctgaggtgggtggatcacctgaggtcaggagttcgagaccagcctgaccaacatggagaaaccccatctctactaaaaatacaaaattagccaggcgtagtgacacatgcctgtaatcccagctacttgggaggctgaggcaggagaattgcttgaaccagggaggcagaggttgcagtgagccgagatcgtgccattgcactccagcctgggcaacaagaatgaaactctgtctcaagaaaaaaaaaaaatcacttaaatgcagtcattaaagtgatgagtgtagatgtatacttttttattagacatgcaagtagtgttttgtgcaataaaatgcaataattaaaaaaattttgttgctttttatgaacctgtataaggcactgtataaggttctggagacattagagttcattaaatgaactctaataaaaatcagagctcactgtgacctgtcctcaagtctgggggagagacactgacataaatggatcatgataaaataatgggtcagtgcactgatgataagctctctatattatgtgagtgttgaggagaaaccatgagcactcagacatcctaattccagctgtattagtctgctatggctgccatatcagaataccgcaggctggtggtcaatagaaatttatttctcatgcttctggaggctgaagtccaagatcaaggtgccatcagttttggtttcttctgaggcctccctccttagcttgcagatggtcatcttttcgctctgtcctcccatagtcattcctttgtgcatatcatccttcctgtctctttgtatgtccacgtttcctcttcttataaggacaccagtcagattgggttgggtccagcctaatggcctcactttgacttaatcatctctttaaaggccttgtctccaaaaaccgtcacattctggggttagagcttcaatatatggattttgggggcacacaattcagcctgtaacaccagccattagaaatatttactcttttcttcattctttaccttttacacatgctgtttcctctgccaagaaagctcatttcctctactgtcgcaaactcctattcatctttcaagatccaattacatatcccctgctttgggaagctctgtgattctcccacctctaacagagttggcctatgcacacgtgatattgtcatatgagatttttatcacttacaggtttctcttactaatttctctagggctggaagcctgtcttaatcaacattctattttcttttctttctcacttccatacctcagcaacctacacgatgctgctgtcaaagggagcgctcaacaaatgttgagaagcaaaaatattaatgaaatacagattggattacatgctatctgtaaattgtttgcaagtgaaaatatcaaaactttaaatgtacccttttcagagataaggtataaacttgcgagagaagtaggaaaaaaaggttatacaaaatgctgaatgctcacagtgactgacaaaatctccgtggaattacagtccagggaacctcccttgctgggttctaagtatctgcctttttatatggttacttatctttattgttactatcaagaaatttgcacttgtcttctctcaggggatataaagagaaacgaagtaagtttcttgaccttaagaagcttacagaatactgggaaagtaagacattcacctgtacccataataaacacatatacatatatatatatatgtgtatatatatatatacatatatatgtatatatatatgtatgtgtatatatatatatacatatatatgtatatatatatgtatgtgtatatatatatacatatatatgtatatatatatgtatgtgtatatatatatatacatatatatgtatatatatatgtatgtgtatatatatatatatatatatacatatgaaagtaaatgcttagggagaaaggagtgatttaagatataggaaatgcatgcaatggatggtgccatcacaattgatttcatggacttttttttaagactttccaaaacacctgtcatcagcatgaatttctagagaaatttcattgtgaaacagatattggggtgaggaaccctaagataaaagtcaggaactacttcagttcatcaatatttaataatttttataattaaatattcagaattgtgaatactttctgagtcaatgaaggtagagaagtgggaaggataacacattaaggtctccaaccattgtgcaaagtctttgttcttactcttgattgtatagcatattggttttaaagtaaactttctttgatgatgaaggatcttgtgatgccccaggatcataattaatatatatgactttatagttctaataactttttaatgcttatttaacaaatatttattgacaaatattcccagttctagatactgggattataacagggcacaaaaacagaattcttgctcttaattatgcttacatgctctggtgtttaaaacactcttatatcactttgtgttcttataaaatattttgtttaaagaaaggagtattggaaaatatattgggttatttgtttgttttagttaattgacttttgattaattgagctttttattgtattgtagatactactttaacattttctgtgaattgtgaagatgatgataatgattatgataacaatgatctctttggtaaaattgtttcttcctgagcaagtactggattttctttatacgttgataacaatttgacttaccaagtgtggcaggtccctgtgtgtgctggggcaacatagcaacagtgttttgtcagctctgttttagtttttcatgagaattacagctggcttatgagcctataaggataattattattttctttaatagttgctttgacaattttaaagtctcaaagtgatatttcaggggaagagattaaagaaagattaatcattttaagtttctttgtctctttaacaagttgatggttctctctttctgaacttagagatcatataagaatattatcaactagtatttgtataacttttcacaaacagcattcaatattgccttatacatatttttcattacctccccatcgagacttattacaataggcagagcaggtattattatctccactttacagaagagaggaccctgtaactcagaaagatttttttgtcagggtttcacaggtaatttgctaaagagctagggctagaaactaagcccttgtggaagaagcgattgctattttcaggcactggctgtttctcttttgcagagcaggcacaacccattctagaagttacacaacttgctgagcgttgttaaatgttaaaaaaaaaaaaaaacttagttctgcaattaaatactgagatggaacgagtgagatgaaaaacagtattatggaaaatgtttattttaaatttatttttaccatgctatataacagatctccagaccttagtcctcctaactgaaacattgtatcctttgaccaacatgcaccctgcccaataatggaaaacattattttaaagcaaaggtgctgacacaaatgtccagaccttattcctcctaactgaaacattgtatcctttgaccaacatgcaccctgcccaataatggaaaacattattttaaggcaaaggtgctgacacaaatgatttttgatattaaacagactcttgttttaaaaatatgacttttttcatttagaaatatattaggagaaaatatagataaaaacaaagaagaaaacaaaaataccaatgatcccaccactaaaaatttaatgtttaacattaaagtgcttattagttctatgtacacacacacagttttaaaataaaatgtatgatactataaatattacttcacaatttgctttttcttttttaaattttatttttaaagttttatctagctatctatcatctatctatctatctatctatctatctatctatctatctatctatctatctatctagagaccaggttatgagactgactaatttttgtattttttgtattgatggggtttcgccatgttgcccaggctgatctcgaactcttgggctcaaaagatccgcccgcctcaaccacccaaagtgctgggattacaggtgtgagccaccacacccggccacaatttgctttttctacttagcaatatatcatgaacatttcttcaagttgttcagaagaatatgagaaaaaatattgaaatatatcattttattataaaattaatgtgttcattctgtaaaactgatataaaacagaagtatataatactactgtccagaggtagctatgtaatttagtgcctactcttctgcactttttttttttacacatcccgaagttaactggttggtggattagaataccttcttcacaaaaagtttgaactaatgaagaagagagcatcatttattttacaaaggtatatattttactttaaatttcaatatagcaaataatatgtaaataacaaatgcatcatttgtaataatctttaggggcattcacacagaatactactctggaaaccactagcatacaggaagccttctacgtgttgaataatctttggctgtcttcaagtaatacctcagtggtgtgtgagtgctctgagctgcatactatataactatccttgtttaaagatggtgctttagaccggacgcggtggttcacgcctgtaatcccagcactttgggaggctgaggcgggcggatcacctgaggtcaggagttcaaaccagcctggccaaaatggtgaaccatccccacaccccatctctacaaaaatataaaaattagctggccatgatggtgggtgcctttaatcccaggtacttgggaggctgaggtgggagaattgcttgaaccggggaggtggaggttgcagtgagctgagatagtgctactgcactccagcctgggcggcagagcaagactccctctcaaaaaaaaaaaaaaaaaaagatggtgctttaaagtctgtgtactatatcagcctttcagactggatttctcaattcagtttgtaattttatccaaaagtagtttactgcttgggtgatgtaatacaacctatatgtgagccataaattggtaaacaaatatttgttgtgaaatggcttacaggatttacaggttagtaaagtacacaaatgactttagtagatggcaggattttatgcttcagaaaggtaaaattaaattgtagttaatagtcagaggaccatagtcagaggtacatagttacttgtgggacaataataatgcttgacacctagtaggcatttcttaaatatgtgttaaatgttgaatgaattaaagaacccaactcaaaaaagcagaccaagaatataaacatgtaattcacagagaataaatccaaatgattaataaacacatgagagtttgtctaacttcactagtaaatgtgaatcaaaaactgtagggtaaaaaatgctcacccatcggattgaggaaaacttttaaatctgacaatattaaatgttggtcagggtatgggaaaaaatgatctacttccataggtctagcagaatgcaaaatggaacagcaactttgggcagcaatctggctggctctagtgaactgaaactagaactagcagttccacttctggaaacatacatgagaaccactcttgcacatgtgactaaggagacttagtctcctaagactagggacttttattgcagcattgttagtaagagcaaagaaatggaaacaaccaatccttcattagtaggaaagaaataaaaatagaaaaggggaacaaaatattatgtatttataggctggaatattaataaacaatattgtaaaatgaaacagctgtatgtatattagcatagataatttccaaaatggtttcaagtgaaaaaagcacaagttgcagaattatgcatagaggaagatactgctttgcaaacttaaaatacatgtgcaaaactatacattggttatggaagcttacataggtacgtaaaaggatgaagaattaccctgaaggatataccccaaactcacagtagtgactgctcctagggaaatagggaagggactgggagattacagtggtttttgttgttgttgttgttgtttgtttgtttgtttgtttgtttttcagagagtcttgctctgttgcccaggctggagtgcaatggcatgatctcagctcactgcaacctccacctcccaggttcaagtgattctcctgtctcagcctccccagtagctgggactacaggcgcatgccaccatgcccggctaatttttgtacttttagtagagacgggatttcaccatgttggccaggctgatctgaaactccttacctcaaatgatccgcccaccttggcctcccaaagtttgctgggattgcaagcgtgagccaccgtgcctggccacggttttttaaaagaactttaaatataaagttttatttttttcacatgccataaaaggactgagagccaatttgacagaagtcaacagttgttaattcctggtggcagaaatatgaatgatataattcatattttatagttcatataaaatgaatatatgaatatttcataattcatatataatgatatgctgttttgcattttgaaatggggggtcagtatatatattcactaagtaattaatttacatgatacaacattcaaaatgtataaaatatatacagtgaaagatattttcccttccactccaattgcccagtcccatacttccccttcctcagaggcaatcactgttaccactttcttgttgcatttttccagagagattctcaccactcctttacgcacagcacacacacacacacacacacacacacacaaatatagatatttacatatatatgtatatttcctacaaatggtagcatactgtattttttttttttagatggagtctcgctcttcgcccaggctggagtgcagtggcgcgatctcggctcactgcagtcttcacctcccagattcaagcgatttccagctaatttttgtatttttagtagagatgggatttcaccatgttggccaagctggacttgaactcctgatctcaagtgatctgcccacctcagcctcccaaagtgctggtattacaggtgtgagccaccacacttggcctcatactgtatttttgaaggatttccaataccttttttttccttccaaaaagaggtcccatagatgaaatactatatagtatataaaatataaaaataacaaggtaccagaggtaggaagaaaggcagagggagggaggaagggagattgagactgtggcagaagaaagggcaataattcagtagacaacggtgaaatcttgttttctttcttttttttttttaatggagttttgctcttgttgcccaggctggaatgcaatggcacaatctctgcccaccacaacctccacttccctggttcaagtggttctcctgcctcagcctcccgagtagctgggattacaggcatgcgccaccatgcccaactaattttttatttttttagtagagatggggtttcaccatgttggtcaggctggcctcgaaatcccgacctcaggtgatccacctgcctcagtctcccaaagtgctgggattacaggtgtgagcagtaatcctagcaggagataattttgtcagttgtggagttgggggaggtggtggtgagatcagggtattgagtaccctagctatgctgttcccgtgggcttgccttgtgctggctgtgttcttcaacgttaagtcactgttcctcatagttattctgcataactccccctctatccagggccacactaaattcctcttcttgtccttggatcccagtggtattaacagtttggctacttctaacccgaggttgctgcaaccatcctttgtggtttccctatactaacatctttgtaaatagtctctttggaaataacctcttccagaattattttgagtgtgcctttctttttggttgggaccctgactgagaacctccttcaaaagtattacttatctattacatatcctttttgtcttattcactgtagtattaatttcttgaaggcatatatcatatattttgttaatatctgtattcataacattgagtacacttcctgtggctagtaggtattgataaatatttttgtctcaagaagcaagaatggaaggaatgatggaagatggtaggattatagtcgccaagcagtttttttaaaatcttagttttggcggggcgtggtggcttattcctgtaatctcaacactttgggaggccaaagcggggagatcacccgaggtcaggagttcaagaccagcctggccaacacggtgaaaccctgtctctactaaaaatacaaaacttagctgggcctggtggtgcacacctgtaatcccagctactagggaggctgaggcaggagaattgcttgaacccgggaggtggaggttgcagtgagccgagattgtgccactgaactccagcctgggcgacagagcaagactccatctaaaaaaaacaaaaaaacgaaaaaacaaaaaacaaacaaaaaactgagtttggtttcctaaaattttctcatttctcccagtctccgaatcagtttccgaaacacagttctctgtgtttctgctctatggaaatcactttactaggagtggggttctggctagtgattcgggcatggctcatgcctccagaaatttgtctcggtgaagggaccagtgtggctaaagtttcttaaagcaggaggtgtctcctgggggtgggagatggaagtgggatctgacactaatggagaaggtgtggaaaagcttctgtggctataggaagaggattaatgagcagtattaagagccaagttgaaactccatagcaggaatttatagtgcatctaatccactttaccttacacaaaactactatattagtcttcctaaagtaaacatgggatgatgtcattctcttgccttaaaatcttcaatgactcttcacttcatgtagaaagaagaatgaacctctattttgatgcagtactcttactttcacagacctgtttcttactttttctctctgtgtagaaattaaaccagtttaatttctattctccagatgggcttccacaggaattccataggaatatctcctgcctctatatctttactcatgaatttccatttgcctagaataggaagcctttctcctgccccatttccacctgataaatcctacttacccaggccccttattttctgtttgctcttgaatttattgtttcaggaggtgtctcccatgatgatttctcttccaacagagagactctccctttctagtcccagatcctgtgggccattcctaactttaagcagcctcttgcatttatgtctcctgctcttggggcagtaggagtgtcctattattgttaatctctgggtttcctcactgtcctctgtttgacattactaacacttttgtagctaatgctctgtattaaattccctctattgaaccacctgatgttagccgtttttctgattggctgatttctgattcactgtgttagattcactgtgttagcacacctgattgaaagactgtgcttcaatatctttgtacaactccatcttcttcatggacctcttttcattatacagctgaaaaagattaaaaaaaactcccctagaatattaaaaaatatctgttatttcaacaatcatatttttcttatgacattgtacaaatatctactaatttctaaacaaaatatctcagaaattggggaaaggatgatggacaattacaaataattatctaagatccccttgtagatgccaaatacttgttcattttagtactcttggcttgttcccctatagtcctctactacactactagttggggggcatactcatctttggatttgttccttatccaactggcagagaactctgtgcattgtacatgtgtgctatttattaagttgggcacagacttattgcttggcatgtgtatttttttttttgagacgaagtcttgctctgtcacccaggctggagtgcagtggcgtgatctaggctcactgcaacctccacctccccggttcaagtgattttcctgcctcagcctcccaagtagctgggaccacaggcacccaccaccacacccagctaattttttgtatttttagtaaagacggggtttcactgtgttagctgggatggtctcaatctcctgaccttgtgatccgcccacctcggcctcccaaagtgctgggattacaggtgtgagccactgcacccagcggtattttaaattttcattttatattctagttgttctttgctattacatataagtaaaattcatttttacattgactttacagtcctgtgaccttgctaaattcacttatttgttctaatcatttttttctagatgctgaagaatttattttatggttgactacatacactattatgtcatctacaaacaaatagttttacttcttttccaattcagatgctttgtattctttttcctgccttattgcaagcgctagaacctccagtgcaatgttgactacttctagaatatccttgtcttattcttgaccttaggaggaaaatgttcagtctttcattattaagtataatgtcaactgtagtttctttttttttgttttgtttttttgttttttgagacagaatctggttctgtcgcccaggcaggagtgcagtggcaagatcttggctcattgcaaactctgtctcctgggttcaagtgattctcctgcctcagctttccaagtagctgggattacaggtgctcgccaccatgcctggctaatttttgtatttttagtagacacagggcttcgccatgttggccaggttggtctccaactcctgacctcaagtgatccacccgcctcagcctcccaaagtgctgggattacaggtgtgagccactacacctggccaatgttaactgtagattatttgatacttgctgtttatcgggttgaggaagttcccttctattcctggtttgctaagagttctagttataaatgggtgttgaattttggaaaatgcattttctacatttctgcatttctacatttgttgaaatcaacatttggtttctctccttattttttgtcattattattgtgaatcttattgattacttttcaaatttatacctacatttctcattttaagttacaaatatacttataatagttgcttgtaagttttgtttgcaagaactgatcctaaaggtttcagatttgtagatctgaaatatcaagcagttaacagcaaccttgaagcctttcctaaccattattttctgtctcccacttgtggcattcagaaaaggccaaaggcactaaaggcaaataatgcagagtaatgtttcacaaggtgtgattcaggaatcctttgcaacagaattacttatagcgcttggtaaaactgtagatttatgtgccttacccataccttattcagattctgcaaatagggccctgtaatatgcattttaaacaagcttcacaagtatatgcatgctaaatttaaagaaccactaatacatagttaattatgtgtgggtttgtgtgtgtaagtgggtatacagcatatcttctctgcccttttatataaagaaggcattattattctgttcacaaatgtgtaaactgaggttccatgaggttaaaaaaatctcacttgagttcattcagctaataagtggcagagccaggttttgaacccaagctagagcatgacttcaatcagtagaatatactgttccatgtattcacagttcatgttccatatttgttttgcctgaattacccataagattttctcaaccattgctttggtatatttttgtgtactttgttatatcctcgcttaagtgaggaatttttgtgagtcagctaaatatgagagctgaatcttgctttccaaagcaattgtttctctttgattcacaaatttcaattcaaagactcatgcatgggaaaaccagtaaagcaacgaagtccctaaaagaatatttttttttctgttcttttcagatgttttgcctatgatcctatgatacctcaagagttgaaaagtgtatgaaaagaataagcaattactattaaaatttttttctcaaactacagagtaattttacctttaaaaacagatggaaaaattcaaaataaaatactagcagctgggacccagtagcatataaaaagaataacttatcagggccaggcatggtggctcacacctgtaatcccagtagtttggaaggctgaggtgggtggatcacctgaggtcaggagtttgagaccagcctggccaacatggtgaaacctcatctctactaaaaatacaaaaattagccgggcctggtggtgggcacctgtaatcccagctactcgggaggctgaggcaggagaatcacttgaaccaagatggtggaggttgcagtgagctgagaacacaccaccgtactccagtctgggtgacagagtgagactctgtctcaaaaaaaaaaaaaaagaataacttatcataaccaagaagtgtttatcatagaagtgttaaaattatttatatagttcaccatattaatattcacaggaaaatatgattatttctatgagagcaaaggagactttaataaaactcaacattaattcccatttctaatattttaaaaattggcaacataggaaacttcctaacatgaataaaacatctacctcaaactaatggtcaacaccatgcttaagaatgaaaatcaagaggcattttcataaagccaaggaccatactggatatccgttaagatagttataacagaatatcaacattattatgtattatcttctggaagttttagtcaaggcaattagacattaaaactaaatgcttcttaaaaagaggaaataattttgtgtaagtaatataattgtattgaaaaaacagaaattaattaatacaaaaactattagaaaaaaatgttgtaaaggccagtaatgtggtcagtttcaaaataaataagaataaataatttcctgacgtagcaaaagtaaagagttaatatacatcaagggaaaaccaagctaatgacaaaaggaacacaaatataaaacatgtaggaattaataaaaatttagaatctatacattgaaacatttttgaaaatgtaaaggaaaataatttcctaatttattctatgattttaatgcaaattccatcaaaatctctatagttggaaaggcagttttagaataacatttcagatcagtagggaaaagatggtctattgattattgattaaatgctaattagaatatcgactatccactcagaaaatataaagctaaatctctactgtataccttgcaccaaaattaatttgaggtagattaaaaagaaaaccataaaacaagtggggaaaatatttataaataattataaatttcaaatgtctttttctgtttataatttctatttttaaaagtgattatgtatgtttaaaagtgattaataaaaaaaaattccaagtagaacacttaggccaacaagaaattataggacaagagaaggactcatttttctttagggttaagcaaagcccaggctcggtttgttctgacaatcagaattatattttctgttcttatttaatattttactcatataattttttctgtgtattatgatgaatgaaataatcacatattctcccttccctagtcataaggcatgaggtctccaaagagagtgttcattgatgacaacagggagttggcatgtggggaaatataccagaatagtcatgtcttcattctgatgctgaaaaggagtcagcgaagaatttctcatcttagaaagcagttgtttctcagtaaaaattactttaattatattttaaaatatatgtacacgttcattcacaaacattacaaaaattctttatttactatttattggctactgcctgctagttattttcattaattgtttgggtactggagtaagatagaaagcattatttattgttgtcttcacttgaatatttaacattttataaaatttaagtcattattgattttactttcaataatgaggtatattttatacatttttctatatcaaatgatttttctttcattttaatttacttaagagtcctatgaattggcaagaaaagttctaagaacagatggggacagtcctgccttggactctttcagggcagagtataaatgggtggacatgattgacagttcattgtaactcaaaagtatatgctaccgtgaggattatgtttattaaactgatagaataaattgtcatttattgggctcttactatgtgccaggcataatgctaagcacttaactcattttatcctcaccacagtttgtgaagcaaatgttattcaggaaaataagatgaatttcctaaagaacaaagttgtccaacaatggaacaggctactcataaggcaggaagttcccacaaccagaagtgttccaaaagagaccaggtgatcatttatcaggaatatgatagcggcattcctgtttgaatggaaggttggctcaagtgacatttgaaattataactgcttctaggtttctatgattctgctttgcaaaggccatcacaccttgtaatataaaccaaataataccagcaaactcactcaatttaaaatccagttattggcttggcgtgatggcccacgcctgtaattccaacactttgggaggctaaggtgggaggatcatttgacgtctggagttcaagaccagcctgagcaataaagtgagatcccatttctacaaaaaaattagccaaatgtggtggtacgtgcctgtattcccacctacccagaaggttgaggcgggaggactgcttgagcccaggagtttgaggctgtagtgagccatgatcacaccaccgcattccagcctgggtgacagggtaagaccctgtgtcaaaaaaaaaaaaattcagctattatgttttaaacatatcaattctttctgtcagtcaagacactaaattagtgttgtttgcttaaacagataatatacgtagtctttggtttattttttctctttgaggttcagtggtcctcaaatttaaaagtggattattgaaatggtatactagaattatgacaactttaatattaaaatttaaatatgttttggatttctcatctgtagtgcaaaaatttgggggaaattagaaatcagtgtaacgagaagttaaaagcatagagttttggcatcatatgtactctggttcacataactactatattgagtatatattctggctatatgttcttggcaaattaagtacattttctgagttccagattccttatctgtaagaacctgaggaaatacttacttcacagtttgtagtgagaattacctgaatagagtgctttatgtctggcatatagtaagaacccagtaaattgtcaagtaaattattacattaaagaatggcatcactaaaaacgtatacttttttttttcattttcaacaatatatttattcaacctggtacttccaacatattattccaacatgtaatcaattttttttttttttttgagacagagtctcgctctgttgccaggctggagtgcaagtggcatgatcttggctcactgcaacctccgactccctggttcaagcgattctcctgtctcagcctcccgagtagctgggattacaggcacacaccaccacacccagctaatttttgtatttttagtagagacagggtttcactatgttggccaggatggtctcaatctcctgacctcgtgatccacccgccttggcctcccaaagttctgggattacaggcacgagccaccgcgcccggccataattaatattttaaaaatctgtaatcagatatcttgcattctttttttactcagacacttccagcacatttcaattcacatgttaaatttccaggtaaatgctcaatctatatatttagatttataaaattcacaattgaaattgaaggttcgcatagtcaagttgttccaaacacacttaaaagtctcctaataactttattatcacttcaaatagttaaaattaaataaagtttaaaatccagtcttcagtctcactagccacatttccagtgctcagtagctacaacagctggtggccaccacattggacagtatttttatttttatttttgaaacacaatcttgctctgtcacccaggctggagtgcactgtaaacttcactccgccccaggctcaagcgatcctgtcacctcagcctcctgaatagctgagaccacaggcatgcactaccatgcctgactaatttttgtatttttagtagagatggggatctcactatgttgcccaggctggtctggaactcttgacctcaagtgatctgccctccttggcctcccaaagtgctgagattactggcatgagccatggcacttggcctggacagcatatttagtgtctgatcattggttctcagctctgactacttggcagaatccagaatccacagaagagggttttaaaagcacagttccacagcccccaaccccaaccttactcaatgggaggctggaagggactctggttccaagaggcagcctgtgtttcttgatggaaggatgtgacagggctgtatctttaatgtttcaccttgaatgctgaagacagcttcaaggaggagataactcaatgtatcttagtccattttctgttgcttaaaagaaatacctgaaactgggcaatttacaaagaaaaggaatttctttttttccattctggagtctgagaagtccaaggtcaaggcacttcttaatatttttgatgcaaatatttttgtatttaagaattgaggttaaaattttcatactgtaagtaaaatgcaaatatattaaaggtacaatttgatgatttttgatctatgtatacactcatgtaaccaccttccccaattttcattccagaaagttcccttttgtccttttcagtaaatttcaccccccttagacaactactatttttacttctatcaccaatgttttgcctgtccttaaattttatataaatatagtcatgcagcatatactcttatatctggcttctttcatgtttttgggattcatccatgttgttggaagtatcaggagttcatttctatttattgctgaaaagtatttcatttttttttaaaccagattgtttatccattcctctattgatgaaaatatgggttgcttcctgtttgggacttctataaatatagctaatgaaaacattcttgtacaagtgtttttatatacatattatttcatttcatcatatgtgttttgataagcaaaagattggaattctaatgatatccaatgcatcaaaaatttattttagatttagtgtcttttttgtgccctctctaagaagtgttgcctatcccaaggtcatgaggatattttcctatgttttcatctagaagctttataattttagcttctatgtttaggtcagtgatccatcttaaattgagtaaatacatatactgaaattagtgagaaacagagtagttgtgtgtttgtaggtaactgccagacagtttgccaaagaggttgtacaatcttttgtcccaccagtgacatgcgtgacatttggggtgttggtcttttaaattttagccattgtactaggtgtgaaaaagtatcttgtggttttaatttgcatttatttgttgactgatgagttaagcacattttcatgtgcttattagttatttttatatcttcttttaggaaggatttgttgatgatttttgtttatatttttattgggttgtttttatggttgatttgcataaaatttcataaattttatgtatataagtcttgtcagataaatgtactgtgaatatgattatctgtggcttgcctttacatcttcttatatgtcttttgataagcaaaagtttataatttttgatgatatccaatgcatcgcgaatttcttttagagctggacgtggtggctcacaactgtaatcccagcactttgggaggccaaggcgggcaggtcgcttgaggtcaggagtttgagagcaacctggccaacatggtgaaaccccgactctactaaaaatacaaaaaaattagccaggcatggtggcaggtgcctgtaatcccagctactctggtgactgaggcaagataattgaactaaggaagcggaggttgcagttagccgagatggcgccactgcactccagcctgggtgacagagtgagactgtctaaaaaaattttttttcttttagattgagtgtcttttttgtgccctttctaagaaactttgcctaccccaaagttatgagactattttcctatgttttattctagaagctttataattttagcttttgtgtttaggtctgtgatccatattgaattaatttttgtggtggtgtgaggcaggggtggagttttctttttttctccatgtacttttaaaatgataatttactttatttgcacactcaggccacaaggttttcaagtttccaaagtgaacatggaattagtgggactaattaaatctgatatatttttggtggtccaaaggctcttagatgagtgtgtaccattggttgttgttattgatttctcatttcttttgagtttctataatattccctttgcctctaattaaacatgatagtttttgcgaggctgttgggcaccagcacccacatttgccaccaactctctccccagtgacttatacctgtctttctctatagtttcctgacctttctcaaaatctccatgcttcatgtctttgttgattgatcacataaaatcttcttcgcaaacattttcttctttatgttgttaatttctctataaacaatcaaagtaattctgttatggcaagtgattttatttctgtaataaaaataaatttatttgtagctttaactttattacttatgtttctgcattacttaaatgaaaaatgaaataattataatgaattatgtttaaggtactcagttaaaacttagtgcagaattgattccactttaatgctaaaaagctttagtaaatatcaggtattacgttcaagagctcctgtatgaacttttccgaagagctcacaatctagcaggggaggtggatgtatcagtacccatgtagtagccagtgtgtagagaggtagacgcacagaactatgggaataaaaaggagggtgtgctggattctgtgcccaagtaatcatctacgtctattttttttttttttgaggcggagtcttgctttgttgcccaggttggtgcgcaatggtgcgatctcggctcactgtaacctccaccttctgggttccaatgattctcctgcctcagtctcccaagtagctgggattagtcacccgccatcatgccctgctaatttttgtatttttgtagagatggagtttcaccatgttggccaggctgctcttgaactcttgacttcaggtgatcagcctgcctcggcctcccaaagtgctgggattacaggcgtgagccaccacgcctggcctcattgatgtctttacacagggaatatatgaactgatttttgaaggccaaataggatttttcctgggagaacaaaaagagtcaagaattccatgcaaaatgaacagcatgagcaaagttattgttaaacagaggtgtatataaaaattacaaacatggccaggcacggtggctcacatcccaacactttgggaggctgaggtgggtggatcacgaggtcaggagatcaagaccatcctggctaacacggtgaaatatcatctctactaaaaatacaaaaaattagctgggtgtggtggcacgcacctgtagtcccagctactcgggaggttgaggcaggagaatcacttgaacccgggaggtggaggttgcagtgagctgagatcccgccactgcactccatcctgggcgacagagcaagactccatctcaaaaaaaaaaaaaaaaaaaattacaaacacatctatctgatacattatcaaatgcttacaacataggagaatggccaaagctaatcaaggtttctgaatttttgaaaccttaatactgtttgtatctggtcagttcagttctatatctggtgggagatcttttaaatagcataaagatgtttcttatcattgctaaactcacctttcttcaaatttcctctagtgcttgtgaacttgaggcataaatatcagtgattttcttatttccatttttaattttaattttatttttagagatgaggtcactctctgtcacccaggctagagtgcagtggcacaatcacagctcactgcagcctcaacctccaaagctcaagtgatccacctgcctcagcctgccaagtagctgggactacaggtgcacatcaccactctgggctaacattttattcttatttttattttgtagagatggagatcttgctatgttgcccagtcttgaactcctggccttaagcaatcctaccacctcagcctcccaaagtgcttggattacaggtttgagccaccatgctcagtgtgtgatttttgctcacttcagtaaaagatccatgaatatatttaaggagacaatattctcatcatcttgaaaggttagactaatgtaaaaatttgcaggctggtggcagtggctcacacctgtaatctcagcactttgggagactgaggtgggtggatcacctaaggtcaggagttcgagaccagcctggccaacatggtgaaaccttgtctctactaaaaatacaaaaaaattagccaggcatggtggcatgcacctgtaatcccagctacttgggagaccaaggcaggagaatcacttgaacccgggaggcagaggttgcagtgaaccaagattgtgctactgcactccagcctgggtgacagagcaagactcggtctaaaaataaataaaaaaataaaaaaataaaaatttgcagtaaattctggaatttattataatgtagatatttaaatgccagcaaaaaaggcagtttgaccattaatgtttctcctaaattttcttcaaacaacaacaatagcaacaaaaagtctgggaatgtgctctgcttttctcctctctatcacctctcccacactccttccttcccttttccttcctcttctttcacatttcccgttctgtcctttccttccccttcctttccctcattttggcaaccatttccaatgttctacagcacttcatgtatctaaaatcaggaaaagaatttgttcatttgcagaaaccgaattgtacactggcctttttcaatagaaagagctttaattcttggaaatagatgcaaagagtcattagaagggctggggctctaggctgaaccataggcataaccccagaacaatatgccagaattagccagcagggaagtttcttcctctcttgtaacctgaaagtgggcagtgaggaagctcccactggaactgtttattcaagaacgcacttccttagatgggagccacttccactgcacctggcacaacagtcaccctactcctgctagatgcattccagcataaactggatgcccttcctttggcaccaggaaagctagtaaccagacggggatagccgcctcagaatatccaacgtgtccctgcccattcttgctggcagccatagcagaaatggaagatccattgtcttcacctcacttctaccttccaaatctcatacaaatgcatttaattgactaaacctaagtgccgcaaatgccatccagaatctgagctgcaaagcagactcagtaatgtagatttttagctctttcagtttttgcagatcatgaaagcacactagaaggagagaagaatgggttatgtgggccaattcaccatatctgtcgccctaagaaccatttcaaagtcgttgtaaatttagtgagttttcataacttctaatgaaatgtctcatgagtatagctttttaaaacacaaaactatatttgttcatgccataagcatttcttgagtacctatcatgtgcaagcactgctgtggttacaaaagtctcccttccagaggaggttgtagccttgtgaagatggtgtgtgtcacaatttagcaagtggaaaacaattgaaatatgtacaaaatgcagtggcagagaagagaaggaagcaattacctaggtcaagggcgaggagtcagtggcctggacttgagcaatggataacacctatttggactcaagagaagtggacttttgaagcccaaggagagcatatgcaaaggcacagaggtgtgaaacagcatggctcaggcagggaactgcagctggaacaccactttgtaccttagtaataatctgttctcatagcatagaccaatcattaaaaaaattgttatatgggccaggcgcggtggctcacgcctgtaatcccagcactttgagaggctgaagggggcggatcacctgaggtcaggagttggagaccagcctgaccaacatggcgaaaccctgtctctagtaaaaatacaaaaattagccaggcgtggtggtgggcgcctgtaatcccagctacttgggaggctgagacaggagaacagctcaaaaccaggaggcagaggttgcagtgagctgatatcgcaccactgcactccagcctaggtgatagagtgagactctgtctcaaaaaaaaaaaaaaaaaaaaaaaaaaagaaaagaaaaaagagacagagaaaaagaaattttattggattccaagaattcatatcctaattgagtcactgaggcatgtacacaaaactgttaagtaacaaaattaggaaaaagtgatactaaaatatttaacaactattacagtcgtgagcacttaactatcagaaaaggatagttataaaggatggttataaacaactggtctagctatatcggtgagtacctttacatagcagccctgtttgaatatagcctaaaggtccctgggcccatggagtctttggatccaaataaatttgcatagtcatcaacggcacagaatttcagctccacctacacccagagggccttcagctttacccccccttcaaaaaggctcgtaaggttttccagggaatccctgaaggggtgcctcacatgtgcacgttttgaacagaagtatgttctttaagtggctggctcttttaagggcaggtatcaaactccacgcctaggtgatcaaggccagtagggaattaggaggaggaacattcaccactctgcagtcagaaccattctggcaccgagtattggaagccatggaagatgcaggcgatgtcatctttcatgtggttataaaatgggaaggttttctgattccccttgcaggacgtgcggcaggggtgtggctcacctgtttggtcccctcccccgccgctgctcaaacccctgagggaagggggagcacgcagacggaaaggtgccagagcccaagtgggcatgtgttatagtgagctcctttagccttgctgtccggggacagctgagtgttaacctccccacctccattcttttccagagtactggacaaatcaggtcatatgaactgtttgaaaggtaatgaatgctgagactttgttgaacagtggaggtgactttcagcgggatggggagctggaattccgggaaggtggaggggtgtggggataatcttcccctggagttccgccgttctggacgcaactcctcttgatgttcagacgcctcttccctccttctctgccgtgctgctctgctgctctccaccactctctgccgctctctgctattctctgccactctgttcctctcgacattcagccgcttgtgtgtgtgcccgctaaggtctcaggtttatatgggcacaggatgggggggacgtgacagctagagtggtctcagaaaatgcaacattgaggcgaaaacaggagtgcctgttttcacttaggtccgagggcataaggtccgagggcataaggcccgagtgtggagccctcgccggggaccccactcttctctacccagcacttccctgtcccccttcccgttatcagttactggcattctcaaggtgggttccctcaaactggagagaggatccttcctgaggaccatgaacagaaatcatagacaaacggaagctgaagccagtgaagaaggcagagtctcagacagcagccaaaggggcatggcctgtgctgggagcagctggaaagtgaattgaaattccaccctgcctcctctacctgagctgaggaaataatatgtcctgactagagtttaggccagtgttttcaaaatatgttgcttgggtatatatgcatctgaataatttaggggacttgctaaaaatgtgatcaattttatctctctttcctctaaagtttgaatactactcaagaccctttttgtccaaatgcctatggaaattcacagcagattacctccattacatctactgctttttactgttatttaattgcttgatgggtatgcgaggtccctatggttttgttctacagttacattgcttgagtatttcaaaactgggataaatccaaatttataaatgttttataagtctggtacattcttaaattaaaaatttttttacaaaaaactggtcaatggaaattaggggaacaggccatgcctgcattctattaaagaataattcctatgtaaaactgcaaacagatggtattatatagtcttagaaaaatggtagggttgatatggtttggctgtgtacccacccaaacttcatcttaaagtgcggctcccataatccctatgtgtcatgggaggaactcagtgggaggcagtggaatcatgggagtgagtttttcccatgctagtctcatgatagtgaataagtctcatgagatctgatggttttataaaggggagttctgctgcacaagctctcttgcctgctgccatgtaagatgtgtctttgcttctcctttgctttctgccatgattgtgaggctccccctagccatgtggagctacaagtccattaaacctctttcctttataaattacccagtctcaggtatgtctttattagcagcatgaggacagactaatacatagggtgaaacttttgattatatatgtaaatatataaaaatagcctttccactaataagacttctttctcctcagatatgaaactatccatgaagaacaatattatcaatacacagcagtcttttgtaaccatgcccaatgtgattgtaccagatattgaaaaggaaatacgaaggatggaaaatggagcatgcaggtaaatccaaacattttcccatgcatttttattattagctacagttctttaatttaactagatttaatttcaatttagctttataatttgtaaccttgaactttgtaatgtatttagcaaatttatttacactttggaactgcataacttgtctaacaaatgaacatagattttatttatttatttatttatttatttatttatttatttattttgagatggagtctcactctgttgcacaggctggaacgcagtggcacaatctcagctcactgcaacctctgccttctgggttcaagtgattctcttgcctcagcctcccaggtagctgggactacatgtgtgcaccaccacaccaggctaattttttttttgtatttttagtagagacagggttttgccatattggccaggctggtcacgaactcctgacctcaagtgatctgcctgcctcggcctcccaaagtgttgggattacaggcatgagccaccatgcccagcctgaacatagatattattgtggtcacttttttggaagcatctattaagcacctatgccaaacatttctttagtcaatggcagggcttttcctcaagtgacattttgaatctaaagagatgacattgccatagatacatatgaaaagtactcagagtatgaaatgctagcaatgtgatttaaaagtataatttaaagtgcttaccctataaatgaatataatgtatatgaatgtggttgaatttacttttagtgggacgaaacattagttagaaaactagttcacacaaaggtataatatgatctaagtcccagatatcacacttgctatttgataaatattaacatcaaccaatgcatcaaacaataggaatgtggaaaacctagaaactagtttcttagttaaatgcattttactgaattatgcacatattttatataattctatgtattttgtatagttctaactttatgctaactaaaaattgttatgtgtgttagtttgagagggaaggaaaagaggtgaggcaattgtccccctagtgaggaatgttgcctctctgcagtggttgaaaacattaactcttctctctctgcctcctattggactgtagctccttttctgaggatgatgacagtgcctctacatctgaagaatcagagaatgaaaaccctcatgcaaggggttcctttagttataagtcactcagaaagggaggaccatcacagaggtgagcagtatgatccatcccttggtgcttgtttttaaccatttatgcttaaggttgcagtgttttgaatttttgcaatcagatcatggtgatgaccttgagcagtaggatagaaataactcccacatgcttagcgttccaataatcaaacactaggcataaatgggtttgtaaactgttgtttcggagcaagctcggcaaatgcctctgctatctacacacaatgtgggatctcaggaggaattacttctgttccttacccatgccgtctcttgggaaatattgccactgcccgatgattatttatggccatggcgttccaagttgtaaacactcttgcttcattttccctgagacccactggggtctgtcccttaagaaacccagtcctttctgatttcttgtttctctctgatccttctttcagggtcctgaagcaagtacatgtgagagggttggctgttattctctaaaatgctccatcccttttggtcctacttttaggaaatagagcactggagagaggtgctagaagagaaaagcaaaaatatccttagtaggaaataaagaagttgtgaaaacttcagataccggacttgagattgcagaaggggtgtggtgtggtattggtgttggagctggggtttccacctgttttacataattactctttctttacttttttttcctttttcttatttttcttcccattgactacctccagccttcccattgtttttatttagcttttctcctcatcttactttccctaacagtcttaggtttcttgttgggagttactggcattgaggttggttcacttaagctaattcttggtatgaacattgactgatatgcatttactaaccatgtccattttcataatgttatgaagaaatacccgagactggttaatttataaagaaaaagaggcttactggactcacagttccacatggctggggaggcctcacaatcatggcagaaggcaaaggaggagcaaagtcatgtcttacatggtggcaggcaagagagcatgtgcaggggaactgccctttataaaaccatcagatcttgtgagacttatttactagcacgagaatggcatgggcaacacccacccctatgattcaattacttcccactgggtccctcccgtggcatgtggggattatgggagctataattcaagatgagatttgggtggggacacagccaaaccatatcactatgtttgttcaagacactggcatttggcaagtcatgcttcatggaggctcaggatatacttttatgctttatgcttcataatatgtttttgaaatatctatcatctacatagtctttagtaatgagtagaaatggagaagaatttgttttttcagaccatttgcctaccatggacattatacagatggtgactactgtgatttcactgcatgtttttcatttcccagggagcagtacctgcctggtgccattgcactttttaatgtgaacaacagcagcaataaggaccagtaagtatatttacaatagaaaaccaaagttttggttttaaagaaaaccagtaaaaatgtaggaatatatctgaatctgttatagaggaaacatttattaatcaaatgatctaatacaatggcaatgatagtcttatcattttgttgaaaagtagtgttcattcatttatttgaatacatgtagaaaaaatcatgtctatagtgttcatgcagttgactttctctgtgaatagagtgactgacaaaaataagtgaatttttgtcaggaaatattactcctttccagtttgagccaatgtgtcttaggtgaatttcctcaggagacagtttctgagatggaggcttgtatgcagaagtttgttgggaatggtcttgggaacaatatctggaagggagttgggggtcagtattgggcagagggagaagtcgaacttcagagaatagagctgatgtacaatgtgattctctggggatccctggagcagggatgaccttttagagttgtccctatttaggtaatagacttgggcctttgttcccatgcacagttattggaaaaaagttggccctagaagatggagcataaccatctggatggagcatggtggtttccttcagccaaggccagccaagggagaggaaaaactgagctgacagcaaccaacactcttggcaagtggggaatgagtgcctgaattttgtgcaccacctgcatagccactgtatggcccaaccgtgtgctgcccagatccattttgtttatatagaaaattcaccccatgtgggaatacctactccaggatcctggttattttttcctgagaaagcttataagagtaaagttaatgggattaaactaaggtctctggcagttgcaggtggttttgaggcctcaaatgaaattcttcaccctctccgcttctactcattctagggtcctctcacccttagccagcacatctgctggtctagatgacttagctggtggaacagtacagacactcatccctgaagaacttgagccctgggtcaccatgcccttcttgagtcatggctacagtacttgcccatttaccaccaaaactgggctggaaaataccaaaagaccacctaggtgcaaatacatctcccctccctgcattgtatacagcactgcctacttctgatgatcacggtcaataacttttgccagtgtggtgactctcttccttgcctgttgggcatgaggggaccaaagtggctggggagtagccgtagcttaatgtttaatggaactctggcattccctggcagatgcatcacccctctggaagccaggacctctagatccatagatccttaagttgcaagaatgggaaacatacctttcctacatttgtcacccctacttagaccccatagttcccagaccaatgcattctatacaggcatagagaaccatacaatgatcattgttttagcatatatacagtatcctagaggatggcaccttttcttcctagagtataaactctatgatagcacttcagctgtggtttcaaaaagtccctccttaactatcatgtcagtagctgacaaaggtgtgcagcttatgataggaccactggatcccaaactcaggttccaatgccacatttttttttttttgccttaaagtgggtccttggtccaaagtgatgttaagcaatatttcatatatagtgatcatgcttcatatgcccctaaataatggcactggtcaaagccctgtggcaaaaaagcaaatgaatagtcataatatatgtcagttcttatcaatatatttgatgccccttccatggtgtcaggagtccaatttagttaacttgccatcaagtgactgattactttcctcaggagaaagcactgttttggagtcatagcattggtctctgtaacaggcatgttcactacgagcaaaaaacagacaaataaaaacaaagattttcaaactttgtgctcacactcataatatgtccattcagtctgcctcttctgaaatattttccctgatctttccatcgttttccatccaggtccctgaccaaccagtcaaggcatttgtgactgcccacgagtccttttacacatgtatattcttaatttgggctatttctttttccctttttttttcttttcttttttgagacaggtactcactcagttgcctgtgctggagcgcagtggtgcaatcttggctcactgcagcctccatctcccgggatcaaatgatcctcctgcctcagcctcccaagtagctgggattacaggcgtgagccaccacgcctggctaatttttgtatttttagtggggtttcgccatgttggccaggctggtctctaactccttggcctcacgtgatcctcccacctcagcgtcctaaagtgctgggattacaggcttgagccatcggacccagtctgggctatttctttttccatacaaactagatgactgtatactgcttgaagctgtgccattggggaaattaacctcacactttcaagaccacctctaagtgaggctgtggtgcagacacagaccattttggcttgcatccacattctaaactgacccatctatgcaacatgctgtatcagctccttctaaagaaccccacatatgaccacaggtgggggctgataaataggtgctgagtggaaaatgacatagtggaaaataaatggaaatttccaacgtggaaatgacataaagaagggtactgaaggccgggcatggtggctcacacctgtaatcccagcactttgggaggccgaggcaggcagaccacctaaggtcaggaatcgagaccagcctggccaacctacatggtgaaacctcatttctactaaaaatacaaaaattaaccaggtgtggtggtgcacgcctttagtcccagctacttgggaggctgaggcaggggaatcacttgaactgggaggcagaggttgcagtgagccgagattgtgccaccgcactcctgcctgggtgacagagcaagactcctcaaaaaaagaaagaaagaaagaaagaaagaaagaaaaagacgaagggtactgagccacctgcctgggcagcttacttatttgctctgattcatgctcaatcccagatatcttacttcatcatatgacggattgatacattatgaattgttgtttctgacagaatccatctcataatgggcattctttttatgtcccatggttaggtaatcctatttcagggcctgactaacagaatgccattgatgcagatatagtggactaatgtggtgctctgagaaatgtccacgtgatccaggtccctcaaggctgtcatgacagtaggaaagaaagttaatatagccttggaaaagagtgtaggtgtgtacagtttgttatcccctgtgagtatgagctatgtctgatcctctttcctgatagtaatgaaaaatgacattcacaatgactgacccagaaccttaggtatgcagtgtatatcaagtgaatgcattgttttccacatatgacacagcagctgcaattggggctactacttggttgattttgcaattgtctattgctatccattaggatccatttggtttttgcaggggtctgatgatgaattatgtggggaaatgaagagcgatcaccacccctgcatgcattaggtctttaaggatggcatttctttttctccccaggatgcaatgttgcttttggccagaaggtgggaagcagcttaagggcttctcctcggtcttacacctctttcctcacaagccaaggaactagtggggtaggggtgggagttgtgccgatgaccaactatatacatttcccttttgtattcaggaattatgtacattacacttatacatttaggaactggagaaatgatcacagagtgggtcactgtgttattttccacataggacatgtcagctgcaattggggctactacttggttgattttgcagtagtctctctgccatccactaggatctatttggtttttgtgggagtcagatgataaattacatggggaaattaagagagaccaccactcctccatgcatgattttatacaattatatacatttctcttttatattcaggaacttatatacattctacttttatattcaagaattacatacatttcacttttacatttaggaactggagaaatgatcacatagtagtgggtctgtggacccagtgggaaacaccataagtcatatctcatccaggaatctattattaccagtccatcatatgcccctcaagtttaacagggggccacgatgatgcttcaatccctaggtgtcaacatcaacatggatcctgtgccaaacagtcttcaatgtatctaagtattcttttttcccccagagtatagtgatctaagtaatggtcataggttctttaggagaaagaccagggaaatcgttactggaatatgtttgtcatactgttgcagagtctttcttcatgggtcttggcttctcctctagtcattggttttaggtctaagtactggcttaggtctaagtactggcttaggtctggaactgttcaaaggattctgatttttttaaaatttaaattgtaatgaatcaatttattttttgagatggggtcttgctatgttgcccgggctggtcttgaactcctgggctcaagtgatcctcccgcctcaacctcccaaagtgctgagattatagccataagccaccatgccctactaggattctgatttttttgatggagtaagttgccctcaacctcctaattattcattcctgattcattttggttgtatacattaaataataccctaactagctaacaggcttcccatctgtctaggaatactatattctattaacctcctccatagctgtctatgggttaagacccttggttaccatccccaccttaatgctcattataattactggaccaaccttacttctgatgggtaagcactgccattagtctcagttatttctagatcctattatccctattgctctcagagaactcagttctgtaatgacatttcccaccatcagccctggcctacagaggatagtaccactgaacttctcaaagctgataatatccctctcaccagcccattccacatcacttttgcatcctttgagccctctttgggaacataattagctggtaggctatcttccaaacagtgtatccacttcaagatgccacttttctgagtcttttgataccttcctccaccatctgccatggtgttaatgtttatttcattttgtgtggaccattacctttttccaggtttccaagagccatttgagtagtgtgtcgacatcatccttcaggatccatgctaggctgtcaaatcttgaatagaagtgtactcccatagcagtaaattcttccttatccaactttattgttctgtccctgtttgtacgtgaccatcttagatgttaagcctcacctcacttgtcaatcttatcttccatttcttcttaacagaggctttccacttctgttgggtcattcttacccagattgagtccattgcacttagaaattttcctgctctaacatcctctctcttcttctcaactccaagtcttagtgatactttgaggcctagctttagaactacttccctttaaaagccttctctgactatcctagtggtaacaagatgcctgttcattcatgtctggctaatgaaatttcctaagacttctgagctgacaatggcagcctgctataaccctaggtctgtctgacttcagaatctattcccctgctgatagagaaagctaatcatagaaagaggcactagttacacagtctccactcaagaagaaattgtatgtggaaaaaggtggccttaaatctggtaaattattctaataactgagattccaccatattaccagacagcttgttgattactcatgaaaaatgacttcagtcagggttatcccctctaaagaaaattgatggcattttcttaaaattctgaatgattttattcaaggataaatgtaaatgatgtcaagaagcttaaattttaaatattatttttaatacattaacactttcgaagaacactcttggggggctgttgtttcttaaatttttctccttggttttatgcctttattcatctccatttgtttctatttcccaaatctattagcttagaagttcttgtttattatctggataattgtctgccccaccccccactttttggggtagaaacctccagtaagagaccagatgggttttgagcactggagcaggtctttgaatgcaaagctgagatttttgctcaatgaaaaagaaagtaaataagagtggaagactgtgattatgtgacagatatattatttttttctttagggaaccagaagaaaaaaagaaaaagaaaaaagaaaagaagaggtaagactttggcaagaattaccccacatttttctgcccataacatttctgtattttaatactacttgcttaattttttcagcaagtcagatgataaaaacgaaaataaaaacgacccagagaagaaaaagaagaaaaaggacaaagagaagaaaaagaaagaggagaaaagcaaagataagaaagaagagtaagcacttttagtggcattgaaatagaaggaaattgtgatgggttttagatgcagggatgattttccataatacaaagtagaaagaaactttatagtaaagagccctgtgtaaagactaaatgtctttaaatattgaaaaataaacatttaacataaattatcagaagtgaattaaaactttttccaatttccctaaaattagcaatggtagcattattcttaattctctcaagaattttcactgctagggttaattctcttccctaagcattggtgaagataacttatcgctgagaaatatttaggttccaaggaggattaggtttctaggatcctacaatcattttaaaaactgaaataaaaatttaatttttattttaattacattcttataaagagtgtgcaacctagatcccttgcacgcgcagatcacaataaggtttgtgctcctatgagaatctaatgccactgctgatctgacaggaggccgagctcaggcagtaaacctccctcaccctgcagctcacctcctgctgtgtggcccgctgggttcctaacagaccacagaccagtaccggcccacagcccgggggttggggaccccagatctatgccactattccctctcagtggctgaggtatacaactgactgcagcatcgcagtgaaaccagggctttagtaaaaacctaatgtatgctttaatataagactggtcttaatgagaagagtggcattgttttacatttttacacatctctttaacatttagcttaataaaacatagctggcctctcaaaaaaaaaaaaaaaaaaaaaactggtagttttgttatctatccacccctcactaaccactttcttatgactagtgctcttatgccatgctaatcttcacactgcagagtgagcttctccagcttacttccatttcattaattgtggttgatgggcataacgatgtttaacatggtaaataaaaatgttcttgtatcttggtaactatcccctttatttctaattgccgctagggagaagaaagaagttgtggttattgatccctcgggaaacacatattacaactggctgttttgcatcacattacctgttatgtacaactggacaatggttattgccaggtgtctataattttttttttttttttttgtggatctcaccccatttctagtttccaagttcactgactaaacaatttgacttagagccctttaggacacacctcctttctctactgcaggtggtaaagagaggctagattattctcagtgtgttttcctgggatcaggaggaagtgcttcagttctcaatataattgggtctgcagtactgggatgcatggaggggtcggggaagacttttattttttaatttttttaacttttatttgacgttcgggggtacatgtgcaggcttgttttataggtaaactcgtgtcacaggggtttggtgcacagattattttctcacccaggtgttaagcccagtacccaatcgttattttttctgcttctctcccttttcccacctgccactctcaaatagaccccagtgtctgttgttagaggggaagacttttaaacttttggttgtataataacttaattagaacatcgggagaaactattttctttgacctatgagaaaaaaatgttgccaatagtggaaaaagatcaaggatttaatgtcttttagatggtaaacatctcactcatccaagaccaagcacaacttcctaaagcgttttgggtacagatagtcaatacgaacctggtgatcgatgtgtttcacccaacatattttgattttagttttaggccatttatttttttaatttatttaaagatttttttgtacaaatttatcgggtacatgtgaaattttgttacttgtatataatgcatatagtgtgattaagtcagggtatttagagtgtccatcacccaagttcaatacatttttgttaagtatagtctgctatcaaacattgaatttattccttctgtcttactgtatacttgtacccttcaacccacttattcttattggatgtttttactaagctgactagtatcatggaaaggatgttggaattcagaagtgtgaggatcgaaatccaaccactcagggaaaatatcgggagagccatggttaattaaaggactctaaggacctctcctagcctgagtgtgctgtgcttctcatcatgataaagaaaatatacaaagagaacttttacttaaattggcccccatttcttttttatttatacaagtgtttctttttttatagagcatgttttgatgaacttcaatctgattacctagaatattggctcattttggattacgtatcagacatagtctatttaatcgatatgtttgtacgaacaaggacaggtaaatatgttcagttttgaatattttaaaatttcatgcttttatctctagcattgtaatttgacatttcctaatccaagtattcttcaaagaaaactcacaaaaatctgttctagagaaaaaggcacaggtgaaggcaagagtcacgatgtataaactcataggcttagatgactccagctgattcagaggaagttaccaggcaactttttgacaagtagatgtggctttcctccattatcttgttcattggttttgtgccaggcgagaggaatagagagagcagaaatattctgccagctacagggggaagctaacagggagataatgtaaagagtcgtggggaaaaatgtcattgtcctcagcagagccatattcaaaattttataagaaggaggaaaaatgcacataactcagctttgtggtttatggtgagatattattgaccagaggggatagcttctgaagtatttctgttaagtaggtagaagctaattgtttctacactctcacatgcaaatgtaaccattatacacagactataaccttttaagaatcattacgtaaaattgaacattctctaaatactagtatcctggaacaatgccctgtcatatttgtagctttggtagccagtttaggagaaggagcaaatccctttcctagtgtaatgtatcagagggctgaaatgctgggtttaaaacacacaagcccatggtaacagcataggagggaagatcccaagtgtctaagggagcaagaatgagagatgaaaatgcagcctcaaaggacacttatgcttcacatcgaaggggtaaggcaagaatatgcaaaatagacagcacagggcaagtacccaagcgtccacgatagggctgggattctgacaagacactggcgtgggctattaggcacattgctagcgtgttcaggaaaccttccatgaactgtgtacggtggggaaaaaaaacaacaacccattgtatgttactatgctctcaatacaacacaattctggtgaccaatatgtatatggcgtttcctctacacaccaagcaattctgtaacaccagctgggttaaaatttaactgaatttggacactaacgggagttagaacaggcccaacaggttaagggctcagtctcccaagatgatcccccacttcagatgccagtcgtaagtctcaggttgtggcttgtgcttctgactgaccagctataaattggagttcccacagctcccttgtgggtctagtaatttgctagcacaacttacagaccataggaaaacacttatgtttactgcgctattatattaataaagggtatgataatgaatacagatgaagagccagatgaagagatacatagggcaaagtcgggaagagtcatgagaacaggggcttttgtccccatggaattggggtgtggcaccctcctagttcatagatgtgttcactaacctgataatgctccaaaccccatagttcagggatttttatagaggttttatcatggaggcatgatggactattaactcagtctccagtgcttctccctttcctggatgaaggaggttggggtaaaagttccaagcttctaaacataacttagtctttctggtgaccagccccatcttggacctcaccaagggctgcttcattagaccaaaagacacttttctttttctttctttcctctttctttctttccttctttctttctttctctttctttctttcttctttctctttctttctttctttctctttctttctttcttttctttctttctttctttccctccctccctccatccctctctctctctctttctttctttctttttttctttcaaataatatcatagagacttaagctggtctcaaactcctgcactcaagggatcctcctgcctcagccttccaaagtgctgggattacaggtgtgagccactacacctggccagaacaaaagacatttctatcacccaggaaatatcaagggataaagagctctgtttcaggaactggggtcaagaaccaaataccacaacaaaagatggacttagggccgcgctcagtggctcatgcctgtaatcccagcactttgggaggccaaggcaggtggatcacgaggtcaggagatcaagaccagcctggccaatatggtgaaaccctgtctctactaaaaatacaaaaattagctgggcgtggtggcacgtgcctgtagtcctagctactcaggaggctgaggcagaagaattgcttgaagccagaggcggaggttgcagcaagacgagattgcaccactgcactccagcctaggtgacagagcaagactctgactcaaaaaaaaaaaaaatgcacttagtaaccatattgcttaggaaattacaagagttttaagagttctgtgccagggaccaaatatatatatatatatatctcacaatatcacaagaatgctactcatgaaaggaatggctttacctggatggtgatgatagaccttgagagatttgtacactctcacttttgcacttacaaaatttttctttttttctttttttttctttttttttttttgagacagggtctcgctgttgcccaggctggaatgcagtagtgctatcatggctcactgcagcctcaaactcccaggctcaagtgatattgggtctcagcctcccaaagcactgggattacagatgtgagctgtctggccaaaattttaccttttatttctacagcagaatattttctacagccataggtttattagtatttgtattttattacattgttaaaggcatatttattgaaaatgaatttttctgttgacctcaacaaagttaattgacagttattcacaaaaattcacaatgacataaaaaggagaaacactgaattgattttattttctattttaggttacctagaacaaggactgctggtaaaggaagaacttaaactcataaataaatataaatccaacttgcaatttaaacttgatgttctgtcactgataccaactgatttgctgtattttaagttagggtggaactatccagaaattagattaaacaggttgttacggttctctcgtatgtttgagttcttccagagaacagaaacaaggacaaactatccaaacatcttcaggatttccaaccttgttatgtatatcgtcatcattatccactggaatgcatgtgtgttctactctatttctaaagctattggatttggaaatgatacatgggtctaccctgatattaatgatcctgaatttggccgtttggctagaaaatacgtatacagcctttactggtctacactgactttgactaccattggtgaaacaccccctcccgtgagggattctgagtatgtctttgtggtggttgatttcctaattggagtgttaatttttgctaccatcgttggtaacataggttctatgatttccaacatgaatgcagccagagcagaatttcaagcaagaattgatgctatcaagcaatatatgcattttcgaaatgtaagcaaagatatggaaaagagggttattaaatggtttgactacctgtggaccaacaaaaaaacagttgatgagaaagaagtcttaaagtatctacctgataaactaagagcagaaattgccatcaacgttcacttagacacattaaaaaaggtacgcatttttgctgattgtgaagctggtctgttggtggagttggtcttgaaattgcaaccccaagtctacagtcctggagattatatttgcaagaaaggggatatcggacgagagatgtacattatcaaggaaggcaaactcgctgtggtggcagatgatggagtcactcagtttgtggtattgagcgatggcagctacttcggtgagatcagcattcttaacattaaagggagcaaagctggcaatcgaagaacggccaatattaaaagtattggctactcagacctgttctgtctctcaaaagatgacctcatggaagctctaactgagtacccagatgccaaaactatgctggaagagaaagggaagcagattttaatgaaagatggtctactggatctaaacattgcaaatgctggcagtgatcctaaagatcttgaagagaaggttactcgaatggaggggtcagtagacctcctgcaaaccaggtttgcccgaatcttggctgagtatgagtccatgcagcagaaactgaaacaaagattaaccaaggttgagaaatttctgaaaccgcttattgacacagaattttcaagtattgagggacctggagcggaaagtgggcccatcgactctacatagaaccgaaaagctggtcattaacagggacatgcctcatgatccttttgatcctatgactgacatcaactaaaatttaaaagaagaggaagactcagttgggaaatttttccatgaggaaaatgtgctttggtgcaaggtacaaggcccacaccctctctgagagatactatgattaaaaaagctttatatcttgggatttttcacaactgataatgtgcaaagatataaactgattaacttgtcagtgtctgtattttctgattttttcacatacgctcattttatgtaatattcttcataaaaatgaataagtagccctcactttcatgccatttccattgttgagtgaagcgtatttgaagtaactgagaattaccatgtacatcatatttgggataacatttttaaaaattagactgcaataaagtaaaattaattatgcaactgtagtgaaaatgagttatttgataatttagcaggcagtttaggatcttgcagaacttcagggtcattttaaggaaaatcaattatttttgtagtctaggactgagaaagagtggttgagagaaactttttaccaataaagcatgataaatcagactttatgaatatatatatatatacacacatagatatagagatatattacattgaaaatcataaaatgttttaggaatcttttatattaaattttaatttttttctgattactaagacctgacagcagtggctatttttttacttctctgcctggccagcagtaagaaaaagggataaagtaataatatttctggacgattaacaagggaaattgtcataatgttaaaaaaggcgacttgaaatttctggagaccagcatgagcatcacctgggagcttctcagaaatgcagaatcctgggctctacccctacctactgcatcagaatctgcatcttagcaagtgtttcatattcacgttgaagcttgagaagcatgcatgtagagaaccaggaaggagttaatgagaggatggtcctagaaaagaaaaggaaactatctggcaagtgtgtggatgtggaaaacattggtaatcaatcagccatcttctgctgaacccagatgtggctcaaaaaatctttcttaacacagatcactagaagatttctatccctatctataatgacatgattaaaaatggcttcttgttaatttgacatttcagatacttaaacagaccttgcttggggtatgctgatggcatattttattctattgtaccagtagaatatccattgaactatacattatgtctttgaagtcctgtgtttccattcatcttggctgttccttcaatatcttcactacagaaatgtctagtcctggagtgggtgcgttgtatataataccataacgtatttctctctga

SEQ ID NO: 79 - DNA, 17172 bp, Homo sapiens
gctgcagatgaagaaacaaaaggctcagaaatgggaagtgactttgaaatcttgcacagccaagaagaggaagatccaatgtttgctccaaattccacccgattctggagtgcgtcctatgacctcagtgcccacctccctcccgggcacctaggatggagcctatggcaaggttttagcacagtgactacaggaatcacagcccagacacaaaagcaggaaaccctttgaccgggctccttcctattgcaccaacagccttgtgttgctgcaatgaaaacacttccccaagcagctgtggccaagagacgcagaaactgccttgtccacgggccccgcctcagactccaacactcacaagagagcagaggagccccaagtcttggggaccacagaagatgccatgtgctccacgatgtcggcccccacctgcctggcccacttgcctccctgcttcctgctgctggcactggtccttgtcccctcaggtaagtggggtctaggatagaacagggtccacccccggctggtcagtccctagaggggcactaagtgctctgccatgcctgaagaagcttgaccccatgaagatagagtaaagaggggtccactgaaaatttgcctgactccggcagagggcacccccagtgtcccaagaagcagcgtagtgaagtgataagctcccaggctctgcgctcacacccactggcttccagcttgattgctcctatgcccacgtcagatgctgcagctcttttagccccaggagcctcttctacaaaacagggacgctcatgggacctttctctagggctactgtgagtattaaatagaaaagtggtgaggctcagccctgggccggctgcatagtttatgagacccactgcaaaatgaaaactgcggtcttttgttcaaaaagtattgagcaacacagcagagcagtaaaccaagcatgggctccttctaagcacagggccctgtgcgactacatagatggcacagccatgaaccagccctggctcagcttaagacgcagtaggctcaaacctcaccactaaccagtttaagtaatttctttctgagcctcagtttttccaactgtaaaatggagctaaaaataggacccaccttgggactttcttaggagaatttaacaagataatacccataagtgcctggcataacaaagatttgataactcttggcgattattattatcattcccatgtttcctctaactcaggggcaggccaggttagctccagagtcttgagacccctgaatatatagctcagcctctgagtccagaactctctgatctaccaggcagggatacttggctctcagtgggctcattccatctcctgcccatctgggcctctgctccaggctctactgagatctagattctgtccatgacatctttggtcctccggggtggccatccccaggagagatcctggcagaacccaggtgtggggtcggacctaggtgctcccttactcattggccgtatgactcaagacaccacttcaattctctaagctgatttcctcaattctaagatgtgaatcataattgctaggtctcattccacaggtacttttgagtgtctgctatgttttaggcactagactaggaaatcagaaatctaaactactcagaataaaaaatattcccaatgattgttgcaatagaatagatggaaaataagagaagttgcttaaaccagtcagttggaatgtttgagtccagctgcatctcaagctgagtcagggctggttcttgggtgtgccctctatatagtggcacagagcctcctgcttagaagggccccatgcttggtttaatgttctgctgtgttgctcaatagtttttgaacaagggacctgcattcccgttttgcacttggcctcacaaattacgtagctggcccaggattgagcctcaccacttctctatttaatactcacagcagccccgagaaaaatatgagtgcccctattttgcagtagaggagactggggctaacacattttctataaggcttttaaagggagccccatacaggaaccatgaaaggcagaggatgcagatggaaaatagatgagaaggtccagctccactgacaaggcagaggcaaacctcctaggacacctcctaaagcccaagtgacaacacagaaggggactcagaaggggagagggagggaaggggtgtgggcaccaggactgagtccaggctccagcttcttccctggtgttcacttccccagactcacccctagctgagataagactttctgagtgcttccttcttcctctcctccattgcttctttctcctcacacacgcaggcttcatctttacaaataatttatttttaacagctctattgaagtgtaagtgacatatattaaaccgtacatatgtaaagtacacaatttgataagttttttttgtgagtgctgggtgtatttcacacttgtgaaatcatcaccaaaatcagcatcatgaacatatccagcgcccaaaagtttccttgtgattcgtccttgccactcctccttgtctccaaaacaaccacggatctgtattctgtcactatagtttgcattttctagaattgtatataataaggatcacacagttatactcctttttggctggcttcttttactccgcataattattttgagattcattcatgttgttgcatatgtcaatagttcatttcttctcatgtctatccattgtatggataaaccctttcccattcacctgtagacagacatttgggttgtttgcagtttagggctattataaataaagcatctatgaatattcatgtacaagtctttgtgtggatatatactttcatttctcttagggaaatatctgagaataaaatggatcatatggttgccatacgtttaactttttcagacactgccaaagtgtttttcaaaggagttgtaccattttacattctcatcagcaatgtaggaggatggcagttcctacacctcctcaccaacacttattatggtcaatctttttaattttagtcattctaatgggtacatagtaatatcttactgtgattttttttttttgagacagggtctcactctgttgcccaggctggagtgcaatggcttgatctcagctcactgcaacctccatctccctggctcaagcgatcctcccaccttagcctaccaaataactgtgactacaagcgcacatcactacacccagctaatttttgtggttgtctggttggttggttagtttttttgttttggtagagacaaaatttcaccatattgcccaggctggtcttgaactcctgggatccagtgatccgcctgcctcagcctcccgaagtcctaggattaccaacctctcactgtgattttaactccctaatatgtaatgatgctgaacattttttacatcatgcatcctttttggtgaagtgtctattcgactctcattttttaagtgtgtttcttattattgagttttgagagttcgttatatattatggatacaaatattttgccagatatatgctttgcaaagatttttctcctactctgtgacttgtctttttattcttttacaagtgttttccgaacagcaggagttcttaatttttatgaagtccaattcatcaatttgtctttaatggatcatgattttggtgttacatctaagaaatctttgcctaacccaaagttacaaagtttttttccatgtttgcagctagaagttgtatcgtttaacattttatgtttagttatatgatctattttgagttaatttttatatagtttgagatataaaccaaagttcatttgtttgcacatgtatttccaatggttcttgcaccattgttgaaaaaactccccattctccattgaattgtctttgcacctttgtcaaatatcaaataattatagttaggagccatggcatgcacctgtactcctagctactcaggaggattgcttgagactagcagtttgaggctgcagtgtgctatgacgatcacacccaaaatagcactgcactccagcctggaaaacatagcgagacctcatctctttttaaaaaatcagttgcctctatttgcatggactatttctagactctctattcagttccactgatatgtttatctatctttgtgcaataccacattgtcttgattactgtaacattatctaagtcttgaaagcaggtggtattagttttctaactttattctttttcaaatggttttggctattctataaattttagatttagtttatcaatgctaaagtgaagcctgctaggatttgaatgggaatggcattgagtttatatatcaacttgagaagaattgacatctaagcaatattgaatcttccaacatatgaacagtgtgtacctctctatttatttaggcttgattttttttatcttagcaatggcttatacattttcagtttgcagttcctttacatttttggctaaatattttctatttttataacattgatgactggaaattttaaaattccaatttcaagtggtttattgctagtgtatagtaatacatataattttgtacattgatcttttatcgtccaccttgctaagctcatttattaggtctagtagcctttttaagaaattttcatttaaattttaattatgtcatatgcacataaagacagttttcttttttctttcaaatctggatgtcttttatttcctactacctttttcacagttagtacctatcctacaaaattgaatagaaatagtaaaaacaggcatctttgtctagttcctgatctgcagggaaaacattgatttttgcaccactaagcttgatagagttgttgtagggttttcacaggtgccccttatcaacttgaaaaaccttccttgtcttcccagtttgctgagagttattattaggaatgcatgttcaagtttgaaaactgctttttctgcattctgttgagatgattatatgagtgcatgtatatgcgtgtgtgtgtgtgttagtttagtaatatggtaaattacattgattgatttttgaatgttaaaccaactttatattccagggataagctcaatttgattataatgtattatactttctaaatattgctgattgctgaattcggtttactaaaattttgtgtaaaattttttatctatgttcatgagagatattgattttcctttctcgaaaggaaaaggcttcggtttcaagataacactgggactcatagaataattagaaaagtatgctccttttttcaattttctaaaagtatttgtataaaattggtattatctctttcttaaagatatggaaaatttggctgggcatggtgactcatgcctgcaatcccagcagttttggaggctgaggcaggcgaatcacttgaggccaggagttcaagaccagcctggctaacatggcgaaaccctgcctctaccaaaaatataaaaattagccgggcatggtggtgcatgcctgtaatctcagctactcaggaggctgaggcaggagaatcgcttgaacctgggaggcagaggttggagtgagctgagatcacgccaccatattccagcctgggtgacagagtgaggccctgtctcaaaaaaaaaaaaaagaaaagaaaagaaaagaaaaagatatggaaaattcacaaatgaaactttcttggattggacctttatttctgggaagatttttaataacagattgaactttttaatagataatagggctaaccaggttgtctttttcttcttgagaaagctttggcagtgtatctttttcaaggaatttgttcatgttacctaatttgtcaaatatgtatgacttgaagttttccataatattcttttattattctattaataagagtaaaatctgtagtagtatcaccaatcttattccttattttaataatttaggttctttctgtgtgtgtcccctctgttcaatctgactagagatttatcagttttagtgatcttctcaaagattttcttcttctcattgattttttctgtgtgtgtgtgtgtgtgtggtgtgtgtgtgtgtgtgtgtgttctactgtattaagtttcatttccagcttgatgatttcctttctttcactactttgagtttagtttattggcctttttttctagtttcttaaggtggaaagtgggtaatttatttgagtcctttcttctttccaaatataggcatttaatactacaaacttccccttgctttaacagaatcccgcaaatttttatattatgttttcattttccttcagttcaaaatattttccaatttttcttttttaatcgatacataacatttgtacatatttatggggttcatgtaatactttgttccatgcataggatgtgtaataaatgagtcaaagtatttaggatatccatcacctcatgtatttttcatttatctgtgttaggaacattttaagtcctctcttcaagctattttgaaatctacaatacattgttgttaactacagttaccatactctgatatcaaatggcaggatcttattccttctatctaactgtatgtttgtacccattaacaaatctctctcatgcccctctccctacactcacttttccccacgtctggtatcattctaccctctgctttcatgagatcaatttttttagcttccacgtatgagtgaaaacatgtgatgtttgtctttctgtgcctggcttatttcacttaacataatgaactccatcttcattcatgttgctacgaatgacagaatttcatttgtttttatagccaaatagtattccatactggccatccagtagtggtattgctgggtgatatggcatttctatttttagtttgttgagaagtctccatactgtttttcatagtggctgtactaatttacattcccaccaaccatgtataaagtttccttttctttgcaaccttaccagcatatatttgtggtggtttgtttatttattttgttttttttttttattgttgcctttttaacagtcgttccaactggggtaagatgatatctcattgtggttttgatttgcatttccccgatgattagtaatgttgagcattttttcatgtgcctgttggccatttgtatgtcttcttttgagagatgttgattcatgtcctttgcccactttttaatgagattttttttaactgttgagttgtttgagtttcctgtatattttggatattagattagtcccctgtcaggtgagtactttgcaaatattttctctcattcaagagtttgtctcttcactgtgttgatagttgcttttgttatgaagaagctttttagtttaatatagtcccatttgtctatttttgtcttagttgcctgacccttttgaggtcttagtcataaaatctttacctataccagtgtcctggagtcccttccctgttttctcctagtagtttttatagttttaggtcctacagttagatctttaattcatctttagttgattttggtatatggtgagaaatagcagtctacctttattcttctgcatatggatatccagtttttccagcaccatttattgaatgtgtattcttgatacctttgccaaaaatcaattggctgtaaatacatggatttatttctgtgttttctattctgtgccattggtctattataccattggtctatgtattctatgcccttggtctattataccaatacacatcccaatcaagaagaaatttacaaaatcccagaaaaagaacacaaaatatcgatactaaggaagatcagtaagatacaagataattctgaaaaacaatacaaagaaatcagaaaacactccaagacattgctctaggcaaaggttttgtggctaagacttcgaaagacaggcaacaaaggcaaaaaaaagacaaatgggactatattaaactaaaaagcttctgcactgcagaaaaataatcaaaagagtgaagagacaacctcctgaatgagagataatattcacaaagtacccatttgacaagggactaatatctggaatatacaaggaactcaaacaattcaacagttaaaaaagcaaacaaacaaataaataatctaattaaaaatgagcaaaggaaaggaatgaataaacatttcccaaagaagacatacaaatggcctagaggtatatgaaaaaatatgctcaacatcactcatcagggaaatgcaaatcaaaaccataatgagatatcgtcttatcccagttagaatggctattgttaaaaagacccaaaaaaaggccaggtgctgtggctcgtgcctgtaatcccagcactatgggaggctgaggtgggcagatcacctgaggtcaggggttcgagaccagcctgaccaacatggtgaaattctgtccctactaaaaatacaaacattagccaagtgtagtgtcatgtgcctgtaatcccagctactcaggagcctgaggcaggagaatcacttgaccccaggaggcggaggttgcagtgagctgagatggtgccactgcactcgagcctgggtgacagagcaagactccctctcaaaaaaaaaaaaaaaatgatgaggatgaggagaaaagggaactcttatacactattggtgggaatgtaaattagtacagccactatggaaaacagtatggagatttctcaaaaatctaaaaatagaactgccatatgatccagcaatcctagaacaggtatttatctacaggaaaagaaatcaatatatcaaaggagtgcatgcatttctacgtttattgcagcaatattcacaattgcaaatgtatggaatcaatctaagcgtcaatcaatggatgaattgataaaaaaaatacatatatatagtgtccccaagcacacccacaatggaatactattcaaccgtgaaaaaaaaataatgaaatcatgtagtcattcacagcaacacggatggaactggagattattatgttaagtgaagtaagctgtactcaggaggctgaggtgggagaactgcttgaacctgggaggcggaggttgcagtgagccgagatagtgccattgcactccaaaaagaaggaaagaaggaagggagggagggagggagggaaggagaaagagagagaggaaggaaggaaggaaggaagaaaggaagaaagaaaggaaggaaggagggaaggaaggaaggagtgagccagacacagaaagacaactatgcaggtgctaaaaatgatctcacggaagtagaaactataatgatagataccaaagactaggaaaggtgatgggtctcagggagaggggttaagagtgaggttggtgaatgggtacaaacacacagttagataaaaggaacaaattttaatgtttgatagcagagtagggtgactataattcacaacaatgtattgtttttcagaacagctaggaaagaggacctgcaatgtacccaacacatagaaataataaatactcaggtgatggataccagaaaaaaaagaaacttacagtagtaaactcacatttctccactcccagtctttattctatcgatgtcataacttctacatatacatgtgttagaagcctcacaatagaatgttatttttttttaaaatcagtttggggccttgcttttaagatttgttgggtggaccagaacacttctttctgggctgcatctctcttctgtggactttccccagtgccctgacaatcatgggttttaccagtttggctggtgggaacaggcaccattcttagccctgtgctgagtgatgggcacagtcctgtacgtgtgtgtgaggaaactccctgaggccagggaaaaaaacaggaaggatcagtgataacagatctgactagctcaaataatgtttgagagtggatgtcgctgaatttcttggaactaaggacatcaaggacagaagcaatccctaggattcaacatgcggttatcacttggtcacaattgtgagaaagttattcttggtggttaacagcacatgcctagctgaagataggtagaaatagaatttagaattccataagtctttcctagaccctcttagaaggaaatgtttgcttcaccttcttactctccttgcctcattcacaactgagaaacaccatgatatactgcaaacaaatgtgtggagtgagactgagctattcacaaaggctgatgggaatacagacaaaaaggaaactcggggtacaaagctgctgaccttgagttgagcagaatcttaagtcacctgatctgagttcaaatcctggacacgatatctactgaatgcatggttcacctcatgtttctttaccactgtgagcattcgttttctttctcatctcgaaaatggagattataggctgggcatggtggctcacacctgtaatcccagcactttgggaagccaaggggaaggaatcacttgagcacaggagtttgagaccagcctgggcaccatagtgagaccccatcactacaaaaaaaattaaaaaataaataaataataaatggggaagtttttaaaattgagattataacagcatctacctcacagaattcttagaaggaatacatgtgatgatgtttgttacccagaatatccatgggaggcctcagccctctttctctgtatccactttgaggataaactcaacagttcaacctatcttcaaaatagcctcacttcataacacattaacacgaactgcagtctgctgataattcacatgaggcagaaagggtatttacactgaaccccgcaacacacaaacctatgtctctgaagggtggcatttgaagattaatagccagagctccagaaacaggttgagagggcttgaatcaagcctgtcaccctcttactgagtgatgtctgagtgtgccagagcttccataacaaagtagcatggcctgggcggcttgaacaatagaaatgtaatttctcacaattctggaggctggaaactgagatcaagatgtctgcagggctggtttgtctgaggcgcctctcctcagcctatagacggccaccttctccctgtatcttcacatggtcttccccctgcatgcgtatgtttaaatttcctctccttataaggacaccagttgggtgagattaaggcccaaccccaatgacctcattttaactgaattacctccttaaagaccctatctccaaatacatcacattctgaggaactggaggttaggacatcaacatgtgcattcgggagacacaatcctagccgatgatcctgggacagctgcctaacctttccggaccctcagtttcctctgtcaaaaaatgggaatgatgccatttaccttacagaagcattgtgaagaataagtgacatcatgcacgcagggcccagcacacggtgagcacttgagtgttatttattgtttgtaggtttgccattgcatagctcagttctctctctgcagccagccatctcatcccctctttcccttccctgtctaatgacactcctgtcttatcctgggccattgttcttggccagataatggtttgattgttttaagcttgtcatttagggctccaagtccttcctgcccagtgcaaggtctttcttcctcttttgtagatgcctctgggcagagcagcaggaatgactggcaggtgctacagcccgagggccccatgctggtggcagaaggtgagacacttctactgaggtgtatggtggtcggctcctgcactgatggtatgataaaatgggtgaaggtgagcactcaggaccaacaggaaatttataactttaaacgtggctccttccctggggtaatgcccatgatccaacggacatcagaaccactgaattgtgattattccatctatatccacaatgtcaccagggagcacactggaacctaccactgtgtgaggtttgatggtttgagtgaacactcagaaatgaaatcggatgaaggcacctcagtgcttgtgaagggtaaggatcaggccctgcagaccacacatttgctccagtctgtttccctgcacagtcacctttatccactgtatcatgctgtatcacacaaaatttcagtggcatacaacaatacatatttgtatctctacatgcacatttacatgtggctgggtggttccactcctcatgtctcatgccagagcccaggctggagaggtagcaactatgtggggcatgttttctcataaagatggcagaagcagaagcccagtcccaactcttcaagtacacctcaagcatctactcacattatgtctgctaacagcccactggctaaagcaagtcacatggctcagctccaagtcaagggacaaggaagaatagtcttccaccatgcaccaaaggtaagagtgtggatgtaccctattacaagcacagagtcaaaacctgaggctgatcatgtcatctaccacactccccaagtactcaatcatggcatctgtaagtccacctatggtgacctgaatacccaaatcctgggcctgtcattgaatagtagttccttcttaagtcagttaccctggctctacatgcctcaagtgctttgcttgaaaaacaggcaaaacaatttgtacttcaagggtcattcgggtgattaaatagaatggatgcttgtggaaacaccccataaactggtgacatggagagtatctgtacgtgggagttcattttaacttgatgccagattcaggaaggcttcactggcttcttccgagctatgatggtgcctcctctgtagtcctgccatcttctgggtttccgcctctgggcaattttttgaccatctccactggaagacagagaatggcttcagggccgggcacttgtgtcttcctgagtttcatgttccccaatcctaccattggtatgtagtaggtactcagagcttttttactgaatgagtcaactggtgagtaataaagaaagcaggaaggagtggctgagtgaagaaatctggaaagaaggaagggagggaaaacaccaggtaggaaatgagtgaacgatggaagaggagagggaattcaacaaggacctcctctttggcttcaggagctggggaccctgaaccagacctgtggatcatccagccccaggaattggtgttggggaccactggagacactgtctttctgaactgcacagtgcttggagacggtccccctggacccatcaggtggttccagggagctggtctgagccgggaggccatttacaactttggaggcatctcccaccccaaggagacagcggtgcaggcctccaacaatgacttcagcattcttctgcaaaacgtctccagtgaggatgcaggcacctattactgtgtaaagtttcagaggaaacccaacaggcaatacctgtctggacagggcaccagcctgaaagtgaaaggtgagacaattggttttggacttgtcgggagagcggagcaggtattcaacaggaatttttctacatgtcccgaacaagccagttcttcacagcctccatgtctttacataagtttttccctctacctggaatgctttctccttttctctgaaaactcctactcatccttcaaggcccagcacaaatggcccttcctctgtaaaaccttctcctcctctcaagcagagttaatttctccccattctggtttccacagaactctgtatagatcattaataattcaacaaacattggccaggcaccgtagttcactcttgtaatcccagcactttgggaggccaaggcaggtggatcacctgagtcaggagttcaagaccagcctgaccaacacggtgaaaccccgtctgtaataaaaatacaaaattagtcaggcgtggtggtgcatgcctgtaatcccagatacttggaaggctgaggcaggagagtctcttgaacctgggaggcggaggttgcagtgagccaagatcgcacccttgtactccagcctgggcaacaagagcaaaactccgtctcaaaaaataatagtaacaataataattcaacaaacatctactacatgactgttgagtgtcctgcactatgctaagtactgcagacactgcaatgaattagacaggtccataccctaaacgtgctccagtagaaagtctaactttgtccttcatagctgcagggtttgacttctagcccatacccacatagaaactggcagactcatcccagagatcccagctcctgggacttaggaagtggtgggagataaagataaagggaagtatgacaaagcctctctcccttgcagcaaaatctacctcttccaaagaggcagaattcaccagtgaacctgcaactgagatgtctccaacaggtgagcgtacccacctcagtggagtcaatgagtcccccacaggcaagggggccatgaatggcttggtcatgggaagggagcagtcccagactcctggggctaacctgccaccaagaatgctcccaggacttcatctcaactgcagaactaggaccccagagaaccatgttataacagctcagctataacgaactttctcatagccagggccatgtaactgtttagtgggaaatgttgtttgagaggtggtgagctccctgtgattctgagtgtagggacacactgtgaggctatgcacagcgacactggagaacatggctttgtagctaagcctcctggatggagccccttcctagtgtaatgggcaggttctcgccccttgagtctggtatctgactctatgaactagcggggaggggacaagaatcagagaccctacttcatggggttgtgtgtgcactcaaggagatcacacatgccaggtgtccagaactgtgcctagcacatctcatgttaacattcaaggactctcagtatctggtgggagcttgtgatagatgtggtcagatttgccttcctgatgctcggccctgctcctgccattcatgggggccagacggcctgggtcccgtgacttctttaacacatgtggccctgagaaaatcatttccccactctgggtctgtctccttatctataaaaattggatcactatcctacactgtaggattaccttgaggattgcattaggcaattaggaatagcagaggttagggatgtgactgagatgattacagatgcaggcagaatattgggcaaccgttctctgggcccagggcagagggaagggtggtctttgatctcctctttcaatgtagaaaggatacagctccagaggttatacagcagcaggatgtgaccttgcccatgggcagcaatgaggcgtgggctgtggggccctcaccacgggtcccgcctgagctctctcctgtgcctcccaggcctcctggttgtgttcgcacctgtggtcctggggctgaaggcaattaccttggctgcactcctactggccctggctacctctcggaggagccctgggcaagaagatgtcaagaccacaggcccagcaggagccatgaacaccttagcatggagcaagggtcaagagtgaggggtcagccccagagtgaggaccctctgagttggagaggagccagggctcctcaaccatttccctacctccagtcccagcctctaggtgcccccaggcctcatgacaaactcctagatccctacatctggttttggtccacctagtgaaattcccttctttgcaccgggcttccctctaaaatgtctccctttctctttttggcctgttcaagacctccttgcttttcagtccctggctcagtctctcctcaacacccttgcccctgctgcagccctttctggtgcgccctgcccctttccccacctcgctacatccttcttggcctccaacatccaactcagagtcttcttcccaggagatgtctgtaagaatctctgaactcaaccagccagaccatctgtgcccctccatctacacctttctccccactccttcctgccttccttccatccccctcatggctggcttgggcaggtataatattagaatgcaggttcagcaactataacaaagctcttaaataacagtggcttaaaccagtggaaatcaaccagaaagttgaccatcagcaggccaagcaatacagagactccctggtattgagacccaggattcactgatctcattgctaccaggtccaccttctaggcagccagactggaaaagagggcaggaaaggggagcaggaccctcccctttaagtgcacagtcaggaacttggccacctcacttatctctacttggctggaatgtggtcacatggtcacacctagctgcaagaaacactgggagatgtagtctttatttctggcagcaatgcgcccagctgcaagttttcactagagaaaccagatggcagatatcaggggataaccagttatctccaccacagcagcatacagacagcctctcacctgccctgtgggacacctgagttcaatgcccagctagctagccagcacttcttcccactatcacctcccctggggcagcatgatgtggggcagtagttcccaagatgagtgattttgcccccactggacttttggcaatgtctagagatgtttttggttggcacaacctgggggggtgctaccaccatctagtggactgagaagccctgacatggggaagagtgtgcatgcccaggagtcagacacacctgcctttaaccctgaggcctctgcctcctccctgtgcaccctcagtgactaatcagagtcccttcccatcacggaacatccaggatactaatgtggacttctctgcattgtgtaagaaccaattcaagaccaggcacggtggcttatgcatgtaatcccagcactttgggaggccgaggtgggtggatcacctgagttcaggagtttgagaccagcctggctaacatggtgaaacctcgtctctactaaaaatacaaaaaattagccaggcgtggtggtgtgcacctgtaatcccagctacttgggaggatggggcaggagaaccgcttgaactgggaggcagaggctgcagtgagctgagatcgcgccattgcactccagcctgggcaacaagagcaaaactccgtctc

SEQ ID NO: 80 - DNA, 28368 bp, Homo sapiens
gcggcaggcggctggcccgcccggggatggggcagaagctggggcggctgagagcgcagcgcgggctcccgggagacgccggcccactgcccgcccgctcgccgcaggtaggcccggcccccgggaggtggggcgcggccaggtgtccccaggtagccgcctcctcccgtcctccgtcggccgcctccccggaccgaggcaggacctcaccccgcgcgtgttccccgggcgcccctctgcgaaccccaggcccttcccaggtttgcgcgcgggggccatccagaccctgcggagagcgaggcccggagcgtcgccgaggtttgagggcgccggagaccgagggcctggcggccgaaggaaccgccccaagaagagcctctggcccgggggctgctggaacatgtgcggggggacacaggtacgaggcctggcggcaggacctcggcggggagggggttacctggaaggggccacctcggcggactgggttggattcgaacacatagcgagggttgcccgcggcgacaggtgcccgatcagccctcggcagggtcactgggcacggcgtttgtcccaggcgctctcaggggctgcttcctgggcgcgcgtcgggttccggcgaccgaaaccgcgcgccgggcgctcttgcgcctaggctttgagtacaacaggttggtgattcagttcgacagaaactcaaagtgctgagctaggggccttttttttttaatatttttttttgtttgttttagtttgtttgacagttgccagactatgtttacgcttctggttctactcagccaactgcccacagttaccctggggtttcctcattgcgcaagaggtccaaaggcttctaagcatgcgggagaagaaggtaagcactaaaacgtccctggaacccagagccgcatagcacagatctcagtgagaaagtgcagtatttgaaattacatacccccagcaatcatagaaacactaaaatatcctttagtttaatttgtggcatatttggcaaggttgtgtttttttatgttctttaactgcaatttatagaatttgatgtctgtgagtctcctttaataagtatatacgtaagacctagtttgtggttaattgaatggaaaacctatttcagcttctgaaaatcagtgagtgacatttctctagatgaagctgtgtggcgattataataagcataattacttgttcttcctggagaggcgaacggggagtccaggatctagtctggacttgcgagaccctgggcgagataacttaatcccgtttggcttgaatgtcttcatctgtaaaagtgatgcgggtggggcgtaaaatgatctctgaggtcctttttgacttcagatggtctagttgtctagataaaagcagctagttgagaaaagattaggtttggggcttgctaacctggaagtccacagtttttaggtttcagatcattaacagtttgtttcctgcctatatcttaaaagcctaacctagtaaaaccagaagaaaaaaaaagcctctgtctctcagcatccttctccctgactattcatggtgcttccccactcagtgtcagtactctggatccacgtccccacacattcctgtctcttatcccttctcatcagatccgattctcagctcattttcatttgggaaggatctgttacactagtactcctaactgactttattaatgattaatacagctgtgtttgtgtgtgttgagctagaacaatccattaacccaaaggcgtgaaactctgatgacagaattctagcaactggataggctagctagagagagagggagagattttggaagaggatcctttttagtccctctcaagctgcaccatatatgtaagtccacttagaaggttgcacttataaggttccataatcagatgctcttccctaaaatgattgtgagtgcaatcattcattcacatgacacgggtataagagacactctcgccggcacggtggctcacacctgtaatcctagcactttgggaggccgaggcaggtggatcacctgcggtcaggagttcgagaccagcctggccaacatggtgaaaccccgtctctactaaatatacaaaaattagcctggcttggtggcacgtgcctataatcccagctacccgggaggcagaggctgcagtgagctgagatcgtgccactgcactccagcctgggcgacagagtgagactccatctcaaaaaataaaaataaaagcaaataaataaataaataaataaaagacagtctcaaggacaccacaagctatggaaggaatttagagatcatacttgagtgtggagggctggagatgtctgtggaaatgtgaatgagggatccgacacatttgaaaagacaacttgttcagtcagtcaccacttgatgaacacatgctaagtgccaggccccgtgctgtgtggtggagacatagaaatgaaagactgcaatctctgccctggaggacatcttcatctgtgtgggaggcagggtgtttgttaaacagacgatctccatcaactgtataacagaagccagaacacagaactgagagcagaggaaagagtgagtagcagtaactctgcctcaagagagttgtatggcagagaagccaatgccttccatctgcaaatgggctataataaatggagatatgaaaagtaactggaaataaaggacctttggtgaaattctttttttttttttttttttcagacagagtctcgctctgtctcccaggctggagtgcagtggcgtgatcacggctcactgcaacctccacctcctgggttcaagcaattctcctgcttcagcctcccgagtagctgggattacaggtgcgcaccactgtcccagctaatttattttgtatttttagtagagacggggtttcaccatgttagccaggctggtcttgaactcctgacctcaggtgatcctcccacctcggcctcccgaagggctgggattacaggcgtgagctaccgcgcctggccctaaaatctgataaagcatgacggtagagttgaaatgactgaaaaggagctatttagaaaacatgaggagatagaagtgaggagaagaacggaatatctgggttggtgaatttatagcagtgaaatgcatggacagcctcttaggatagtctaagacaggaaaaatagagaagggtagagaatctaaggaagcagagccaaggccattgcatcctccagccatggtcaaggggaaaataggagctcttgctaaaagccaagggtgtttcaagggcagggaagtttgcttcctttcaattaaaagcaagttcagggttacttagaatccagtaacaaaagacaatatttctcctgagatcctaagggatgcagggaaaaatttgatctggcaccaaaagtcagtcagtgacagaatcagaacttgcacactcagggaagtggcaagcagcagcccctggaaggcggatttaatacagtgttaatcataatagcatgattaatcataaatatcatatttatgatattggcataaatattatttcaggaaaaataaaaatgtttgtggctctccctttttctgtttcctctatcaaagtagcttttgagttccatggggttgtatttttaataactcaacctactggaacagaagactgtcatgagaaatttggcactgctctttttagccaataaaatgtaaggatctggacatatttgagaagtatacagaggcagatatctaattctccattctgaacttagatttcatgcagtaagtatagctaagtgaggcaggctatgggttgcttaatcaatagttttatactttaaacctatgccgagctgagaaacaccagactatacctatgaattgcttcaactggtagactttaggtccaagagtttcctcccactatagcaaagttgagtttgttcattcagtcagtaattttttgagcacctcttatgggccaagaaccaacatccctgctttaatggagcttttcttctagtgaggagaacagagtggtaacaaataagtaaagcatatagaaaaccagatggtgatgagtactatggagaaaggcagagtgtggacagggagtgccaggggtgggtagggatggggtttcaaggtagcattgaacaaaatcctgaaggatgtgagagagcaaactgaaagaagaaagttctgttcagaagaaacagtaagtacaaaggccagagagaaccaggtgtgttggaagccagcatagctacaacagaatacgtgagggatagtggtgggagatgaggttagagaggtaagggcttggggaccagacagagaagggccttgtaagccactgtaatgactttggctcttactctgcagggggtggaattgctgttagaaggtttttaaaaagcaaagtaggaacagtctatcttgtcttttaaagggccctctttggctgttatgttaaaaacagatggtagagcagcaaggagacccatggaagaccattgtaggaatcccagtgaggggtgatggaggcttggaaaatttttcattctatgtccatttggtggtaatataaaatctacaagaagacaaaggaggaaacagaatagaaatatttcatcacactagcccctctatctaccttttagaatactttttaaaacaactatcaccaattatcccattgtagcttcctgcttggttcaaatagcccctatctattatttataatatagaaatggacactgtagaatattgctgctcccccaaaatataatgtgaactacatacataatttaaatttttctaatagccacattttaaaactaaaaagtaataggtgaaattaattttaagaatgtatttaatttaatcttgtgtctgaaatatcaccattttaaaatataagcaatataaaacattatggagacatttcacattctttttttttttaacaccaagtctttgaaatccttgtgtgtattttacacttacagcacatttcaattcagacaagtcacatttcttgtttatttatttatttagagataggatcttgctctgtcacccaagctggagggcagtgacatgatctcagctcactgcaacctctgcctcctggcctcaagtgatcctcccacctcagcctctcgagtagctggaactacaggcgtgcaccaccacaccgggctaatttttgtattttttgtagagacggggtttcatcttgttgcccaggctggtctccaactcctaggctcaagcgatccacctgcctcagcctgctgggattacaggcatgagccactactcccagccacaagctacatttcaagtgctcaatagccatctgtggctaatggctaccatattagacaaaatagttttagaacattcagacctgtttggaaagataattcatttgtggaaaaaatatcttggacaaaatgtgactgttctcaaagggccaaaaataaatgtacaacttgaggtcactcaaaaatcagtatgagttttccagaccatgatctctcatgaacagtctttcaattgcctactttaatacattctttctttagaaatggtgagcagtgaaaagtatccgcacttttaaattcttttaagcattgtgatgtagttctcagtttctgaattccagtctcagtaatatgatctgaagcaaaatctcttaagctttgtttgtgtgacaccagaacaagtttaaagtttgtgggttttgaaaatactaccatggttggatgctttggttttgtgtcagcctgttcttaacctgtagtgtttaccatttaccttcccgtcaaatgtaaagggaaccttataaaacattatagacacgtatttggggtgtaccgtagagggagctgctactttggaaaggactaaatgtctttagttaaatcttataattagcttatagttttattaatttagaagtttagaattttataagttttagcataaacttgaatacagcaattttaatataaaagtattaatttgtaatttaagaacttggccaggcacggtggcttacacctgtaatcccagcactttgggaggctcaggtgggtggatcatgaggtcaggagttcaagaccagcctggccaaaatagtgaaacctcatatctactaaaaatacaaaaattagctgggcgtggtggcacgtgcctgtagtcccagctacttgggaggctgaggcaagagaatcacttgaacccaggaggcggagattgcagtgagctgagactgtgccattgcactccaggcccggtgacagagtgaggccccctctcaaaaataataataataataataattaataacttaaagagatcttagtgattatttaattcccaattttataaattaggaaatggcagcccaaagaatataagtgacttatctcagaatacacacctgataacttaagctaaatcagaacaaaaagctgtcttctaactctcagttcaatatgttgtccatgatgccccactaatttttctcagtcaagataatagggaaccaattctttagaaacagacctgtcaattgttggaaaaataattatctggagggaaaagagatatttaaataatttttacttatactattaattttggacataatcaactccagtggaattatgctaactttgtatttcacatttatcagaaattatcttcactgatgctttttctttctttttttgggttagattttaaaactttacaaaaaagtttggtataatttagccacatcaagagaactattcacttttttccacaattaaaacaggaattttttgactatatttgatcaatgtttaagtctttttcattactttattagtgtttacatcaaaagaagaagcaaactttttcatacatagacgccttctgtataatagatttgatctggagctcttcactcccggcaacctagaaagagagtgcaatgaagaactttgcaattatgaggaagccagagagatttttgtggatgaagataaaacggtaatgtggttgattatgttaattggctggaaatgttaaattgtacttaagaaagtggcactttcagttattagagattttatgccttaaacacaatcaggattatgtacctgctatctctttctacttccttaaaatggtaattaacctatttagacttggctttacacctaattaactggtttcatagtagttagtaaattattgactgttgtgattttgtgtgtttaatgtttattatatttaaaagtaatcatggggcagagtgaatttaactccaagattttgtggttagtgctctaactcaggcttcaatcatttatggcggagtgaatttaactccaagattttatggttagtgctctaactcaggcttcaatcatttatgactgagtaatttgtcctatcggtgaccttaccttttttgatgacccatatttgtatttcaagtatttactggaagtctgctatgtgccaggtattctccttgaacctgaggatacaaaacatatagcccttgtattcggaagtatattatttggtctatcagtgtaatttgagggaaacatttttaaaagttctttcttagaatataactaaattctgttaatcttgataaggtacaaaacagatggcattgtgcctgtgataatctggcatagtcttgaaaaatgttaactaactgagatgatgatgatgatgatgatgatgatgatgatgattattattattattattattattattattattattattatctggagacggagtcgcccaggctggagtgcagtggagcaatctcggctcactgcaacctccacctcccgggttcaagccattctcctgcctcagcctcccaagcagctgggactacaggcacatgccaccacgcctggctaattttttgtattttagtagagacagggtttcaccatgttgcccaggctggtctcaaacacctgagctcaggcagtccatctccatcggcctaacaaagtgctaggattacaggcatgagccaccatgcctggccctaaattctttacttttgtagatttcataaccctagctcctttttccctttcttaagagtcctattttactttttgttcaataagaacctccccaggtatccttccctacaagtatttgctgtttctattaaggaggaaaacgaagcatatactgtgtagttgtgtctgttggaattttattctgtttttcacaaatcttttataattttatcatagttccttaaaattcatttctattctctcaagtagcactgaacttaaaattgtctcaacaatgtcttcccaaatcaataaatacctttcaataagatctcccagaagggcacagtggctcatgcttgtaatcccagcactttgcggggcagaggtgggaggattacttgagcccaggagttcaagaccagcctgggcttcacgatgaaactccatctctgcaaaaaagaaaaaattacctgggcgtggtgtcaggcgcctgtagttccagctactcgggaggctgaggtgggaggatcgtttgagcctggaaggtcaaggctgcagtgagccatgatcacaccactgcactccagcttgggcaacagagtaatcctgtccggaaaaaaaaaaaaatctcctgagacaaactgagggcttacctcccatagaaaacttcagtctcctgttcaatcatgatagtgggtccacagcctcaacttctacctttggtactttcacctactctctaatgcaataatttcccccaatgctttagtgggggctccagtcaggtgaagggaaaatagtaggcacagtagtaaagagctgggactggcagtaatcccttgacaattagagagatggcagaggcagctgtgggtggtagtgatttaattagagtgagtcacaccctccagcttgaatgaactggtctcctacctatggtgcatgccaagagtttactacccctagtctaggtcattaggaccaaatgaaatgtgataataaagatattgaataaacttgggaattttaccttttttttagattgcattttggcaggaatattcagctaaaggaccaaccacaaaatcaggtaaaacaagaattgatcaaatttaatgcttttctcatcctctctctgttgtaatacattttagttttattgtttgagtttggttgttgcgcaacatacataccttataaatccaaggagatttctcaactatgcaccgggctatctcagacagaaaaggacagattcatctatttaatacactgaaaatcaagtttggtgagatactaggaaaatgagataatgggcttaaagctgttttaaacagctcagctaagtcaagacttgcacagaataaaagcagattctattcatttcaagatgtaagctattttaactttttttcttttttaccattaaaggcagatggaacatttatgctagataaattaagattgttggatcgaattaagtaacttgtagagaggggagatctttatctcatctgtattgatcatctctagctgcattttagtcaggtgtttttttcgccagctattctttcattcctcttaggtagggccccctccatggcaggttatgttgcatagctaccctgagttgcttaataaatattatctcagtggttaataccaaagtatgtctagttgagcagtgaatatgtttatcccacttaatgctgaatattatccatttaataaatggatatttcaaatatttttaaataaataatttttaaataaataaatttaaataacaaaatattttgaatattattaaaatataagtattatattttgaatattattaaaatataagtattatattttgaatattattaaaatataaatatattttgaatattattaaaatatagatatattttgaatattattaaaatataaatatattttgaatactattaaaatataaatagtatattttaaatattattaaaatataagtagtatattttaaatatttaaaaaatatatatattttaaataaataaatatatttatattttaataaataaaagaataaccataactagggctattagaagtgtcatttaaatttttttcaggtagattctctagcacaaagacttgaaagaagtcaacatcaatgattagatgctgtataatgtgtttagaaccaggattaaatttgttgaaatcataggtgatgctatatagttgttatatttatgttattttaatgatttattttaagatggcaacagagagaaaatagatgttatgggccttctgactggattaattgctgctggagtatttttggttatttttggattacttggctactatctttgtatcactaagtgtaataggctacaacatccatggtaagtactaagtgaaattatttaattcatcactagacattctatattattattttaacaatgggtcaagcaaatggctgcctattttcttaaataagccttttattttggaagaattttagatgtatagggaagttgcaaaggttaatacagagagttcccacatatccatcacccaatttcccacattgttaatatcttgtattaccatagtagatttatcaaaactaagaaaatgacattggttcatgactattaactaaactccagactttgatttcagcagttttcccactggtgttttccttctgctgcaggatccagtcaagttaccacattgcatttagctgtcatgtcttcccagtctgtggcaattgtctggtctcctaatttaacatttacataaacaacctaatgatgctatttctaaggtccttcgaaagaatacaagaagtttcacataggtcagcttcatttttcagtatttccttcttaagcaagaggcagataccagtgtcttcacattatttccagaggcaagaagtcctatagtttacgctgagtcacagagttaacagatccacatggctacccaaatagaaacagtgtaactggcttttaaattcaactatttttattaacactttaaattgaagttaataaaataaaatgcttaccaattgaggataatagcacattgataaagcttcagaaagattcataaaggccataattgtttgcataatagaagctcagcatccctattgaaataaaaagtactgattatcttcccagtaagtatggctgagtaggcgtagaaacaatcttattaaaaaaaaaaaaagcagcagatgctaaacaggctattagaaattgatacttatttatcactattcacactttcaaattctatgaacaagctcaaggtggcgatcatgttactttcttttatgataacgatcattttacttatcttttcagcaaaatgggcagtgtttttgtatccctccaaaagaatagaaagtattctttatcatatatattagaagactctttgtcttctaaattaataatagctttcaattcatatcaagtaaactttaaattttacataacaattgacctatattgttcaaaaaatgtcagtgtcatgaaagacaaagacaggctaaagaaataactgttccaaattaaagtaaatgacatgacaattaatgcaatgtgtgatcctggactgaatcctagaccaaaaaaatgaattgctaaaaaggaaaatttgcctggcatggtggctcacacctataatcccagcactttgggaggccaaggtgagaggatcacttgaggccaggagttcaagactcaagaccatcctgggccacatagtgagactcctatctctataaaaaaaaattcaaaaattagctgggcacggtggcctgaggctgtagtctcatctgcttgtggggctgaggtgggaggatcatctgagcctaggaagtcaaggctggagtgagccataattgcaccactgcactccagcctggacaacaacaacaacaacaaaaaggaaaatttaggagaaaatttggatatagctacatgttagataatagtaatgaaccaatgttaagtattccaaatttatgtgaagatcttttcaaaatacttaattctgtagtggttctaaaattctattggcagtcagtaaaaaacagaagataattacaacaacatggcatcaaaaattatttttaattggttaaatatttagagtttttgtccattttaaaagaggattgtacaactattcaagtctaaatacaatataaaaataggcctataagaaactggaagactttaatcacaactgtttaattggtttaaagtttttcttcattgtttcatatccagatataaaatgaaaatagaatgacatgtataggaagggcaccaaactaggaatttggaggcaaaaattctcatgttaattttgccactatttatggagcttgaagcaaattccttgatttttttaagatctttcctcatctaaaagaggaatgaaaggaatagactgtgattcctcttaaagttccttaatatttttttattttgccaaagatgagaacaaattttttgcccttgattatattgtcagaattagagtttttaaagttatttattaaaaagaagcttggctgggagcagtggctcacacctgtaatcccagcattttggaaggccaagccgggcagatcacctgaggtcaggagttcaagaccagcctgaccaacaaggagaaaccccgtctctactaaaaatacaaaattagccaggcgtggtggcacatgcctgtaatcccagctactcgggaggctgaggcaggagaatcacttgaacccaggaggcagaggttgtggtgagccgagatcaagccattgcactctagcctaggcagcgagagtgaaactctgtctcaaaacattaattaattaattaaaaactaaaaagaagcttttacatatatacacatgtaaatgaaattagtaaatataaaagatacattttcctctaaaatttaataaaaatattttctcttgaagaaagtgtattattattattatttagagatggagtcttgctctgttgcccaggctggagtgcaatggtgtgatctcggctcactgcaacctctgcctcctgggttcaagcaattcccctgcctcagtctcctgagtagctaggattacaggcgtgtgccaccacacccagctaatttttgtagagacggggtttcaccatgttggccaggctagtctccaactcctggcttcaagtgatccatctgcttcggcctcccaaagttttcggattacaggcatgagccaccgtgcccagccagaagaaagtttaaagtaggttgtttcatttcatctggtgttaattgcttaaaaaatcatttccattgtgataagagcatctgaaaatgtgctgattatggaggctgaggtctttaaaaagattttatcctgttttttgcctacaaaagtaatacatgcattattttaaaattcaaatattatagaaaggtataatataaaaaatgaaagtcctcataatcctacttttcaaaaataaccactattatgaatttggtatgtaaaactccagatttttttctatgcatatactattcagttggtgcaaaagcaattgcggtttttgccatttaaagtactggcaattgcttttgcaccaacctaataacatattttatgttttcaaaagaaatgttcgttacatgtcctcctctgcaacttgcctttggcactgaacaatataatttaaatatatttccagtgcagtacatttttaaaaaatagtaaaatatatgtaacataaaatttaccatcttaaccgtttttaagtatacagttcagtagtattaagttgattcactgttgtgcaaccaatctcccgtttttctgttttttttttttttattttgcaacagtgaagttctgtgcccagtgaacaaactgtttcccattctcccctctccctaggctttagcaaccactattttaccttttgtctctgaattttactacaataacacctcatgtaagtggaatcatacagtattagtctatttttgactggcttatctagcgcagtaattttaaatcattaatagagtctcttcaaaatgttttattacagcatttcatttatgtttgatgaagtttttttaaattctaaaatatagtaagatgtgattcctttctaaaatacattagtcctagcccagctcctgtttctggaagagaccaccaaggtgtattctccctatcctagaaatagatatggtatagtggttcactgtgtgagctctggagccagactgcctggattcaaaaccctggtacgccactaactagccgtttgactttggaaatgttacttaaacttatactctgcctcagtttctctgtgagtaaattgaaggtaataatctgagccaccacactacatagttccagagagttgccattcacatgggctactgtatgaatggtaccctctggtttgtgtagtatggtagctcagataataactgtatgtatgtcataagggacttacaggatttaaatgacgtgatacacaaaaagtacttaagagagtgcttggtagcaagagtagcaagtactcaataaatgttagctattattattattattattattattattattattattattattattattttgagacggagtctagctctgttacccaggctggagtacagtggcatgatctcggctcactgcaacctctgcctcctgggttcaagcgattctcctgcctcagcctcccaagtagctgagattacaggcatctgccaccatgcccagctaatttttgtatttttagtagagacgaggtttcaccatgttggccaggctggacttgaactcctgacctcaagtaatcctcgtgccttggcctcccaaagtgctgggattacaggcatgagccactgcacccggcccagctattattattatgaatttgcaaactaagatttttctaaaaagctttcactggaatgtttatgtattcccatccaatatttgtatttctttaaaaatatgtctagactgtaaatgaactgcagattctccagtgttcatataaaattaaaacatattatcagaaggtaatatagatagtataatcagaaagtattatattgcaaataagttttcttcaaatttggtagatctacaaaaattttatttggcctatgaaatctccctagcttacctgacctttatgatcttgtaaaaaaaataaaaataaaaataaaaaaaatctcccttagctgtatttataaccatcttccacatcacctgctgttgctaaccatatactgtacaccactttcacactaccttctcatttagtactctcagtatttgtatagtgtattatggcacataaaggagattacatggagtgattaccatttgagtgaggcaactacataacaaaaaagcaacttggatataaacttgtaagatagagaacactcggctgggtgcggtggctcacgtctgtaatcccagcactttgggaggccgagacgggcggatcacgaagtcaggagatcgagaccatcctggctaaaacggtgaaaccccgtctctcctaaaaataaaaataaaaaaaaatcagccgggcgtgatggcgggtgcctgtagtcccagctacttgggaggctgaggcaggagagtggcgtgaacccgggagcttgcagtgagctgagattgtgccactgcactccagcctgggcaacagagcaagactccgtttcaaaaaaaaaaaaaaagataacactgttcttataaatggctaggaatgtcaagtcaagcaggcataccatcagtgtgggatacaactagtcactttggcggacatgggttttagaggaattaactaggaaggggtgtttcaagaaagtggacccacaggagcaaagacaggtactaccaaggctcatataggagatgataagcaaaatagtcttgaccaaagattttttaaaaaaataattgtaagccaaggccaggcacggtggctcatgcctgtagtcccagctttgggaagccgaggcaggaaaatcacttgagcccacgagtttgagatcagcctgggcaacatgataaaaccccatctctactaaaaatacaaaaaaaattagccaggtgtggtggtgtgtgcctttatacccaactactaggcgggcttaggtgggaggagcacctgagcccaggaagtggaggctactgtgagccgtgatcatgccattacactccagcctggacaatgggagagagaccctgtcttaataataaaaaataataataataataataattgtagagacaggatctcactatgttgcccaggctgatctggaactcctggcctcaggcaatcttcctgcctctgcctctcaaagtgctaggattacaggcatgagccatggggccaagcccttgaccagagatttaagacctgtgatgaagagtagtgagtgacttgggaaatgttgtataattggaatggcagccacgaatttacatttgagttgccagacatgaggtggaccacttaagcagaggattaaaaggaaaaatagcctttggggaaggtttttgagaatgtggtaatatactaggttctaggaacacagcggtgagtaaaacaagcatagtgtctgcccccatggctcttatagtctggttttcttaagtaatgtgtactagagctgggagaaacaggaagacagaggaaaaccaacaaggatgctagcatggcaattcagatgtgaggtaatgagtttgaacctgtcttcaaggaaaaagaagtcgtagaacttgatgcctgattagaaagaacttggggccacacgcggtggctcatgcctgtaatcccagcactttaggaggccgaggcaggcggatcacgaggtcaagagattgagaccatcctggccaacacggtgaaaccccgtgtctactaaaaatacaaaaattagctggacatggtggcacacacatatagtcccagctactcgggaggctgaggcaggagaattgcttgaacctgggaggcagaggttgcagtgagccgagatcccgccactgcactccagcctggcaacagaacgagactctgtctcaaaaaaaaaaataaagaaagaacttgggaatgttggaacaatatgacttgaacctaagcttctgtgctgaagaaatatatgtatggaagctgggagcaagaaaacaaaatttggatttgacaggacaaaatggttcatattttatttatttattttttttgagacagagtttcgctcttgttgcccaggctggagtgcaatggcaaattacaggtgtgagccactgcacccggccaaaatagtttatattttaaagatagctcaagaaaggataaaacaacaaagagactaataacccacgttttttttagtgaaggacttgaatggacatttctctaaaaatatatgaatggccaacaagcacttgaaaggtgttcaatgttgttagatattaaggaaagggaaattaaatcaaaaccacagtgagagccaggtgcagtggcatgcacctgtaattccagctattctagaatagctggaataataatttttaaaataacaagtattggcgaggatatggagaaattggaacctcatattcacattgccagtaggaatgtaaaacggtacagccactgtggaaaagtttgacagttcctcagaaagttaaatgtagaattactgtatgacccagcagtttcacttctagatttgtatccaaaagcattgaaaacaggaactcaaacagatacttgtacaccaatgtccatagtagcattattcaaataaccaaagggttgatggaaatagcccaagtgtccatcaaaatgtggtatatccatgcaatgaaatattattcagccataaaaaataatgaagttctgatacgtgctacaatatggatgaaccctgaaaacatgataccaagtgaaagaagccagacacaaaagaacaactgttgtatgattccacttatatgtaatgcctaggataggcaagatctaggataggcaaattcacagagacaaaaagtagattagagattaccttgggctgggaggatagggatgtcttagtttatttgtgctgctatagcagaatacttgagactgggtaatttataaggaacagaaatttatctcttgtagttctggaggctgggaagtctaagatcaagggaccagcaggttgtatgtctcataaggacccagtctctgcttccaagatggtgccttgaacactgcatcctctagaggggaggaacattattcctcacatggcagaagagcagaagaaagagagggcactactcctgcaaccccttcttatagcagcattaattcatttatgagggcaggaccctcatgacctaaaagcctcccaaaaggccccacctcctaatactgttgcattgaggattaagtttcaacatgagttttgagcggggcaaaaacattcaaatcatagcaaggggaatggggagttattgtttcttatgtacagagtttctgtttgggtgatgaaagggttatggaaatagataatggaaatagttgcaccttgtgagtggaattaataccactgaaatgtatacttatgaatgattaaaatggaaaatttaatgttttatatattatatgtaatgttatatattgtatataatatgtgtatatgtatacatatatatatatatgtacataccagccacaaagtctttttacttggaaaacaaaaaaagaaagggtaagaatttggccaggggtggtggctcatgcctgtaatcccagaactttgggaggccgaggcaggcagatcacctgaggtcaggagttcaagacctgcctagccaacatggtgaaatcccacctctactaaaaatacaaaaattagctgggcatgatggcaggtgcctgtaatcccagctactcgggaggctgtggcaggagaatcactcaaactagggaggtggaggctgcagtgagccgagatggctccattgcactccagcctgggcaacatagtgagactctgtcttaaaaaaaaaaaaaagaatttaaggcaacaggtgtgaaattaagattcacctattggaagattaaaggtgaagtcatgagggtaggtaagttctctaagtgtaataaaggagctggacacagtgtctcacgcctataatcctagtactttgggagtccgaggcacatggatggcttgagcccaggagttcaagatcagcctgggcaagatggtgaaaccccatctttaccaacacaaaaaatagcctagtatggtggtgcatgcctgtagtcccagctacttggaaggctgaggtgcgagaattgattgagccggggagattgaagttgcagtgagccaagatcacgccaccacactacagcctgggtggcagagcaagaccctttctcaaaaaataaaataaaataaagttggccgggcatggtggctcatgcctgtaatcccagcactttgggaggccgagacgggcagatcacgaggtcaggagttcgagaccagcctgaccaacatagtgaaaccccgtctctactaaaaatacaaaaaattagccaggcgtggtggtgcgcgcctgtaatcccagctactcaggaggctgaggcaggagaaacgcttgaacccaggaggcagaggttgcagtgagcccagattgcgcttctgtactccagcctgggagacagagcgagactccgtctcaataaataaaataaaaatataaaaaaataaagtaaagggacagaagggaaaaggacaaagcccctgaaggatgcccacaataagggtgcagaaagaagaggagctgccagcaaagacagaagaggaacataaatggtcattctagccccatgctggaattcttgaaaagttccccaatgcattatgtgaattatgggcatgaactaaggagtttgtccctataaagcctataaaaaatttgagaagttagagaaagtaaggaagaatttgtttagcagacctctattcatttcccctatttagcagacaggaaatgagcaaggtctttctaggacttttcactaagattttattcagtgtgactttctccacaagctgggagtaatccacaagataatgaagaaataggcaaaatttgtctttagacattcttcttttcttctttttcacctcattcacaatgtttttcaaaaaagttcacgtatgtcctcatatgcaatagtttcactcaatgactgtgaatagcacagtcattatttagtgtcctcgtgcttacactttcttctctcccctgcttttcttcattttccaacttttctgcgtcactatgtttttcaccttttaccttttttttcccctgaaacatttctagcttcttccctgcataagggatggagcagaattcgagtgcaggaagtaaagtggcactgtgattatgacatgtcttccgggtgtgttattataaaatttaaaaccctggataccttttattttaaaagtacgattagttatacttaacattagcacagtgtaatgcttcttgttcacagatcatctttatatccattgtctcactttgttcccctcagcaactctctgagtttcagaggatattccaaacttggtttactagacattctcttatgttagcattaactggtaaatacttactaaagtacttttcatctattgtcccaagaaattcttccagcagagttatttgtttctatattttgcaaatctgaaagtagggggagggacaaagaagctgagaaagaaaagaataaaaaataagatcatcgtcagaaaagtttgcctcattcatctgtaaaaacaagccaagaggctggcagcggtggctcacgcctgtaatcccagcactttgggaggccgaaacaggtggatcacctgaggtcaggagttcaaaaccaccctggccaacatggtgaaaaccagtctctactaaaaaaaatacaaaaattagccgggtgtggtggcgggcacctgtaatctcatctattcaggaggctgaggcaagagaatcacttgaacctgggaggtggaggttgcagtgagctgagattgtgccattgcactccaatctcggcaacaggagtgaaattcagtcgcaaaaataataataataataataagccaagaaatgaaaagaccttttcatttcttagttcctatattttgtggaggaaaacaggcatcataggatgttgccagtttgagatgttattagtgcatactttctgatttcagtcatgtaagattgtgatgtgtaagaaagcactgtgtagatatttaatgactgatgtaattattacattgtttccatacattaaattttgaaagtcaacatgtaaaaatttatttattcaaataaaatatctgtctcctcctttatcttgtaagcaaacaaatagaacttttcatcatgagctaatgaatgtggcaagtgactgcctaccatgaatacattccagatttctgacagaggaggaattgtgttgagctctctaagtaaacttgtgatcctctcagtcacctctcaactattgaagggccaattatccagttcctagatttacacagaccttttgcttttcttctttctcgcaatttttctctctccttcccttccaattcagatctcattattacctcaaaaggaaaaatggtgctctaagagacatattgactgatttaatttggaaaagttggcagtattttgggcctgctaaactatttcttgatgggaagaatattgtaaatattgactagaagttaggggttatctatgcatttttttccttcttcctttttttgtgggtacatagtaggtatatatatttatggggtacatgagatgttttgatacaggcatgcaatgtgaaataagcacatcatggagaatggcttatccatcccctatgcattttaattatttcattagccataactataggaggttaatgtatgtatagatactttataaatagcctaaatagattgatttattaatgtctaaatcataatttgtacttcacaagtgagaaaggaaaaccataggtttaagaccccaggcccatgttgcatttcattggctgacaaggtttagtgaaaatggtgagacttgaactaagccatatatttttttttaagtgttaggcttagattagagctgaggggagaaaagatgatatttggagaaagggaacgatactagtgaaagcacagagaagggctgagaacttactgcccatgcaggggagtgtaaagaagctgccttggtagagcagagagctgtaaaaaataaggtgtggctgcagtaagagaggctttgaagagaaggcacgggacttagaacttgactcagctggaagtatgctgcgggtttggcttctgaggagaagaatgacgtgaagaaagtactgcttaggaaggattggccaggcagcaggactgcaggagggaatggaggagagagacaggcatcagcctattgtgattacctctgtgacatctatttccttggtctggaattgcgccacctttcaacaaagcctgaatttggttttggtttcacatcatactttcaaaaagttttaatccaggagtaagagaaaagggaattcacttgttttgagtcctttttctagtgcaccagacactgctagaagctttccatgcatcttgctcaatccacacaaaccaactctgtggagacagctgatactagacccattatagagaggagaaaattgaggtcggtaacttgcctttggtcacatagttaggaaatgacaggatcagatttctctttttttttttttttttttagatggagtctctctctgtcccccgaggctggggtgcagtggcgtgatctcagctcactgcaacctctgctcctgggttcacgccattctcctgccttagcctcccgagtagctgagactacaggcacccgccaccatgcccggctaattttttttttttttttttttttgtatttttagtagagacagggtttcaccatgttagccaggatggtcttgatctcctgacctcatgatccgcccgcctcagcctcccaaagtgctgggattacaggcgtgagccaccacgcccggcccaggatcagatttcaaacccatgtctgactcaaagctcttggtctttccactgtaccaagactttcagagtctgggggtaaaataaaactgttatattaatacattgtgtttaatgtttattaagatagttggttggatttttaaatattgtcctctcaacctaaaaatgctacctttcctagacctaaatgttgtctctctgcttagctcttcagccgtctatgaaagggggaggcacactccctccatcattttcagaagacctgaggaggctgccttgtctccattgccgccttctgtggaggatgcaggattaccttcttatgaacaggcagtggcgctgaccagaaaacacagtgtttcaccaccaccaccatatcctgggcacacaaaaggatttagggtatttaaaaaatctatgtctctcccatctcactgactaccttgtcattttggtataagaaatttgtgttatttgataggccgggcatggtggctcatgcctgtaatcccagcactttgggaggccaggagttcgagaccagcctggccaacatggtgaaacccggtctctactaaaaattcaaaaattacctaggcgtcatggggcatgcctgtagtcccacctacttgggaggctgaagcaggagaattgctcgaacctgggaggcagaggttgcagtaagctgagatcacgccactgcattccagcctgggcgacagagcaagactccatctcaaaaataaaataaaaaaagaaagaaagaaaagaagaagaaaagagaagaaggagaaggagatgaaggaggaggaggaggagaaggagaagaagaagaagaagaagaccacaaaagacatgactatccaactttttatgacaaactgcaaggaataaaggaagaataagtccatgtactgtaccacagaagttctgtctgcatcttggacctgaacttgatcattatcagcttgataagagactttttgactctatatccttgcagttaagaagaaagcacttttttgtaatgtttgttttaatggttcaaaaaaaatctttcttataaagagcataggtagaattagtgaactctttggatcctttgtacagataaaggttatagatttcttgtgttgaatattaaaaaagcaaggatgtctaaccattaagattatccaaagtcaggctgggcgcagtggctcacgcctgtaatcccagcactttgggagggataggtgggcggatcacctgaggtcaggagtttgagaccagcctggccaacatggcaaaaccccgtctctacaaaaatacaaaagaaattagccagacatgatggcgggtgcctctaatcccagctactggggaggctgaggtgggagaatcgcttgaactcgggaggtggaggttgtagtgaggcgagattgtgccattgcactccaacctgggcgacagagtgagactccatctcaaaaaaaaaaaaaaaaaaaaagattatccaaaaagatattggacctactctttcttaggatttttttggcggggggttagaaatacttcacagaatttgacatttcagtataaatctgtgaccttaatataatcacttggttttatatgttaaattattgcacagcagtcatcatattttgcagagtttagttcttaactcttgctgtcagtcatgttttattataggtagtggggtcagtagttttcttcttctaaaaaatactatttgctatgaagttagttcttcagaagatacaagtttgcaatgaaaaggatttgcaagggttgttatgctatcaaataaacagacctaaaatctaggagacactagaacttaatgaagttgcccctgttactgattagtaaatactcccatcttcgttgcaaaattatctctctgtataactacatatgattattttgaaatttgttaaacttcataagtaatagtttgagaatgtggaaaaagtaatttgcttttctgctcttaaaataatattgattaatgttaccagaaaccttttgcatctcttaatatgtctgaacacaaaaggaaaacaccataatcatataaacccattctttgtctcttcttctaaatcatatgtataaccagtttttccttaagaatgtagcagcatataagctataaatttctggagtatatgcacacaaatttatctgggtgggtatgtaggtatatgtgagtttgtttcctcttccaggagctcaagaaataacatactcctgaaaaatagaatagaaatttctgtgctttatgtttttgccaggctattacattttcttatcatttaggatcacttataaaatgatcattgtttattttgttttataatttttacaggagtgagactgcaaacccacatgtttgatagttcctaccaaattaaaagtttagaaagcataaatcatattacagtgcatatgtgagtgtatgtctctcttttaagatgcatcatcttaaggcagataaaagtaagtccttaatcattacagactgccaaagactttatccttttagattctcagtctctttgttgcttgttgcaaataaatcatctagcaacatttacatttaattaggaaatctaacttgcttttaaaagttacccacgttgcatataaaaatcttgctattccttgtgtcttggctttacataagcacttttgctcatgtgactttgcactttgcacttattttaatcctctttaaagggctacaggcaaattctactttgccataatcacactaaggcatggaagaacaacttgcccagaatctagcaggttggtgacaactgggtttagaatgagtgagcacacttttctagtcccatgtcatgcctataaaattacactgcctcgaattatgaaattcagggatcttgtacataattctaagtttgggacagaaatttacaagcatttctcatatatacatacatttatatatgtacatgttacatatatttagatgtattctcatatacatatgaaaatatttatgatgaatagaattataagatatgtatgtatcttgcactgaatcataatttgaaatatttcatgaattcatttacttctattgactcccaaaattctaactgcaagctagcttcagaacctgtgagaaccccaccccacccaagcagctgcctagatttgtctactgctatcattttgtgtaaagcagttgctctaacttgaatgagtctagaattcatcattaagattgtgatatttatagagcatccaatgtggagatcatgatactttaaatataaaaaggaaaatatgatagaactgttattgacaaatgcttataatgattgaagggaaagtatctcaacattgtatcagtcacatatatttctgttgctttcaccattttctattcctgttgtaagtttggtggtagatttagttttgtttggtttatctgttttgtttgtgttttgtctcctggcaattgattagtgttaatcattaaatctattttgacacaaggttttatatataattagatcagttttccactttattacaattaagaaatgagtaaaatatggatataaaaggagaattggattgaaaagacaaatacacatttacaaggtcatacctttggtaggacagacaattccatatagaatattctcttttgataatgaaaaaaattaaagagagcacaaactttgactatgtcaaagtatttttatttttaattttttgagacaaggtcttgctctgctacccaggctggagtgcagtggtgcaatcacaactcactgtagcctgaacttcggggctcaagcaatcctcccacctcagcctcctaagtagctgggaccacaggtgcacctcggtacacctggctaatttttgtgttttttgtagagacagggtttcaccatgttgcccatgctggtctctaactcctgagctcaaggaatccacccacctcggcctcccaaagtgctgggattacaggcatgagccaccacactggactgctgtgtcaaagttttgcatcttttttttttttttttccagaaggagtctcactttgtcacccaggctggagtgcagtggagtgatcatggctcactgcaacctccgcctcccaggttcaaggatttctcctgcctcagcctcctgagtagctgcattacaggcacctgccagcacgccttgcaaatttttgtatttttagtggagatggggttttgccatgttggccaggctggtctcaaactcctgacctcaggtgatccgcccgcctcagcctcccaaagggctgggattacaggcgtgagccactgtgcctggccccaagttttgcatcttttaatgccctctgaacaaatacatagagaaaactctcagaacaattaaaacctgcagagcaacagtgtcctccatgtcttaggtttcaagtttgcctctaaaattctaatccatatttttctacttctcagataatttatgtgtgtgtactcttcctagacgtacaagagactttttaatgctaaatatttgtcagtgcttaacaaaaactcaatttcacattactcatattgtttttgttttaattgaatgtgaattaaatttttattagttatttgatttggaatgttatgtatgccattaacactattaggggaatctctagcatttctgtatttttaaagaatttgattcttttgtagattctgcctgtgtggtcattttaaaacatgtgtgacatatatcagtaccttcattcttctatattttgtgtctcctccaacctccaactttttttgttttttgaaaaatgtttctctaacacctcaacagtttaaggtaatttagtacacatatatcagtatttttgtgatctgaaaaagcaacccattttctaaattcatatttttcctaaaactttactatgtttttattttaagaggtttcctgttatatacactttttacacatgcaaataaactttataccaagtgagta

SEQ ID NO: 81 - DNA, 114874 bp, Homo sapiens
gttggagtgagctgaggacacagcgcatttcatttgatgcacgaggttgctgacagttctgaggagagcagtctcagcagctgggaagggcagaggtcagacgggcaatgttcagcagcagacatgaagcaaactgctggaggtaagcattggacatctctgcaggcaagtatgattagaaaggaaagcaacaatggttgtagctggacaaagatggcagagagaccaagtttatgccaatggaaatgatccaatagaaaggaagagacagataaggtggaaaaatggggaaatctaaggagaggagccaagcaggagagagggggctgagctgacatggagaaaccggccttgaaaagggcggctccgagctccttgttgcatgcagatgggcagttagtcacatagggctttggggtcaaaattagggaacttgaccatccatcctgaaaactacaaggagctctggagaaatctgaagtcagatttgcgtttgtgaagatcactctggcgaaaagggtcaagagtggatgacagccagcatcgttggtgacaaggggttcagctaaagtgtgggtggcagggtgaattcaggggaaatttagaagattgaaccataaagtgtggctagtgtgtgatgaggatggtgagaggaaggaatccagaatgactgctagggtttttttctgggtggcaaaatgtcggagccatttgcagacaatagagaaggagaaggtttgcttgggatgctgataaacccacctttgaacaagctgagcttgagacagaaacattcagaagggtgctactcgtaagggtgtggagctcagaagagagatcatctgcctgtatgtggtgagctgtggccatggtgctttccatgggcttcatgtgggatgcattccttctgctggtgcaagtgcagcaggaagccatgaggtcatcttagaaaaggcatcagaggtggggatgataacttaacagccttctaaaggtgcagcagaggccacaaaccttttgaatttggtgtgaaaggagcttgaggatcagcaggaagtaaaaacagccccagttttatgaaactcttctcggaagagctatctggtgtttgtgggggcttcataggcaggtaaagtccaagggacactgtaagggaaggagagtctcctgagccagaaatagtgagtactaatgaggagaatagttttatttttatttttatttatttattttttaattttattattattatactttaagttttagggtacatgtgcacaatgtgcaggttagttacatatgtatacatgtgccatgctggtgtgctgcacccattaactcatcatttagcattaggtatatttcctaaagctatccctcccccctcccccaaccccacaacaaagggaatatcaccacagatcctacagaaatacaaactaccatcagagaatactacaaacacctctactcaaataaactagaaaatctagaagaaatggataaattcctcgacaaatacaccctcccaagactaaaccaggaagaagttgaatctctgaatagaccaataacaggctctgaaattgtggcaataatcaatagcttaccaaccaaaaagagtccaggaccagatggattcacagccgaattctaccagaggtacaaggaggaactggtaccattccttctgaaactattccaatcaatagaaaaagagggaatcctccctaactcattttatgaggccagcatcatcctgataccaaagccgggcagagacacaaccaaaaaagagaattttagaccaatatccttgatgaacattgatgcaaaaatcctcaataaaatactggcaaaccgaatccagcagcacatcaaaaagcttatccaccatgatcaagtgggcttcatccctgggatgctaggctggttcaatatacgcaaatcaataaatgtaatcaagcatataaacagaaccaaagacaaaaaccacgtgattatctcaatagatgcagaaaaggcctttgacaaaattcaacaactcttcatgctaaaaactctaaataaattaggtattgatgggacatatctcaaaataataagagctatctatgacaaacccacagccaatatcatactgaatgggcaaaaactggaagcattcccattgaaaactggcacaagacagggatgccttctctcaccatgcctattcaacatagtgttggaagttctggccagggcaattaggcaggagaaggaaataaagggtattcaattaggaagagagggagtcaaattgtctttgtttgcagatgacatgattgtatatctagaaaaccccatcgtctcagcccaaaatctccttaagctgataagcaacttcagcaaagtctcaggatacaaaatcaatgtacaaaaatcacaagcattcttatacaccaataacagacaaacagagagccaaatcatgagtgaactcccattcacaattgcttcaaagagaataaaatacctaggaatccaacttacaagggacatgaaggacctcttcaaggagaactacaaaccactgctcaaggaaataaaagaggatacaaacaaatggaagaacattccatgctcatgggtaggaagaatcaatattgtgaaaatggccatactgcccaaggtaatttatagattcaatgccatccccatcaagctaccaataactttcttcacagaattggaaaaaactactttaaagttcatatggaaccaaaaaagagcctgcattgccaagtcaatcctaagccaaaagaacaaagctggaggcatcacactacctgacttcaaactatactacaaggctacagtaaccaaaacagcatggtactggtaccaaaacagagatatagatcaatggaacagaacagagccctcagaaataacgccacatatctacaactatctgatctttgacaaacctgagaaagacaagcagtggggaaaggattccctatttaataaatggtgctgggaaaactggctagccatatgtagaaagctgaaactggatcccttccttacaccttatgcaaaaattaattcaagatggattaaagacttacgtgttagacctaaaaccatacaaaccctagaagaaaacctaggcattaccattcaggacataggcatgggcaaggacttcatgtctaaaacaccaaagcaatggcaacaaaagccaaaattgacaaatgggatctaattaaactaaagagcttctgcacagcaaaagcaactaccatcagaatgaacaggcaacctacaaaatgggagaaaattttcacaacctactcatgtgacaaagggctaatatccagaatctacaatgaactcaaacaaatttacaagaaaaaaacaaacaaccccatcaaaaagtgggtgaaggacatgaacagacacttctcaaaagaagacatttatgcagccaaaaaacacatgaaaaaatgctcaccatcacgggctatcagagaaatgcaaatcaaaaccacaatgagttaccatttcacaccagttagaatggcaatcattaaaaaatcaggaaacaacaggtgctggagaggatgtggagaaattggaacgcttttacactgttggtgggactgtaaactagttgaaccattgtggaagtcagtgtggcgattcctcagggatctagaactagaaataccatttgacccagccatcccattactgggtatatacccaaaggactataaatcatgctgctataaagacacatgcacacgtatgtttattgcggcactattcacaatagcaaagacttggaaccaacccaaatgtccaacaatgacagactggattaagaaaatgtggcacatatacaccatggaatactatgcagccataaaaaatgatgagttcatgtcctttgtggggacatggatgaaattggaaatcatcattctcagtaaactatcgcaagaacaaaaaaccaaacaccgtatattctcactcataggtgggaattgaacaatgagaacacacggacacagaaagttttatttttaaaaaatcagtatgggagagaattgaaatgaggcataatatctaagctctgaaatttcagcctgtaagagacaagtgtttttaagtgctaaattctgtattctaagggcaaagcatcattttaaacactttgtgaatagtaaatcattcagtgctctccacagtccaatgaggtggatcctactattgtccgtgttctgttggtgagtaagcaaagaccctacaaaggtcatatggctggtgtacaccagcttggctccaagcctatgttctaattgtcacacagagaggcaaacttcagtgtaaagacagatgcaaggtatttaggaaagcaaatatgtcaactgcacaggctgcattttctttagattaagtagcagcagctgcagatgaagagaaacatgatgagtgttcaggaaaaatgaaagatgacagcaacctcgggtaagcaaactattaatgtaaaggataacttcagctgacacggatggagaagaagagaataacattattcttaaggttgtgacttgttctttaactataactgaaactcaactgagttaaacattcatttgtggtttagacataattttgcagatacctgggacctcacagacaggagcaagggaaatccttccagaggtgtcaggggacctcaaacattttaaattgtgaaccactttaaaccctttattttcccaaactatagaagatggagcttatgttataaaacctacataaacctcataacaaagcctgaaaaagatggcactaaaaaagtaggcaatatgtcgatctcacttattaacacaaaataatagctaatctagtttaacagactacaaaaacaataattcaccatgactggcctggcatggtggactcacgcctgtaatcccagcactttgggaggccaagggcaggtggatcgcttgagcctagcagtttgagacaagcctgggcaaaatggcaaaaccccatctctacaaaaaacaaaaaatacaaaaattagctaggcatggtggtgcgcatctgtagtcccagctacttagcagactgaggtggaagatgacttgagcctcggagactgaggctgcagtgagccatgattgtgccactgcactcctatagcctaggcaacagagtgagactgtctcaaaaataaagagtatttcatcataactcaatttgggtcatctcttgactaaagatagttaaaaattattaattctaacagtgctttgtattgaaagaaaattcttatgattttctcagtagatattaaaaacaatcagaaataaaccaatgcacttatggtcagttgatttttcaagagtgccaagataatttaatgggggaaagaataatcttttcagcaaattgtgctgggacaactggatatctgtatgcaaaaaggtgacattggatccctacctcacaacatataaaaaaaaaaaaaccctaaaaatcaaagacttaactgtagtagtcaaaactataaaactcttagagaaaacatagatgtaaattctgagaattgaaaacatatgtccacataaaaacttgtacatgaatattcacagcaacattattcataatacacataattcacctaatacagaaagtaaaaacaacctacatgtttatcagatgatgaaagaataaacaaaatatagcatatccatacaatggaatatagttcagccataaaatgaagaactgatcccatgttatatacggatgaaccttgaaaacctgtgaagcgaaagaagccagacacaaaaggcaacataacgtataatttcatgtcaatgaaatattcaaataggcaaatttatagagacagaaagcagattagtggttgccagggattcaggggaatgggaggaatgggacagactgctaacaggtatgggatttcttcttagggtgatgaaaacgttctggaattagtggcaatggttacacaactttgtgaatatgccataaaccactgaattgtagtatgtgaattgtatctcaatttaaaagacttataataagtacaacaaccattcctgtaataagttccttagaaactaagaataagatttttttcagataacatagaatatctcaaacaaaatagcaaaatatctacatgtacttccattaaaatcagataaaaaatgtcatttattacaatttttatttgacattgttctagaagttacaaccaatgcataagatgtgaaacagaaatgttgtatacaatagacagaaaataattttcagaaaaagataatatactttgaaagtgcaaatgaattaattaaaattatggaaaaaataatcaaaggatcaatatataagatggatttcaagaacttccttttatattagacatgactaattaggaaataacatggaaaatattccatccactagataagtagctattaacagaaatattgcaagagtgatgaaatgtctaagtgattatttttagttagtaattgttgataaattttatttcttctgtagtttttattattttatattttctatattgatcaagtatagcttttagaataaaaaggcaataaaacatttaatcaagcattactttgtgtgcacctatactcttagctactggggaggctgaggtgggaggatggctagtaccaaagaggtagaggctgcagtgagctatgattgcaacactgcactccagcctgggtgacagagcaagaccctctctctaaaaaaaacaaacaaaatattaccttagtaagaagtgactttggggacctcctcagttcacacttgtagtctgcaagccatattgtaagaaccccagctcttaacttcttaatccttagttcttcagaattaaattagctttaattttaagagcactttataatagatgatggcccagccaactcaaggcaattaaattacatcattctttttgagatgtgtcctcattgtttaccaagggtgaaagctatgagaggaagatcttgagagagaaccagggtgggaactcagttgacagagggtaaagatgatgagtctggggacggaaacaagatggcatcaacaggaccatacaagaagaagtggaagttgaagagaatgaaggaaagatgaagttcaataaggcagatagaggtgggaagagagaagtggcaggtgttaagaataacatgtaatgctttgacctgaaatgtgacatcacaatggggtcctggaagggggattgtgggggaaaacgagggtcatgtcaaaatggtggagtcctgacagacctttcatgagaatttctgtggtgctcagtaatgggttaaattgtgtcctctcaaaattcgtatgttgagggctgggcatggtggctcacgcctgtaatcccagcactctgggaggccgaggtgggcggatcacttgaggtcaggagtttgagactagcctggccaacatggcgaaaccccatctctactaaaaatacaaaaattagctgggcatggtggtgggtgcctgtagtcccagctacttgggaggctgaggtgggagaatcacttgaacctgggaggcggaggttgcagtgagctgagatcatgccactgcactcctgcctgggtgacagagcgaaactctgtctcaaaaaatcatatgttgaatcctaatccctagcacctcaaaatgtgactgtatttggagttaaggcttttaaagaggtaaattcatatgggagtgcctaatccaatatgaccagagtctttataagaagaggagattaggacccaggcacacacagagagaagactgcatgaagacacaaggagaagatggcatctgtgagtggaaaaaagaagctcagaagaaaccaacccagtgacaccttgatctccaactgtgtcacagaactgtgagacaatacgttttttatagtttaagccacctggcctgtggattacggcaacctgaaaaaatgaatatagattctgaagagcaggagacagagacaggaagacagcagccacaaaggctcagggaggtccacatttcaggtagggaggcttcccaggtggggtccttaggggcacaagcacgtggtgagcactctgtccacatttgttgatgtaaatgctggtaatagcataaatacatttgggagcaagcaactcacttttggtgaacacagggtggtctctggcctgagcacagagggtgatgtgggcacatgtcagaaggttttgcagaaagagtcaggcgtgtggggatgtggtgctactttcagcctcaaatgcttccctccctgtgaccagaaggtcccacagaaaaatgagctgggcacagggacaaagaggatgtgctgagctttagaaaagacagagtaaagagattcatgaaaatgtcaggtctacagcccacagcctgggtaccagaagccagagctcatgtgtgcatgtgtgtgcatacatttgtgtgtgtgtgtgtgtgtgtgtgtgtgtgtgtgtgtgtgttacctgctgctctgcactgggccatgctaacacctagctcgggccaagcacaaggaccctgtgaagaggctcacaaatgactcctgactcctgaggatttatgtaccatctgctgctggacttactgcagtccctccaagcacaccctcaaggactactgagctggggtgccatcagtcttgggaaaagagagtgagaattccctaaagcaatgtttggcaaacttgactactattcttttcaaaggccaagaaacattcctatggaccctgccttgacttcagttattgctgtggaaataaagcagcacaaacacaaacagctaagcttatagttgctttacaagtgcaaaacaaaaaccaaatgtgtaaattaaacacaattgcaaacagcaataaaactcaaactaacaacattagtttaatgtgactatgggtgtttgtgaaaccgatttgcctcttctgtgaatatggaactgaatgccattcagattctcctgatgggtgatgggctctcatgccaagggctgggaagtgagtcagagccttacaggagtcgcatgctgatagagcttgatgcctttacctccacaggagtcaaactgccacgtgtgtcagaccagctcatactagactttggttacaatccattgcttctctaacacttttagtctagacttgctccaagctgggagtctttgtgtctctgtagaggacttacagaggtcttattcccttatttctaagttattaagaatgcagaatgggaattttcctgaagcctaagtcttctgcttggattcacaaaacatcagaactgcatttactgtaacatctttgacatggggaggaagcaatttataattaatagtaccttacaatagatgaaataatgtaatatgtatgatactgatcaataattacatgatgcctatgagcagcatatatataaaaacactgagatatcataaaagtaataaacaagttttagttttaagttttacttcgaaaaaaatgaaaacttacagaagttgcaagaatagtacaatgaattccatatgctctttatctagatctactgactttcccatttgcctctctctccctgtgtctctctctctttccatatatatattatacaatacatattatagataaacttgttatttttgctgaaccatttaagagtaatttacagtcattctattaacaccagatacttcagtgtggatcgcctaagaacaagtgtaaaggcattctctttcataatcatgctcaggaaatgtatgtagtatacaatatagtccatttgccagtcataccaataatgtcctttttagcatttttttcctgatcccacatcaaggatctaggatcatacgtttcacttagttgataagtctttttaacctcttttactctgaacagttcttcagtctgtcttttgctcactgaatgttcaataaaagtagaaggcatagactgagatttttagtcttatacatcagtggtcagttctaagatgttttctttgtggtcagttttatagacatctgtttggttcctagtccctccctcatttcaatcacctccatctggagccttctaggaatctggggccatgtctttccgtttcctgggagctggtccaggttgctgcatccagccggcctgcagagcccttggcatcagctcacaatcacgtccctctattggggtcaccaatgaggttggttagaagctatttctatctagacatcctgtcaggcctatagcttcacatttctgtacatttcgggaaaaacagtgtagtccatactccttccccagttgtgcagggagaagacggtgctgaaggtttcatgtaaactctgccccaggggccttaggcatatctttctgattggatggctgcattgtctgtaaccacgatctctcctctttcttatcctttccctgctctctcagtcacagctgataactgcttttctctagagtgaactctcttttagtggcaattcaagcatgtagctgactgcttttagctgtaaaatgcctgtgaacaatagggaggagcaaatattcaaaattacttttagaaacctagactgaaaaagtaacacttggaaatctgctaaacaccttagaagaggggtgtttcgttttgcttgatggtcttagtttagggatatatttgctgtgtgcaaggtccattacaaaaccatgctgtactcttccatctctgacccaggttctaacaaacaattggataatgaaagaggaaaagccccggcctgccaggtgatagcagaatgcacttgttggagaaaatctggatttctaagattctttcagtggcaactggtagaatacaggattagttgagtaggctctccatatagcttagtgtccacaggaatctggatcaactttagaatggtttgaacaccctcttcttatgaggtaaacaaaaaatagaattggattgtattattcttccaattcagtacaaagtaagacctgatagagccaaggtatggacaaagaagcctgtgaaggattttcaaatggtcctaagcttgtgaatgagtgagcaggcagcagagctaagaaaaccatttggaaggcctttgccaatgtagtccagaagagctgaaaggccaagtcttatccgggtcactggctctgtctcccatgagggctgagtatattcccttgttcctgtgttcatgcagcaaaggttttaccaggatgatcagttagattatatgggaagctgaaaagtaccagcagtgcacacagctgtaaaatcagcacaatgttacctgtagcagaaaagtacaagaaaagcactttctagcctcaaatctttggcacaaccccagtttggtaaagacgaagcaagtcaagggtggcaggctgaatttctgctctgttttgcaatgagagttggatatttagcaatatacaacgaccaaagcaggagttgcctcctccaagggtggctgacacatctaaggggtcccttctgcttttcaccaactgggagagtaaattgagaccagcaggttgaggtgggaggttaccaaggataccaaatggccctgccacatctctagctgctcttagtacagccatgtcaagacgccattttacatgtgtcaccttcacttgacaaatgaaattcagagaggttgtgctgctccaggacccaaggttgttgcccagccagagcgggtcacagatccactttcagaaccagtgctcctcttcagacatcctccctcagtctgccaaacactgccccaggctccagggctgagtcaacagtctgcagtcagagtccaagttcccagttcagacatttggtgccccacagaaccttgtacgggtccctggtcttctttgagcctgaatttactaatttgtaaaatgaggcctaggacattatgtggatgggacgtgaggctcgtttgctcatgtataaaattggtttccaaactctggtctggaagcctcacttggttctagtttgcattcctgggctgcaggagtccatctgaccccagttctagtcctcacttcttgtccttggcatcatagccaagtacctttgttgccaactcactatcgggtcctcaggcccttccaccaacccaaattatagatggggctgctttctccagcctggctgccttgatggtcagtccagtccctgcagggccctggtccacagatgagtctcctagctggaggatcccatggggtccagagacctctggaagtgcctggggttcagagatgtcacagagcctttgcacccactggcctggggtgcctgaagaggatggtccctctggggaatgccctggggctcacactagtgggctgcaccctctttccatgccacccacacctcctcactcccttagagggaaggagatgagggccctgtctcctcctcctcctacagggacccactcccaaccagggcccacctgctagctgctgctacccctcactggaactccacaaagacctctcctgatagacacacacagaatagacctaacatgtgcttttcttgcttggagatgggttaggctcagaccctaagtttagaacagtggcaaagagaccaggcattggctcagagtgacagggctctgtggttgtgtgacatgggtctctttcatgtggctgcttctgcttccttatgtatagtaataatagtagtgttcactgacacccgtgaatcgggtgctggggcaatgcgttaatgggaatggtgtaacttggtcttcctaaacaccccagaaggggtgggcccatttccccattttacaggtgcaggaaactgaggcacatggagattacagaactgtcccaggcctgaccgcggcggggttcagtagcatctggaaaatcactttagcccaggcctggctgaggcactgtaaatgggcacttttgttaatagtttccacatattctgggctggtctgtgtggaccctctcagttttccaagggttagcacctcggaccccgccctccatttcagggcagcagaaggggcttctcccccctcagctgcttgttggctcccgagggtcctgtggagtgagcgcaggaggcccacgaccagcaggtgagtctcaggccagaggttccctggacgcgcccccaccccctggctcccagatcccgccttcccttaggaataagtgcatctgtgggcagaggaccgccggtcgcactgcagctgtgtgttctgtgagtcaccagcgatcaccttgcagaaactcagttttctcatctgggaaatggggctgttgaaaggagacgccacagatcctggagcgaaccgatcgcgcggcggctcccgcgcccggtgcgggcctcgggacccagcagccccggccccgcgtggcaggcggcccaaggggcgggccgggggcgggcgcgagcgcgggcccggggcgggctggcggcggccgggccaggcggcggcgctctcccgcgtcacagcgccgggcggcggcggggagatgcggctgctggcactggcggcggccgcgctgctggcgcgggctccggctccgggtaagcgcggcggggccaggcgggagcgggaagggtgggggccgggcggccgcgccggggaggccggggctccgggcctggtggggaggccctgccacctccgggcgcgggcggggggcggcgctgtcactgtcgccagcgcgctccggtgggctcgccgagggtctggcgggcgcagcggcgcctccccaaggttcagaggacgcctcccgtgagcgcggtccccgtcccgacctcgcctggggctgggtactctcgcagcagccgagatcttcccagcggcaggccccgaggggagatgcagcaggagcgcagcccaagttggtggttcgctttccttttttccacggcagtcaggacacacagctcttggcagattcctcggagcagcaacttccctttcactctcttcggagagttactccgaagacaagtcaggagcggctggatctgccttggccaggaggtggggaacggggacttgatcgtgggccttttgaggtgaccaggcctggtgagaggggcatccacggctggatgcagcgacgcctctccaccagcaccctgctttgaggacaacttcttggtccacactaatggctttcattcgggttttactgctcccacttgtaagtgtcttaagaattttccctctttattccccagaactctgtctggctgcctcagggcagcaggggccgtactggctggaataatagtaataatacaggtatcgatggtcactttccctgggtgcctatctgggcctatctcatttaattacaacacttccaagtaataatgactacaacacgtttatatatccaagtattaaaaaaaaaaaacatgaacttggttaatctcaccaataacctctgaaggaggtgctattattatccctattttatagatgaggaaactgaggctcaggcccatgaacggacttgccttaattcagtaggcttgtaagtggtggagctgggatttgaacccagttagcctggctctgggctctgtcaataaccactaaactgtgttgccattgttttgaaaattaggaaactgatgctcagaagtcattttccaagagtgatctggctaccaagtgtagagctggcatttgagccagcattaatccatagatcccagtctgaggaggaggcacttggataacagtgggaagaaatccatctactgtcccccagctatgagtgcagccaggttcccagtgaacctgaaatccttgctgcgggaaatgtaccttttcccagttgtcactgtctcggctggaaaaatgatgagaagtttgccttggactggtgggcagggccagttctcgtggtctctgtggagtagccagcagccagtggtccttcctctcccaggctccatgaccaccttctaattgcaggagctgtcagagtgggtgtcccagagattgtcttttgctggggatcaagggcattctcacatttccagagccctcgggagccttgagagctggaattcaggagcctttagagtctgccctggctgtgcccatggtcagccctggaggatgataagagctcctgcttgtgggacactcactgtgtgccacccacttttctaagtgcctcattcatgactcctcaccacgatcctgctgggaggggctggcagacccattttatacataagtacagcttcttaactgctgtacttttctgcctctccattttgggactgaccaggaccctagtggtcacctggtcccatgtctcattttacaggaaagaaaactgacagacaatatatttacgatagcaaatctgtaggcttgagaggtggctgagctgtctttgaagcaagatggcctaggttcgaattccagctctgccacttactatgtgagcttgaacaagggcttagcctctctgtacctcagtcctcttgtctataaaatgggaataaacagagtatcaggataaattgagaaaatacatctaaagggcatagagtttgtacccggcaggtattagcctctatcattgggcaaggtgatatttttatcctggatggagctattttcaggtgataggctaatgtgagtgaatcagtccatgggctaggtctggcatcacctctgcttagtgctcagtaaatactggctcctggtgccaaagactgttaagtaatataactatttctttcagagatttagctgtatgaattcagactattcttttaataagaaagctcactgctgctgatcagtactgacagtttgcattccttataaacttagaggctctggtctccctgaagtgagcaggtgcagtttcttcaggcagagaggaagtgggaggcacacagctacgagcacatccctggcctgctcagaaccgagggactgtgcccacctctgcatcccagatgaggctgctgccttgttctgttagttgtccttactccctcacctggaagtggccatctcccacttcacaatgagtaggttgttctattcagctacaacggtgtcctaggctgttttcagagtggtgttagtccttttcatgacattattcaaatataagcaagggggttagacaccttaacttttatccacaggaatttgagattcgtctacaaacataaccagctacatcgcttgtgggatccagtgtcaaatgaaaatgtgggcctccttgttaaaatgtattaaaatttcaagatagcaacagcagagattaaaccatgttggggtgtgaggacttccaaccatggggtcctgtgtgcctgcaggtcgtgggcccacgaagcccactgtactcacaggacagtgtgcatgtcactttctattgctcccacctccccagtctcagggcatgcaaactctatctgtattttaagggtgcttttgcattggagcctatgcttactgtgaaaggcatccttttcccatttttcggatgaggaaactgaaactccaggaggctcacacctaacagaatcaggtttccggcctggttctgtcagatgccagcccctggctctctacccagccccaccaagccactgcttctgtgtctcatcgtttctctgcaactaccagagaaggcctgggaccataaacatccagtgcttagcccatgtggtgcccaggactaccaagtcccagagcatgtgcttgttggagactgggatttgctgcagcaggaatcctgtccctctgtttgtatcagtctcttccctatcagttttgttatattcctccttcaaaaagtggccttggggaacctgactggggtagggaatgccttctgaggatcatgtgttggcaagggtggctgttgggccacagtggggtacagttcaccaggatgaactgacctttccatttccagcctgtacagggtccctcttgcctcacaacatttgcagaggtggggctccctccttggaaatcattccttgttgctgccttgaactttatttcattagctgcaagtgagtctttagctcaagctcacatccccagagtcccttcccctgaccccgaagtctagatcaggatcttgccatgattttcttaaaccctgcacttttctctgtggcatgtgacactgtagttatattctcccatgtcttttccccaatgagtggctgccttacccactggactgtccactgcacaaggtcaggaatgttgttttcttcttcacaacatgcctgctgcatgaggcttaagctggaggaagcaggaactgtgagtggagaggtacaacggggagggggacgatgcgtctccctcccacctcaattctccgcaacacagggtcacaaaacaagaaattaatttcttcttcgggcctgagtgactttggcaatccttcctaggccaggagagggaggatctgccctgcctggctgctccatcatctacctggtggaggagggggcgagtgacaccatcaggtcctgcccctctgacaagctgggcatgcatggactgtcattcagactgagatccagagggaagagcctgggctcccgggggccctgtacactgtctcctgcctctggacactgctgcacctgcttcccctcgtcctgtcctctgattgccattggtgttccctctgctgagccctatggtcctgatgactgcgggggaagataacggactacctctctcttagtattgaaataaacacccaactggctcacatttgccagcccctgggtgccctaactgcattccctctcctccctcctgctttgccccatctcacagttgcctggatacatgtgccacctttgctgggtttaaggcagggctggggaagagaagaatgttactcaaggcacccagctttgctgagaaggcttgtcacaggcacagggaccccacaacctgaatagcttgtgtcctccagcaaagctttcagacttggcgggggcctgtggccatcagagttctaaccacaccacccacctcctggtgctgaaggtgcaggtagagggctggaatgaagcttgctgtgaacagggctggattagtgtgcttacgctgtcataacagagtaccataggctggggtacttacacaacagaaacatcacattttggagtctggaaatccaatcaaggtgctggcagggttggtttctcctgaggcctctctccttggcttggagatgccaccttctccctgtgtcttcacagggtcttccctctgtggtgtttgtgttcttatctcctcttcttataaagaccattgatactagattagggcccagcttaatgactttattttaatttaattactcctttaaagaccctatctgcaaatacagtcccattcttaggtcctggggctaacgcttcaacatatgaattttgggaggacacaattcaacccataacaaaggtctttgcactttggtagaagaaacagaagtttgtgccatttgtaagagaatatggggcaaaatgaaggcagggaggtgcgcctataaaaagagggttcatcctggaaggctagagaatagtcctttccctttcctgggatcccctgaccctgtcctgagccacagaagtggaagggttactagcttgcctccaggaagaaatctggcctcccatggggactggagcacttggcacatccttctggtttcagtcactataaataatccctcttccatgtagcattaataggaggagcctggggcgtggggtcccggctgcactctcatcccacccatcttgtttcaatttcctgccttcctcagctctcctggcctccactgggaagctcttgagggcggggtggggctggacttcagttctggaagccagctgctgcatcgttgctgctctctgtggctgcccaaccccagcagctgttggagctgggtcagccagtgtcccccagctgctgcattcctcaccagggagctcctgccgtgggagctgtgtggacttcacacagggcttcagcagtgaggaagaaatgtcttctgactaatttaacatggcccatgggccaggtgcctgccaggtgggcgagatgcagggggaattgtggggccaattcctcttcatttgccttgcaggaggggcttctgatgacagcgggattgctaccagagtgggtccctcctttggctacacattagtctgcagccctaagtatctcccgcatcactgtaggcatagaagacctcatacccatccagcggagagtccagctgagccttaaccctttttcttctgagctcacttccatatatatcaaagactttggtgttttaatccctggggacctgtgaatggaacgttatatgacaaaagggactttatgggtgtgatgaagtcaaggctcatggaattacccttgaatatcctgtgggctagtgcttgtcttctgagagatgagaaagaaaattaaggaaaaatgatcctgaaatcatctgtcttgaggtgttcagttattaaatcaatagtggaaactgtataggaggaagacctgttgcctggatttttacaatgaagaatagtttgtatctaccatccctcccccagcccaccgcagggccgcctgcttgctgctccacagcctccttgtcaaatgttcagatcttgcttgatctgtttttccactttcctccttgcttccctgcagcactgcccaggggtcaaaggttttggtggctgtgacatctggggcccaagccctcttctgttaccagatggtggcattttgggactgaaagctgtgctttgggatgaccatggggacacctgcttgtgtgggggggtggaggcgaatggcttcctggagtgatacatggggcagtacaggggtggggacatggaacctggtgagaagacagccctgacttggcagaaagaggttccaggcatcctgtgcaaagcatcttttctcgggccctgcctgccagagggctgtgctgtgagcaccgggcagcctggtcgcactgggcagtccagggtacaccatgaatcgtggctcctgggagaagacttcagcagtcggcctctctgaggtctactggtctgggtggtggagtgggcgctggggtggctccatcacaggtcagctcaggggcagaacagtggctgggagtgggcagccctcgggctggttttaactaaggaaccaaaggacaggaagttgtggatggggcctggaattccaaagtgtcttttgggttgttgggagagtctctcatccctcctcttcctggggtttaatcattctttattcttgctcttcaactctgagacgatggatcctacaaataggaaaccaagcaacccctgttgtcccagctcacatccgaccttactactcatctgccctgggtacagttgaaatagcggagtcagggaaaggggcccagcttcctggtggacaggccaccagagagagggccctaccctgccctgctccagggcggctccccacccacagcacagctgacatcaggccagggacaaaactgataaaagtaggccttggggaggggcaggggccaggtggtgaggtgtggggagtggtggggggttggatgtgggctagacatttttaagaaattccaaaaatctaaatcttttacatgaaatttgaattttaaacgtcagcaactaattacaaaattttgaaaaatacttctgggtcaggaggtcattgtttagcatcccacatggacagggtggtcccatagatgagacagtgggggcccacagaggctcacccccagaagaacccctcctctggagaggtgaggggccgcctgcttctctggccaggcagagcactaggatgcccagtgcgtggaggcatttcctggctcctcgactgtggactgcccacagggggacttggggccctcctcatcctctcttctcccctttttctctgcagaggtctgtgcggccctcaatgtcactgtgtccccggggcccgtggttgactacctggagggggagaatgccactctcctctgccacgtctcccagaaaaggcggaaggacagcttgctggccgtgcgctggttctttgcacactccttcgactcccaggaggccttgatggtgaagatgaccaagctccgggtggtgcagtactatgggaatttcagccgcagcgccaaacggcggaggctgcgcctgctggaggagcagcggggggcgctctacaggctctccgtcttgacactgcagccctccgatcaagggcattacgtctgcagagtccaggaaatcagcaggcacaggaacaagtggacggcctggtccaatggctcctcagccacggaaatgagaggtgagggtcttggtctccctgggtagaggtggtggtggggcaggccagtaggcccccctttgcagccaccacccaggggctcccgggttggctgtgttgcactagaacatatcttgtgggcctctgttggtcacagacatgagtcatgccatggggtgagggtagatctttacctggacactggctaatgtgctgtgtagacacagaagtgagaacagaaaggaccaagtgcctgccccaacatggcccagcccaatctctgggcaaagcctcttatgtgtctgaagttggactgctgtgtgctgtcaaaggtaaacaaagctggaccctggtcaaaggggtcagggcagattttattcagcagtagctattgcagtagagaagagagcctggcatgaactggactcaactctgatttgtgcagacatgactggttgttttaaaaggagaatgagtgagtgggggtgagtggggactcagtagagtcaaagaagtgtgaaaattgcaaaaagcagtagggagaggtttggcttatgtggagccatctgggtttgctaagatgcttatcgaagtttgaagtttggtttctaccttcccacagagatggggagatgggggttttgtcttcaggtgttggctggaacaagcagtaaatgcttttggcagccttgagttttctcaggcaggcactttcaggaggtcatcgtaggcataggcatgtggccttgagccattagaaactatgttagtgtttgttggagtctttaggccaagactgaggcttagtcgagaaggggctctgaggagcccggctggagtttggctaaggagagcatgtttgtcagtgctcagcctcccacccaggtctgtgcaggcttgatggctttggctggggggtgccgggcacccatggaggaggcacgcgttgggaggttttgctgtgagtcgtcaggcctgggagcagggcaggctggttgcccagtggaactgatccaaacttaggcaacagctcgccaagaaattcatgaggaagtgggcagaggaccaggggtagccctcccttcctgaagacagataggagggatggacagcatttctgcaacatctcagctaccaagtgccatattttggggttgtcatttttttatcaccaatgtttctattcgggaagacacctctcacaattttagtaagacttcctattatgcactaaattttgcctttgattgctttgaaattgaatttagtttggcacaagatcaagaggatcacaaagtacagctgatagtctcaaatacaaaaaagggtctaattttattgtacacatataacaaaatactcaagtccttagtgatgttgttttgacaagcctttttaaaggacaaaacttagttgtgaaaagtatttttaatgtcctatatgaataagggacatagagtaaaataatttatatacagagtctttacagtagttcaattttacttgtctttggagtttgcttgttgtaatgtttataagtacagaatgaggtattaaatagaatgtgcaatttttctccttaagcaaattaattcaagaaaaccaatgactattggcttattattttcacatagaaaacaagacatcagatcatcaagggctgggccaagaacccactgcaaataccacttggctgtgaaacacaagatcttttatatatacaagatatatacatacatatatatatacacacaagatatatatatatatatacacacacacatatgatacgtgtgtatgtgtgaattgtgttgtttttggtgtttgtgtcacagtgtattctggagtcacagacgaaatatcttggcagtgatgacattctgccaaataaagcatataaaagctttgctaccttcaagtaagcagagtcatttagcttgttggttaacgtgaatctcatttcagtgagtgaagctgggttcagtctagaacatttgtttgggaacttgctccaaaaacatgaggtagtttttaacacctcactggaaataagaatctttccccacttcttctcttgctcccccactttcctgccctggtcctctggtttctcttccttcccctcctcagctccccttcccttcactccccgcctcttttcttcttcgtctttcctctctctctgtctgtcactctttctctctctgcctctccctctttctctctctttctgtctctctctctctctgtctcttggtatatctctctctgtctctcccccccccgtctctctctctttctctgtctcttcctccctctgtgtctcttcgtctctctctgtctctctgtttctggctttctatctctttccctctctgtctctctctctctctctctctctgtctctctgtctctccctctctctctctgtctctttctccttctgtctctctctttgtcttttggtctctctctgtctctctctgtctttccatctctctctgtctctctctccctctgtgtctgtctctctctgtgtctctgtctctccctctctctctgtctccctctgtctctctggtctctctccctctgtatctctctgtctctctctctgtctctctgtgtctctgtctccctctgtgtctctctgtctctctccctctgtgtctttctctcactgtttctctgtctttccttctctctctctctgtgtctctctctctctttgtatctctgtctctttctctctccgtgtgtgtctctgtccctctctctctctctgtgtctctctccctctgtatctctctatctctctgtgtgtctctctctctgtatctctctatctctctgtgtctctccacttctctcgcccactcccctctgacctctcacccagaagtggttctaccctctcagcggagctcagcctcccttgccatgtctgctccatctcagctcctgggcagggccatgatttgctgatggaaagattcaaaaccttaggaagcaatgaccatatcttctagaacattctatttaggcttccaggggactgttccaaggcagttaaggaaaagcaaccccaagcaaatggcctgaaaccaggcaggctgtttgggttggagcttgtccgccccaggctggggctgtgcagagccttggctgcctgttcttcctgggcagggccaggagaggcgcatggctgcagcctcccagagcacctttcccggtgtcctgggccttgctcctctccaacggccttattttcctaaatttccacctcatgttcatagttgttgttgttgtttttgagacagagtctccttgctctgtctcccaggctggagtgcagtggtgtgatcttggctcactgcagcctttgcctcctgggttcaagcaattctcctgtctcagtctcctgagtagctgggattacagctatgcgccaccacacccagctcatttttgtatttttagtagaggtagggtttctccatgttggccaggctggtcttgaacttgtgacctcaggtgatccacccacctcggcctcccaaagtgctgagattacaggtgtgagccaccttaaatggaaaacaaaaacacagaacaacaaggatgagaagttctgtggtccgtacctttgggttagaatatcaaacaggagctcttgggggtttgagtgccccccaccccaggcccgtggtctctcttgtctaacctgctcatgtcacctccctcctttcaacaggagtctccagccatccagtggagaggggagcttttcttgggatttcccttgtaatactacctcactctttgcccttcaccgcagacttaaccatggcctccttcctgcagagttcttgatgtgagataaaattgcttgtctttcactggaaactcccagaaagaaaggctggtgcctggtctctcctcatttccctgtcatgaacacctcgcccagcacatggagggtgacttgcgatgatatatttaaaaaataactcccagttctgagaagagccataggagtgttggctcttattatctgtcctgatttccatatgttggttgttttctattgcaaaagtaatatagtgtaatatagttcaattatagaaaacatggaaaaatactgaaagggtttaaagaagaaaataaaaatgacttaccatatctctactcaacttaacatttcagtgcaaatccttcctgtcattttatgcaaattaaaatttaaaacctaatttcaatcttactgtaaagagtgttctgtgactcgcttttctgatattactaaatagtgtgcacattttcccttgttaaatatgcctcaaaaacataatgttaatgatggaataatgttccatcatgcaggtggacctcaatttagcttcctgcttattgttactggacatttgaagctgctgtaaatctttgtcaataaatctccatgaatatccctgaccttagcataaaatcctggaaataagattgccgggtccaaagatctacccaaattaaaaatggacacaatttcaagaagtgaattgacctctaaaatagtttacaaatttatattaccaccagcattgaaaatgccttttccccacggattggtctacataagagtgttggttaattttatgtgttgacttgactaggctaaacgatgcccagatagcaggtaaaacattatttctgggtgtgttcgttctgtttctctgggatcccagactaacacaatcatatactttttgaggatgatgatgataacaatgaatgcctgcaacagtgcctggtacacagttgatcctcaatagatacttgatgaatgaataaaatgttctttgtcaagtgtcattagcaactgttgctgtggatgactttgaagtaggcgtgacttggtggatgtagtcaccctctctgggatgccttacctctctttcccttgacctatttcaatcatacatattttttggggctccacatccagctttcatcttccatcaatgccttctttgggcatgccagcccatggagtgctctcccactggcaacatcttgtagcttctgtttttagcactgtagacacaacattatgtggtcatgccgttgtttttcaagctgctgtggcacagtgatgatgtcaaaaatattatacataaaagagttggccaggcatggtggcttacgcctgtaatcccagcactttgggaggccgaggtgggtggatcacgaagtcaagagttcaagaccagcctggccaacatggtgaaaccccatctctacaaaaatacaaaaattagccaggtgtggtggtgtgcacctgtaatcccagctactcgggaggctgagatgaagaattgcttaaacccaggaggcaaaggctgcagtgagccaagatcccgccactgcactccagcactccgctctcaaaaaaaaaaacaaaaaacaaaaaagagtcaaacaatgcaaaaactaaaatgcgcaaatatctttctcctacccactacctaatatccccagttccactcccatccccagagataatcattgtcaataatttggtttagatctttcaaatctctttcctattgacattcatacacacacacaaacacacacacacacacgcagacacacatgtattttaacaatagtgcatgtattgctttataagttgttggtgatattacatgtattcttttgtaactggtattatatagtgagataataccaaactgtatccaatcattcccgcagtgatagacacttaggaatcttccagtgtttcaccaacataaacagtgcttcagtgaaatccttgtacatctttccaagtgtatctgttagttagattcctggaaagggaattgctgggcctaaggctaagcatatttaaaatttttgtagacaatgccaaaatgctatcactgaaaagactttacaaatttatactctgaccatcattgcatgatatttccctgaagcctctttaacaatcaatattattaatcttttccattatttatcacaattggaaaaatatttcattgttttaatttcgattattatattcaatacaatacagtgcaatttaatttctgtttttgtattcaattattagcaaggttgaacattgttattcatggttcatttatttattctgtgaatttcctggccataaccttaataaatgggttgctgtcttttttatatatgtgtacgtgtgtgtgtagatctgatcattaattttttagctattacatatggtacaaaattttattcctgtttgttacttttctttccacgttgtttatattttcttttaccgtatagatatttcacatttctggatatttatgtagtcaaatttgatattttttcctttgtggcattcttttctagtggaattttttattgaaatgtaatttacattcaatacattgtacatggtaccttggttttgtatcgaatcttggaaaggattccctgccccaagcttataaaagtgttttccatatttttctttaatatttttagatgattaaaagaaagctttactcctttatctctttggaatctgtttttttatataaggtatatagtagctaatttattttttctttacaaaaggctaaaatgttatccctacactgtctgttgaagaggtatttttctagcttgacatgtcacatttttcataagctaaatccctatatttaaatgaaaactttgtacacttcaccaatatagcactattctaattattatagaatagggcaaatatcctcattattttttaaattcttagctattcttatacatttagtttttctttaagatgctcttgaggatccacttacccagttttgtaaaaattacattggggtttgattgggatttcattggcttcttaggttactttgttatgggcatattcatcttagacatctttatgattttaaatgttcctatccaggaacttgttgtattccttcatgtagtcagggttttttttttaaatgtctttcagtacaattttttttcacatgactctcgaacatttttattatatttacttctaggtattttataattgtaattaggatataccatctcctgctatgcagacacatgtatgtgaagattttaaatcggtattgctggtatatagaaagtttgacttttgttgagttatatttggcaacataatgagttaacttattatttcagatgtggtgtttctcagttgcatttcaatagtatctatgaattagtatctcattatttttctaaccatattgcattggccagtactacctgtaccctttctgtatgacactactgtgagttttaacctactatttcagtttttatcttgaccacatcttccatctagcccatacagctacccttagagactgtcagttatcttattaaaagccagctttgaggcaaccgtggctttttcatgatccttactggttaacctatcaaaaaaacaactgggattgccctgataatatctcttaggcatctttccttttctttttccttttccttcctttttctttttctttttcctttttcacggagtctggctctgtctcccagactggagtgcagtggcatgatcttggctcactgcaactgcctcctcctgggttcaagcgattctcctgcctcagcctctcaagtagctgcgattacaggcaccagccaccacccagctaatttttgtatttttagtagagacagggttttgctctgtctctagcacatgaagaatgaaagggacagaatctctggagaacagtggagccatgcctggcttattcacagaatctcatgccagatgaacttgttgatgtcgtttttattacccaatggtaaaaggaaaggcaaagaaaaagacgcagtttctccaattgcctgtgccatgtgatgatttcactgggtgagaaatcctgcttagagagaaaatggattgaaaagtcctaagtgacacatggcatcggaaacccctggagaggtttctagtggaaatcatgagggtcaatgttaggtttgatttcctttgattgttttatcaataacattgaaaaagaagcccacatcaccctaatgaactttctagaaaatgcaaaattgggaaatgttcttaacatcagtgagaaatcacacatgataaaaatgattccagagcggtaagaaatataggcaggaaataacaaaatgaaattcaatttgaaaaacagcacagcaatacatgtggggaaaacaaatcttaagcattgctggatgctgctgggaggctctctctgcgaaaggattcggagtgataatagcagcgaatcagccgtgcatttgcaacgtgagactgcatctcaacagctggtgttgtttccatccacatacaaatcgacctggagcccctgagaaggaggtgattgtgtcgtaggtactacactggtgagaccctaactgggactacacagtcagctttgggaacttcatttccagacagacagatttaagctagagaagagaggcaaatgtgatgaggaaatgagcaaccgccttcagagacaggatccattctattgaggaaggtttgctcggctcagtgaagaaatagcaccagaaaatagtattgatgatgtccatcagcgctaggtaaattcatttatcccttcactcagtgtgcatgttatcaaacacctactgcgtgccaggctgttgcaataatggagacccagaaacacatgggtggatctgcctatggggtggcagacacacaaacacatggggttttgcagtgtgagtgcaggggacaggatgcacacagggcactgtgggaacacaccgcagggtcccttaagagctgagggagagggcaatgttggagatgtccttggtggtttatgtgggggcggcatggatgtccagagggacaggcactgcagctcatgccagggctttggggactctgcattaggcctggaagcttacaaagcattctaagccttttgaatgttggctccctggagcatggatctggggggaatcagattagaggaggaggaagtggggtcttttgtagttgcacgagcttgaaatgatggaggactaactttggcagtaggaatggggagacattaagaggtcagatgtgaagtctttactgatggactggatgtgaatgatggagagagctttgggatgacacccaggggtctaactctgtaaatatgtgtagcagcttttcactcattcatcacgagcaggccagatgcaggtgtagcctcactgcaggtgagacgtgatgaagtggagtgcacaataatgccctgcccagccccaaggctggtgaggaaggctgaggcctgagggctgtgtgcccagcactgtgggggcatagcaaggctgaagggggtggcacaaggaaaacgggatgagaattgagggagcataagcaggggggttgggatgatttcaacagggaggtgcactgctcagccatgtctccctctctccaaggggtggcttatttacattgagagtgtccagggcatactgaattggaacttgtttcatacctggcaggcatcatagcctagtgttgggattcccaaatactcttggttcttgatgcccttaggccagagaaaaaaacaaaaacaagaacacacgcaaacaaacaaagagcagttaatagttttgctgaagtagttgagtcacaattttaggtaagtattgagatgcagacaacttgttcttgtcctcttcagggtaaactccaaggtcacctttgaaatgagatgacaatttcatattttagggggccaaaatgtctcatgtaagtgaaaaataatatatagctagttatggtaaatatcttttcaaataatgatacttcctgaagaaaagcactttgctttgccctgtgttgcacagactgtgtccacccatgtctgtcctgcatgctcagtgctgctgggccatgtgctgagcctcagacctgcccttgataacttcagttgctgtcttcctgtttctctcatgtctagggcctgattgcccctctacgcacccttgaccctttgtccccaagtctaagacattgtggtttgtgttctgtcctttttttttaccttcctttgctccctcagctttgggaatctctccacctttgtgcctcctccattgtgcttgacatcccatcacctctagacttttctccctaggggacggatctggcttggtgcctctggaagcacagattctgtagacttgctcagcaggaggaggcccccggtgggcatggggcagggcgaacccttaagcttgcttgcttcttcaggtgctgcctggagagattccaagatgaagcataagtgtccaaggggctcctggtgaaagatgggccccagctgtagccctgagtgccacgtgtcctaaggttcccgtggaaagcgttgagacaggtttgcagggccatagcctgagtgcacttcctgggccttcaccccagggagcgtgtgctgctggtgttcacaggagtgatgtagtcattagcctccctaagaggctcctgctcttagggaggccacagctttgatccccaagacttcaaaaaacatgatctttgtctgggcacggtggctcatgcctgtaatcctagaactttgggaggttgaggtgggtggatcacgaggtcaggagttcaagaccagcctggctaacatggtgaaaccccgtgtctactaaaaatataaaaattagccgggcatggtggcgggagactgtaatcccagctactcggcaggctgaggcaggagaatcacttggacctgggaggcagaagttgcagtgagccgagatcgtgtcattgtactccagcctgggcaacaagagcaaaactccgtctcaaaacacacacacacacacacacacacacacacacacacacacacacacggtcttcaatggcttttcaacccaatcctacaacccacagattcagaagcagtctaaccttctgagccaaaataaatcttcctgcttttagatggagtggtctttatcagcagtgaaaatgctaataatagaagcaatttgcaagggatgtctcctgcagtttaatcgtaattcactctaaacccacatagtgtattttaacaagccaaattgttatttgacttaacattatgtaagtaaggtttaatgtggagactggacaaagcaaatggaaaaaactgtttgtcaccctaaaagtatgtgggggcaaagatgaaattataatatggtttctcatctgactgtttaaccccaaagtgtgagaggaaatttaatgattagatctgaagttactaccacagggaactgatactgcaagttttagtggaagaaattaacgaaataattcctttttctcgggagacatggaacagataatgaggaatgagatttactaaacatttagggcttctgcttaattaagcaaacacacatcatggtgtttaaagtgtcaacaggtccagacactcaaaggaatcaaattgacaaccagagtgtaatttaaacaccactttaaacaattcttcatcgtacctaccctcattccaactgccatggtcttggaagagtttagattaaaaacttaatctcacaaacatgcatgaagccccagtttatgagcctgtcatcactgtgcctttcccaaagagaggtacagatggagatgtttgatgcctgccctcctggggccccagcctcataacataggggagaagccatggtgtagatgtggttatagatttaatagacgttatggaggtagcaaacagaaagagtgtgaaagggccagacgagggggtgaggctgacatgggagtaagggagatgaggacacattgctggaccatgggagaaggtcacatggaggatgtgggacttcgcttggggcacaggagagcttcagcagacagccctgggctgtgctgtttcagtagagacgacagcctgctcaaaagtgttgcaagaggccagagaggcatgcaaaagtaactcaatggacttagatgcatgtttgcaattgttgggggacaggggtgggcagcaacaagaggaatggttggaaagatggacccagctggggaccttggtaccaaggaccctgccggggccttccgaaatgcaccctcacatgttatgtggtgcatgtacacagaaggggcccaatgatgactttttagatggaggagtgaatgagtgatccaagctctttttctctggagacatggcagagaaaatggcaactaggagtggaaggtagtagcaagtggatatatagccctatcctggacttgtgtgtgtaaaggaccagtgaccaagccctaggtttcagtatttcctagcttctcattggggacataaagatagcctttgtgctctgtagctccttcactttcagaatgtggacttcttttccgaccgccttgccatgggaagtctatttcattttttttgtttgcccttttgcttggtttgctggaatttgtcttggactgaatgcggtaggaaagggcggcataagctagacaaagctggagtttcattgtttctcatcggctgctgcctgcaggtcactcagaggtcctactgacatatatggctttatttgagccccaggggagactgcctttgacctaagtcttggagaggcaagggagaaaggaagcaataggccagtgcctgagagcagaaacagagaaggtctctgtgtctccctggggctgcagtggcacgccccccaccccctgccactgagaatgttgatccagttataaacagcaaggacacagctacattttaagagctgtttccttgggaaccatctcatccattgttgaataagaagggagagtgaactgaatacattgaatttgaatttgggacaaaggtgttggctcatctttgttttacttaaggatcttttcttctgcatacttcacatcaccatcctcttccagcccctttacattttcctctcctattaaaacctgtgtaagatgctgcctgagggacctggagcagggtggtacttgctctctcctggtgcaaattagcaaggcctacttgccagggatcaggctccttaacttcttccgcttcctttcagcttgagggaacttaagaatcatcttctgtttaagaagaatcaccttctggttaggaatcatctttggactttctgcttccattctgtaggaaactaaactcccagaggccataaaataaatcatgacagacacaaagcctgcaactccaaggccagaattttgtggagaagttagcctctgcagccaggtgtgctggcgcaaccccactgcttctgaggctccaggggaaggactgttgctgggcagggtgggaccccctgaccctggcccctctcctagctttccggaaagtaacaatgtcatagtcctggtaaggtgtacttaccccactgtatcacgttcatttcattcattcattaagagtaactatgacggccgggcaccgtggctaacgcctgtaatcccagcactttgggaggccgaggtgggtggatcgcgaggtcaggagatcaagactatcctggctaacatggtgaaaccccatctctactaaaaatacaaaaaattagctgggcgttatggcaggcacctgtggtcccagctacttgggaggctgaggcaggaggacggcgtgaacccgggaagaggagcttgcagcgaacctagatcttgccactgcactccagcctgggcgacgaagcaagactccatctcaaaaaaaaaaaaaaaaaaaaaaagagtaactatgacttgaactatgggccaagaaggattctagaaagtgaagaaaacagacacagataatgaacaaggtagaataaggcatggtctggtgcacagtgatggattttaaagccacacattccatagagagaggaagggtgtgaaacattagatcaccactggaggaaggcttcaattcaaattgtctccagtttccaagacaggcagttgactccttgggaagacacgtccatccttacacatgttctgctcttttaaaaatcattgtttcttgaaagctgtgttctgcacatcattttctacattgagacatgctattaaaaggtgctctttcagggtccttttgaaacgggaaaagttcccttgtccccctaccagtgcatgcgataggggtgtggctggcttctttggtgccctgctgctcaaacctttagggaagcatacagatgggcaggagctgtggggctccgaccccacggcagtgtccaggggtgaatgtttataactcctgaagccccagtgggcatgtgttatggggtgctctcttattttgccgactataggctgcctgtagctcaattaagaccctccacctagtctcaaggacagagggctttctgtatcccgggttcgtgccttggtgtactggaagaatcagatcacatgtgcgcttggagaatatcttattctccaagttttattgagtacaagtagctcccagtcaatgggggaggtagaagggagacggttttcccctggagttgggctgctctgtggccccagctctcttctgactgcctcggccaaactctgcctggtgcctggtcccactggtcgatgtcctgcctacataccagtgcctgtctgtgtgctcttctgctggcataatctgctccatgttctctggactaccaagccgcttgcgtcttcttccggtgacgtgctcctctcgatgtctgactgcgtctgtctctgccttgctaggttctcaactttttataggcccaggatgggggcgtggcaggccagagtggtcttgggaaatgcaatatttgggcaggaaatgcctgtcctcacctaggtccgtggaggtggagccctagccagggaccacgccctcctctacccagcacgccccttcccctttccatattgttcaaagggaccatactcttctcttcccagcactcccgtatcactttgtagataacacttctgtggcaggatcactccttatccttattactcttgttttccctagattaaatagaagaggcattggtttagttttgagttctaaaccctctcctggattggacaggacactgaggcccagggcctggtttctcacagcaggactctcctctcccacatctccttgtactcagtctttcttctaggagtgcacatgacagagactctccaagtagggtcctcgggcctggagcctcagaatttcctgagaggtgaactccctcttcaggcagagtcccaaaccctctcagaaactcaggggcaatgcctgggagtcttcgttttaataagagcccagttgattcttctgcacagtaaagtttaaaaatatggctttagagcactaaggaaggcagcacctgctaaggacaagatctgtagagtctgggagaaggcttcagctaccctggccagggtaggcacggaaagggaaggcatgtctcctgagcccagctgcctgccttccctgcatcctggctcctgctccctcctgcctcgttcttcctcttggcccgccagggccccaccactttcctctccatcgaatcctgcgttctggaaggctttccgtgtcagaaatgtgcacctgactttggatatagcctagagttgcaatttaagctttgttaattgtaagattctttgttaaaggaattaggggcgccagtgggagagaatttcaggaaaaatggagccttcccaggacctctcggaatttttggccatcacttccgtgggtgagtaaggtcagtctagacaaagcatgtcagcgtccttggtgaatgggggaccccgaaagaaccagaggccccttggcacccagagggcattgtcacagggtcttggtgtgaactcacctgtgaaacatgccctccccagggaagttggcagggtgttctttccaaggcaggaattagggctctcggttttcacacctctctgagtgatggtttccccccaggtcccatcaaaggggacttgactgaggctctttctttccagcctgcttcctctagacatgcagttgatagaatcggtttgtctcagtacctctgggctgcattcttcctgactgtttgatcctgtggccactttcttcaacagaggggcagtgacgtgatggatttcacaacttgtcccttattagatttcatcctattctgtgctcctggggaggccccagagtggcctgtagctctgtcatctgggccactgcctccccggaaactctcatgggctctgcccattgggtgctagggtcccaaggcaatgacaaagcagtcagtaggtcagctgacaatttagcttctgagcactcatcacccctccctccactgtgagacctgacccatcagatataaaaacccactttagttccgataacagctgtactgagataggtggcttggcactgagatcaaattgggcttccttctacttccctgaacagttgtcctgcctgttcgcctttccccaccccccaccccagcatggggactacatgcctgtgcactgtgggagcaggaggtcagggtccttgcactgcccttgtcatggtctccctggacacaggacggatggtagaggagtgtgtgcaggagtggtcacaggtggggctccgtgagaggcagggctggtgtcactcccagcagctggggtgatgagactgtcccaaggggccccacagcatttgcccccatgccagctatttgctgggagaccagtctcagagcacagggcaggacagagtctacttggaaaaagttctttaccacattcctatcacccagaggggggctgtggtcagaagctcacctggatcaggagcttttccttgtccaccaggggtgagggaggtggtgaatgcagatgagagggcagagaggggcagcatcattccagtcctgcaccttcctgggaagggatggaagtctcatttctcctccctatcatgaaaacctgagcacagagcagcagagtccaccatcaggaccctataggaccattgtctggctcaccagctgactgtcatgcacttgctttcctctttgggggattgggctgggcactcctttaatcatgagcagctgtcaggagggcaggacctccattcctttgagctggtgcataggaagagtcagcaaattggtacaagaggctgttgtcatcttctttccaattgtctggaagtccagctggatcccaaggtgagcccagtacggcagaatgggatagattgattgactcttgcttaaggctccagccttctgattgctgaactcattggaaactgttacaaaaatgctcttccatcaggagatttgcattttatttccacaagtctttgagcaacattagtaatctgtggttggaacatttgccacttgttccttagtcttgccaaattttttctcaaagcattccatcctcttcaagcccatctaccctgctggggcctcttccactccacacttgaaggttgaccaaggtgaatttatattagctgctcacagctgtgctgaggagggcagagtatttgtggagtcaggagacctgctgattgtccactacacagcccttgctgttggcctggctgcatcccacagctctgtttcctcatagtctgtggactcagacccctggcttgacaatatatcaaattcactttgagatagcacaggattagcagctgcaacaagatacttatgggagaaccttgggaaaattcccgaagatctggcagggtccatgtaaaaatttttctttcttgtaggaacaagtaagattaggactggtgtttctaataatcagatgccaaagttgctgcaccgtcctgtgaaatatctgcactgcgggggagtgaggagcatccagtgattccttgcatagggttagtttagaatcccagtttgttagctctttcaacacatgtgtccataaatagattagggagagcttgttgctttctatcctaaataagggaaagggaactgtaattggattaaatcaaggacccacaatttctgaccctgaaagttgcataaaaaatgacccgaaggcacctgttggttagaatggcagcagctcattcaaggtgtagagattgaagagtcaccccctgaggcaaaggactgacaacaaagggccattctgaggttggcgggggtggaggttagagcagtgaataaaacaagtgaaagtccctgtacttagacagctagtgtggatatgggctcagtaggtctcaggcactgttctgagcacttcacacacatgaacccctttaacccctgcatctactctgacatgggcatttctcatcatccccattttacaaatgggtaaaataaggcacaggaaaattaagtgacttatccaaggacataaaactagcaagtggcaattgagtctttcaaccctgtgagcatgtgtttgccaaattttaaaaggcatacatttcacccaggggatttgggcttgaaagcagattctgattcagtagatccggcatggggcctgccattctgcatttctgaggagctcccgggtgacactgacattgctggcccgtggaccacatgtggggtggtaagggtccacaccatgatgggtatccttggcctcctggaaaccaagctccttgaagatatatgtgtattgttcatctccgtgttgtcttcatcaggaccttcttatccttatctaggcttgattagctgaagccatggaaatccagccaagctttttcaggagagaagtgggcacagtctaagggtgcaaagctcttggaatgcaaagagagtaaatacaacatgccaggccttgtggggcccagagtgccatcaagctttggcctctcatcttccctctgctatgcaggttctaggctccgctccattctgctcacttgttttccaacatggccacccacaaaatccactggctctttcaatctcagggctcacaataaccacatgcactctgtttcttattttaagtgtttgaagggggaatctggcagtcagtagattacaggggctatgggtattgagcaggtcaaggaggttgggtgtgatggacaaattgtctgatgtatcttagatcacatgcaaggtcagatattcactaagagctccttcctggaggtccaggttgcttcctttgggaggaagtcagaaagaaatatataattcatatattttaccaagcacctatcagctgccaggcaatgtgcccagtgataggaatacagaggtagaagatatagccactactttttaaataatttaagttctaatggcaaaggagttctgtgatcaaggcaacctctcagcagagcaaagccctcctcctgagaacaattaggaaaactgaaaataaagtctatcagcacttctgctttctgattcacatatctacatttcataaatatatttgtattatataattacatatatatgtatatatacatatattacatgtgtatatacacatatatattacatatgtatatatacacatatatattacatatgtatatatacatatatattacatatgtatatatatacatatataacatatataattatatatatgtgcatatatatccaactatcttaattgttatctgaaggactagataggtagttagatcacagagaaaagcagcaaagtgagcccaattgctggagacgtttaactctaagaaactcactcatacttaagcagtgctagttgagagaagctatggagaaagtgacaaccagtatgtttaggaggtgagttagtttttggcagttctaacagtgagataaaaattgggaggttgtggtaaataccccaggatttttgctggggaaccctgaaggaccgaatgaaccctgagtaagggcaaaccagaaatagagcggattctataaaaactgaaagcctctcaacagttcaaaccctgattggattaaagtgaccatccccctactctaacttcctatcagggaaccaaaattttatctagagtcaccaagattttctatatacaatgtctggcattcaattagaaaaaagttatcaggcattccaacagacaagatctaaagcaaaaacagataacagaaaggagtctatgggaagtgcaaatatgaaagtttatcaggcatagacattaaaataatatgattgatatggtcgcagaattagatgacaacctagagaaattcattagagaactgagatatctacaaaagaattaaacaaataatatagaactgaataaaaagaataaatgcaattaagaacttaatagaagggttgtacagaaggttaaacacagatgaagagaaaattaatgatttggaagatatgtcaataggaaatatccagtgcaaggcccagagagacaaaaggaaggaaaattcagaattgagatcatgacaataataatacaaaagtttgtgggagaggcagtaaatcgaatttaagttctaggccatctttgccgtatttcttgtctcttttgttgattctatctccattcaattctggtcctagattctcttgtctagagctcttcgttgtggtaacccctgagcacatgtagctgggtaaattaattaaacttaaataaaagtaaaaattcagttatttggtaagactggctgcatttaaagtattcagtagccacatgtgtccagtggctgctgtattggacagtgcagatatagaacatttcaataacttcagaaggttctattgaacaataatctcattccgtgatattttacatttttcatcagtctgttttctagatctttacctatgatgatgttacccctgtacatggaaactttccgtgggcccagactcctttaatgtgatgttcaaagtttcacacagtgtaactcaattctgtttccctgcctgttgaaagcaggcaaaatgaattcagtgatctaccattacctgaaagaagacaaaatgttctcacaattagatgcctgtggctctgtgggtctgtcttgcatggagaatggtgctcagagcactaaccttgagtcatctgatgacttcaggttcctctatccaggaatactgggacaagtacactacattttagaaagattcccactaaaatggtaaaataaatcatgtattaattattgggtttgccactgggaacttcttatttttcaagtctatggggcaagtggggcttttactgaactgcatcctgagcttgccatttactggcttttaaacatggatgacttaacttcaacctctcctgtgccccttgtttcccaactgttaggtaaagtccttgcacccctccctaacatgtgagttttgacaactaaatgtggttttgcaaatgtagaaattgctttgtaaatgtaagtgccatgtgtaccatgtggcattattttttcatactgtgctgtttcttttttgtctttcagtcatttccctcaaagcttctgaagagtcatcctttgagaaaacaaaagagacttgggcattttttgaaggtaaagcttgtatatttcttttttttattgctctatagttgctttttctttttctttttttttaaattatactttaagttctagggtacatgtgcacaacgtgcaggtttgttacatatatatgcatgtgccacattggtgtgctgcacccattaactcgtcatttacattaggtatatctcctaatgccatccctccccctttcccccaccccacgataagatgcagcctcacttttagacaataggaaggaaacagaatataaagaaaggaccctaacttcttagtttttaagttgttttcttggtctaaacttactcaaagtgagatggaaatccctgacagtatcagcccacagttttgaaagagtggaagttaaagcaccagtccacataatttttgtttgttttgttttgctccagaattcctactcccaggtgatattagggacgaatcttcaagtgatataaaaatgataagtacctctactgtgactacattttatttcaggttgcttaaggagtttggggttctagaaacagtttgcaatccttaaccaagtaattttcaacccatgctagaatcactcatggaatgttaagaacatgaatgcctggaccacatctctagagattctgatttaattggaagttgttaaaagctccccagatgattgcagcatgcagccaggctgagaaccatggccttggaacagtggttcccaaagtgtgattgcagaccggcagcatatgcatcacctgggagcttgttccaaatgcacatggctgtgccctgccctagcttatagaatcagaaattctagggatggtgcccaagaaatccggggtttaacaagacatccaggcaattctgatgcacattcaggtttgggccttagggcaggggttctcaacagtgggtgacttttgctactccagggtacagttgccaatgtctgcatgtatctttggttgtcacagcttttgggggtactcctggcatctagtggcaggggccaaggatgatgccaatcctacaatacacaggatagtccccatgacaaagaattttggctccaagtatccagagtgctgaggttggaaaaccctgtcttggagtaaggaaagttcggagaaattattatcataaagtgggtgaggattatgatcataagcaattaaagaatgcactttgtgagttctctggcagagctttggatcagtgaaaggctgattaatgttcaaaggtggtcaggaactttgtaaagattatgtctggtgatggtacaacatttattgatgaggaatgatctagccaaaagtctctaaggagaggcacatgtcttgaggccttactgtcaccctttgttaacccattgtatgatctggcagaaggagggccatccttagggagcaagtacttgctttcaagctcaccccttccaatgcctagttataaagcagtagactgaaacacattctgtcttaggaaaatgtaacttttattgtgaacatcgtttgcagaccataaggtgtcacccacataggcctctaggattaattgttttgttttgtagtcataaatattttgtttatgagattgcactcatgagaatccaacagtgattctttgtatttcctgatgtttctctgcatttttgtagttgcctttttctttatttgatgactgcctcctagtaaaataatccccatttctcccactcagcctctcattaagagaatgcctactcattggcattggcaaagaaatgaaaatgactttacttctcatagagtgaagcagtagtaagggcaaggtttacctttctcattactatttagtaaaattgaggcaaccccattgatgtttgccccatgtctctggagctgccctgtgaccaggcactgtgatgggttgggatatggagagggcctggctgtggcaagggtagatcactagggatgtgacagctggagccttatgtatcatcagatgcatcagaatcttccagggagacttcaggctccagcccctgaggttctggttataacattaggaagggatcagagaactttcagggccacaggtgattcctatgcaagtggtctgaggaccatactttgaaaatgccatggtgcaaaaacaagaccatatatttggaaagattgtggcatttagacccaacataccccacagcataatcagcatttctgaaaccctttgtgcaattaacagtatctcataattcatgtgcagctatagaatgtcagggttactcccgacctaactctctacatgaaatctgtagcccagtatgtgctctcttctcaacagagagaatcaggcctcatccaaaagcagaactggcattctcgctatgtgtagtgcctgcctcagagcagctgtttacagaccaatcttttcctatgatttcggcagcagcagcgtctccgtgctttgcttttttaacccagccgtagctttggcgaggttagaggtacagttgaaactccctggcgcatgatcccaggccttttgcccttttgttcctggacgagagagctacagtaggggttgtggatggatatccatcctcctggggcttagttcatcctggctgtgagcccactgcacaaaagaggcattgattgtcaggcctctttgtgagatgctggagtgagttaaaatcctttggggctatcactcaggtatttcaccctgagcaagatggtattacaggctggattaaaaaatagaaatacacagccttatgtctcaaactgctatctcctgacttttccatttgccctggaaatgtacaagactgaagcttactttcttgattcagaaagcaggggagagcggggttcctggactctgctgaggggcactggggtcactctttttcaaaggagcactgaatatacccctgctgggatcagggttgctgggcaacaggtgccatctgcctggccctggcttggtggggctgtttgggagggcgggagctggcatgctgacattatgcaccccagtcttggcctgtctctgcatgggcagctgctccagcctgccagccctgccatctgcttcagggaggcctgggcattttctacatggcagcttgcagttgagtctaaaaatggcagtgatgcctttggaagttcaatggcaaaagacaaaactgtaaatgatttaagagaaagggaatgtaacatgatttttagaattattgtgggtgtgcagctatatgtgtttttttttcttttccttttgtttttgatggagttttgctcttgttgtccaggatggagtgcaatggcatgattttggctcattgcaacctccgcctcctgggttcaagcagttctcctgcctcagcctcccaagtagctgggattacaggcatgtgccaccacacctggctaatttttgtatttttagtacaaaaatttgtactaatttgtttcaccatgttgacaaggctggtttcgaactcccgacctcaggtgattggtctgcctcggcctcccacagtgttaggattacaggcatgagccaccatgcctgaccatatgtggtattttaaaagtgaactccagatttgattaattgcagatattttgttaaactcaagcctttgttgaaaggtctggcttcaacctttcaaccagcattatttggcctagtctgagttttaaaacttttgagccaacattttatagagagatttttacataaaaaggtaaaggatgaattggaagatctggcaccactgggcgggcattccagcctgagagcagtgccctggaactgagtgcggcagggctttgcattagctgacatgacaggaaggtgactctgcagtcgtaggaatttgtgaccctggcttcaatggctcagagtttaactgttgtttgcagagaacagccagggaggggggttttcatgttttgagtggacacagcagggtggttatctttatgcaacaaaaggaatgcttgtaacagaagggaaaaaaattcggaacataggcatactggttgctgctcaatcaaggggaactcaggtggtctttctgagcttttcttctcctgcaaggcagcactttttacagatctgtagcttcaagaacaaaacagagagtggccatgaccggtcttgtgtgtgtggggagccacacgcaggcaggaggtgcccgctggctggtgtccataactggaggcctgtgtgtttggcggccagctgagccttccagagtcgccagatgttttctgattctgtagccctggctgcctgtggggagccccctttgagccatgttgaggaagctgtgaactgaaactgtagcttgggccttttgaagcccctgacctcctgcctgggcagagtgtgccccaaatgtctgcagcatgctgctagggacacttggggagagatgcctactgcggttcttacctgcaaccttgtccctcctgggttcctgctgttctgaagcgaaggaaagagctcagatgaagaggtgagcttgtggatcagctgctgtgctccatgggcatggaagcttttgtaagacaatttttctctccactccatgaataagactaaaggcaagtttctctgccttttggtctggggaccacatttgcatagtcccttccaggcaggtgctgtgttcacctgcctgaggttctgtcggcctggcagcctgactgtgttgttcaccatcttctcctgccagcaagggctctgccatcctgttctggagtagtttgctgaccaatgtggaaaggcaggactggccgtgggtttgctgggttgtggccatcctgtgccctgggatcctgccacaaatcctggtctgtgaactttgctctgtccctgagttcgtcatgaagtgtcttgtccagaatccaagagtcctgttgctgagtttcacactgtttaaatggatgctgcagcctctctcctaattctgacccctcacagagttctccaccctgttaatctacagagcccacacatcagagacacaggcatttactagaaaggcagttttgatttttagctatgtgagaactttctcaagctcctcacattccatcagcttctggacctctctaacctgactctgcccccaccagcctactgacagggctttcctccaagactttcccagtagcttcctaggagcaaaacagagtggatgttttccagcagttgatgctattaaggcatccttcttacagtgctttcttctgggcttccagaactctcgccccagccctcctctgcatccatgactagctctgatcctttgtaggagactcccttccacacacctgcccctctctccttaaatgttagtgcagatgcacccttcacctgctaccttgccctaaggcactttctacttattttattttcagtccagacatctaaattgccaagagcagaaatctattcaaactagcttaggcaaaaatgctgactgccttaagaacacaggaagatctcatagactccaggggcagaggttctgctgggcttccctggggcctaggccagggaggggagagtcaaaaggaacctgaatgtctgattccatttcatgccccctttcttctcattaaccataagcctgacctgcttctccaggctctccctgggagccagccacctgctactcccagtaggcttgctttttcagcttaagcacttaactaactgcttctccacgccacaagggctttacaaatgttcttttcctgttgactcagctattccacttctaggaacttaatcttgagaacatattgtgaaagttgtactaaggtttaagttcatgaatgctcaccacagaattatttatgatggggaacaggtagaaacactttgagtagccaatagtaagagattgttaaatcattgctgatatattaatatgataaacttttatcatatttttcaaaatgattctgaatcatttttgaaaagaatttattgagaaaatgagagaaattgaaaaaagatgtgaaagtatatgatctcaatttaaaaatatatgcatattcatcataaagtataccaaatatttattaatagtagttatctcagggtgacaggatggccgatggcttttttttctatacatttttgtattttttgttattttaaatacaactcggtgcagaactctagccctcttggaagcttctctcagcctccccaggctgggctgggtgtctctgagtgttcctggtattggacacacgttcttattgttacacttactaagtggtcctctatttcttgaagagaaagcctttgtgtgtgcatttttatctttcttggactcaggaaagtactgaccatggctgatagtaaatgtctgttggttgtagaaagttaagtcaacagagaaacatttttgctaagttcaaataaatgcctgtggcatttttcttcaaagatggttagaataatgcttttggcttcccttttcactttctgagcagcttggcattgtattgatcagactaatgataacgttgattattagagtttaagaaatgtaagtatatgtagctgggcactgagtctcatgcctgtaattttagctactcaggaggctgaggcggaaaggtctcctgagcccaggagttcaaggctgcagtgagctgtgattttatcactgcactccagcctgggtgacggagtgagaccttatctctaaaagagatgtatgtacatgaacatggtttaactgttcaacttagacaactttttattttgagattattgtagattaatatccatttctggccaggcacagtggctcatgcctgtaatcccagcactttgggaggtggaggtggggggatcacctgaagtcaggagttcaagaccaacctggccaacatggtgaaaccctgtctctaccaaaaatacaaaaattagctgggtgtggcggcgtggacctgtagccccagctactcaggaggctgaggttggagaaatgcttgaacctgagaggagaaggttgcagtgagccaagattatgccactgcgctccagcctgggccacagggcaagaaagaaaaaatcaatttctaaaaaatcatacacagagatcccttgtaccagtttgtttcctttacctaatgtctcccaatgatagcattttgcaaaaccataaaacaatatcacaaacaggatattaacatccatacagtcaagatacagaatatttctgtcattataagtggcccttgtagccaaacccattttcttctcaccaccacccccttcttaactgctggcaaccactcatctgttctctatttctataattttgtcatatcaagaatgttacattgatgaagaatgtcatatcaagaatgtaaccttttgggatttttttttttttttcactcagcgtacttctctggagattcatccaggttggtgtgtgtgtcgatagtttgttctttttatttctgaggatgctgtggtgtggatgtaccacactttgtttaactattcacttgctgaaggatatccggtctgtttccagtttttggctacccaacatacatgtacagttttccatgtgaacttaagctgtcatttttctgggacaaatgcaaggaatgcaatttctgggctgaatggttgttacaggtgtctcctttgagaaactgtaaagctctattctagagtggctgagcctctttacattcccaccagccacgtctgagtgacccagtttatctgtatccttgccagcatttggggatgtcactattttttattttagccaccctgaaaggcatgagggatattttactgtagttgcattttgcatttctctaacagcgatagaagtcaaacattttctcatgggattgtttgccacctgtacattctctttagtgaaatgtctgtatttttttttttttcatttctccaacaggattgtgtggtttttgctgttgagtttttagagttctttagagtctggatagtagtcctttgttggatatgtggtttacaaatattttctcccagtctgtttgactttttatcctctttatatgtttgtttacagaacatcagtttttaattttggtaaagtcaagtatagtatgtcaagttttactaatatagacggtgcctcttgtgtcaagtctaagaactctgtctattcttagatcccaaagatttttcttgtgggttttttctgaagtcttctagcttacattttacatttaggtttgtggttcattttgagttaatttttgaataaaaggtgaggtttattttagttttattttctgccagtggaagtcccattgacccagcaccattgattgaagaaactgtccttccgccgttgaattacttttgcacttttgtcaaaaatcaactgagcatgcctgtgtgggtctatttctgggctctctgttctgtttcattgatctgtgtctgtccttgcaccaataccacactgccttgttgactgtagcactgggatttcaaatattccaattctgattgttctcttgccagcgcacttctgctgcggcccccagaaggctgactcacgtgtctgtccttgcctttcagatctctatgtgtatgctgtcctcgtgtgctgcgtggggatcctcagcattctgctcttcatgctggtcatcgtctggcagtctgtgtttaacaagcggaaatccagaggtaagaaaacagataaggtcatgtctgggatgggagcacaccccgaccacagacgggcggaagatgctagacaaagtaccaccttggtggaaaagtgcattgtgagtcagggattatttacctgtgactgtgggcaaagtgagcaagctgtgtttcccttggactctgctaaaatacactgtggccatcattgacatcactgaatttcccctttctcggtttctgaggccccttcctgctgtcaatctccctgaagagtctgtggcatcagatgagcctagggttggattttgactctgcagtttgaggctgaggttttgggcaagttcccgagccattctgaacatgggtttcctcatttatgaaaggagattgacaccctcttccctcagtggaatgttcttatgagcgttcactggcaggcaggtggcacttgggaagtctccccagttctttccctgaccagtctgagagttcccttccgtctcctttcactttggtgtccctgtttctctgcactctgccttcagccccttcctgccttcctctcaggaaagtgtagttctcatgactctcatatctctatgaacactgcctgatttctcgagagtctctgcttctccccgagccccgatttcacttgcccagcagctcctgttggaggtctcctttgagagcctctccctgcatcctgcttcagaatctccaaaacagcttggggacactgtggctcccagagatgaccagggtaagagccgagctctggaaatggaccgactccggttccagtggctcccttacttacaggctgacaacctccttctgtgcctgctttcctcatctgcgacatggaggaggcaggagtgcaccagtctcaggctcatagtgaggactaagttaccaaaagaaagatgctaaaacctgtaacacaggctccagcgaatgtcctgcttttatgttgacatatggctctaattatacacaataattgtcactgttagctcaaggtcatagagcttggaaatattagattcagtggtcacagtttgaggggccactccaacagtgactctgtgcagcattaatgcaggggtgtgggcaagcctaagggacaatgagggaggtgacacatccaatgacaagtacccatgggatgctgtttccatcctagaccttaagggacaaggagaggggaggttcctggaatgcaccatgcgttagctgcagctttgggagaggtgtcaccatcaggggtctgcagagagggactcagctcctgacaaaccaggaggcagctgggagggagccaggatggtacactcctcaggccctctcccctccccactttggatctcctgctgctattgcccttggtgccacccaccagaagccagggggtcaggaacaggaaggtgcctccagggctgagcaggctggacaaaggtggacggggatccagagggcagtggagaactccagcatgctccacaatcggcaatggggcagaggctgtagcatgggtgtctttcctctggagcctgtgctctcccaccagcctctgcctgtgtctctatgctgtccttcaaagccagctccagggccttcccctgcaatacccacctccctcatcagtggcaatgcagctttttcctgttctcaacccctgaatactcttgtgagcttgtggcacattgcacttgtgccttggcatgggccttccttcaagaggacagtgtgagaggcagggaccacacattcaattcattctccttggaatgtggctcaggacagatgctcagcacatggtggacaaatgggtttatttcccacctgccttacacccaactgttggagtgtggaagccacataggcagtttccaagctgggtatgctctgaaggcacttttgcctgggctcaggggcatgatcgagagtctgcactggctgcaggccctgctaggccctagacaggatcagggaaacaaagaagggccaagaagggcagactgggacatgtgcaagcacctggcatcctcctccaggcctcacagagaggcttcagagaatggggatcccagctgcctcatccccactggagtgggcctcagatggtcccatttgcacctgtgcacagtgcctgaaaaccctccccaaaccacagctgtccagagcgttgtctgagcacccgctgtgggccaggcacctcatatggcccctccatgtgcttatgtgaccctggatgagagcgacaatgctcttacctgacagcacagctgaggagcttgagaaggccctgaaaccagggagcggtagggtgaagttgagccccagcctctcaactgctggagtgtggaagcaacataggcagtttccaagctgggttcccaagcctctcatgtttctattcaagaaaaccttggctatcgggggctgaccttgccaagggaatttttctttagccctccatggcagttgttgctgaggctcttccaagacagctctagccagtacctgcatctcctagtagtttggttttggttgagtgcaactcccattggcagggcaggtcttgccccatgcacctccaggagccaggcatctttcaactcactgtggggccaaggatggaggaccgtgcatgatgggcctaggtagtctccttcagctgggcccaggagtcttagagcagccctccccaaaacttcaggagcagaccgttcacgtgggaacctgctcaaatgcagattctgattcaggatgtctggggcaggcctgcaatcctacatttccagccagctctgctgctggtgtgaggccatgcttggagtagcaaggccttagagctgttcttcttacctctatcccatcaagcatcctgcttttacaacaagtattttggaatgatctctactattttaaaatgaaattcatagatgagctatactatgtgtaccccctcaaatcaacttaatgctttataattaaaggaaaaatcagaggaaagcaatttatagcacactgagacaaattctagtattacacctcttctttgaatcagtgtgaatttcagagaagataataatcctttatatttgacgcttgaaataaacgctagataagcacctgtttgtatatgcgaagactcaacatgcaggggacaaggatcagcatagacagacacagatgggctgtaatatccaggagaggcactgcccatggtgatgggattcctaacatcccaactgttggtagggtttttaatgaaagaaaacactcttcagccaatttgcacaccctttaaacattcattgtgcattagcatggagaaaatacacaccttgtgtttccacataaattggacttagcttccaggctctcatgaatgggtttcctcttttctgcatgaatgtcaagagggttactcaaagtctataggagaaatcttcatttgtggactttcctatatatcacagatgtcaagcttccctgccatggcctatcaatggtcaaggattgtccccaatcagtgctataatcagaacatcccctgagcgttccaagttgtcctgtggttgggggaagggcaggattgttccccctggaaaccatgggctttgagctgattattcccaggtccattgaattggaggaaacaaggcctctgggaccccctgagacaggctcaacaagggagtcatggtgcaaatggaacactgtctgtgagtgattctgcttctgccatgctctgtctggggtgtaagtggtcacatcaagcccctgtgtcctagctgagaaggtggggatatgcagagcagtggcaaattgcccagatattgctcaggacccataccccacttcctctgaatctaagccctgtaccttccactgcagggccatagcagaagccgtcctcccagagccttggcaccactgcaaggggttttgagggtgttccctcccctagatggtgcccaagaaggttgctcaggctcaggtggtgttccagaagcagattggcaggtagatttgctggtagatctgcatggatctgtagatccatgaggcctggactgttcctaactttttttctctatgaaatttaataacaaaaatgatatgataggacagaaaggatatgataaatatggccttgttttaaggtggtcaagacttccttcctggctttgaaggtataactaagaatagttgcctttcctgtcaacacacacgggtaatcccaaaatgttcaaggtatctcttgctgagtaacaaatcacccaggaagtagtggcttaacacaacatttatttgttcaagattctgcactgggctgggtgcaactgggtggttcttctggcagtgtcacctggagtcatctgtgtgtcttcagccacctgaagttgaccaggactggagatccaaggtagtgccactctcagccctggggcctgcctctgagacaaataggacagcagggctggtgatatttctctccctgtggtgtcaccagcaaggtagccataccccccaacttgctccaggctccaaggacatgcctagactggacgctggcactgtgtcactctcccacattctatcaattacagcaagttgtgaggacgggccagacttagggaagaggaagagtgatgaggaatgtgtggttatctttaaatcaccactcaaaggagactttattgctgtctcttctcactgccaggcccagtgggaagcaagggaggccaagcaagcaaggaacaagtttgaggaggattaagggatactgcccaatcattcctggtggctggggcataactgcgaccacctgtggggcctgaggattggtggtgctgagctgttaccccagcaaccagctggttcctgaggagcatgccctatttgcatccaagcaggtttagaaggggtttgggccatggggctgacagtgattctaaagtcttaggctctggcaggtaccagctctacagcaggcacagggcacatccccccatgtcaggctgcaccgcaagatgctcctccttttatggattagctgaaggtggccatggctctcattggaagcaatcaagcatttgtagaccaagccatgtgtgtccaaagatcccactgatcctcagaaatgacatcactaaaacctgcaacactcttaactttcaaatataacatattctgtcatttaatgcactgcactataacaaactttgcatcaccttgattaaaattagtagtacatctatacactactgagaacagtgcttggtttgaggaagatacaggcccttgttctgttcatggtttccagtctctctatgcagttgtatgtttgttgggcttccctcatcctgaccacattcaggagacccaacccctcctgcatgtgtgggagctgagggcatcaaggtatgcaggctgcttacacacatgtggacaggagagctgagcccggcacctgctctccagcacctgcagcaacatctgcctggaaagaggacatcagagtagctggtcccactccggatgcaacccccagtgggaccttgagataaacacagcccatcccaggagccaggaggccacaggccagcccctcttcactctcagccttgctgcttctctgccctcaccccaagcctggcactgctttgcctctaagggcgctcaacattcagtgagctggagctgattgcacacatatgttgcttgccaagcacaaacatgtttccccttccctcctgagcctcaagtctctgtccttgctctttgttgtgcccgcagtgccaggcacctcatcccagggccttgacagcactgagtcatcctggaaaacaccagcctggaattattcttctggttcctcaatcatacttgtttccaaaggcttttgcttgttcgcgaattagtcctgacctgctgccttggagtggctccaacaatccaaccttctgtgtctgagcttttaaatgtgcagtttttaaggcacaaactcgaactagataggaaagaggagtggcctggcttctttctctgtactcatcagtgtgagctgtgatactgtttggtttgcacagattgtgctagaactggaaacagaacctcccaaggcttgttaaacacccatgactcccctgtcccaggcactctgcttctccatgaggatgaagctaagggcctgtggctgttccttccagagagatgcaagaaaagggagctggaggttacatcccacccacagccagactcgggtggggaggaggcctccaagcacagaatggggtggctgtggatgaggagcagaggatggcctggggcctttgagaggaggaaggactcattcatctggagtcaaatacctggacagctggagcgagatctctctggttcttcagtgggtgccgggaggctcagctggctctctggtcaggccccctgagcacccatctttcctttgtgggggttggttagcctccctggagcacgggacttggagcctagattcaagctcccttatttataaagtgggtcttctgaactcctgactcttctctaacattggaatgaaggttcctcttacctcttggggctgtgggaggtactttcactgtgctgagtgactgccgttcctggcatgggcagctgcaggggcaccttctcatgtgcagggctcatccttcctggggtgccccttcaccactggcagcccagctgctcagacaagtgaaggcccttttcatgatgccccctagaaatatgtcagccatacaggtgatctgaccatttttttttttagtagtcacattcaaaaaggtaaaaagcaacaggtaaaattaattttaatatttttacttaacccactgtatctggaatatcattccaacagtatcaacaaataaagatgatgaatgagatatgtcatatttctttttttttttttttttttttttttttgagacggagtctcgctctgtcgcccaggctggagtgcagtggcgggatctcggctcactgcaagctccgcctcccgggttcatgccattctcctgcctcagcctcccaagtagctgggactacaggcgcccgccactacgcccggctgatttttttgtatttttagtagagacggggtttcaccgttttagccgggatggtctcgatctcctgacctcgtgatccgcccgcctcggcctcccaaagtgctgggattacaggcgtgagccaccgcgcccggccgatatttctttttttatgctaaggtgtggctttatcatctggtgtgatctcacactccagcacatctcattttggattcatcacattttgggacttgatagccacctggagctcatggctgccatgtgggactatgggaccctggacagacagctgtgcatgctggtcctttgcatgtgagaaatgtggcctctaagtggctttttgtgccaaaggggcaggaggtggaggacttgcttctcctcagcttcccacttggtgatagaggtggtcctgtccttataactgtaggcctggaaggttgtccaggcaggactcattcctggagggggctgggctctggggcctgacatggtggaaacagggctgtgtgtagtaaggggtgcaccctggtcctttctctcccactgggtaaatgcaggcaggggctgtgggttgagccctgaatgagggaggtgctttctcaggctgcagggctcccagcctgtgctgggctgcaggagatggggagagtactgtggtccttcactctgaaaatgctcctgggtgcttactgtgcatgaagtactgtgaccccttgcaacgccagggttgccacagtccttgcctcgagtgcagacacttgatggatacagcagaaacatccatgggtcctattgcggggcctgtgcaaagcctggaggtcagaagacgtggccagggcataggggtaaggtgggtagatatcaaccatgccttggaggtcccaacactgttacggggcctgataagatgggagtaaggctgcctccacctcaaatcacccagcttggggtggcagtggtgatagggacaggtctagatggggaagacagagccttcaggctggacatgccatctgggaggtttgccatggggtgagagtgtgagcagcatggtttcagctgaaaagaagaagaaagggtgggggtggtagggagtggcccagggcctgcttcttcttatcaggagaggttgcaaaaataagccttcctttcagagtcttcaaagtcctaaggatcctaaaataaccatttgagaacacgtcctgaatgttcacctctgtgcaggacggttgcttctaggtcaagtgcctggtgccaggccacagcccacggggtgtattggctccattacgcaccctttattggctgattctcttcttggtctccggcactttccagtgggtttcctaggatcacctcccacataaactcttgacacttgaatctttttcttaggatttctgcttcttggggaggctaatctgggttggcacacttcggtaaatattaatagcactaattatgctatgcatatttaagggtgactctcagtgaagtctatttctcaggtgcctgtaaacctcatctttgatgtccagaatcacttttgatcctgtgggcagtccctcttaatgggaccatcaaccccacatacatgctgccgagatctcagaacggtgcctcagcaagcgctggcaggggtgcatctcctgtaccctggcactgtctggcctcatcgggctcctggcccttcttagtcggctccctgcctccggggaaccctgcagctgctctactgttccctgcattcctgatctccaggctgctcaccttgctacctcgagcactggacttatcaaaacaccggtcagctcatgggattatcttgggtcccagtaccatctctgcttggcttcagctgtggcacagtggtctggccatttcttctgtgagactctatttccccacctgcaggacccctgacgccagctgcccagtgtctctgagaatggtgcagagtacagttggtcctccctatccacaggttctgcactgaggattcaaccaaactcggataaaaaatatttgattaaaaaacaattaaaaataacaatacaataatacaaatcatactgatgaaaaaaacataacaatggtttacatagcatttaccttgtattatgtattacaagtaatctagagatgattaaaagtatacaggaggatgtgcgtaggttatatggaaatactactccattttatataagggtcttgagcatcttcggatttcggtatccttgggaggttctggaatcaatgccccaaagatatgagggatgactatagttacaagagggctctggagccaagctgcccaactttggcacttcccaggtgtattaggttgcggaggccgccacagcaaagtaccacatactgcatggctttaacaacagaaatttattatctcacacttttaaaggccagaagtcttgagatcaaggtgtcagcgggattcatttcccctgaagcctctctcctgggctttagagaccgctgctctccctgtgtcttcacatggtcttccctctgtgcctgtctttgttgcaatctccttcacttttaaggacactagtcagattagataagggcccagcctaatggcctcattttaacttaattacctctttaaagaccctatctccaaatacagtcacattctgaagtactgaggattaggcttcagttaggctcagtggaggagacataattcagcccgtaacatcacctgagtgactttgggcaagtttattaacctctctgtgcttcagtgtcctccgctgtaagataaaagtaatgacaaggctactgtgaagattaagttagaatgcaaagttgtggtcttcaaacttttttgcttgcatagttcctaaaataatttcaaaaactatgcactcaatcatttttttgttgacatctaaactttttcatcataaatgtaaattgttgcgaaagatgtaatttccatctttgacatcttaaaaatgaaatgattagatccatctttctttcacatctaaatgtcttgaatttaatgactgtcttcatttatttaaagccatcatgagaaaaaaagtacctacccaaacaagttttaactgttagaaattttgtattgttccttcttctccttgaatttttatcttcagtacacttccccacaaaatttcatcctactgtaatacatcttttgttttgaaggttctttattgattaccctattttacttatctgtaagataatatgtgtgtacaaatttaaattaataattttttaatttcctcatttcataagtgtctgttaaaatattttttagattgacttattagtattgcacaattagtaaactttggaaaattagcataagattaatcaagatgacataaacatatcataaatttagatacataatagccataaaaagcaaaatttattgggaatgcatttttattgaaattgatttttatttttacttcatataccctggtatgaattttttagggataaaatttatcatcaattttgttaatagatattagctctgaaatacttcaatataaacagagtatgaatgaatgaatgaaattttcttatactcctcaatttttagaactacttccaaggtatatgtcaaaagtcacatcatgatttatcatccaaaatgatttttaatactctaccagatgacaattggattaggtcattattcaatccttgttgaaagcaaagtattagaaacatcccccccttgtgaaagatttagttgcctagttaataatttgctttattgacacagatattagtattttacattaattcttgtttgatgtctcatttacgtttcaatctgggacaggtctccaggatggtgtgctttgattttatgaatagaaaagggtgatgttaaaagtggggaagggaaatgaatacggccagacctcaggcatgttctaagagaatgcattcttaggaaagaataccatgggaggtgaggatgttaaggtgattccttaaaactgttttgccaaagagtacccaggggtatccagaccctagactgaagaccactgatccatctaataagcttagaatagtgccagggacacatgaaatgttcgataaatactaactatggttgttattattgttgcatctatagattatctagtatacagtagatgctcggtaaatggaatacagaaagagtttaggtattaataggaggctgaacgagataaacctgtacagttccatttgaagctgagattctctcatcttactttggaagctgcgtaacagatcaccccatatgtaacagcttaaagcaactattatctgctctcaattccacaggttgccagtttgggctgggcttagctgaccatttcttctgctggtctcagctggagtcattcatgcagctgcagtctcttgatgcattacctgggacctggttgttcggggccttggctgggacagctggtgtctgctccgtgtagtctcatcttccagtaggctagccaggcttcctcatgtggtgacagaaaaattccctgcaacaagagagggcaaaccccatagcacaggtgtcttttacacctctgcttgtgacacattggctaatgttctcttgaccaaagcaagttcatatggccaagcccagagtcagtttgggagggggtacacatgggtgtggacacatacaaggaggtgtgattcactgagtccactgatgtaacaatctaccacacaattcaagggtccccctggttgtttcagctttacctctatttgaagtaaattcagctgtgaacctcagagtggacacttgctggattatgtgcctaggtattcttacttttcctctgcagccagaatcatttggttttcctgtaggaggaggttttggtccaagactcttttcccgagggcctctttttagtcctggaagagcattaatcagagaattcaaactcatttttcaatgaggagcttctaaatggacacgttattccatctggcctcaagagggctttcttatgactcaggcagagcttagaggttgagtgactctattactccaggatcccaacttaacctgccttggcccaaaatgaatacccaggaagtctggggtgtatggcttaatgcctggctagatccctggctgggacatatccagtcactgttgtgttcatgtgatggctctgctgtgctcttccaaacagaagaatgcaagtcttgagagttgggtggtatagcaccaatacctgaacaacacctggctcccggcatttccttgtaattcctggagcatatatatctgaagtagcattggtttaccatcttctattatttttcctttcacagtgagacattatttggtgaaatgccctcagaacaggtaagaatattttcttccttttttcagatgaaactctttgccatttaactttcttttgatattaccaataaattgattaaatttgtagttttacctaaaagtctgcatatttgtccacaaatatgcctgcaaatgtgtatcctgcatgcatttgcatgtttccaaggtctacagtctggttttcacccccagggatccagagagcatgcagcttttgctggcccagcaggcttgctggaggaggcttggtgtatggtcctgcagagctgctccccagtttaggaaggggctcacacttgctctgaaccactttgatacattttgaccacaaacacccccaattctcttcaccaatgctgacttactgtatgccctgcttttagctggtgaggcacactttataggtaacataatagttataagagatagtgctaattcaaagcgtttaaaaatttgggacttctgatccagacaagatggcataggtcaatttcttccttctctttcctgctgagtaaagctttaaaccttggaaataacataagagacaaccaaatgaagactttgaaaggtggtgaaaagaaggtaaactggtttggaatcccaggactggaggagtaacacaactgctagacatcttatgttttcccatccaacagcagaaggtcacccagacttgcttttttcctactccaatctagcaacagaaaacattcaggtaagctcattcctcccctggatcaaaggggagttcccctgaaaacctcaagtgagcccagcatcagctgcaaagaggatggatcaggggctcctcccacaatgagcaccagaggaagagctcactttttcttccaggctaagactcccttcctcaaccaggtgacaccaagccttcagggaagagccagcaagaggcacctagacacaaaagtggcccagcaaggaagcttcttcatctccatgggtgtgaggcttctctcccctactgaaaaacatccagcttccaaatctgaggaaactctctctgtcccctctggcagcaccagcagggcccagtggcaccatataaaccaaacagaccaaaataatactgtaaagtctctgaaaatgaaaatgccattggaactatagcccatagaagcagaccaagattacatgataaacctgggtgactgcctacaaaaataagagatttatataggacctgggaccttctgacaagctactataaaaaaaccacccatcattttaaaaaccacaaaaatcacaacttgaatgagaagagataatagatcagatcaacactgggatgaatcaggtgttgaaattatctgacaaaaattttgaagcagtttttttctttctatgagatggagtttcactcttgttgcccaggctggagtgcaatagcatgatcttggctcactgcaaccctcctagattcaaatgattctcctgcctcagcctctcaagtagctgggattacaggcacccaccaccatgcccagctatatttttgcatgtttagtagagacgggatttcaccatgttgtctaggttggtctcaaactcgtgacctcaggtgatccacccacctcatcctccaaaaatgctgggattgcaggcatgaggcaccacctgcaggcttaaagcagtttttattaaaaaaaaaaaaaagattcaatcatcaattcaaattatcttaaaacagttgacaaaataaaaaaatctcagccaataaagaaaaaaacaaacatatggaaattatagaactaaaaagtacaaaaacagaaatgaaaaactcactgttcgggctcaataggagagtggagatgtcagtggatagtttgtgaagtggatgacagagcaatagaatttatctaatctgaacaacagagagaaaatagactaaaaacaaacaaaaaatgaacagacatcaaggacctacaggacaaaagatccaacattctatcatcagagttccagaaggagaggataaacagagtggatctaaaacagtattagaagaaataatggctgaaaactccccaaatttggcaaaagacaaagccctataggtttaagaaactgagtgaatgccaggcataataatctcaataaaatccacttgaaaacacatgataattgaacagaaaacaaagttgaatgacagtgcatttctgctctgaatccatgaagggcagaaggaaatggcacatttttaaataccaaaataaaagaactgccaaccccaaattttatatccagcaaaactgtcctccagacatgaaagggaaataaagacattctcagaagaaggaaagctaaaagagattgtcactgtcagaccaactttaatgactaaaatataatcttgaaacagaaaaaaatgttggagccttaggaaggaagaaggaataatggaaagagcagaaataggagtacatatggtagagtgttctttccatgaatagtcgtgagttttaaaaatcacatttgaggatttaaataaaaattatagaattgtctgatgctcaagacaacactgtttaaaagtgagtgaggcaaaatgacctaaatagaagtcaaaagtcctgtcaaagcaatggaatgttggtgccaatagaccgtgtaaagtcacatatgtgtattgtaatgaccaaagcaatcactaaaataactttgcaaaaacaatacactcagaattcctataggtagatcttaaaatttatgcaagtaacacaaagaaacagaggaatgagaattacaggaaataaccagaaaacaaacaataatatggtagccttaattgctgaaatactatttattttaaatgtaaatgatctaaatacatcaatcaaatttcagagactcacagagtggattagaaaaatgacccaactggtatgctttttataggaaattcactttatacacagtgacgtaagtagattgaaagtaaaaggatggaaaaagatataacacacaaacaataaaataaatcaggtgtggatgtactgtagctgataagatgtacttcagggcaaaaaaccttactagaggcgaagatggacattagatgataaaggctcaatccatcagaaagacaagtttccacatgagtacaagtcaaacaacagaaccacaaaatttaaacatcaaaaactgaaagaacagagagaagaaatagctaaatctatagttttggttagatccttcaattcctccccctcatctactgattgacctgctgtagatagaaaattagcatggttattgaagatctaaacaacacaatcaaccaatggtgcccaattgagacagatcaaacactctaaccaacagtaaaaaaacaattattttttcaaggctccatgggacattcatcaaaatagaccatatcctgggctgaaaaacaagcctcaacaaatttgaaataattgaaataatagagaatgtgttctctgagcacagtgaaatcaaactagaaattaacaacaaaacgactgcaggaaaatctctaaatgtggaaacagttttttgttgaaagtgacacactgattctagattatatatgtacattttaaaaaataacaaagtcagaggacttacagttcttctgtccaaaacttattctaatgctagagtaatggagacactgaagtattgatataaagtatatagatcaatgtagcataattgagagtccagaaataaatccttatatttatggccaactgacttttgatagagatggcagggcagttctaaagagaaagctttgtccttttgacagacagtgctgggacacatgggtatccatatacagaaacataaactgagacccttgtctcacattgcctccaaaattaactaaaaatagatcttagacctaaacataaaagctaaaattacaacatttctagaagagaacaggagaaaatctttgtgaccttgggttgggcaaagtgatactaaacacagaatccataaatgaaagaattgatgtaattaaaaacctttgcatttccaaagacaccattaagaaaatgaaaagataagtaagccccatatttgcaaatcagataaccgataaagaacttgttcctaaaatatataaagacctctcacaactcaataatgaggtgacagataacacaattaaaaatgggcacaaaagatttgagcagatattttcctaaagaagatatccaaatggtgagcaagtacatgaaagatgttcagtgtcattacctactagggaagtgcaaattaaaaccacaggtgatatcactatacccccattacaatggctataactcaaaagacagacaatagcaatttctggcaaagatgtggagaaattggatctttgtacattgctggtgggaatataaaattgtgccaccacttgggaaaacaacttgatggtttcttaaaacctttaagttaccctatgacccagcaattccgctcataggaatctatccaagagaactgaaagcatatatctcatgaaaacatatatgcagttgttcatagctgctgtgttcatgataaccagaaaccagagacaatctagatgtatccatcaacttgtgaattggaaaacaaaatgaatatatccacccagtgaggtaccacttagtaataaaaaggaacacactgggtatggaccaaagcatggatgagccccaacaatagtaagtggaaaaagccagatacaaaaaattacatatcatatgattccatttggataaaatgcctagaaaaggtacatttatggagacagaaaggggattagtggtttcctacagctgagggtgggagtggggattaactataaaaatacaagatggaacctttgggggtgatagaaatgttttaaaactgtattgtagtgatgcatgaatctaaaagctattgaattatacacctgtgatcagtacattttatggtacgtcaactatgcttcaataaaaccatttgtttcttttttcaagcatatgtcccaataaggcccccaagactagggtgattctggcatttcagacttgggtaatggctggagattgtcagagctgtggatgatcagcccgccaacatgctcaggatttgctttctgtgatgtttttgtctggccttttgtgtctagcaagcagcctctggctactggggcccctcttttttcccttacagtttcctcattctgaactggggctgactgaggctggaagtacagcaaggatgtcattccagcctggtggacattagagtttgatctcccctcagccctgggataaatgaggtcaagatgaccgcagaatcttgttgaaaggctgcctccttctctgccagccatgctgggcactgtcaggttggttgggtgtctgagtggcagttctccctatgagcagtctcctgttgggtcaacccacagatttgcctctagaaagcctgcatttactctacctccatcccaggaccctgctagggccaggccttgacccataaacctggtagtcagctcctggccaactttgcattcattttcccgattagaacctcaagcctgtttgacttagtgcagcccagactggccgccagtgctagtgaattggtcaattcttgcctttatgcctggctttggcctgaattgtgctctgcctctgtagcccaggcagttcctcccgtccctgttgtgccagtagctcccaggtcccagcaccctcatctgtctgcctgctctgtgctgctgccatgggcaaatggggccctgggtcttaagctgtgatcaagaagaatgcccttctctggcttctgaccatttcttcctaagggggaacagacaaaaagcacagggtcaggagaagatgcctgggttggaaaccctcaggcaggggaggggaagggcctccggaagagaccatgtgctggctctgaggctgcggtcactgaatgaggggccttgccaagtaactgggccagaacctggagactcaagggaattccatgacttgctaagaaaagttcaaacggaaggaaaataaatctcatcttgaatgtttattgtccctgaggttgtaaattgctgtctcttggaggggtggccctgaccttcaggagtgggagactgttcctttcccagggcagaatgctctgaggatgcagagcagagagcagggcctgagtaagcgtctcagggatctgtgaggttcaatgtgcccttcccagggaggacagccctgagagcagctcagctggaggatataaaattgctccaaaattcctggaaacccggagtgaaaacgaaatccccccagttgcacagagctgtgatgcagtccattctgcaatgactctccaatggatccagatgccttctttcctgcagggcaaggaaagttgtgaggaggactgaaggggcaccacaaagctaatgcccagccaggatgtctcctggccttttgcttcatctctacttacgggattgagataataaagtacttgccaatgagggaagttataatgcagcaatgaatggtacagaaagtcaaggcaatggaaggagaagcggcagggtatagatatggaagctgaggatggctgcagagacattgcagccccctgacttcgagaggtccaatggcctctcattagaggcatctatttgcaaaagcaaacctcaccaaaatgaacaggctttactgtgatcagttgtagggtcagattaatcagttctttcaggggcttttctgggacacatgtcagagtcaggtcattctcctcctgagtgaaccctcagtctcaaagaacaccagaactctaaacagacttatgctgtgccccagccatttctcactgttgtttgcttggattttaactcacatgcatgcttgtgccctccctctgcccacatccacctgagcaagcaaggtggtgaggatgggggcagtagacgcagggacggggtctccctggccacctccctcccatgctcccacggtcattactaccttgtcatgtccccaccgcatccaagcactcaggcccagtgtccttcttccacagccctccaggcaggggtgggagtggggagggcaggcctgtgagatgggggtggttcctggcataaagaatatgcacctggattccgacagcttcagtgtcaggtagagttgtgccacttggcagctttgtgaacttgggccacttactcagcctttctgggaatgtttcatcctccacagcaggcacagacttgcctgttgtccctgtcgctaagggtttccataggaattcaatgagagaacagtggtcgtagactggtgcagcccagctctttactggatttatgtcttattctcagaaaaactctgcaaggcacagttggtttcctcagactaagagcatggatgaaactgccaatgattagaccaatgactagccctctgtcatttacaaaccttctgaatccaggttatggcttggatgtttgttcccttcaaatctgatgtggaaatgtagtttccagtgttggaggtagtcttggtgggacgtgtttgggtcatgggggcagatccctcatgaatggcttggtctgtccttgtaatgaatgagttctctcacctgatgaattcacacgagatctagttgtttaaaagagcctggcccctcctccgtctttctcttgcccccctctcgccggatgatatgcgggcccctcctttaccttccgccatgactggaagcttctgaggccctcaccagaggcccagaagcagatgccagcaccgtgcttcctgtacagcttgcagaaccatgagccaatataaacctcttttcttgataaattacccagtctcagatattcctttatagcaacacaaatgaactaatataccaggtgacagaaaagacggctcagaatgtcttgtccagggaggaatcttgcagctcacttaactagggatgctacagtgggcaggtctcagggcagctctagccagagggacacagggtcatcagggtggtggcttccagcccctgcccttctctgggaagtgctgtgtctaggtggtgatgagaacccaggccaggcaggctcccctgggcagggacaggtgccagcaggggtcagcccacatgcatccatccatggcctttgtgaatgagtcatctctcttcctaaccagcaggcacaacccggcagttagtggagcagcctccagcatggactgaagctgaacagggagtggggtctcccacccaaatacagccttacccctggctgagcagatgctgaggagtcacctctccctgccattattactaggagccaagcctgcgaccctgtggagcaccactaaagtatctcctgatctcaccagctagtgtaaaaaaatgttagcacaaacaaaaacgccagcctggcaaagtctctgctgtggacttcatgaagccagcagggaaatacaaaggaagagcttccctcgcggctgcaggagcttcttgtggctctaaggatgagcttcttgggtgatgtaaaccatttattgtaaaggtcatgggggcactgtggacagggagatggcttggcaaatacctcacaaaggagtagcatttattctaatgctgtgcagaggatgcatgcagaaatgtcatggagcagatgcagcagagagcacagctttgcaacccgcaagggtctggcatcctttctgggtgcataggcactcacttgggttgtagagaatactgccttgtcctgcttccgattcaaggactcggagagcattttctgtggtaataattatggataatactgccagtaaggtcatgataggtgactccctgtaggcacttactgtgcactagacacaattctatgtggttggctcatgtcacccacttaatggaaaagaatcatttcaaagggtccctgtgagtgggtggcaccattcatccatcttgaaagtgaagttctgcaacttttaagcagctcctggcatatggaaccaattgactttgtgtgtttcagtggcagggaaagctgctggagcaagttcaaaaagcctaaggcaagacattaggaaactccccctgtttgcatgagttcttggcctttatcaatggcagctgaccttggggagaaggggtatctacagttgttactattattcattttactttaaaagatggcaacgaattgccaccatagttgtggagaccaatgcccctccttcaagattctgcacataatgttctgggcatggggttatggggtggcgagtgtgctgtgtgaaatcttggaaggaggccatagagctgcttggaaagaaacggatggatccctccctccatctgtgtcagacatctttcttgtcagaaccaagataggcaggaagacaggaaatacatggacgtttctggaagtaaaataatcagctgaagcgacacctttcaaagatgtgtggagcaagaagagctcagggggcctggaaggatgttgggaggactggagccaacacagctccattagctccatgcactaagggtttctgaatggggatctttggcttgacgaaagcatttgacatccctaggtgtcccagttcagaccacaatacatccctttggagtgtgacagacagctttgtgcccaggaggaggggcatctactcattcaagaaggaataagattgaacagacctcaaagaagtgttttgatttgtaattcgtatgtccgggtgcaaagatcgccctgggccagaggaagcacccagcatctttgagatggctggatttgtgaaagtcccttggctcacacagttcgctgcacctcctgcacatcccagagagagactatattagaaggaccatttgatggcccagggacattaaaggcaggggtgaggactcctgatgccacatgcactgtggttcagcacaagttgctttgacctcacatttagttttgaaagcagagtgtggctgggtgcatgcttcttagttataattatgttttttggtggaatcagctcagtttatgctgttcctcctgcataaactgctccccgccttctgctcccaaatactcttagtgctagaggcacaaaattcccagctggctagcccaccatgcccaccttcattttggcagctgacatcacttgttccagacgatttccaggcacatgcccccttcctcctctgcgcttccttctcaggatggccctgggtcttaggcaccagccacaccctcagtccccaagaccccactacctgggttggcctctcctcctccctttggggcaggagtttgagcagctgcaacagtgctgtgggttccccacgctgaatctaaatcagacttgaaatgcagtagaatgttaatgtctccttctggtacttctcttcagggagatggtttaaactgggagtagccactgtggctctggctctattgaccttgttcctgttccagtgttcttgttatctgttatctgggctgggtcctgggtccttgcttcagggccagaggaagcaggccaacatggatcaagtcccatgtccccttctcagctggtgacttttgagaaggacctgatctctctgaggccccatttttgcaacaaggagggccagaggtcacggataccaagctctttccacagtgccttgcataggatggacacaaacatagctgttactgttgttaactttagtttctgaaaaatatggttgctcagaatttgttcaataccttgcaaaatctaggttggctgctttgcctggtgttctggagtggctgcccatcgctcaggaatgcagcctctctcatgacctgcctggtctgtcctgcagcggtgctttccagcactgctctattagtgggagggcagctgtcaaggggatgtcatgctgtaatatcctgggcaggaagactttctgatcaatgtctaagttgaaacttgcagccctactcactgggctgaaacaagggcaccatgaaatacccaagtggcaacatcatcctccctgggtagtaccatgaaacgtctacactgcacctgtaccctggagactagggtcagttgctatttagctgtttcacaccccatctaatttaggctatgctctctcatctgaccctcataactttgcaagagagatagccaacatacacctccccttttacagattggtgggtggaagcccggggaagtaagtgacttgcccagggtcacctctctggtcaaagtagaatcagctttagtggccttttgacccctgttcagcacctgttcactcaatccagccgctgtgtgtcatggagcaaaactgccaagcctttgtgggacagaagctccttctggcaggtggccaggccggaacctggtacatcttacagcaaggcctctgcacgtgcgacatcctgcctgcccttgttggaggcagaaaaatagccttgctccacaatgagctcccacaaatagcacttctctctaatcaaacagctctctaatttagagggagtttccgggcgggcctgttttctgtctttcttggtttgactcactccaacaaggcttgctctgttgtgtcagagacaaaatatagccctgttccaacctgagatgtcgaataacttttcttgtaagttaatcataaggtggactttccttgccaaatattccgaccagtcctgctggctcaaggggagaaacaagattctgagagagtgtctatcctatgtcaatgtggtgattcattgtctaaatgagatcaaattgtcgaaatatgaattaaaattaaatttagtgcagttttactgttttgaaggaaaattatgatgacaaagcaggtgttctccaccttaaggaaatccctgaacataatgttataagtgcacaaaaatgatgttccagaaacttccattttatattaaacagttaaaaaaaatccaaaaagagaataggaagtggaaatattatttgattctacaccgtgcaaggtgcagttggggagactacccaagttttgaggcaaaagaagaaaggaaaatgtcaaaagattttagcaaaaacaaattaaaaaactgcatggaacaaaaagccagaattcaaagggaattgggaaaaatatttttcaataaatatgtccaaatggtgtaaaagttgcttgcaaacctgtaagaaaagctcaagatcctaaatcaagagcagaaatcaagaaaatcctaaatcaagatccaaaaaaaaaaaaaatcctaaatcaagagaaggagctatccttccatcataaatgagaaaactccttagacaaacatgggaagtgtccattatcactagaaatcagagaaatgcaaatcaaaaaggaatcagctttttcttcattaaatgagtcattttaaaaaaattgacaagtggtgttaaggagggtgacgtaggtattctcatttgttgagtggcatagctgtggtgtagtactaacttgtcaaaaatcattttgacagtaagtattaaatagccttgaaaatggtccttttccatgacctggtaattccagctttagaaattcaaccccaaaatgaaagtctaagaataaaaaaccattatgcacaaatacatttttagcagtgtcatttctatattaaactgagaaagaaatgagatctttagatgttagggaaatggctaagtaaacatcggcttatttcctcactggaatagtatgagaatataaatatgaaaaatttagattaagtaaattaagaatacaaaattataatataatatgatttaaaaaacactatatatgaacaaggaagggttgaaaatttgtatctacacacaaaaaaactgcacatggatgtttatagcagcttttttcataattgctaaaaattagaagcagctgagatgcctttcagcaggtgaatgcataaactgtggtacatccagatgacagaatattactcagtgcccaaaagaaatgagctatcaggctgggagcagtggctcatgcctgtaatcccagcactttgggaggccaaggcgggtggatcacctgaggtcaggagttcaagactagcctgaccaacatggtgaaaccccctctctactaaaaatacaaaaattagctgggcatggtggcaggcacctgtaatccccggtactcgggaggctgaggcaggagaatcgcttgaacccgggaggcggaggttgcagtgagctgacatcgtgccattgcactccagcctgggcaacaaagagagactgtctcaaaaaagaaaaaaaaaaaaaaaaaagaaatgagctgtcaagccatgagaagtcacggaggaagggtaattgcatattgctaagtgaaagaggccaatctgaaaaggctatatattgtatcattccaactctgtgacatcctggaaaagacaaaactgtggagacgttaaaagatcgctggttgccaagggttagggtagagggagggatgaataggcagagcacagaggatacttgggagtgaaactactctgtatgatgctatgatgctgggttcatgccagtataaatttgtccaaacccatagaatatactgtacatcaagagtgaaccctaaggtgacctgtggactttgagggatactgatgtctaatgtcggttcctcagttgtagcaaatgccctactctagtgcaggatgttgatcatgggggaggctgtgcatgtgtggaggtgggggctataagggaaatctatcttccactcaatgtttctgtgaatgtaaaacttctctaaaaaataaagtctgtttaaaagcaaaagcaaggaagaggaaaaagagtgaaaatatttatgaagattgtgttttggttatgacagtgttattttctttggtttccatgcctgtaattaccctttttaaacacgagcatgcattattttatattggaaataagaaataggcatttcaagagtttataaaactacagaatgaagctgaacatgtggttgtatatgtaaacaattctgagaatttaggatcccttgtttgctattgttggtcaaagttttgtaaattcacattctttttggctatttgtgaatttacacaattgaccctgtactctaaagctatgaccagttagaatctccgttcccaataaaaataaggcatctttggggaatctcagtgggaactgtattcttggaatttatcccacaacgtgtgattcagtttttacttatttttatatatctaggactattattagaatagcctatctcttattacccatgtgtatatttatttgcatttaattataaacatatccagtaatgattctccctgtcctgtctcacatctgtttagttccttagcacccccattctagggaaccactatttttaaattcttgtgaatatttctggagcttctttatgtatgtgtaagcaaatgctaatatatattcttatttccccttatttttatgtaaaagtggcacattttatacattgtccaacacctagcttttccacttagcaatgcatctttccttatcaggacacacgtagcttcttcgtctttatacagatgaccctatgcacggattcaccataatctactcaactagtccctgctgatggaagatgagctgtctctaatccatagctattataaacagtgctgtaataactgatcttatgcacacaacatttcctacatgtgcaaggatatccatagaacgaattcctggaaatgaaattgccaggtcaaagagtctaagcgcctgtaattttgatagatgttacgaaatcattctccatcaggaaagatcacgctgctgccagcaatacttttgagtgccagattccctgcacccctaccaatagtgctttgcctcacatttgactgcagccattttgatttggaaaaaaaaaaaaagaagtcagtatactttaactggaattcctctgtcctgagggagctttagcatgttttcatgtgtaaatgagtctttccttatgtgtaaaaactgcctgtttccaaccttcttttattttgatgattgggtcatatttttatggatttctagaaattctgtatgtattagcgagatagcctctcttgagacctggacttacctagctgggacatgtgcctgcggacaagagattataaaaggtacttccctctggattactggagcgaataggaagcatttgcaagaagatgaatggtcattcaagaaagtttgcgaactccagcccatgagtagcaccgagaacaagtttcatatcggagcagtgtatgtttgcagctttcctatttgctgcttaccaacaatgtcacttagagcaatcatgtagcctatttaagccttggccttcttacctgtaatgtaaaaggcttatcttcccgtccctttggcttatggctaacacatattaagaagctgatactgcagtaattacacagggtcaaggtagttggaaacactcccagcgctcctcaaggtgagctcccttcacctgtcctaaaggtaaaggtgcagcaagagaagaaagctccggcagtcacaggggaccccagacacatccaggtgcagctccccagaaccctttcccaggtgatggggagatgtttgcctttggattatgaaccacagaggtgtgtgcaaggaaccttggttttagggagctgaagcagaaacttctagtggcataaataataccccactggtgatgtagccaagccaaaatgtgtaatcagttaaaccaggtgtcaaccatcaacccatgcatccctaggcaatgtacacaagctaacgctgggtccctccaaggaatttgggactgtaaacagcacattcattataaatcaccaactggctcaactcatccttcttatcttggccaaagatcagtaccagacttccagacctccctggagatgagcacagagtgtttccagtctacccatatgataaccttcccttacacaggtacacagggagcactcagaaactattggaagctattgtgggtttttttttttcctttctcttttgcaacaaatctgcctttggtttcactggaaactttttcttctacagctcaggggagactgtcactagcgtgaccagcttggccccactacagcccaagaagggcaagaggcagaaggagaagcctgacattcctcccgcagtccctgccaaaggtaaggagctggcctgcagtttcttacctggaaactatcattattgatccctgtgggtctggggttccatgttggattatgacagggagcgtaggcagatggggaatatgacatgacatttaatgattatgtagtctggacccccacctagattctgggcataactggtgctcaaccacctcagccgttagcccagtacttgggttgggggtggagttggaggaggaagcaagggcctagcatagctttagcagggggaagatcaacatccacagatgattccagattatgtttcactttgtactattaaaacatgccacacatgaggtggggtggtgggttgggatgaggaagtcttcttggttcattcaagggaagaaaagctctctgaatttttaaagatgtcaaccaggtgtgaaatttatttcacagttgctctgggtataaaatgacggctatcctgtgattccagttatgatttagagcaatgtaagtgaggaagataggtgtttctggaggaaagaactgcgagagtattaggagaaccaagactgactatagatagttcctaaaataactggtcaatttaggagatattcataccttagcaaatttgaaatgtagttgggggaatacaagggttgcccaaatgaacaattctattcctcaactgcgggctttgcatgcttcccctagggacacatcaagccctgtggggaagcctgttggtgaggctgagcacacatggagtggaaagagggctggagggtgtggttgtactgcagggggatgaaaagcatggacctgggagggaagggagtagagaacgcctgcctgggccaggcatcatactgctcgatgtcgttcattccacagtagatattacccacccttactaaagttgaaagtgagacttaggtacgtggtagagcctgactttcaatgccaagttcaaatcctaaatggttcaagattagtgacatgacaccgtgggaagggcctcactttctttttctgttaagtggggacaataagaccctccctgatgacctcacagggctgctgtgaggttcaagagtcattgtgatcagcgctagtgtgtgggtaggacggagtctcccagggaaggtcccagcttcagccttcactgggtgcatctggttcacacctgcacacctgacatccatgtagctggcagagttttatgcagagttgttttgttgaccttgctgagggagacgacaaaacgttcaaagactaggggaggatcacgcccgccgaggggcacttgctgacacctagatcagaaagttcttccatgggaccaggaaggggtatgagacctctcagaatatgtccctgatgctcataatgtgtggccactaagtgttctgggaggaactgcaagctaaacccttgacctacttccacagctccgatagcccccacgttccataaaccgaagctgctgaaaccacagagaaaagtcacgctggtaagtaaccgtcttctgtattcctatcataccttaagcctcagacacaactcagattccaaaacagtgcctttattaactcaaaacatacagaaagttttagaaacttttgtccccaaacaaaaacattctctattctcagatgccagcttttgagtcagcctttctccatacttagttcccagagtaactctttaaaaatccaaatagtttatattatagatgctctgtttcaaacgggagaaaagccatactcagaaatttataaaatagaaagtggacctgcttgcatacctttacctgataattactccaaagatactgctgcacatgttttccagaaaatatgtcatagcttttgattttgaacaattttagatttacagaaaagttgtaaagctggcacagagtggtcccatgtaccttcatccaccttctcttagtgttggtttcttacatagtcatggtacatgtgtcaaactaagaaattaacatcggttcattgctattaactacacttcgggcttaaccagattttggtctacctgctaatgttccttttctggtgcaggatccaaatccaggatctcacattgcatttagttgttacatctccttgctttccaacaatccaagacagatttgcaggctttctttttctttcttggccttgacacttttgaagagtagtggccagtgattttttagaatgtccctcaatttggtactctctgaggttttctgagcattagaaatggggtgtattagtcagttctcacactgctataaagatactacccaagactgggtaatttgtaaacaggtttataaagagctttaattgactcacagttcctcatggtttgggagtcctcaggaaacttacagtcatggtggaaggggaagcaggcacatcttacatggaggcaggcgagagagggtgtgtgtgagcacaggaaaaactaccatttataaaaccatcagatttcatgagaactcactcgcttgtcatgagaacagcggggaggaaaccaccccctaacccaatcacttccctcccttgacacctggggtttacaatttgagataacatttgggtggagacacagagccaaaccatatcatggggttacggatttgggggacaaagagcacagaggtggaactcccttctcattgcatggtatcggggcacatgacgacaatatatcttgttaatggtgatgctcatctcaatcacgtggttaaggtggtgtctgccaggtttctttactttgaagttactattttctcctttccagactctatttgttagaggccagtccctgagtccaattcacattcaaggtgaggagagttgagctccacctccagaagggaggcatgtcatgaatttgtggatatgttaaacccaccacagtaattaataaaaatcttaggggagatatgttaaggcttgcaaatatcttgtttttccttgaacttttgcccactaatcttgcattcatcagtagattttgcttgcagcagattttactatggtgcactaagggtgattttctatttcccttaatctttctagatgtattatttggaattcttctataaggaaaatggcccccttttttcatttgtttattgttcactaattccttgatatcagtatggatccgtggatatttattttttagtttttaactacataattatttattttgttgttaatattattcagcagttagttgtgtgtgtgtgcatgagagagagagagagagagagaaagaaagactgtcaaagctattctaaggtgtgtatgccaagacaatcttgagggcggagtgcaaggtggaggatttatatgccaattctcgacatctacattaaagcaagtgtaagtaatacaatggggtattaatacaagggcagacaagtagacaaaggaacagaataaagagccccaaacataactgcataggattgtcatttgatttatgacaacagtgacattgcagtgcagtgaaaaagagattatcttttcaatgtttggtgacgggttttttggatatccatatgaaaaaaagatctatagccccttctctacaccacacacaaaagttaacaggagatggatcatagacataagtatgaatggtacaaagtaaagcttcccgaaggtagcatttcttcctaatttcagagtagacaaagatgtttttaaacgagacacataaagcaccaacatgaaggaatggataaagaaatctgggttgtattaacatttagaacttctattctgtttaaagatacagttaaaataatgaaaaggcaagctgcagactggcaggacatatctctatgcatatatctgccaaaggtttccctccctctctccctcctttttcttttctttaatttttccttccttccttcctttcttcctttctttctttctttttctttctttctttttctccttccttccttcttttctttaattttttctcttctttctttctttttctttctttctttctctccttccttccttcttttctttttctttctttctctctttctttttctttctctctctctccttccttccttcttttcttgtcattaattttcttttcttttctttcttctttcttttctgaggcagagtcttgttctgtcacccaagctggaatgcagtggtactacctcggctcactgcagcctccacctccctggttcaagttattcttgtgcctcagcctctcaagtagcgggtattacaggtgcatgccactatgctaggttagtttttgtatttttagtagagttggggtttcaccatgctgtccaggttggtttcgagctcatggcctcaagtgttccttccacctcggcgtccaaaagtgttgggattacaggcatgagccactgcacctggctgacctgacaaaggtttcttatctagaacatatgaacacctgccaatcaataagaagtaaaaagacagcactaccaaaaaatggacagaaggtttaaatgtgcacttgacaaaagaagatatacaaatagccagtaaactcataaaaagtccttaacctaataggcatcatggcagtgcaatttaaaagcataaagccagttcacctccaccaggatagttaaaatgaagtacttgtgcagtttcttttttgcctgtatttctctgatccatttggagtttagaaatggatccaattttatctgtttgtcagactcttttttattttaccttatgccttctatttcaacaatcattatttgctaatttcatcaccatattctaaacaattatttgaacttaatttttgttttgttatttattccttttttttgagtccagtgtctttcccttcattacctttacttgcctttccatttgagcaatttgtctgtgaatggaattctagattcataaactttttccactaggtgcagagaaataggataagcacttcataatgcatttctctgaacttcctgtattgctgaacataaatgccaacctcatgactgtcacctataattccccatattatttgagccacataggtaatttaaactttctagtagccacatttaaggtttgaaaagtaacagatgaaaccgattttaatgtatagtttatttaacttaactatcaaaaatattatcatttaatcatgtaatcaatatagcaattattaattaaatattttctattatttttattgtggtaagtcttcagaatccagtgtctatttgatgcttactgcacatcttaattcacagccacagttccagtgcttagtaaacacatttgactagtggctaccacattggacagtgcatcccagaatgatctagcccccattgcttctttgacatgatttttatgaccatccctctctctcatttcccttcagccacactggcctccttgctaatccttaaatataccaagcatgttcctgtgtcagggcccatgtacccactctcccctcttcctggaatgtcctccccagaatctgtccatggcttattactcaccccctgtggtctctgatcaaacatcatgtaataaaggagctgtcctgatagcctatataaaacaccacccaccctgacatattttgtgtttatatctattaatcatccatctcttctaccaggctacaagatccataaaggcagggagcttgtctgctgtgattcctgctgtattcttcatgtttagaaatgtgtttagcgcaatggatatttgtttatgattctgcacaccctccctgttgagtaggttctgtaattctacatccataattgggtacatgagcctctgagagtcagtaaagtgagagatgggtgatgtacccaaggtcacacagcttgtgggttgcagtcagggcttaatccaaaatctaaggttttcaccagcacattggaagctttgcctcagtgcggagtctgggcctagctgctctctatatgtgatcctgaatgcctgtgtggctcagccttgctcctgtccttgctgctctgtgcttcacctgttttttaaagagtcttcttttgcctgcagtgaactgtgggttctagcaggcttttcatatagtgggttccatttggttcatgttatcaaaaaatcctcatcaattctactctgttgactataccatatggttcttaaaggcagcagcaggccttttggcttattttaataggccattggcagtcagtgggcttttggaaactgtggagcataaaggctaaaacaatcaatttcccttggccttggagcatcccatttctcacctgttacattcagtctcctgcagatagacaggctgagttcactgtcctctagactgtgtgcagcactgcacatctgggtgtgcgtgtttatgtggctcttttagatcttttctttctaattctgatatttaacaactaccttaagagtgactacagagtgactacacttaatttccccaccttatgttctctctaagttactcaggacatattgtttctaatccagtctcttaccccttctaataacagaaacaactatatattgaagttttattgatatgtcccagggatagatcaaaaaagtgcttttggcatgtcatcgtatttaattctcacaataagattttctcattgccccctacaagctttgcatgtgagaacaaacaacactatttaagaaacatgatccatatccctcaggtgtaatgtcatcagtcttcaggaaacaacttcccctagtgcatagcctgggtggacccacctctcatttatccattaaacatgaaaatcttttgtgcacctcttgggtgcaaaatgctatcttaagcatttttttgcaactaaaaaaatatcagattcaatagagttttcaaatatagctgtggtcctgactacaagttttttgttgttgacttgtttgtgtgtctgagctgatgtgcttctctgggtggggactcatcataggaaattctcaattttcacagataattgattggggcagctatatgcatttcagaaggattctttattttatggaagtattctcaataatagttctttaaataacaggttttcccttgatcatttaaaatacaaagaaattggaagcttttataccaaattttccagaagcaaggtcaatttggaagctagtttacacctataacaattcacaataaagacaagagctgacctcagtagggcctctatcagaccattagtttagagacaaaaatatcaggcctagcatctgcagtttttggtgaatatcaagatttattttcccgggaggccagcattgacctcagtctcagtttggtcgatatttatctcttagatcaataggtcttgatggtagctcaaacaaaagtcaatagccacctgttgactcacacaaagttagtggataatttagaaaataatttggagacatcttattttgggggacctggtaccaatttaggtgtctaattttgtaatggttccatgttgccccaatctctgtaacacagtgcttcctgctgtgatcctaggccacagagctccccagcccctctgtctagaaaccaatctgacaacctccactgacttattgacaagaagtgggaaggctcacagggaaagcctccatttattgggcgcctattgtgtgccagctgccgcattaggtgatttataggctctgggtgaaaagcacgtatctttatgtctgcaatccccaagccgttaacaagtgggaatcttttcttaggtttccaagacaacattgcattttgcaagaagtgtgtacactagacattaacagtagtcagaagtttttaaaaaatagtaggacaaaagaagaaaagggtgaggccaggcatggtggctcatgcctgtaatcccagcaatttgggaggccgaggcaggctgatcacctgaagtcaggagtttgagactcgcccggccaatatcgtgaaacctcgtctcctcaaaaattacaaaaaaaattagccgggcatggtggcacatgcctgtaatcccagctacttaggaggctgaggcaggagaatcgcttgaacccgggaaatggaggttgcaatgagccgagatcacaccactgcactacagcctaggtgacagagtgagactgtgtctcaaaaaaaaagaagaaagtgagaaaagcattttagacattttaaaatcaaggtatcaaaactgcttttcctttttttaaaacaaaacaaccaaacacaacaacctgctttcaaagttctgctaatcagataatgaggccacatggatcacacaggcgctttctgtctgacactgtgaccagtttgtctaataaacatttacaattcccatatatcagtgctccctcatccccttggggtgaggcattggcccaagcatcccttgaagcctcctggggccgtaggagctaaatgccctgcagcaaagcttcggaagccttggagctgattcacacacttccaggaaaagctgtcattacttccttgtttcagaagacactgagaaagccagaagtacatttgatttatttttattgctttctgtcagttattgattcagaggccaagtagcggaacttttctatgatgcggaaggaaaacctcagagttaaaggaaaaacagccgcaggacacaggactgttacctgaatggggaaggagggcagtcagcatctcaacattaactggaaggtggcaagtgtcaaccttggagttgaatgaacttggataggctcttccatgcctcgtcatcaaccatgccctcctccacaatgggtcacccacacctcatctgcaagtcctccttctccataatgaagccctagggtagctgagggggtcaggccacccctgttctctagggagaaaatgatctctgtgagccagccccagacgaaagacatagaaaaccaggagcaccacaggcttaatcactgcacgtttcccagggaagcgcttgcatcctgtcttctcactccaatccatcctctgcgtggctaccgggggatttttctaaaacacagcttcatctgtgtcatttccctgcgtaaatggctccctctcgcctccaggatgaggcggcttcctgtgagtagcggctggctcttgtcataatctgcctgcgctccctcaggcccaccccacccaggaccctcatcctgctgagaccccaattggtctaggtcctctgtcctcacctacgcctgcctcatcctcccgcagagctgctgctcagctctaagatgtggctcactcaccaccttctttttgaggcctcctcccctctgccccccacttctctggaatctaggttggcctaggcatctgagtaagttgtgcctgttcacgtcagtgacctgcttgtagacagctcttggggcacttttcggttcctctgtcctggatgccccctcatggtccgcccacctttgtacttgcaggtggtcctgagaggcctgggccctctggttgactgcttttacccctggctgttgctcctccacaggtggtcaggctgcctccccctcctccactgtcctagaatgttggcttctcttgggctgtcttctccttgacattcacaggcacagcagccatctgtgcagcccattggtcccctaacgggggtcctcaagccaatttcagaacaacccttctgactgttgaccagacactcccctggagggcccacaggcacctcaaatccgccatgacataagcacacacggagctcatggcctgccccacacctcagtgtgcatgggatatcccgccttagcccatggcattcccatccagaagctaaatcgtggtaaaatacacataacagcaaacgtactatcttcatcatttttaagtgtacaattcagtcatgtgaaacactcccactgtggtgtggtcaatctccaatgctcttttcatcttgcaaaactgaaactctgtactcaagaaacaccccccactcccacccagccagcccctagcttccaccattctactttctgtctcaatgaatttgactgctttagcaacctcatagaagtggaatcatgcagtatttgtccttttgtgactggcttattttgcttagcataatgtccttattcatccacgttgctgtgtgtgtgagaattttcattcttcttaaggcctaataatattctattgtaagtatataccacattttttgtatccatttatcccttgctggacaacggagttgcttccatcttttggctgttgtgactaatgctgacgtgaccatggtgtacaaatatctgtttgagttcttgcttttaattattttggttatatacccagaagggggattgctggatcagatggtaatggcatttttagttttttgagaaactgctacactgttttccaaatcagctgcaccattttacattcctacaaagagcacacagggtttcaatttcttcatatcctcaccaacacttgttggtttccttttttttttctttgatagtagctatcctaatgggtgtgaggtggtatctcattgtggttttgatttgcatttccctaatgagtgatgttgagcatctttttatgttcttgtcagccatttgtctatctttggagaaatggctattcaagtccattgaccatttttaaaaaaagagattgtttgattttttgttgttgctgaattgtaggagttctttatatattgtgaattttaattccacatcagttacataatttgccaaaattttcacctgtcctgtagtgactttttcattctgttaattgtgtcccttgattcccagaagctttaaatttacatgggaactggttttaaagtcagggagaactggtcttacccctaatgatatcctcagcagggaacctggagtcactagagcgcccctttggccaatgtatatggagtgaatgatgaataatgtttgcgtgggaggatctgtggttggaacttagtctgagtcctccctgctccaattgtgggccagaaggccaggcactgcctgggagcttgttggaaaagtagaatctccggccctgactcagacctactgaagtggaacctgcaattaacgaggtcccagatgaatatgataaacagtaaagtttgagaagtgtggctctgactaacttttcagactaagtaggcacctctggtggggtcgacgctatcaggatccagagccgctgccacccacctccagagaggactctgctttcactttagtaagacaggtcagccccctggggagaaagggagttgttttatctgtcaacaaggagaaaactaaatatgagaattctaaaagtccttgtgactctccctaattcctgcaaacctttccagaacagctcatccgtatgtcaaccaggtatatgtagccttgccccatgatctcctagtgtagcacttggccaggtgaccaagacttacttgcctgtgattccctcaagcttacagtccacagtaagcctccctcttctcacagaaacccaaagattagaatgctcaaaatggacagaaaggaagtagttcattcatccttgttcagagggaccctgccgtaggaacctgcctcctccatagcgctgttgaaaaccatagtgtggccagcccagggctgagatgccctgccttgttccacatctgctgggtgttgggaagaagtttcttcccccggccctagttttcaccattgagaatgtactgccagggccaaaaaagaatctgtctcttatcagtagcagaaaaggactttgaagcacattagaaagcagtgatagaattctgagaggattttaataataacccaaatcccagcaaaattatttccagaggacatgcatttcaggtttcttgaaggatgtttataataagccagagaatttctcttgttgtcgttaatgtgctagaactggtttcagttaaattttacatgaaaaggatatattaacctgcataaaatatgttcataatctcgatttaaaattaaaaagaagaaaaaaagccacaaccacatgtacaatatattgccccaagtaaaagccttgggaaaaaaatacaaactttgcttgtaccacgctagtaccatttttgcagagataaaatttctatgctcccctaggtacacatgcacagcccattattgttgcggggagttatgtatgtcagctggagggaagaacggatgctgaggcttcagaagggatgggcgtgcggaaaacagaagccatttgctttcatggcttcctccagtctagagagagcaggtatctcggcgttcggtaagctggatgtgatcaagatcatatctctcccacactggaagtgagaatatcctgtatcaggaagtctgttaaccttgacacagggctgtcttttccctgcaggccacacagttagtgccaaggcccctctactgcctgcccctgccaacacttgcctagcaagaaccaggtcacgtgcttctcagctgtgtcagagaccaatagaaattcactggggctccaattttgttgaaggtgggctaagtgacacagttactttcaaggagtctttatttatttattattttttttgatatagagtcttgctctattgcccaggctggagtgcaatggcaaccgtagctcactatagcctcaaactcctgggctcaactgatcctcctgcctcagcctcccaagtagctggtaccacaggcatgtgccaccacatctaacttttttttttttttttttttttgtggagctgggatctcgctatgtgcccaggctggtctcaaactcctggcctcaagcaatcctctcactttggcctcccaaagtgctaggattacaggtgtgagccactgcacctggcctcaagaaatgttttaaaactggggagctccttaagctctccttaggcctcccttttgggagacaaagggaatcctactgcagattgctaccaacagagttgtccccactttgttctagaagggtaatgtggctttgtgctttgagaaggaacttgactttggaattggccccctcaggactatgtgcttctcctgtttaatgcatcactgattcattcacattgctttcccagtcttctatttattcattccccaataattgttgagcgctgataggcagggggcaaggtgccagagaggtgggagcatgagcctgggagtcacctgaccaaggtgagcaggtgcagggagatgtgctgggctggaggatggcctaggcaggaggcaggcctgcacatccagcaggccagcccatgggtggcctttcctggttgtgcagtccaccctggtcccaggtgtcatggtgcggctccactctggggcacgctgtccccacgtgcctgcagagactgtccctccctgcagagcagtagcttgttttccatctcagcgtggctgatttgctgccgttattgggcacttcatttctgagatcattgcactgctgggaaatatttttaaaaactttttctctgcattttatttttgaaatctcatgaaacaatatcatttctgctcacatttttaaagcctatttcatttaaaacttcagttttgagcacagagtacctcagagttattaaaagactttttcagtcctacatggagaatactagaaataaagtgccattttggaaagaaagaaaaacatcaccgtctcaaaaaaaaataataaagaaaagaaaagaaaaacatcatcaacatatctgtaacatcaagctaggcacccaaaatatcaagaagaaaatttctatgtaaaattctgagtttgcaataaacttatggtgcatttaaggagattttttttcctagccagaatcaattctaatttattattataacttcttaaaattaaatttatgaatttccaacgagcacatgtgatcaccaaaagacaataagacatagcctcataaatttatcgtgagagtgttcatagaaagatgaagaataaaaattgttagttcagtcatatgtgcccattgccgacattgcatgcaacatgaatttaacaaataatcaggcatacctactgctattttagatttggttttaatgcttggtttgtgccctgtacatcatgtctatgacctaacactactgtgatgatgatgatagtattgatgatggtactgatgatggtgatgatagtggtgataatgatgatggtgatagtgatggtgatgatggtgatgatggtggtgataatggtagtgatgatgatgacggtgatggtaatggtgatgatgctgatgatgatggtggtagtgatggtaataatggtgatgataatggtaatgatggtgatgacagtgatggtaataataatggtaatattgatgatgatagtgatgatgatggtgttggtaataatggtgatgatgatggtaatggtgatgatggtgatgatgatggtgattatggtggtgataatggtaatggtgataatgatggtagtgatgatgaagaggatggtgatgatgatggtggtgatggcggtggtaataatgatgataatgataatgctcacccttccatggcacttcccacatgcagacactgttccagtgcttaccaggagaagcactcctttaactttgagacaactcttattgtctccatttcacagatgagttagaggaggcacaggaaggtaaatactaatacaaagtctcccactaggacatggcagagctgctccaaccaggcacttggccacagatccctgttcttccccactgcactctgagctctgatgccttttgtcaaaagtacttggtaaagtctgagtctttgggttttcagggtgtttaatgtcttgacctcattggacagtgatagagaagtaggccggcaatcagaatctccatttgttaaaatagaaagtgaaattattcctctaagtggtctctgtcaggagtttggcatatattcttctaaattgtttttgtatatacaagtgtagatccatatttattatatattcccaatatgtatatacagtccacccacatttagtgtgggtcatggctacagattctgacaaatccatttctgtgtgccaagttccctaaaaatgggaatgattctttacacagtgttcacaggttgaattgttttctcattaacaatatctcaggcacatctttctacatcagtacgtatagatctacctcattctttaatgactgcaaagtgttacagtatcatcatttctttaaccagtatgcaactcttggccatttaggttgttctaatttttcactcttagaatggatgctttggtaaacatcctttcacatataactttatgtgagtatttctgtaggagagatttttagaagtgggatcgttatgtgaaagtatagcctcatttttaattttgatagagtctgcccaattaacttcctaaagtatttttctattttattctcccaccaaaaaaaaaaaaaagaatcagagtgaccactttctcataccctcaccaatggaagatatcctctctctctctctctctctgtctttctctctctctctattgatctatcttctacctatattttaaactagtaagttaaaagccatgtggagattttagatgactccaagcagcagaacccaggtgttcttgctagagtgttgtcgtggaacctctagagaagctaaaagaaagaaagagtttcattggaaagaggagagtgtccctgtctacattcctgaggccaggcagatgggggtgggggtgctaaaagacagtatcagactggttttctttcattttgtctttttcattcattcattcaaaaatggctgcctgagtcagatgtctttctaggagctgaagttgcagccagcagcatcctcgagcctctctcatccactaaagggggcacatacattggcaccttgaaattagctgtggtaagggtagtcacacatgaaaatcagaaattactgctcacatcagagctttctttcctgtcaagcctgttgtcaacatttatccacacggccctggatgcagcagtaaataagctacggagtcactgcctttggggagcccagtgatgtggtcagaggccggctctacaccagccatgctgctcactagctactgtctgcatgctcgccacttctccaccttcatctctgcacatgtcgaatgaggactataataagggtaacttccacatagactagttgttgtactaagtaaatattaggtgctgttgtcacattctttagtggaggaagacagaaggctaccaaattgatgataccttataataccaaggagtgatatgtgctctgagagcagtagaacagggcaaggggagctgggggtggggggctgtattcaatggggaggacgtcacagttgagcagagacctgagagtgagggaatgagacacatggctctgtggggagaacatctcaggctgggctgagagcacagcctgggcaaaggtcctgaagtagaccctgaatgaacagtgccatatggggtgtgtccaggaaacacatggagatccatgtggctggagccctggtcagcaagagggacgtgtggagcaagccgaggtcagaggcaggcacaggatgaggtaatgaaggatcaagacccttatccatgctgatatcctgataagaactctggattcagaatgtgatgagaaaccactggagaactgtgtgcagggcagtgagtggcatggtttgacttattatttagaaggattgtctttcctaccaaaaaataaaataaaatagccagatgtgtttggccctggcctgagacacagtggtgttcattagcgtttagcacatatactttccaaaacgtctcaaagtgttttcttctttctacctgtaaatatttcaaagcaacggactgtttaaacaatacttgtttatcatctataatgtaaatagtagcaatagtaataatcaaacacttgtatagcatttactgtatgcctaccaggtattttttcaagcacattacatgtttttatgcatttaatcctcaaaataactctattggatagttactattatgagtcccactttgtagataaggaaatggaggaataaagaggtgaagtacctcgtccgaggtcacacagctagtaaatggcagtcttcctgtctctgagagcacatgttcctaagtaggcccttgcacaattagatgggtctaggagagtgttaaagattgcagttgatcagaatattgagagtgttcaagtctgcaaattctcagcatgaacatctatgttgaagtagataaccaaaggctcccttttttctaagcaaaagcatcctcttgaatagtactgccagtaacagtcctttgaaaggcagctgggaattcaaacatctatggaccacaggggagaggaaatgaatgaccatgttagaccatggagcagttgctgtgagactttgaaagttccaggtattaggactctccccaagaacactgtctataatcacattttagcttccaaaacatatgttggtgacattgacaggcatctgtctgtctgataacttgtagaaacttgaacgaataatatttggccttgggtctttctatgccagatttagcaggctcccgaaggggtcacctctgcctgtccttgaagcagttaggtggtgactttctgtcatgtcaaatccattctgaggacgcactttgctgaacatcctgtgtactttttggactcaaggacctgaggcgaatttgctctgctcatgatttctgagtgagttcgtccaacccaaagtgcacgtcttcatatccatccaagacttctctcctgagctccagacttttccagtcctcccactgtcctagagcatgctgggtgactggctctcagtccctgggtgaccatgcagaggtggggtggagggggaatctggccagatatgatctcaaggctcatttatacctgaagctgcagagtaggtggggcgtttggtgcctccgagagtgcctaggccccatgtgtctctggaccctgggtcaaggcacacctaagtcagcagtcacagcagaatgctggatttgggagtgcaactggattccagccctcacatctgagtgaagacctactatgagttatgctgctagagccagaggtcccagtggaccagtggcctccgctccaaggagatggtgagagtagacctggtggtggctctaacggttacctctgaaaatgcccctggacgtcttcagtagccattggatactcagctgcatattttcacctatccagcagacagctctgctcaggggtctgctgccaccccacacacagcctggcccaagcagagccttgcagccttgtggctgcatcccatgccacccagaggtacactgggaacctgggggtgaggctgtagagaggggtgcggggccccctggaggtgttccagtgagattctttctttcccctccatcaccctctcccaccagggacagctccatgtttctatctttgggaagtcttgggttctgtggcctcaagtcttctgtttctccacaccaagccagggctcctgcctctgatgaggatggggccagttcccttctcccccaacttcccctttagttggagctcatactgcctactgagtggtgtgggattgttccaaaacctcaaacaattcatgccaagggcttttcactattttccctgttggcatcccaggcctacttcttgggaagggactgctgtctgcctgtctgctcacctggatacaaggcattcacatcagagcatagactctgcctctgagcatgcatttgcgatgcctgggactgcccacgagcatctgggaaggactgactggctctgaatccagacaccacctgtaatccagactccataatcactggccctgcctcacagtgctggcatgaggatggagcgagatggtgaaaattagtgttttctgagttctgttctcagaaggaccaattctcagccaccacactctgctacctcccaaagccacttctggattatgtcctttgttttggaaagacatttcttttgtttctttatttttatttaacatatacaccatagaactctatattctcttttcataatagatttaaataaatttgccaatcagcacccatggtacttgagattaagtcaagttcatatccaaggcatgtcgatgatagtaggactgataagcttcacagcatactttactctcctgagttgggtactatggagacccattgaggagaccctctgtcaaatagagctttctgaatgcacagcctcaagctccttggtggctatagttgtatgtgcagtggctgttgttaggggagagtttgttttacaagttactccattgaataaaaaatgagcacttatcttgcaggtagaagaggaagtctgcccctgataatttgtaattctctcatgggtaaatagattcctgatagtgcagctctgtggagctgcagtcacatttttaaactctaagatgacgttaacataaacattccatgtcccagttattgatctgttgctgtgataatggtattacccaattgaacttttgatgttgagagaacttgcagaggctgcaattgcatttttcttttattaccgtgacttaattcaagttacacatccaactgtgatctctgtgaaaaagtgttgttttgcaggagtctgcataagagaatgctaaacctctcttagtaagaatgttaagttccagcctgaatcatggaaagacacctacaaaatgatatactcagaaactatccattaagagcttaaagtgtgttatcttccagaaaggtgcacaacctcagaattccttgaggttgacttttctctcagtagccaaatcaaatagttcttccccatggacatactttccatgattatcaccctcaaactgggggaaaaggggcttgcattagaggtgggagattcagcccagaggctgctacctgctgttatagtacctcattgttggcagaacagaaggctagacaggccattgcaagctctgaaaactgcagactcactttgtgatgcccagagtccaggaaggttcatcactgcattttaaacctggtctgtgtgatcatcctttcctaatgcttctgagaggaaactgtgctatgtaagaatttaatctggctcagcagctatccaggagcacttgagttcaagtctaggatgggaaagttccttaagcataagggaaaggtaattactgtgctactgacacctagaacaatggctaaaagaaaaaaaagcgctgacaaggatgtggagcaattgaaacgctcatgctttgcaggtgggagggcaaaatggtccaccctggacaaataggcagtttcttacaaagttaaacataacttgccatgtggcctagcaaacccactcctgggtatttactctggaggcatgaaaacatcacacaaaaacctatatttgaacgtttataacaactctataaccactaaaaacttggaacaacccacaagtcatccagcaggtgagtggatggctagctacagcatgtggaatactctttaccaacagagaggagcagacaatcgttgcttgcaacaactgggataaatcttcagggaattatgctcagtaaaaaaagccaatcccagaaggttacacactgtatgattctttgtacatcaccttttctaagagacaaaacatagtggcagaagacagatctgtggttgccaggggtcgggctggagggaaggtgggactgcagaggggtggcatgcaggggtgatggaactgtcctgagacctgactgtggcagtggttacagacatctatacctgtgttacaattcttagaactgggcacctcaaaactcaattttaccccatgtcatttaaaacaaataaaataaaattttgagaaacctccattatgtcatcggagacacagcaggaggcatgagtggaactgtaatcctagggctgagtctgtggacacatgttggtgaacatgcctgcagcgtggggggcctggcacacatttgagaacatagctcagaaacatgcatgcttagagcattcttagatgttacttgtataaatgaatgagttggtcattagtttgttgtaaaatgccttccttcactggccagggagcagttctgtgatggtgatcatggtcattagagagggcgaggcagaatcccagtagctcgctgtgcagggtcagaggaaatcacaggtgcagtgagtgcaggagagtgtggccgccaatggcatcagtgtcagggcattcagagggcctggtgggttttgaaggagtaggggtccaccttgtgtgtgacaggcaagagtttcatgcggaggggatcaacttaaacagaaacctgtactcccctgttagagaagtttcagggaggagcctggaaagaggactgagcagatcacatggctcttttgcatccgtagtgtaaggcttggtactttcagcagtcacaggatgtgcaatgtaaagaaacgccttccctcagggttttgcaacctgtggccttcattgctagagaacccaggtcagaaacatccctgagtcaggtagcagcgggttcctctgctgtgagggaataaatcttctggcccagccctgcccctgtcaacacccacatcctgagccccaccatcctctcccaccatgagctgggccctctttttccacacggagggcagcaggcagcaggctgccaccatggcagggtggcacccagagatgaaacgccaccacctcccaacatctggtcacttctgcttagccctgggagtgtgacttcccaaagccttggtttattttatgtatttcactttatcttgaaacagattggtttttatttgtgttttaggacaagatatctgggcatagtccagggccactgcccatctatatggcacctttaggtagattacaaaaaggcacctatcttaatagacatattatagaagagcttcccatcatggtgggaacaactcttgccccacagaatgtcttgggagagctgagcatggggtgaatttcaactctcagtcacttaaacctggagaccctgggtagacccagggccaatccagtggttcattgaggcggcagacactaggctcctcggtctgttttctctaccatcttgagcaggttggccttggttttcattcatgttgcctctctgtcttaagatctagtttgtttttccctggaagaagtgaggctgtgcccagggaagtccgagcacgcagacctagtatgatagcttccctgggcaaggagccctttcctctaggatttttctgtcttctaccttgaaacctcagcccagtctcttcctcaggtggggctgcttctgcatgtcattttgtttctccttacatccccagcatgaaatgtggcaacaaaagaaaagtggcttcagagagagctgcagaatggcagatggaacacagggtttgggggcagaaacaacctgacccttggcactcacagcctctgtgtgctcagctgactgcaggatctgtctcggccccgggtgcagttcagagggcaggaatgtcctgcagctagcccgtgtgccggtcacttggtagccaggtgcattgctcagatggaggcagccacacctgggtggcttttctctgttagcttccctcccctgctggagccaggtgcccttcataccagtcagcatggcagtcaccattgccccctttccagaaagctggaggtttgtgtgggctgccagcaacccagctagatctgttgcagcccagggtcaaggccgaggcctggccatggcgggccaggcagctggggatgggaggtgtgtgtgggggcagggtgccatgtgaggaagtcctagagcctttctcctccagccctgctcctcactgaaccaggggtaaatgtatcagacctttgtcccctgccttgtctcggggagggtgctctgctgctgacataaatgccttaatctcgtatattctcccaccctatcaggtagttcttctcatctccccttcaggaaggctattttcttttcttccattctcttctgtcctcaccttgacttatgtattcatttgctagggctgccataacaaaacaccacagtcacatagtcagggcagcttaaaacaacagactttattctctcacagttgtggaggccggaagtctgagctcaaggtgctggcagggttggtttctcccaaggcctctctctctcaacttggcttgcagatgccgccttctccttgtgtcttcatgtggtcttgactctgtgtgtgtgtcctcatcttcttagaagaacaccagtcaaattggatcagagcccaccctaatggcctcattttaacttaattacctctttaaaaaaacccatctgcaaatagagtcacattctgaggtcttaggagttagggcttcaacacaggaaatttggggaacaagattcagtccataacaactaatttcctagaatctgttccttacctgtcaaaagatacccagggctacttagttcacaaagttcttgttaacttatgaagcattcagaacgtgcacatatgcgtgctattttagctgaccctagagaggaggtgatgccactgaaacactgatttgttcagcacacacatgttcagcaccttttatggggcagctgctgggccaaaacattacatagacctcatttcaatcctcataatcatccaacaaagtaggtattatctctgagctccagtgatggaactggcccaaggtcacacagctgacctttaaactaagatccaaattcctcctgcacccatgatctgctgtcagccccaggacgatagcctcagccactctcctcacctcttctccatgaacactttcattgatctgagagttagaagaatttccctttattgcagccttcctttgatgcatcaatacgtgcgtgtatctgaccctccatccccccttgctcatagaatcctcctccagaattacttgtggattctcactggctggtagttttctccctgtctggtagttttctaatatgaaaagtgagactaagggtccatgaaacaagggatttgagacacacaaaataccaagcagctgaatacaacaaatgccaggcctttatttgaggaatagaaagagaatctgaccaggagtaacagcaggttaggtgaaatggaaaataaagtaaaaccaaacagccctgggagagaggaaatggccgagttgcttctcacatatttagaaagttctagggctttttctaaaggattctgccaggacttcccagcagcagttggttcactcttgctgtctgttttccagtgattacaacatctggatataaatgtaaaactcggtccgggtctgaggcctggaactcctccttcaagcagtttccttgaggctttcaatggaatttacagtcgttaagagtgtttgtgaatagacagttcaacactgttgaagcttctatcctgagttccacaatttgtactaacactccgcaaccttctgtacttcctgcatcccccagagtagggtgggggcttgaagagagtcattttgaagccagcgtctatcaggaaattaacagaagtgcttcctcattcatttttagagatgctgggagtgattccctagcttaaatccagtttgggcttgtctactgaagatagcagtaaacttgtatcatctgaagtaaaggtgaggctttgcaacaggctcctcgtcaggctgtgccccattgcaaccacctgctttaaccactgctttcagctcctggctcttggttttaccaccagttttttagtttacctagtcttagtgatgtgccaaaaattttctctaagcttctcctcaaatgcaccttaaaccttccactgaaacattagtgcaaagaaacgtagtttggtgaaaaccagtgaggaatatgcatttgcccctttcattggccattaggaatttatttccagttaaacaagctgggaaatgtaattaggcacatggctgattgtgatagccaagtgtgcatgccagaaaaacaataggttctttaaagatgccaaggactgatattatgcatcttatcttggaaactatacacttcacagttctgagcctcctgtgagctgcctcgtatcttcaatcaaattattatattccagaaatatgcataagggaaatgattctacacattttatggtgggttgttgcttgtagcagtaattgaagtaccttttccacttatgaaagtactacttttatttgtttttattgcttttctagatgcaattatttatttagtgtgctttggctttattaaattatgtttactataggaacatcataaaaatgtatgaaaacaacacatcagccaagccagcctggtgacctgtattgaaagagctagtgttatttttcatatccaaacgtaatggaataacttaagaataaacagataatctacactagaaaacaatgcaatttcaaggtaatgtaataacacacctggacaatatgatttcataaatcttggtgctaaaatttacatgagttgggttttgtgtgcttatttgaggacacatggcatttctaaatggaatcattataatgggaaatgtaattaaactgaaaagcgagaatgtaaacagggtttttgttgcttgtaagatatggatgactaagaagaaatgtaaagacttttggtgtcaaaaggcaagcagaaggctcccatccctataaatgatcttaactttgaaattgaaaaattgctagacaattcgtctaggtcacttggcagtcacccccagcagaggtgctggcttgaagaactctttgtaactctccttgtctattacttcccgtgcctttttggggtgcatcatctcaaaagaaaagaagtgttttgcttttggcattctttttaagaaacttaaattgaatgaaggtggtttagttgtttggaatttccaccagataaccaggaaataggcatacaaactttttttaaaaagtccatcaaacaacaacaaaaccaaagccaaaaccaaaaaaccctaagtctgacatccttataaagagcagaggtgcttaaatgaaaatgtctgtgtgactataaattcatgaccaacttttatttttttaattatgggttaaaattaattaatgcattgttaaataaaaaaaaataaatgcattaaaaaatgcctactacaaaatccaaaaggtaacaacaaatgtacacagtgaaggctgagtctccctgcagctgttcaggttacttccctagaaagagccatggttaatgtgctctccattttctgaacgagtgccgagagttcccaggattttctaagtatgtaaaatatgtacccacatatttacttacatacacgcatacatgcatatttacacaggatatgatagtgaaatataaagtacacatatagctcctccctcattcttaaagactgcaccgtatattgcgttatacgaatgcccccatctcctactgatacctatttaagtgtttacagttatttgcttgtaccaagaaagactcccacccatagtataggagaggacctctatgttttgtcaaccttttttttttaatgtttggcaacttgaaagacaaataaatgatgtctaagtgtgactttaagtgtcggttttctgattatgagagggtgagtatcatttcatctgtgtccgagatgcttgcatttttctttcccatgaactgctggtcctgtctgttgtcctttgccagatttgctagtggaaacttgattattatctttgttgaattgcaaatccctttaatatgagatataaatatcttcctcattttttcagtttttttaaattttatttagagactgttttgccatgtgtagcatgaaaatgtacacacatctttttttcctttgctcctgggttttgtgtcatatgttaaaattatttccatacttggaggctatttttaaaaaactccccacctattttgtagtacttttataggtttattttccacattaaaatttttaattcatttggaattaacctggggtgaagaatgatataaggatgtgattttttttttctcaaatggctgtccaagtattccaacagcatttattgaaaaataacttttaggtttaattgttaatatcactagatttgaataagcaattattctttattttaataatattccttaatcatattaagaaaatatatgtctacacctacttcattcaaaaattgttttaaacaaaaatgtgtttttaattgtattaagtacctttctagcatctataatcatatgacttttctcttttgatctattactattatgaattatattaatagactttttaatatcaaaccatctttgcatttctggaatagaataaacttgaatatgattatctatcttttaatgtacttcattctctctgagtaaatttaacttaaaatttgtattaataaatgatatcctctcttcctccctctctccctctctccctccctgcctccctccctccctccctcccttccttccttccttccttccttcttctttccttccttccttcttccctccttctttccttccttctttttgatggtacattcagatttcctggagttaatgtttataatttctatttttctggaacataatgcattttatcctgtatttaaaagttttttcagtatattcagcaaactgtcttgtttaagcatttttaaacttccttcattttgtttatgtctcttatcttattttttattttattcacttacgctttttccctttttatcttgattaatttatttttcagtttatctgttttactggtgatttatgcagtctgggtttatttctatgaagttcttccttctgctattctttattttattcctctttttctaactgcttgagttggaggcctgatttacttaattcatgctatttagcataagtatttcaggccatggttttctcccagcactgcttcaaacataggctttaggttttggcaaggaatattttccttagcattattttcaagatattttgaaattatagttttatactaagtcatttacaaaaatttctaagtggtggcgttctagtgttgttattaatttttagaatttttttgtttccatctccacttttatatttcccttttgatcagagaccattagttacattatttttactcttcagcattaaagtttcattttagccttgtgtttagtcatttttttgtgagtgtttcatgtcaacttgaaagcaaatcacaggatctcactgcaggacgtagtgctctatagaagacaatgagatctatcttattaattatgttattggatattatgtagcctcttaaatttcttgtccacttatccctcgctgaatcccaaaatgctatgaacatgcatacttgatgaatgaatgtgtgatgtagagctcctgtggtcagctagaattgtgttttgttttgttttttcttttatagccaaagattgctgaggaaaacttaacctatgccgaactggagctgatcaaaccccaccgggctgccaaaggcgcccccaccagcactgtctacgcccagatcctcttcgaggagaacaagctgtagtacagcgtccacctccaaggttctatttaatacctgccacccagtgatttatgaagccttggagacaaagcccttatgtctgtattttcactcatgccttctgagtggtggggagccccttttcagcagcattctgggtgcctttgaagaggtacaagcctgctctccccaaaagaatcggggccacagctcttgacagatctcccgggacaagatgcgcctgggtttgagccctgagcgtaaggattctgatcctgagagcagccaaggagattttctgctgagccaaaccccttcacatttttctcctctttccccaggttttctttaaaatcgtttttaaatcttaattttactctctactcttcctgtatccacgatacaagctcacagtatatagctagaggaaatgccattatggacccaactgtaagatggcacatatgttggttttccaaggatcagatggcattgccagggccacagccaactgctgattgccagcaccacctgagatggcatctcttgttttaaatagatgcactaaccctgaagattaaggccagaggggcagactgactagagaagtataaggtctgtctctgaatgccatggtgcccacctatgagaccctgaggccgcaggacaagaagaacaccattctagagggcttccagccctttcacaaggtggacctgtactgatagagaaacacactctctaagaagtgcttactcacccttttccaaaggagcacaggtgttggccatcagaagacacactggagcgcatgggcctcttcactgtgtgccaagctcagtcacctctgattcagcccctgaaggtgtctgctgccaggtgccctcagggtaggagagtgggaagtacacgccaagctggaaagtgtgttctgaagaccctcctcttgccaagtgccttgcccattgcaaccttgtgtgtgaattctaatgggtttgaatgggggtcagggtgcatggggaagttgctctgtggacctttgggacacaggaatcttggacttactggcaggggatccattctgaaagcaccatcctgtcaactgtgttattgaggacatttcttgatgtgagtatagtctgggtggctatttactgcccactatagaaattgtttgactatgtagtggaccatgtatatatgataaattatctattttaaacacagctggggtatgagttgtgccctctatatagctgtgtgaacttggctaaatttcttatcccctaatgacctcagactccatgtttgtgtaaagacgacttaacttcccatagaattcttgagggtaaaatgggataatgaatcttgccagttctagaaactgtaaattgctacacaaatgctctgtgttgacattcatgctaaagccagtctgcattttcaaaatgaaaatttcttcactatttaaggctttcattgcaataactttaaaaaccaaatatttgtccaccaacttagccctacagtaatgttcccaaagactcatgagagtttatggtttattggaaagggtccaaattggaagcagatattgattttctgggagcaaactggtctgcctttacaaagtggaagttcaccctctctggataacacctgtgtctcattcctccctctctgccagatctcgaaggcactgaataaaccatgcagcttttgaggaagaaagaaccatttggaagaactcactagaacttctttgagcatctctttgggaggggaggatatatggttagcacaccatttatataataattatcacagggatttttaattttatcatggcagtgttctgacagatgtatagtgttttgagggcagaggatgatctcctaatttgcccaaagagccttatgggtttgtggggctctgggggtgccaaatgggaaggagagggggcacatgaaaaggaaatggcgggaagagggcaacaggccagggggtaatatcttcccaggccccttaggcctctacagaacggaaatgaacttcattcacccccaaacccacccacttaaatccaaagagagcttagggttattatgcatggacaggaacacattctaccaagaacacatgctcttaagagctagtagctcccagttagagtcaaaccagtcattgttatattatagattgaatccagcctctttctcccaaactgtggtcatcactgcatgaatccacactaaggtgtgtgaatgggaacctgcagattatctcctcctactgaaaatgctgcccaggggaatcttggaagctatggacagcatccaggcagagctggtcccactgttatctccagaagcaaatgcccaagctgtgctcagaactggaagcaatggatgacttgtatcaggtgcttgtttgagaggatatattgacattattgccatagtaagcttaaaaaaatgtgcccactcattcattctttgtccatggaccactaatcatgcattgtcatttccaaagataaggggaaacatatcacatatcattgaaatagaaattagggaaagtttgtcaatttgttttcactataaggcatcaatggcagaaactacatatgagtaattttcaaaatagaccattgcttaaatgtttaaatgaagctaaaagaagtatgaacccattggttagagtgcagtggcttctttcaggcagacagcagatgctctcagatttggtggtgagttttggccttggcatggttggcatggagtcagcacaggaagccgggaggtatgaaggggcatccacctgggtgaaactgtcttgccaagccaaagccccgaggcctgccctgaagcagctgtagtggaggagaggcctgggattccttagagtcacctttttacgaatgtaccgccactctgttagctcacagggaaaataaggaaaagccaggcctcccacctcttgactcttgtgagagtgaagacaacatggggcatttagaaaatatatttttagtgtatgataatgtgggctggcccacacagcaatgagcccaaagaccccctcgctttgggaattattcatggccctgctcatcacagcctctgatatgcatgactgtaacctaggctgagccaagaatggagctcatgccagaaatggtcctaagcatgcacatggccccctggaatatcaaaatcctggggagaaagaaatcatctttgccttgggcagtgaagctggaatggcacatatctatctgttgccacatctcctgcctagtggagaagccttggaaggcaacagacactgagcaagcagcagggaggagaatgtcctggaagggcaggactctacccaagtccctaacatccccagactcttctcttccataaactctctaattactctgctgtttaaatcctggttttggtcaagccagtcaggttgcataaagaatatgaatacagtatgcatcaaagttgcttcccagaacaggaagcaaaacaaacaaacaaacaaacaaacaaaatactgatatcagtacccagggtgcccaattaggtcacacccagtggctgcattgcagcccctgagctcctgctgcaccgtgtgtcctgctgcccgagtgggccccaccctgggttctgaagatgcccttcttaatggagagctcccgatggagggctccaggactgatgctctccctaaggaagggaggcctcagatttggagagggacaccaacaggaccagaggaggactgaggggcactggcaccaataagtggaagggaacagcgtggtaacaaaaaagagccatgccacttgcatgctggagggagtctttttgtgtcagcctaaagcttaggctggtgtccatgtggaacatgacatctttccagtatccctgatccaggaaactgcagtgagacccaggtgacccagctctgtgtcatttggagcccattaaaaagtgaggcagccacatggcggggacattgaccccactccagaccacactcccatctccatacataggatagaaactgttcatcaggaaggaaaaccaaacagaaattcgtggtctaggggaggggtctgcattcagcatggccatgctgggctggagtggctgtggggtgtccagatagatgggcatgtagactagtgctttctcaacctttaatgcatgcacaaatcatcgagatcttgttaaaatgtagatcctgggtgggcacggtggctcacgcctgtaatcccagcactttgggaggctgaggcgggcggatcatgaggtcaggagatcgagaccatcctggctaacacggtgaaaccctgtctctactaaaaatacaaaaaattagccaggcatggtggtgggtgcctgtagtcccagctactcgggaggctgaggcaggagaatggcatgaacccgggaggcggagcttgcagtgagccgagatcgtgctgctgcactccagcctgggcaatagagtgagattccgtctcaaaaaaaaaaaaaaaaaaaatgtagatcctggctcaggaggtctgggataggacctgggattctgagtttctaacaagctcccagggatgtccatgcttctggtccctgaaccacactttgagtgacaaggatgtaaactgttggaaacatggatctggtgctcattgcgggaaagggggtgtcctcagggcataggtcacagccaaagccctgacagcgggcaagagtcccagggagaggctgcctgcacattgaggaggggaagggctgggcctgagcagtggggagcatccatgctggcaggtatgcagcaggcaaggagatccaggtggagatcagaggacagtgacagtcacagcagcaggggagagccaggagaaagctgctcctaggggtgtctcaaaggaagaagggatctgcagtgtgaactctgcagagggcagggagaatagaggttaagcctttgctcattctgaattaattgattactgctttttaaaagtgctttctttctctgggaaaaaaaaaacattccccagtgcctaaggctaacagacgtgggcgctgagctgtgtctggtctgctgagtgtattttccccagagcaatcctcatcttctcagggggtggggatttggacaagactcttcctgaacacgcagcgtggtggggaagggtggccatggaggttttctgttccttctgttgtcactggtgaaagacgacttggtgcccaatttctaataaacacaatgctattagcgtcactccaatttagtgtctgattgttaaatgttaatgtactgcactctacagttttaaatataattagagatgtttacagctttggttaaatgcaccttgttcttccacattaaactttattacaagcgtc

SEQ ID NO: 82 - DNA, 3952 bp, Homo sapiens
tgggcggtgcctgagcgggcgggaaggaggcgttcgtctagatttgtcggcttgcggggagacttcaggagtcgctgtctctgaacttccagcctcagagaccgccgcccttgtccccgagggccatgggccgggtctcagggcttgtgccctctcgcttcctgacgctcctggcgcatctggtggtcgtcatcaccttattctggtcccgggtaagacccacggctgcactcaatccgtccccattcccatctctgagtggtcctagtcctaccctgccccctcccagtgtcttaccctcttgggttttcttgtttcccgccgcccccaggcctgccctgcagcctgcccctttttcacttctcttcctgtgccctgctcccaggacagcaacatacaggcctgcctgcctctcacgttcacccccgaggagtatgacaagcaggacattcagtgagctcttgggacggggtggccagaacgaagaggtggtgggagtggaggggtcttagaataagtccaaaggcctgggccagtccacttcctctctgcaggctggtggccgcgctctctgtcaccctgggcctctttgcagtggagctggccggtttcctctcaggagtctccatgttcaacagcacccagagcctcatctgtatcctttctgcctgcccacctttcccacacgacccacttctatcaggactcccttcagccacctgacacaatagtgtctgctgtagccaatccttccagttcaaagatcttcaacgatgtgctaaatcctgctgtttactaggcacttaaaatcccaaaatgagagtaaaatacagtttttggccaggcatgttggctcacgtctgtaatcccagcactgtgggaggcgcaggcaggaggcaacatagtgagaacccaagtctacaaaaataataggaataataaaaaccccaccgtttctttttacaatgaggaggaggtagatacaaatctgtaattcagtgtgataagcactgtgctatagaagtgtgtgaagatagaaagcacaggcagggcgcgatggctcacgcatgtaatcccagcactttgggaggccgaggcaggtggaccacctgaggtcaggagttcgagaccggcctgaccaacatggtgaaacccccgtctctactaaaaatacaaaaattagtcgggcgtggcggcgcactcctgtaatcccagctactcaggagactgaggaaggagaattgcttgaacccgggaggcagaggttgcagtgagctgagatcgtgccactgcactccagccagggcaacagagcaagactctgtcaaaaaacaaacaaaagatataaagcacaatgggaactcagaagaggcaacggaagcgagcactgggaactcagaagaggcaaaggagatgaggcacatgggtcagagaattgtggaccaggaggaccaggacactggaggctgattccagcgcatattaagtcgctgtcagcactcctttgtggcatagcagaaggagagcctactcttacctctcatctgaaggatccaggctggcccacagataaggggtagggtagcctgaggtccgatctgtgcagtcacttctggtctctcctcacatgactgtcctaaaattcagaagtcagagctgctgactctagcccttgaaacatggtgagggagcaagggatgaacctgaatgcagatgccagccccaccactggccttttctgacccatcactgtctgtcgatccaaagactttccttaatctcgtgccttcccaagccattggggctcactgtagtgcatccgtggccctgtccttcttcatattcgagcgttgggagtgcactacgtattggtacatttttgtcttctgcaggtgtggtagcatccaatatttggggatgagggaggaaggttggccctaaacctgaaggtttttcccctacccagccctttcctccatgtgtgagataccagatccactcaacatcctgtaggcttttaaagtttcatcccctaccccccatgccacctgccctacactttcagaggtggggtctctggtttggagatttgggtatttatactgaaagggtttctgaatctaccacttgccttggtagtgcccttccagctgtcactgaaatggctttattcgtcaccgtctttgggctgaaaaagaaacccttctgattaccttcatgacgggaacctaaggacgaagcctacaggggcaagggccgcttcgtattcctggaagaaggaaggcataggcttcggttttcccctcggaaactgcttctgctggaggatatgtgttggaataattacgtcttgagtctgggattatccgcattgtatttagtgctttgtaataaaatatgttttgtagtaacattaagacttatatacagttttaggggacaattgagatggctgaactactgaataaaaaaaaaacaacgctgttttctagtcctgcagaccgtaagatacttggtatcgcttctattttggttactacggtaggtgcctggcggaagggagtgggcggagatatgtaaatagaaagtgcgtacagttagaacgtccggcacgtaactgatcggagcattctgggaagaagtaatttattccttttcggcagccgaatgaaaaaaaaatttaaaaaaatgtgcgagctaatatggcaaaacaactggaaggacgctaaataataggattgctcataccagcgcgttatgaactcaccctagcttgtaacggaatctttttcactgagtgcagaatgtcggctgtttgtctgtatcgtcaggtgggataatccttacctgttcctcctccggagggcagattagaacatgatgattggagatgcatgaaacgtgattaacgtctctgcgtaatcaggacttgcaacaccctgattgctcctgtctgattctttctgacgatcacttacatttgtgttatgctgattagcagatatccacaaacatagctatgaagttctgactgggataaccttgctgtttgtctattttgcagtcttgctattgctgtttgtctattttgcagtcttgctaaatttgtttgttcttgaaaattgtgatttggtttttgttgctttctggaatttaggcagtgaaataatacaaatgggctctttgttttttgtcgtttgataactttaatcctcacttctcaggaaacattgcacatcagtaaatatctgcagtcttgtgcacatggtggttgccctcaggatggtattcaataggaactgtatttctttttccttgaggtagggtcttggtctgtcgccaaggcaggagtgcacggcgcagatgtatatacatggatacatttgtttttggagagttggttgttaaaaatctaccagtacacccccaagaaactcatcatcaccaatgacttcttcccaaatccagagtcacttttcagacttgagattgacctctcttcagcatatggtatgttgaccacccccctcttttggttttttttttttttttttttgagacagtctcactctgttgcccaggctagagtgcagtgtgcagtggtgggatcatggctcactgcagcctcaaactcccaggctcagatgatcctcctgcatcagcctcccaagtagctgggactacaggtgagcaccaccacacctggttgttttaaaatttttctatagagacagggtctcactgtgttgcccaagctggtcccaaactcctgggctcaagccgtcctccccactaggcctctaggcctcctaaagtgctaggatacaggcatgagccaccgcgtttctcccactcccctcttttgcacttttttctcccttagttttgaaacagtggttcacctggtttgcctactattatactgttctggttgttccttcttacattaatt

SEQ ID NO: 83 - DNA, 62506 bp, Homo sapiens
gcacatgcgcacaggcggcgcagccggcacgcggcgctcgcgctccctccttaaatgagcctgggcgccccgcgcccgccacttcagtggatcccgcgccggggccgcgggcggagctgcctgccggtcccgcgccgcgcgtccgcactcctcggccctcgggcggtcgatgggacggggcgccgcggagcaggaggcggcgcccgtcggggtgctcgggccgcgcgggagcccactgtggggctcgggcatggcgggccgcaggacctgagctctcctcaggggagcggggaggcagctgctggccggcgatggggacggagtggggccgtcgccgccgcgccgagccgtgagcgccgagccaccgccgccgctacctcagcccttcgcgaagcgccgggcagctcgggaacatggccctggagcggctctgctcggtcctcaaaggtaaggaccggggctggggccacggacggcgccccctgcgggccgaggctggcgcgccgccctgcccgcgcctctgcgtcccttacccgcgcccgggacccgacgcgcctctttgtctggcggggctcgcggctactcggagcggaccgcggggcgcgagccctgcccggctccgccggctctccgggcgcgccgcttccgacccctgcgagtccggccgacgttcgcggggcgcgtgtgggaagagggatcgggtcgggaaggcggccaggaggcccctgggcccagcagggccctccgggctgcgccctcgcgccgcttccgtagaattccgcgcatccctttgcaaagttgtgagattcctgtcgtggagcggaggccgctctttctccagatgtgatggcaaaaagtaattccacgagaacaataaaagccgcggccgtgacgtcgtgcagtggttttcgaatagccccgcggcgcctgcacctcgcggcggggaacggggcctgctgggccagccgggtcccacctgctgcggccacggaggctgcggcaccactgcgggctccgggggcggcgcgcgggcgccgcggacccggcttgtcccggcccccggggagcgctgctgctcgggtgcttcccgggacgcggcgctcctcgcgctccgccagaggtctcagaattccccgccgctggtgttcggttcttactaatttgttgtactgggaattaaaacagttggcttgtccagagcacagagctctaaaacctactccaccggctttgcatttcccaggaggtggtaatttagatgaaaatttatatacatagataattaggattgggatacaaagttgctcctgaaactcggactgaataaatcgtcttttcaatttccagagggaaaacagcaccaccactcagtaaaggacttccctttttccccctgctgatttaaattgaaagctgacgtgtttgtaatgtcgtaacatgttctttttttaaaaatttcgagggtacggctgaggcattattaacggtgttatgtataactcagcactgtatcttaatatttgtagagtgacttttttcctgctccctaacagcacttttttcaaatttgttttattagaaagttcagtgtaattttgcttttgattttaattggacacattgtctactctccacatattcctaaattcgtaattgagatttcagtaattcgaaacgtttaactaccccactgtaaacgtatctacagcttgtactaaggtaacctaggactttctagctgatgaatatttcacaaaccgtaaatccgtagtgatttctttattacaattgaaaacaactctgaaattcatcctgtggctttcatatctctaactcctaatttttacagtcattcctgggaaaggaatgtttttactctttcgtgataaaccgtatgcacactaggatttctgatcgtgttgcttatctgaattttctgccgttgtcggattgcgccctcactacggtaaggttgtcagcatgctactgaccgtgcatccgagagcacccccggatgaaatcgcgtagatctgtcacaccgctttacctgcagaacttgataaaatcgagctggatagggtaggggctggtagcgcctcctccaatggtgaagggatttgcagcgtttctgcctttgcctttcccgtgggtgcacactgccctctctggccatcgtggtgaagcgttgagtgttgtacctttcaggaaaggattctggtgatggcagagctacggtgaaaacaatatagtgtctggcttttcttttttcagtgttagcctacactatttttacatgctggagtatttttaaagctcaagctgaattattattgttgttgctgctattggtggcggcttcctagagagaaagcaagttatttttaaagtcgtctgtggtatcaacttgtaaatgccaataactggtctggaaagattcaataaattgttaacagtagttgattctaatacggaaatctaggggattaaaagacaggaatgaagggaagactggtttcactgcacacccatttgtatcacttgattttgtttttgttttttttttttaccaaacgcatgtataatttatttaaaaatcaatattttaattttaaaaagttgcctttaaaaagatactggcctttcccattacaaactactcattgtgtgccccaaggcatgaagaagttttccttttatcctataaagtgaattgctttaacatcaaagaggttcttatctgaagcagctatttaacatttacataattgtggatattacccacagaagccttgtttgaaatattatggtcagtttctactaaaataaatcagccataatgagtgtgtgagattttaagtagaaagtaattttagttctttaagatgccactgattattcttgttttactttcagccattaagacaaaagaataaccttactaggcttttaaacctttcctatgttgttgaaactaaaaaattcacttttagctgtgatcactctaggcctcacagaattcgagttaatcttctgtcaaggttaactaagcattatagtctcatgaaaatattacatgaggattataaatccattttttgttcttattctgcacacttgcttcaggagaatctgttcgactcagcaatatttcaagctgtagaaactggttaaatttgtaatgtaacagcaaaaatattccttggcactgtatttaaaaatcttgtctgagacggtgcaagtattaactcgtttttcattcttacatttcacccaggactataaactagttatacagaaataagtgtggtactgaaaaacttgtcctttaatactaaagccttattaaaaatcaactttttggcttttccttccaggggttgggaaaaactgttttaacactgtcaattgaaaagtcttattaaataatggtttttttgtagtaaatcctcaactgcaatctggtttatctttcattttgaaattaaaatcactatttaggaaaaaccctgcatgacaaaacaagttgaaatcaaagccattttcagtcctttttagaaaagatagaaaaatgatagactagaaataaagttcatatctgaaattttaaaacaatagactacctccttctcttggggtaccacccatccagcacaatctcctatcatttttcaacttacgctcctgtagaataattatttatacttagaaatacgtctccctgaggcactggagattgaaattattatgatctttgagttggaaaggagcatcttaagaggtggtctaatccaatggtttccaaacttcagaggaacttttgtgaggaagcacttgaaaaaaaaaggaaaaaggacaacagaacagagttgctgtgattggtgggaggccttgccctctcagtcacctcaaacaccagggtggctccaagaactgacacttcaacgggtttgttatattgcttccaaaattacagggtatactaatctgaaagttcagtcctttctaatcaaaatgacattaagacatgttggtttaaatatgcctggagtaacattggaaattacagcactagaagataccaagtagtctttcaaatatgacctgatcatgttagaaggtgatggtagtcactgtacagtcaggaggactgatgtgtaattaaaatacagcttacaaaagcgccatctcagatcagctcgactaaggaggagtttgtcacattctgcaggaaagagaaagcacttctgctatagagttactctttcttactaaagtgattggcatgtcattagcatatgtaggctggagtgatcccaaagttcaccatccatctttgttcttaactagtaaagtatgattgagtttgattaaatttgggtactttttttgttctttggaacatagtttatcaaaaacaagtgactgccatgtcaaatagtatgtggactctaattgaactctgttctgctgtcattataggaaatggtaatgagcagagagaccaggtaggtggttctctgtgttggattttaaaagctttatgtttaccactgagttgcttaacacaggaagatgtagaaagagacacacttaattactaacaaaggtaaattgagccagcttgaggaaaataacagtggtggcagggtatctcaggagggtgggggggaatctcagttcttttcccatcccctgatttgtgctcgcatttaaaaaagcaaggtcacatgtgtggctactgtttgttcatccaagatgtgtgcctgtcagttactgtgctatgtgtttgcggttacaaagaagatgcactggagtcgcgctcagtcacccccatgtgttcatcgtgtctgtattgaatactgttgaggccagacagtcttttaggctgtggagatgcatcagtgaatcagacagacaaggcccttctttctagtgagaagagacagacaaccaacaagactcaaaataccaggtaatataataatgaagtaaagcaaaatgaaggagaaaatgtagcgcttatttagaaattgggaaagcctcacaagacctgaacaacaggaaggaatcagccaaagagattctaggccgaaggcacagctggttcctgaggcaagaattagcttgatgtgttttgagtgatgggaaggcggcctgtgttctagtagagagcgctcggaaggccagagagacacgcaggctccaggtcacatagtacctccgaagtcagagtaaggggcacagagttgttctaactataatgggactctactggaagattttaagcaaggctgtgatgtgatctgatttgtattttgaaaaggtcactggctgctgtgtacataatacactatagggactgtggcagaaacttccagttgtctagaaatgtccatttaactatttgtcagtaattctctgaatttaactgagcgcacagttccccaaaatgaagactatttaccagtttcctgttggtttaggtgaccatgtgactaagtctagccagttagatataagtagaaaatgatgtgtgcaacttaggggaattgttgtttttgttgtttaaacttttattttgaaatcattgtagattatgggcaagtgtttttgttttgttttgtttgagatggagtcttgctctgtcacccaggctggagtgcagtggcacgatcttggcgcaccacaacctctgcctcccaggttcaagcgattctcctgcctcagcctccccagtagctgggactacaggcgtgtgccaccatgcccggctaatttttgtatttttattagagacggggtttcaccatattgttcaggctggtcttgaacttctgacctcatgacccgcccacctcagcctcgcaaagtgctgggattacaggcgtgagtcaccgcgcctggccctgggcaagtgtttttaaagaaagagagaatgccctttatcaagtcatcattcttgataactagaatgcagacatgggagctataatgaagatagaatagctggcactccagcctcatactggaccatagggtgaccttggaaatgagcctctcacagctgggtagtgagacagaaggaacccaggtcctggtatttatagagccttcactctgatgcttgactccctatgtccagcttgttcgcatgacagagcaatgtatttctatcttgttttaaactgttagtttaggtatttctgttactcatgccaaacctaatgctaacatagaagtgtgcaaaatcagtataagaacaaaaaaattaaaaaacagatggagagctgttgaatgatcagaagtgaaaagtctgaatgcagtcaagtaaaattaatctggaaagggttcctggagaaagcaggttttagaaaatgtactttcatggaagcaaagaggtccaaggtccctggcaagtgcagatgttcagaaacaagaagtatttgttggagcccttataagaatagatagtagagccttcacctcaagttcaacgtttccaaaatcgactcaactccttttcgcccacccctgccctgcccaatccatattggtccaaacatgtctcctgccactaccaaaggagggaaaaggccacctctcactgttgctttcagtaatctgccatgctcctgttgcagtggtactcacagtgtggtcccagctccagcagcttctgcatccctagagaatttgttaaaaggcagattctcaagccctgcctcagacccagtggatcagagtctctgaaagtactcccatctgtgagttaataaacccaaggtgattatgatgcacattaaagtttgaggaccacggtcacagtgattcagttcccacacctggaagtagaaatgctggtgggatttgcacatttttgagccttaatatattctaccagattaacctccaaaaagttgtgccagtttgtaatccagtggcattatatgagtatgtcagtttcctatagcctgaccaacactagaatctgtacatgtatatatgtatgtatgtttgtatgtttgtaaggctgaatttttgggttttggcacatttttatgatggtctaatcttttttcccccatttattattagtttttatttatgtgtctgtcgttagtaaatgaaggtgctcttcacctcaaaatatatacataattcaccttttttttcccaatctagtatttattttttgtttttagcttgaaggcgagatctatttttatttcaaagaattaatatgttatcccagaaccatttattaaatccatcctttcaccaaggatttcaaataccatgtatatcataataaattcttggggctgggtgtggtgactcatgcctgtaatctcagcactttgggaggctgaggcgggcagatcatttgaggccaggagtttgagaccagcctggccaacacagtgaaaccccgtctctactaaaatagaaaaaatgagctggccgtggtggcgcatgcctgtagtcccagctactcaggaaactgaggtacgagaattgcttgaacccagaagcagaggttaagtgagccaaaatcacgccactgcactccagcataggcgacagagtgagactgtctcaatcagtcaataaataaaaattaattcttggatatatatatctatttctgagcttttaatttttttccattttgttatctgtaaggtgctggagaataaggaccttgtctgtttggttcattgccaccaggaagtgactcactacctgttagacaatgggttcctgcatgtatttaacagatcatctgtttcttcctatgtcattgctacattttttaattactgtagctttacaataaatatatcatatattgtttttatttattctatgtgatttctaaattttctttggccagtataacaaagtcttcaagatgagcatcagaaacgttttgttaagtccaaaaacaggacccactaagagtttgattaaaatattaaatgtatggcctattggaaagactcattatctttgcagcattattttactgctcagaaacatgttactgctctgttttattcagtatatttattgtttatttattttagttttactttcttcccttaataggtgtaataatttttcaaataattctcttgaggtttttaggttttcaataacattgaaatctataaataataattttgtcttctttccagtatttattgcattcactagaattgccactattaagtaatagtgaaaagaataaatttgacctttttttttttattttttacagtggaaagtaggccttaaaattggaaggcctaggaacagaattgtctgcttagagctaaaatgacagtgattcagggtaaaaagaggaggaataaagggagtggctttgaggattgtttaacagcctgaatagcacctgtcttttatcatctgagtgacttcattttaggtcagatctgtacacaggtctgactaaataagactaaattcaactctagaaccaggagtaacatcataaatggtggacattacctttttcaagcatcaaatcacaagcagttctctgtacaatcaaattgcatggttaaagagtttagaattatttttgtgtagatttctgccttatagaattagcgccttcctatatacattatcattgaattcaaagtgtgaggtcttcctgtatttgagatataattgatccttttggtaagaggaaacagtggcacctagattgggaataaagacagaacaaagaaccacagaactgcttcatgtgctaaataattgcagggtttagcattaatggaatttgttttaatatctcagcctgattataactcaagcagtgtacaaagaccttgttatacaactcaggaaactgtgtttataatgatacagaatttagaatggattaatagtcacaactgtattaccaaaaactgtatcagtacatctttctatccctaattgctgtgcagattcgccctattctttatacgtcgtttttatatttagtggcacagctcatttggtcgattgagttgtgaatagctagtaattacttgagaaaaaaagaaaactgtgcagccctctaaataaagttgaaaagaatataataggctatttggccttgcaactttattttcagtatgattgttctgccttacttgtgtattctgtgcaaatttcataaagcagttattttatacaagcacatttttattggtcattgtataccgtaattgtgctggcacagttcatccctttgccatagttgccgttgctgtcttgccttcagtttattggcctcttacatgccctgtctgctggctttgtgtggttatttgcttatagatggatttgtaaatgtcaaactggtaaatagttacacctgtgattaaggaggaatggtatactgcgcacgaaatattgaccagtggcatatgatctgaatgatatgcctggggagatagtgtctactaatgagataaattgacacaaatggttgggttatttgctgaattatcaaatacctactattacctgacttttctttttgatcataaatcttctgtattaaaaaatgtttcaaaactccattcttctaatcagatccagtgtaaagatgtgaagagttcaagatctcagcataacgtgagatcttcaacactaccatcaaccaaaaaaagggaagggggaaattaacgttattgagaaaagacagaggagacacagaggtcagcaaggatgcaagaaaccaaggatgaagaggtcaaagaattagattttaagatacgaactgaataacaagagctacctcttaaccatttctacgttggtgactttggtagtagacacccagtacgtgctattgagtgaacagtggtaactgtctaccaaccacttgcactagcagactccagtgcctccacctccctcacccctcacgtcctgtaagttgcacttgactctacacctgaaccatgtcattagtttctcctcctttccctttccactgctaccactctgcttcaaagatggtaatgcaaacatgatcacctttccttcctaatcttctctcttctcattaaaagtatagaccccacacaaccattaggattattggtctaaaacacagaagtgataatgtcatacacttgtttaaaaacctacaagggcttctcattatagttagaagtccacactttttagcatgccattcaaaacttgttacaatcagatctcacccaacttttctctaacctactatactgctgtagccttccacttgccaaccacactgtattactcagagttccctaaaacctgctgtaggttagagctcatgcctccatgtttttattttattttattttattttattttattttattttattttattttattttattttatgttatgtcattttatgttatgttattttatgttactttatgttattgaggcatggtctcactctttcgcccaggcagtagtgcagtggcacgatcatggctcactgcagcctcttaactcctgggcactagtgatcctcctgcctcagcctcccaagtggctaggactataggcacatgccaccatgcctggctaatttttttttttttttccgtagagacagggcctctggaactcctgggctcaagcaatcctctcgcctcagcctcccaaggtgttgggatttgcaggcatgagccaccagcgccctgccctccatgttcttatttaagctgtttctttctccttttcctgggctcaaggactgtaaggtccaaccagagtatgccttcttttttgggagttttcctcattctatttcccttaacccccagcagaatggaccttctgcttccattatgccttctgcatatctcctgttaaactccgtttcaccttgtattgtagattcaacaatacattgattccttgtggatgctggtttgtcctaatatccatcatttatttagcagaatgtctggcacataaaaatactatatacattatctcatttaatcttcacaaccaccaatgaggttgacctatttatacgtcatctccattttacaaataagtaaactgagctgaaaaggcctcacagctggtagaaggcaaaacttgaaccctagcctagattcatgaaactccttaagtccatactcttaaccattttgctcgatttctctctccacacctgtgcatccttggtgcccgctcttcagtggatactctgtaagtgcctattcactgaatgaataactccagttcacgcagtagttcgggacaggctggcagtgtggtttcctttgaaagggagagtgcagcatccatgaaaatgtttctttaaatcttcaaaccacatacacaaaacaattcaatatgttgttgattgggtctcagaaatgttcaacatggaaaaaagcttcagtgttaaatatggctagcctttgtagcacagagcacagcatagtactgcacaatgataagacagtttgaattgatttctaggagactgctgcccccttacttctgtcttgattaagaatgttctcagaaaacagatataatctaattgaactttcactgccatagcacactgcagagccagctatactgcatgtaaactttgagatggactacagtaaatagaggaatagttaggatgagcaaggtctgttgcaaaaaacaagtgtttttttttttttaaacaaaactattaagttgaaaaatgctttcaatgccatgtattattaaatgcttataaatgagtacaaaaccacttgtcttttcttgggttatcttaagggttaggtagcaaatcagaacataacatttaatgcttaaagatcttgagagtgaattttgagtaataaatagtgattttagttaatctttttttgtcatccaattttatttattgacttagtaaaatgtagtatagattcaatttcataacttttcttctctgttatttctctagtgttgttaataacagtactggtagtggaagggattgccgtggcccaaaaaacccaaggtaaagtacttacattggtgacttactgcatgtttaagacaatggactggcttatttgaaaggattgcaacttttgggtactattttcataatccctttggggtgttccagtgacctaaggctttctgtcaacccatcagcctcaatttaactgagtttagctgcagttaactaaattgtcagcataaagtcttgccctgataaatttttaaaattgacatcactagtagctcctagcatactgtggattatgtccaaaaattaaaggagatttatattttatcactaagcaaaaataaaagtccctttttctaatttaaacaaatgaaacacttcaattaatatcttattcaaagtcctttggttctgttcttttgtcttgatttatgtttgatgattagctagtgtgattttttttagccagatttttatgtctgaatttagtacatttccagtgtaatgttgtttgttttttattttcatctaagtaatacatacacatgataaaaatcaaagcattcctaaaaagttaattaggaaaaatgagttccccatcttgccctacttaacttcctgctccatggaaataatcactcttagctgattcttttggtatttcccttcctttctctaaataacatgctgtattgctacttcttggttatttcagttttataaattagataatgatttttcaccgtggaagatgagaatttagctctttcacgcacctaccgtccaccccatccatatttgagtgttctcgtaccttgcatttgtagcacccttctcaacacagttctgtcataattctggttaactcagtattcaggatttacattaagtcactcattcagctgaattttatctttaggaaatcttttttttttttttctgttttaatttttaaaattccctttcctccattttctctcttttgccttttcaggaattctattattttacttggttatggccctcttggtttttgtttctggctcttctgttttccatctttttgctccacattcgctgagacttcctcaactttacctctaaaccaggagttagaacactttttctgtaaagggtcagatcgtaagtgtttaaggcgctgtaggtcctacagtctctgaagcaactcttcaaattcctcaactcttctgtcctggaacaaaagcacacaaatgatggggatgggtatattccagtaaaactttatttacagcaggctccaggtcatgtttggcccagggtcatagtttgctgaactctgctctaaatgttctgctgattttttcatctcttctgtttttggaagcttttttggttctgttttctgaatataatattgtttgtacagtatctttgtttttgtcttatagatttacttgcttttctttctcaggatattaaatgattgttttgtggtggtggtggtttttaaatatttttcttgcatagtctttatctcctcagagttgcttttctccagttttattattattattatttatttatttatttatattagagattttcctccaatgtctggtgatccttgagggctcatattttaagaggggcactaaaaactgatcgttaactgtctgcaggtgtgggcaaggatcagttactggctctcactgttgacagatctgacactggggaactcctgcatctgcatcaagcctttcctaggggctgtttcgactcccagagaagaatcttttcttttcctgcttaaaggctcaatatctgaccaggaggcctttgtgggagttaagcaggaaacgaaggctgggacatgtgctaacattcactcgtctccctgttttcgttctcaactgttcctggtgtcccctagtccagtaaccctgttgttttaccttctccaaagaaatcacctttagtgttctgatgtggttgtagagctgctagatttgtggaggaggaaagggtactgaaaatccaactcattctaaacagacttttaactagcctcgtgtttttaaaaagcccaatttcactcaccacccccaaccccacttcctggtactgccagttgttactgctatatctacccctctctgtttaagagtttatacccttttaaaaatccttttattgctgtttaagtggagtttgaggaaggagctcagctacgtgcatgtatttagtctacagtcttcaactaaaatccctctaacctttgaatcatcttttactgttgtgttaaactaagtttgagggccccatatcagagatcagctcctgggatgcctttatttttaggttagaactgaattgtattgcatcttactgacttagcagattcccccatatggttttgccctttgttaagtgcctataagccctttatttccctgttctcttacacggcaaacttgtcctctcccagcaagttttccctccctctctttcacttctgtactcaatttattgtgctaaatttgacagtggttcttagaaaattttatatatgtagcatagagtgagcaatcgtttggaaagtggtgggggaaagagaagaatgattctcttttgctgtaatgagtgttttaaatgccgtttttccctaagatggacaaaatattggaatcaagcatattcctgcaacccagtgtggcatttgggttcgaaccagcaatggaggtcattttgcttcgccaaattatcctgactcatatccaccaaacaaggagtgtatctacattttggaaggtatttgaacgatttcttttattggatgaatttttactttattgtaaaactaaatatgttggtaaaatgacctatgtaaaccagtttgaatgaaatttaaacatgtatttgaattaaactgtagtaatgataagtatttctgcatattgaatacattaacaagatactagcagaaatgttaggggaagtttgaatctcccaaagtataattcaactacgtacattagtatgtatgaaaaacttctttctctgataagaaacttaaacttactggcatcccttataaggcttaattcaaatttatgtccacataagtgagttcttttcatttcttctgtttatttttctgtgtattgtggtacgttgtatcttgaactaagtattagcttcttgactcttcagtttgaatcactcaaaaatatttaatttagtagatagcatatgccaatggaaaagattactatagttctacagagtagcattatttttaatgtaagatacatttatcatgacttgtatagcaattctcactaagacctttgtctatgaagcagttagcagaacagttattctgcttttctcatttgtgtcaatacatttatattctttcttgtttgtgttgtcctgatttgcttactcttattttctagctgctccacgtcaaagaatagagttgacctttgatgaacattattatatagaaccatcatttgagtgtcggtttgatcacttggaagttcgagatgggccatttggtttctctcctcttatagatcgttactgtggcgtgaaaagccctccattaattagatcaacagggagattcatgtggattaagtttagttctgatgaagagcttgaaggactgggatttcgagcaaaatattcatttattccaggtaaagaataagttatcttttaagtggttgggcatctcactctaactctgattttagaatcttaaggttagaaaagagattaatttggtcaagttaatcaaatcaagattttaaacaaattagcaaagtcaaagggaaattagtccatgaacaaataagaagttaatagaaattggacatagaaacgtatcacttgaattttgaagcatatcagagatggtgccacattttcttagatttttttctgtcttatagcacatgctcaggctaacatttaaaatacatttaaaaataaataattttaaaaataattcaacaaattgtcttgttttcagaattcccacaaaaattgttttgtatgatttttctcatttagctgttagaattaaccactcaactgaatgaatactctagaatatattgagcaatagaaagaatactgctctgcacttggatgtcaaagatctgggtttgaattctttctctgcctcctaatagctgtaagacgattaagcacagaattatgtttgagattggccattagtaaaatgggaatgcctgctgtgttagtttattgatgctgccataactaattacctcaaatttggccacttcagacagcagaaactgattttcttgccgttggggagaccagaagtccaaaattgagcagggcctcactccctctaggaacctgggggagaatccggtctttgctccttccagcctccagtgcatgccccagcattgctgggctgtggctgcatcacctcagtctcagcctccctcttcacagctctttctactcttttcaagatccttaacctaatggcatcttttgtcttgtaatatttactcttttaaaaaactatatgtgtgtgtgtgtgtgtatagatacatatataagtgcaccctactactcacaggttatggggaatccaatgtgtgtatattggggggctactgtaccatcagcctgctccaccgtgttacctgccccacagtaggtgagaacactctgagaactgtaaagccctgtccagtatggcgtgtacatatccctaatgcagaaacagatgtgcaagttattgttcctgtcttcaccaagcttacacactaacaagatgaaaaaataacagtaagacaactgcatgatctttttgcttttatttttcgtgcaagaaatttaattggaaaaaattaaaacattgaaatgaaaagaaaatatccataatccttccaccctgtatataaaatcagtgtgaacaatttggtgtatatcccttccagtgtttttctatatctgtttcttttgtttgttacacaagattgggattatggtacacatataactttattatctgcttttttgcctgaaaaacagatgtttgcctgttagtacttatgtaggaaattttaagcttggcttcagtgtttatctgctctttttaaaaatttttttctatattctccatagccaaccaagtatttatttgcacaataccaaaaggatatttccaaaaagtaaacattgtctaatagactttattttttagaacagttttaggttcacagcaaaattacacaggaagtagagttaccataagcctcctgcctccctttccatcagcatcttgcacgagagtggtgcatttgttactaatgatgagccaacatccatgcatcattatcacccaaagcctgtagttgacattagggttcactcgcagtagggtgtgctctgtgagttttgacaaatgcatgatgacatgtatccgcccttacagaaccatacagaacagtcccactgctctaacagtgccccgtgctctgcctgttggtccctccctttccccaaaccactggcaatcgctgatctcttcagtatctccctagtcttgctatttccagaatgtcatgtaactggaattatacagtatggagccttttccagttagcaatatgcatataagtttcctccatgtctttttgtggcttaatagctcattttttacaccaaataatacttcattgtctagatgtaccatggtttgtgtattcattctactgaaggacatcttgattgcttccacattgtggcaattatgaataaagctgctattcatgtgcaggtttttgtgtggacgtgagttaattcatttgagtaaattctaatacatgccacaacatggatgaaccttgaaacattatgctaagtgagataagccagacgcaaaagcacaaatatgactccatttatataaggtatttaaagtagtaacattcatagaaacagaaagtggaatggttatcagggtatgtgggggaagggggaaggggagttaatgtttaatgggtgtagactttcagcttgggatgattaaaaattctgaaaataaaaaaatggtgatggttgtacaacattgtaaatgtgcttaatgccactgaattgtaaacttaaaaatggtggagccaggcgtgtggtgcacacgtgtcattccagctactcgggaggctgaggctggaggattgcatgagcccagaagttcaaagttatagtgagctatgatcacaccactgcactccagcctggatgacagagcaacaccctgtcttaaaaaagatcaacattatgaattttatgttatgtataatttaccacaattaaaaaatagtagcagccagatgtggtggcttacacctgtaatcccagcactttgggaggctgaggtgggtggatcacatgaggtcaggagtttgagatcagcctggccaacatggcaaaaccccgtctctactaaaaatacgacagttagctgggcgtggtggtgcacgtctgtaatcccacccactcaggaggctgaggcaggagaatcgcttgaacctgggaggtggaggttgcagagagccaatattacaccactgtactccagcctgggcaacagagcaagaatctgtcagaaaaaaaaaaaaaactagtagctagtaagctgttttttcacagtggcagggaaaagaaagaaagacaggatatcctgccttgtgaaatagtccacaggagtttgagaaccaatagtttatatcaaaatgactgattggattaaattggtcagctattttatttttattaactaaatcaactaactgaagtaattgaaacattagtgtcatgaagatactgttagaatagatggtggctgcacataagtttagactacttgacagaaaaagacatccaaagaatactcttatttgaataatgtttttaaatatttaaagacaaagtcagccaacttcatatgtaaagatacttactttggagtcaagtagctctttttcctctattcatgttatagatcatgagagcaactttaaatggcctatagttaaaatatagacaaagtataataaaatgcttaggatttctagagtttatcacctttcatttgcattttatagtgcttcacagttttgatagacattatgtttaattttgtgctaatgactaatgtcaggaggattatgtaatattttattttacagatgaggaaactgagtcagattaagtgattttcttggttcatagaatggcaaatccaggactagattgcatttcactaggcaatacttcctactctatcatgttgcctttataatgtggatgaggtcacattggagaaaagccttattaaaatgtggatgaggagtccacaattttatcactaaaagagaaaaccaacacatgtcaaaataaataggcaatgcataattagctaaatatgtctgtctgatgttatttcaagtcatgttaataaaataaattttgtctaggaggtggtaaatctggaagaaacctattaacaatggtgagaagttcattttttttaatgaaattctctactgagggagaggctcttaatgggttgttagttcctggacataactgagataattatggacattttaatgcaataatgacaatatcctagatttctggaatacatatgaaatagttctgattaatctgccagacagttcctgtgattcccctccgccatgccgtttaagatttaaatttcactttgacatttctctgcaaaagagcagaagtgtctattgtcctctttcagcaaggatgagttttgtttataaagttaaaaaaaaaagttgctgagatatattctacataagctaataatttttttccactttttaaaatatgtaatttgataacttcctaaagtatctggaattaaaaacaacagttttaacaggaattgagtctctagttgtacacaattaaattgcgtattgaaatagattttccagtccgggtgcagtggctcatgcctgtaattccagcactttggaaggccgaggcaggcagatcacaaggttgggagtttgagaccagcctgaccaacatagtgaaattctgcctctactaaaaatataaaaaattagctgagcgtggtggcagacacctgtaatcccagctactcgggaggctgaggcaggagaattgcttgaacccgggaagcagaggttgcagtgagccgagattgtgccactgtactcctgcctgggcaacagtgtgaaactccatctcaaaaataaacaaaaataaatagattttccagaaatctgagacattttagacaacccagcaattttttttattctggctgttaggtatatacacaggttctatctgaactttaaaataattttttaaagatacctgtgtttataatttctaaaactttatttttattgtggtaaaaaatatacataacaaaatttaccctttaacctttttttttttaagactcattttgtcacctaggctgaagggcaatagtgctgtctctgctgtctgcagcctcaacctcctgggctcaaaagatcctcccaggtcagcttcccaagtagctggcactacaggcatgagccaccatgcctagctctctttaaccatttttaagtgtgtaattcagtggcgttaagtacattcacagtattatgcaactattaccaccatccatttaagccgaagtttagaagacaaattgtaatatgattcagcagaaaggaacttcattcctttttaaggccaaataatattctggtatattgtatatgtgatgttccgtttacctgttcaactctgacagttgatgtgagtttgcaagtagcataaataaattattcactatggaatcaaaaatataaacgtgattaaataaatgtcaatcctgtaagcgagctcctaaatgaccaatgatatgtagttttcaccaatgaaagcttctcttaccttgctatgaaatggaacgttagatgtaatgtaagacatcgaggattaaagtaactatctcagtaccaatgactttcttcttttttctgttacagatccagactttacttacctaggaggtattttaaatcccattccaggtttagtatattaccacttgttcctcttggcatttttgattagtcttatgttcctttgaacacctttcatgtattccttccagattgtcagttcgagctctcgggagctgatggaatagtgcgctctagtcaggtagaacaagaggagaaaacaaaaccaggccaagccgttgattgcatctggaccattaaagccactccaaaagctaaggtattattatgtattgagtcgcttcagagaagaacatcatgataaggcatgatttgcaaaatgtgtaattttggtttgtgtaaatatttattgactacataaactgatactgcaactttttaaaatgtattttatttcacttactttattggcatctactaagatcccagcattattatagttaaataaactgaaatttctgaaattcttcaggaatattacatatatattaagattctcaattataaaagattaagattcttaagacctgtcagttcccaattggtgagtgtgcatactgatcagtatgattatagattcattaacagctttatgaggaagaaaataggctacaagaggtgaaaatgtgttctcaaaagttacagagttggtcgtagcaatctaaaagcgaaaacccaaatgtgtcgagtctgttcttaccctgccatcctctgctactcatggggtgcttttattggaaagaactgcagggaaggatgtttttaaataactctgacagattgagattggatacttttgcatttaatgtatacttctaggaatatcaacagagttaaaattatatttaatgcgtattatgtaaaaagagggaaaagaggagagagtgagggtgggaaaacatacctctcaagaatcatgaaaatcagatttaaagattgggtaatatgatagataaggtaacctgaaaacccatctgctagaagacacatggaaacattgggtaaaatatgacaaataattattttaaaagcatatgtgtaagctccaggaaggagaaaaagagggtaatgcttatggatgagaaatgaagagagagaactgtagattaataaactgaaattgatgttacagatgcccctggctgacttttataacctgttactgcacaggggtagacatactgggagcttccttttaattcccatactgagaaaagaagagtcctggggttcacatggcctttgtgagactcacatgaagctggagccctcaaagggaggcaactcacatgaaagcatagattagaaaaaatgtttcactaccacatgctgatgacaaagaagcttgtttttctgggtttagtctcagggtggggttggaggtgaggctggggtcccccctagctttatacttagaaaccctgcctttattagggtttgagaaatgaatttacattccctgctcaacccaggagtcatgaagtccaaagactgacagaatggtcctgggtgcattaaacctttgagtcacctggcaaaaataaatctaaaagtcaccaagaaagctgcagggttggcatggataaaacactgctgcaggtcagctcacagcccgcagattctaaaacccctatgctcacagcccaccatgggtacgagttcaccgacataacacacaggaaggagttccttagatccccaagaatttgagtgtttcacgtatcctacaagaaggaaacagagatgagaaagaaaaatgaccacgtccatttttaaaataaccaaataggaggtctataagttaaaagtatggctattaaaagatgtgtctgaggaaattacccagagtgtatcgctggaagaggtggcagtttattgggattttccataactgatactctgtagtgtgtaagtctgatgcccggatgttgacgcacacatgtgacgtgcgcctccctccagccttgttaccatgtcggcacattgcctatctgacatgaaaaggaaaaaaaagaaaaaaaaaatttcaagaactaatgaaaagcatgacacagggtgactcccaagcaggaaaaaaaaatttaagtgacactgacattgtaccccacagacaaggagaaaagttattaaacaatagagaaaatagtctacaaaaggatgctattaagattgacaccagaattatcaatagcaaaatagaagcctgaagacaatagaataatgtcttcatagtgttaagagtgttcattgtcatttaagaatgaaggcagtggccaggatgtggggatgattaatgggtacaaaagtataattagatagaattaatatctggtatttgatagcacaacacagtgactacagtcaacaatttattgtacagtttaaaataagcataattgggttatttgtaacacatgataaatgcttgagatgatggatcccccatttatcctaatgtaattattatgcactgtatacctatatcatgatagctcatgtaccctataaatacatatagctattatatacccataaaagtaaaaaataaaagaatgaggacaaaattaagatgtttctctgcaaagtaataaatgaattaaatgctacagttaaaatccaaatatatcttgtttatgggataattacaggaaaatttgaaaatacaaaactaggaaagaaataacagacaaatgtcaaaaaagagctgatgtaactattaaaacaaatcaagaatgtctctatctcactagataaatctcaggtattaatatagccttaaaatgcacaaaacaggttgttgattgtcaaggaaaattgacagatccataacatagttggtaatttttttttacttcttagtaattaacagttcaagcatacaaaaagttaatatggctcaaaagatttaaattacacagtatgtgcttaatggacacagtatcttgctcccaacatccagaaaataggcattctctactagcattcataaaacattcatcaaaacagatacacgtgctcagctaacaaaggaagtctgaacatatatgcagagcatcatgtgacagaaatgcaattaaaccagaaatcagcaaccaaagattactttaaaactccatatgtttggaaatataataatatactacttagtaatttgtaagtcacagaagaaatcagtatggaaatttgaatacatttaaaatgcattaatgaaaatactacatttaaaaaaactgcggtacagctaaaacagtactttgagaaaaaagactgaaatttaataagttaagactcaagaagttaaaagaaaaacaaatccaaagaaagggcaatcataaaacagaaattaaaaaaaaaaacgaagatacaaaaagaataaatcagtgaggcctgacatcggctctttgtaaaaggtaacaacaggcagacttatgccaagattgatctagaaaaaaaaagacataaataggccgggtgcagtggttcacgcctgtaatcccagcactttgggaggccgaggcaggcagatcacgaggtcaggaaatcaagaccatcctggctaacatggtgaaaccccatctctactaaaagtacaaaaaattagccgggcgtggtggcgggcgcctgtagtcccagctactcaggaggctgaggcaggagaatggcgtgaacccaggaggcggagcttgcagtgagctgagatcacgccactgcactccagcctgggcaacagtgcaagactccatctcaaaaaaaaaaaaagaaaaagaaaaaaacataaataatattagaaatggaaaagttataaatcaactacagcaaggatttaaaactattatgaaacaaaccaagtagaaagtagatctgccaaacaaaaaaggaaagaaactgtttctttcataaataaatgacaatgggggaaaaagaaaaaacaagaacctatagattaaaagagatataaaagtcaagtgaacttactgattgaaacaaactataaatggagggaactgatgacagaagtttgaacactggtatttaatattaagttatttatttgtttggtttgataataggataaaggttattttttaagtggctttagtgatacagaaatgtttacagatgcaatgatttaatgtctgagatttgtctctagtatgtaagaggtagaagttaggagagacaaataaaataagattggctaggttataattgttgaagttggaagctgggtacacagatatttttgtctgtttttgcatatttgaaattttaacaaatgttttagactatcataagagaatattataaataatgatttgtcagtagatttgtaaagggtatatataaatggtgatgtttggagagtatggagggaatcccggcttttttctctcttaatcagaactcacaacaggttgggagactaaaattctaaggaaaacttgtctttctggccagaggaactagatagaggagaccatgttgtcatctggagaatatgaagaagtcttggagaggagagaactagagcagggaagcactaatgcaggctttctttctgaggtgcctgtgtgtggaacagatccagggaaacgtggcagcagtgttgggaaccatgttacagtataaaccacctctgagtccctgagtgtgtcacacactgggcaagcctacccagcacagcaaagtctttgaacattgggaccaccacccaaacaaagagagacagaatttgcagtgcgaacacaacttagttgattgtctgcagaaccaaaacaaataacaaaaaacgacattctccagggattttttaacaggatccaagtcacacagcataatatttaaaatgtccaagatacaatgaaaaatcacatacagagaactaggaaaatctggttaatttttaatgaaagacaaccaatagatcccaaccctaacccaaatattaagaactatccaaaaatctttttttaatttaaaaaaatgtttttaatagaaataggatctcacaatgttgcctaggctgttctcaaactcctgagctcaagtgatcctcctgcctcagccttccaaactgctaggattacaggtattagccaccctgcccagccagaattatcaaaaattctaaagcagtgatagaaccatgcttcatgagatagcagtaaacactctcaaagagtaggaaaataggactcagcagagaaataaactaattttttaagtgaaaaatttagaactaaaagaaaaatctgaatttttaacaaataatcactgtatgagctcaataggaaaatggagaaaatagaaagtcactgaacttgaatcagtagaaattatccaatcagaagtacagaggggaaaagattgaaaacaaagtaattgaaaactgtctatgggacagtttcaaagggcctaacgtttgtgttatttaagtcctagcgggagaagagattggcacagaataaatatttgaagaaaaaattgctaaaaagtcccaaacttgaaggacatatatctgcagatttaaggagctcagtgaacaccaaataggataaacaaaaacaaaaagcaatacctgcacacatcaaaatcaaattacttgaaatcaaagattgagatcttgaggtctaccagagaaaaatgatgcatcttgtataagggagcagtgatttgaatgactattttttctctttagaaatgatggaagccaaaggtagtggatcagaatcttcacaagctgggataggcagtaaggggaactgtgatgcaagacttctttcaagaatgataaaactaagagaatttatcacctatgcacttgctataaaggaagttatttagataagataaatgatactagaaaaaatcatgaaacttcatgactaaagggaaacgaatggtaaatatctgggtaaatttcaaccattttaccagtatcaggaatgaaagagagaattctatcactaccgaccctaccaatattaaaaggagtaagaaaatacagggaacagctctatgccagaaaatcagatgacttcgatgaaatgggtaaatctcttaaaagctacacagctgcccaaacatgtcccagtagacatacacaacccaaatcatcctgtgcttattcaaaaaatgaattcgtaaacaccttctaacaaagaaaactctaggcctagatgggttcgctggcaaattgtaccaaacattcaaggaagatataatgccaattctttagtatcatccaggaaatgaaagagcagggaacatttctaaacttactttgtaagataagcattaccctgataccaacagacaaagagacattataaggaaactattgatcagtattcgtcaagaaaatagatgcaaaaatttcaataaaatattagcaaatctaattcagcaatataaaaaaatacataatagtaaagcgtggtttatctcaggaatgcaagtctggttcaacatttgaaaaatcaatgtaattcaccataaagactaaagaaaactatgattgtctccatttgttaaaattcatcacccattcatgataaaaatctcagaaacataggaacagatgagacttccataacctgaagaagggtatctacaaaaacctaccagctaaaccaggcacaatggcatgcatccatagttccagctgttaaggaggctgatacaagaggattgagaatcacttgagctcaggagttcaaggccagcctggacatcatagtaagagcctgtctcttagaaaaaaaaaaaaaaaacagaaaaccctacagctgacaccatacttagtggtgaaaacctgaattctttccccttcaaaatctgtagcaagctaagtcctattcaatgttatactagaagttgtagccagtacaaaaaagcatacagattggaaaaagaagaaatcaatctttttgaagatatcgttgtctatataaaaatttccatagcatctgaaaagctcctggaacaaatatatcaggttaacaaggttgcaggatggaagaccagtatacaaaaatcaattgcaggtcaggcactgtggctcccgcctgtaatcccaacattttgggagaccaaggcaggtggattgcttgaactcaggagttcaagaccagcctgggcaacctgacgaaacccagcccctacaaaatatatatatatacatgtatatatatatatatatgtatatatatatatataaaaattagccgggcatggtggctgcagctgtagtcccagctacccgggaggctgaggcaggaggatcacttaagccaaggaggcggaggctgcagtgagccaagagcgcaccactgcactccagcctggacaacaaactgagaccctgtctcaagaaaaaaaaaaatcagttgaatttttatatactagcaatgaaaactgtagttcaaaattaagaaaacagtaccatttaaaatattactccaccaaaaaaaactgtgtagtatctgttaactgaaaacttaaaagaccataatgaaaatattcagagatgacctaagtaaatatactgtgtcaatgtattgataggcccagtagtgctaaaatgtcagttcttatgaaaatgatctacacagatgaatacaatttcaatcaaaatcacagctatattttttgtaaagattgacaaactgattctagaatgtaatggaaaagcaagggattacagaagccaaaattattctgaaaaagaacaaacatggaagactcatgacctgatttcaagacttaatgtgaagcttcagtaaccaagactgtggtactgacaaaggacagacacacagatcaatggaacaagatagtccagagattagatttctgcaaatatgatttgttaatttttttgacattcaaaggaaattgagtggagaaaggatagtctaacagatggtgctggaacaattgaacctccatattcaaagaaaaaaaaaatgaaccctcacctgttgagtgtaggtgttgcctcacctacatccaacactgtatttaaaaattaactcaaaataaatcatggacatagatgtaaaattataaaacatttagaggagaatatatgaaaagaatcttactgggttagacaaagagttcttagatgcaacaccgaaagagtatccataaaagaaaaattcaggctgggcgcggtggctcacatctgtaatcccagcactttgggaggctgaggcgggcggatctcgaggtcgggaaatcgaggccatcctggctaacacggtaaaaccccgtctctactaaaaatacaaaaaattagttgggcatggtggcgggggcctgtagtcccagctactcaggaggctgaggcaggagactggcatgaacccgggaggcggagcttgcagtgagccgagatcatgccactgcactccagcctgggcaacagagcgagactccatctcaaaaaaaaaaaaaaaaaaaaaaaaaaaaagaaatttataaattggactaatgaaaaagcttttctctgtgaaagacactgttgagtgagaaaaaaaaaaaaaagccactgactgggagaaaaaaaatcacctatgaaaagatttctttcatccagaactcaaaactcaacaataagaacaaaacccaattatgaaacagatttcaacagatacttcaccacagaagatttaatcattacaaaaatgcaaattaaaaccacaatgagatggcactattctccattagaataactgtaatttagaaaaatcactaagtgctgggaactatgtagagcagctgaaactctgatacagtcctggtaggagtgcaaaatgatagagccgctctgggaaacaggttggtggtttcctataaagtaactgtgtgactcagccgtctcttctggatgggtacccgggagaaatgaaagcttatgtttatggaaaaaaacctataagtaaatgttcataacaactttatctgtaataaccaaaaactagaaatgtttcaagtgttctttagcttttaaaagaataggccaggtgcgatggttcacgcctataatcccagcactttgggaggctgaggtggggggatcacttgaggtcaggagttcaagagtagcttgaccaacatggtgaaaccctgtctctactgaaaatacaaaaaattagccgggcctggtggcaggtgcctgtaatcccagctacttgggaggctgaggcaggagaattgcttgaatccttgaggcggaggttgcagtgagccaagattgcactactgcactccagcctgggcgacaagagcaaaaactccatctcaaaaaaaaaaaaaaaaaaaaaagaataaactgtggtacatccatatagtaacatctattcaacaataaaaagggataaactacagctacatgcagtaaccccaaatgcatcatgctaaataaaatgagctagactcaaaggatacatgctgtgtgatttcatttatatgaaattctggaaaaagtgaactgtaggacaaagaacagatcattgcttaccagggatgaagactggagatggattttgactgcacagtgacagcacaagagaagttgagtgggttgtggaactgttcttgaagtgtcagcaaggactgagtagtggattgagtagagcaagcagactcaaagaatttgctttagaagtataaattgtctcgttagaattcaactgtaaagagaaaaatgtatataaattggtacaaccactttggagagctatttcggatgtgctctggtaaagctgaaaatggtcacatgctactacacaagtatacttctagatgtatacccaaatgaaatcgtcatacctgtgcataaagagaagacaacaatgtttacagcagtattagctaattataaaagtagaagcaagctaaatgcccaataggagaatggatacatagtgatttatttctataattggtatgaggttttaaaatatatggaacaatacaacatatttttatagatatgtaagtatgaaaatattaagtgtgctttaagtgaaattaaacaatatttattagatctcattcttcattgaaatattccttgaaaagataattccatattcacaaatttttaggagcgttacctggaatattgactatagaagaatgttgtattgcttttaataaaagtaaatcagttaaacttaaaaaaattattacagttgacatgggaattggatcaaattttaaaatttgaatgtttaaatgtgtaaataggccaggcgcagtggctcacgcttgtaaacccagcactttgggagtctgaggcaggcggatcacttgaggtcaagagttcgagaccagcctgggcaacatagtgaaaccccatctctactaaaaatacaaaaaattagccaggtgtggtggtgcacaccggtagtcccaactactcaggaggctgaggcacaagaatctcttgaattgggggtggaggctgcagtgagagccgcgatcacgcgactgaactccaacctaggagacagagtgagattctgtctaaaaaaagaaaacaaacaaacaaaaaagtgtaaatagatggttttatttaagaaatctaaattaaatgttaaaagtcaccattacccttgaatactaaatgtgagaaactagttcatgggtgatgtttaagaaaaatatccatttataaatataaaaagaagccagtcacggtggcccatgcctgcagtcccagcactttgggaggctgaggcggaaggatcacttgagcctggcagttcaagaccagcctagacaacatggcaagaccctgtctctatttttaaaattaaaaatatattttaaaaataaatatacaaaagaaggcatcgatgtttaagagtatacaaatagtgttttagtccacttttatcagtggccttttcatgatagtagctttctggggatttcatttctgttggggtcttcaggggctccaataaatagcatcccttttccctggtggagtgctgaaccaattgagaaataaaagtgtcagtgtgtagggagttggaaaagcctctttaccacagtgaaggctaggatagagagagcaacgcagagagatgatctaattagtgttggcaactccttgcccaccagttctacgtctcacctaagtctagaacagcccattccactccagggaaagttcgcatctgcagagcagaccggcctacccagtcccacttcctatgaggggagggaaaaagaaaccaaactcccaccatccaggtaacttgccctgcctccctgggtaggatatagggatagggtaagaggtcacttacttgatgaaagttgtaagtaaaagatcccttctcatgcaatctggagtaaaagaaaagtagtttatgcccttctcccaacattgcaatttgtcagattcacgttatgaatatttcccaaaaatttgttgaactaaacaattcaatatttagctgtatttacagtagaaaagtgctgtgatcttgttattatttatctttaactcgatgtttttttaaaaatatgtctttgaagagcatttactatagccttatataataccatatttatttggattaaaagaaaagcagagagtaaatataaatacttcagacagcttgattattctactgatacttctaccaagtcatagttttacaagcctagtcactttctcattgtctgccatgagcaagaattatactggatgaaactgagccagtgaccttccattggaagacatcacagtctagtggaagagggaagtcattacagcattagagctcgctaccagagtgtgagcggagggtttgggttatataagtgatggaaaactaatgagaactgttgatatatttaagaaaacatattgcttctttgttaaaatacacgcatgaagactttgtaaagttttgaactggaaatcctatttcattaccaattttccaccattctcacggaagtggtgaaccagtcatttcaaataaaccaaaattatttagtcaaaatgtaattctttaagctatattttgtaagttgttctctcttagttttatgccatcaaggtatttggtggggtggggggggaatatatgacatgacatttttgttttattaatctcttcgaattaaagggtagatgtggcatactgctccctcagaaataatagctaggaagtgaatactcattagatgtcttgaatggcaattcaaaggtaatctttattcactcactcaaattttattttaatgatagagtcacatatgagaaactagagcccaaacagggaacactgtgtgagtatgtaaagcgcttcatggaatgagaaggacgcacatttagagtcagaccaacctgggtttaatccttgccaccgaataacagattcatctctgcccacaaaaaaacatgatacctacttcattaggctcttctggagattaatgcttaaaatctaaattcacaatgtaagagaaatcgccaaacaagaatgggtcaagagtgtttaggaaataacttagaaccatttagctataaaatttgaatgggggatgctaatagagcttcctttgatagtacagttgacgtctgcctgtctgaaaatgcaggtattgttaagaggtgaaataaagcaaccatgtagaacagtaggatattgtgtaaataaataataggacatccgggaataggtatggctaagagtatagataaaaacatttttatatgttacagctaaagtaggatgtgtatatcttacaattaaacacaggtttttttaatgtgcagaaagagtgaaaagaaactcaccaattaatcacatgcattgttggaataatagaaatatgagtgattattttattttctcccctgtccagtaccatgagattgcttttataatgagaaaaatgtgagatagttatgccttgtgagcaaaaagtttctactctttatagacaaaacacaaagtaagttccttaatgcttggttccattataaagacaaccaaagaaacagatcattaatcttagttcctctcactatttaggcatcagccatttatcgattatggttttctgtcagctgtcattcggtgtcccatgttgtctgtggaaaatagaaatagaaaaattcaaattaatatatctttttaaaagcagtgtttttgtgttaatattacagatttatttgaggttcctagattatcaaatggagcactcaaatgaatgcaagagaaacttcgttgcagtctatgatggaagcagttctattgaaaacctgaaggccaagttttgcagcactgtggccaatgatgtaatgcttaaaacaggaattggagtgattcgaatgtgggcagatgaaggtagtcggcttagcaggtttcgaatgctctttacttcctttgtggagcgtaagtaaataattcctatagtattgagatcttttacatatttttcactcattcacagtacactcagcatttacttttttaaaatatttattttaggatgtttttttttgttttactacagctctttttaatgcaagaatattatttaaatttaaaatattttaaattttatttaatttttagaggtggggtgttgatttgttgcacaggctggccttaaactcctgggctcaagcgatcctctgcttcagcctcccaagtagctgagactgcaggcacacggcactataccaggcagcatttacttttgacaaaaatgtgcaagtcacaaggtaggagcaactatatcttggtccctgttctcttggaatggactggtatgggtgaaaaaaccatgttaacatatcaattggaacactcattataaaggtgtaaacaaatggtagagattgcagacagggaagacttatactttctctcaagattttctaacttagtagtagtattaatttagcttggtgaatagttatgaatccatgaaactatggtcatcaaagatttagatatgccatagatctttttctttttaaataactttaaacttacagaacattgtaaaaatgatagattccctatgtgccgttcactcagattccactaatgccaacatctctcaaagccagagtaaaactgaaaattaacacagatacgatattattaactaagctatagaccggtccggtatctctagttttgctatgaaggtccttttatgatccagtttcccacattgcttttagttgtcaagtatccttagccttctccatctgtgacagttactctgtctgcatctttccttggcacattgtcaagagtactagctagccagtttagtagaatgtccatcagtttgggtttgtctaatgtttcttagggattccattgaggctgtgtatttctgtcaggaataccacagaaactatgttgtgcccttctaattacatcatgtcagtgaagcaggggtacatggtaccattttgtcttattgctggtgatgttaactttgatcacttcattaaggtgctgtctgccagttttcttcactaaaaagttgctatttttttcctttctaattaataagtctctttgagactatgccaatatcttctaacccactaattttagcatccattgttggcttctgcctgtaacagttactactgtagcgtttacctaatcatgattttccatttccatcataccttctgtatacattaattaacattctgctgtgagaaaaactatccctttttcctcacttattcagttattaataattacatcagtatgggctcatggatattttattttattctattgttataatattaataatattattattgtgaccgggcatcgtggctcatgcctgtaatcccagcactttgggaggccgaggcggcagatcacttgaggtcaggagttcgagaccagcctgggcaacatggggaaacccccatctctactaaaaatacaaaaattagctgggcatggtggcaggtgcctatagtcccagctactcaggaggctgaggtgggaaaatcacctgagcccaggaggtcaaggctgcagtgagctaagatcacaccactgcactccagcctgggtgaccagagtgagactgtctcaaaaaaaaattattgttttctatgatactaacactattttgttgctcaaagcccgagcttcagccattggaagctccttcagtttgcctcctctgtcctctcaacataccgaattaatagtttttaaattattttcttactttacggcaatgctggatgaaccaggctcaactagtgttttccctgacccaacgctggaccagccgcatttccaaggagccctttcttcatcttaaacagcgagaaacctgactaattatctgaaatggattaatttgtttaatcctaatatacacaaaaagtaacttcacaattgctaatccatatccctttgagaaatttcctaacaaaataccttacgtacagttctttctatgtttaactttactgtcaagatactgttttccagttactcaggctagtggtttatatttcattttgtgcacccccccaacatcatggtgtctgtacattgtttttatgtgggagttgtggaaacataattgttgttcctaggagcccacatcccaagagggacacttggaggtgtccttgcctccttcattctctgccttccatttcttacctctatctggatttctttttgcacaaatgagcagatacatctgtattttcttatgtgccattttttcttatgtgaaggacagcattattcttttacactttatgtttttaacttaaaagtatatcctggtcaggtgcagtggctcacacctgtaatcccagcactttgggaggccaaggtcggcggatcacttgaggtcaggagtttgagaccagcctgggcaatgtggcaaaaccccatctctactaaagatacaaaaattagtggggcatggtagcacgcgcctataattccatctactgggcagggtgaggcatgaaaattgcttgaaactgggaggtggaggttgcagtgatctgagatcaggccactgcactctccagcctgtgtgacagagtgagaccctgtctcaaaaaaaaaaaaaaattatatcctggaaaccattccatatcaattcatagagcacatttttattttatagctgcatagtacagcattgtatacaccaactttattttatcttctacttatggtgggcatataggttattcccaatatttgcagttataaagaagctacagtgaataatgttatgcgtatgtcattttgtattgttagagacatatcttcaggataaattcctagaagtgggattgtttggtttaaaaagttgtgtaatttcgttagatattgccaaaaacccttccggaagggttgtagctttttttttcaactgtggcaaaatatacatggcataaaatttaccctcagtcacttttaaatgtacaaatcagtggcattaagtacatgcacattgttgtgcaaccatcaccactgtctttagagcatttttatcatcccaaactgaaactctatacccatgaaacagttccttcccatttttctctctccctaccctggtaacctctattcttctttctgtctctgtgaatttccatattctgggtaactcatagtagaatcatataatatttgtccttttatgtctggcttatttcacttagcataatgatttcaaggttcatccatgaaatctttccatggttcatccatgaaatctttccatggttcatccatgtggtcatatgtatcagaattgtattcttttttaaggctaaataatattccataagtaaatgccacattttctttatacattcattcatctgttgatggatgtttgattgtttctacctttgagctatgatgagtactgctgctgtgtagaattgctggatcatatgggaaatctgtgtttaagtttttgaggaaccggcaaacttttccacagtggctgcaccattttacacaccgaccagcagtgcacagagggttccagtttctccacatgttcaccaatacctgttatttttcatatttttggataatagccatcctaatatgtgtaaagtaacatctcattgtggttttgatttgcctaatgattagtaatgttgagcattcttccatgggcttcttggctattcatacatcttctttgcagaaaggtctcttcacatcctttgcccgcttttgaatttttttttaagttgtagacgttctctgtgtattctggatattaatcccttattgtgtatgtgattagcagacttttttgcactctgtttgttgtcttttcactcccttgatatagtgtccttttgggtacaaaagttttgaattttgatgaagcccaaattaatgtgggttttttttgttgttgtttttggtgtgatatccaagaaatcattgtcaaaaccaatgtcatgaagcttttctcatatgtttgcttctgagagttttatagttttagctcttgtaatacatttaagtctttgatgtatttggagttaatttttgtatatagtgtaagttaaggctccaacttcattctttttcatgtggatatccagctttcccaggatcattttttgaaaacactgtcctttcctattgaatggtcttggcacccctgtcaaaaatcaattagatctgggcacagtggcatacacctgtagtcccagctatacaggaggctgaggcaggaggattgcttgagtccaggagtttgagaccagcctaggcaggagttcaagaccagcctggtcaacatagcaaaaccccatctctatttttctttaaaaaagtaaaaaaaagaaaaaaaaaaaggccaggcacagtggctcatgcctgttatccgagcactttgggaggccaaggtgggtggaacacctgaggtcaggagtttgagaccagcctggccaacatgacaaaaccccatctctactaaaagtacaaaatttagccaggcgtggtggcacacgcctgtaatcctagcttctcaggaggctgaggcaggacagtcacttgaacctgggaggcagaggtcacagcgagccgagatcgtgccactgcactccagcctgggcaacagagctagactctgtccaaaaaaaaaagaaattatgtgaagatttatttctggcctcttaattccattggtctatatgtctgttgttatgccagtagcaactgttttgataactgtagatttgtagtaagttttgaaatcaggaagtatgagtcctccaacttttttcttgtttttcaaaactggattggctattcatggttcattgagatttcatgaactttaggatgactttttctatttctgcagaaacactgttgggattttgatagggatcattttaaatctgtgggtcactttgagtaatattgtcatcttaactgtatgaagtcttcccattcatgaacacaggatgtatattcccattgatttttcatctgtaattcattcagcaatgttttgtagttttcagcatacaaatgttttgcccccttagttaaatttattcctaatattttattctttttaatgctattatactggaattattttcttaatttccttttctaattgttaattggcagtgtttagaaatgcaacggatttgtgtatgcgggttttgcatcctgcaactttgttgacttagtttattagctctaacgggggtgtgggtgtgggggtgggtgtgatctttagggttttctgcatataagattgtgttgtctgtgaacagagaaaaccttttatcttcctttccaatttggataccttttatttccttttcttgcctaattgctctaaccagaacttccagtatatattcaatagaagtgaaattgggtatctgtcttattcttgatcttagtggagctctgtccttcactactgattatgatgttagctttgggtttttcatatatggcctttgtcatgtgaaggaaattttttttctattcatagttaattgaatgttcttatgaaagcctgttgaattttgtcaaatgcttttttaaaaattcattgagttcatcatgtagtttttttcccttactgtaaatgtgatgtattaaattggtggacttttgtatattgaaccactcatgcattctgggaataattcccacttgttcttggtgtataatcattttatatgttgctgaattctgaagtaataattttcttgaggatttttatattaatattcataagggatattggtctttaggtttttttgtgtatctttttctagctttggtatcagagtaattctggcctcatagaatgagtaactagttctggcctcatagaatgagtaagtagtgtttgttcttcaactttttcaaagagtttgaggattagtgttaatttttttttattattacaatacttgaagttctgggatacatgtgcagaacatgcaggtttgttacataggtatacacctgccatgctggtttgctgcatccatcaacccatcatccacatttctcctaatattatcactaccctaggccctcatcccccaacaggccccggtgtgtgacgttccttcccctccctgtgcccacgtgttcttatatttcagctcccacttatgagtgagaacatgcagtgtttggttttcttttcctatgttagtttgctgagaatgatgatttccagcttcatccatgtccgtgcaaaggacatgaactcatccttttttatggctgcatagtattccatggtatatatgtgccacattttctttatccagtctatcattgatgagcatttgggttggttccaagtctttgctattatgaatagtgctacaataaacatgtgtgtgcatgtgcctttatagcagcatgatttgtaatcctttggatatatatccagtaatgagattgctgggtcaaatggtatttctggttctagatccttgaggagtctccatactcttctacgatggttgaactaatttacactcccaccaacagtataaaagagctcctgtttatccacatcctctccagcatctgttgttttctgactttttagtgatagccattctaactggtgtgagatggtagctcattgtggttttgatttgcatttctctaatgaccgtgatgatgagctttttttcatgtctttcttggctgcatagatgtcttcttttgagaagcatatgttcatatccttcacccactttttgatggggttgtttttttttttttttcttgtaaatttgtttaagttccttatagattctggatattagccctttgtcagatggatagattgcaaaaattttctccgattctgtaggttgcctgttcactgtgataatagtttcttttgctgtgcagaagctctttagtttagttagatccatttgtcaattttggcttttgttgccattgcttttggtgttttagtcatgaagtctttgcccatgcctatctcctgaatggtattgcctaggttttcttctagggtttttatggttttaggtcttatgtttaaggctttagtctatcttgagttactttttatataaggtccagtttctggaaggggtccagtttcagttttctgcatatggctagccagatttcccaataccatttattaaataggaaatcctttccccattgcttgttttcgtcagatttgtcaaagatcagatggttgtagatatgtgacgttgtttctgaggcctctgttctgttccattggtccatgtatctgttttgataccagtaccttgctgttttggttactgtggccttgtagtatagtttgaaagtaaggaagcatgatgcctccagctttgttctttttgcttaggattgtcttggctatacaggctcctttttggttcctacgaaatttaaactagttttttctaattctgtgaagaaagtcaaatggtagcttgatggggatagcattgaatctataaattactttgggcagtatggccattttcacgatattgattcttcctatccatgagcatggaatgtttttacatttgtttgtgtcctctcttatttccttgagcagtggtttgtagttctccttgaagtggtccttcacatcccttgtaagtagtattcctaggtattttattctctttgtagcagttgtgaatgggagttcactcatgatttggctctctgtctattattggtgtataggaatccttgtgatttttgcacattgattttgtatcctgagactttgctgaagttgcttatcagctttaaggagattttgggctgagacgatggggttttctaaatatacaatcatgtcatctgcaaacagagacaatttaacttccggtcttcctgtttgaatacactttatttctttatcttgcctaattgccctggccagaacctccaatactatgttgaataggagtggtaagagagggcatccttgtcttgtgccagttttcaaagggaatgcttccagcttttgcccattcagtatgatattggctgtgggtttgtcataaatccctctaattatttggagatacgttccatcaatacctggtttattgagagtttttagcatgaaggggtgttgaattttatagaaggccttttctgcgtctattgagataataatgtggtttttctcattgggtctgtttatgtgatttgcttatgttgagccagccttgcatccgagggatgaagctgacttgattgtggtaaatatgctttttgatgtgctgctggatttagtttgccagtattttattgaggatcttcacatcgatgttcatcagggatattggcctgaaattttcttttttgttgtgtctctgccaggttttgttaccaggatgatgctggccacataaagtgagttatggagaagtccctcttttctgttgtttggaatactttcagaacgaatggtaccagctccactttgtacctctggtagaatttgggtgtgaatccatctggtcctgggctttttttggttggtaggctattaattactgcctcaatttcagaacttgttatcggtctactcagggattcaacttcttcctggtttagtcttgggagggtgtatgtgtccaggaatttatccatttcttctatattttctagtttatttgcgtagaggtgtttatagtattctctgatggtaatttctatttctgtgggatcagtgattatatctcctttatcattttttattgtgtctatttgattcttctctcttttcttctttattagtctgactagcggtctatctattttgttaatcttttcaaaaaaccagctcctggactcattgcttttgtttttttttgtgtctctgtctccttcagttctgctctgatcttagttattttgtcttctgctaacttttgaatttgtttgctcttgcttctctagttcttttaattgtgatgttagggtgtcgattttagatctttcccaccttctcctgtgggcatttagtgctgtaaatttccctctaaacactgctttagctgtgtcccagagattctggtacgttgtatctgttctcattggtttcaaagaacttatttatttctgccttaattttgttatttaccccatagtcattcaggagcaggttgttcagtttccatgtagttgtgtggttttgagtgagtttcttaatcctgagttctaatttgattgcactgttgtctgagagactgtttgttatgatttctgttcttttgcatttgctaaggagtgttttacctccaattatgtggtcaattttagaataagtgttatgtggtgctgagaagaatgtacattctgttgatttgggttgaagagttctatagatgtctattaggtctgcttggtacagagctgagttcaagtcctgaatatccttgttaattttccgtctcgttatctgtctaatattgacaatgagttgttaaagtctttcactattattgtgtgggagtcttaagtctctttgtaggtctctaagaacttgctttatgaatctgggtgctcctgtattgggtgcatatatatatttaggatagttagctcttgttgcgttgatccctttaccattatgtaatgcccttctttgtcttttttgatcattgttagtttaaagtctgttttatcagagactagagtgcaacctctgcttttttttttcttgccatttgcttggtaaatattcctccatctgtttattttgagcctatgtatgtctttgcacatgagatggatctcctaaatacagcacactgatgggtcttgactctatccaatttgccagtctgcgtcttttaattgggggcatttagcccatttacatctaaggttaatattgttatgtgcgaatttgatcctgtcattatgatggtagctggttattttgcccattagttgttgcagtttcttcatagtgtcaatggtctttaaaatttggtatgtttttgcagtggctggtaccagtttttcctttccatatttagtgcttccttcaggagctcttgtaaggcaggcctggtggtgacagagtctcttagcatttgcttgtctgtaaaggattttatttctccttcacttacgaagcttagtttggctggatatgaaattctgggttgaaaattcttttaagaatgttgaggctgggcgcagtggctcacacacctgtaatcccagcactttgggaggccaaggcaggtggatcacgaggtcaggagttcaagaccagcctggccaagatgttgaaatcccatctctactaaaaatacaaaaattacccaggtgtggtggtgggcgcctgtaatcccagctactcgtgaggctgagagaattgcttgaacccattgaacccaggaggcagaggttgcagtgagcctagattgtgacagagcgagactccgtcacatacacaaaaaaaaagaatgttgcatattggcccccactctcttgtggcttgtagggtttctgcagagagatcgctgttagtctgatgggcttccctttgtgggtaacccgacctttctctctggctgcccttaacattttttccttcatttcaaccttggtgaatctgacgattatgtgtcttggggttgctcttctcaaggagtatctttgtggtggtctctgtatttcctgaatttgaatgttggcctgtcttgctaggttggggaagttctcttggataatatcctgaagagtgttttccaccttggttccattctccctgtcactttcaggtacaccagtcaaacgtaggtttggtcttttcacgtagtcccatatttcttagagactttgttcgttccttttaattcttttttctctaattttgtcttcccgctttatttcattaaactgatcttcaatctctgatatcctttcttccacttgatccattcagctgttgatacttacatatgcttcacgaagttctcatgctgtgtttttcagctccatcaggtcatttatgttcttctctaaactggttgttctagttagcaattcctctaaccttttttcaaggttcttagcttccttgcattgggttagaacatgctcctttagctcggagaagtttgttattacccacattctgaagcctacttctgtcaattcatcaaattcattctccatccagttttgttcccttgctggcaaggggttgtgatcctttggaggagaagaggagttctggtttttggaattttcaggctttttgcagtgttttttccttatcttcatggatttatctacctttggtctttgatgttggtgacctttggatgtggtttatgtgtggacgcccattttattgatgttgatgctattcctttctgtttgttagttttccttctaacagtcaggcccctctgcggcagatctgctggagtttgctggaggtccactccagaccctgtttgcctgtgtatcactagtggaggctacagaatagcaaagattgctaccttttcctttctctggaagcttcgtcccagaagggcacccaccagatgccagctggagctctcctgtgtgaggtgtctgtcgaccccttctgtgaggtatctcccagtcaggaggcatggggatcagggacccacttgaggaggcagtatgtcccttaggagagctcgagtgctgtgctgggaggtctgctgctctcttcagagccggcaggcaggaacgtttaagtctgctgaagctgcacccacagcggccccttcccccaggtgctctgtcccacggagatgggagttttatctataagcccctgactgggactgctgcctttctttcagagatgccctgcccagagaggaggaatctagagaggcagtctggctacagcagctttgctgagctgcggtgggctctgcccagttcagacttccctgtggctttgtttacactgtgaggggaaaaccacctactcaagcctcagtcatggcagatgcccctccccctaccaagctcaagcgtcccaggtcaacttcagactgctgtgctggcagtgagaatttctagccagtgcatcttcgtctgaagggccccgtgggggtgggatctgctgaactacaccacttggctccctggtttcagccccctttccaggggaatgaacagttctgtctcgctggcgttccaggcaccactagggtatgaaaaaaaacttctgcaggtagctcggtgtctgcccaaatggccgccagttttatgcttgaaacccaggtccctggtggtgtaggcacccgagggaatctcctggtctgcgggttgtgaagaccatgggaaaagtgtagtatctgggccagaatgcgccgttccctcatggcttcccttggctaggggagggagttccccgaccccttgagcttcccaagtgaggtgaccctccaccctgctcctactcgtcctccgtgggctgtacccactgtctaaccagtcccagtgaaatgagctgggtacctcagttagaaatgcagaaatcacctgccttctgccttgatctcatggggagctgcagactggaactgttcctattcggccatcttgcccaggaatcaactgattggtgttaattctttacatgtttagtagaattcaccagtgaagccatgtgatccagagcctttctttgttgagaagttctggattctttttttaatctccttgctagttttaggcctattcagattttctttggcttcattatgcagttttgattgtgtgtttctaggaattcatccatttcctctaggttgtcagtttgttggcatacagttgttcttagtattcacttatgattctttttatatacgtcagatctgtagtaatgtctccagttgcatttctgattttaataatttgagtctttttgttcttaataattctagccacaggtttgtcagtcttgttgatctgtccaaagaatcaagttttgggtttttgctctttttctgttttctattttatttattgtcactcaaatctttattattttgttacttctgctagctttggatttagtttgtcttctttctctagttccttaaggtataaagttaaactattgatctaagttgtttcttcttttttaatgtaggcatttacaggtgtaaatttcccttttactactgcttttagtactctgcataagttttggcatgttttgggtttcatttgtctcaaggtatcttataatttcccgtggatttcttttttgaaatcacagctttaaaagttgtgtaagagtgtgtagtttaatttacacagacttgtgaattttttcattttccttcagttgttgatatctagtttcattccattttgatttgaaaataaattttatatttcagtcatttaaaatatattaagacttgttttgtggctgaacatacgtagtctattctagagactgtctgatgtgtaattgagaaaaattacatttttctgttattgggtggaattttctgtatatgttaggtccatttggtctatagtggtgttcaggtcctttattttcttattgatgttctgcctggtcattctatcctttattgaaagtgcaatgttgaagtctccaattactattgtacaagtgtctacttctcccatcagttctatcaatgtttgtttcatatattttagggctcctttgtttttagtccatatatgtttataatcgttatatcttctgggtgaattgacccttttatcaatataccgtgtccttttttatccaagactagtcttgccaccccctagctgtcttttagcaactatttgcatggaatatctttgtccatccttttactttcaacttttttatatctttaaagtgagtgtcctacaggcagcatataattggatcttgttttttcccatcaattctgcaatctcttcttttgattggagagtttatttatgtttaattgctgatgaggaaggttctgtcactttgctacttgttttctgtgtgtctatagctttgttgtctctcatttcctccattactgccttcttttctttaattgatttttttttgtagtgacaagttttgattcccttcgcatttccttttgtgtatattttatagatatgttcttatggttactatggagattgtgtttttatgaactgcttaagtttttaaaagttatcttcactatttggtaagcatgtgggaagtttttcttattaaaggttgtagctcatacacagacaaccaccacaacttaaaagtggagaaattttgaagacagattttaggattcttctttgggttcctaggccaggcacagcggctcatacatgtaattccagcttttgtgaggccgaggcgggtggatcgcttgagctcaggagtttgagaccagcctgcctagccaacatggtgaaaccccatctctactaacaatacaaaaattagctgggcgtggtggtatgcaccactcaggagactgagatgggaggatcacttgaacccaggaggcagaggttggagtgagctaagattgcaccactgcactccagcctgggtgacagagcaagaccccgtctcaaaaaataaatggccaggcgcggtggctcatgcctgtaatcccagcactttgggaggccaaggcgggcagatcatgaggtcaacaagattgagaccatcctggctaacacggtgaaaccctgtctctactaaagatacaaaaaattagccgggcatggtggcgggcgcctgtagtcccagctactcgataggctggggcaggagaatggcgtgaacccgggaggcggagcttgcagtgagccaacattgcaccactgcactccagcctgggtgacagagtaagactccgtctctaaataaataaataaataaataaataagtaaataaataaaacaaaccttcctttaggttcctgaaaaatcaagtgaatacattcccaccaggaaaaactgtttctgttatatttctttgcttttctatctccttaaactcctcagccaattagctaaggattaaaaaaaaaaaaaaaaaatccaagtgatatatcagtacttcctaatttttttttattttgcttatcataagtgcagatcatattaccagtagctttggcaaaatctgctttccaaaataccatcatttttttacttgaatttgaatggcccttaactttaatctacatttgggcagggctggttagcctcttccaactgtttcctcagattcatctcctgtatgaagaataataccattttaagacacatctgaactgcccagatatagttgagtttgtatgttcacatcacatatattttaaaattataagtggtatatcttatctattgtcatgaaaagaaacaaatattttagcctttatatcctgactgatgagtatggtgtaatggtaagctgtatgatttgtgcaaatacagagtttgtaaatacaaaagtgtgacagtaagatatcagatatttttgacaaatttgaaaattaatagtttttctcaatcttataatttcaaggcattgtattattccatggattctgtattaaaatcatgactgtttatgaccatatacaggctttcttatagctgaactcttctatctagaattttaaaggtcttcatgagatgccaaatggtcaattgggttatgaagccaatttggtcaaccagccttcctacctgctttccatgcatttctttggcatttgtcatgtgaggtactgtgtttgatgctaggaagatacaaacatgcatggaacagtacctgccctaaagggttttccagtcagttaggtaaggtgacctaggcaaatagtgacagtgtaggattgaccgtgacgaagaccctttgagacataaagggttctcctgttaaatatccaagttccttcaaacaggcagcatcaattacggaggaggtggtctttgagtgcaggtcctttgggtgtgtccttgagagtagatatattttgaaggtagaaatgttcattgaggctgttattttagacagaagcaataatgagcaaagcattgaagcagagctaaggtgggccacaagaagtgtggtagagggagtggcagagaaaggaggcaggaaaggtagattaaaactggatgaagccctttgaaaaaaatcaaagggaaaatgtagactcatcttacaggcatcagggagttgacactataaagtaacatctttagcgctgtgccttagctggggcatggatatgagttaagagtttacttccatagtcacagcgggaagccatggaggtctgaacctaagcaggggcagtgaggacaaagaagagtggggaaacggaatccacaggattcaatgacccattcaatgaaggctaaaagagtgagtcagtcacctacaattttgagtctgactgaaagatgaaaactgaacagacaagatggggaaagtgtcatgttttggacatggtgagctccttgggcagctggaaatgtcgggagctcacggtggcatttgctgagagtgaactttgctgctgctgcttccttcaccagggagagaacctgagcatgtttctaaaaccttttaaatttgagaacttttcaaacttaaaaaactatgcagaggctgtttcactgtgtcaaataactacaaatcagtgctttatacaaagacgtagctaacaagaaaggcttttagccttcttatttttccctcggtttctgtgcacctgtgctgtccagtccagtgtccgccagccacctgcagcctctgagcacttataacatggcccgtctaaaccgacgtgtgctatcattataaaaacgcctcccagatgtcagaggcttggtatgaaataaagaatgtaaagtatcccactaacagtattttatgctatatgttaaaatgagaatgttttggaaattgtttcggggcttccaacagcatccccatgttaggtgccttgctggaaggactctagaacccagcatttatttgtactgcactcacagctgggatggaggacaacaaaagggagccgccagggagaggctgccagggtctggaccgatccttgcgcaggtccacatatcgcgtcctttccatgaggggcattctgagtatgcctgtttctccaacaacagcaaatgggcatggactggacacagtggctcacgcctgtaatcccagctctttgggaggccaaggtgggaagattgcctgagaccagcctgggcaacataatgggacaacatctctacaaaaaaaaaaaaaaaaaccaaaacagttttaaatgagttgggcatggtggtgcaaacctgtggttccagctactctggaggctgagacaggaggatcacttgagcccaggaggttgaggctgcagtgagctgtgaatcatgccactgcattccagcctgggcaacagagtgagactctgtctccaaaaaaaaaataaaaatgcagtagcacatacgcagtgtttctgcccagagaagcccattagagactcagcacccaaggttcttatcagagtctggtcacataggcaccctctgctttgcatatatcaaaatttcagactcttagcaggaaagcaagtatttggcataaatgacatcttttatgcaaagtctaggtacaatgaagtacccttatctgttagggaatggatggcacccaagggccagtcttgcaatcagaacctttcaaaggtagcaccctcaggcctgctataatgttaactctttctgcactgatatgttgggttaaataaactatataagtcaaattaattccaccaatttcttttttactttttaatgtggctacttgctcacattttttactcacatatttattttgggcagcactggtctatatccatgatgagaaattcttctctaatgtgttttagttaaggtattttctctatatacactaattttttttgttaatacaaatctgataattaaacaggtgaaaagcctccctcgagtgatatctttatattaactaatcaccaaatgtaagaataagtttaaattgtaaggctgcaatagatttaacttcatatcccaaatttagctttattacccaagaaaaagaagaaagccgccccttcagaaaaagtgtgtgtgattaaaataagggatttaacagagttttttaaaaacaagagccagcttgaaaaacctccatttggaaagcaaatttcagagctccaattagtaaattttttcatgcttatcattaattcaaattattgaactatttcttttgttctcctctaagctgtgatttgtaattgttacaatttcacccatggaaacaattagtatttcagaagaggtttatataaatgggctaattctgcatgagagattcagttcatgcctacccattgtagattgcagatataactgaaatagaataattttgctaaaatgaatgatacagaatagcaatcaggatatatttggcttcttcccaggcactgaatactaatatatacctcactctttaagaaagaaacagttttaggaaaataatttctaggactagaactgtgaaagcagcagcagatatttttgttagaataaacccgtaatgtgattttcggtgacatactgcctgcaggccccctgcaggctttgctgaaggacagccatccttcagcatcattgccacatctcattgaaattgggggggacacaaaattccagccctccccttcctttccacaccatgacccagcagtgaggaacagcaataggtagagagttctcaggctataagtggagttcataactggcactatttttgctgtctttttttatataaagacttatagttcaatcattttattatttgaattgaagcataccattaaaatcccatatcaataactgatgcttgattgtcatttccaccagccatgcttaaccagtgaaaagccataaaggttaatgtaggtgtaattattaatataactcacatttctatgaaacaaaagctgacaatatcagtgctgttttctaatcactttaaataatatggagagcagttgtaaagaatttataataaaaactgaagacattttcctctcactgctcaatcagtgatgaacacggagtggtaaacctgtctttaaggccacctttgaagttataaagagccatcaaaggggggggtcacatgatgttctgtagataaaccttaaaaaccaatggtagttttattcatgaaatccgaatgtcaaggacccacagtgctgtttattacctcattcagcctgtcttgaaaatggcttatctttcctgcatcccgtttttgtgaactagataaaataggtagtagaattagaacataatatacaattatattgtatgtaatagaattacagtgtgatatataaataaaaaaagaaactccagtttgtagaaatgaggaaatcaaaaatgctatatgtttctcttggccgttttttagtatttttcggtgcccccatttgtatgatacagttttatgatatctatgacaaacccaagtaggtgcactagctaattttgtagctaattttgtaaagtgaataaaacaccaccatacactccccagccctcaatatgatggcatgtttgtgtaactgatacctgttgtctttccgatgagccttggaaccatcaatgttatctaagaaccatgaagtaattatttcagtggttttagtgataccattttgacaggttagcagtctctggataaattacttattagatatatacatcatttgaacttaagtctaaaacagaagtatcatgattgagaccactgattgcatagtctcatcaaattttggaaccagaagtctgagatacactgtattccatccccttcattttaaaagaggaagccgaggcccaaggaggttaaataccttaaaatgtggattaactgataatagaaaccatttttattgattactagcccattgtttttttctgctttctgctgcatggtgctatttcccaagttccttcacagttcgtagctattgtggactcttcagtcatgtcagccaccaaggggttctcatacttgaactgcagccgctgagtactccgcaggtgaacaagcttaacagtttagtgtgaagactgttgaactgtatatagagaaagaagtctaaactcaactgcaggttggcttacagtgaggagggggaagggataaatgaaccctagttcataatgactatagatttttaacctgttgtactgaaacttgggtgaatactaccgtttagggcattctgcttaaagagagattatggtcacactcttaatagcaaagcaattttggatattcaccgtggacctacatttgtcagattatgttttggagttatctaggtacctaataaatgcctgtttttacagcccatgttcacagcccattgagaaatagacaaagtgggtaaggcagatgaatgaaaacatgtcagttttattactgataatgtactgcaattggagaatgtggtcagatattccaaacttcctatgactgcacactgaagagtcttctctttggaggggagaaaaataatgctcgtggctgtttttaaaattatgtttattatatatttattaaaagaaagataatatttagaaaaaaatctcattagtcaagtaaaattttagatactctatcttgaaaaaccttctgaaaacagtataaaaaatatttgagatatgtcagtataacatagagcaatattcgattctccctccttggtgcagcaaatattttctgaaaatcaaaagtacagaatcttttaggcaggaaatacattttgtccaattataattttagaagtcaaaattgttaaggtttttggaccaggcacagtggctcacgcctgtaatcccaacactttgggaggctgaggcaggcagatcacttaaggtcaggagttcaagaccagcctggccaacatggttaaaccccacctccactaaaaatacacaaattagctgggcatggtgacacgtgcctgtagtcccagctactcggggaggctgaggcaggagaattgcttgaacctgggaggcaaaggttgcagtgagctgcgatcatgccactgcactccagcctgggcaacagagcgagactccatctccaaaaaaaaagaaaaaaaaattgctaaggtttttgggcttctgtcgtactgaatgggaaaataataagctgcctcacttcttgactttcatatgttttgtttgtttctttacactgaaatacttaatactactctattggacttctgcctccaagccaggagtttatttcctaacagaagtaagcacactgactaataataatccattctaacaaaggtttacatacacaaggataggtgccaaatagaggagtatgtggagtgtgataggaacacacaggagcgactggctaccccagagaagcaaggggattttcacagatggtaacatttgagatgatactgaaagatgagtaggtggccgccacaaagagaaagaaggagccattccaggctgaaagaacaatttatacaagtaggaaattacatggtatatattccatatacctttagtgtccttaaaacaatttttttgaatccagaagagtggattttttttattatgggtaaaatatacataacaaaatttattattttagccattttaagtatacagttcagtagcattaagtacattcacattattgtgcaaccattaccactatccatattcagaaagtttttgtcttcccaaactgaaactctgtacccattaaacatcacctccccattccttcctctttttggaccctggtaatctctattctactttctgtttctatgagtttgcctcttctaggcacctcaataagtggaatcatacaatatttctcatacaataattaatatgtaattatagggctgggcacggtggctcacacctgtaatcccagcgctttgggaggccaaagcaggtggatcacgaggtcaggagttcaagaccagcctggccaacatagtgaaaacccgtctctgctaaaaatacaaaaattagccaggcatggctcgtgcctgtagtcccagctactctggaggctgacacaggagaatcacttgaacccaggaggtggaggttgcagtgagccaagatcatgccactgcactccagcctggcaacagagtgagactccatctcaaaaaaaaaaaaaaatttaattataaataattatgctaagtgaaatatgtggctttgtccatgttgtatgtatcataatttcatttctttttatgaccaaatcacattccattgtcttgtggatgctacattgtttatccatccacccatcaatgggcattttgtttgttcccactttctggctgttgtgcataatgctgctgtgaacattggtatgcaagtaactgagtttctggtttcagttctttggagtaggtagctaaaagtaaaattgctggatcatacggtaattctatctttaactttttgaggagcctccagataattttccacaatgactgcaccatcttacattctcaccctcagtacagaagggttccagtgtctccacatccttgccaacattgtctttcaaagttttggaaaaaaaaatctaccagactgtatactggttccataagaaccattgaaaatacattcattatcattacattaaaagtgaccttttggggcctagcataagaaaaagtttgaatgagccagcatcagagaatattgacgtttgtcttattgtttgaatagtacagagtttattcaaggaaaggcctttgcggtaagaaagtactcttataaagtcagatttgttatgtatgaaataaaatcaggtggtctgcctgctctttgcaacactgttttctcttcctgcagctccctgcacaagcagcactttcttttgccatagcaacatgtgcatcaataattctttagtctgtaatggtgtccaaaattgtgcatacccttgggatgaaaatcattgtaaaggtgagtttgatgtaaaggccaacatttttgagaaaagagtggctattgcccttcattaagaacttaaaatgttattttctacaacagtgcttagcatagctgctttttgtttgtttgtttgagacggagtcctgctctgtcgcccaggctggagtgcagtggcacaatctcggctcactgcaagctccgcctcccgggttcacaccattctcctgccttagcttcccaagtagctgggactacaggtgcctgccaccacgcccggctaattttttggtatttttagtagagacagggtttcactgtgttagccaggatggtctcgatctcctgacctcatgatctgcccacctcggcctcccaaagtgctgggattacaggcatgagccaccgcgcccagcctagcatagctgctttgacaaaaatggaaacatgtaaatgttcttttaaatggatcatagacctgggatgtggtgaaaagcatactctaaacaaaagcattttttgtctacaaactgttaagttgttctaaagtgtattgtggccaggcgcggtggcttacgcctgtaatcccagcactttgggaggctgaggcaggcggatcacctgaggtcaggagttcaagaccaacctggctaacatggtgaaaccccatttctactaaaaacacaaaaaaatcagctaggcgtggtggcacgcgcctgtaatcccagctactcgggaggctgaggcaggagaattgcttgaactcggcaggcagaggttgcagtgagccgagattgcgccattgcactccagcttgggcaacaaaagtgaaaactccgtctcatccaaaaaaaaaaaaagtatatcgtggtatgccttgcccttattttgttactgttgttgaagtttgtcatttgtattgtaaacataccttatttaattgtcaaaataatttagaggttagcctgaagtatgtggaaacactatttaataaaagtcaacttgcagattctgtcttaaaacataaaagcagaaacattctatgaactgctttttttatttcgtaacatttcctatgctgtattcccagtgtgtactcactgaaagataaatgcagcttgtggtaatggttgaatgtctgcaagctggttgtcagatcactgtgtaagaactaaaggtaatcttccttttatcctctaagacagcagtccccaacctttttggtaccaaggactggtttcgtggaagacaattttttcacagaacaggggtggggcaggggggttggtttcaggatgatttaagcgcgttacatttattgggcactttattattattacattgtaatatataataaaataatcatacaactcaccataatgcagaatcagtgggagccctgagcttgttttccttcaactagacagtcccatctgggggtgatgagagacagtgacagatcatcaggcattagattctcctaaggagctcacagcctatatccctcacatgcacttgggcttctgtcatactgaatgggaaaataataagctgcctcacttcttgactttcatatgttttgtttgtttctttacactgaaatacttaatactactctattggacttctgcctccaagccaggagtttatttcctaacagaagtaagcacactaataataatccattattgttatccataatagggctcctgctgctgtgagaatctaatgccactgctgatctgacaggaggcagtgctgcgggtaatgcgagtgatggggagcagcagcagatacagatgcagcttcactcgctcactcgcagctcacctcctgcagtgatacccagttcctgtctgtggcccaggggttgaggacccctgctgtaagagttcaataaatatcttactgtggaaaggtgatctaatctgatatggctgtcgtaaatactcgacatgaagtgttttcagttaatcattcaaaaacagtaggtcatgataatatactggatgggttagtctgatgatgttagtttgctctccctggggtcatcagtagatgcgggtatacctgaacacagcagttggtcaaacctaccataaagcagaaagctaaacttgatagaacaagagtatttatttggcatagtctatatttgtatatttgatttgatttgcagaatgtatgcatttatgtgtcttctgaagaaacggaccaagaactttatcttctgtaatctatcagtactgcgattggtaactttaaccagaaattataatagggttgttttatttgtttaaaaacctaattgtaaattgcattgtctgtagtatatttggcccaagtattctgttttacctaaaaataccttactaatttgtaccaggattcatattaatgtattttgaaaacttaacgtttctcattttctttctgcagaaaagaaaaaagcaggagtatttgaacaaatcactaagactcatggaacaattattggcattacttcagggattgtcttggtccttctcattatttctattttagtacaagtgaaacagcctcgaaaaaaggtcatggcttgcaaaaccgcttttaataaaaccgggttccaagaagtgtttgatcctcctcattatgaactgttttcactaagggacaaagagatttctgcagacctggcagacttgtcggaagaattggacaactaccagaagatgcggcgctcctccaccgcctcccgctgcatccacgaccaccactgtgggtcgcaggcctccagcgtcaaacaaagcaggaccaacctcagttccatggaacttcctttccgaaatgactttgcacaaccacagccaatgaaaacatttaatagcaccttcaagaaaagtagttacactttcaaacagggacatgagtgccctgagcaggccctggaagaccgagtaatggaggagattccctgtgaaatttatgtcagggggcgagaagattctgcacaagcatccatatccattgacttctaatcttctgctaatggtgatgtgaattcttagggtgtgtacgtacgcagcctccagggcaccatactgtttccagcagccaacccttttctcccatcacaactacgaagaccttgatttaccgttaacctattgtatggtgatgtttttattctctcaggcagtctatatatgttaaaccaatcaaggaacttactctattcagtggaaacaataatcatctctattgcttggtgtcatttataggaagcactgccagttaaagagcattagaagaggtggttggatggagccaggctcaggctgcctcttcgttttagcaacaagaagactgctcttgactgataacagctctgtcaatattttgatgccacaataaacttgatttttctttacattccttttatttttcctttctctaaatttaatttgttttataagcctatcgttttaccatttcattttcttacataagtacaagtggttaatgtaccacatacttcagtataggcatttgttcttgagtgtgtcaaaatacagctagttactgtgccaattaagacccagttgtatttcacccatctgtttcttcttggctaatctctgtacttctgccttttaattactgggcccttattccttattttctgtgagaaataatagatgatatgatttattacctttcaattatatttttctcagttatactagaaaatttcataatcctgggatatatgtaccattgtcagctatgactaaaaatttgaaaaagataaaaatttctagcaagcctttgaagtttaccaagtatagtcacattcagtgacagcccattcattccagtaaagaatcatttcattcactttgggagaggcctataattacatttatttgcaatgtttctcttcgctagattgttacatagctcccattctgttggttttgcttacagcatatggtaaccaaggttagatgccagttaaaattccttagaaattggatgagccttgagattgcttcttaactgggacatgacatttttctagctcttatcaagaataacaacttccacttttttttaaactgcacttttgactttttttatggtataaaaacaataatttataaacataaaagctcattgtgttttttagacttttgatattatttgatactgtacaaactttattaaatcaagatgaaagacctacaggacagattcctttcagtgttcacatcagtggctttgtatgcaaatatgctgtgttggacctggacgctataacttattgtaaagaccttggaaatgtggacataagctctttctttccttttgttactgtatttagtttgtgataaatttttcactgtgtgatatttatgctctaaatcactacacaaatcccatattaaaatatacattgtacctgaccctttaatcatgttatttatgccaccaaggttgtggatcttaaggtatgtatggaaaggaactcatttatcaaattgtaagtaatacagacatgccatttaaaagaggtaaattcttgttttctatattttgttagtaaattctcaatgaaataagttgaagtttcactggatttcattaacttttaaatattacatatatgtgttttctcagattagtgaaaattgtgaccttaaatttaatacacatatactgcctcagagtgctttctt

SEQ ID NO: 84 - DNA, 60082 bp, Homo sapiens
gaagggcagacagagtgtccaaaagcgtgagagcacgaagtgaggagaaggtggagaagagagaagaggaagaggaagaggaagagaggaagcggagggaactgcggccagggtaaggacaggggagggaatagggtggcgaccaggctgtggctttgagggcagagaggtgtagacctggcaggacccagacccctcacggctgcagcatctcaggggttgtggggccggcatgagtcataggctctcctgccgagcccaggcctgtgggaccccggcagcaacacagggccaggggcaatagggttgctgggggcaggggacagagtgctagggccctcccacctgggcccagagtcctgtacttggctcacttgaggtggaccagatgtcagcctcagatccatcactgtgtgtccttagcccctcccttgctctctctgagctggggaaacggcatcttcatttgagtgggtgcgggaaggacctcattttggaaccacaggcctccctggactgcctccaggagtctggggctgtggcttcaagtggggaaaagaatggagccatgggacagctctgactcacaggcccagccgccaactcaggggcagctgagccacaccagggaaaatacccgacggctataaggcctggccatacaaagcccaccatcccagggatcctggcttcagaaaacacccagagcctgtgacttctcttctagctgtggcaggagttgaatgaggtgatacccggatctgccttgtaaagaaaataactagcccacattccagacagggattatctttgctggtgcaaaagcctctgtctggaggtcagaagatctcagctccctgtgtctcaggcctgctccttatgggaacttgagtggattacaccacatcaggcctcagtttccccagggataaatggagctagatgccacactaagacaaaggttgataaaaatctgactaccactatccaacagttactatgccccagggctgtctggttgcttcacacacattagctcattttaccctcccaaaagcccagtgacctgagtcctactattatcccatgttacagatgagacaccagtccaagctgttgttgttttgtttgtttttgtttttctagttaaagaagtttattcaagggcaaagtgtgagggtagtcgtcaggaaacaggaaaaccagagaatggtgatcagtgcttccctgtgtggggcaaggtgaggatggtttatatagccagaaacgggtgggtaacacaattacattttccatacaaaggttaacgtagagctacaagatttgattggctactattgactacactttaagggggctgcttaacactcatttgtaaagaggtaatgatcaccagcgtgtcatttagtccaggtttgaataaagaatggggagcccggttaaagtataacattctcaacacaaaaatcaagaggcaatggtcagagagcagtcctgtgatgtgactcagtttccagggcttaacttttcccattggcataatgaattggggagctcctgaaattttattttattttcacaattttgatttgcattcaaaccaaatcaaatgtgcattcagggaggttttgaagtgacttgcccaagatcatctggtcagtgtggcagggatgggagaggagcccaggtcagactgactcccaagtcagcactcagggaggtaaagcacccacccaaatttgcagagctagggactggggaagcctgcgacaaaactcctatcttctgtctccagaccttctggtactgtgtttccccaagagaaaggataggaaaggactggatgagaaaggaaagctaacatcatctgagagctagagaaaaataataaaaactcatttgtgggagggcttgggcctctcaggcccctgtgcagagggcaggcagggtctggggtaaccacaggtcagcccctgctgggctcctgcctcccagtctctcccctcaggcgggcccagggaagacgggtgagctgggattttcctcccagacagatgagccacttggactgcacaattcttccgccaccccactcacggccggggttcttgttcctggaaaaagagggaaagactgaaaggagctatttctgccggggccctgacctgcagctgatgagggtctcacagctcccattcacgtcccttcttctttgaatcagggcaccgtctctaacaggccccttttattttagttataatgttcggttttgcaattaaaaattatttttaatgggcatcaggatatttccttctgtctttgaatatgccttttgtttctaatttgtgcaactataacttcacgtgaacctcatggattctggcttaggcaagtggcttctatgtaattagcagtgattccatcttaataaggtcctgtgatctgacaaaaaaaaaaaaactacttgatacaagtatttatgtcatatatgcctgtatttaaaaatccattaccaaaatacataatatagaaagagaaggtcttctttgagtatttttatatgttaaatgcagtaacattttaaatctttattctctttattcagcaactctgtggtacaaatttatcttgttgaaattctgcctctcactataaatagtttagttatatttttcaaagttgttttctttatatccatactaatatttgtatctgtacctatctacatagaatatagctataatcttcaacaaaactcccatttgtcattgtgcaactttttgtttttcacttaacaatatatcatgggcatactcataggtccatgggaaatacagatattaatgcattcattttgagagatgcacatagtttaaaagcaagcctgtgccagacattatttaaccaatgtcagaaatgcaaaatgcttgttccccagtgccacaaagaaatagcactcgaacataaatttaatttcctcagcaaggcaatttttactttctgcagagagggtgctcctggcagatggaacaatggcgagagcacaccttgacaggggaggggaagaggttcttattcctgacacaggcagcctctactgctgcattgttcccctattggctagggttggaccgcatagtctaagctaattccaattggctatttgaaaaaaaagagcaggagcatgagctggagtgccggggtgagtagtttggtgggaaaggtggatacgaacaggtggctcaggatgagtcaggatggagcaggtgactcaggtcaaagcaggtgaccaggggaacagatgtgaactgattaggactggtgggaaagttgtttactgaaaccagaagcaagggggcgaagagatccaggaagttaaactttaaaatggagaatcaaagaataagagagctgaacatattgacatactgattctttgaagagaaacttggggttcactatatttaacaccaatctcctactgaggggcatttggactatttcccattttttagagttataagttatgctacaatggccattatttataaaatatgtttgtttttgcatatttaagtatttgtttccatagcataaattcctagacattgagttgttgagtaaagagaataaacatttaaaatgtcactgaagtctaaaaattcccttttaagtacatatagtgccctgggcggctgagaaaatcaaacatacaaacaacagaaacaacgttatttaattctagctaagtactctggactggtggaggaagtatggaccctctttggtttattgagaaaagtcataagtgggtgacagagaagagttgaagacagaaatgcgccaagctgaaacattctccttggcataaccagaaacacccagaggacttggcaaggcaggaagcttcccacagtgccattcagtgctgctgcagctctactaatccatcatcccacatctagacagggcatcccacccgtcgggaaacccagccttccctcaccgccctgctctgccccagtccctcatggtgtagggtgtgctcctaccagtggtcccatcggatcctcacgattagcctgtgagaggagcctccagatgaggaggttgaggctcagagccatcaagtggcttggctacagtcactgcagggaggctcttgccttccagcctccctgctcctaccttccccgggggtgtctaggtccagttccagatctcagagtggccagcaggctgagccctggggtcaggggccagctgcctacacagaatgtggctcctggaatttcttgggtggtggggggggggcgggcttctccttgggatggggttctggggccgctctgggccatgaaagtttcccacagcttggaagaaaatctgccaccactgtgtaggggtctggcgagggaccattggcctggggcagggacctggggacatcacagaagccgaactgtctccctgtaccaccccctcccagctggctcttccctcacccacatgttcttggcatacaggtctgccctctccagcagctcccaccccccacctgctcagggctcctcgccttctcctgcagggcttcacagcaggctgcccttgcccagctcccctttgcagatccacagtctctggttttagattttgtgggtcttcactgcaggaactagaaaagtcacaaacatggggaagtaacacagtttctggaaaatcacagaattctaagtcccttttttcccctctgaagagacaagagggaagcttccacatctgaaaatttttctttttcattcttgatcttcctgaagcatagtgatggtcttggtgttcccttgctcaaacatcttcagtggctccccgtggcccagcaaagtcgagactccttcatggaatctttaaggccctccctgatctgattccaacctctcctactgcctctcccacatctgccctccaaggtccatccaccttgtgtgggccactagcttcctgacctctgcccctttttttggtgctaccgtcaccacctagaatgcccagtcttttatagctgaaggtcaaagtcttgctcaagcttccagcccagcaaaagctactttctccaagaagctttcctcattcttcagctgaaaatgatttctcttcgcattcctttgtctgtgcctcttatgggccctcacatctgttcagcattcttagcctcccataccctgtgcactcttacgcctccaggcctttactgtgctgtttctccttcttggaacattccttcctcctccctgtatctctcccccaactcctcacccttctcacttcctctcaactcagatagggccttccttgactcttctctccggtgatcccaggacatcttgcaactcccccagtggcctggttcctctcctggctctgacaataggctgtgagttgcagaagggagggaccacagctgacctgttcaccaccatgtccccagggccagggacagtgattgagaaatatctgttgcatgcccttcacctgcattattgtctcactggatctgagtcaatagccccttccccattttacataatgaagaaacaaggccttgaaaggccggggacctggctgtggttaggagtggggaatgaattcctggtctatctggctccaaagcctaggctgttcccctttaccctcgatcctcctgagagcccctgccattgatgaaagacagtggttgaacatgtgggctctggctctgggttccagggtttaaaacccagctctgccacttagctgtttaactccaggcaggttacttaccatctttgagcctgtctttcttcatctgtaacatggagtaattacagctttcccctaaggtggctgggagaatcaatgagatgatctgtgcaaatagctcagtccagagactggcatgaagagtgtgcccaatggatcaaccagaacagtccttcttcatgcccctgtgttaatgcaattattaatagcaccccttccagtctcaaaggttccaaattggatgacaaatcatgttaatgtccatagatgtcagatattatcagctgcactgtataacaccacttagctacttgccttacctcccaccaggcggtgaggtccctgcatgcaggaaagtgctctgagccttggccttcctgggcccagaacaaggcctgacacatgaagcatttgctgaataaattgcttttggagggtggagagcttctccttgctcttcatttattcattcattcattggattgtttatacatttcttcatgcatctggcattgactgagcactcatctgccaggcagggccaggtgtagagggtataaagaagaccggaagggagactggccctaccaggaaactcctgctgcagaacaaaggggtcagaatgacatcacaccaataaccactctcataactgtgcttctgttgacagcgagaagtgccaggaaactcagggagccacgagagactataagacagggactcagtcaggcaaagggaggcttatgggccaggtggaagcagaagtatgtggaacaggaagaaggagtgtgggggtgtatgcaggagctgcaagtgttcagtacagcagggagggtggatggagagagaagaggcagagatcagattgcaaaggcccctgtaagccctgctacagggtatggccttgatctgctctatggagctgcaatagtaatgggagcaaataccccatagtactccaattcagacactagagctcaatcctcaggcctagagataggtgtggtcgaacctttgtggtccagggtcaaagaggaaccagttgccaaattgccattattctgtctgggtccctggctcctagcttgggcccactccactctctggtggggaacctcctgggtcccagggcatgggctgcagttggggttaactgggcaggagggtgggggctaagctgtccttgacctggggtctggaggttccagggtccaggagtcaggcagggagatgaaaactaggctctcagtatgtgaagtgtgacatggcccacacatttcttcagagtttcctaatccttgggctgtcatgcaaactcctctcaaagttcctctgccacaggaaggggtaatgtcaatctgggattcttgtttgtcaccttcccggcagcatcaccaaggcttcctcagtcagggcttaccccactgagtcccatggcacttccccactctgtgtccactagcggtcagcacacccactgctgggggaggtcaggatcgccctgtgcagtgtgctggtcattagcgtaggctctgcagccaggctgcctgcttccagtctcagctctgtcattccctggctctgggactttgggcaagtgaactaacctctctgagccttggtttcctcatcggcaaaatggcgtaattaatagaatcagcctcatgtgttaaaagcactaaattagataaatatggaaagagcctgctgtggtgcctggcacataaacagcactcagaaaatattagggagtccagtgtggtggctcacacatgtaatctcagccctttgggaagccaaggcaggaggatcgcttgatgccaggaggagtttgagaccagctggagcaacacagtgagaccctgtctcaacaaaaagaaatagaaaattagtcaagtgggcggtgtgtgcctgtagtcctaactactcaggaggctgaggcaggaggattgcttgagcccaggagtttgaggcttcagtgagctgtaactctgacactgtactctagcctggcaacagaatgagacttgcctataaaaaaagggaaaaagaaaaaaaagaggccaggtgtagtggctcacgcctgtaaccccagcattttgggaagccaaaacgggcagatcacttgaggtcaggagttcgagatcagcctcgccaacatggtaaccccgcctctattaaaaaaaaaaaaatatatatatatatatatatatttttttttttttttttgagacagagtctctctctgtcacccaggctggagtgcagtggcacaatgttggctcactgcaacctccgcctcctgggttcaagtgattctcctgcctcagcctcctgagcagctgggactacagccacgtgccaccacgcctggctgatgttttgtatttttaggagagacagggtttcactgtgttagccaggctggtctccatctcctgatctcgtgatccacctgcctgggcctcccaaagtgctgggattataggtgtgagccactgcacccagcctctgtcaaaaatattaaaaaattagctgggcgtggtggtgggtgcctatagtcccagctactcaggaggctgaggcaagagaatcacttgaacccaggaggtggaggttgcagtgagctgagatcacgccactgcactccagcctgggtgacagaatgaaactccatctcaaaaaaaaaaagaacaaatgaacaaaagagtaaggattaggcctctaaatgccattttttccaggaggacagagtaccttcctactcacggggctttggcatacagcattcattcattaattcattcactcttcatacatctaaaatcagtggatcagaatggtcaggtatacctgtaccataggaggcagaaatgccctcaccagctgtgtgatcttgggaaagtgacttaacttctctgagccttggtttgctcttcagtaaaacaaggataataaccacacctacctctagagttgaggattcaatgagaaaattccaaagagcactgggcgtgctgcctttcacatagtgagcacctgataaacctttgaagcctgccatgcaaggaaaatgctgggatgcggttgagcccaaaaggcctgggatgcataataaggatacctgcccatctggcaggaacagggaggcttccaggaggcagcgagtctgaaggagctataggaattagctggatggatagaaatgacaggacaagcagcatcctttgatcgtggggacagagacaggtcctgccaaggtggcctaggccatccctcaggactactgtagcctccacccctcttgctggttatacccctcctccacctaaacatgttccaccagagaggggtctctgccagcctgggtcagggacttggtgagaattgcatgaaagctgggcaagatcacacacaaactttgcatccgtgttaggggtgcccaggtttcctcaaggccatccagggactctcaaaggcagtggcctcagccagagggagcatgagaatccgctagagagcttgttacctgtgcaggtacccccctcccacccctaagtcagcaggcctgggatggtcctggagtcttcattttaacagttacccctgtgattctgaggctggggtccctgaactgcacttggaggtgcacccctctagaggcctccaggccattaaggacccatggcctataggatcaagccctggcaccctgccaggttgtcaggtactcttagtacttggacctcaccccctttctactcccatctccactccattccttcacactctggttggccccagagagtcctgatttttcaccctctctgcccctatgctattccctctcctgggatttcctttctgcctgaagggttgctgctcctccttcaaggcccagctccaatgccactgctctggaaggcctcacagactctccatcttctgttccccagcgccatctgattgtgcttatgttacaacacttaggggcttgcttccaaatgtgttggactttaagaagttaatgtcacattgatgaccttgcatgttgttgatctgatgagagtaagggaggccagatgtgcttggagaccatgtcccaggaaagactactaagaaaccagagtgctcaccctggagaagtagtacctccggggaccacaagtgctgtctgcatcactggaggcctgtcgagggacagggaacagagctgcctgagggtccagagcaacaggtgggtgtcacagagaggcagatctgggccagatagggaagcatgggctaactgcttcccacaacagatggatgcaggtgacctgtcagaaatgcgccaaggggcacagggaatggtattggccagacaatccaagtagtggggagtggcgcccagctacctaggccttcgactcagaaaattcggattctggctctgagtcttccccaaagtagctgtgtgagctgagataagtcacaaaccctccttgaccttcctttttcttatctatgcaatagagctatgcacttcactgattgcctgtgacccaggcctgtatgagaaaatggaaatgaaagtgcctcgtaaacaataaatggctcagccttcctaaacaaaacatgaaacccagaagtcagaaatgaaaagacaacagatttgactacacacagtaaaaacttctgtgtgaatacacaaaccaaaagaacattagcagagaagtggcaaactgatggaaaatattttcagcatttctgataattgggttagcagacataatacagataacgaatagttcaataagctgggtgcagtggctcatgcctataatcccagcactttgggagaccaaggcatgcagatcacttgaggtctggagttcgagaccagcctggtcaacatggtgaaaccccacttctagtaaaaatacaaaaattaattggccgtggtggtgggcgcctgtaatcccagctactcgggaggctgaggcaggagaatcgcttgaacctgggagtcagaggttgcagtgagccaagactgcgccactgcactccagcctgcgtgatagagcgagactcggtctcaaaaataaagaaataaatagtccaatgaatcaataaagacaaaaaaacggacaaaggatatctgtagaagaaataccaatagccaatacacacatggaaaaaatgtttatttcatcactcatacagaaaatgcacatgaaacctcaacgaattaacattttttcctaccagactgcgaataattttaaagatcagtgatatcccatgtcagcaagtgtacggtgatgctgcatttctcacacactgttggtgagaatgcacatcctcacggccttcttaggggaacaatttaacaatatctccatgttttaacgtacctaccctttgacccggcgatcccacttctatgaatggatcctgctccaatgagagtgtatttacacaacgattcatgtgcaaggatgtccactgagcattgtttgcaatggagaaaaattagaaggaactagagtgtccatttgttagaggaatggtgagataaattatggtacatccatacgatgagatacagtgaagcaattttaaaaatatggtaaatctctatgaactaatatggaaagatttctaagatgtgttgaatgattaaatagcataggatactatttttaaaactataaagtagggatgggatggatgggtggacagatggatgagctcgtctgtgcccaggcaaatgctaggaagagtatacacacactcttacaagcagttgaggcggggagagaggctgtgattaggtgaataagggtttggggggccttccatttatggggacagtgtatctctttatggatgaatatcttacagtgaccactagtattaaaaaaaaaaaaaaaagaaggcaaggaaagcaagcaaggagtgggaggggattgccagcaccgccactctctgcctgggtcccgtgacggctggtggcagactggtggacctgctgattgcctttgctgttcatttcttttcagatgcccttctttctcttccctgcctctgcctggcaaaatccaaccttcccaggcctacctcttcccttagctcactctatcagttagctgttgttgcatagcaaacaaccctacaaagctgcagtgacatataccaataaacacgtatttctctctcatctacagtattcagctgatctggctggattgctagggttttctcatgcatctggggcaactggggactctgctttaatctagccttggctaggataccttagccatgccagctcaggcgcgtctttctcatagtgatgttagcagcatccgcaggcaaggagaaacatgcaatgcctcttgtggcctaggcttgaaactggaacaccctcacttccatctcattctataggccaaagcagcacctgcacgaccaagcccagattcaaggggtggagaaataggtatcaccttttttttttttttctgagagcaactgctaagtcacatggcaaagagatcgggtactgaaaggaatgaagaattgggaccattcatgcgatctcctttggataccataaagaggggagagacaaaccacagaatgggagaaggcatttgccaccatgtaaccaagcatgcgtataattgtgcgtagctgtatttcacttgtttatttggtttatattatactattatataaatactactttttactattctattattgatggatatttcatttttttttccagtttgagctattatgacaaatgctgctatgtatcttagtacacttgtgcacacatttctattgcacgtatgcctgccagggagtagaatttgttggatggtaagatattgcattttcgtcaatctaagtaaataatgctaaactgttttcccaagtggttgtatcaatttatacccttaccagcagtgtatgagatttcctgttgctccaaatcttagccaacacttggtaagggagttcatttctgtatatgttgtatagccggaaatgaacagtacttttaaaaaataatggttagccacacggtgaaagcccgtctccactaaaaatacaagaaattagctgggcgtggtggcgggtgcctttagtcccagctactcgggaggctgaggcaggagaatggcgtgaacccgggaggcggaggttgcagtgagccgagattgggccactgtactccaacctgggtgacagagcaagactccgtctcagaaaaaaaaaaaaaaaaaaaaaaaggttagccaatgatcttaggttcacttaaaactgtctttccctcccccatccccactggttctatcatctgtcaagtgtccatatgatccatatctaggaatttttttttaagagatgggctctcactatgttgtccaggctggactcgaacttctgggctcaagggatcctcctgcctcagcctcctggataactggcacgggtgcgtcccacagtgcccagatactacgatctttattttgtaccaccagtctatttgtctatctgtgagccaacatcaaactgtcttaactatctttataatatttcttgatatctattatagaaagacttcccttttttcattttctttaagactgtcttggttattcctggccctttacatttttttcccattgttttatgaaaatttaatttacacacaataaaatggaccctttttagtctacaattctgctacttttgacaaatgtatatagtcatgtttatcattgtcacaatgaagctatatttccatcaccaaaaaattccccaaccccccacccccctgccggttctttgaagccctccctccatctccagcccctggcagccaatgatctattttctatctgtttacaagagtgtcatatgagtaagatcaaagagtatgaagccttttgaatctggcttctttcacttagcataaagaatttgagagtcatccacatcgttgtgtacatcagaagtttgttccacttaattgctgagtagcgttctattgtatggatataccacagtttatttatccatttaacagctaagggacatttgagttgtttccagtttgagctgattacaaataaagccactaaaacatttgcttagagggccttttgtgaacatcaatttccattttacttggaatgcctaggagtaggattactcaattatggtaggagttttctttttaaagttatgaattatggtaaaagtttcctttttaactttataagatactgccagactgatttccaaagtggtagctcttttgcatcctgactaccaatacatatatgagagttctattaatagttgttcgtggccaggcacggtggctcacgcctgtaatcccagcactttgggaggccgaggtgggcagatcatctgaggtcaagagtttgagatcagcttggccaacatggtgaaacatgtctctcctaaaaatacaaaaaaaaaaaaaaaaaaaattagctgggtgtggtggcgggcacctgcaatcccagctacttgggaggttgaggcaggagaatcgcttgaacctgggaggtggaggttgcagtgagccaagatcatcccactgcactatagcctgggtgacaagagcaagactctatctcaaaaaaaaaaaaaaaaaaaagttgtttgtattctcatccttatcagcacttgaaactgtcaggttttctgatttttggttttagccatttaattaagtatgtagtggtatttcattgtggttttagtttgtattttcctaacaaatattgatattgagcatcttttatatggcaaattatcttatcatttatatatattatttgttcaatgttttccttgtttttactgaatcatttattttcatattgagtattgaaagttctttatatactcttgatataagtcctttataagatatgcaatgttgaatattctctcttggtctgtattttgtcttttaaccatctatttaaaagagtagaagttttaaatgttgatgaagtccaatttatagatttactttttaaggtaagccaagtgaaacagtgggagtggagaaggaacaaagaaacctgtaactggttgtgatcaatttgttgtaaacaccactgcactcagacagcctatttttttttcttttatggattatatggatctttttaaatgttgtgtttaagaaatctttccataaccctcaaggtcacaaagattttctctatttcttgtaatagttgtatggttttgcatttaggtctttgatccattttgagataattttgtataaggcttaagttagagatcaatgttttctatgtttgtttgatttttatttttttctttttgcatgtggatagccagttgttccagtaccactttttggaatgcctattctttattcatttaattacttttgcaactttgtcaaaaatcaattggccacatatgtgcagttctatttctggactctattctgttccattgatgtacatgtctatcctttcaccagtactatattatagctttatagagtctgtcaaccaggtagtatgagggcttcaactttgttcttttcctaaattattttggctaatctaattcctttatgcttccatataaattttagaatcagcttgtcaatttacacaaaacttcttgcagagattttgattggcactttgttgaatctgtaggttaacctggagaagaatcagcatgctcaaaaatattgagtcttcaaacccacaaacattgtatatctaaccatttatttaggtctcattcattttcttttctcagtgttttgtacacagtatgcagatcttgcacatatttagtaagatttatacctaagtgtttcatgtttttttcagtgctattgtaaatagtatttgtaaaaaataaatttcacttttaatctgatttttgatattgaccttgtattctgtgatcttgctaagtttacttacagttctagtaacttttttgtagattctttggcattttctatgaagacaatcatttcatctccaaacagagaccattatatttcttcttttgaactctttttctttcactttctttcttttttctttcttcttcttttctttctttcttttttctttctttcttcttctttcctttcttttccttctttccttctctttctctctcttcctccttccctacctcccttcctcccttctccttccccttcccctttccctttcccttcccttctccttctccttccttccttccttctttccctttctttttttgagactgagtgtcactttgtcacccaggctagagtgcagtggcatagtccctgctcattgtaggctagacatcctgagctcaagtgatcagccttccaagtagctaggactataggtgtgcatcaccatgctaggttctttttaaatttttttgtagagacagggtctgcctatgttgcccaggctggtctcaaactcctggactcaggtgatcctcctacgttggccccccaaagtgctgagcttacattgtgagtcaccacacctggtctatttctttttttgccttactacagtgtctaggatctccagtacactgttgaatagttcagtataatgttgaacagacatccttgccttgtttctcatcttagagggaaaatatacaatctttcaccactaagtttaatgttagtggtagggtttttacagatgccctttaccatattgaagaaatttcctttagaaatgaacattgaattttgtcaaagcattattctgcagctattaagaagcctatgtgatttttaaaatcttgatatggtaaattatagtgcttgatttttgagtgttgaacgtttcaacctttaactcttataataaataccacttggacatgatgcattatcctttttatatatacttaaatttgatttgctaagattttcttcagaatttttgcatctattttcataagggatattggtctataattttattttcttgcaatatctttgtgtggtcatgatattgggatactgctggtatcatacaatgaattaaaaagtcatctctcctatgctatattcttaaacagtttttgtagaattggtattctctctttctttctttctttcttttgagatggagtttcagtcttgttgcccaggctggagtgcaatggcacgatctcagctcacagcaacctctgcctcccgggttcaagcaattctcctacctcagcctcccaagtagctgggattacaggtgcctgccaccatgcttggctaatttttgtatttttagtagagatggggtttcaccatgttggccaggctggtctcgaacttctgacctcacatgatccgcccgcctcggtctcccaaagtgctgggattacaggcatgagccactgggccaggtcagtattatttatttcttaattgtttggtagaatttgccagtaaaaccacttgaacctgaagagtttttttgtttgtttttggttagaaggtttttaactacaagtttagtttttaaaaatagatacaggactgttcatgttatctatttcttcttaagagaattttagcagtttgtacctttcaaataatttgtccattttatgcaacttagtgaatttgttggcatagagtagttcatagtattcccttattattcttttagtgttggtagggttggtattgatgtccactttccattcttgatatttgcaatttgtgtttttcttgttttttttttttttttctcggtaaatgttattacttttttttccagtgaaaaagcttttggttttattaattttccctaactcttttgttctggattttattgatttctgctcgtgtctttatttccttcctacggtcaatttggatttaatttgttcttctttttctagtttcttaaggtggtagccttagaccattgttttcttatccaattcaaaatattttctaatttttcatgtgacttcttctttgactcttgggttgtttataagtgtgtttaatttccaaatattttcaatttcccagatacctttttgttaataatttcaagtttgattctgttgtgatgcaagaaatactttgcataacttatttaaacttttaaagatgtatcttaagtgatagaatatggtatatcttggtgaatgttctatatgcccttgagatgaatgtgtattctgcaattgttaggtggataaaaatcaattaggtcaatcatttacgattttattcaggttttctataaccttgctgatttgctctctacttgtaccacctacaactgggagaagggtgttacaagagatttttatatctctcctttcgggtctatcagttttgtttcatgtagtttgaagctctgttctttttttttttttttttttttccaatttgagagcaggtactgtttattaaccaaccagcttagaaaaataatcatggtagacaccttagttcattcttctaataagcctgttgatctggtcctccctgttgccagcatctccaccttctacaaaatgggtggtctttttcttcattccacctcgtggagaagacaatttgaagggccacaggaagttatttgcctctttgaagcgttttccaacagtatagatctcatgaatcaaatcctccacgcagatgatgccgtatttaccaagagatcgagcaatcaaagcgttatctgtcaaagcaattcgcttcttattgattttgccataaccacgcttgtagattagttcatttactgacttcagattggggtacccccatgcaatatatggctctacaatcctcagcatgttaatcgaagccttgttgagcttcacaaaggttccattgaagatttgacgaaggcgaagaagctgcaacacctttcgaacctttgggctcactccattgatacctctgattctgatgacaaacgccaatttgggttctgcaggtacatagaagttgccagcttttcttgccatcctcgccattcgaatttcagtcctgtacatctgcctatattccttgtgatagtgctttgctttttcatagataagcttcctccttgcctttcgaagcatcttttgggcaaacttctttctcaggcgcttcatcttcagctctgcgaaattccttcgctttttcttaagggtttctggcacagcaggaacctccttcttcttctcttctacaccctccatggttccagccggaaaaaaaaactgaagctctgttctaaagtgcatatacacccaggattgttatgtcttcttgtaaaattgattctgtcttcactatgtaatgtccctcattatgcctggaaatatttcttgttctgaagtctattttgtctgatattaatacagctactccaggtttcttcaagttttattttatttttgattgacacataataattgtacttttttttttttttttgagatggaatttcactcttgttgcccaggctaaagtgcaatggcttgatcttgggtcactgcaacctctgcctcccaggtttaagcacttctcctgcctcagcctcccaagtagctgggattacaggcacctgccaccacacccagctaattttatacttttagtaaagacagggttttgccatgttggtcaggctagtctcgaactcctgacctcaggtgacctgcccaccttggcctcccaaagtgctgggattacaggcgtgagccactgtgcccggcctcaataattgtacatgtttatggagtacaatatgatgttttgatacatgtgtatattgtgtaatgatcacatcagggtaattagcatgtctattgccttaaacatttatgatttcttatggtgagaacattcaaaatcctctcttctaccatcttgttagatgttttctattcattctatctggtcttctttctttccatctttgtcttcctttggattgagtatgtattatgtctccatttcatttccactattggcttataatttatacctcttcaaaaatttttaagttattaaaaagagagaaaaatttttagggagtgtcctgggttttacaacttacatcgtaaattaatcaaagtctacctttaaatgataaaatgttactttaaatatagcatgagggccggtgctgtggctcacacctgtaatcccagcactttgggaggccgaagcaggcagatgacctgaagtcaggaattcgagaccagcttagccaacatggtgaaaccctgtctctactaaaaatgcaaaaattagccagacacggtggcaggtgtctgtaatcccagctacttgggaggctgatgcgtgagaatcgcttgaacctgggaggtggaagttgcagtgagccaagatcacgccactgccctccagcctgggtgacagagtgagactccatctcaaaaaacaaacaagaaaaataaatatagcatgaggacctgacaagagtagactgcacaccctttcttcccgtttttcatagtgcagtagttcccccttattggcaatttcagttacttgtgatcaatccatgtccaaaaatatgaaggtactttgagagagagagagagactacattcacgtggcttttatcacagtgtagtgttataattgtcttattgtattattagttattattgttgatctcttactttgcctaactgataaactttatcataggtatgtaggtgatatggtttggctgtgtccccacccaattctcaccttgaattgtaataattcccacatgtcaagggtggggccaggtggagataattgaatcatgggggcagttttccccatactgttctcgtggtagtgattaagtctcacgagatctgatggttttataaatgggagttcccctgcatatactcttttgcctgccatcatgttggatgtgattctgctcctcctttgccttccactatgattctgaggcctcctcagccatgctgaactgtgagtcaattaaacctcctttcctttagaaatcacccagtcttgggtatgtctttattagcagtatgagaacagactaatacagtaggtataggaaaaaaacatggcatatacagggtttagtactatctgcagtttcaggcatacaccagggttactggaatgtatcccctgtggagattgctgtaaatgcatatgtgaaagtgaaatgtatgacaacaatatgtttcacttttaatctgctataaatatacaatgcattgctactacttttgctttaaatcagagattggcaaactatagcctgtggaccaaatgtagcctgcctcctgtttttgtaaataaggtatgattggaacatagcgtgctcaatagtttatgtattggctatggctgcttttgcactgcaatggcagaattaagcagttgccccaaagaccgtatggccacaaaacctaaaatacttactatttggtccttgacaggaaaaaaatttttcaatgtctgttttaaatagttatcttttcaagcatttaaaaagcaatcatattttttatgcttacctttattccatttccagcactttttattttttaatgtatatccaactttctagctggtatcatactccttttacctaaagaacttcccttaggatttttttttttttttttttttttttttggtagtatgggtctgctggcaatgaattctcttagtttttgtttgtcaaagataatctttatcccttctctttttttgagataaaattcacataacataaaattaaacattaaccattttaaggtgtacaacggcatttaggacaaatacaatgctgggcagccatcacctttatctagttccaagacatttcatcaccccaaaacaaaaccacctcctcataagcaatcactccccattctcccttgccacatcccctggtaaccactcgtcaaccgtctgcctctacaggtttacctgttctggatgtttcatatagatggagtcgtatgacattttgctactggcttcattgacttaacacagtgttttcaaggttcatccacagtgtagcaggtaccagtatttcattccctttatagctgaataatattcaattgtatggacacaccacattttgtttagctgtcaactgtttccaccttttggctactgtaaattgtgctgcgttgaatatttgcgtgcatgtatttatttgggtccctgttttccattcttttggttttacctagaagtgatatttctggatcatatgacaattctatgtttaactttttgaggaattgtcaaactgattaccatagcagctgcaccatttttcattttcaccaacattgtacaaaggttccaatttctccacatcctcaccaacacttgttatccgattttttttattatgatgatcctagtagatatgaagtggtatctcaaggtggttctgatttgcacttccctaatgactaatgatattgagtattttttcatgtgctctggagaaatatctattcaatgttttgcctgttttttaaaaaaattattttagactcgggagtagatgtgcatgtttattacatgggtacattgcataatggtgaatttggcttccagtgtacccagtacccaaatactgaacactgtacccaataggtaatttttcacttcctttttgccctttcccctttccttctatccttccacttttggagtctattctttccatctttatatccgtgtggaccctttgtttggcttccacttataagtgaggacatgcaatatttgaatttgcctatttttaaatttaattgtttttttgttgttgtaggcaacactacaactttcattcttttttaaaatttattttcccataaatatttattaattgtgagggacaatagagtggctttagctacatattgcgtgattctacatacattctttagctacacactgtatgattccatttatatgacattatcctgtaaagcacaaagacattgtggaaaaggcaaaactgcagggatggagaacagatccgtggttgtttggtgtaaggggtttggggagggctttactataaaggagcagcatgagaaacattttctagagtgatggagctgttctatatcttgactacagtggtggttacattgttatatatatttgtcaaaactcatagaactatgcaccaagagtgatttttgctgaggaaacactacaactttcattctgtatatattctggatatatttatttattgtggatataaatattcattctgtgtgtttttattctcttgacagtgtcctttgatgcacaaaaatgtttaatttttattatgtccaatttttctttggttgcttgtgcttttagaaacatatctgagaaatcatttccaattccaaggtcatgaatattacctttatggtttcttttaaggttttaataattttagcttttatatttaggtctttaattcattttgagttaatttttatatgtgatgtaaaataaggattcaacttcattcttctgcatgtgactatctagttcttttagcacctatgttgaaaaaactggtcattctccattggatggtcctgccacccttgttgaatatcagttgtccatgaatgtgagagtttacttcctgactctcaattttattctattgatccatatagttattcttatgctgataccacactattttgatttctgtagttttatagtaggttttgaaattgaaaagtgtgactcctccaagattgttttgcatattcaatgtccctcgagattccatatgaatttgagaatcagcttttccatttctgcagaaaaaggctgttgggattttgatagggattatattgaccctataaatcagtctcactttgagagtaccgctgtcttattaaatcctccaacttatgaaaacaaggtggtttttcatttattaaggtcttctaaatttctttcaacagtgttttgtagttttcattgtaaagtcatgcatctccttagtttattccaaaatattttatttttgatactattgcaaattaaattgttttcttaatttccttattggagtattatcagtactatagagttacgtatgttgatcttgtatcctgcaggtttgctgaatttgtatattaactctaatagttgctttttgtagatcttttaggatttatctatatataggatcatgtcatctgtgaacagagatagttttacttcttcttttttaatttggatgccttctgtttctttttcttcctgattgctctggctaggacttccagtactatgttgaacagaagtggcgagaacaggcatctttgtcttgttcctgatgtaaagggaccagctctcagtcttttaccattgaattagttgtgctttttcacatgtgcccttaatcacgttgaggctgttcccttttattgctagtttgttgggtgggttttgttttgttttgtttttaatgaaagcatgttgggttttacagttacatcaagtgacatgatcatatgaggatttttttcattctattaatgtgatgtattaccctgattttcatgtgttaaaccactgttgtatttcttggacaaatcccacttcatcatggtatataatcattttaatatgctgttagatttggtttgctggtggctgggtgcagtggctcacgcctgtaatcccaacactttgggaggccaagatgggcagactgcttgaggtcaggagttcaagactagcctggccaacatggtgaaaccctgtctctactaaaaatacaaaaattagctgggcatggtggcgcatgcctgtaatcccagctactcgggagtttgaggcacgagaatagcttgaacgcgggaggcagaggttgcagtgagccgagattgctccactgcactccagcctgagtgacagagtgagaccctgtctcaaaaaagaaagaaagaaagaaaaaaaaaaaaagatttggtttgctagtacatttttgaaaatttttgctttctatattcatgcatttgtattggtctgtagttatcttttctggcaatgtcttggtctagctttggtaccagaaaaatgctggcttcatagaatgagttgaaaaggattggtattaattcttctttaaatgtttgggagaattcaccagtgaagccatctggtcctgggctttgctttgtcgggaggtttttgattactgattaaatttcttttcttgttataggtttatttggattttctttttcttcttgagtcagctttgattgacattcatgattgctaaaggttcaaaacacttttctgaaaaagaaagtacatatatacactcataaatatacatacaaacacacacatacacaccacacacacacctgagtacacgggaatgatcattttcctggatcaatgttatatcaggatttttcaatttcaagaaggaactttaggctgggtatagtggctcatacctataatcccagtactttgggaagccaaggtatgcgaatcacttgagctcaggggtttgagaccagcctggacaacatggtgaaaccccatgtctaccaaaaatacagaaatttgctaggaatggtggcacatgcccctgtagtcccaactactcaggaggatgaggtaggaggatggcttgagtccgggaggtggaggttgcagtgagccgagatcacactactgcactccagcctgggtgacagaaccaaaccctgtctcagaaaaaaaaaaagaaaaaaagaagaagaaatgaccatgttctttagagataagaagtaaaatactaagcgaatcaactaaaagaggtaaaagcaattgcctccaggaaaagagggagcaaaggaatgctatatattttaagaattatgcagaacaattagattctttgtaaaaataaataaacaatgtaagtaacgcacaaaagatagttttataaccagactgctgggatccaaatcctatctccaccatttggtagctgtttgactatggacaagcttaaggcatttgatctctctgagctttagttttcccatctgtgaaatgagaatgacaatagtacttacctacataaagttttgcagtactaaaggagacagtgaatgtaaaaggtttggctagtaaatgtcctgtaaaaggaagcttattgccaatattatcaggctctcccagaccaacctgtatacaggaagaaaacaaactccgtttctcctatagtctcacaacacaaaatacttctgaccccagatgtagaggatggggcatatttccccatacaccaagcaatcaaccaattgttcagattctgcagcagacacgaatctggtgccctccgattcaatttgaacactatatttacctagagataacgtcagatctcacagcttgaaggcttgagccaggagtttgaggctgcagtgagctatgatcgagccacagagctccagcctgggcaacagagtgaaactgcgtctctaaaataataataataaatttttaaaagatatgcattactttggagattccaaggattttaggagttgtaagccaggacatcagggtaaagaaaaaatatatatgtcacaatatcatgcaacctaacttctctttgggatctgccagagccacctgatcactctgaagaccctcatttgtgctactgactaacggtctggctgctcttggacatgtctcttctcccaagaccccttgaagatggctttagaagggccccaaacttagctagctccccccaagctcaggctggccctgccccagactgcgacccctccctcttgggttcaaggctttgttttcttcttaaagacccaagatttccaaactctgtggttgccttgcctagctaaaaggggaagaagaggatcagcccaaggaggaggaagaggaaaacaagacaaacagccagtgcagaggagaggaacgtgtgtccagtgtcccgatccctgcggagctagtagctgagagctctgtgccctgggcaccttgcagccctgcacctgcctgccacttccccaccgaggccatgggcccaggagttctgctgctcctgctggtggccacagcttggcatggtaagagcagaacggggggtgggggactttgttggggtgtgatggagaagacccctgtgaaaggattcagtccttgcccctcactgggtgtcctcaggctgttttagtctccccaacactggactgcaggcttgtgggtatctgctttggagaggtagtggggtgaaaagagatgggtgtggtggaactggtccacctggtgctgtggatctgtcccagctctgccagcgactcactgtgtgtcctgagcaagcctctgatactcttgaggcttcagtgtccacttctattcaattgcaggtgttgggggcagggggacagtgatagactagaccagagcagtgcttttcatactttcctgtgcatacaagttacctgaggattttgttacaatgcagattcagactcagtcggtctcaggtgcgacctgagattctgtatatccaacacactcctgggagatgtgagatgccggcactgctggtccagacctacactgagttgggaggacctggagagctcctgatggctctggcagctctgccagcctgtgattcgatgattctatgcaagatctgatttggaagggcctgataggggtggtggttcttccttgggtggcttgtgtaaggggtcagaggggagagacaagaggttggcctctctggcccagggctcaggagaggggaattcggggtgaaataggtatagggctagaggagggattgggaagaggccagtgagggtctcctggaccagagccctcccagacacaggctgccaagtctcaggaggtccccaggctgtagcagttctgcagaatttccatctgggagggaacatgactagaggtgaggggctgctgtgcttggcttgttggcccaacaaacacatttctattgcctgcttattcaaagggaccttgggggaggatggggattgaaggggagaaaggacagcctcatactggcctcttcacagaaggaccctaaggccgtggcgcttctggtccctgatgaggaggagatggcccactgaccatccttctctggcccaggcaatcacactgagcttgagtatttgggttttttttttttttttcctgagacagagtctctctctgtcaccaggctggagtacagtggcacaatctcggctcactgcaacctccacctcccgggttcaagtgtttctcctgtctcagcctcccaagctgggattacaggcatacaccatcatgactggctaatttttgtatttttagtagagatgggatttcaccatgttggccaagctggtctcgaactcctgacctcaggtgatccacctgccttggcctcccaaagtgttgggattactggtgtgagtcacggcgcccggcctggacttcttattttgcaatgtaacttacatgcagtagaaagcacaggttcttaagttcaatgaggtctgacaaatgcacacacagtgtacccgccacccccttcatctcagagagtcccacaggtttgatttcactgccttgtcctatccttacacccacaacctgcctgtggggcaaaaacggaaaagtatctgagccaggtctcaatttaattttattttttttattgagatggagtcttgtggccaggcatggtggctcacacctgtaatcccagcactctgggaggccgaggcgggtggatcacaagatcaggagtttcagaccagcctcgccaatatggtgaagccccctctctactaaaaaatacaaaaattagccgggtgtggtggtgggttcctgtagttccagctactcaggaggctgaggtgggagaatcacttgaacccgggaggcagaggttgcagtgagctgagatcatgccactgcactccagcctaggcgacagagcaagactccatctccttcctttctttcttccttccttccttccttccttccttccttccttccttccttccttccttccttccttccttccttctttctttctttctttctttctttctttctttctttctttctttcttttttctatctttttgagaccgagtcttgctctgttgcccaggctggagtgcaatggcatggatctcggctcactgcaacctccgcctccggggttcaagcaattctgccactcctgagtagctgtgattactggtgcctgccaccacacccagctaatttttttatttttggtagagacagggttttatcatgctggccatgctggtctcgaactcctgaactcaagcgatccccctgccttggcgtcccaaagtgctgggattacaggcatgagccactgtgcctggcttcaatcaatttagaagtttattttgccaaggttaaggacatgctggcgagaaaaaaacatggagtcacaaaaacattctgtggtctgtgccattctggatgaattcgagggctttaatatttaaaggggaaagtgggctggaggggaaaaggggaggttgtggtaatccacatgttgcaaaagaaaagcagcaggtaggggaacagtcaattatctcggttcagtaaattggctctttacatagggaaagtgaacatagaggagctgcctgtgggatattttaccttttatctgtcgctatctgcttaggaataaaaggcaaggcagcttcttgcatgactcagtttccagcttgatttttccttttggcagagtgaattagggtcccaagtttttattttcccttcacaggggcatggtgtgtgggaggggggccagatggttttccagggtccagtcccaagagaaagaagagatggggaggctggaaacctaagttttcagcccaacagaccaatgatgagtggatgaggggccactgtgaggagactggggatggtattggaggaccctagagagagaggggggctctctcttcattactgcgatgagatcctgggctgaagaggggctgtgtccagccttagtgtgcagtgtgtgtgtgtgtgtgtgtgtgtgtgtgtgtgtgtgtgtgtgtgtgtgtgttgggagagaagagtagagattggggcacattctggaagtgatgagggaggggcttccaggcaagtgggagctagtggagaggtgtggggcatggggagaattggggagtggagatgagaggggggaagaatggacaggcacagaaggggacctcagttaatgttcataagcccatgcccccaccccgaggaggatgggggccaagccggcttccttccctgctagccaagccagcaggggaagttggctgcggaagttgcgggtatcagccttatcctgcgtgaatacctgggacaataggataggacaaaatagggcagacaccgctccctgaccacatttcctggaggccaaggcagggtctagagagacaggctgggggaagggatgggagaagcccactgtaaggtgtgaggcaggtgtaaaaaaggaacaaatggaatcacagaatccaaggttaaaatcttgagcgatcagagttggcccagaagggacattagaaatgtagcaattaaagcaggtgcccagggcaggagtagttctatacatcatctcactcaaccttcagctgaagtttttggggtgggagctgggattattcccatcagacagaagaatagcctgaggctcaaagaggttaagaaactaacccagctggtaagggaagaaccaagatccaaacccaagttggtgtgagcccacactccaagctgtttcctgctataaaaccccggcctgggggccctagattgctgcagcagtgatagggcagccccagctctgttgagatttgctaaaaaggctgctagaaatgacacttgtccctcttcctggcagttgcactgcataggagggctacaaccccaggtggcaggcttggcagtattcacaattcactcaatctcgtttgctgatcagagtcttggggagaagggatgcacattctgatgaatacaaaatcaaaacgtgaattaagccatcctgaaaggacttgagagaggaaacctttccaattctgggctctatggtggggcagggggaatttccatttcaagggggtttgcagagaacaatggagataccctgaattcaccgaaagccctcggggctggcctgtcattgtgcccccatcactgggaagaggaagggccagagctgaggagttggatggccagggtcagccagtgggtcagcgtcagagcccagcctcacagctgccccgcaagtggcactccctctccctgcctggagagaggagagtggctaggaggctggggaagcagaagtgagaacatccctgtagaagggccacaggctgagcggaaaccgggggctgagcctgacgccaacaatgtgtttccgcccacacaggctggggggcgcctggcagcccctcggaggcttgaatcagctctcacttccctcctttgcccctattttaggccctggaaaaatgctgacgctgcagaggcaacgggccttcttcccggacagcctgataggggtttcaagttctcttttctccttcaagaaaattttccttaaaagagattggcttcccagtaaacacagatgtgtgggggtgccggggtgagctgctgggtgtagactaggtaataaacatagtgactaactcttactgagccatttatttggtgacaggtgatgttctaaagtcttcccatgcatttaaaatgcctaacataccaatgagtgggtacgatgattgtccctgttttataggtggggaaactgaggcatggcacctccccatcccactgtgctgcagaccagatgtccattggtgggagcgggcacaccaggagattcttgggacctctctaactctgctgggctaagatcctacatctctttttttttctttcccatatgaattaagctgaggacttggccgtgaacattccattcatttgtttcttcattcggtggtagaaatacgtccactttgtacacagggttaaaagagtccattcctggggagtagaaagatggcatcacagcagggaagactgaggcaggaggctgaggaccccagggggacagaggcctgggtgagaggctgagcaagctgcaagccccctttctcagaggagggacctcctggacatcagagacatcagtctgtccctgagcaggttgagggttaggagctgagcaaatgaccagggggcaggggctcgttcaaggtggtcccttgatggcacagcaccatccctgccaagctaccacccatctcagagtcaggacggcccaaggggcgcatcctagacctcacttctgtctgctgtccctctctcccaccaggtcagggaatcccagtgatagagcccagtgtccctgagctggtcgtgaagccaggagcaacggtgaccttgcgatgtgtgggcaatggcagcgtggaatgggatggccccccatcacctcactggaccctgtactctgatggctccagcagcatcctcagcaccaacaacgctaccttccaaaacacggggacctatcgctgcactgagcctggagaccccctgggaggcagcgccgccatccacctctatgtcaaaggtgaggagtctgagcctcctcccaagaggcctgacccggcaggccccactacaatgggccctaaaattaacaatcgtaacaattcagctctgcatttactgagtgctggctatgagcaaggacctggaagagctgctaatgtaatgcagtcctcacaacaaccctgcaagtcgggtctatgatgatgcattttctagaagtgcagggaggttatccaaggtcacacagcctcacatagtgggactagactggagcccaggtgcgcctgactctggagccaccacgctgaagcatccgctgaactgtcctggcgtggtgtgacctcagatgaatgatcagcctctctgagcttccttgtcacctatgtccaggtactccttggcccagtggagggagggcagttgtaaccctgtgccctcctctactctagaccctgcccggccctggaacgtgctagcacaggaggtggtcgtgttcgaggaccaggacgcactactgccctgtctgctcacagacccggtgctggaagcaggcgtctcgctggtgcgtgtgcgtggccggcccctcatgcgccacaccaactactccttctcgccctggcatggcttcaccatccacagggccaagttcattcagagccaggactatcaatgcagtgccctgatgggtggcaggaaggtgatgtccatcagcatccggctgaaagtgcagaaaggtgcgtggggcatggggaccggcagccaggcctgaagagtggggacagagagccggcggccacatgggtggtgactggggactgggtgtgatggggggcagtgggatgtcctctttctttcacttcttcccctcaatggttccacgatcatctatggggcaggactgacaaggtgtcggggcagggagacaaaccacatgtgagcaaataactcagtgggcaaggtcatctcaagtcattggacatgctacaaaaataaacattcaacatggtagctgaataaggagtgtgtagggcggggagcctcactgagaaggaaacactttattagagcggaaatctgaatgacatgaagaaggtggctgtgcaaagatctgcttcagcagggggacagtgagtaccaagtggtgaggtggggacaggctctgaatgttctaggtatggaaagaggacggaagctcagcctcagacatggatttcccactgggggcctgcctaaggccaagtgctgggcatgtgtaggagggatgctgagccaagaggcagggaggagatggtgggtgcgtgtgatggctctcgcggtggccaggtaacagtggaggtggagtctcaccctgctgggatggcaggcaggattctggtttctgggaggactggtgagagcaagcaggaccccagcctgaggacctgggcttgagacagcaatcagtccctgtaacaagggccagggtcagagtgaagcagctagcccaatgccactgggatctgaagccactaaacctgcccagggggtcaaaggaccccagctgtgtgggcagaggaggccattagggctctttcctggcatttcatcctgcagagccctgggctggccaagagccaaaggtcctgggccctagttctgccttgacaccccctcagggaccttgggtgagtcctttcatgtccctgggccttaggaatctggattagattatctttcaacagcagcaatgggcataaatatgaattcaaggcctactgtgcatcaggcatcttgctggctgctggaatattcctgtcacggatttgacattcgactagagtctaactattaaatagaaagtaaatacaaatgtgatgagcaagaaaccaagctggggagtggcgggcatggaggtgctggggaggctaattcatatcagctggtcacagaagccttgctgaggaatttttgagctaaagatctgaaggatgagaacagcctcccatttgaagtgtgggaggaaaggcattccaggagggaaaggtgggtgcaaaggccctgtggtaggaaagaggtccagcgggctgcagtgcagtgaacaaggggtggggttatcagggcggtcagaaacaggttgggctgtggaaggactttgacttcttttctgagagtaatgggaagccccaaatgtttacagaggagagaggcatggtcccatttatatttgtaagaggtcactttagtgaagaatctaggtgtggggggcttggagggaggcagggaggtctctgaggaggctggtgcagaagtccagagtggagaatggtgacgggactggggaggggtagaggtgatggagaaagtagactttccaaggtctctttaggacaggccttgcagtggggggactgggagcatcaaggctgcctcccaggatttgggatggggcagtgatggggaccctggcctgtgtgtcctggcccatggcagggaggagagcaatatctctatcatgttcagggagcctgggtgttcaggggtctctcccccggtctcagtcatcccagggcccccagccttgacactggtgcctgcagagctggtgcggattcgaggggaggctgcccagatcgtgtgctcagccagcagcgttgatgttaactttgatgtcttcctccaacacaacaacaccaaggtcagtccctgcagatcacaaggtgaagtctggccatcctcccagcacaccaggtttcccatggtggagtcctgggcccccaactccaaactggctgtcttagctgaaggcacagctcagactccagagaggggtgcagactcacccgagatctcactcccagtcagtagctgacacagaatcaggactcatgcttgtgccgctgaactttgtgggggtgggtggggggaggtggttctctgtcaccttgacacatggcctttgccccagcctttagacaaaagccagaggtgagctcacttctgatttagcaagggtttcctaggccaccattgaagcccaggaatataacagctatttcagaaagacattgggagagagggaggaggagggaggattccaggagggactcacgttgggctgcctctaagagccccctcccttcccactgcacctgccgtgttccagacacagccctaagccacttgcatgcatatctcatttactcctcactacagtcttggggcagggagccagtattagccccattttacaagtgaagcaacaggctcagaggaaaggcagatagtaatccttaaaggctgaggattggaacccagatctttctaatccctaaactaccttggtataacatctccattccttctggctgcagctcgcaatccctcaacaatctgactttcataataaccgttaccaaaaagtcctgaccctcaacctcgatcaagtagatttccaacatgccggcaactactcctgcgtggccagcaacgtgcagggcaagcactccacctccatgttcttccgggtggtaggtaagcatcagggtggtggtggacagtcggtagggatcctgcaggagtgtgagcagaagggttttgaggaggaagctgatgtcagggaaggagacctgctgaggatatctctgctggagtttgtttatccaaggcctggctaaggagccactctccaggagctttcccttaccctctcctgggatctctctcccatcttggagctcttacagtgcatggctgcattgggtgcaccttagtgccattttttgtttatttggggattggggtccagtagctccctactggacttcatttgttcattctttcatgcattcctttatggaaacatgaaaagacaatgatcacccagtgattatgggggaagcacaaggtgtcctgggaacactgaagagtccccccaacccaggcttcgagaaggtggcctctaaactgggatgggaagaatgaaggtgagttggccgggcagaagggtgggaaaggaaggggaacagcgcttctggcagagggaggaacatatgcaaggctcaaaggcaaagagaacatagatcatttggaacactgaaagaacttgacaacagctgggatgtggagtggtgtgaggagtggccacaggggagcagaggaggtggcagaagccggaggtaaaggtgtcttaaagtgagaaagaataactgcatcttaacctattgggaggtcattgtaaagaggagagtgatggggtcagattgtacagaggaggcacttcgtggtggtcaggagcacacactccagggcagtgttccaacctgagtctgccaaggactagcaggttgctaaccaccctgtgtctcagttttcctacctgtaaaatgaagatattaacagtaactgccttcatagatagaagatagatagattagatagatagatagatagatagatagatagatagatagatagatagatagataggaagtacttagaacagggtctgacacaggaaatgctgtccaagtgtgcaccaggagatagtatctgagaaggctcagtctggcaccatgtgggttgggtgggaacctggaggctggagaatgggctgaagatggccagtggtgtgtggaagagtctgagatgcagggatgaggaagagaaaggagataaggatgacctccaggtctctggctatggtgattgggtgcaggcagtggcagtcactggactcagaccctgaagcaaggcagcagctcatcggagtgggagcaggctctgagacatttaggtctggccgtgcctcatgtgttgaatgttatgggagatggaggtggcgaggagcatgagaatcatgagcatcactgcccctagagtatgtgcaaggcactggacttgcagcagattgtgagctctgctgtggaccccaatctgcactgggagctttggcagggtaaaggggaagaagagcaaaagcacaagaattcagttacggcttctaatcctgtctgctttctagtacaggcatacagtcatcactcaagaaatgtttatgttcattcacactttgggccagacactgttctagacatcgaggatacagctgcaagtgaaacagatacaacaacccccgactcatgaagtgtgtgctctagctgggagtgggcaagcaatgagccaagtaaattattaaaaaaacaaattatatagcatttgcagcttcagatagggtgttcaccaaggaagatctcactagaaagctgatatttgagcaaaggcttaaattgctgaaggagcaagccatgcggccattttggagaagggagctccatcctgcagcgggactgtgcttgccatgttcaggggacaagtgggccagtgtggctgcggggagagagtgagaaaaaaagtggtctcagatgaggtcagagagctaaagtgggaaggtgagatgaaaggaggctaccgcagtggtccaggctggagctgatggtgggtggactagagtggtaatggtgaaggcagcaggaagttgttggtgtttggatggatgaatggactaatggatggatgaataatagatagatggattgttgagagagacagagaagagaaaagccttgcccccaaaagctcacagactacttggagagagaagaaagctacctggagggagaaccagatgcatgaagcagtgcagatgtggtgcctaatgagtgtgtagtctggaagggcagcaaaagtcgagtggagtgagaggttcctgtgtcctggagcactgagtagagactccctcatgggggtgaatcttaaaggataaaggggcctctataatgaaaaggaggaggatgggatttctggtagaggaaattgcttgagcaaaacctccaaggttggaatgactatggtgtgttcagggatgttaggagacccagatgggtggagcgttgagtgtgtgtgtgtaggaaggaagaggggaggtggctggatgagcacagtgagacctgatttgattgagagccttgaacgccacgctgaataatggaggcaatgggactccatagagggcttttgagtagacatatatcagtgtagaagggtgaatttcagatttttagacagaatagagtaaggagaggagctcttagaaatcatctagtccagggcttgtggcagagccctgaggttttaagaaggcatgtcaggggctaccatgacaggcacggagaggctgagtgaattggggttcttgccacaattcccttgcctgagattcaacaagagcagctgtattacaatctgtgcaaaatgtcattaggagaaactagttagtagctgggcgtggtggcatgcaactgttgtcccagctactcgggaggctgaggccggagaatcgcttgaacctgggaggcggaggttgcagtgagcagagactgtgccactgcactccagcctggatgacagagcaagactctgtttcaaaaaaaaaaaaaaaaaaaactagtcaggactctttcagatacaagtaatagaaaccaactcaaactggcctaattaaaaggatttttttccttatagctaaaaagctcatggatatcagcttcaggaacacttggatccaggtgttcagctgatgctggaaagaatctatgactccccaactctcagccctgccaggaaggctttccccttgtaggactccgactatccgccttgtagtatctgatccagcaacaccagtaaaatgagggcttctcttttcccagagtcttaacaaaaatcatggaattgagtgttatggactcatggattcatggtaacccaaaccaatcaccgggccagaggggacagagtaccctcactggttggcctgggttacacacctactccagagctatatttggaagccgcattgactaatttatgaccagaagaaagggaaatggatgaggacacgtgaaattgtgtgtgtatgtgtgtgtgtgttttcttgctgccaaaaatttttcaaaaacttggaaaatcacagatatattcaatctcttcattacacaaataaggagatggaggcacaaatggggatagggatttgcccaggttctcctagggcttcagtgagaaaagttttgatccagggattctgaagggggtggtgagaagaggggtgtcagaggacctgtcttgggtggtggggactatgtacctgtgacatagctgctcagggactggatcaatgggtggatgacaaaatggacaaataaacaaggacatcttcccactaatgccagatgcttgtgtgttctgctttccagagagtgcctacttgaacttgagctctgagcagaacctcatccaggaggtgaccgtgggggaggggctcaacctcaaagtcatggtggaggcctacccaggcctgcaaggttttaactggacctacctgggacccttttctgaccaccagcctgagcccaagcttgctaatgctaccaccaaggacacatacaggtaccacttatcagctcccgtctacacagcccgacaaccagatggggtatgcttcagcaagcatcaggacgcttggctcatgtcccaaccttggtgtatgaccttgagcaagtccctgcccctttctgggcttcgctttccctgacttcatggaatcccaatattggtcatctgtgtttgagatctagatgaaattgacctacctctccatcccacatccttgggatagtcaatgccccacccaaggattctaccatttcttgggagtgtgcattctcattggtccctcaagaaccctcagcctcattcattttcctctcttggggccaatccaaatgcagaaaacagccccactcatagacacactcctgataatgactgcacaagttatctgctacatacaaaagcttggagggaggggaagagggaattaagatcacacaatcacagatacatgaaatgttctttaaaggattgtgatcacccagccccaagaatttctcactggctgctcttctctgtaagctcaaaactcttcccatgaagtgcaatctataataactccacacccctcttcttccgtctctccactcccacaatcctgtgtattccacacacattttagaaatctttttcctgtctgcttgtgaactgtgttcttggggtcttgctttctcatccaaagtggcttaagcaggtaggttctaaataagaaagctttgtgcctaagaggaacactcataccaggtatatcaggtattaactcaggtattaaaatagttccttcttttctttctttttattattttttttagatggagttttgctcttgttgctggagtgcaatggcacaatctcggctcactgcaaactcggcctcccgggttcaagtgattctcctgcctcagcctcccgagtagctgggattacagatgcccaccaccacacccagctaatttttgtatttttagtagagacagagtttcaccatgttggccaggctggtctcgaactcctgacctcaggtgatctgcctgcctcggcctcccaaggtgctaggattacaggtgtgagccatcgtgcctggcctgaaataatcattcataccctgccctttcagagggagacagtacagcttaagggcagcgaatacgtggtgtgcatgccacactcactctcattcttgtttctgcaactctgttctgcagagtgtagatgcggcctcagagtcctcctcaacacaggtcccaggcagtatttccagcatagttggctcatgagagatctgtttgtcatccctgtgtggatcccttagacaacttcaaaactctttgggattctcgttctagctctggaagcccaaacctcattgattcccacaatcttgcttgtcaattgtcagaagcaacaaggatgttttcttgtcctcatcttcctcctctcagttcccttctggtcctttctggccaggtctctgtcttcctctcatttaaagcagaagttctgaatctggaatgtgtaggccctttggagggggctggtccatggatcggtttaatgggtccataagccacagagacattgaggaaaggaacacgagatcccctaaaacacagtagtctgggcccattcagcacaaggcagacaagcctggacaccaaacagccacagaattttagttcatgtgatgggttgttcataatggtgactttcaattatccaaaaaagtcaaattatttttagttaaaggggttagttatctcaagaagtgacctgggcagaggccttgtatatgcccagggtctggctggatgagactgctctctgaataccatagattttagtctagtagtagctgcagacatttcccaagcaagaactggccatttgctataatttttaaaattttatttattttgacagtgaactgggggactttttaaaaaatgtatttattacctaaacaacacatgttcattatggacaaattgtaaaatagagattaaagaaagaataaaacaaaaaatttcccagaatcagccaaagatgatttttattgttagtttttgctccagggccttttctgtaataaagggtaccattgaattgagtgcccacaaagattcaacttctgtgtcaagcaccctaaaaaggtcctttaatcctcaagccaagcctgtgaattaataaccatcgatatcactctcacagcaaaggaagtgagggatcagagaggttaagtacttgtctaagatcacacagccaagaaacagcagcaccaggacttgaaccccagtctctgcagcaacatggctcagaacccagggccctacatcctgcctcttgtctctttctcagtccctcttggcaaggttggcacttcagggatttgtagcagggattgcagctttcatgaaagcttagtccagtgacagtggtcaacgtaggcgacctgtgataggcctcccagcaccttgaagacatcacctctattaaacctcgggaaaaaaacactttcagataagaaaaccaactaaggaaatgggattggtggtttttgcatgtctcaatggcaccctgtctgagtatctggcttacccaaggccgttgggccctgaatattttaccaaaaataaaataaacccctttaaggctgttatctgactgcaatcctggcaggggccatactaggctggggctcaccaacaccacctgattctctcctgcaggcacaccttcaccctctctctgccccgcctgaagccctctgaggctggccgctactccttcctggccagaaacccaggaggctggagagctctgacgtttgagctcacccttcgatgtgagtgctggggccgagcgccacctggggcggaggccctgggactgcctggagggatggggttgactggggcagggcacagggaagtaggtactgggagattgggaggtggcggggaaagtgtgacttggggcctcctcctttcttcctcagaccccccagaggtaagcgtcatatggacattcatcaacggctctggcacccttttgtgtgctgcctctgggtacccccagcccaacgtgacatggctgcagtgcagtggccacactgataggtaagtgggctccactcacctccctcacctgggctcaggggctgggcaccctgtgagtgggagggacatgctggcgctgggaaccctgaagctctgagccacattctgcttttgccaggtgtgatgaggcccaagtgctgcaggtctgggatgacccataccctgaggtcctgagccaggagcccttccacaaggtgacggtgcagagcctgctgactgttgagaccttagagcacaaccaaacctacgagtgcagggcccacaacagcgtggggagtggctcctgggccttcatacccatctctgcaggtgagagggagccttcgcacccgcaccgcccccccgcccgccccccgcccctgctcctttaggcggctcctcccccaccccccaccgagggagctggggttggctccacctttggagcagatcctagcagtaccaaggtccacctctctgggccagtccaagcccctcctgcctggcaggtcccccgaagcagtaggacggggtagtctctgagaaagcagagagaaagcagcctgaagaaactggcccccactcttgtccctgcactctaactcatgcatctattcacaagtatgtgcaggcattatgcaccgtgtgccagggacgtgccctatgcagggaagcagtgcctccccagagctcagaggctgatgagggaggcaggcaatgagcaaggaaacagtccatctccagctcggggccagctaaggacggccttctccaactctcccctcttgctccagacacagtctatccatttgaggttgctgtgcaagaggctgccccgggggatgatgcccggccctgtgcacaacacaggctgcctctctgctttacacaaaggctccttaccagctagttctgtgattctcagaggcccacagcatcctcaggcttttgacaaccaggctctggcacccactgtgtgccagaccctggcatctgcctggctcaggggtggtcactcacgtccccagctgctggccttggagcaactgctaccagggtccagctgcaagcaggagcctgcggccgcgctgggcctcactgctggaggttgtatattataataaagccaacattttgttgaaggcttctgctgcgccaggcactgtgttaagctctttgtggggattatctcgattaactcctacaaacctaggaaataaatagaattttccctaggctcaatgtcacacagctcccaagtggcacaggtgaaacttgactgcagatctaagttactgatctgagcaaggaagtggaaattatgttctccaaaacatcactagaactagtagtatagattctgggaagaggagactcaggggccacaagcctggcttgctagaccctcagaagggctgtatgattccaaaggcatgtggagaagctgcaggggaaatgcaggagaggaaggttgcagtgtgacctccagaaggcctttctgaacgagcttcctggaggtgtagtgcatgcaagccatggctgggcaccaggccaggccgctgcagagaggtttcttgcactggcagagggtgagactgcatgaccccagaggctccctacccccagccacaggaggctgtgactctggacagggtttggggctgggcatgagcagagctgaagaggccgtcctctctgcctttctcggggagggtgtgcaggagaggctccagaggcttccagtggaggatgcttcattcagtcaacaagcatttattgagcacccactgtgttccaggcagtgtgcaggcctgacctcagggggctcggaggcacccctgcctgctcactgctttgcttcatgccttccaggagcccacacgcatcccccggatgagttcctcttcacaccagtggtggtcgcctgcatgtccatcatggccttgctgctgctgctgctcctgctgctattgtacaagtataagcaggtgagccggagcggagtggggctgccaggtgcctgagtgagccagatttggatggtacccccaggctgcatggattcacccttcctcctcctcagtcagtccatcagctaacagctctttagtgggtgcctactgtatgccaacatgagtcagctgctgggtggcctctgaggctctgccctaatagcgtttactgtctagtgcgagagacaggtgctaatcaaatagccattaaagcaagggcacacctgtaatcccagctacttgggaggttgaggcagggggattgcttgaggccaggagttagggaccagcctgggtgatacagccagatcccagctcaaaaaacaaacaaaaagccgtgaaagcaagagcatggattatagagtgagaggctatgaggagaggaatggcattctgaggcagcgcagccctgggatcctgtctcagcccaggggtgtcctggcacccagcacggggcagaggaaatggatatacaagcgtggtgtcccctgggccaggcctgagccctgccctaagaagcacatggtctagtgaagacgagggcctgtgaccatcatcctcttcattatttcatgttactgtcctattagccaaagccacaatttagtgcatgttgcgtatagtgtgcttcctgtcactgtctgctcagtatatgacagtgatttgaggggcatttttctatagcatgttacctacatcatctcatttaatgccctcagcaaccactgtatgcagctagcattagtctgttttacagagttgtaaactgaggttctgagaggttgggacagttgcccttgtctacagctggtcaaaggcagagtctggtttttaaccctgaaggaggactcactccaaagcatgtcccaatcattatgtgaaacattgactcatcttattttaccctcacaagaagctggaggcaggaagtatactagtcagtatcttacccatcaggaagctgaggctcagcaaggttaaaaaaaaaaaccccaaggggctgagggatagggttggcactgggccccaggggcttctgtccctagagcccatggcctccactgcctgcctgcccacacaaagaccatgtgcaatgtgatcagaagctgagaggaccaggccagagggctgtgggagttcagaggtggacggacttttcaggctggtgggtaagggagactgcctggaggaggtggcttggcattggtgggacgggctttggaggatgaggatgcagcaggggagatgacactaagggaaagggtacctctgggggagagggcagagtgtgcagaggtgcaggtgagggaaggaccagggtggggttgggggtctgaagggttggaccccaccctgtcggtccaaggccatcagtgggtttgaacaagggagtggtgtgatcaaggactgaatgacccatcttgtgtccccttggctaccttttcttccccacacccccttggggcttttgtgagaagagggcttgaagtgggcagggtgggaaggatgttgggggagccccaggggcacatggatcgggatctctactcctgccagcactcagcatgagaaggctgctctgagggcagccccggtcaatacctccggatctaggtccagctctgacactgttttgccatgtaacctcagctgactcgctgtcctctctgggccttagtttcccctcttataccatgggtctgggtgttctctaacagcccctcctcctctgacatgccaagagcccactggtggtctagtttaagcaccagaaacttggacttcagtgaatctgggtccaaatcctgcctctgccaagctctggctatgggatgatgagaaagttggtgtgtctgagtctcttctccatttgtaaaatgggatcattaacagcctgttgtgagggattccgtaccacaacgcacatagaggactgagcggggtgctggacgagacagtctctgtgatgggagctgcacactcttgtcccaggaggaagttcgttggggaaccagagttagctcatgcctcttgggatggtggaaggagggggaggtctgaggtcgggcatcatctccttgactacacacccaaagcggttgtttggcccagcccacccacctccagggacaggaccttactcactctcggggccacctgttccttctctgagcagctccaatgtttgcaaagttcttccttacatggaactgaaaactgcctcgcagtgcccacagagctgccaggacagtcatgcagagattccagagaagagcctagggccccctgcggccctttctgccttgggctggccagcccccttggctgtggtttaggaactctgtatcccctctccacgggaccatttttggaacatgtcacctccacacttcctgtccaggaaattcagctgcccctggagcccatgcaaggctgcgagaagacttgcagctaccctcctcccctacacccattcacagaccctttagctccaggccgaggtgtccacccatgggagcggagggggcaggatggtcatgcccgtgctaagtgcctgccctcccatcctcctctgccttgccccatgaggttcggagccttgccccttcactggggactcagcccagcctctcctcattgcccaggcctggggaaagaagtggcctgtctgtggggagtgtttgttctgcctcagggctgaatcatcacctttctgtcccccagagtgaccacaaggggggccgtgggggaagagaaaagggcaggagtcagcaggctcccctggaggaggaggcgcacagggaaatggctgaggcagcagggaagggagggtccagggaggctgctggaaagactacgattctgggggctggaactgagctctgaggagcaacaggagggtccccaaagattccactgggaattgttcagatctccaccttcctgggatggagaacatccactcacccagaaccagcaggcctagatggggaggggaccgggactttgtctccatgccccctttggtggggaggatgggaggaagggaagaagtcagggggtgggcctggggcttaggcccattgcaaggaatgaatggggtgatgtgcttcaagcatctagcccagcgccccactcccaggaagagctcaggaagaacccgctgccatcatgacaattacgtccacccttctcagggagcctcgcccatccccacctcttgatctctcactcatagttctttggaagagaggctgcctctgggtagacgcccatgagccctttccagggatggcacaggtgccctgggaggtttacatgcccagcaggggcaggggagggttcctgaggcaggcagaaggcagcttggtccgcttccagaaattaggagcctaggattcagaaatctgagaatccagccaaacctccatcctccttgatcccctccctttcaacagtgccccctgcccagctgggggcagggaggggctgactcagcccagctgcagagggacagaggaacaagaagtggtaagaaaaaacagtcttagccacagaggctcctagagatggaagtggccaggagaggctgaagaatcccctccttgccttgttgctgtcttttgggctgggaaggcacccacgggcaggatttggatcctcagaggcttgggaagttcttctccctgggtcccgtttcagactctctcccaagctataacgcagaggctctgaagttcacctgcagtccgcccttccgaatcagagcctggaagttagttccttctcatttctaattgcagtcttttctctctaactaccagctagaagttcttcctgatggttagctggaagctttctccctgtctctctctttaaaaatgtccacattttatttttgattcaggggatagacgtacaggtttgttgcatgcgtatgtttcgtgatgctgagctttggaatatggatcccatcacctgctactgagcatagctcccatagtttttcaaccctcgcccgcttccaccctccctgctctagtagcccccagtgtctgttggtgccatctttatgcccatgcacactcaatatttagctcccacttataagtgagaacatgcggtatgtaggttttctgtttcggtgttaatttgcttaggataatggccttcagctgcaccacgttgctgcaaaggacatgactggaatcttctctctcaaccaggacttgcagctaaaggccagcctcctccctagcaccggtccacacttcctttaagtttctagctcgggtgcccagggaaggagcccagctgcaggcacagccaagcttgtcccatccccaaggcctggccggaaagagttgctctgctgacccagggcctcagtgtcctccaccgccccagcccagcttccactttccccctcaacttggtcttccatcagcatttcttgtgggcaacccttagcatggtactccccctcagcagctgacccctgggcaagaaacaggggcagccattcctcctccccacatcccagggcttgcctcccctggctgggtggtaacagcatggagagcctaaggaaggaaatcaggtctttccaaaggtgctggtcctccagaatctatctagtgggcagcgtctctctttctctctcaaaaaggtaaagtcaaggctgggtgcgatggctcacgcctataatcccagcactttgagaggccaaggcagaaggattgcttgagcccaggagtttgagcctagtgagctatgatcgtgccactgcactccggcatgagtgaaggagcaagactctgtctcaaaaaaaaaaagtcagatggcgactcacctgtgtcaaactctcagggtctctcactgcccggccaggcatggtagctcatgcctgtaatcccagcactttgagagaccgaggcaggcaaactgcttgagctcacgagttcaagaccagcctaggctgcgacaaagccccgtctctacaaaaattagccaggtgtggtgccacatgcttgtagtcccggctgcttgggagactgaggtgggaggattgcttgaacctcgggggtcgaggctgtagtgagccaagactgcccccactgcatgccagtctgggggacagagatcctgtcttggaaaaaaaaaaatcccaaaagggaacccactcaccttatcatagccctcaaggccttcctgtttctggaatctgccccccacttccctcaagccatgatggctgccttcctatagctcaaacttgccaggatcattcccatgtcaagcatacagcatttccatgcactgttcctggaaaattcttcctctgatggtcacatggtgggctctttaggggccttccctgacttatcttactttattttcttcatagcaccacttgagaatctcctagatacatgtttatttgcgtttaatgcctctctcagccactagaatgcaaactccatggaggggcagggactttgtcctgttcaactctgaatcagcggtgcctgacacaaatagatgttcaagaaagtatgtggatgggctactattattcagccttaaaaaggaagggaattctgacctgtgctgcagcatgaatgaaccttgaagacattatgctgggtgaaataaggcaatctcaatagacacatgctgtgtgagtccactgaggtgcagtgcctagagcagtgcaattcacagagacagcagaatcatggttgccaggggctggaggagggaaaggggagttgctttttaacaggaacagaatttcagttttgcaagatgaaaagagctctggaaactggttgcacaaggtagaatgtaatttacttaatactactgaaccatacacttaaaaatggttgaaatggtaaatttcatgtatgttttatcacaattaaaatatatatatatatttggatgggaggttgggtgggtggatggatgggtagatggatggacagatgaacggatggataagatctcaagttccaccctccctcctggctcaggaattaccagattatcagagatatcagggccctcagaggttgtcttgtccaaggtcttcaatacacaaatagtgaaacaggcttggagaagggaaggtcacacaacaaggcagagtcaagcaggaacatgctctcagtgctatgttcatgagacgacctctctcagcccagagcaggccttgccctgccttctcccactgggcgccttgggactgcccacacccctgctcttgggggtcagaaacaaggtccaggaactgcctgccagccccgactgccacgtgctcccttcctcttctgcagaagcccaagtaccaggtccgctggaagatcatcgagagctatgagggcaacagttatactttcatcgaccccacgcagctgccttacaacgagaagtgggagttcccccggaacaacctgcagtttggtgagatggcagctcatcactccacagcttcctatcacagggcctgtgggggttgcagggagcccatgggcccttggacagaggccctttggtgcccagggacttaagggacctgtgtgcgtggcaggtaagaccctcggagctggagcctttgggaaggtggtggaggccacggcctttggtctgggcaaggaggatgctgtcctgaaggtggctgtgaagatgctgaagtgtgagtgaggggaggggatgagggaagggatggggggtggtagatgctgggggtgggctggccctggtgtcacaagaggcatcacacacatttcaacctgttgaagcctgggggacagagctcaggggtgaggacttgggttttcttgtgagctccaggcaccctctgactcccggctccaagaaggtctaggtcaccctttagttgtgaaggggctcctgactgagctccaaaaagtctgggggtgcagaaaggccacctatggccatggcctggccacagtttggcttcctgtcacctgaagaccagctcagtgacaggctcatccctcctctctctctctctgccatctgtgtgtctgcatttttccttctccttcttttggcttctggtcactccgggtcttggggtatgccctgctttctcccctgggtctctgcatttggtccccatgtatctgtgtggtgctctctgtcctgccctctccctgtctttgggactgtggttcttcctcccagccacggcccatgctgatgagaaggaggccctcatgtccgagctgaagatcatgagccacctgggccagcacgagaacatcgtcaaccttctgggagcctgtacccatggaggtaagggccttggggttcctggggccaaggtcttggggcctctggggaatctcagggccccagggctaccttgttccgtcttctccttctcaggatcctactgctccaagtgtcagggggatcccggtcacagcatcccttaaactcctgggcccatctcctggaatagtcaggagctgcacgggcagcttgaggtataaagagagactgatagggagcatcggagcccttggaggaggagatgaatgtgcaagctcctaggccctgcttccagggagccggatcctctgggtctggagtgaagccccccgcctacctcttatgaagcttccattcaaggatgcttggacactctccccagggcccccaaaggtgccccgggctttgctgggactccaagtgccccacatcctcttcactgatagcagctctgacctacagtgagccgccatagctttcctttgaagaaataattcttgggctacattttttttaaggttgtcttttttttttcattttttgttttttttttcttgagacggagcctcactctgtcacccaggctggagtgcagtggtgcgatctcggctcactgcaacctctgcctcccaggttcaagcaattctcctgcctcaacctcctgagtagttggaactacaggcacatgccaccatgcccggctgatttttttgtatttttgtagagatggggtttcaccatgttagccaggatggtctcgatctcctgacctcgtgatccacccaccttggcctcccaaagtgctgagattacaggcatgagccaccgtgccccgccaaagccatctgttttaaacaaatggaactactgaggcacaaggaaacttgctcacagagccgaggttagaactcagctatgctgagtccaagtccagtggcctcactgcccccagtctcatgctcctgttcatggaggggagcactcagcacctccctcaccccacacccttggctgctctaggccctgtactggtcatcacggagtactgttgctatggcgacctgctcaactttctgcgaaggaaggctgaggccatgctgggacccagcctgagccccggccaggaccccgagggaggcgtcgactataagaacatccacctcgagaagaaatatgtccgcaggtagcccctggcaaaggacaagaaaaaggccaggtctgggaggcaggatccgagtctgtcttcaaagccagctcagggttggatggctcatgaatgggtggctatgcagccctcacctgccacctgtgtcatgggaagtagccaccacaggttttatggccatctcttgtttctctactccttttccccttcattcaacaaatatttgaacacctaccgtgttctgggagtgtggagggcaaagatgggcagctcataatctggtggagatatgcatcaatgaaatcaccacccagtgtgtgtaaaagatcaaccaagatctgtgcctggagccctagtaagagatgggcagatgtggccgggtgcagtggctcatgcctgtaatcccagcactttgggaggctgaggcgggcagatcacctgaggatgggagttcgagaccagccttaccaacaaggtgaaaccccgtctctattaaatatacaaaattagccgggcgtggtggcgcatgcctataatcccagctactcgggaggctgaggcgggagaattgcttgaacccaggaggcagaggttgctgtgagctgagatcacaccattgcactccagcctgggcaacaagaatgaaactccgtctcaaaaaaaaagagagatggctctgttgtcctgttgctgtgattcctggaagccatccagaacagagccatccaacagacagagccacatggggaaccaaagagaggaagtggggagattcatgtcacacatgagtcagggttagaggtggagcctggactagaatcctgctctcttgacttccagtccaggagtcacccaagccacactgctgtcctggaggtctctgtctcaggggcttgtggggtcaggacaggatcagaacaagaagggtgtacactgcgccctcatcctagatactgtcagctgccacgcctggggaggcaaaagagaaggaggccatctcttcacccagggccttaaaaatgggggcctggcagcatcacttcctcttctgattccctgacacttctatgagggtggcacacactaggcctctgaagatcagatcaaaatgagcaccaaaggaaagtattagcttccatcttcaaatacgcagatggggaaagtattcccagagtgggtaatttcgagggcaaatggcctgtaaaccaactctgtcaaaggattccaggctgttaacggaagcatagtttctacaagggagcggaaggttttttcggtttctccttctgggaacactagaatatggacattgtcaaggtacacatctctagcgcagaggggacaggagggagagagaaatcctatctggctggaacgttaggagcagtagtgcttcagtctacagtagtgcttctcaaattctctaccccaagtgtgctctcataggcatctcttgaggactgttggaagtgcaccacctcaggcccatccacccaggcctgctgattcaaaatctgcattgcagagattcccggggtgatttatctgcacatgagttgcagcgtaagcagcactgctctagaccagtgggcctcagcttaggctgtactttgtgatcacctggggagatttaaatctgtgaatgactgttttgtccctagagtttctgaagtattagtaattagcctgatcctaaaagctcccgaagtgattttaatgtgaagccaggggtgtgaggcactgtccagagaagagagggcacaaggggccctagaatatgccccaattctagtagggctgttatggggaagaggactccaacttctctgtggcccttgagggtagagcaggggctaggaggaaaatctcaggggtagattggcattaggaacagtgaagaactttctcacaggcagagctgcccaaaaccagaatgggttgtaagctccctcaccggggacagccgagcagagaccaatgctcactcagatggagtgtggcaggagggtttcttatcagaaagggaggttccagttgaccatggggtggtgggtggtcaaggcctgagctgagcagtgcagtgatgatgagtgacctctgccccccaaccctctctcctatgtagggacagtggcttctccagccagggtgtggacacctatgtggagatgaggcctgtctccacttcttcaaatgactccttctctgagcaaggtgaggaggtcccagggccaggccccatttgcttgataacaagggaaaaggagaaggggctgctggggtgaggggtggggagtgtggcagggctgccctgacgcctcttcccaccctagacctggacaaggaggatggacggcccctggagctccgggacctgcttcacttctccagccaagtagcccagggcatggccttcctcgcttccaagaatgtgagtaggaacctggccctggctcatagccacccaggtctgtgctccggggaggctggatgagtgacgatggggaggaggaaacgggagcctgtgagggggtaggggaggagacagagtatgagagagtcatttgggcagcagctgcaaggatgagtgggagaaagctgtgcccagggctggagctctggggctgggcacctgtgtccccagcgtgaagatgaggaagggtaccaggctttcttcattcgtttttactaaatagtgtatgagagacaacagttgtctctgctcataaagcacgcggtctggtggggatgataacggaagcttcctcagaattttggggatattagataacgtataaagtgcgctcggcctaggaagaagtgccagggaatgggagctcttgccatcttccttagaacagattcgggagtcagtggtttgattgttggctctgccacctgctccgtgactttaagcaactatttaaattctgtgcctcagtttctacacctataaaaatgggcataacgattgttgaaaagaaaaagggttcaatgtgtgcagagtttagggaagggcctggcagatagcagctgctatgatcagaagtaacggtagggtttggagactgctctctgcacggaagcccttcgcttctggggcctgagcagaccagtcagaggacaaagggtgagaagggccatggctgctcagggtaatgggggtttctaagcattaaatgatcagatcacgatacacattctcagatcctgggccctggtagaaggtatagacaagggtttgtggtaaaggaccaaaactgttgttcactccagcagggactccaaagccatgtggggccctccctgccatcctcctcacctcaggctcaggtaggagaaggcccaagactaaccctgcagtgctttccctcagtgcatccaccgggacgtggcagcgcgtaacgtgctgttgaccaatggtcatgtggccaagattggggacttcgggctggctagggacatcatgaatgactccaactacattgtcaagggcaatgtaagtgctgggagggcttgggccaggctggggagggggtgaagagtcggggcccaaaataactggggactgtcatcccaggcccgcctgcctgtgaagtggatggccccagagagcatctttgactgtgtctacacggttcagagcgacgtctggtcctatggcatcctcctctgggagatcttctcacttggtgagccactgggcccactccaggcagagcctggggctggctcctctggttgccccactggtggacaaagctgtttggtgcccaggacacagcgagggttggtgagagtgcaggaatgggcaagggctctcgaaacccagcatcgtggctcctgcgggactcggcagaccctctgcccctgacaggcgctcctttctggctcttccctcgtttgtctctgctcagttgctgttacctgttaccctcctttgtcactgtttccctcctttgtctgaaatctacagacccttgaagatgcagctctctactactaggctctagtagaaagaactgctatttcccgaggactaggcacaaggacttgtactcagttcttaaatacgctgctcctataccctcataaccacctgactgtccacactttaacgatacacagctgaagctttggtctgattccaaagcctgtgcaagaatgtttggtgtgataaggcctggatagaggctcacaccttcctaaagcctaagcctgccacacactggctggcacacaggaagcaccgggtaagagtagctgctgttgcagtgttgtcaagtgggaccctttaaacccagtctaagatgtgtgtgggtgtgcgggaatggggagaagacaatgggcatggcctcttacctgatcttggcctttgcagggctgaatccctaccctggcatcctggtgaacagcaagttctataaactggtgaaggatggataccaaatggcccagcctgcatttgccccaaagaatatgtaagcgaagggatcccagggagggaaaaggacaccccaggctttcgctggaaagggatggaaggccgtgtggccctgatctttccctgtccaaaatgttccagggtcagactttatctctcccatagtggacacaacaagccccttttgagttcaagctatgggggatgttctcagagaagcagctgttcactagggctggtcctaaccgaccacttttcctttttttttttttttttttttgagacagcatcttgctctgtagcccgggctggagcgcagtgatgtgtgcaatcatagctcactgcagcctcaatcttcagggctcaagcaatcctttggcctcagcctcccaaacagctgggactacaggtgtgcaccaccaagcccagctatttttaaaaaattttttagtagagatgggatctcactatgttgtccaggctggtctggaactcctggccttatgcaatcctcctgcatcaacctcccaaagtgttgggattacaggaatgagccactgcacctgtccctaaacagacttttaagagatcgttattacagttaccctgaggataccaaaatggcctcatctgtcagaatgagggtgatgagagtacccttctgcaagggttactgtgaggattaaatggtaaagcatgccaaggacttggcataggttttatactaaacttactttgactgggtttggggacctctgctgggtaggtctctctaggggtgtgtgttaatggcccctggaccctagggagctgcccatgggcatcctctgtcctatctcccagatacagcatcatgcaggcctgctgggccttggagcccacccacagacccaccttccagcagatctgctccttccttcaggagcaggcccaagaggacaggagagagcgggtgagtggggtgaggcttggggtgggtggccggtaaagcacgttgggctgggcctgatggatctggactgacagtttctggtccctcccaccctcaggactataccaatctgccgagcagcagcagaagcggtggcagcggcagcagcagcagtgagctggaggaggagagctctagtgagcacctgacctgctgcgagcaaggggatatcgcccagcccttgctgcagcccaacaactatcagttctgctgaggagttgacgacagggagtaccactctcccctcccacaaacttcaactcctccatggatggggcgacacggggagaacatacaaactctgccttcggtcatttcactcaacagctcggcccagctctgaaacttgggaaggtgagggattcaggggaggtcagaggatcccacttcctgagcatgggccatcactgccagtcaggggctgggggctgagccctcacccccccctcccctactgttctcatggtgttggcctcgtgtttgctatgccaactagtagaaccttctttcctaatccccttatcttcatggaaatggactgactttatgcctatgaagtccccaggagctacactgatactgagaaaaccaggctctttggggctagacagactggcagagagtgagatctccctctctgagaggagcagcagatgctcacagaccacactcagctcaggccccttggagcaggatggctcctctaagaatctcacaggacctcttagtctctgccctatacgccgccttcactccacagcctcacccctcccacccccatactggtactgctgtaatgagccaagtggcagctaaaagttgggggtgttctgcccagtcccgtcattctgggctagaaggcaggggaccttggcatgtggctggccacaccaagcaggaagcacaaactcccccaagctgactcatcctaactaacagtcacgccgtgggatgtctctgtccacattaaactaacagcattaatgcagtca

SEQ ID NO: 85 - DNA, 2042 bp, Homo sapiens
gcacataacgggcagaacgcactgcgaagcggcttcttcagagcacgggctggaactggcaggcaccgcgagcccctagcacccgacaagctgagtgtgcaggacgagtccccaccacacccacaccacagccgctgaatgaggcttccaggcgtccgctcgcggcccgcagagccccgccgtgggtccgcccgctgaggcgcccccagccagtgcgctcacctgccagactgcgcgccatggggcaacccgggaacggcagcgccttcttgctggcacccaatggaagccatgcgccggaccacgacgtcacgcaggaaagggacgaggtgtgggtggtgggcatgggcatcgtcatgtctctcatcgtcctggccatcgtgtttggcaatgtgctggtcatcacagccattgccaagttcgagcgtctgcagacggtcaccaactacttcatcacttcactggcctgtgctgatctggtcatgggcctggcagtggtgccctttggggccgcccatattcttatgaaaatgtggacttttggcaacttctggtgcgagttttggacttccattgatgtgctgtgcgtcacggccagcattgagaccctgtgcgtgatcgcagtggatcgctactttgccattacttcacctttcaagtaccagagcctgctgaccaagaataaggcccgggtgatcattctgatggtgtggattgtgtcaggccttacctccttcttgcccattcagatgcactggtaccgggccacccaccaggaagccatcaactgctatgccaatgagacctgctgtgacttcttcacgaaccaagcctatgccattgcctcttccatcgtgtccttctacgttcccctggtgatcatggtcttcgtctactccagggtctttcaggaggccaaaaggcagctccagaagattgacaaatctgagggccgcttccatgtccagaaccttagccaggtggagcaggatgggcggacggggcatggactccgcagatcttccaagttctgcttgaaggagcacaaagccctcaagacgttaggcatcatcatgggcactttcaccctctgctggctgcccttcttcatcgttaacattgtgcatgtgatccaggataacctcatccgtaaggaagtttacatcctcctaaattggataggctatgtcaattctggtttcaatccccttatctactgccggagcccagatttcaggattgccttccaggagcttctgtgcctgcgcaggtcttctttgaaggcctatgggaatggctactccagcaacggcaacacaggggagcagagtggatatcacgtggaacaggagaaagaaaataaactgctgtgtgaagacctcccaggcacggaagactttgtgggccatcaaggtactgtgcctagcgataacattgattcacaagggaggaattgtagtacaaatgactcactgctgtaaagcagtttttctacttttaaagacccccccccccaacagaacactaaacagactatttaacttgagggtaataaacttagaataaaattgtaaaattgtatagagatatgcagaaggaagggcatccttctgccttttttatttttttaagctgtaaaaagagagaaaacttatttgagtgattatttgttatttgtacagttcagttcctctttgcatggaatttgtaagtttatgtctaaagagctttagtcctagaggacctgagtctgctatattttcatgacttttccatgtatctacctcactattcaagtattaggggtaatatattgctgctggtaatttgtatctgaaggagattttccttcctacacccttggacttgaggattttgagtatctcggacctttcagctgtgaacatggactcttcccccactcctcttatttgctcacacggggtattttaggcagggatttgaggagcagcttcagttgttttcccgagcaaagtctaaagtttacagtaaataaattgtttgaccatgccttcattgca

SEQ ID NO: 86 - DNA, 26564 bp, Homo sapiens
caagggcgggagcctgctgggaagcacggccgcgggggctcgctcggggccacctgcctggaactcagcgcgaggtccagagttccctccggctgcgcagcggcgcacgtgccccgtggaaggggcggttcccgcaccccagaaggagggggcgcccggccgcgcggactttcccttttgcttacttcctagtcccgggcaggccggctcggaggcagcgagaaagcgcagccaggcggctgctcggcgttctctcaggtgactgctcggagttctcccaggtacgtcgtgcgctccccactcgtgtggtctctctgcaccccttcctggggtcgggtcgggcaggggcggaggggagccgcagcccggtcacgggctctggggaacccgggctcccgttcggctgcacctgggcccctagctcctgtccgggcggggatagcgggaagcgcaccaggcccccgggacgccggtgcttctttgcacggcccagcgcgggaatgtggacaccagcgaagccggctcaggtcggccctcgggagaagcaggggctacacggaaagggagcccgagggtcctgcagagcccgaggtcgggaccccgcgcgtgcagtgccaatgggctgcggctgggctgagcgcccttccaaccttgcaggccccgggggggttgccgcggagagcttccgctggggctccgggcctctggccgccacctccctcgggaggccgaggggggcggtggccccggcccggccctcccgcttccctcacggcctggccctcccgcttccctgattcccggtagggtcgctctccccgcctcctggcccctcttggctcggatgacaaagattgggtaaaggctttcaacgagctagcgtctggcagggggtgtgtcctcgctcactggttactgctaggacggagcttggattttggtcaccgtggctcagaggtgggaaaggttccgtgctctgggtctgtccaggaccctggctccctaacccaagtctgacctctgctccctggcaggcttcgccccacctctgcgttccttcattcttaggatgtgtgagttaggtctctgattagaaaacaacttacagcgtttaagcaaagtcgagtccttcaagtaagaatgctttgaagtgccctttacaacttcttcaacttctataaatatgaacttgtgtttagaacttaaatgcaagccaggaaagtctttttcctgtttgaaagagagagaaagagagagaaagaggtgattggaagtggtgggtgggggcggagaaagagaaggagagtaatctgggtgtagacaactcaaagtttgctgagatgactttaatcttttgactctgttattaagatttttaccaaagagcaactgtagctatggtggcctgacttgaagggacagaccaaacaaacaacaaaacacaaaacaaaacaaacaaacaacaaaagcaagagcagaaactattggaaaatgatttattcaccaatattttaaaggttcttcctgttctaagcaaggaacatctttaagttctttataatgtacccattttacatttacaaaaactgccagaagttgacagcatgttttgggggtttctaagctatcagttaattttttggggtacagttttattgataaactaacagagtagaaaaaatctaatggaatacccccaaatttaaaagagggcaagaaaagagagacaatagaacataaaacaaatgggacaagaataaagtacatagttgtcacagtcccttgggtgctgctgtaacaaaatacctgagactgggtaatttacaaagaacagaaatttatccattcatggttctggagtctgggaagtccaagattgaagggctgcatctggtgagggtcatctggctacattataacatgatggaaagcatcacatggtgagagagagcaagagaggacagaacttacttttataacaaactcattctcacaataaactgctcccttggtgataacattaatccatttatgagggtacagccttcataacctaatcacctcttaaaaggttccacctctcagctcgcagtgagccgagatcatgccactgcactccagcctgggtgacagagcgagactctgtctcaaaacaaacaaacaaacaaaaattccacctctcaacactgttgcattgaagatgaaatttccaatacatgagctttggggcacacattcaaaccatagcaatagttcaattactttaaagcccaaaatgtcagtaattatattaaatgcaatttaatacatcagtaactaaatgagatagactaaattttatgataatcagactaatattatcagactagacttcaaaacaacccaacaatcatatgctgtttacaagagacacatttatggatactaaaaggtataaagtgaacagatgcaaccatttatcaaaagaaagctgttgtggcaatattactattagacaaaatagaattaggaaaaaaatcataactgtagataaacgtttcactaagttaaaggtttcactgagaagaaataaaaattttgaatttataagtacttataacaacattaagaaactagaaaatagaaaaagaatagagccaaattgactgaactagaaaaatagaaaattcatagaaaaatccacaatcatagtgggagattttatcatacatctctcagtaactgatagaaaaaccagacaaaaatcaataaggataaagaaaatgcgaacacaatgtagttcacataaggaacctatactacttccaacagcagctgaaatcacagagcatacttaaaatctgaccatatactggctcatagagtaaattgcaatacattttaaagaatttaaatcatacagaatatgtcttctgaccataatgcaattaaagtagaaaagaacagaaaaacttatagaaaattctcatatatttggaaattagtaaatttctaaataacccatgggtcaaaaaataatcagaatgaaaatcagaaaatatttttaatgacttatgaaaaaaattacatataaaaacttgtcagatgcacctaaactgttgcttaaaggaaacttacaaccttaagtgcatatattagaaatgaagagtgacgaaaaatgaatgagcaagcaaataccttaaaaactggaaaaggaatagtaaaataaatccagagaaatcagaacaggggaaataataatataagaatagaaattaatgtgctagaaaataggggatctatcaagtcagaagttgattttttgaaaatgctaataaaaatgatgaacctctggcaagacaataaaagctggtacaaataactcatctaaggaataaaattgaggacctctcttttgttaaatgacataagcaggaggccattatcctgagactgtctctacactttgagttcttacataataaactgcaacctaatttagtatactacataaacaaactgaaacctaacttaggagctttttttttgtaattaatagctaaatttccaccaaatcataaatagccaagctttagccaatcacaggcagccaactgatcagactatgcccaaacaaggtaaatgcctattacaccatacccaaataaggcagactcctagctgaagccaatcaggtgattactatgctcttgtgtttggcctataaaagctcactgctcacactgttggatgctctctgaaacttttgtgaatctgagtgctgcctgattcatgaatcattctttgctaaaataaactctgtcaaatttaatttgtctgaagtttctcttttaacagtgtttggtgttgcaagcaggatccaaaggagacctatagtgactcccaggagctcttagtgaccaagtgaaggtacctgtggggctcattgtgcccattgctctttcactgctttcaactggtagttgtgggtaagttcctgctcagacttgagcactatacatttgcattttcagctctctgactttatttgagcaattctttgatggattggctccagaattggattggattcagtgaagaaactgaaactggactggtgctctaggaggcctcaagtagataaggttactagaagacagggaatcctgggcttatctggatttaaggagtctacaactccatctgcaactccagccgatttcatttataagaattatggaccaagaacctgtgcttttctagagaaatgtgtgagccttactaaaggtaacttagaattacaatggactgctgagaccagctcggtcgtggagaccctaacccagcagcgctagaggaatcaaagacacacacacagaaatgtagagtgtggagtgggaaatcaggggactcacagccttcagagctgagagcccctaacagagatttacccacatatttactgacagcaagccagtgataagcattatcgctatagattatagattaactaaaagtattccttacaggaaacaaagggatgggccgaaacaaagggataggctctggctagatgtctgcagcaggaacacgtccttaaggcacagattgctcatgctattgttgtggcttaggaacacgttaagcggttttctgccctgggtgggccaggtgttccttgccctcattccagtaaacccacaaccttcagcgtgggcgtcatggctgtcacaaacatgtcacagtgctgcagagattttgtttatggccaaatctggggctagtttatggccaggtttgggagcctgttcccacatgtcccccttttttgttttgcaaagcaataaaagcaaaggcagctttgtcacagtgagctacttcttgcaggagtcgggattcgcatatgcatactatacaaagacaaacaacacagattaaaagcacaaccatcattgaaatcacagagcttccaagtgtctttatctattttaatgggttaatcactgctaatctgtctgcagctccttcaagcactccagttcctggcattaaggtctggtgtgcctggaatgctttaaatatttgttcttttaatattgcaatatggaaagacaagtttgtagagtgtcttctaggtgcttttttattctttcctgaatttggtcttatttaagagccattaatagtttccacaaatccttatgtttagctcctacagcgggccatatcatttgagggtgaggtgccactataccatcatgtttccagataataggaactcttgccatatttcttgctatttctaccatctgaccattttgtttagaccagctaaacatagtgtggccatggcacgcagactgagaggtgcaatttaagctaaacatccccttaggggaccaatcaataatgattccataggaatcactgcgcagcacctctgcctattctgcaatgcaatcttcccaaacaagtatgttcattatttctggccaggtccaattctgtttacaaataggtttttgagggcaatatgcctcaattatagaaacagatttattatggtaaatactgagatcagaaagcatgtgtaactgtgtcatagaatgattacatccaggcattattgccagccaagattgataaatatgcccaataagtataattgttctctgtgttagcccttgttgaaggaatactaatggcaatggtgatcactgctatcatagctatcattaaattactcattgtgactggttgtcccactttcctcaggttttcttccaccctctatggcagtttcttgatctgtccccaggtagatggctgtgtttgatggttgttgctcgtgatagtttgggtcctcctcagcatcagtctcgacatggctgcaaccagagggtcctcgggatcctcccagaatctcttccttggcatctggctcatgataaggtttcaggtgtcttgatggtatccaaatcagctattgattctggcctggagaaacacaagcataacctctaccccaagttattattttacctatttcccaactttttgttgtcagatctctgcaccaagccagttgttctgcttctgtttttgcagctggtttctgtagatgctcttcagctgctgatagcatctggcctttaggcaggctcaaaaaatttaaagtcattaatgctagattcagttgtatatggggtgtcctgtaatccctgtttcccctttttgcttttgcaactgctgtttcagggagagattcattctttctacaatggtttgtccttgagaattatatgggatgccagtaatgtgtttaatattccatatagagaaaaatgtagctagagcttggctagtatagcctggggcattatctgttttaacagaagttggaattcctatcaccacaaaacactgcaaaaggtgatgcttaacacatgcagtctcctgattggcatgtagcccagacaaagtgagaaaaggtgtccacacatacatgtacataagctagtctcccaaacgagggaacgtgtgacatccatttgctaaagataattaggttccaatcctcgaggattaactcctcctgttaaagatgaggaatgcaccatttggcaagttgggcatcactggataatagctttagcttctttccaggtactgttatatctgcatttgagaccagaggcattaacatgggttaaattgtgaaagtgtctagcattagatattgcagtagcaactaggcgatcagccatttgattcccttcagttaaaggtcctggaagaggtgtatgagccctaatgtgagtgatgtaaaaagggtgcattctactcctaaatgctgtttgcaattgggtaaataaagtcatcagttgttcatctgtatgaagtcataactgagcattttcaattaattgtatggaatgaaccacataggaagaatcagaaatcacattaataggcatatcaaaagcagtcaatacctcaattacagctaaagctccactttttgagctgaagtatagggcgtgtgaaaaactttaccttttgatccagaataagaggctttaccattacaagacccatctgtaaaaacattctcagcaccttcagttggtttaaatttagttattttggggagaatccaattagttaatttcaaaaattgaaataatttcattttaggaaaatgattatcaagaatacccacaaagtcagctaaatgggtttgccaagtaagactatttatagaagcttgctgtatttgtgcctttgtgagagggacaataatttttccaggatcatatccatgtaatttaacaatccgaattctcccatttcttatcatcgtagccatttgatccaaataaggagttagagtctgtgaattagtatgtggaagaaaaagccactgtacaaagtcttgctcttatacaataacaccagtaagtgaatgctgagttggaaaaattagcaaatctagggtcttttttggatctattctatttatttgagatttatggatttgctttttgattagctgcagctctgcctcagcttcttttgttaattgctgagggctaatgagactaggatctcctctaaggatagaaaatagattactcagggcataggtgggaatgcctagagcaggtcatatccgattaatgtcccctagtaatttttgaaagtcatttaatgttttcaattgatccctacgtatagttactttctgtggcacaatggtagtgtcatttactaaggtccccaagtaggagtaaggagtagtagtctgaattttgtcaggagctatataattaaactggcatgagaaatcgagttttgcaagtgatcataacattggagtaatatttcttgagtgggggcagcacaaagtatattatccatataatgaataatgtaacactgtgaaaattttttacgagtaggttcaattgcttgcccttcataagtctggcaaatttttgaactgtttcacatgccttgtagcaacactttccaatacaaatgctttagtatgctgcaggttttttactgcaggaattgtaaatgcaaacagttcacagccttgctcagctaaggggatagtaaagaaacagtcttttaaatttatgactattaaaggccaattttttggaatcatagcagaagaaggcagtcccggctgcaatgtccccataggttgtataactgaattaatggctcttaagtcagttaacattctgcatttacctgattttttcttaattacaaaaactggagaattccaaggggaaaatgttgagctatgtgtcctttttctaattgttcagcaactaagtcctctaaagcctccagtttctctttactcagcagccattgtgctatccaaattggcttatctgttaaccattttaaaggtatataggttctggaggcttaacaatggccaccatcaaaaatgatatcctaaaccttggtgggaactttgtctttccgcttgaagcatttccttcaaagcttgcaaattttttcctagtcccataccagggacataccccatttcatgcatcatatgttgactttgagggctgtataattattctggaattagaacttgtgatccccattgttgtaataaatctcttccctataaatttataggtacagaagttataattttttgtatagtcccaggttgtccattgggcccttcacaatgcaaaatataactactttgatatactttaagggctttaccaactccaactatgttaaattgagcaggttgaattgaccatgcagatggccagtgctgtacagaaatgattgaaatgtccgctcctgtatctaccaaacttttaaatttctttccctgaatagttatttcaccagtaggatgtttatcagtaatttgattcacccaataagctgctttgccttgtttatttgtgcttccaaatcttcctgttcatttaatttcacttttccccatttccacatatggcataatcaggagctgtgctatatgctctcctggctctgctttccagggaacagaagtagatataacaatttgaatttcccctttgtaatctgaatcaatgactcctgtttgtacttgcacgccttttaaatttaaactagacctacctagaagtaatcctaccatccccgctggcatcatctgactggagacagcaaccttctttaacagtcccattacaaaaggagaacctgttccatatggattaatagcttgtttaaattctttgagtaatttaaaaggaaaaggctcaaatgtagctataatatttccctgttgatctacggggtatattctaacagggaactgctaagcctctatatcaccctctcttctaacttgctgaattcctggctgaatagaactgagagtggtcgctcgaggtgctgctcagtcactggggcgactactttttgcccagtgtcctctggaaaagaaagatctggaggatcaggctactcttttgcttcgaaataatgagggggtgcagaagggtagggacaaacctctccctcctttgccactttagctttagctggcaaacaaacctgctctgtcacctcttctgttacttcattatactttccttcctcctcatctttagtgtgaaaaggttccaaggtggaatgagctagagcccacacttgcccattgttaccctgatgcttccgagctccccttcttactcaccatggggattgcttaagagtactcgggtatcctccagctttgttccacgttttccaaccattgctccagcgagccttcatcctgggtttgagtccccacgttgggcgccacttgccgagaccagctcggtcgtggagaccctaacccagcagtgctagaggaattaaagacacacacacagaaacatagagtgtggagtgggaaatcaggggattcacagccttcagagctgagagccctgaacagagatttacccacgtatttattgacagcaagccggtgataagcattatttctgtagattatagattaactaaaagtattccttacaggaaacaaagggatgggccaaaacaaagcgatgggctctggctagatatctgcagcaggaacacgtccttaaggcacagatcgctcatgctattgtttgtggcttaggaatgccttaagtggttttccatcttgggtggaccaggtgttccttgccctcattccagtaaacccacaaccttcagtgtgggcgtcatggccatcacaaacatgtcacagtgctgcagagattttgtttatggcaagatctggggccagtttatggccagatttgagggcctgttcccaacagtggacaaagaagaaaagctgcttaaggcaaacaggcacatattttttaaagctacaatagctagacaaactaagagaatcctgtgtatgttttacttttgtatttttatttttaatatttgtggatacatagtagatgtatatatttatggggcacttgagatattttgatacaggcatacaatggataataataacatcacggtaaaaggggtatccattacctcaagcatttatcctttctttgtgttataaacaatccaattaaaccttttatcataaaatgtacaataatgttgactgtggtcaccctgttttgctatcaaagaataaatcttattcattttatctaagtatatttgtgtacccattaaccatcccagtccccctgctcctccaactacacttcccagcctctgttaaccatcattctactctcttatctccatgagttcaattgttttaatttgtagctcccacaaataagcgagaacatgggatgtttgtctttctgtgccttatttcacttaacataatatcctccagttccatccatgttgttatatgacagaatttcattctttcttatggctgaatagtaccccattgtatatatataccacattttctttatccattcatgtgtaggtggacacttggattgcttctagatcttggctactgtgaatagtgcagcactaaacatgggcgtgcagatatctccttgatatattgatttcctttattttgggtatatacctagcagtgggattgctggattgtgtggtagctctactgttagtcttttgaggaacctccaaattgttctccatagtggttgtactaatttacattcccaaccaacaacagtgtacagggttctgttttctccacatccttgcagcatttttattgcctgtcttttggataaaagccattttaactggggtgaaatgatatctcattgtagttttgattagcatttctctgatgatcattgatgttgagcacctttttatatatctgtttgccattcatgtgccttcttttgagaaatgtctatttagatcttttgcccatttaaaaaattggattattagatttttttcctattgagttatttgatctccttatatattctggttattaatcccctttcaaatggatagtttgtgaatattttctcccattctgtgtattgcctctgcactttgttgattatttaatttgctatgcagaaactttttaacttgatgtgatcccttttgctcatttttgctttggttgcctatgcttgtggggtatgacttaagaaatctttgcccagaccaatgtcatggagagttttcttaatgttttcttttaatagtttcatagtttgatgtcttagatttaagtctttaatctattttgtttttatttttgtatatggcaagatataggggtctagtttcttccgcatatggatatctacttttcccagtaccatttgttgaagagactgtcctttctgcaatgtatgttcttgacacttttattgaaaatgaattcactgtagatgtgtggatttgtttctgggttctctattctgttctgttgttctgtgtgtctgtttttatgccagtaccattctgttttagttactatagctctgtagtataattttaagtcagataatgtgattcctccagttttgttctttttgctcagaatagctctggctattctgggtcttttgtggtttcatgtaaattttaggattatattttattaacatatttctgtgaagaatgtcattggtattttgataggaactgcattaaatctatagattgctttgggtagtaaggatattttaacaatattgatttttccaatccatgaacatggaatatctttccattttttggtgtcctctttaatttcttgcatcagtgtttatagtgtttctttcatcagtgtttatagttttcattgtagagatcttttactcctttgattaagtttattcctgggtattttatttgtagctgttgtagacgagattactatcttgatttctttttcagattgttcactgttggcatatacaaatgctactgatttttgtatgttgattttgtatactacaatttcactgaatttgcttattacagagagactaaagatagttaggtccattaccaaatgtgttttctgtcacattgaaaaattataccatgagaaggcacatgcttctagtaattacagttcatagatatgtcaatgtacagaatgctggtgtgacagttcacaattgtttgctttatagttttcactggaaattaaattactaagggtaaagtaatcccagcactgtgggaagctgaggcaggatgattgcttaatgccaggagtttgagaccagctggggcaatgtagcatgagcccatctacaaaaaaaaaaaggaattctaattaatatgtggtactagaattaccagaaataataagggaaacaactcggaaaagaaggtaagatgtgttttgggtaagaacagctataaagtatgaggggatgttttgttttgttaaggaaaaaataaaataatatttgtcctaaagtagaatgcctggttgttaagacaatgagaaagagaaagagtatagaagaaaaactgaatggatataagaaagttgtagaaggttgtgggataggaatcctggaaagggaattttatatgtgatcaaactaagatttgaagaaaattctaagtttttttttaaaaaaattgagcatgaatatcaaaaacatactgacacagaactagaaatttgtcctctatgttaaaacaacaaggttttcttggagtattggtctgctcttaataagaaattgaaagacttttctttacctgctaagtaattggcctaggaaatgaagattctgtgttttattgagataatttattgtgcttcatgttgtctttattagatctttgactgcctcagagacctgagttcaccttattaaaagagaaagagtttctacaattatgtggctttctttatttgcctttgaagtcttttaccaatcactctagttaaatgaataaatattgtttcatagggacctgtgatcctattttaatcagatattttaaaccttttgatatttttgacttctcaaaatcaaattctaaattaaaaccttttgacgttgaacaaactttggaagcttctagatgggcttctggaatatctcaaaagaaattgttttctctcctgataaaaaagagagatattaaactaattgggcttatttgatatgttatattgcatgggaagaattgttaaattataagtgatgctgaactttctttaagtcatattgtatgggtatgttattaatatgtgcttcagaaattatatgaaattcttagaaaccagatagtcgtggtataatactatcagccaaaattctaattatcgtgaaatattatgtgttgcagaagtaatacaatttccttatcaattgcattattgtgaactctcatcatatctttaaccaagtccattttaagctttgtcatctacaaagagtcacttgttttactctggtactttccggaacactgtgaaaaacaattatataaagggtgtggacctataagacaaacaaccaaacaaaaatcgtaaagtgttcttttaaaagattcgtggaaaggactctgataagtacaggtttctgataactttaagatcatactactggactgggtaagaatttccagaactctagcaaagaagtggattggttcataaaactgccaacccaacatgaagcagaataagaattaattgaataccagggaaatgctttggcagattttcatgctaagtcagccagtactgaaattgttaagatatgcaatttgaaagaacactataatattcatctgaatcaaattatctatgataacctatttaaatgaacagcatcatgcacctgaattggagaaacaaaactgatatttaaaatgatataaatttagtgttaaatgtggcctcatggatcagacagctatctggtcctttctgagtccatatagctgccattattaaaagttctgcactctatgactcatcacagaatagataacgtgaaattatgaaaaaatattggtgttatgactgttctaaaattgctaaaatggcttataatcaatgtttggtttgtcaaatccacaatttttataagataataaaaacctcagttggtacatttccaccatccactggactatttgaacatttacagatggattgcattcagttgcctcattgggaatctgcaggaaacttaagtaaatgctggatatgtcatgttgaaccaaatactaatatgcttttaaagatcttctaattcaccctatagcagatttcactgatattccaagtgtgactacctgttcaaattgcacatctggtctttctatagggttaggctttttgagtcacatattcagatttcatgtttaaagctaacagtagacaaaacatataggagaggctttacagttaaattattccagaaactgaataataaaaccaaaaggagagataattagacagtttgtagacgaattcataaccctaattctctaattgttggtagcctccattgatgataattaatagtggagccttagataaatactactattgcttccccgttgatgacccctgtagcacacagtgtcccacagggaactgtctcttgtgcccctctagcatatatttttatctatgaaggatttaactatcaatcataggcacaggcaactccatgtcccagtcagtaggaaataagaagtcagtgtggattagggattctaacagtaccactgtcactccataaccaactgaaaatttgacattgttctatacctcttaatttgcactatggtataaaaaggaactttctagcaggtacgaatccctctaaatgggcatcttttgttcaaatgctccttccctggcttggaataaatgtaaatgaggttatgattagaaatccccttcaaacattagctactacagctcactctactgcaaaggctatatagttgcccagtgaagttctctaaattctcttgctaaagtttctttaaataacaggattgccttgaactatctgttggtttgtagtggggcagggggtgtgataggggacactgtgtataatagctaatacatcctactgcacttgcataaaggaatctgttataaagaaaatgaaataaaggtataaaagttggcaagaagaaaaccatcattatgtcttgaggatgattggggatacagaaaatgagaagaatccacaaactattagaattactaagttaatttagcaaggttgctcaatgcatggtcagtatacaaaatttaattgaatttctacatatatgtatatgccatattgtgttagattgttttgcattgctataagggaatacctgaagctgggtaatttataaagaaaagaggcttatttggctcatggttctgcaggctgtacaagcatggcactagcatctgtttgaccttaggaagcctttactcatggtggaagaagggggagcaggcatgtcatatagtgagagagggagtgagagggagggagcaagagtgaagggggaggtcccagactctttttaaataacctgaaatcctgtgaacagagtgaaaactaacttattaccatgaagagcacaccaagccattcatgaggggtataccttcatgacccaaacgctttccaccaggtcctaccttcaacactggggatcacatttcaacatgagatttggagaggacaaacatccaaatcatatcacatatataaatatgtaaaactattttaaatgtttttaaagtatcgaatagaaataaatctcacaaaatatgcttaagaactttaagcaaaaaccataaaatactattgtgataagttaaagaagacctaaataaatggagagatctgtcatgctcatggattggaagattcaatactgtaatgatatgaatagttcccaaattgttctatagattcaaaacattgccagttaaaatctcagtggactttgtttttttgaaactgacaagctgattctgccatttataataatattcaaaggggcaagaataaccaagacacatttgaagaagaacaaggaggaagaagaacgtatttgaagaagaataaggaactctattaagtgtatatctcctatatattgagatacacatttgaaatacatctatcacctagatattgagatatattatacatttaatatagtgtgttgctggtatagggatagacaaatgaacattggatcagaatagcactgaaacaagatctacccctatatgggcatgtccctattaacaaaaaaatattgttgattatttcctcaagatgatctgtaaaaaacaagttaattgaacatccatatgggaaaaaagtgaatccttctgctacctcaaatatcaaccccaggtagattatagatctaaaagtgaaaggcaaagcaataaagattttagaaaataacaaagagaatatctttatgaaaatacaggaaatattttaaaaataggctagaaaactcactattaaaatatataaaatataagaacatctgttcatcaaaagtactatagtttgaatagcagtgtctcctccaaaattcatattgaaacttaatccccattgtaacagtactaatcctaaaactaagtattaagaggtgtgacctgtgggaagtgactaagtcatgaggggtctttcctcaggtatgggattagcatccttataaaaggccttgagatggaatgtagtgcccccttgccctcttgcgttctcccatgtgaggacacagcaacaaggcaccatcttggaaggagagagaagccctcaccagacaacagtgcacatgccttgatcttagacttcccagcctccagagctataataaatacatttctgttctttataaattacttggtctctggtattttgttacagaagcactaatggactaagacaaaaagattccattatgaaagtgaaaaggcaaccgcagagtggcagaagcttttggagatgatgaatatgtttacttcctggattgcggtgatgataccatgagtgtatacatatgtgtgtatacataatgtatacaaattgtgttcattgattatgtacagtttctttgtataccaattataccttaataaagctaaggaaaaaaaaaagaaaatccagaataaatatgcatggtatgacccatttatttaaaaaaaaaaagagggaatgcgaagcagtggttttggtgcgaacacaaaaattctggcttcaacagcatttaaattcccaaaccaagcatgtttgtgttttaattctttgtggccataaattgtacagctcaggcctttatagtctctcagattctgtgaatgtggggaattagttttactcataaaaagttttgttcttggggataaattttttaaaaaaatttttgtatagttagcacactgagaaaatacagacaaaggcatacagatgcaagaaatgaggtagctgaatagaccaaagaatgatatagggcccagaaggtaggcaaagagaaagttgttgggtttatggttacaagtaaactagcagttgtggtgcagatagttttatttcccccacattaatctgaacagcccatccagacttaaacactgctttttgcatttacttctaggcaggaagacagggttctgatggtgtgagtctccttcaactcagcaaaccaccttggtctgcctcgagtttccaacacccctcctgcctgctagtgataggtgtgaggcaggttgatgaacatggaacttttttcttttggtcccaaagcatgctactcctggagtttcattcagtgaatgagaactatagtttggttctgtgagatctctatgaatcaaggcggccactgaagcggagaaaagaaatgcttaaatgttaagaaagtttgaagtgcagaaaaaggtgattgtaaatccatatggttaagcttagcccatttcttaaaaggcttgattgctcattcctccattcattgatttactcactcttccaatccatgttattgagtcttgctctgtaattccggatggttgtgcttttaagtactgcatagtggttgtatgtctgtgttagcattgctgaatgtatcagggaattcatttttttatccccattcattcgttccattcatctgtttctctctctctctctctttgtgtgtgtgtgtgtgtgtgtgtgtgtgtgtgtgtgtgtgtgtgttatgcctagaaaacatttctcaagaattagaattacgatatgctgtcaaacacaatgacttatttgaacctcttttatttgtaggttgaagcactggacaatgccacatactttgtggatggtgtgggtcttgggggtcatcatcagcctctccaaggaagaatcctccaatcaggcttctctgtcttgtgaccgcaatggtatctgcaagggcagctcaggatctttaaactccattccctcagggctcacagaagctgtaaaaagccttgacctgtccaacaacaggatcacctacattagcaacagtgacctacagaggtgtgtgaacctccaggctctggtgctgacatccaatggaattaacacaatagaggaagattctttttcttccctgggcagtcttgaacatttagacttatcctataattacttatctaatttatcgtcttcctggttcaagcccctttcttctttaacattcttaaacttactgggaaatccttacaaaaccctaggggaaacatctcttttttctcatctcacaaaattgcaaatcctgagagtgggaaatatggacaccttcactaagattcaaagaaaagattttgctggacttaccttccttgaggaacttgagattgatgcttcagatctacagagctatgagccaaaaagtttgaagtcaattcagaatgtaagtcatctgatccttcatatgaagcagcatattttactgctggagatttttgtagatgttacaagttccgtggaatgtttggaactgcgagatactgatttggacactttccatttttcagaactatccactggtgaaacaaattcattgattaaaaagtttacatttagaaatgtgaaaatcaccgatgaaagtttgtttcaggttatgaaacttttgaatcagatttctggattgttagaattagagtttgatgactgtacccttaatggagttggtaattttagagcatctgataatgacagagttatagatccaggtaaagtggaaacgttaacaatccggaggctgcatattccaaggttttacttattttatgatctgagcactttatattcacttacagaaagagttaaaagaatcacagtagaaaacagtaaagtttttctggttccttgtttactttcacaacatttaaaatcattagaatacttggatctcagtgaaaatttgatggttgaagaatacttgaaaaattcagcctgtgaggatgcctggccctctctacaaactttaattttaaggcaaaatcatttggcatcattggaaaaaaccggagagactttgctcactctgaaaaacttgactaacattgatatcagtaagaatagttttcattctatgcctgaaacttgtcagtggccagaaaagatgaaatatttgaacttatccagcacacgaatacacagtgtaacaggctgcattcccaagacactggaaattttagatgttagcaacaacaatctcaatttattttctttgaatttgccgcaactcaaagaactttatatttccagaaataagttgatgactctaccagatgcctccctcttacccatgttactagtattgaaaatcagtaggaatgcaataactacgttttctaaggagcaacttgactcatttcacacactgaagactttggaagctggtggcaataacttcatttgctcctgtgaattcctctccttcactcaggagcagcaagcactggccaaagtcttgattgattggccagcaaattacctgtgtgactctccatcccatgtgcgtggccagcaggttcaggatgtccgcctctcggtgtcggaatgtcacaggacagcactggtgtctggcatgtgctgtgctctgttcctgctgatcctgctcacgggggtcctgtgccaccgtttccatggcctgtggtatatgaaaatgatgtgggcctggctccaggccaaaaggaagcccaggaaagctcccagcaggaacatctgctatgatgcatttgtttcttacagtgagcgggatgcctactgggtggagaaccttatggtccaggagctggagaacttcaatccccccttcaagttgtgtcttcataagcgggacttcattcctggcaagtggatcattgacaatatcattgactccattgaaaagagccacaaaactgtctttgtgctttctgaaaactttgtgaagagtgagtggtgcaagtatgaactggacttctcccatttccgtctttttgatgagaacaatgatgctgccattctcattcttctggagcccattgagaaaaaagccattccccagcgcttctgcaagctgcggaagataatgaacaccaagacctacctggagtggcccatggacgaggctcagcgggaaggattttgggtaaatctgagagctgcgataaagtcctaggttcccatatttaagaccagtctttgtctagttgggatctttatgtcactagttatagttaagttcattcagacataattatataaaaactacgtggatgtaccgtcatttgaggacttgcttactaaaactacaaaacttcaaattttgtctggggtgctgttttataaacatatgccagatttaaaaattggtttttggtttttcttttttctatgagataaccatgatcataagtctattactgatatctgaatatagtcccttggtatccaagggaattggttgcaggatcctcgtggatatcaaaattcatagatgatcaagtcccttataagagtggcatagtatttgcatataacctgtgtacattctcctgtatactttaaatcatctctagattacttatgatacccaatacaatgtaaatactatgtaaatagttgtactgtctttttatttatattattattgttattttttattttcaaaatttttaaaacatacttttgatccacagttggttgacttcatggatgcagaacccatggatatagagggccaactgtaatctgtagcaactggcttagttcattaggaaacagcacaaatgaacttaagattctcaatgactgtgtcattctttcttcctgctaagagactcctctgtggccacaaaaggcattctctgtcctacctagctgtcacttctctgtgcagctgatctcaagagcaacaaggcaaagtatttggggcactccccaaaacttgttgctattcctagaaaaaagtgctgtgtatttcctattaaactttacaggatgagaaatactagagggtgtattttcatgtgatctggatctgtctttctggctattagataggtttctccagccatagttacttgagagagtgagtacacagtgcaaggtacagtaaattatgtatttctgtaatttaacaaaataaatactcagtttaggagaatttgaaagacacttcccacatccggactctggtcttcctcagcctctaactaccttttgagttctagttattgtccaatcactctgactctcagttcctgttttttagcctatatctcctgcatcttgttgctttttccttcttcgaaaagtcttgtttttaattctaaaaaagcctgccctttttccccttctgaatattttaaaaagtacatgtgagctaaatagatttttaagcaaatatatacctagagtttcctcataatgactcaaaaatagtttgatacacagtaatttaaaggtagatactactaccatatgttaattttgcaatctaggtataataataccacacattaaattttgatgcaactttctttggtaagcactatttgctgattctatgtaactttcttaagctgggaaccatgtgaaaggaagtgagcctttgacccctgctcaattctcaaccagaactgggtgtatgtggttaattgggcactagagtcagaaagacctgggttagtagatgtgtaatctttggcaagtcagttgacatgacccaaaaagtttttctgtctttaaaatagggatgatgatctctatatcctaagatactgagagtatgaaatgtaggaatgtaagtaaaccatgagcctaagctccttgattcccattttctctggaggggtgttgagggcaagagtaccacgcctaagagaatgggcactatgggttcgtgtgtggggtgagggtgatgtctgtagtagatgttagctattattattattttccaagaagatatttcattcccttatatattatggcttgtaagtggatatttttctgttatggatactagcagggatataagggatcctgctgtttgcagaaaaataccacaaagaaatatatgctcattaactgcagaacaagcttgtccttggggaactcgcatagggctgctgctgtttcacacgacctcccagaagagtgttatggaggaaacggtagccagccttaaaaaaaatcaggcttggtgtaatcccagcactttgggaggctaaggcaggaggattgcttgagtccaggagttggagaccagcctgggaaacatggcaaaaccctgtctctaccaaaaaatacaaaatattagcagggcatggtggcatgtgcctctggtcctagctactcgggatgctgaggtgggaggatcacctgagcccgggaggtccaggctgcagtgagctgtgattgcaccactgcactccagcctgggtgacagaggaagacactgtctcaaaaaaacaaaatgaaacaaaacaaacgaaaaacaagtttagaggaaggaaacttgagattccacagacaccaaatacagtaatggactttctgctttacttctctgtttccatgttaattatgagaacaaggtagatttaacattgactcgatctatgtttaatttcaagaacttaaaatagcaactgaaatagcttcatagataattgatagatttaaaataatatttaaaaaataatctttaggacggacgtggtggcttatgcctgtaatcccagcactttgggaggctgaggtgggaggatcacctgaggtgttgtggtgcctattcacattaaaggtggatcttcctttcctagtccactgactcaaatgttaatctcctctggcaacaccctcacatacacaccagaaactatactttaccagctatccaggcatctttcaatccaatcaagttgacacctagtattagccataatactctccaatcttttttcagtgtacatatacacactactttacaaaattgggattagattgtaaatacttaaattttataaagaaaatggcatcttcatttttttctgaggctgtttagtgattatctgacattcctgaactctgagggtcattgtgaatcccattcagataaatactggcttatttgccgagagttctaaatggttctgaaagctgccattgtggctatacataaaagataagtgggaactaaattagagatcagtttaagggttcttttttttgtttaacaggagaaaaactaattttttgttagtgctttatccaaatgtgaagtcttttatttgtcaatagactataagctcaagaatcttgttttatctccctaccccttgaacatgcctactatatagtaagtattgaattattgggatgttttcagagtagagaaataagcaattaaaaattctataatctggatgctgaatcaatcataatgagagaggagaaaatgaaaaatcagttcggtagacagctaaggctagtcttcagagaagcagtctgcctggaaaatcacagctacaggcaaaaatagagcagcctggggaaaactcagactgtacctgcacagataagcaggcaaggtccagcacagaagccttttgttctttgtgtgattagcaggctcccaggaaaatgttttctccccttttcagatatgaacacggggggatccatgggagattgcactggaaacagagggggtttacctaaaagaaacccacaattactcaaacaagaaaaaactatgctttgtgcttacctagagacatctcacagctgtataggtaggtggagttgtgcagacaggttttcaaataagagaagttactcaaacagctacagagatgagaggagtttcttataaaagcttttgcattcagctgtaaaatggcaccccacttgggctctcctctccactgtggagagctttcttctttcacttactaaacttttgctccaacctcaccctttgcattcatgctccttaattttctcagtcatgacacaataagttcaaataacaccttagacaatgagacaatggaccctgacctatttcaataatactgaagcattgggcagtttgaaagaggaaagttctcaacagtaagaaattgtagtgtgagttatcttaatgatggacctttgaatagcattaagtatagtgccaatatctgaacaaggaaaataatcattgtatttcctttctacttcatacaattgtaatggcttcaagtattgcagagtagatgtctggtgttaaatgtatacagtgttgactattttaaaaatgaccagtaattcaaaacaaattaattttgagagtccaacatatcattcatgggttaattctttctgactggtcttctctattcagttaattttgttcccttctgccagattaatttactctttcagcaaatattttttgagtgcctcttatgtgctaggcagtgctcaaagtgcaggggatatggtagggaacaaaacataaaattccttgtcttcatggaggagaagacaataaatttatgataggatttcgggtattgagaagtactatgaagaaaataaaagcagagtgccacaatggaatgactgtgcacgtgtatgtgtgcacgcgcacgcagagtggaacaaaagaaaagtgattcttcttgctttagtacagctgttgcatgggtttgagcacttttggcagctccaggaaacccaaagtacctgtggcccattgagaaggtgtggcacctgctgccagaggctttgggagtaacccactttctacagaagagctctgtggtgcagaagctgccacatggtaacaagcacatggagcagaagacaagcacaatgtccttgaccatagattacttaacgactccacctactttaaagatgttgaactgatgagaaagtattagctatggctaaatgttgtgtgtgagaagtactttgcaaacctctgaaacactttacagatattgttatcagtcaaactggaagtagaatgtccacagtgcagtgtaacaaatgtgacatgtgcatgagttaagaaacagctgtaatgggaaagatgaaaaaacatgctttatttgtttattccattgttcagcttctctttaaattctttccacatggacaaattgcttgacaacaaagtttacttagttttctaaacacttgggatcatctctaaaattaaaaaaattaatattaaatgttggaccaaggatttcaaccatgcagtatgttgcttctggggtctgctgtcctattccagccctagtgaatagataatgccttgaactattcctatcaccacaggttgccaggccaccaaataacgaagccaatccaggatttgtccatacagaaaatgtgtgcgctcccagctaaatctcagttaaggaggttgttctatatacagccaagtagcagaaatattcataaatgtcatttgcaaatataataaacaatgtaatgaatgggtatttcctttcttgttaattctatgtgctcaattaaaagccccttatgtgagtttta

SEQ ID NO: 87 - DNA, 6048 bp, Homo sapiens
aatccctccctccggcgggcgtcgctggcgggtggctaggcccaacggcaggaagccgacgctatcctccgttccgcggcgccgggtccgccttccgtctgttctagggcctgctcctgcgcggcagctgctttagaaggtctcgagcctcctgtaccttcccagggatgaaccgggccttccctctggaaggcgagggttcgggccacagtgagcgagggccagggcggtgggcgcgcgcagagggaaaccggatcagttgagagagaatcaagagtagcggatgaggcgcttgtggggcgcggcccggaagccctcgggcgcgggctgggagaaggagtgggcggaggcgccgcaggaggctcccggggcctggtcgggccggctgggccccgggcgcagtggaagaaagggacgggcggtgcccggttgggcgtcctggccagctcaccttgccctggcggctcgccccgcccggcacttgggaggagcagggcagggcccgcggcctttgcattctgggaccgcccccttccattcccgggccagcggcgagcggcagcgacggctggagccgcagctacagcatgagagccggtgccgctcctccacgcctgcggacgcgtggcgagcggaggcagcgctgcctgttcgcgccatgggggcaccgtggggctcgccgacggcggcggcgggcgggcggcgcgggtggcgccgaggccgggggctgccatggaccgtctgtgtgctggcggccgccggcttgacgtgtacggcgctgatcacctacgcttgctgggggcagctgccgccgctgccctgggcgtcgccaaccccgtcgcgaccggtgggcgtgctgctgtggtgggagcccttcggggggcgcgatagcgccccgaggccgccccctgactgccggctgcgcttcaacatcagcggctgccgcctgctcaccgaccgcgcgtcctacggagaggctcaggccgtgcttttccaccaccgcgacctcgtgaaggggccccccgactggcccccgccctggggcatccaggcgcacactgccgaggaggtggatctgcgcgtgttggactacgaggaggcagcggcggcggcagaagccctggcgacctccagccccaggcccccgggccagcgctgggtttggatgaacttcgagtcgccctcgcactccccggggctgcgaagcctggcaagtaacctcttcaactggacgctctcctaccgggcggactcggacgtctttgtgccttatggctacctctaccccagaagccaccccggcgacccgccctcaggcctggccccgccactgtccaggaaacaggggctggtggcatgggtggtgagccactgggacgagcgccaggcccgggtccgctactaccaccaactgagccaacatgtgaccgtggacgtgttcggccggggcgggccggggcagccggtgcccgaaattgggctcctgcacacagtggcccgctacaagttctacctggctttcgagaactcgcagcacctggattatatcaccgagaagctctggcgcaacgcgttgctcgctggggcggtgccggtggtgctgggcccagaccgtgccaactacgagcgctttgtgccccgcggcgccttcatccacgtggacgacttcccaagtgcctcctccctggcctcgtacctgcttttcctcgaccgcaaccccgcggtctatcgccgctacttccactggcgccggagctacgctgtccacatcacctccttctgggacgagccttggtgccgggtgtgccaggctgtacagagggctggggaccggcccaagagcatacggaacttggccagctggttcgagcggtgaagccgcgctcccctggaagcgacccaggggaggccaagttgtcagctttttgatcctctactgtgcatctccttgactgccgcatcatgggagtaagttcttcaaacacccatttttgctctatgggaaaaaaacgatttaccaattaatattactcagcacagagatgggggcccggtttccatattttttgcacagctagcaattgggctccctttgctgctgatgggcatcattgtttaggggtgaaggagggggttcttcctcaccttgtaaccagtgcagaaatgaaatagcttagcggcaagaagccgttgaggcggtttcctgaatttccccatctgccacaggccatatttgtggcccgtgcagcttccaaatctcatacacaactgttcccgattcacgtttttctggaccaaggtgaagcaaatttgtggttgtagaaggagccttgttggtggagagtggaaggactgtggctgcaggtgggactttgttgtttggattcctcacagccttggctcctgagaaaggtgaggagggcagtccaagaggggccgctgacttctttcacaagtactatctgttcccctgtcctgtgaatggaagcaaagtgctggattgtccttggaggaaacttaagatgaatacatgcgtgtacctcactttacataagaaatgtattcctgaaaagctgcatttaaatcaagtcccaaattcattgacttaggggagttcagtatttaatgaaaccctatggagaatttatccctttacaatgtgaatagtcatctcctaatttgtttcttctgtctttatgtttttctataacctggattttttaaatcatattaaaattacagatgtgaaaataaagcagaagcaacctttttccctcttcccagaaaaccagtctgtgtttacagacagaagagaaggaagccatagtgtcacttccacacaattatttatttcatgtctttactggacctgaaatttaaactgcaatgccagtcctgcaggagtgctggcattaccctctgcagaacagtgaaaggtattgcactacattatggaatcatgcaaaaggaaaaaaagtttcatgatatctgttgttggcagtttttgtttatctctgacagtttttagttaaatgtttagatcctcagaactacattagtgcctactattaacttactctgtctcttgttaaaggctaaatctgcgcttctccctggtgccagcaggttcccctcacagtcaatgcagtggtatagcatatcctcacatttctagtgcccttgagactgtgctatggaaccaatcttgaacatacatgcattgacttgacaagttactgagtaagcagcatattcagcaggtgccactacatgcctactctgccagacactgagcttggggccctagggaagatagagaattatacaaggcaaagtccttctctttagggctcttacaatctatcacttccaaaaagtaaatggtgactgataaaacaattggcagaacctgtttgattactgtgacagtcttaatgataccataaatcaatattagaaagctagttgacttaaagcctgaaataatgggagttttctcctccacttattagaataaggaccctcagtgactaattattgtgggtagggtcaagattaactagttttatacagagttctgctgtaaatagtcattttgcatttgattagtgcagttctctgaatcataaagcaagttttacctctctgtacatgtttttgcagacatacttgaaaagctcacttaaatctaggtgcttcaattcactttcttgagaggacaaatgaaaagctgtggagaaaatgtcctcattaaagtattaaagtgtgggcagaattacaattacaaagtgccagccaccgaataaagataaaagttcagttcttaaaatgagtttttatgagataacagtcagtgatcttggtgttaccgggattccacatggggcagtgggaaagagttcaggttttgaaggtaacctagtttagatttgaattccagctatgtgacattgggtaaattagtagtagtcctgagcctcagcgtcctcatctataaaatgactggcgaaaatacttcacaagctcattttgagcactttaggaagtaagtgaaagtacctaaaatagcaggcacccaattgatgattttatatcttccttctttgcttgcagtgatttcaggatgtcctcatatctatttataggtctaaaattatatcttaaggtatgttgtagaataaattaaaaggataatctaaatcaccatttagattaagcttgacttgcaaactaggaagaagcacctaggctttctttgaaaatatttttttggttcgttttggtaaagctctataaattggtatctattattttaccaatttttttttagtattaagtccatttagaactaaccatattatttatggaataattagcatgaggaaggtataattgcatttttttttttttgagacggagtcttgcactgtagccccagctggactgcagtggcgtgatcttggctcactgcaacctccgcctcccaggttcaagcgattctcctgcctcagcctcccgagcagctgagactacaggcgcctgccaccacgcctggccaattttttgtatttttagtagagactgcgtttcaccatgttgggcaggctggtcttgaactcctgaccttgtgatccacctgcctcggcctctcagagagctgggattacaggtgtgagccgccgtgcccagccattgcatttttattcacatacacattgttaatgtggaacaatttaacactaatctcatcagagagcgagatgaatgtggcaattgctcattttattttgcatatattaaattgagtaggttcagctctaacataccttaagaaaaatgcatatcggtgcactgtatgtatttcaaaatgcctttcctatgattgtcatgtcctcctttaaggcttttccctcaaatttattacaaatttagtatttttagtacttgatgactctaattacatgaatgcacctggaatgacatttgtaacagaagacggtctgacttgctttcagtattcacaagttctttccagtttccaagtcttttcctagcagtaatttaggggagacagaggagtttcatgtaaagagcatgcagtttggagtcagaacctgggtatgactctgtggccttgatgaagcaagttacttaaactcttgagttttagctttctcctttacaatgcatgaatgcctatccccctacaaaacaaagattaaatgtgatgatgtatgccaaggtgctttgtatattgtaaagtgctatataattataagatgttctaaattttcaaggatctaaaccagggattggcaaacgtttttccagggagtaaatattttacgctttgcatatataatttatggaggtgttgagaggatagattagacacttgaagtactcaggatagtgcctggcatgtaggaagcacctggaaaatattcgctgtgattaccatcagtccattttaccgaggaaggagccaaggtccaggcccactgaaggacttgcataacattacaatagcagtggcagaaccagccatgcttctgcaaatcacaacctctttgagcctctgtcacctgaactgcaaaatgagtgggttagacaaaatcatctgttgggacctcctagttccacgtgctatcattctactaactggcaccctaaggttgaaagtgcttatctgctttccaatgtggcttccttacagtctggaactgacaatatgcaggagcagtaaactggcagaaaaccaggaatcagagaaagaaaatataatttaactttaaagatgtaaattatatatatagtatattatatatatttttaaagctttatatgcctcaaatatcagggaaaggagccaagtccttggtatttagtttggtgaatacttgcattgaatacatgtcaagatgtcaagtcatttttgaatgtgtctcagggatttctatgctacacattcttttaacaaatcaagtatttatgtacacatgttcagattttttgacaaaatgattaaaataatgagatggaaaatga

SEQ ID NO: 88 - DNA, 30048 bp, Homo sapiens
tcgtgacaaagcaaattgtctggtatcatgaatttggaacaccgtaagtgatctttactgagggttacattctgtcattgtcagccttttaaggaggccttgccaccagcgcaggggaggtgaagtctaagggaaggtaatattgtcaatgcctgctaattagttctaccctggagattttaactttctgcgaagtttttaaaaacaacttccaaaactctgctgatcctgaaatgttcgagaattcagagttcctagacaatggctactgtcccccttcccactgattaggggagttggcatttcaggaaccagagtttctaagggcgccaaatagaagggctcaaagggaatcagcaggcgatggttactgtgggcgggtaaatcaggtgatttagaggaggggtttggcgaggttggggtcgggctttaaacgtgggagggctaattaacaggagattaactggagaggggcggtgcctgcgtccggcccgcgcggccacagtccctgcattgcgcgcgacccggcggcgggacaggcttgctgcttcctcctcctcggcctcaccgtgcgtactgggaggggagaaggggaccgcatgcaaagggtggcaggcagggagggccagggtgggtggcagatggaagacttgggggggtctctgccagctggaagtgcttggctccacttagcagctaaacttagcttttcaatcgatcgcttttgaaagggaattgtatttctgtccccgtgcgggtaagttttcccatttctcaaactccaggaatgaaacgagagagtcttttcatgcttgagtgatgatttccaaacttagccttttcaagtcaaagtaacctcctgtttgaaagggtcccttgaactctggggaaggaggaaaaggcacgtgtagtaatggaggaaatgcctgtagtttgaacgactgctgttctccccaagagtgcaaaagcctgcgatgtctcaggtttcatgggcatagtggcctttatgcctattgtaaggcaggatttgctcttctgagttcactttgataggagaaacatcagcaagttttaaaataatactaaataatactactgctaataatgctagctatcgaaacaagaggatgtgggttagatgataatatttttgtgtgatattatagccagtgacaagagagctaagggtgagccccttgggacggttctcacctgtgccccacttccccagtctggaggaggaagccatgtggaaggagaaaaggagaagggaactctctttttcgggaattaaggtgtcatatattgctctagctggcttgggacagaggagagaggagtgcatgtaaatcttctagtctctctgcttctcttgaaatgtggcagtctgagctccacgtttatattcccctatttcttctccctaatttcttacccagtgagtgctgagtgggtgcccgcaagcattgctgtatagcacccaggcctccagtgagcaatccttaaagcccagttttcctggggtcccagcctgctgtgagtcccagcctacacctaccttttgcatatgcttttcttggccttaggatagtactggactttgttgtcctctgctgtttccaaaataagagggctatgtgtgcgattatctttggtaattaaaaaaaaaaaaaaaaaaaaggcaaatcagtccaaatttggatattaccctctctggcagacgagtaaaatttttctaccgctttgttttagagtggtgtctatgaatccctgagattggaaaaggaggtcaggtcagcacagagaaaggccttaccccaccactctcccgagaggcaccagcatttcacctgcagcctctgggctctgaaccccactttgcatgagaccacatagtgggctgagtctgcagccaccacgatgccttcaggaaatgctagaattcatctagagttccagattaacgtatccgcaacatggccaccgaattatcttttttctttatctcatgtgtagtgtttgttagttttagaaggtacaaaattgcagagtcatggccctggggatgcgtgcccagattattcatgtgtttcacaatattgatgcagaaaggctggccacctcatcctgagaagagaactttgctcattttggccaaaagcctgtaaagggaaagggcgttcctcaactgagaagtgaagattcttctctgctagatagtacgggggtttggggggaggggtagaaaacaggaatgagatttgacaaggaaaggcctccagaagaccagagctgttgagaattcttagccttgatggtgggtagcccagaggtaaacacttgagaaaactaagttgcagtcttggtctctccactgtgaatttgggtcatattactcactacttttctgggccttaatttccttacatactaaaggtagaaaaaaatattatttgctctacctcaggatttttcgggtcaagcgagataaaatatgcaaaagctttttgaaaattctaaaatcctcagtgcctagaacagcgccaaagtcggaagttttttatttaccaaacacacagcatttaacaggtcccagagcttctttttttttttttttttttgagacggggtctcgcactgtcacccaggctggagtgcagtggcacgatctcagctcactgcaaactccgcttcccgggttcacgccattctcctgcctcagcctcccgagtagctgggactacaggcacctgccaccacgcccagctaattttttgtatttttaatagagacggggtttcaccatgttagccaggatggtctcgatctcctgacctcgtgatctgcccgcctccggctcccaaagtgctgggattacaggcatgagccaccgcgctcggcccccgcttttctaactttattcagctaaggctcacaagaatccagtgaaatgggagttcttattcaactcctttcacaggtaaggtgaagaggtcccagagaagttaagttacacttactaagtggcagggtcgagatccacccgaatgccaatctagttccagagttttgaatacttgacactctaccccatgtcctcttatgaagaagtcacctccacattaggggacagagctctggtctctggcaagagaggttgagatacttattaccatgctggccaatgaatggagaatataatgagcaaacaaaccactgtgcaaacatgattgatcattgtaaatattttctataattcataaccaaattagtgtttttccctgcttacttttctttgattatttctccttcattccttgaatcctcaaaccacttaacatttcatcctgttatttattattatacaggaccactcttctccctcctgacaacctttcctggtaaaaggctttcagtaattttgttgtggctgcagagccaaccatgataatggctgcagttttgtgcagcaaactcgtggcaattgattgataaatcagctttgggggaaaaaaagtttacaacagcattgccttaatccatgctataaacaactactatttcttaatgttcttaccttaactgctcattacctggctcttgggtacctgtgaaggggaagatgttaccctggagagatggttcattgactcatcaggtgtgtgtcagatgcttggtgctggccagtctcccaaacccacagacttgaggagttaagccacattcttcgtgattgagaaactctgtgtgaagtgcacagtgtgttgttcatttttaaagaaaaggcctcccattgccctttttcccagccactgacttctttgtgtactttcctaccaacagtcctgggaggctgccatttttttctctactctttcaatactgattttcaatgagggggaaaaaaaagttctctggacttttgttccatcaatacataaatttcattctgggaacattagtagaggcctatagagaatgttttagttttaaaattattgttaagtagcaactttctatttgataaacttaccttaattttaaaaaacttcacacgcttgctgtatttcttcacatctttgtacagaggcctgggacttagggatcctttcttaagctaattactttacctacactctgaaggatagtgcagtttattcatgactttcaccccttcaatactagaacaagcagacacattaaatgttaccaaaaatattatattgcactgagagctaatctaacatactgtgctttcaagactagagacttatggaggttgattaatttgctatctaggggattttttaaaaaccttgcgcatgtagtttctgtttgcctaaatccaagctgtatatttttagcctaagaaaacaaaaataggggggccaggcatggtggctcatgcctgtaatcctagcagtttgggaggctgaggcgggtggatcacctgaggtcaggagtttaagaccagcctgacaaatatggtgaaaccccgtctttactaaaaatacaaaaattagccaggtgtggtggcgggcacctgtaatcccagctactcgggaggctgaggcaggagaatggcttgaacccaggaggcagaggttgcagtgagccaagattgcaccactgcactgcagcctgggcgacagagtgagactccatctcaaaaaaagaaaagaaaaggaaacaaaaataggggttacttaggtagctttgatttctttatctgcaaaatgggaattttaatacctcaccacataactggaaaaagaaagaagatgacagatataaggggtgcctacttgtgccagccacagagtaggcattcacttaatgtcaattgaattagaattaagcagaattaaagagttgagagcagaattaatcaagcctcttgaaagagagagtatagtgtagtaaccgtatggggtgttcgtgtcccagcttggcagcttaacaactctaattccctttttcttcttttgtgaaatgggtatagttatgacaattgtaatagattaacaaaggtgatgaaagtagtgtacataatgtacatagtatagttgaacacatagcaagctctaataaagctaagtatatatgtatgtggtttttaatcacattcaccagcaacacaaagatggctatatgaccaataaagatacatataaatgtatagattactggtaagatggatagaaagattgcagctgataggtgtcaggctaataaggacacaatgcaggggttgagctttaaaggcaggaatgaacatcatctagaagagacagtactacatgccaagcaggataaatagcctctaagcttgggtctgagaaaagttgtgtgtgttctgtggaagagagagaagtagatagcagggctgataaaagaacaagaggaggttacaaagaataatggcagaggactggaaatgtacattttaagctttaccctaagttcctacctgttttgacttcagtatcaccagtgtgtcttggccttcctcttcagcacattcccaattatacttccaattccagacacagataactacattcctctactcaacggcttttagttgaatgtaactttggaatgtgaaatgactcaaggatcatgtaaagctaattctccttccctattacacccatgaaagtaccatatatggtaattccttaccttgcatttgcaagcctgttttttgatgtttccattatcctgcttctccttctttacctgtcttcgaattgatgatgatggtgatcatgatgacaattgtgataaggatattataaatttattgagggtttttcttgggccagtccatattttatctccattacattagacaataacccattaagttagaagctattactatttcaatttttttttttggagggggagacagagtctcactctgtcacccaggctagagtgcagtggtgccatcttggctcactgcaagctctgcctcctgggttcatgctattctcctgcttcagcctcccaagcagccgggactacaggcgcctgccaccacacccggctaattttttgtatttttagtagagacggggtttcactgtgtcagccaggatggacttgatctctcgacctcgtgatccacccgcctcggcctcccaaagtgctgggactacaggcgtgagccaccacaccaggcctactgtttcgattttaagaatgaagaaatttagtctcagagactgaatccctcaagcaaggttaacagctaaatcgtgggactggaattcaagtcctaaagcctacagttttgaatactactgaaatgacaagttgtaagttgggtctccaaagcaggatacataagaactgaggccttcctaagttcagtgctgctgctaggtacatagcttgatgtttccaaagagatcagtctatgacctctggtcttttgctttcaacctacttatagttaatctcagtgctagtatgtgatgttagtctatgtttagggcatttttgctatttatttttgcttatactgcacccttttttttcaagtagtacttgcttgatgtcttcaagctaaataatatagaactagataaaatataatattgcatacttttttttttttttttttttgagatagagtctctctctgtcgcccaggctacagtgcagtggcgcaatcttggctcattgcaacctccgcctcccggatttaagcaattctcctgcctcagtctcacgagtagctgggattgcaggcacacgccactgcgtctggctaatttttgtatttttagtagagatggggtttcaccatgttgggctggctggtctcaaactcccgatctcaagtgatccaccagcctcggcctcccaaagtgctgggattaacaggtataagccactgcgttcagcccctatttactttgacattttaaaaactaaacaatcatttcttctgcaaatagtccaagatatttttaagaacagtataattaatgctgcaatataagaacatcaaatgatcttccagttattttgggtatttatgtctgctttttcccattttatttaaatctttttaagattccagaccaaaattgaaaaaatggttgacctcacccaggtaatggatgatgaagtattcatggcttttgcatcctatgcaacaattattctttcaaaaatgatgcttatgagtactgcaactgcattctatagattgacaagaaaggtaagaaatttggaggtaatattttcttacttttaagagttggaattctggagagcagttttcttaattttctttttttatttttggtaaagcccaatagcacactgttttatgctgtaagtgaagtatgccatcgtttggcacagatggatctgatgtatttatggaacagttgctttctcctagaaactagtaaatggttttttcattatggcttttacctttttatcattctgctaagcagatgagatattctggaatatcaaagttttcacggaaactttctttcattttggaattaattttgccaatgagggtttagaaaacaatcattttctagacagttaactggtattttcagctctagtgcaggtcaagggtatgattttggttaaaaaaaaatagaaaaaaaaagaagaaagaaaaagaagaaaaaggctgagaattaaagtcttactttcaaagtgagcctcatatatgagccttttgaattttgtgtacttctgactttttaagtggatactatttctacccagcattataagaatgacttttttttttttaagtgcagatgtggggagggtggtagacagattctgaagcacatattatgtattcaagcagggtttatacgtgcttgaagcgcgtagagcgaggttccctttacaaaattaaaatattttcacgggggtagtccctgtgctcattcagcaacttcttcctggagaccatctgtttctctcttaggacctgtcctgagttttgtcctctagagccttgattttatctataggtcacagtcttccctaaggtgtttccttgttacttttttttttttttttttttgtgagatggagtctcactctgttgcccaggctggagtgcagtggcaggatctcggctcactgcaacctctgcctcctgggttcaagtgcttctcatgcctcagcgtcccaagtagctgagattataggcacgcaccaccaggcccagttgatttttgtgtttttagtagagatggggttttgccatgttggccaggctggtctcaaactcctgacctcaggtgatccacccaccttggcctcccaaagtgctgggattacaggcgtgggcctggcctactattttgaggtataatggaaggatgtttgcattttaatggagggaacacctctcatgcactgatgtgttgcagcatcagggcaacaaagtggctgtctgcttccaggtccacactgacttctagacacagaatgtcaccaaggaaatgtaccctgtcttaaaagaaaagatgaagggaattcaaatttggagagtgccgggagccacacgctttttatgtgtgcttggtcatgcagtcattttacacacttgttagcattgtcaggtgaaatgaggattcatctttccattttatatagagggggcagttagaggttaagtagctgtctgagtccctttgggctgctcttacaaaatgccatagactgggtggcttaagcaacaaacatttgtctcacagttctggagtctggtaagtctaaaatcaagatgccagcagatctggtgttcagtgagggcccagttcctgacttgcagatggccatcttctcattgtatcctcacattggcagagcacagagagagagagagagaaggaagcaaactctctcctttctcttcttataaagactttaatctcattcatgaggactccactctcttcacctaattacctcccaaaggcctcatatcccagatactatcacatcgaagattaggctttaacatacaagttttagggggccacaaacattcagtccttagcaatagcttatccaaggttacatacaaataaagagtgaaactgagattcaaactgaaattgcattaaacccaatctaatgccctttccattgtaatacatttatttctttattcaacatatatttattgtacatctagtgtgtgccaggcacttatttaggggagcactacgatgaacaagacagacaggcctgaccttaggaactttatctggaatatttattccagataaagatgttgaggaaaactgatgggcagtatcccagccctgtgcatcggttctcttcaacatctttatctctaatataatgttcatatcatattaagaaaaaatagaaaacaaatgagattaattttgcagtttgtgtttttctctgccatcaattattaaatagtggcacatgcttaaatattttttaaatgcagatttcaagtttcaagggatggggaagctatttcaaagagcataataattgcaggaaggaatacatgaatgtgtacttcttattcctaggaatgcaattcagcttctcaaatttcattatacagtattcttcaacccaaagttttatctgatttagaaaaagaaaagaggtacacatgttctgacagagtacaagacacctttcccatcccttactcttttatgcttcttgcctgttctctaaaacctttggcaggtaaacatattactttcagatgagccaatcgcttggaaatgttaatacacttgagggaaggtatgtcaacatcactgtgaaaaagataccagtgaaccatactaatagtcaatgacttagaattatgcctttccccatatttgcttccttttcactatttttattcactggtttttgttcaagttcttatttatgcttctctttttacaactttgcattgttaataaaaattcagttttaactatagatgccttcttctcctcttgtgtttgatttattgctccaaatgggccaacctggatgtctatatttcttccactaaaatgcaaataacttactaggtagaatatccccatgttatttcttggtttgtttgttttcttttttttgaggcagggtcttgctctgtcacccagactagattgtagtggtgcaatcacagctcactgcagcctcaacctctcgggctcaggtgatcctccaacctcaacctcctgagtagctaggaccacaggcatgcatgtggcccactaccatgcaaaattttttttaaaaaaatttgtagatatgggtactccctatgttgcccaggctgatcttgaattcttgggctcaagcaatcctgcctcagcctcacaaagcgctggaattacaggtgtgagctattgctcctggccagtatttgaaataagttttttttcttggtatttggataggtttttgccaatccagaagactgtgtagcatttggcaaaggagaaaatgccaagaagtatcttcgaacagatgacagagtagaacgtgtacgcaggtaaaccagtgtctcttgaaattacttactttatgaaacaattttggtcaaggagttcagtgaagatgtctcagggtcttggagactgaggaaaaaaagtgagacctcttacctactccacatgacaattacagaaaactggatgtctgaaattgacacactgcacttgtatgtgttgccaatttggcaatactgtacttttatgtgtactttcttggggttaatgacgttgctgtatatagggatgtatcaaaagtaatggcagggaggaggtaaaatgggaacagtagattcttggagttttatcgtctttgtccataggtgagactgtcaactcatgtaaaaggttgaagaattaggtatttttgcataagattcaaaataagaatgttgacactctggaggagtaggaacctctttctctgtccctctccccactgccatctctttttaaatattatgttttaatgtactgggaattcaatgagcaatgaaaagcaataagccaagatacgactggggtatgattgttcctatcacccaggtagtgagcatagtacccgttagtttttcaacctttgtctccccttctgtactccctctaatagtccccaaaatctattgttgctatctttgtgtttatgtacccagtgtttagttcccacttataggtgagaacttgtggtatttgtttttcttttcctgtgttaattcatttagggtacttgcctacagctgcatccatgttgctgcaaaggacatgatttcattctttttttttttttgagatggagtctcactctgtcacctaggctggagtgcaatggtgtgatctcggctcactgcaaccttcttctcctgggttcaaaccattctcctgcctcagcctcctgagtagctgggactacaggcatgtgccaccacgcccagctaattttctgtattttcagtagaggctgggtttcaccatgttggccaggttggtctcgaactcctgacctcaggtgatccacccaccttggcctcccaaagtgctgggattacaggcgtgagccaccggacctggccaaaattcattcctttttttttttttttttttttttttttttacagctgtgtagtattccatggtgtatacgtaccacattgtctttatccaattcatattgatggacacctaggttgcattagcccttttttgattctctgtgaaagtctgaagcccctcccaagatttctgcagattcccttatggcatatcatctccaggttaactctggatctgggttcctgcctctatgcatgtttccatattctgcaattggttatgctggatgttaatccagccctttcatcagttcccttcaaaaatgaactaaaaaaaatgtggctaaaaatagacttgagtaagtggaagtgcagaggcgtttacactgtggcagcacaaacattttaagttgtatgttatttctctgtcagacaatggccttcagcgtcctctctttgcagaatatgccccgtacctgtacctccttcacgcaagcaatgcccagtgttacaccatttttgaggctctcctctagccccacagactcttcaaccttttcagcactaaaattaaaagtaccttcttgctcatgcaaaacaattctacccccaagctattcatcaagcaagaatgtttctcttctaagaagaagtctgtgcagatacttagcacaaaatttcaccttctatctcacttagttatatacttcttaattcagcagccctgctgagtaaatcagtgagtcttgagaatgggttgtgtcaagaatatggatataaaatagtttcaggacaaagaatcactgtggaaatttcaaacagcagaacaatatcaaaggaaaaattatgtgttagacgaaaaaaaataaaaaaaagtgagtgaagcttaagttttcaaaaccactgaagagacatgaaaacttttaaagccttgtctggtcctttatgcacttccccttttagagcaggcagccgcctgcatgatgctagtcatggccctgtatttataaaattgcccagaactggaaagtgatcagaagcaattagaccctcagtagtattagtaagactgaaatgaaaatccaagtaagtctcctgtgtgaaagcgtaacaaaagatattttatttggggattttagattcctccctactattctttccgaccttccacccttactccctgcccgtgggattgtacttttagaggaaaacgacgttatctaaattgatccgctagtcaggttgcaaatgaatgttagaaagaacaattgaccccagttctgtaaaggttccgagtcctggaggaggtgcagcgactgtgtgcacagcgccccctggtgatgagacactggcttttccgcatactgagagaagagcgtctccaacagagcggagtttccagttgtataatgctttttgagacagtacctgtttcatcgaaaaagtgcctaataacacacttttggagacacttttcagagagagcgtttccagcatcttccctttccatttttaagttagacttttttttttcacctctctcgttacttcagtcattgtaaagctgttacgattagcatatttgaacggcagagccagaatggggctacaaatgaagtgaaaagtatgctttaccgtgtgcaacaattgtgaaagttaatacatacacatatggaacaattaactaaaaacttaaggtaatatgtgttgaaataccaagatatgtgacttaaagtcagttatttgagttctggaaagacagaaaccagtgatggttagaaagcacttgacatatttatttatttatttaataccatcttagcttgtctaggaagcattcaagaccatatacattcaacacaaaaagataaaaagaaagttgaaaggcaaacaggccagctggtgaaatacagggagtcattcaaaagacaaaataaaggcttgagttggtatttagggacaggagagacatttagaatatattccctttaaaggtagagaataacccttcactgagagtgttccatggagtctaagtgacacttgctggggactctgtcatgagactggagcataggctaggggttgaactggatgatgtccctcgtggccccagtgtatgaacacacatatatggagagattattgtgtatgtatcactgtcatttcttctattgggatgctatcaaagagctttaaaactgggttcctgaccctcaggggtttatagtgttccccccctccccgcccccaaaagacccacatgcatataggaatgggagaatgatatgaagccatgttccattagttccatggaatatttcataaaggaagaccttgaagagtattaggatttgaaaggagaaagaggagagaagtctcatcaatttgggaaaattcctttgtgagaatgtgaacacatggctggctatgtgctgagggtgaagagctttggctgagatgagggcgtcaggaaaagcctgctgtgcagctccttttgtagttgttcacagcctgacaatccccagaagcatgtagcaatggcagtccaggtcaggtggatgctgggatccaagtaattctgatctgagggaaggaggcgtggctgtggcctcaagagcacagagatggtgggaaggtccgtcacagagcaaatatatgccagggcatgtgtgtccaaaggagaaagaagaatgggaaaatgtaatcatggggaagaagggtaatagacccaggtagaaagtggactcttaggaagactgatgtccacctggtgatagattttggcagctgtccataaatggcactaacgtgaaggaagctgccgctccaggaaggagtctgtcgttggagaagaggggagggttaggacggaagggtgatagtgcactgcagcaggtgctcacagggaaagctggggaactgtttgcctggaacagagtctcaaaagaagtacaaaatacagcataaattggcataagtatgagggtctgtggaaaacaggccttactagcatagtgaggagtgttatctttgagaacattttgagggctgacgaaagagaaagagaactcaaaagggagaataagataaagagaaaatgaggctagaaaaacatgcaggagctagaaaggtaaaggaacccctgccccttgaccttccttccctctaccctcatggtcctcttactgtccttgactttcttctctgctttaacattccattctatttgtcaactgcgtaacacaggcgtagaagtggacattgttttccagagagtctcctttttatagtttcttcctcaaccttaaaatgtctgtccttttggcatgttgtgaaggagaacactaacgtgcctaagattggaggtgacgatatctctgtgatgctgggggagaaatcacaggggcaaaacaaatactctaggtgtcattgacaaagtgggcccttctttaatagaaaatggtattcctgtcttttctttcccatctcattctcagtagtacttgtattgctccatgaaagagagggcacaggaacactcacaccatcctctctttgcttttattctgtattgaagccttttcaaatcattacttagctgggctgctgctgtcctcttcatgtctctatgtagtcatcctctttgtgagacaagcttagagataatctagggaagacaagacaaaggaaaggagaggaggagagtgacgatcgttgagcaggcaatatgtaataattatatgcttattgctatagaagagagtaacgtaaagcagaaatagttttcattttgaaatacatatcaatagctgacaaactatcaaattctccatttctagcctagattctaaagcaatttctaattctgtagacttaagggaggtgacattttaaaattaagtatttttaaaaatgttgctgggcatgatggcttgcacctataaacccagtgttttgggaggctgaggctggaggactgcttgagaccaggtgttcaagaccagcctgggcaacatagcaagaccccatctctaaaaagaaaatttaaaaaattagccaggcatggtggtgaggcctgtagtcccagctactcatgatgctgagactcaggagtttgaggctgcagtgagctatgattgtaccactgcacttcagcctgagcaacagagcaagaccccctctctaaaaacaacaatagcaatgacaacaataataataaaaatgtcaagtccatagtagatgtgttttgtattcggtcttagccagagaaacccaagatgccacggtttggagcaaaactgtggctaaaacatgctttttgttttcttctagctctgttataaagaaaacatttaggaaattctctctttctctctttcacctatcctactttttgtgtgtcctttgtagttttgcaccatcattcctaacgaatttatttggcatttggaagataggttagcaaaaattttactatatttgaaaggctagttatgtattctgttatttagatataagagcatgagagtcttgatattaaattggtaaattaattattggcaacctagtggtttgggttggcaaggattctgtcaataatcatttggtagagtagcagaagcaaaggaggtgtcttaagaaaaatcaacaccaaaagggttttcttccttcgggagaaagaatttttataaaaagaatcttgaattgctaattgttatgaacctcataagaaaaaagtatttttatttacaaaaatgaaatgagttctattagatagatgtcgttttgatattctaggaactacaaaatgccttctgtgatatttaaagatacactaaaaataaaaagaaacagaaataatgagagattctaaataaaagtcaagtgggcaaggaagcaagacaatttgagagaaaaaaaataaatcttactttgaaatttaaggatccattagtgctcagatttagtttttagaagagagagaaaaaaggatacatatctagtattttgaaattagtgtctttaatagttatctttttccacagagcccacctgaatgaccttgaaaatattattccatttcttggaattggcctcctgtattccttgagtggtcccgacccctctacagccatcctgcacttcagactatttgtcggagcacggatctaccacaccattgcatatttgacaccccttccccagccaaatagagctttgagtttttttgttggatatggagttactctttccatggcttacaggttgctgaaaagtaaattgtacctgtaaagaaaatcatacaactcagcatccagttggctttttaagaattctgtacttccaatttataatgaatactttcttagattttaggtaggaggggagcagaggaattatgaactggggtaaacccattttgaatattagcattgccaatatcctgtattcttgttttacatttggattagaaatttaacatagtaattcttaagtcttttgtctgatttttaaagtactttcttataaatttggatcatgttatgatttgtaacattcacacaacacctcacttttgaatctataaaagaattgcacgtatgagaaacctatatttcaatactgctgaaacagacatgaaataaagaatttaaagaatgattttgtttggttttatttttcccaacattttattttcaaaagtttcaaacctagggtaaagttgaaaaatagtacaaagaaccactctgtaccctgcttagaatcgccagttgttaacattttgcatatttgctttccttctctctctgttttctttttctctgaaacatctgagagtaagtggcagatatcatgacatgtcactctttaaaacttcagcacgtttttcctatgaacaagacattctccaaataactacaataccattattacacccaagacacttagtattaatatactaatatttcatatatagagtccttattccaattttttcatgtttccccagtaatagtcttcataactactttatttttgatccaggattcaaagatcaaacattgccttctgttatcatttctatttaggtttcacttaaatgagagagttcttttgctttctttctcttttgtataaccttgacattttttgaagagtatagacaagttgttttacagaatgacccttaatctggatttgttttatctatgattttctcattcttagattcagattaaacagttttggtggtgtgtccttcacactataaaacatcaacaggcatatgatatcagtttgccctgttattggtgatattaaatttgatgaatttagtaaggtagtgtcaaccaaatctgtccattttaaagggatccttttatttttataatcatatgtggggtgataatttgagactgcatatcctgtctccccacaaactttcacttaatagatttagcacccatggtttctacatataactatgtagcacgtaaatcacaaatttagatttttttggtcttaagtggaatgtgtacttaagtctttataataaagggtaagcttttaaaatatcagttttttcttgtatatgccatccatctaatttatattagtttttgattttcatatcttttgatgcattttaattttaaatatgtatttctcaaacagtacttttaatgacatttgtgaattgttcatttagatgtgccactcaagagaaaagtcactgtgttgtattttaggtttcatagtttgagcaactctgaagtccataaacaaaacctattagacaattgactacgtagaattccatacaagtttccttttacttcttttcctaatgttaaaaagcagctttgcatgctgtggatcttggccttaggaacgctttgtggtgtaattgacagaaaagaccacgagctcaggagggaaaagtccgaaacccatgagttggctctgtgtgcatgaacatgcacgcgtgcacgcgcacacacacacacacacacacacaccctgctctggagttgggcaactgacttatgctgtctgatctgcagtttcctcaaactttacaagattttttgaaggtcatatgcttttctgtatgtggagcaatttgaaaaaagtatattctaagccattaagtgtttcccatgtgtgaattatctcagtaatctctcaatcataaagattcagataactgagttcctcctggttttgggtcaggtctttgttgaaccattatcacgtctttcatcgttttcttaaattttcttctcacttggtgatgcttctctgagtagaagcagaatggattgtggttattgtaacagttatccatttagctactaatatttgatattcattagtagacaattattaggggaaaaggacgtttaaattttatattctcagaggtataggaactatgtatatgagcagaacacacgtaaggaaaagtgcaaaagtctagggattacccagttcagtttctaaatttaagtataagttgtaaaaacaatttagaatagtttctaactatacttttactcccaagagaagctttagatacagggggatttattagtgaaactgcttttatgaaggaaggtggatgaaggggaaagctatttactggtctagtctctcctgaaacaaggattccccacctgactacaagacagaattggctctagagtgaagtctgtgtgctaagtgactttaacttgtgataggactcaggtggaatggtacagcttgccttaacactattacttatgaggaataggatgggtttgttttcatgtttctgctacttaatttgaaaacaaagattgtggttatctttctatctgcatgcatatctgtgtgtacacacacacacacacacacacacacacacacacacatacacacacacatactaccatcatcggttctaaccattatggatgcttagtaattagataacattgttactttttcaaacaccaccatctcccttcattcaggccttgttctgtcctcacctgtcctaaggcaactccatcacaagcagttcaaggtccactgaaactggaagatatttatctgtatctattatagagtcatcatctagggcaatgatgggagttttgggggcagggttcagtgactctcaaatgaaattggagaggggtagattttaccagaattactgtagcaagggcaaacgtacatttatatagatattgaatctgtattatactggacaaaagtttgtatttttatataatactacatgatgtagaatcttcttaataggtgggacatctgtaagatggaaatgaatacattgaattagaacaatttttgaaatattctgtgactctaaaaattctatttactctggaggcaggtgttggtctactcttttctccatcttgggcatgttgatggatgggggtaggtcatgagatttttatgtacactgaaagcctccgtggtttaaacaaggctgagagatccttgttgaattaatgtcaaatagacgagtctattttgaagactgaaaaaatgattctttcagggcacaggagatcttaggcccagaaaggcagattcagaagaacctacatgtaaatgagactggagtggaaatgagaatggcaggaaatgcatggaaacagacttgtaactgtctcatggcctggtcgtccaaatcccagaggttagtccattctcctgctttggtcaagctgccctggaagcctctcttaggctgctgttggttctctctgcgggatcactgctaaagatcccagagtcactccatgtcccagtgttctgcacattgctgtatgttggcttgtgtggccaaacagcatgtttggtgagtgtgggtttaaaccaaacagagttagaggaatcaaatattaaatggcttaagactaagacaatctgacacatccatcattcacttcaagatggagatgatctctcttcagtgaaacttaaaacctcagtctattggccacagcaccccacattcaattcacctttacacttggaatgactctgcaattgggactagcaaggccaagtctgatgacacaggaccctcaccactgtgggtgcttggataggtatagtcaatgcttatctttgtatattttttcctgtttcttgggctatccaatcattcttctgactgatacattctccctttcactacattaaaacacaaagaggctacttcttggatctaaccaatcaggaagtgacttggcatgtctatgctgagtttagctaggaggttaacgatcaaaaggtaattgtacaatctctgatccctagttattagggagacctctcaaaacccctaagcactgctgactgccaccttcccgatctaacattcaatgattctaaggccagaaattttgctaggcagtgaggagaagggcatggagtttcggacaaccaaagtgttaaattttaatgcagtaaggcccagtcctagggaatcctgatgggttctataaaccattcacctgagagctctactttataaataaagaaaccaaaaagaaagttttctgagttgcatagttgcatcacactgattcttcatggaggcagatggtgagaagtgaggcaatttgccttgggagtctttacaatccatttagaaacagcagcacaaaaatcctatgatcatctccccgctgccagcctgaaatgtcagccctgtgggaagctgctaggtgttcctgccatcagccaaagcggcacctctacattcatacctttcagggtgctttattcactatatattctatgtaaactgttggatttgacaaggaggagttgtcaaaggcagattactgggaagggccgtgttgggttgaatttggcaccaatctctcatacttgacagctcatgtacaagattgtggatgagctataggacctgtgagcctcctcagtcagcaagcgcaggccctaagtcacatttaattcagaaagccctgacagccctgcataaaatgtgagccgtaaaatggagagataggagctgtgtgcaagagtagaccatttaagttattgccttttactgaagtttaggaaaacatgaaccaggacaatatagactctgatataccacgaagagatctgtattagtaacttcaagaaaataatccaaataatccaaactttaagccagacataatttttaatgacccaaaactaagagggacatcagtggagagttagaggttgcctaaagttcttagtcttttagcctaagtcattcgtatctatacctatatctttatagaagcaaaaccacccaaaataaagagaatagtgaaggactgaagcagtgtggtatagtgaatagatcctggatttgaaaaacacctatatctgtgtcttgagtctcgaggctttctggctgcctgagataatgactgaggctttatgccccatccttaattctaaagtggcaaaattaatactttacctactgtattaatagccacaataattctgcatgataagtcatcctatgactcagtggctttgctaatggttctgtagggttgggctgatcttgactgggtttgctcatgtgtttgctgtaagttacagggtagccaggcggtcctgctgaatatgtgtctgggttctctaaggaatctggaaattggctgaaacttggctgattcagaaagatctcaactagggttacttgggcaactcaactctctcccatgtgtcttatcctgtactacagtgctcagcaaactatggactctgggccaaatacagcccatgggctgtttttataaataatgttttattggaacgcagcagtacttacttatttttatatttcctgcaactgcttttgtgtcacaatggcagagtggcgtagttgaattgttgcagtggagaccacacggctcacaaaaccaaaaatatttactctctggtgttttacagaaagttttctgattcttgctccagtaggttagcctgactgtgctatcacagcataggagcaagacaggaaatggaactgcataaatctcctttcaagagtctgcaatcattacatccaccaacatgcccttggccagagaaagtcacagggctggcctcagaactaaagtgctgggaaatggactcaaccccctcagggagatgaaccgcaaagtcacatggcacaggggcatggatgcacagagggatgaagatttaggccacttatacagtcaatctattgcacttgtccgctttgttatgctagtatgagtttcaattcagacacatgtaaaagcattttataaactttatgacattatgcaattaaaacagcatttattctaatgtgtcataattttatcagattagtggtaatctgtgatatgctcagtatgagagcaatagttacaaactaagtaaaaaacacaatacagggtttgtgaacttggccttctccctctcatttgcaatgtgctgccttaggaagacagatgggacaaggaacaaatatttggacagccttatcgcctctataactaagttggttcccaaactgtgcccagtctgttctcttgaaattataatatgcaccctgctcccaaccaagtgtttcatcaaatttaatcagtttctgattattcacatattaaatgtagaccagagaatattgctggcccaaatgtaaaatttttgtgttagtgtttgctgaaataattgtatattatcttctatgggttgtatattaatcatgaaaataaagctgtgctaagttcttgtttgagctacccaatttataacttgatagtgaaaggaatataatttcctttgtaactcatctttcatgacaatacagttagagtctggatcctagaattgattctaataatagttttgccactgatacacatgagaaacccaggcaagtcacctacttatgctctattcatttcttcacatttaaaatgaatacattgaactagaacaatttttgaaatattctgtgactctaaaaattctatttactctggaggcaggtgttggtctactctttctccagtgataaaatatgaatatcaagatgtggaaataattatagcagaaagcttatagcctttattaatgaggtcaagctcaatttgagttaaatagcattttgtgggtttaatgtctcagaataataatctttaattttctctgaatcaccaatgtgatgtcaccaaaatgaaatgattgttacttttccgaaaaattcaataaatgcattgaattacctccatttaataattttcttctattaattcttcttcagacattgaacatactatcacttgaatagaccagtaacttgtgctagtagttgatggtgggacaaatagaatgcttggaagtaaatgaaacagggttccttggtctaatcattattctgggttcccagaatcttgactctataaattagttaggttctacctagtccaaatgtgtacagataaaataaaagaaaaatgtttattcatttcttcataaagaaatatttattgaaggactcatatgtgcccagcactattctagatgcttggtatacaacaaggaccacagaaaaagtttgcattccaaaggaaattctttaacttagggcttgtaaagaaagaaagatggtgaaacgactgaactcatattataccagaagtcagtcaactatggtctgtgggccaaatctgacctgccacctctttttgtatggcccacaagctaacaatgatcaatggtttttactaatgaacatttgcaatcaatttgatgactagaaacactaaccttgaactccaattaagcaaaatgttaatcccctgaataaaaattccattcttctcattagtagatctttgttacaaaaaaaggtacttcatcattattgttatcttttgaagatcatcagctaaaaaatatggaaatttgttttccttcctgttttataagtacctatgtaacatacttgattttgcctcttagctcacaaagtctaaaatatttactctggcataaaaacagacacatagatcaatgggacagaatagagaacccagaaataaatccatgaatttagtcaactcatttttaacaaaggtaccaagaacatgcattagggaaagaacagtctcttcaataaatgctactgggaaaattggatctccacgtgcagaaaaaggaaactagacctctatctcttgccatatacaaaaatcaaaccaaaatggattaaaagcttaaatctaagacctgagactatgaaattataagaagaaaacattaaggaaacactccaggattttggtctggcaaagatttcttgactaaagcctcaaaaacacaggcgaccaaagcagaaatggacaaatggtatcacatcaagttaaaaagcttctccacagccgaggaaacaatcagcaaagagacaacctacaaaatgggagagaaaatatttgcaaatatccatatgataagagattaataacaagaacatataagaagctcaaataactcaatagccaaaagtcaagtaatccacttaaaaatgggtaaaagatctgaatagacgttctcaaaagaatacatacaaatggccaactagtatatgaaaaaacacacaacagcactaatcatcaggaaaatacaaatcaaaaccacaatgtggtatcatctcactccagttaaaatggcttttacccaagacagagaataacagattctagtgagaatgtggcaagaggggagccctcttacactgttggtggggatgtaaattagtgcagccacttgtggaaaacagtatgaagatttctcaaagaattaaaaatagaattaccatatgattcagcaatctcactgctgggtgtatattcgaaagaacggaaatcagtatattaaagagatatctgtactctcacgtgtattacagcactattaccaatagccaagatcagcctaagtgcccatcaacaggtggatggataaagaagatgggatgtgtgtgtgtataatataatattccattatatattatatgttacatatattatgtattagattatatattacatattatgtagtatattatatattacatattttatatattttatattgtatattttatattatatattacatattacatattatatattacatattatataatatagtatatattatatactatattatcatatactatacatactatgtgttacataatggaatattatacaaaacaaaatattatttggccataaaaaaaattctgtcatttgaaacaacatggatagaactggaggcttttatgttagtgaaataatccaagcacagaaagacaaatatctcatgttctcactcatatgtgggagcttaaaaagataacctcacggagatagggagtaaaatggtggttactagagaggttgggaaggatagtagggatgtgggggataaagaggggttgaggaatgagtttgagaatatggttggatggaaggaatcgatctagtgtttggcagcacaataaggtgactatagttaataataatttattgtatatttcaaaataactagaagaatgcaattggagtgttcctaacacaaagaaatgataaatacttgaggtgatgaataccccaattaacttgattagattataatatgattgtatcaagatattatatgtatcccgtgtgataactgttatgtatccgtatccataagaataaaaataaataaaaatttttaagaagaaaaataaaataaagtatttactctggccttttacaaagtttgtcaactcctgatctatacaattgaataaaaagcatataaatggatactgaaatttctctcattatttttcactgactaactggtgccagaatttaatcaaagtgactaagaacaccactttatttcaacattggtcctcttatatttgccccaaattatccatttttgtttcaaattattacaattattacattctatatggcttggtatatatgggatactcagtaatttttcaagaattttctcagttgttaaaggattgaaatattgttaattgtcttctatgaaaacatagcttcttatcagcatgttttgagcttgtatgtgctttccctagtagctgaatttttttccatgagatcagttctcttgacattactgtgatggaaattgaggttttaaagtccctttggttggaaaagtgtatttttgtttggagtagatatgcagatatcatgatacatccagtgtaacaccattaaatcactcacttctcagaaacggtagctaaaaccattaatgtttaatcacttcatagccaatgccaagtagtttacattaacagggagcagaatatgctatggccaaatgaaactaaatggaaaactcagaaacagctgatgatgtctaacatctttgttttttcctgggacatttatgctcacggtggtgattttatattgcacacatataatatagtcatggttattgcttttaaaattgctcctagtttctttgatggatttaaatttattgctgttttatggagagatagcatattattccaccaggagcatcacagtgtctcattgctctgccacacaaacaaaatttaaacccacccaaatccaaaaatcaccccaaatccctttatccagaataaaaacaatagccattatgtttaggatactgattagcattttaaactatattttaaaatatgaagaagaaaaatgtcatagattactatttttaggaacctaccccaaagttacactagataaatgtatgaaagtacttgaaaaccaggttatttattgaagcaccatttttaatagcaagcgaatgcaaataattcaaatattcactaacagagactggttaaataaactatgaagattaacacaatagattattatgcagctgtaaaaagaattagaaaaatctctatatgttactatggttactgtggaataaactttaggatatatatatactcttgtatgtgtgtgagtgtgtatttgtgcttatgttttatttaatttagtattggtttgttttagagacaagtctcactctgttgcccatgctgaagtgcagtgggacaatcacagctcactgtaagctcaaactcctgggctcaagcgatcctccctctgccgcctcttgagtagcttagacaacaggcatgcaccaccatgcctggataatttttaaattttttgtagagatagggtcttgctatgttacccagtctggtctcaaaatcttggcttcaagtgttcctcctgccttggcctcccaaagtgccgggattgaaggagtgagccactgcaccctgactgttcttatgttttaaaatcaatgaaaagacagaacataaagtttggaaaaaatagttaactatagagggaaggaggcaatagaataaaatgaaaagagatagaaactatttttaaaagtatcttgttttaaagatgtgactttgaaaacataaatattttacataatgattaaattaattaaacacaaagagcagttcctaaacattgaaagtaaaaagaaacaaagaaacctcaatgcgtatcctattgatggcataaccttccacaaaggaactatccgaagtggtcttaaaatgtaacaatttgattaaacataaatggtaggacaacagaatatgaaaacaatcttttcagtaatagtattattattggtagtagtgttgatattattctgagactgcaatctgcatagtgtggcatgaaacaaatgagtaattatatcagcatcactgaaaactaggatttggggcatggcagaaagaagatacacatacaaaatcaaatacgtagaaactctgtactactgaatttgaattagaagtattagttttaactgatgatgtgttttatctaaaacaaaacaaagataattatttttatctacgtctactgaaaggaattagcaagcagatgcaggcaatgtgagatgaacctggaatatgacttaccatattagaaaataatgatgctattcaatacaactagcattgtgtcaaaaggactctagactaaatgaatacgctcccatgccaataaatttcaagatgtgaaagatgtttaaatctatgagctcataagatatatacacacacaacacccacacacctatatgtacacacacagattttatacatatatataaatgtattttatgtgttcacgtgtgtgtatatagtctttgaaggatattaaaaatcttatttttttttaattgtttagaatcaaacaaaccctgagcatttatcttgcctcttctatataaagtttaactcggcataaccaattgctgatgaagaagaaatgtttccttgtagaagcaaaccagtgaataattgaagaaaaaatttatcttttcaacatctaatgagttaatggattcaagcaaagattatccacggctgttaacaacacaaaaagacaatcggaaattagctattactgcgggaagtacccaataccatctatgaaactgtgtggacaaaaacactgacaaaaatctccacgaatctctaattttgaatacaaatttaaagaaaatgcaaaggattaaaatagaccatgatgaagtcagaaaaattcagacagagaaaaatgctccaggaccagaaacccatttcttccgcaaaagcttccaggtagagattgactgaccgagagaacagagacatagagagaacctagagattaaaagaaacttgagcgatttgtcagcattcagttgcaacgtatggatgtgatttgaattctaatttaaaaaccaaagtagaaagtggtaaacaattggggaaatgtgaacaatgatagaatatttaatattaatgaaatatgttaaatattttcagatatgataatggcattgagtatgtaaaaaagagcctgtttttaaagaaatacctctgaaatacagatgatataatatcatctgtatattagatgatattatatatatcagtatcatcagaataaagtaaggttagcatgaattgttaattgttgacactgtgcaataggtacgtggataattactatactgttctcattccttttatttatgtttgaaatgttctaaaattaaaagttaaagcatagagtgtaaagttgagcaaattcctccaagacctaaatatagcttatcaaaacttacattaattagatgctgactgttgagctaatacttttttttaatgatgtgtgcttcagtttattgcacttttcaaatactccagttttttgtgtgcgtgtgttttttaaattttattattattaaagttttagggtacatgtgca

SEQ ID NO: 89 - DNA, 17272 bp, Homo sapiens
gagtactgtgaagatgtggtccccaaggctagagctgaaaagaggcttagggccgggtgagccttccagccagggcctgcctccaagtgatgctcccccagggcagggggcataaggatggcacccagccaggtgggagcctgggccctgcccagcctcaaagctttgagctcaggaaatccggaggcaggggagggggacatcgttgccacattccccagccctttaagacccccaaggcaggaaggctgcccgggcctcaccagcttccctcacaggctccttcctgggaggaaggggctgcctgtgccctcgaaggcgcaagggagggcaggagggaggctcggaaggtgttgcaatccccagcccccgggcctgtcagaggctgagccattaacgacagagctcggggagagaagctggactgcagctggtttcaggaacttctcttgacgagaagagagaccaaggaggccaagcaggggctgggccagaggtgccaacgtgagtaggggatccctagagaggggctgagccttgggcttgatggagagctggaatcctggggccactccccacagctctgccaagtgttcatgtccggggtcctaggcctggggcccgggattcgtcctttggaaccccagccctggacactgagtctcttttcacaggatgcccctacttttgggggtattgcaccagggaagtcactcacagccaagtatctccttggggacactgagctgggctggggacaggcataatcattctcccctccccatgcctctgtctctcaggacgtgtgtgtctgtgagttccagccgcgcaacccctccccgtctgggtctctatttcactctctgtttccatctttcctcctcagcttctctctggcttgctatctctctgagtttctctgtctcgcatatttcctgctatctcttgaatcttaaactctcggtaacagacgcttcccgggctccaggcctccgagtgccccccccccgcccactctctgggtcggcgtacattgggccctttttctctgtctctcgatatctctctggcctcaatcgtcctcttggcgagtctctctgtcgtttcagtctgtgtggatttcagtcaccgcctcactctgtcactcttcctgttgctctctctttttctttatctgcagcatatctggaaatgcctctcccctctgtttattcccagccccctcctccctccccacccttcccacagaaagaatctcgaggtgagagtagaaacagcaagggagcgaggggtgtgaagtggggaagagagtgtgaggggagagggctgagcgtgatgagggagaaacagaaagagggaatgtgaaggcagccagcccaggagacatcgagctgtgctgggccacaggagtgagcacctgcagagcccagcagagatggccgcagtgacaggagggccagggggcccaggagttaggaggagaggatccagaaagggggctttggaactgcgcagtgtggcacagacaaaagcaaggtggcagtcctgggaggtgtgaccacacaggctgtgagggaggcaggggtgaggggaaaactgaactgtgctggattctgtgagctgctgacctgctatttatggctcgtgaaaataacctatggttgctgagtgccaactccatgcaaggcacagggctaaatgcctttaccaaaataatctcatttcatcctcacaacaacgctgaggagtgagtgctaatgttatttctttcccacagatggggaaactgaggctcggctcggaaaggtgaagtaacttgtccaagatcacaaagctggtaagtggcggagctggagatcaagtcaggtgacctgaatctgagctgggctccaaacctctctgcatatcggccccccagagagtgagaccatgctccaacaggtcctaggcccacttaaccaggctgggggacgtccagggctgcagtggaggaccagagactgaggccaagcaggccaacacccagcacccaggggaaggatgccggggcctcttggggttaggttgtctactctggacaggagccagtggaggcggatagggtggtactgcacggggcataggctgggcctgaagctgaccctggctagggcaacagggctgggataggatcaaaagcacatggagatgaaaaccagtgtcccaaaatctgggccttggaggctaaatcttccccaaccagtgttgcggggggataatcaaactggtatgctatagtaagaaggttaccaaccaccgatgggtagacagatgctcgggatacttgtacaggtttctcactgcacaaaactgaggagtaactggagccgaaatccaggctgttccctagttgccaggtcctagtgtggtgctgcatccatccagaggaaggggtgctttctttctgatttgcacaaaggagacttacgggctagcagtcactgggtattccgatactgcaatatatacatggatagactgggggtttgggtaagacccctgtgagcagtaacaaccttgggtatctgggcagttcttatccacacctctgtctgggaggaagagaaaaggattctcctacctttctccctgctgagcacgagggatctgctgggacaccacctgcgtgtatgtgtccagatatgtacgtgcaagctgaccagcgattcccactgatctgccaccaagagcaccaactcgtgctggaggatcaggtgttggctccaagaccccaatgggagcagggtgaagatgaggctggacacccacccaagtggtagaaacctctgcatacttcctaagactggagccaaggcaccctccatccaggtgctatggccgtgacctcatgatgcctgaccccagaaggccaccagaggtctgtgcccaaaattgggggcacactggacccttcgggtgccccacttgatattctctcagcccacatggctgaggcagccagcttcctgcaggcataacctgacagccccttgcctcagctgctccatagagttctccctttcttccagggagtgtccctgacaacactggcatggcttccccaggagaacctgcctagtactcatgcatgcccaacctggatgtgccagggaatgaacaccccaagaggcatcccttgaccaatggggggcaggagtcagtgggtaaatctttccatcttccctcccatccaagggataaattgaccctccagtggacagctctgagaagtgttctacatggctctttggaaggttccagcaggatagagccccagttgtccatagaggtgaccaacatgatgatgtaactttgtgctggctttctctccttccctgtttcattctccccagtcccttatctgctgctaggatcttctcaaaataaactaccagcatgcaattcctcatctcaggttctgctctctaggggtagcctagcttagatagctgggaaggcggaagaatgctcttcctcactgctcctttccctgctctttcctggaaggcaagtataataactgtggctgtcactgtcatttcctatgttccaggcactgtgaaaagcccttgacttgcatcattttgtgtcttcctctcaaagtcccatgcagtataggctgctgttacttccattttgcaaagaaacgaaggctcagagaagtcaagcaacctagtcaaagctgcacagtgacagacaaggattaagatcagctctgactccaaagcccatggtcttaaacaacccttctgcctacaggtgaacatcaagttggtgctatggcaaggctgggaaactgcagcctgacttgggctgccctgatcatcctgctgctccccggaagtgagtatggccaaggatgagggtgcagtggggaggggaagctacaaggagagatattgggaatttccttgcactgccacatggctcctgggattcccagagaatcccacaagattcaagtctgagccacagatgtggggtagctggtctcccacccacagacttccacaggcaaaccaccacccaagaggaatggtgagacgacccgggctggtcatcctggaaaaggccagtgaggcgcagatcttgtccgcaaatctctaccaagctgtcagaagcaacccatgggtcctatgcagccttggtgggcagcaaagggatcaggatggaagctacaaggggacaggtttcatcctgaaataaagaagcccaggcagagcttggtttccaaccatggaaactctgtcttgagaggtagagaacttcccatccccaggggtatgcaagctaaagccaggattgataaagatgctgtgcagcaggggttggcaaactttttctgacagtaatgtttaggctttgcaggccacatactgtctctgttccttgtttgtttgtttgtttgtttgtttgttcgtttgtgagacagggtctccctctgttgcccaggctggagtgcagtggcacaatcgcagctcactgcagcctcaacctcctgggctcaagtgatcctcccgcctcagcctccaaggtagtgcagggcatgccaccacacccagctaatttttttttgttgttgtatttttttgtagagatgtagttttgccatgttgcccaggctggtctcaaactcctgggttccagcaatccacctgccctgacctcccaaagtatggggattacaagcatgacccgccacgccctgcctattgcatgttttttggtttttgtttttttgttttttgagatggagtctcactctcttgcccaggctgaagtacagtagcgggatctcagctcactgcaacctccgcctgccgggttcaagcgattctcctgcctcagcctcccgaatagctgggattacaggcacctgccaccaggccctgcaaatttttgtatttttactagagatggggtttcaccatgttggccaggctggtctcaaactcctgacgtcaggtgatccactcacctcggcctcccaaagtgctgggattacaggcatgaaccaccgcgcccagccctgtggcatgtttttatttggtttttgctttgcttgtttttaactcttttaaaatgtaagaaacatctttagttgttaggctatacaaaaataggccactcaagccctgctgtagagggcagagcatcaggtagagttttgaagcaaacaaccttgtaaagtttcttccagcctgaaatcctgagtctgggccgggcgcggtggctcacgcctgtaatcccagcactttgggaggcctaggcgggtggatcacaaggtcaggagatcgagaccatcctggtgaacacagtgaaaccctgtatctactaaaaatacaaaaaattagccgggcatggtgccgggtgcctgtagtcctagctactcgggaggctgaggcaggacaatggcgtgagcccagcaggcggcgcttgcagtaagccgagatcacgccactgcactccagcctgggcagcagagtgactccgtctcaaaaaaaaaaaagaaatcctgagcctgtgaagcagtagaagccctttgttgagaatcatgaacttgctctgtgaccctgggcaaactgcttctcctcttagggccttcgcatccccatcagtaaaacgggcctaagaacacctgagagaggacagaaagcattgcgggcaaagtgtatgttgatttgtttgtttatttatttatcaaaaaaaattcatcggccgggcgcagtggctcatgcctgtcatcctagcactttgggaggctgaggcgggtggatcacgaggtcaggagatcgagaccagcctgccagcatggtgaaaacccatctctactaaaaatacaaaaaaaaattagccgggcatggtggtgcgtgcctgtagccccagcttttcgggaggctgaggcaggagaatcgcttgaacctgggaggcggaggttgcagtgagccgagattgtgccacagcactccagcctgggtgacagagcgaaactccttctcaaaataataataataataaatattcaccaaggtcctactctgtactaggcactgggaatacagtaataagcaaacagccaaggtctgctggcctcacagaatttatagtctagctggagtgatagataagtaaataatcataagactctataattatgaaggataataagagctttgaggaagtacagggaccttggcctcctccagttcgttagtgcctggtctggtttcttcaagatgcctaagcgttaaccaggtgaaacaggggtgggagagagaaagaagagtccctccaaaaagaacagcatgccgggcacagtggttcacatctgtagtcccagcactttgggaggctgaagcaggaggattgcttgagcccaggagctcaagattagcctaggcaacatagtgaaaccccatctctaccaaaaaaaaaaaaaatcaaaaaattagcaaggtgtgctggcatgaacctgtagtcccagctactcaggaggctgaggtgggaagatcacttgagcctaggaggtcaagggtgcactgagccgtgatcgtgccactgcactccagcctgagtgacagagcaagaacttgaagaaaaaaaagaaaagaaaaagaaaaccaaaacaaaacaacaacaacaaaaaaaaaaaaacagcagggacaaagatccagagattagaaagattttggagttttcaaagaatagcaagaatgagccagaatagctggagctgagagaccggtataagctggaactgagagggtcaggcaggggccaggccacaggagctattgaaggatttgagtgtttatcctaatgatggcagcaaatactcacatgccagacactgctctaaatgccttccatatgttatcgcatgtaatccttccagcaacactaaggtagggacgatttttatccccattttacagatgagaaaactgaggcacaggaagtcttagaaatataccaggatcatgtaattaataagcaatagaaccagaatttaaacctaggcagtctagttccaacatccacactcatccatcacaccacactgcctttcagagcaataatgtgccattgaagtgctgcgatggagatggggtagcagaatcagatttgaattgtgaaaagattgctgtggctatgggttcttatcactctaatcactgcttgcaccatccttggggagggcactggggagttaacagtctccatctggtggtgtgctggtgctggcttgcaaaaactaattgtgcacatctcttcccaactccccgatcaatgatgtcacatcaataggctgaaatcagctacagtgagagcacttacaccgcggaaaggcacacactacaaaccagggtctgcttttctctgccaagctggctgataaacggttaccagcacatcactatctctgtgtcacccccgtagcctctcgaagtctccgtccccatccttccatttccagcccccatatcttgaagggtgagacaggaaggtgaggcctctgagtctaggagtacaaaggcctagattatagcccagctctgctaggcagaggcgtcgttcctggcccattctcttccaccccaggtctggaggagtgcgggcacatcagtgtctcagcccccatcgtccacctgggggatcccatcacagcctcctgcatcatcaagcagaactgcagccatctggacccggagccacagattctgtggagactgggagcagagcttcagcccgggggcaggcagcagcgtctgtctgatgggacccaggaatctatcatcaccctgccccacctcaaccacactcaggcctttctctcctgctgcctgaactggggcaacagcctgcagatcctggaccaggttgagctgcgcgcaggctgtaagtccttccagccatccaactactctgcctccaacaccctcctgccaatactaataagaatattaccagccgggcacgttggctcacgcctgtattcccagcactttgggaggccgaggcaggcggatcacctgaggtcaggagttcatgatcagcctggccagcaaggcgaaaccccgcctctactaaaaatacaaaaaaattagccaggcatagtggcgggtgcctgtaatcccagctactcggggggctgaggcaggagaactgctcgaacccaggaagcggaggttgcaatgagctgagatcacaccactgcactccagcctgggcaacaaaagcgaaacttggtctcaaaaaaaagaagaaaaaaaaaaaagagtactacctattgagctcttatctaataagcactttatgggcatgatatcaggtaacagtagtaccagttggtactactatgtagcctcactttgcagatgatgaaactgaggttcagggagggtaagtgacttgcccttatcacacattaataaggatggaggcagtgtggctctaaagccagtgttgtgaccactactctacatagcccaagtcctcagccatctgagggtgtctccagggagaacatcctctaccagctgggcttgtcccccaccccagtttcaaacttcctttcaaactgagcaggatggagtttgtgccaagctgaggcataaggaaaaaacaaagaccgaggttcttgtttaagaatcagtaatgggccaggtgcagtggctcacacctgtaatcccagcactttgggagcctgaggtaggtggatcatttgaggtcaggagtttgagaacagcctggccaacatggggaaaccccgtctctactaaaaatacaaaaattagccgagtgagccgagatcacgccactgcactccagcctgggccacagagtgagactctgtctcaaaaaaaaaaaaaaaaaaaaaaaaagcaccagtaatggccactgctaacacttacatagcatttcctgtaagttaggcactgttctgagcacttcatgtagagtgagtcatttagcccttgtgataacgctagggggtgggattttaccattatccccattttacagatgaggatgctgaggcatggagcagttaaataacttcaagatcacagggctaatgaatggcaggaccaggatgaaaactcaaacactacactgtcactgacaaagggtctagagttgggggccttggaagtgggccaccactgggctgctgggagtctgtgatgcttgccccggtgcatgcctgcaacttagcttcccccagggctgcccttccagagccactctgcctggagacagggggacagacaaggtgacaacagaggaaccaagccagggcaaggcaacagggccagctggtcccagaggaagctttctgagtggtcccacccaaagccctcacactcttcccacccacatgcagaccctccagccataccccacaacctctcctgcctcatgaacctcacaaccagcagcctcatctgccagtgggagccaggacctgagacccacctacccaccagcttcactctgaagagtttcaagtgaggaggggcccccaccttggtcccctccctttggattctggggtagggcatgggtaggatgctgggcatgcctctgggagggagaagggagcctcgctttcttcctctgcttggcacccaagcctggactattggcaggagccggggcaactgtcagacccaaggggactccatcctggactgcgtgcccaaggacgggcagagccactgctgcatcccacgcaaacacctgctgttgtaccagaatatgggcatctgggtgcaggcagagaatgcgctggggaccagcatgtccccacaactgtgtcttgatcccatggatgttggtgggtgatgcaggggagggaggggatccccaaaatgggcagacactgagaggaatggagagggaaacacagaactagcgacagacaagaagacactggaagacctagagacagaggcacagaagagggacagagacaaagaaaggtgcagctggagacagagaaatggggacacagacccagagacaggaagagacacagaggcaaagagacacattcagtcatgctttcagcgtgtttcctaaagcacccactacatgttaggcactgctctaggtactggggatacaaagcatcaaaaatgccctcagaatgttagattcaagtgggggggaaaataagatagaatttcagatagcaataagcagaaaggagaaattaaaggaggagaagggcatagagagagaggggggaaggggagcactggctattttaatatgctggtcaagaaaggcctcactaagagggtgacaattgagcagatccttgaaggaaatgagggagcaagccgctggatatctggagggaaaacatttcaagcagaagtaacaaccagtgcaaaggccctggggcaagagcggaaacagagacctagagagaaacaaagacacatagagatcgaaccacagaaacgtgtcattggcaacgtggacagatggtgaaccacagacagggagacaagagggagctaaggcagagccctctagggtgggatagggagaccttctgacagccccactccttgcagtgaaactggagccccccatgctgcggaccatggaccccagccctgaagcggcccctccccaggcaggctgcctacagctgtgctgggagccatggcagccaggcctgcacataaatcagaagtgtgagctgcgccacaagccgcagcgtggagaagccagctgggcactggtgaggcagagggcaacctggagagcctgaggtggtgggggcagggggcagggtaagtcgggctcgagctggccctagaatggcccagcgatccaaggctcagagtcctgtccacccctcaccaggtgggccccctccccttggaggcccttcagtatgagctctgcgggctcctcccagccacggcctacaccctgcagatacgctgcatccgctggcccctgcctggccactggagcgactggagccccagcctggagctgagaactaccgaacggggtaaggaggtgatgagaggctgggagcagccaacagtatccagtccaggccccaggcccctccccaactggcaccccctcttcttgttccatccacagcccccactgtcagactggacacatggtggcggcagaggcagctggaccccaggacagtgcagctgttctggaaggtgactccctctgaaggccatccctccacctcgacacctcccgcagtccaaacagatccctacaaaccggggcttaggactccaacaggtctgggaggcgtggacgcatttatatgtgatttgcatgcactttgcatgtgcctagggagctgagttagcttttggacagactgtaacgcacgtcacagtgtggttcagtgaatagttaagagcctgctgtgtccaccaacttgtttcttcctgccctccttcctagaacctagcacaagggaacagagggaaaaggggaggggggtgagaagcctggaccccagcctggggaggctccgtttgtatgatccatccaccccacctagaggctctccttgactcaagatgagctgcacatccccttctctttttcctcctgtgccccacagccagtgcccctggaggaagacagcggacggatccaaggttatgtggtttcttggagaccctcaggccaggctggggccatcctgcccctctgcaacaccacagagctcagctgcaccttccacctgccttcagaagcccaggaggtggcccttgtggcctataactcagccgggacctctcgtcccactccggtggtcttctcagaaagcagaggtaaagggggctggcagccagaagagcacagaggtcaagcgcatcaattcaaaggctagactgcctgggttaaatctagtcctattggccgggcgcagtggctcacgcctgtaatcccagcactttgggaggccgaggtgggcagatcatccgaggtcaggagttcaagaccagcctggcctacatggtgaaacccctgtctctactaaaaatacaaaaattagccaggcatagtggcgggcacctgtaatcccagctactccggaggctgaggcaggagaattgcttgaacctgggaggcagaggttgcagcaagctgagatcacgccattacactctagcctgggcaacagagggagactccatctcaaaaaaacaaaaaaaaacaaaaaacgagtcctatcacttgctaacagtgtgacctgagtaagttacctcccatccccggcctctgtttacacatccagcagatggggatgataacagcacctactgagcggtgccatggggtgtacatgagttaagacaagtgcctggcacaaagtaactgctctgcatgtgtctgctgttgttattatcattagccagaccaggttaagctctctctctcacacacacacacactcacagcccattctgccaagaaagccaagagagaaagccccaggcttttccacttggaacctggtctatgagttcattgctcattctcaggaaatcagctgccaccacccactgctttccctaaacattggtcctcgcaaggtgggactaataatcacaataacaataatcatagctaatattcccacttactagctgtgtgatcttagacaagtttcttaacctctctgtgtctctcagttttctcattagtaaaatggggaaaagagtagtacttcctgggtatgactattagaggactcagtgaattaaaatgtatcaaggagtccagtatggtggctcacgcctgtaatcccagcactttgggaggctgaggcgggcggatcatctgaggtcaggaggtcaagaccagcctggccaacatagtgaaaccccatctctactacaaatacaaaaattagccgggcatggtggcggttgcctgtaatcccagctagtcgggaggctgcggcaggagaatcacttgagcctgggaggtggaggttgcaatgagccgagatggcgccactgcactccagcctgggcgacagagcaagtctctgcataaaaaataaaataaagtaaggtaaagtaaagtaaaataaaataaaatatatcaaggactacgcctgacacataccaagaacaatagagtgttagctgttatcactaacaagaactactccatgccaggcgctatgccaggcttgtttcgtgcatcaagtcatttaatctgcactaagaccctatgagttaggaacttttatcatcatttctactttacagatgaggaaactgaggctaagatgttgacctaccaaaggtcacccagcctgtaaatagcaaagccaggatttgaacccaggcttctggctcaagggcctgcattcttttcaccttcattccaccatttcccaccctgtctccaggcccagctctgaccagactccatgccatggcccgagaccctcacagcctctgggtaggctgggagccccccaatccatggcctcagggctatgtgattgagtggggcctgggcccccccagcgcgagcaatagcaacaagacctggaggatggaacagaatgggagagccacggggtttctgctgaagggtgaggctggcctggaaagttgggcagggccagggacaaagggaggcagtgcttatctgacaataggcatgggacaacctgaactgcccaagagacatggattctccagcctttcttgatccttcgttgttctcatttcatatcctcataatcaggaagttcttcctacagtctaacctgatcctttttctatagccctgactctgccacccttctagctctctcttccacttttcttccctaattctcatcaaatgatctaaagaagatattgtggaggttaaccctgaatcatgaggccaggttagccctcactagaggtctgaggctagctcctgatcattagcacaggttaggccctaacagaagtgcctaccccattttctctctacagagaacatcaggccctttcagctctatgagatcatcgtgactcccttgtaccaggacaccatgggaccctcccagcatgtctatgcctactctcaagaaatgggtttgtcaactatcaggcccctttccagaatcctctcctctctctcccaaggctctgcctggtccccagcaatcagaagtatagggaacattgccttcctaccatacttccagccctggagaggatctctcccaatcccctggcttacactggatccctacagctggacagaaatcaggtgctgggatagaaattgagtagggagttggcacaattcaaggagcaaacctggcaaaaatcaaaccatttcccagacaaaaataaggtgttatatgtaacagaaattggacagaggggccgggtgcagtggctcacacctgtaatcctaacactctgggaggccagggcaggcagatcccctgagttcaagagtttgagaccagcctaggcaaccttgtctctacagaaaaataaataaataaataaataaacaaacaaacaaaccaaaaattagctgggtgcagtgacacatgcctgtaaccccagctacttgagaggctgaggtgggaggatcggagggcttgagcccaggaggtcgaggctgtagtgagccaagatggcgccactgcactccagcctgggtgacagagcgagaccctgtctcaaaaacaaaaagaaattggacagaggacctggcataaattcggagagtgagtggcagaaatcagagagtaaatcagatgaaatcaggcctggtagaaatcagaaagtgaggctttagagtcaagcagagccaggttcaaatcctggctcagacacttattagcagtagatggaatctggattaaatccctgggaaaaatgaggcttgggcatgagtccccttggactcttttctcacccaccccacagtgtctgggaagccacaagaagtccaaccgggctcttgctctgccccactcccttcagcccccgcacctctctcttcccatagctccctcccatgccccagagctgcatctaaagcacattggcaagacctgggcacagctggagtgggtgcctgagccccctgagctggggaagagcccccttacccactacaccatcttctggaccaacgctcagaaccagtccttctgtgagtctatcctcagttcccccacagccccagaaggcctggaagggggtgctcagctgccacggaggcagctttaccatccaggcctatgctgaccgtacacccctcccagccgccatcctgaatgcctcctcccgtggctttgtcctccatggcctggagcccgccagtctgtatcacatccacctcatggctgccagccaggctggggccaccaacagtacagtcctcaccctgatgaccttgaccccaggtaaggggagacgggggctgggcagagatggctgtttggagggtaccccacccaaaggatgctgattttgagagtagctggggactgactttgaatcccctggtcggagggaggagacccagccttcccaacatgcattctaacttcttccggccctgccctcactgcagaggggtcggagctacacatcatcctgggcctgttcggcctcctgctgttgctcacctgcctctgtggaactgcctggctctgttgcagccccaagtgagtccctttgagagacctgagatcctgcttcccccacccacagggaacctcaggtccagatgggcccatctaagtcccttccagccttcccaaactttggggcccatgtctgagagtcccagcccccagcttcttctctctgcactaagggcagctgcacctcttcaggtggggtgggtgggacaaaaaatggaaagatcggagggtgtgtctgactcagcctccacctgcccccttctccagcaggaagaatcccctctggccaagtgtcccagacccagctcacagcagcctgggctcctgggtgcccacaatcatggaggaggtgagaatccaggagggagagggaaatgagatggggatgtcggcccaggctcagtgaagggacaccttctgaagccaagtactcaggccttcctgtcacttccggcaacatctcgtccctttggactgaagcagacccaactttgaatcccacctctgtccatctcaaagcctcagtcacctccctgtgatatggaaaaactgaccatgctgagtctgaacggtgcatggcatgtgtcaggcatgtgtgaggaacatactagtgctttgcaagtggtaccctttgtgttccaccagtaacaacagttgaatgtccccacagctgcccggacccagacagggacagtggctggggcagacatctgaaatgagccgtgctctcaccccacatccttgtgtgcaggatgccttccagctgcccggccttggcacgccacccatcaccaagctcacagtgctggaggaggatgaaaagaagccggtgccctgggagtcccataacagctcagagacctgtggcctccccactctggtccagacctatgtgctccagggggacccaagagcagtttccacccagccccaatcccagtctggcaccagcgatcaggtcctttatgggcagctgctgggcagccccacaagcccagggccagggcactatctccgctgtgactccactcagcccctcttggcgggcctcacccccagccccaagtcctatgagaacctctggttccaggccagccccttggggaccctggtaaccccagccccaagccaggaggacgactgtgtctttgggccactgctcaacttccccctcctgcaggggatccgggtccatgggatggaggcgctggggagcttctagggcttcctggggttcccttcttgggcctgcctcttaaaggcctgagctagctggagaagaggggagggtccataagcccatgactaaaaactaccccagcccaggctctcaccatctccagtcaccagcatctccctctcctcccaatctccataggctgggcctcccaggcgatctgcatactttaaggaccagatcatgctccatccagccccacccaatggccttttgtgcttgtttcctataacttcagtattgtaaactagtttttggtttgcagtttttgttgttgtttatagacactcttgggtgta

SEQ ID NO: 90 - DNA, 3380 bp, Homo sapiens
tctagagaagccaatcagcgtcgccgcggtcccagttctaaagtccccacgcacccacccggactcagagtctcctcagacgccgagatgctggtcatggcgccccgaaccgtcctcctgctgctctcggcggccctggccctgaccgagacctgggccggtgagtgcgggtcgggagggaaatggcctctgccgggaggagcgaggggaccgcaggcgggggcgcaggacctgaggagccgcgccgggaggagggtcgggcgggtctcagcccctcctcacccccaggctcccactccatgaggtatttctacacctccgtgtcccggcccggccgcggggagccccgcttcatctcagtgggctacgtggacgacacccagttcgtgaggttcgacagcgacgccgcgagtccgagagaggagccgcgggcgccgtggatagagcaggaggggccggagtattgggaccggaacacacagatctacaaggcccaggcacagactgaccgagagagcctgcggaacctgcgcggctactacaaccagagcgaggccggtgagtgaccccggcccggggcgcaggtcacgactccccatcccccacgtacggcccgggtcgccccgagtctccgggtccgagatccgcctccctgaggccgcgggacccgcccagaccctcgaccggcgagagccccaggcgcgtttacccggtttcattttcagttgaggccaaaatccccgcgggttggtcggggcggggcggggctcgggggactgggctgaccgcggggccggggccagggtctcacaccctccagagcatgtacggctgcgacgtggggccggacgggcgcctcctccgcgggcatgaccagtacgcctacgacggcaaggattacatcgccctgaacgaggacctgcgctcctggaccgccgcggacacggcggctcagatcacccagcgcaagtgggaggcggcccgtgaggcggagcagcggagagcctacctggagggcgagtgcgtggagtggctccgcagatacctggagaacgggaaggacaagctggagcgcgctggtaccaggggcagtggggagccttccccatctcctataggtcgccggggatggcctcccacgagaagaggaggaaaatgggatcagcgctagaatgtcgccctccgttgaatggagaatggcatgagttttcctgagtttcctctgagggccccctcttctctctagacaattaaggaatgacgtctctgaggaaatggaggggaagacagtccctagaatactgatcaggggtcccctttgacccctgcagcagccttgggaaccgtgacttttcctctcaggccttgttctctgcctcacactcagtgtgtttggggctctgattccagcacttctgagtcactttacctccactcagatcaggagcagaagtccctgttccccgctcagagactcgaactttccaatgaataggagattatcccaggtgcctgcgtccaggctggtgtctgggttctgtgccccttccccaccccaggtgtcctgtccattctcaggctggtcacatgggtggtcctagggtgtcccatgaaagatgcaaagcgcctgaattttctgactcttcccatcagaccccccaaagacacacgtgacccaccaccccatctctgaccatgaggccaccctgaggtgctgggccctgggtttctaccctgcggagatcacactgacctggcagcgggatggcgaggaccaaactcaggacactgagcttgtggagaccagaccagcaggagatagaaccttccagaagtgggcagctgtggtggtgccttctggagaagagcagagatacacatgccatgtacagcatgaggggctgccgaagcccctcaccctgagatggggtaaggagggggatgaggggtcatatctcttctcagggaaagcaggagcccttcagcagggtcagggcccctcatcttcccctcctttcccagagccgtcttcccagtccaccgtccccatcgtgggcattgttgctggcctggctgtcctagcagttgtggtcatcggagctgtggtcgctgctgtgatgtgtaggaggaagagttcaggtagggaaggggtgaggggtggggtctgggttttcttgtcccactgggggtttcaagccccaggtagaagtgttccctgcctcattactgggaagcagcatgcacacaggggctaacgcagcctgggaccctgtgtgccagcacttactcttttgtgcagcacatgtgacaatgaaggatggatgtatcaccttgatggttgtggtgttggggtcctgattccagcattcatgagtcaggggaaggtccctgctaaggacagaccttaggagggcagttggtccaggacccacacttgctttcctcgtgtttcctgatcctgccctgggtctgtagtcatacttctggaaattccttttgggtccaagactaggaggttcctctaagatctcatggccctgcttcctcccagtgccctcacaggacattttcttcccacaggtggaaaaggagggagctactctcaggctgcgtgtaagtggtgggggtgggagtgtggaggagctcacccaccccataattcctcctgtcccacgtctcctgcgggctctgaccaggtcctgtttttgttctactccaggcagcgacagtgcccagggctctgatgtgtctctcacagcttgaaaaggtgagattcttggggtctagagtgggtggggtggcgggtctgggggtgggtggggcagaggggaaaggcctgggtaatggggattctttgattgggatgtttcgcgtgtgtggtgggctgtttagagtgtcatcgcttaccatgactaaccagaatttgttcatgactgttgttttctgtagcctgagacagctgtcttgtgagggactgagatgcaggatttcttcacgcctcccctttgtgacttcaagagcctctggcatctctttctgcaaaggcacctgaatgtgtctgcgtccctgttagcataatgtgaggaggtggagagacagcccacccttgtgtccactgtgacccctgttcccatgctgacctgtgtttcctccccagtcatctttcttgttccagagaggtggggctggatgtctccatctctgtctcaactttacgtgcactgagctgcaacttcttacttccctactgaaaataagaatctgaatataaatttgttttctcaaatatttgctatgagaggttgatggattaattaaataagtcaattcctggaatttgagagagcaaataaagacctgagaaccttccagaatctgca

SEQ ID NO: 91 - DNA, 18982 bp, Homo sapiens
gttttccttggtctggggctccccacagttccccaccatcactcctcccattccttccaactttatttttagctgccattgggagggggcaggatgggagggaaagtgaagaaaacagaaaaggagagggacagaggccagaggacttctcatactggacagaaaccgatcaggcatggaactccccttcgtcactcacctgttcttgcccctggtgttcctgacaggtgagggaagttaacttcttggtttctggtggggatggaagatacatagattgtttggaattgggaccattatagttaaaattctttgggatttaggttaggaagcgaacactggttgtacatttcttgtatgtgtgtctgtgtccttgtgcatttttatgccctcacatatgactgtttgaatattgagactggcaggggctaaagctgcctaggaccttgtgtaagatttgtatctaataattatataatatataatgtataattatatattatatataatatacatataatatataacaattatatattatatataatatacatataatatataacataattatatattatatataatatacatataatatgtaacataattatatattatatataatatacatataatatataacataattatatattatatataatatacatataatatataacataattatatattatatataatatacatataatatataacataattatatattatatagttatatattgtatataataattattattattttttaaagatagggtctcactttgttgtctaggctggagtgcagtggtgcaaccacagctcagtagttgggactactaggtacgcgccaccacgcacagctaatttttttttttgaaacagggtctcactctgtcattcaagctggagtgcagtggcatgatcatggctcactctagcctcaacctcccaggctgaggtgatccttccaccttagcctcccgagtagctgggactataggcgtgtgctaccacgcctggctaatttttttttttttagagacagagttttgctatgttggccaggctggtctttaactcctggactcaagcaatccgcccccgacagccacccaaagtgccgggattataggcatgagccaccatgcttggctgagatttgtatctaaatatataaaatcttcatcctaagccctataggggtaaggagacaaaaaagaaatgtgatgtgaccttccacgtggctagtctgattcctattatcccctccctaacttcttacccttggtggtccctggggcctgaggcataactgactaactatgtggtcagaactctgggtttatctaaccaatgagctgcagtttctggtcatacagccctgccagttttctggatgcaaaactgctcacatactaaacacctttctgaaaatgagcatggtttgggataaagctatagccattggtaatggtgagggggtagcctgagagggggttgcttagaagtacagagcaagacatagttggggaaaggaccatgggaaggacaagaggcctggaatttttccttggcagtgccctgtaatcattgtttcctaaaataccagctctgattttaaaggcattggggtcaaaagggaagattagctagggtcgggcacctttagaatgggctgaaggctgaggaaaccatggaggtaggtaggggaccagttgggagagtagattagttaaaaaggaagcaggttgtgggaaacttcaggatgatgggacccttggaaaggatggatggcaaactatgtgtgtgggcaggcgagtggccccacccagttaattaccactgagatttccaaggctggaatcaaccagggacctagacattggaaaaagacagtgagagtgtgacaatgacactggaagtcaggaagagatagagaaggagagagccagacatgcagtgctccttagcttcctttcattccccctattttggggagaattggaagcaatggttgttctggggatacagaaaggccctctccctcttttgaccctcacagtttgttgaggagagtgtgtggaaggaatgttgtggaaaagagtagccaggcgcggtggctcacgcctgtaatcccagcactttgggaggccgaggcgggcggatcatgaggtcaggagatcgagaccatcctggctaacacggtgaaactccgtctctactaaaaataagaaaaattagccgggcgaggtggcaggcgcctgtagtgccagctacacgggaggctgaggcaggagaatggcgtgaacccaggggggcggagcctgcagtaagccgagatcacgccactgcactccagcctgggcgacagagagactccgtctcaaaaaaaaaaaaaaaaaaaaaaaaaaaaaagtaacttgaccttttcagacatgtctgtgaatgaaatttcaggggtgggaatggaaatacagctgtacatcagcatggcagagggccacagtttaggcatctggacacaaacacaggaagggaatcatctttgcctggagctctgagtacatgacactgagagaggccagaaaagcttatgagtgaaaaagcaggcaggcagactgagattaagacgcttcctcacagcttctctcgggctgtgcctctagccattcactacctcatactaacattatgatcctgaccccacaggtctctgctccccctttaacctggatgaacatcacccacgcctattcccagggccaccagaagctgaatttggatacagtgtcttacaacatgttgggggtggacagcgatggtgaggaagaaaccggagtgccaggggattgggactgcagtagtgctaacaaaggggaggcaagatagatgggactctaaactaatctggtcttttgaaagtggctggggctctaaacttaccacctccatgctctttccctttggcctatgtcaagggtcatgtttgccctgtgcttacttacattcacatcctcttcccaggatgctggtgggcgccccctgggatgggccttcaggcgaccggaggggggacgtttatcgctgccctgtagggggggcccacaatgccccatgtgccaagggccacttaggtgagaagatgcctgacccttctcctcctaacccctgactttgatactctagaagcttcaactccctatacctcagctttttcacccctaaaatccgcatactccctgtccccaatctgataccaatccctgctcattctcctccaaaatcacatgaattcaagcaccccatctatgaccccatgatctcattctcttccacctccttccaaccaggtgactaccaactgggaaattcatctcatcctgctgtgaatatgcacctggggatgtctctgttagagacagatggtgatgggggattcatggtgagctaaggagagggtggtggcagtgtctctgaaggtccataaaagaaaaaagagaagtgtggtaagggaaaatggtctgtgtggaggggtcaaggagttaaaaaccctagaaagcaaaaggtaggtaatgtcagggagtagtcttcatgcctccttcaactgggagcatgttctgagggtgccctcccaagcctgggagtaactatttcccccatccccaggcctgtgcccctctctggtctcgtgcttgtggcagctctgtcttcagttctgggatatgtgcccgtgtggatgcttcattccagcctcagggaagcctggcacccactgcccaacgtgagccagaggaaggctgagtacttggttcccagaaggagatactgggtgggaaaaagatggggcaaagcggtatgatgcctggcaaagggcctgcatggctatcctcattgctacctaatgtgcttgcaaaagctccatgtttcctaacagattcagactcctggccaggtgtggtggcccacacctgtaattctagcactttgggaggccaaggtgggcagatcacttgaggtcaggagttcaagaccagcctggccaacatggtgaaactccatctctactaaaaaaaaaaaatacaaaaattagctgggtgcgctagtgcatgcctgtaatctcatctactcgggaggctaagacaggagactctcacttcaacccaggaggtggaggttgcggtgagccaagattgtgcctctgcactctagcgtgggtgacagagtaagcgagactccatctcaaaaataataataataataattcagactccttatcaggagtccatgatctggcctggcacagtaactcatgcctgtaatcccaacattttgggaggccaacgcaggaggattgcttgaggtctggaggtttgagaccagcctgggcaacatagagagaccccatctctacaaaaataaaaaataaaaaaattagctgggtatggtggtgcatgcctgtggtcccagctactcaggaggccaaggtgggaggatcacttgagcccaggtggtccaggctgcagtgagccatgattatgccactacactccagcctgggcgacagagtgagactctgtctcaaaaacaaacaaaatgggccaggcgtggtggctcacgcctgtaatcccagcactttgggaggccgaggccagtggatcacgaggtcaggagatcgagaccatcctggctaacagagtaaaaccctgtctctgctaaaaacacaaaaaattagccgggtgtcgtggcgggcgcctgtagtcccagctactcgggaggctgaggcaggagaatggcgtgaacccaggaggcagagcttgcagtgagccgagattgcgccactgcactccagcctgggcaatagagcgagactctgtctcaaaaaaaaaaaaatgttctctacccacatgcctttcctaatattctcttctccttaaacattttcagtcttcatagttgctaccatgtttcattcctcaccatcagaaccactctgcttttgttcccccaccatacagtcattgctatgttcctacatagcatttaattccttcttgttttttagaacattgtatatataaattatatctatgtatataaatgtgtaggtgtgtgtgtttatatacctatatatacatatatacatatatatacatttatatgtatacttacatacacacaattactaaagattactaaaggaatattttattaatttctacacttacacagagcctggcacagtaccttctttgcatgtaagaagtgccttataaatgtctaaattgaatgtgtcctcctgtgacctctttcccttgttgcccccagctcagtgtcctctacctcagtgttctccttccttctaggctgcccaacatacatggatgttgtcattgtcttggatggctccaacagcatctacccctggtctgaagttcagaccttcctacgaagactggtagggaaactgtttattgacccagaacagatacaggtaagagaaggcaatatgagctgggcacagttgcttgtggcacctacttaagaggtggaggtgggaggatcccctgaggccaggagttcaagactagcctgggcaatacagtgagacctcatctctaaaaatatgaaagaaaaaaaaaatagccaggcatggtggcatgcgcctacagtcccagctactcaggaggctgaggcaagagatcagttgagcccaggagtttgaggctgtagtgagctttgatcacacaactgcactccagcctgggtgaaagagtgagacctcatttcttagagagagagagaaaggcaatatggatgggcttggaaggggagagacagagagagaggggataaatgtaggtgttgtcttcagtagtatccaggtgttcatctctcctctcttatatactttcttcttcctcctctccccccatctcacatacatacatttcatttgaatgcgctttattcccaggtgggactggtacagtatggggagagccctgtacatgagtggtccctgggagatttccgaacgaaggaagaagtggtgagagcagcaaagaacctcagtcggcgggagggacgagaaacaaagactgcccaagcaataatggtggcctggtgaggcattgggaagacaggtgtgggaggctagagcaatgaaggcttagaagagttagggcggggccaggcatggtggctcacgcctgtaatcccagcactttgggaggcaaggcaggcggatcacctgaggtcaggagttcgagaccagcctgaccaacatggagaaaccccatctctactaaaaatacaaaattagccaggcatggtggcgcatgcctgttcagaggcatgctacttcggaggctgaggcaggagaatcacttaatcccgggaggtggaggttgcagtgagtcgagatcacaacattgcactccagcctgggcaacgagagcaaaactccatctaaaataaaataaaataaaatgaaatgaaaatctttcccttaaaaaaaaaaaaagaagaagaagaagagttagggcaggtttggagtgcagtgtgtatatcccaagatgtcttgcatactttctttgtatgtacactaatggtacaaagaggaaggctaagtgggctgtcattgtactccctctcactgcatttctacaaagtatctatgtctgtgtctctccatatttcacagacagaagtctctttctatccctccactccaacaatgatcctggcccacaggttctccactactgatgtcctagcccacgttccaaacatgatccaaaactcatctctaggggcacggtggtaaaattgaaacaaaacaaaacaactcatctctgggaggagtccctgcccagatcattcttttccgttctatatttcatcgatatttcccctcccaagtgcaatatttgttgaatgaatctgagtgtatgaacgttgtacttatttggactgataagctactctgtatgttctatgaccttcaaacatttgagctctcactccatgccatctccatgttaaatactcaggaaatggcctaaaaggcaagatgcctgacctcagggaagtgctgatgttaaatcctgtgtgtgtgtgtgtgtgtgtgtgtgtgtgtgtgtgtgtgtgtatgtgtgtgtgtgtgtgtgtgtctgcatacatctgatctcacctcactcctttctcttctcagcacagaagggttcagtcagtcccatgggggccgacccgaggctgccaggctactggtggttgtcactgatggagagtcccatgatggagaggagcttcctgcagcactaaaggcctgtgaggctggaagagtgacacgctatgggattgcagtgagaattcaccctggatctggaagagttggggagtggcaggggggcagtgtcttgtgaactgtccaaggactgggaacttgaggaaaacaagggcattaactacttcccagacttcagccacagcatgttagttggctgtgttctgtaccaactctaatgcctcattccttgatcttatgacctcttaggtccttggtcactacctccggcggcagcgagatcccagctctttcctgagagaaattagaactattgccagtgatccagatgagcgattcttcttcaatgtcacagatgaggctgctctgactgacattgtggatgcactaggagatcggatttttggccttgaaggtgaggattactctggagaaatggacagggcgggagaagttctggagtgtaggtggggctctggagtgagttcagtaggtcaaaggggaaactgtcttcccctgatattgtctcaatgttttctcatgaccaagggtcccatgcagaaaacgaaagctcctttgggctggaaatgtctcagattggtttctccactcatcggctaaaggttggacagattgaccccttcattacttctcccattctctgactcagataacttcaaccacagggccctccagattcctcctttaaccagcctccatgctcaccttcccatgcctttccaactgagcccagcagaccctcagtgatcttttcactcctggaacgttttttttctctttattccccactgtcttctcagtgaccccatctgcttctgtcccacaggatgggattctttttgggatggtgggggcctatgactggggaggctctgtgctatggcttgaaggaggccaccgccttttccccccacgaatggcactggaagacgagttcccccctgcattgcagaaccatgcagcctacctgggtgagcagcagagagttgcagaggacttacagggtaggggaggaaatacatccctagtgggggcgggtatgaaatactccctcttaactcatgcggtttctcactgacctctggttacttcccttgggacctcctgctatgcctttagggaacccccctactctggaccccatcttcttttcctttacctctgttactttgcccacttctaggttactctgtttcttccatgcttttgcggggtggacgccgcctgtttctctctggggctcctcgatttagacatcgaggaaaagtcatcgccttccagcttaagaaagatggggctgtgagggttgcccagagcctccagggggagcaggtagggcatccaaggaagggtgggacctttggattcccagggacctctgggctgttggggaggagtgtgaagtgggtaagagagaggcctccaaagtctgtgcggaattctggttggcagagtctgtcagggatgtaaggagcagactagcaggctggtgagtgcttcccactgagtccacttgtctacagttaccttcccttttctctggggtcatcatcacccaccattccccagattggttcatactttggcagtgagctctgcccattggatacagatagggatggaacaactgatgtcttacttgtggctgcccccatgttcctgggaccccagaacaaggaaacaggacgtgtttatgtgtatctggtaggccaggtgagacttgctgggaccccctgccctggacttgcattgtgggggtggagggaggaaaggagggaaggtgcacatatttgagggtttgctgagaggttgggtctgccagattagcatcttctatcttctctcctccaccagcagtccttgctgaccctccaaggaacacttcagccagaacccccccaggatgctcggtttggctttgccatgggagctcttcctgatctgaaccaagatggttttgctgatgtggctgtgggggcgcctctggaagatgggcaccagggagcactgtacctgtaccatggaacccagagtggagtcaggccccatcctgcccaggtcaggagtacccaaataaagcaggggcacggttgtaggaagaggaatagggggatgctctttgcttgtcaatagtctccttggcttgagacccaaactgaacaagtgcttttattagtaggcaaaaacataaggcagtggacaggttgctgaactaagaactcctgaacacaggcaagtttctcttattcccaggactgacgggagcattataaagagcaaggcatggccgggtgtggtggttcacgcctgtaatcccagcactttggaaggctgaggcaggcagatcacctgaggtcaggagttcgagaccagcctggccaacatgatgaaactctactaaaaatacaaaaaattagccgggcctggtggcgcacacctataatcccagttactcaggaggctagggcaggagaatcgcttgaacctgggaggcggaggttgcagtgagccaagatcacaccattgcactccagcctgggcaacaagagtgaaactccatctcaaaaataaataaataaataaaaagaaagagcaaggcaggaggcctgagaaactaggtgtatgggtccctgcctcagtattctctctcttcctctcagaggattgctgctgcctccatgccacatgccctcagctactttggccgaagtgtggatggtcggctagatctggatggagatgatctggtcgatgtggctgtgggtgcccagggggcagccatcctgctcaggtgaggggtcccagctcaggtggtggtggacagcatagcatagctgttaaaggcaagggccttaaagtcacagatggagatttggttttcttggtcaacttactctgtgcctccattcttagtttataaaatgacagtagtaatagtacctaccttataggtttattgtgaagattaaatgagataatccatataatgatttgaacacagtgcctagcatgtaagtgcgtattgaagtgaatctagggctgggtacagtggctcacacctgtaatcccagcactttgggaggcgaaggtaggaggatcatttgaggccaggagttcaagaacagcctgaccaacatggtgaaaccccgtctctactaaaaatacaaaaaaattagctgagcatggttgtgggcaccagtaatcccagctactcgggaggctgaggcaggagaatcacttgaacccaggaggcagaggttgcagtgagctgagatcgccccactgcactccagcgtgggccacagagtgaaactccatctcaaaaaaaaaaaaagatcaatgacatgaatctattatcttacttctgtcagagggttcgggggagggtgacatgtgcattcagcccctccttctttgttttgaccatggggaagcaaacactgggcttgcacttctcagagggcttacctcctactgctagaatttcttttccacactgttcccagctcccggcccattgtccatctgaccccatcactggaggtgaccccacaggccatcagtgtggttcagagggactgtaggcggcgaggccaagaggcagtctgtctgactgcagccctttgcttccaagtgacctcccgtactcctggtcgctgggatcaccaattctgtgagtgactaaaatgcatcacaggcaactctcaattccttgcatgccttcctcactagacccctttccaccctcactcttgcctccttcattcagacatgaggttcaccgcatcactggatgaatggactgctggggcacgtgcagcatttgatggctctggccagaggttgtcccctcggaggctccggctcagtgtggggaatgtcacttgtgagcagctacacttccatgtgctggtaaggagagggcagtaactgcttagcatcagggcctgagaatgaggagaaagctgggtcagaggaggaattttagctgaatcagcaagaaagccaaagccgggaaaatgagatgattcagactttggagtcagggctgatctgggtttgaatcctagctctgccatttaccacctatgaattctggcaagtccaaccctcagttttcttgtctgcaaaggggtgataataataactgtatcataggagttgtattaaaattaaatttagccgggcgcagtggctcacgcttgtaatcccagcactttgggaggccgaggcaggtggatcacaaggtcaggagatcgagaccatcctggctaacatggtgaaaccccatctgtactaaaaatacaaaaaattagccgggcgtggtggcaggtgcctgtagtcccagctactcgggaggctgaggcaggagaatggcctgaacccaggaggcagagcttgcagtgagccgagatcatgccactgcactccagcctgggcgacagagcgagactctgtctcaaaaataaataaataaataaataaattaactaattaattaaatttagtaatacagttaagatcttaggacagtgcccagcacacagaaaatgcttcataaatgatcactacaattatcacaagatccttgactctgtgactctgtgactctgttttccttcaggatacatcagattacctccggccagtggccttgactgtgacctttgccttggacaatactacaaagccagggcctgtgctgaatgagggctcacccacctctatacaaaagctggtcagcagtgccatgccctgccccttgctcccaacactgccctccttcaagagaaaagggagggagggagaagacatgagatcatggtgaaatctgacctgggctcctctaatcaaaatatacccacttttgtcttttcactttccccctattctattcctttcctccttgctttcctctcaacccttagccccttccctttcttccaggtccccttctcaaaggattgtggccctgacaatgaatgtgtcacagacctggtgcttcaagtgaatatggacatcagaggctccaggttggatggacatgtactaggcaaaccagggtgacctgagacagactggaagggactcgaagggcgggtagggggttgtttcttacccatgataacaaaagtgagacttttggcactcccctccttcaactcctggtctctccctcattcatcattcccaggaaggccccatttgtggttcgaggtggccggcggaaagtgctggtatctacaactctggagaacagaaaggaaaatgcttacaatacgagcctgagtctcatcttctctagaaacctccacctggccagtctcactcctcaggtgcctttggaggagggggtgtgggagaaggaaagaaaggaggaggaagaagattggggtattggcctcagctgtgaggtcctctagagaaaggctcagtgtttagaggctgtgggtaggacagcagttgcagccccagctccagcttctatctccattcccctgccctcagagagagagcccaataaaggtggaatgtgccgccccttctgctcatgcccggctctgcagtgtggggcatcctgtcttccagactggagccaaggtgggttggggtctaggatgaaaagagggctctaggagggcagaggctgggatctgagggtcctgggacttcagggaagggggcgcacaagggctcctgttcctctgtagttgttccatgaggaagactctaccattaccctgtgtcccctgcccctaggtgacctttctgctagagtttgagtttagctgctcctctctcctgagccaggtcttcgtgaagctgactgccagcaggtgagaatgaagggaactttcttccagacctctcctcctactgagtcttgactggaggggtggggaggaacaacattgattcctctattaacagagaagggtgtcttctgaggaggggttgagatgtgagcctctcccctctgaccctacagtgacagcctggagagaaatgggacccttcaagataacacagcccagacctcagcctacatccaatatgagccccacctcctgttctctaggtatgcccagcttctagggtgggacccagttctgacctcagactcatacccttatgctgcttccctccccttccatgtgcctcagtttttccaaaaacccaagcccttgcggctgctcagtctttttgccctcaatcctattcatgctgaatcttcccttttaagcatcttactttcctaggtatagtgttttgccaggccttgggcactggagctgggatgaggggatatgggatgtagccataaagcttgcattgtctgtgtcatgttctacttctgtcttctccatgtacccccacctctttatccatgtgctggccctgcctcctctgaatccacgtctgtgtgctgatcatgtgcccctgtgtctgtgttatggctgtgaccatgtacttcctgacttggtgttcacacagtgagtctaccctgcaccgctatgaggttcacccatatgggaccctcccagtgggtcctggcccagaattcaaaaccactctcagggtgagaagctggaggggtcttggcatgaggagaatgtgggggaacaacagctttgtgggaaaaggatgggaagggtctctcttggattttaatggtatctagggtgaaggggaacaaatgaggaagggtcttctgtctcccacttcttcctattcccaaccttcctcttaggttcagaacctaggctgctatgtggtcagtggcctcatcatctcagccctccttccagctgtggcccatgggggcaattacttcctatcactgtctcaagtcatcactaacaatgtgagtctggtctaggagggcatggaatcctgccaccttgagctggtggactcactgaagctggacaccacaccagctccctatctgttgggcctctgctcttggggctcttctctctggggggctttctttttacacatgtggcttattagagagaagaaaaaggtattataaggggaagaactacaagggtgtaggtatgttccaactcagccttgagtggctagcgccaccccatcaggagggtctttcaagttggatcttcctctaggcaagctgcatagtgcagaacctgactgaacccccaggcccacctgtgcatccagaggagcttcaacacacaaacagactggtatgagtcacaaaggggtgtccagagtgggaatgcaagtggagttgggtgacttgggacaagagggtaggaactggagtggggaagaagggatctttccaccccagggtcctgatctggagtgggaatgaaaatggagtcaggtgccttgggacaagactgtgtgaactagaggtggggaaagaggatgtttctaccccagagtcctgatctgtctctctctgtctcttctgttagaatgggagcaatactcagtgtcaggtggtgaggtgccaccttgggcagctggcaaaggggactgaggtctctgttggactattgaggctggttcacaatgaatttttccgaagagtaagcctttccttttctagtactccccacttctgctcctttctggaactttagcataggttttggaggtagacagacccacgttcaagtttcacttttgcctcttactagctatttgaccatgagcaagttatttcatctctctaagcctctttttcctaatctctaaaatgggaagataataccaatttcatggggttgttataaagaataaatgaataatgagctggacatatggtgaacactcagtggaagctagttattatccttgtattttcctccactgaccattacttttttttttcctgaccattccttagtgctgtatcaatcaacatttgcaggatacctaaatttaatcagttaagaatccatcacgttcctattacgtaaaaggccctgtattaggttgacactgagaatatctccaacatttagcctcatgcctaactcattgtaggcgcttaacatatttttgctaaatgaatgaattattgatattacatgcaggatttgtactggggagtggtgggaagtaagattgtataggtgagagggatctagattacgaaaggcctctgaagccagggagaaactgaacttaatatgacaggtagtgaggagtcagtgtgagttcctcctgggcagggaaatggcatcttaattgtaatggctgtttggcactaaggtcaatgttgtgctttcccatatctacctggaataacacaagatccctgggatgtcatcatatgttttagggaagttaagtccaataaaccacccttctccaagtctctgtccttctttggtatctttttttcactagtctattcatgctttcaacaaagatttattaagaaaccactacatggccgggcgcggtggctcacgcctgtaatccctgcactttgggaggccaaggtgggcagatcatgagatcaggagatcgagaccatcctggctaacacggtgaaaccctgtctctattaaaaataaaaaaattagccaggtgtggtggcaggcgcctatagtcccagctacttgggaggttgaggcaggagaatggcattaacccgagagatggagtttgcagtgagccgagatcacgccactgcactccagcctgggtgacagagcgagactccatctcaaaaaaaaaaaaaagaaaccactacatacttggtactctgctatctagtaggcactaaggacacaaaggttagtaaggcacagcctttaacctagaggatcttatagttcaggagtgaaaaacagaagtaaacaccagtgttggtgggggttaggaggaatgatttccctaaatcccagaggggatgacatctaaacttcaatctaaaggaggggtagaggtcagccaaaggaaagaggagtagaatgcatttcaggtaaagcaccagatgtattgattgtccttggaaaacaaacagcagcagcagatgtgaccaggggttttccatctattacccttcctctcttttcccattggtcttcagccttttcttctggtcttgagagccctcaacattatgcctctcagcctcaactttgctgttgggattccaaagaactatatcacctgataatggctcattttaaatgtcttcctatccacttgttccataggccaagttcaagtccctgacggtggtcagcacctttgagctgggaaccgaagagggcagtgtcctacagctgactgaagcctcccgttggagtgaggtagggctggagaccgagtctgagagctgtgaaaataatgatgatgggtatgtggtagggccacccgtgggctttttcagaacgaaggcatctccatcaggcagcaggatcctagtgttccactgccgccattcctgcctcagtttctttcctttaagtagcaggaggttatttattctatttgggggctggctttgatataatgtggggtgaggctagctgggttataggatgcatgtagaaaactactcttctgtccacgcagagcctcttggaggtggttcagacccggcctatcctcatctccctgtggatcctcataggcagtgtcctgggagggttgctcctgcttgctctccttgtcttctgcctgtggaaggtaagcactgctttagtggggagtgtggagcatgatgcccatgagttgagggatccttgattatagcagagagaacaggatttgtgctgggcagctaaccaggctgtggatgtcatgcccagatctccttcactgtaccccacaaatgttggttaaattattctaagccaaataaaataaatttgaattccatttttggaaacagaacaaaagtgaagacctcagataagtctgagagctactggcaaggttcccagtctaggcatttggcagtgacgcttatcttttcttctacagcttggcttctttgcccataagaaaatccctgaggaagaaaaaagagaagagaagttggagcaatgaatgtagaataagggtctagaaagtcctccctggcagcttcttcaagagacttgcataaaagcagaggtttgggggctcagatgggacaagaagccgcctctggactatctccccagaccagcagcctgacttgacttttgagtcctagggatgctgctggctagagatgaggctttacctcagacaagaagagctggcaccaaaactagccatgctcccaccctctgcttccctcctcctcgtgatcctggttccatagccaacactggggcttttgtttggggtccttttatccccaggaatcaataatttttttgcctaggtgcctgactcctttcagattccctctttatcttccctcacagtttggaaaggatgagggttatcttcctcgattcttccaccctctcactttcctgcctgttccccactccacaggagggagctgacgttggcttgaaaggagtaaagtcaacatctgctgctttcctgtggactctggtgattcatagagccggatggggagagtcaacaggaaaaaaggagggaggaggaaaagccacaagagacattctgtacaattccaaggaacagagaagcctttagacaggcaactgccatcccccctgaaacctgagacctgtagtgcactcgaccgccctcaggtgttggtgaaacagagctgcccccaggctcgctgggcataggcttcctgattccaagccttttctgggagcaaagccagggcctggtgcctgattttctgaagccaggagccctcaggtggctggagctggaatagcagggaggactgggtgtacctaggcagtattttctctacttctctcaagtcttatactcactcttgagccctccttggggcctgcttagaaagcagacaggagagagagtactgctacttgatgatgggaaatgctttcactttaccagctttgggaagcagcagccccatgggatctaaaagtgtggagtctgcattaagaaacctacatgggtggcatggggctctggggagcaagcccttacttgctcagcactggttatgtagcacaaatagctcctaggaaaatgtttctggggcaaccctagaaccctggtcatattttgcagggtttctctggtggaatcagtttgccagcccttgcttgatgcttactggaaatctccaggttaatttctatctctgatccctccccaacccactccatatttgggtcatggacagtaaaggcagttggattctcatagacaactgggtaacttatatttctttgtaatcaagacttgagatatcgaagtcagttattggtctccagagtgcagctctgggagccttttgaagaatcagcactcattaagagctgagaagagagaagacctgattgggtggttgactagcagtcacagaacctgtcctcccaggctgttcctgaggcctgaccacagtatttattttggcatgtctctggccttctgcagaggcccaccctcatgggcattgtctctgtttcccagtggggtggacagtatatcagatggtcagaacaaataaagttcagtgtcaaatga

SEQ ID NO: 92 - DNA, 81123 bp, Homo sapiens
gcccggaacgcccgcgggctaggccacaacggctcgggaaccgccgccggtatccgcgtccgcagcgccgccagccaggcgagagccgtgtgggatcccagcgcccgcactcccgcccccgccaaggagccaggtgagccgctgctgggagacgcctgggcgccgggggctgcaggtcccagggcgggggctgcgtccgtcaccggcaggtacccaggtatgccgcagagccaggcacgccgtgggcactcagtcagtatctgtggaatgaatgaatgatggtcgtccctgggagcttatctctgaggtattgtctctactttcaaaggccgtgtggatggcaatgacaagagacaacagtgtgtgcgttttgcaagctgcatcctttcaaattctcctgtctatattgtcaaaagccccagaactgacgtgctacctgcaccccaccgcctaccccatccatttcctcctgaggcctgactgcccggccgttcctcttcctttcagaccccactgcttttgttaattttgttccctgtgactgaatccccacccccacctccttgcccctttcttttcatgtcaaatgccgttgatgtgtcaggggccccgtgaagccttctccagcacccccaccccaataatgagcatctctccaacacaccatgttactctatccacattgcatggaaggtggttgtcctatgtttatgtgtccaatggtcatccgcttaaggactgtcatcttactagtcatccctagccactagccagagtgactaaaggatctaaaggccaggctctttgcttataccttttctgtattcccaatacattctccataaaaacctaggtagtaacaggtgtagggttgtttctgatggaattacaaatgcttattttgaaaattcggaagtaaattttgcctttccgtgattatagaaaacataagaaagttaacaatatcagggggaagatattcctgcaactaaactagctttcaagatttcatattatttgggtcaatagctaaaaaattggattgtatttaaactttttattcttgacttttttttttttttttttttttgagacagagtcttgctctgtcgcccaggctggaatgcagtggtttgatctcggttcactgcaacctctgcctcctaggttcaagcgattctcctgcctcaccctcctgagtagccaggactacaggcacgccatcatgctcggctaatttttgtatttttattagagacggggtttcaccatgttggccaggctggtcttgaactcctgacctcagctgatccaaccgccttggccttccaaagtgctgggattacaggcatgagccactgagccatgtctggcctattctttacttttaaagcactctgaacacagataatgtaaataattagataaatggatggatggatggatggatggatggatggatggatggatggataagggtactatggagggtgaaagagctaggccaaaagtgcttgtattttaacagggcccccaaatttagcactgaaaggctcatgaaagataatccactatatttatagtggtagtcatactttaatttttatcagaatcacctggacagcttctttgctttttttctacctagcaagacctactgaatcagaatctctgggggcccagcagtctggacagcttcttaaaacagactgatggcccccagagtttctgattcagtaggtcttgctaagtggggcctactcaacagtaggagtttctggtcattgcatcttcttgggaagtgtcctgctagtacatgaaaatgagccactaggatttctatgaaatcaagaaagacataatggagctggagaaattccaaagaaaattacttaaaaaaaataataaggaaaccatgcgtttacccttgctgctgttagccagacatttgatggagttccttaaagacaactttccacctgctcctcctagccatcctcactgtggtcgtaggagtttatgacttgataacatctcctagactaatattaatggtctccaattggctgttttgcctcagtctctcctatctccactgtccaacaactttttgtgatgatggaaattttttatatctgcatatctgcactgtccagtaaggtaaccactagccatatgtggctgttgagcacttgaaatctagctagtataattgaggatctgaattttttattttaagtttaaatagccacatgtagccagtggctaccatactggacaactcagctctagaacataacactggcacatttcatcttcccaaaatgcatctctgtgcgtattactacttctgctgaaagactttaaataggccaggcgcagtggctcacgcctgtaatcccagcaatttgggaggccgaggcgggaggatcacctgaggtagggaattcaagaccagcctggccaacatggcgaaaccctgtctccaccaaaaatacaaaaattagccagatgtggtggcacatgcctgtaatcccagctactcaggaggcaaggcaggagaatcgcttgaacctgggaggtggaggttgcagtgagctaagatcgcgccactgaactccagcctgggtgacagagctgtactccatctccaaaaaaataaaaaataggccgggcgcggtggctcacgcgtgtaatcccagcactttgggaggccgagggaggcagatcacgaggtcaggagatcaagaccatcctggctaacaccgtgaaaccctgtgagctgagatcacgccactgcactccagcctgggcgacagagcgagactctatatcaaaaaataaaataaaataatatacatatatatttatatgtatacgtaaacatatgtaaagtaattgacaacatttaaaagccagaagattccacataaaaatctggcattatggcttctcctggaaaagatcagatctaagccattccgggccccacattgaccgatggcaaaaatggctagagctaagcagcttctgctgcctttgccagccccactgttcccaccactccttgacggtcatattttgcctattttacaccaatcctcctttaatgtcactttcagaacaaaatgctgggttctagactctcgatgtgacccaggatatcagttttgtcattagcagactaattaggcttgtttaggttgctgggaacaaagagactactcatggaagtacattggacaattatacggggaaagtaaggaagattgggtctgtattcctatgggtggggaaagaaaggtggggggggattccttacatttcaatatacagttctacctttttttctttttgtaagagacatgaggcactaattatcttaagtaatatattgtaaaatacctctcccatcctcttctgtattccccagtcacctcactggtttagagaatttgtgatctttagttcatggttgttatacagcatattacttctacccaatgctttgagggtaaaaatacaatatataattatggcccaattacttacattttctaaaatcttggttttacacctgtaaaatgaaagaaatagtagtactggtattgttgtggaaatttaatgacataactcgtgaagaaatctagtgcaatgcatggcataggataaatgcccaataaatgttggcaatgatgatgatgatgattcttctgaaggaaaacaaagttgctgacacattaaacttatctgcagcatcacccatcatctatataattgtgtaatctatataatttgagggtttaccaatatattttataggtatgtggtttatacatatgcttttttacatttatgtggaagaattttagagtttatgctttttttattgttcaaaaacatagattattaagactggttatactttctcccagagatggatccctatccatcctcatttactctatcttttcaatcttttaaaaaagcaggataatatagatttttttttcttttagagacagggtctcgctctgacacccaggctggagtacagtggtgcgatcccagctcactgcaacctccacctgctgggctcaggtgatcctcccacctcagcctcctgagcagctaggactacatgccatgccatcatgcccagctaattttgtttctatttttagtagagacagggtttcaccatgttgcctagtctagtcttgaacttctatagctttttctgctacaccatgaggccactaactgtatacttggcagtcattcaagaaacacttgttaagggcctgctaagttgctaagtgaaagccattcttttgggtcctggggctgcaactgtgaatagtcacagtcctgcttcctggtcttacattttatgggggaaacagacaatggacaaacagacaaataatgaatcaggtgctggcaagtgccgtgaagaaaagtaaaaggtaaagggataatgatgtctgctattttagaggagttacaagacttgtattgagcacttaacccttcatctggacttcttcatatatgctggatagtgagcattttcagtgaaaattgttgattaatactgtccacctcttgatcattttcctacaacataacacaactgaatataaagaaaactaggcctcccagcaggacacctgggttctagtcctggctctaataagtatcaaacagcaaagactgtttaaacttctgggttttgttgtctccatttgaaaaatgaaaagaatacacataaaattatacaactttgagaaagagttttttacaactgaaagatgctatgcaagtgtaaaacattattatataggaattttatttccttaaaaatatgccgaggatctggattactgaaaatgctcttttatttgctctctttccactcatccaggaatggcacaactagagaggagcgccatctctggcttcagctctaagtccaggcgaaactcattcgcatatgatgttaagcgtgaagtatacaatgaggagacctttcaacaggaacacaaaaggaaggcctcctcttctgggaacatgaacatcaacatcaccaccttcagacaccacgtccagtgccggtgcgtgtgtccaatctttcacctgctgccgagccgggcaggactgaaacctaacctgactcctttggggtccgtttctctttcttgtctgagttcctgtaatcagaatcatgcagtttattgtgcaatttttcttcagtcatttttgtggtttgtcttgcagtaccttttcgattgtaaacttcctgggcataaagatcttggatgtccctatggtacctaaggaggatatttcataattccattgttcaatcaaccatgactaccagactcccgaccaaaaataagatagccagcaagacgcaatggctcacgcccgtaatcccagcacttcaggaggccaaggcaggcagatcacttgagtccaggaatttgagaccaacctgggcaacatggtgaaaccccgtctctactaaaaatacaaaaattagctgggcgtggtggcacgtgctgtaattccagctgctcaagaggctgaggcatgagaattgcttgaacctgggaggcggaggttgtagtgggtcgagattgtgccactacactctagcctgggcaacagagcaagtctctgtctcaaaaaaaataaataaataagatagccatggtggactgattaatggtaggggaatgagattcttctagtctcatatccaacagtgcccacatggtggtactcatggtcactaaggtagaatctaccaccaccacctctgatacccgctgtgactagctaggtcctacagttcaggggctcttaccctgtttttgtgctttgaaccttctagcagtctgataaagttaatcaacatctttcagaataattttttaaatgttttttattgtggtgaaatatgtataacataaaattggctattttgaccatttttaaatatacaattcagtggcatgattgacattcgcaatgttgtgaaaccatcaccgctatttccaaaactttttcatcacctcaaacagaaattctgttaagcaataattccctatttccccacccctcagcccaagtaacctctcttctgctttctgtctctatgaatttgcctattctagctatttcacttaagtagaatcatacaatatgtttgtctttttgtgtctgacttctttcacttagcataatgttttcaagattcatccatattgtagcatgtattagaacttcatttcattttatggctgaataatattccattgtatttatataccacatttttgtttatccattcgttaacagacatttgagttgtttctaccgccattaggctactgtaaataatgctgccatgaacattggcacaggagatctgtttgaagtcctataactaggactagaattgttgaatcacatcataaatctgtggtaaatttaactttttaaggaactgccaaactgttttccacagtagctgcaccactttacattttcactggcaatgtacaatttttccatgtgctctccaacatttgttattttccatttttttaaattatagccaacctattaggtatgaaatgatatctcatcgtggttttttgtttttgcttttgttctgcattttcctgatgactaaaggtgatgagtatcttttggtgtgtttattggttaattgtatatcttctttggagaaatgtctattcatttcctttgtcctttgtaaaattaggttgtttgtctttttgttgttgagttataggagttcttcatgtattctggatattaaatttctatcagatagatgtttgtaaatcttatataattttgtaaatattttctcccattctgcaggttgtcttttcactctgttgatacagtgtcctttgatgtagaaaagttttttggtgttttgttttgttttgttttgttttgttgagacggaatttcactcttgttgcccaggctggagtgcgatggcatgatctctgctcactgcagcccctgcctcccaggttcgagcaattctcctgcctcagcctcctgagtagtggggactacaggcaggtgccaccacgcccagctaatttttgtatttttaatagaggtggggtttcaccatgttggccaggctggttttgaactcctgacctcaggtgatccacctgcctcggcctcccaaagtgctgggattacagacgtgagccaccgcacctgatgtagaagagtttttaattttgatgaaatccaatttatctgtattttcttttgttgcctggacttttggtgccatatttaagaaacttgtcaaattcaagatcatacaagatcatgcatcttttcttttcttttcttttctccttccttccttccattcttctttccttctttctttctttttgaggcaaagtctcactgtcacccaggctaccatgcagtggcacaatctccgctcactgcaacctccacctcccaagttcaagcgattctcctgcctcatctcccgagtatctgggattacaggtgtgcgccaccacacccagctaatttttgcatttttagtagagacggggtttcatcaaattggtcaggctggtctcaaattcctgacctcaagtgatccgcttgctttggcctcacaaagtgctgggattacaggcatgagccaccgctctgggccaagatcatgcatattttcatctatgtttccttctatgaattttatagttttagcttttaaatttaggtctttgatcctttttgaattaatgtttgtatatagtgtaaggtaaaggtccagctttattcttttacatgtagatattctgttttcccaggacaattagttgaagagattgtcttcacctagtaaacggtcttggttgaataattttttaatgcataaaataagcaggattataaggaaaaccagttacattgaaatacagttatctaaatatcaaaaataccaaaattgtgttatttaataacatgggtctaataactaccataatttcaaagtagtgatgaatgtaactaatatttcaagatctctttagcaattgtaatgtaatatagaaatgtttgtcatttctactggtgacaaagtcaagttctgctgatactactgtgttttgttgccaacattcataattgaaggaaatgctaaagaggttagtgaaataaagatataagttcacctatataatttcacatatgtccccaaatactatctacagactccttgggggtccacaaacctcaggttaagaaccctggccgggtgcagtggctcacacctgtaatcccagcactttgggaggctgaggtgggcggatcactgaggtcaggagtttgagaccatcctggccaacgtggtgaaaccccttctccactaaaaatacaaaaattagctgggcttggtggcgcacagctgtagtcccagctacccgagaggctgaggcaggagaatcgcttgaatccgggaggcagaggttgcagtgagccgagatcacgccactgcactccagcctggtgacagaatgagactctgtctcaaaaagaaaaaaaaaaaacaaagaatcctttgtgacctacatcattatagtaatcttaattactcaagttgtcctcagtcacactctgaatttattagtccttcttgtcccctggtttatcacccacaattggcacatgttggtatgttggcatgttggtgacaagtgtggaaagtcctacacagccctgctccagactgtcctctccttgagacattctcctttgtccgcattctgccttttgcaagttgtgttcttggatatcccccccagtcctctcacttcctctgctccatgatggatcgggggacatgtgccaaagagggtatttgggggcaacattggctttgtctctataaaatgatagtctttttccctaactttaccctcattataaataagtattcccagtgaaatttcaacctaactcctttctaccttccttacttagccttgccatccggacacttaaatctgacccattctgcctcccataagctttctagcaactgttactccctacttctaaaacatacaattctctccacttctaaattttaaccagaaaggtagcacagcacaatgcttgagagcacaattctggctgggcacagtggctcatgcctgtaatcccagcactctgggaggccgaggcaggcagatcacgaggtcaggagtttaagaccagcctggccaacatggtgaaaccccgtctctactaaaaatacaaaaattagctggacatggtggcacgtgcctgtcattccagctactcggtaggctgaggcaggagaattgcttgaaccaggaccggaatgcaaaggttgcagtgagctgggattgcgccactgcactccagcctgggctacagagtgagactccctctcaaaaaaaaaaaaaaaaaaagcacaattttgaaactgggctgcctgattttgaatactagtcctgctgcttttcagccttgtgaccttaggtaagctattcaactctgctgtgcctcagtttccttatctgtaagatcaacatgataatagcacctgcctcgtaaagtgattgtgaggatttaaagagtatttgtaaagcaactaggaaatagcactagataagtgaggttttttttctcttttttctttttttttattttgagccagagtctcgctctgtcatccatgctggagtgcagtggcgctgtctcagctcactgcaacctcagcctcccgggttcaagcgattcttctgcctcagcctcccgagtagctgggactacagacctcgtttatttttgtatttttagtagagacggggtttcgccatattggccaggccaatctcgaactcctgaccttgtgatccgcccgccttggcctcccaaagtgctgggattacaggcatgagccaccgcacctggccataagtgagtttttttaatgtaaatgaaataatcttttaaccccatctcttcctttctgcagaaaacctcttaatagctttcctcattttcttcctctttagcaactgcaaatcccccctcttatcaaaatctcccttgtgctttcattttgattcttccatttctcacttttaagatgtcttaactgaaatccagattcatgtctaaatgctaatattattcccccgtcagcttcaacttccattcctctaattccctccttagtttctgtcactcttaaagcctcatcactccgtgtccattgtatttttcaccatggggaagagctttgatgactttgccttgggtggctggctggtctttccctaagtgacacacagagaggaaggcagactgaaccaggtgaaggaacaaactgttccagtgccatgctctactcttctccacagaggctcataattagaaagagcatattttgtacacctgccacacacccagggactctcctaagaacagcaatgtgatgttccttccaaaccaatggtcttactcatggctgccgagcagcatttcacagctgccaataggaaatttggaggcaggagagtggctagaacactgagctagaaatcaaggaccttgtttctagccccatctctactcacacttattcctgtgaccttggtaaagtcatatttatttggcattaattaccttagcaatagtaatgccatagttgtaacagtaaaacataagtaaaattactttttgtctgagcatgcacttcagccctgactacgttaaagttatatttgttgttgtagtcaaatcccaattatctagctcagtttacacatgaaaaatcttcatactttttactttcaacccctgctaaaatctaaataatgaaaaacaatttaaaaccaaattggttttcttggttgattaatgatgattctgttgttttagatgatctaaaagttaaagcaggttttctcaatctcagcatcattgacattttggaccagaaaattctttcttgtggagaattggcctgtgtattctgtgatgtttagcctctacccacttgccaattgcaagaatcaaaaatgtctccgggccaggcacggtggcttatgcctgtaatcctagcactttgggaggccgaggcgagcagatcacctgaccagcctggccaacatggtgaaactccatctctactaagaatacaaaaattagccaggcatggtggcgcatgcctgtaatcccagctactcaggaggctgaggcaggagaattgcttgaacccgggaggcagaggctgcagtgagccaagattgtgccactgcactccagcctgggcgaaagagcaagactccatctaaaaaaaaaaaaaaaagtctctggacattgccacatgtacacaggggaacaaaactgcacctagttgagatctactgggctaaaggataataaagtcttattttataaagttgtttccttacataactaagtccttaagcacaggacttcatattctctattttctactaatttctacatgtcacaggtcaaggccagacagagtaaatgtttggtaaaaattttagttccatgctctcctctcctccacagagggtcataattagaaagaacacactttatgcacctgcctcgcacttggggactctcctaattgggaataacatgaatgtgttaactgcccttccacctatcaatgtcacacctcaaaacactgtccttgtcaaaagaaaacaacagcagtccatttttctactggaaaattggtaggtttaattcttcccaaatatcctgtgaaaacacagaactgattacatgctggacgtatatggcttagttcttgacatatacatagcacttggttctgaagctaaggtgatttagtcccccagggaacatgtggcgatgtctggagacattgttattgttagctgtcacagctgaagcggggagttctactgatatcaaatgtgggaatgtgtagagacgagggatgctgctaaacatcctgcaatgcacaggacagcccaacaacaaagaattatctggtccaatatgtcaaactctcattagtgctgacaagactctactttttcttggctatgtgggccaaatgccttttcttggctatgcgggcattttctttggagaaactaaccaagtctctgctcctctctctcacagctgctcatggcacaggttcctacgatgcgtgcttacaatctttcccttcctagaatggatgtgtatgtatcgattaaaggattggcttctgggagacttacttgctggtataagtgttggccttgtgcaagttccccaaggtaaggaagatatgaagcctgttcatccaaagacaatgtatcagaccttgtccacgtgcccagggtaaacaattacttgtgctacatgaatagaaaaaaaatattgaattttattcacagcattaccatttgttcccttatctgccagatttctaacctctccagggtggttccaaaagacttggtttactttagacccctgaatgctttccagagtatttgtaacacccactctttgttattttttcccttcactagttatttcatgcttatggctataatacatctcacttggcattggttttacctagaaaggggaaggataggtgggcatagtggctcatgcctgtaatcccagcactttgggaggccaaggcagacagattgcttgagctcaggagttccagaccagcctggctaacacagtgaaactctgtctctacaaaaaaatacaaaaattagcggggcctggtaacgtgtgcctgtagtcttagttactctggaggccaaggtgggaggatcacctgagcccaggaggtcgagactgtagtgagcagtgatcacaccactgcactccagcctgggcaacaaagcaagaccctgtctcagaaaagaaaaaaaaggtgaaggataggaaacatagcatgccagcatctctccagcaagtgacaagcaatccagtgctcactctttggtcttccaagtagcagttcagatgtaagacaacaagatcacacagataggtgtgggagcttatctgggctttaaaaactcatttcccaaataggaatcaacaactttgtaacagtgccataaatattgcttccagagtcccacaatgggcaagtccagttgtaagagtcactatgctcagagaatcccaaaggtagggcttccaactggatatttatctttcattcacagtcctcttggtccagatggaatatactatttgggttcatttttaccataagcaattctgcccggtaacacagctgacgttctaccattataaggtttccagggaaacagagctagaaagttaaccccagatcaaattcatcctcaaaaaatagaatgggttttataaatcctttactcacagtagtttatagttccccagatagtctttaaatacctccatttctctatttttctgaggctcaacaggcagggttgaagcttgtgatcgggcaggttgtggatagcacaaaagaggtcaagaacatgaacaagctgtggctgaaatccaactctagcacagcactgttaattggggaaaacagataactttttaaatctttatttacttatttgtttctaaattatcaaatagtaaaattggcgctttttttccccttttggtgtatactcagattgattttaacccacttggctgggactggtggctcatgcctgtaatcccagcactttgggaggcctgggcaggcagattgattgagatcaggagtttgagaccagcctgggcaacatagtgaaaccccatctctactaaaaatacaaaaattagctgggcatggtggcacacacctgtaatcccagctacttgggaggctgaggcaggagaattgcttgaacccaggaggtggaggttgcagtgagccaagatcgcaccactgcactccagcctgggtgacagagcgagactccatctcaaaaaaaaaaaaaaaaaaaagaatacatatatagatttgtgtaaccaccaccacaattgatgcagagtagttccatcacctccagaactctctcatgccatgctttttaagccacataccccccaatctataacccctagcaaccattgatctgttctccagcaccataattctgtctttttgagcacatcatataaatggaatcatacagtatgtaaatttcaaaggctggcttctttcattatgcattgtgcctttgagattcacgcaaattgttgtgtgtatcaatagttcatttttattgcttagtaatattctactatatggatacatcgcagcttgtttatccattcacttgttgatagacattttgtttccagttttggtctctcacaaatgaagttgctatgaacattcacgtacaggttttgagtgaacatagttttcattttactaagctggagctggatcactggtcacatggtacgtgtatgtttaactttataagaaaccaccaaactgttttccagagtggtttttctaccattttacatccccagctgcaagcataagaatttcatttcctccacatcctcatcagcacttgatattgtcaatatttttaaaatcaaactttctattttgagataattatagattcacatgcgtttgtaagaaacaacagatagaacccatgtaccctttacccagtttccccaatggtaatatcttgcaaagctatggttcagtctcacaaccaggatatcagcattgtttcagtcaagatagagaacactttcaccaccacaaagattcctcaagttgtctttctatagccaccactacctgcctcctgtccctaactcctcttaatccctagcaatcattaatatgttcttcacttctataattttaacatttcaagaaagtcatctaaagggaatcatacagcatataaccctttggtattggtttttttccctcataattctttggtgattcatccagattgttgtatatatgaattgtttataactttttatttttgagtaatagtccatggtatagatgtatcacagttcatttaaacatttacccattgaaggatatctggattgcttccaggctttattattacacatatagacgatatgaacattcatgtgcaggtttgttgttgttgttgttgttgttgttgttgtttttgagaggcagtctcactctgtcacccaggctggagtacagtggcacgatctcggctcactacaacctctgccacccgggttcaagcaattctcctgcctcagcctcctgagtagctgggattacaggcgcacgccaccacacccagctaacttttgtcttttagtagagacagggtttcaccatgttggccaggctggtcataaactcctgaccttaagtgaccacccaccttggcctcccaaagtactgggattacaggcaagagccacagcgcctggcctcatgtgcaggtttttaaaataaatgttaagtcttcatttatctgggataaatgcttaggagtgtagtacattgctggagtatataggagttgcctgttgccttttttcaccaacctgttttccagagtggcttaacatattaccttcccactagcaatctatcagtgatccagttgctctgtatcctcaccaacatttgctgttgtcactattttttattttagctattctgatagtcatgtagtgatatctcattatggttttagtttgcattgtcttaatggctagtgatatttaacaccttttcatatgctaatttccatctgttattttcataaaatggctcttctcgtcttttgcccatgttctagttaaattatgtttttactgttgagatctgagaattctttgtagattctggatactagttattttgtcttttgtgttttgcaaatattttctcccagtctggagcctgccttttcatactcttaacagtcttccagagcaaaagttttgattttgataggctcgtttttagtatcttttattttagccattctaagaagtacgtagtggtatctcatcattgttttaatttgcatttccctaatggttaatgaggttgaacatcttttcatgtgcctaacttgctatcctcatatcttctttgaagggtctgttcaagtacttagcctatttttccactgaggttttatttttttcttgttgttaatttttgagcttttgttttgttttgttttgttttgtttttagagacaggatcttgctctgtcacccaggcaggagtgcagtggtgtgaacatagctcactgcagtctagaactcctggcctcaagcatcctcttgccttggcctcctaaagtgctgagattacaggcatgagccaccatgcccggcctcaacaccatttttttttttttttttttgagacggagtctcgctctgttgcccaggctggagtgcaatggctcaatctcggctcactgcaagctccgcctcccgagttcatgccattctcctgccttagcctcccgagtagctgggactacaggcgcctgccactatgcctggctaattttttgtatttttagtagacacgtggtttcaccgcgttagccaggacggtctcgatttcctgacctcgtgatctgcccgccttggcctcccaaagtgctgggattacaagcgtgagccaccgcgcccagcctcaacaccatttttaaagaatatcctccagtgaattgtttttgcacctttgtcagagatcaaataggcatcttttgtgtgagtctcctaaattttcttcattctgttccattgatctatgtgtctatccctttaccaataccatatcttgacagtgagttttaaggttgagtgatatgcttcctccagctaattttttttccaaaattgttttagctattcttccgtattcattttataatcagcttatctaaatttaccaaaaaaggtttttgtttagattttgataggtattccattaaatctatagattatttcaggaagaattggcatctttattatgctgtcttccaatccatgattatggtgtctctccatttatttaggtcccttgatttccttcatcagccttttgtagttttcagcatagagatcctacgtgttttgttagatttgtgccaaagtatttcattttaggggtttaaatgatggttcagtctccaattattcattgtttgcatataaaaatacaattgatatttgtgtgtttttcttgtatcctgaaactcctttattagttctaagaattttttgtagattccctggaattaactacattgacaatcatgtcatctgttaatagggacagttatgtttatctttttaatatgaatggccttaatgactttttattgcttgttatactagctaagacttccaatactatgttgaataagggtggtgagaatagacattcttgccttcttcctgaacatagggggaaagcattcagtcttttaccactaagtatgatgttagctgtaggatttttgttgatgtcctttattaggttagggaagttttcatctactccagtttgctgagaaatttatcatgaatcaatgttgtattttgtgaaattttttttgcatctattgataaggcccatgtggtttttctctttagatgattaatatggcaggttacattaattgatttttttgaatattgaaccagccttgcattctcagaatgagagtattcacactaagttaccatatgtgctagttgcattcctgcaaaaagaaattttcatgtggcagctacaaccaaaatggcccatttgtattaacatagtcactttatttctatgaataaaatttctagcatattcctatggtgctgcaatgagacagctaaactcttggaattgatgctttaactatgagccccctgccagtttctacttatatttaaataaagaccaaagttggaggatatcccattgctaaattaaaaagtcatcagtataatcttgtatcaaaataagaatggcattagagtaatatctagcattcaccacaacacctagcacatagtaggtactcaaaagatgtttgttgaataaaaatgattgcataactggttatggtagctcacacctgtaatcccaacactttgggaggctgagggaggtgaatcacttgaggtcaggaggtcgagaccagcctagccaatatggcaaaaccctgtctctactaaaaatacaaaaattagccaggtgtagtggtatgtgcctgtaatcccagctactcgggaggctaaggcaggagaattgcttaaacctggaaggcagaggctgcagtaaactgagatcacaccactgcattccagcctgggtaacagagcgagactccattggaaaaaaaaaagatttcatagctatatgaatgaatgaatccaaccagctcttaatacttgattaagggattgaacattagtttaattgatgtgaataataagataatttgtagtgtgaataattcaaaaattgtacttacatttgaatacctgatgacaataattttattcaaatgaaacaaaaatactatatgatgaagaccttattaaaaaggtgctggatcttccttacagtagaattccaatttataaatgtagaattaaagaagaaaatacaaaatcaccttcatgaaaacactacagtaataattgtacataaaatctacccagtggatgctaaaaccagtgggtgaaaatttgcaaactaagaaacaggatttgcatattttcaaagtatctccctcgagatatttattaactaccccaccactttacaatagaaaacctaggagaaaatagcttaactaagtgattaatgtgagcatcaccagtagtaaaatatatggatatcatgaatcctgtgatatgatacaatgagaaagatacaacatcatttctgtagtattcttgccaaaagtgtataaccttagtacaatcataaggaaatataagacaaaccgaaattgaggagtgtttgacaaaataactgatctattaatactcttaatttgtcaaagtcatgaaagacaggtaaaaattaaggaactgttatagattgcaggaataaggggaaataacaactaaatgaaatgtgagactctggatagaatcctagaacaaaatgaaagacattagtaaaaaaactgatgagattcaaataaagtttttaatttctaatgttaatttcctagctctgatcaatatactatgactatataaaatattaacattaggagaagctgtggaagggatatatggaaactgcattatttttgtaacttttctgtaattctaaaattagtttaaaatttttgaaaattttaaggtgttggaaagtttggaaattttaattccctctatttcactatggcctaaacttaaatgagactagataacttaattctcagattgttaacccagtaattctcttaccttcccagcattggttagttatttaaaactaacaaaagattttttcttcatgctacacgctgcttttcaagagtaaatgggggccaggtgtggtgactcatgcctgtaatcccagcactttgggaggccaaggcaggcagatcgcttgagctcaggagttcaagaccagactgggcaacatggtgaaacccttgtctctactaaaaaaaaaaaaaaaaaaaaaaaatttaactaggtgtggtggtgcaagcgcctgtagtcccagctactttgggaggctgaggtggaaggatcacttgagcctgggaggttgaggctgcagtgagccaagatcgcactccagcctgggtgacagagcaagacagtcacacacaaaaaaaagaaaaaaagtaaataggggctattcaacattacaacattataatggagtgcatacacagtatattaaagcaagaaaaagaagtacaaagtataagaattataaatgaataaagcttcattattcacagatgatttttatgcaaagaattcaaaagaatataaagaaaattgatatgacttttttaaaagcaaaaaaaattttaaaaaggcataaaaaaagaaaaacaaagaaaatagtaagattttatgaatgttgctggatactaaatcagcatataacaatcagttatgcttaggtgcaatggctcatgcctataatcctagcactttgggaggttgtggcgggtggactgcttgagcccaggagctcaagaccagcctggcaacacagtgacaccctgtctctatgaaaactacaaaaaatctagatgggcatggtggtgcatacctgtagtccagctacttgagagactgaagtgggacgattccctgagcctgggaggttgaagctgtagcgagctgtgattacaccactgcactctagcctgggcaacagagcgagactctgtctcaaaaaaaaaaaaaaaaaaagcagaaataaaattgtgttcagtataactcttaatataaagttcaaaatgggagcaaattaaactgtattgtgtagggatacgtacactactggtaaagaaaagcaaagaaataggccgggcatggtggctcacgcctgtaaccccagcactttgggaggccgaggcaggcagatcatgaggtcaggagatcgagaccatcctggctaacatggtgaaaccccatctctactaaaaatacaaaaaattagctgggcgtggtggcaggcacctgtaatcccagctactcaggaggctgaggcaggagaatggcgtgaacccgggaggcggagcttgcagtgagccaagattgtgccactgcactccagcctgggcaacagagtgagactctgtctcaaaaaaaaaaaagaaaaaaagaaaagaaaagaaattattatcataaacgccaaaataaggaatccttctgtggggagaggtggtgttgtaatcaaagacctgggtggtacttacgtaagtgtttgttttataaatattaagtaaccttgacatctattaatctattttaatgcattttctacatgcatgttatatttcacaataaaaatggagattactaaattaattaccaaaactattactaaagtaattagagcaattaacacagtacaatattgcagagatagacaattaggccaatgaaacagaaaaaagagtcacacgtatatgaatcacatgatgtgtatcagatatgtcactacagagacaggctgttaatgacaaatgatgtaaaacacttgggtctctataaagaaaaacatttcaggcctttacctcacaccatacacaaaaatctattcctggttgattaaagacctaaatgtaaaagttaaagcaaaaaagacattttggaataacataagagaatatctttatgatcctgaggtagaaaaaggtttcttaagtaagacaccaaaagcaaaaggaaaagcccaaaggaaaagaccgataaatctgaggtaagtacaatttaagaacttctatctattcaaagctgctataaagtttgaaaagcggccagtcacactgatttatgcctgtaatcccagcactttggaaggctgaggtgggtgaatcatttgaggtcaggagtttgagaccagcctggccaacatggtgaaaccccgtctctactaaaaatacaaaaattagccgggcatggtggcgtgcgcctatagtcccagctactcaggaggctgaggtgggagaatcgctcaaacaaggaggtggaggttgcagcaagccaagatcatcactgcactccagcctgggagacagagagagatgccatctcaaaaaaaaaaaaagattgaaaagcaaatcacaaaatgggagatacttgcaaaacaatacgcaacaaaggctttatttataatatacatactcctataaatccataaaaataactagacaagggtgctcaacattattagtaataaaatggaaaatgaaattgaaatgagttaccaccatacacactaaaattaaaaatctagcagtatcgagtgctagcatagatgtggataatgggaactgtcatacattactggtgggagtataaattgcacaaccatttggaaaacagtttggcactatttagtaaatgccccagaagttgaaattcaagctatatattctcaagaaacttgtaaatccatgtaccaggagacatgtacaagaatattcatagcaatattgttcataatagccccaaactggaaacaaagacaggataccatgaaccctggaaacaaagagaatgggaaggtagcaaccttggattctgatggctttttagttcggttccagtctctgatgaggtctaactgccctttgtacccttttaataaatttcctattttgcttaagctaatttgagtagattttctgttacttgcaatcaatagagccttgcataggggaaaaaatgtggtgaaaaaatcctatagattacaagagacttaagagacatatcaaccaatgtgaggaccatatttgggttctgatttagacacacagattgtgaagcaaagcacaacatgtaacagcaaataattttttaaagatcaccccaaaactcatcatacctctggttcgaggtctctcgtgagattgcagttatctcaagggtctactgaggctggaggatctgcttccaggctcactcatgcagctgttggcaggcctgagttcctccccattctggcttctccatattcacaacatggcagctggcaggaccaactatatgtgttgggcccaatacaaaataaaaacacagggcccttagttcaaaaattattcagaatttcaagacagtgacagcaaagcattaaacgaagtgcaaagtccttctaagcccaggactctgtcttgactgcatagattacaaacctttgaagccacctctggcaggtaatgacctgaatgagagagcaaccaagatggaaaccaaagtctttttgcaacctaatctcagaagtgacatcctgtcatttttgttatagtctactccttagaaacaaattggttaagtctattccacacttaatggggaggaaattgtacaagggcaagaagacaattggcctggctgggcgcggtggctcacgcctgtaatcccagcactttgggaggccgaggcgggtggatcacgaggtcaggagatcgagaccatcctggctaacacggtgaaaccccatctctactaaaaatataaaaaattagccgggcatggtggtgggcgcctgtagttccagctactcgggaggctgaggcaggagaatggcatgaacccagaaggtggagctcgcggggagccgagatcgcgccactgcactccagcctgggcaacagagcaagactccgtctcaaaaaaaaaagaaaaagaataccaactggccattgtggatcatattagagaccctctaccacaacaatcatttgtaagataatcagggaaatttgaacactgagtggataatgatgatattgtacttaaattagaagagtattatcatttagagacacataccaaaatatctacagattaaataatcgaatgccttggatttgcctcaaagtaatatagggtgagagaggagtagaagcatagattggttatgggttaaccattgttgaagtggatgatgggtatatggaattcattatactctatttttggatgtgtttgaaatgtcttataaaaaggagccttgcttatctaagacaataaaccacctcactaaattcataactgaatttagatgagtatatcagtatgatgtaaattgaggacagactcttagggaaggaaataggggcttgaaacatcaaaaggatgacactatgcctgttagtccatttgcttcaaaatttccaaattctcatggtgcttcttagaaaagaaagtaagtattagagaagcagctgaaggaagaggctggagtgattggcctatggaagagaaccaacacataccaacttcaagtcagtgaagtgtgattcttgccttgctctccagttttatcttcagccctggagaattcccacggcctgcttgtgctagactaggcataaggatggggctgcttttgagctgttggaattaggggtcttattgctatggtatttgctttacatgtttagtattaagaccttgcagtgaatgatgtttcagcctatgatattgaattaaagtgtaaaagcatgtggcaaaataggaagagaagctaggaatcaaagaagataataaaaagtgctaatgaaggattgtatgtccagaaatactattaccacactcagtcagctatacacatggatgatttttattttaaatattctttacagtttttatttaaggtgacttttaaagacaagctgctttttcttaaattatcttgtttttcaggcctgacacttagtttgctggcaaggcaactgattcctcctctcaacatcgcttatgcagctttctgttcttcggtaatctatgtaatttttggatcgtgtcatcaaatgtccattggtgagttcagcactgaaatacacatgcggtggatgaagtttccatcttgatcatatacttattgctaaggtacccaacataaagctttaagatagaaagaaaggaggcaggaggtggacattctatccatacagttagtgttcagattgtagaaataaatacttctagtgtatcattattgtcaacaccagaaaacaggccagcaagatgtttcccaaagaaattaaagggcagaggtactttccttaagaaatcatcacacattggaatctgacttccctcaacccagaagatgcaggaatgattgtgtcaatactcctagagcagatacttctttcatctgaaccataataaccaaactccatgggctgacttgtaatacagcatgccagcttattaatttacagtgagaaaatgttatcacagtaatcaaaacactgacatccataggataagtacttcccttccctgagtcaaaagtccatctactaatttataattagaaataactattacagaggccagactaattaaaggtcatatgatcagcacatttacttcacctaggtgagcctgcatagaaatcaaatcacaaaattcccccataagtttagaaggtcattgccaacatttactcagtgatgtgccttttcctggatttctccactgaactgaccaatccaccaacatttaccattctgaatgacacattctttatatatgtttttatgttcagtctgattaacatcccatccttccagacgtgaagtgctacttttccttttttaagaatagcttggccaggtacggtggctcatgcctgtaatcgcagcactttgggaggccgaggcaagtggatcatgaggtcaggagtttgagaccagcctggctaacatagtgaaaccccacctctactaaaaatacaaaaaattagttaggcgtggtggcgggtgtctgtaatcccagctacttgggaggctgaggcaggagaattgcctgaacccgggaggtggaggttgcagtgagccaagatcacaccattgcactccagcctgggcaacaagagcgaaactccgtctcaaaataaataaataaataataaaaataaagaatagctcatgtctttattcaatctgctatgtgttgattttacatttgaacaccaataaaacaattttattcctatatttccaagtttctgaggaacctcacaatcatttccaaatacttataataagggttgttagagatttatttatgttaggtaaatttaaagttaagatatatctttgctctcttatgtgttatgacaatatgaggactaaacaaaacaatgtttgaaataagtttaatttacctcagtgtcagtattatttttcttcctattgttattgattgcttcattatcttttcttttcttttctttttttttttttgagatggagtttcgctcttgttgcccaggctggagtgcaatcgtgccatctcgactcactgcaacctctgcctcctggcttcaagtgattctcctgtctcagcctcctgagtaggtgggattacaggcatgcaccaccatgcccagctaattttgtatttttggtagagacggggtttctccatgttggtcaggctcgtctcaaactcctgatctcaggtgatccacctgcctcagcctcccaaagtgctaggattacaggcgtgagccaccatgcccggtgattgctttcttttctaatattttcactgccatctcacttttaaccttctctaagagcagacacagcagctgagcctgacacccatttcagtcaacttctctattccactcaacatacccataacacaaagagactaaatacctaaaccaccaccatctaaatcccatgagttggtcacaatatgtggagacacagttctcttttttgatttttcttacttctcaatggccactttcaaatgagaaaagttattcagttgaaggacaatccagaattcaaccataccttgcttttgtcaatatcagtttacctggacttgaaacttcaccttctacctaacatcttcttccacaggttccttcttcctggtgagtgctctgctgatcaacgttctgaaagtgagcccattcaacaacggtcaactggtcatgggatctttcgtcaagaatgagttttcggccccctcctaccttatgggctataataaatccttgagtgtggtggcaaccacaacttttctgactgggattattcaggtaggatctgagtcttcaaatccctgaaaaggaactgaataaaggggctataaacagaccccttccttatactgctcctgtgatccactgtgatatacctggaacttcagtgatttattttttgaaaaatcagaggctgtgtgaatagcgtgtctccttagtgacaaaacttctctctcctcagaaatcatctaccactgatttaggatgagatattaaacattctcttcagtcctttcacctctaagacaaagggtctaagggatgatggtccagagcagtggtccccaacctttttgaaaccggggaccagttgcaaaagaagacaatttttccacaaatggcaggtcggggccagggagggtggtggttttgggatgaaactgttccacctcagatgacctggcatttgattctcataaggagcatgcaacctagattcctcgcatgtgcagttcacaatagggtttgtgcttccctgagaatctaatgctgtggctgatctgacagaaggtggagagctcaggcagtgatgcttgcttgcctgctgctcacctcctgctgtgcagcacccggttcctaacaggccacaaaccagtaccagtactggtcggtggccccaggggtctggggactcttagtccagagctccactcctgatcttaccttttcaaaaattgcttcatattctttttttttttttagatggagttttgctcttgttgcccaggctgtagtgcaatgggacaatcgtggctcactgcaatctccgcctcccaggttcaagtgattctcctgcctcagcctcccaagtagctgggattacaggtgcatgccaccacacccagcacatttttatatttttagtagagaaggggtttcaccatgttagccaggctggtcttgaactcctgacctcgggtgatccacccacctcggcctcccaaactgttgggattataggtgtgagccactgcacccagccaaaagttgctttatattctatcaacaagaatggactcatttagctgggcatggtagcatgtgcctgtagtcccagttactcaggaggctgaggtgggaggatcacttgagcccaggaggttgaggctgcagtaagctgtgatcatgccactgcactccagcctgggtggcacagcgagaccctgtctccaaaataataataataataaaaataatgatggcctcacaggctcacacactatctttgggttagtaagctttagagccagatctggaatcctttttctgcattgacaaggaccacagctaaaggacaataatatgaatgactcattaaaatctcaaaacttattttggctctgtctttaatttcctctgagagtctatcaccaaaagttcatctactgaactagtcacatcctccaggcttatttctcttttttctcaactaacccagtctctagttgattttcactgatctcccctgggactgtctttcactaagtaaagatttattgggtacctacaaaggcaggctatcaaagtgggcagactccagccctgacactatgagctgtgtgaattttggtaaattattttaccttggtgggcctcagtttcctcatgtataaagcaggaataatatttgttttgcagggttcttaggaggatttagtgaaaaaaatgcatgcaaagtatttagcctagagcttgtcacatagtaagcatcaataagttataattagtgggcacagagaaatgaatttggtactttaacagagaccaaaaatttaaaaaacaatatatagtttcctgtggttaaaaagtttaatcttgtgggataagacaaaatacacaagcaaccttttaattatcaaggggcctcatgcatgctttctcttctccttcaagcctcagcttttttcatctaaaaaaggaagagggctgggcatggtggctcacatctgtaatcccagcactttgggagactgaagcaggaggattgcttggggccaggagtttgagaccagcctgggcaacataggcaaactctgtctctacaaaacaaaataaaaaaaaaaaatagctgggtgtggtggtgcacgcctgtagcacactactatggtccttattttaagaaaacaagggcatagagaggttaagaaaattgcccaaggtcacatagctaagacaccaaactgggattcagttttagggttgtctgattgtagaatctgtgctctaggaaatcttaagcataaaataatattcatataagagtttagtgccaaaagaacatgaagttaaaaaataacctctagttgagtcgaagttatctgggaaggaaacaactatttattgagccctccctttcattcattcaacatttagtactggcttcctataagaatggcagataggtttcatctcacaggccaaccctgactgattaacagtggctgcctagaatattatgttaacactgaacgtgatgccatattacagtgggcaagaaagagttctaaggcaattgcagatttttgccatttacaagatggaaggcagggatggtatgaagaagagtaacatatatttgcatatatgagtgatacatatttgtcactattttcacatctgagctaggtattttacatgtgtgatgaaatttaatctattcaaaacactttacattgaatattattcacattttatagatgaggaaactgaggttcaaagagttaacttgcccacacttacacagccaatgagtggctgggccaggactgaagccagattctccaagcccaggaaccatgcttttttcaccacactccttaaaggagaggaattttactgagctcttgaaagatgatgcaggccagccacagtggctcacgcctgtaattccggcactttgggagaccaaagcgggtggatcacttgaggtcaggagttcaagaccagcctggccaacttggcgaaaccctgtctctacttaaaaatacaaaaattagccaggcgtggtgctgggcacctgtaatcccagctactcgggaggctgaggtgggagaatcacctgaacctgggaggcacaggttgcagtgagccaagattgtaccactgcactccagcctgggtgacagagcaagactccgtctcaaaaaaaaaaaaaaaagagatgatgcacatggattggcagagatggaaaaaagaggggctcatgcataagcacagaagtaggagtcagccagtcacgcaagaaataggaagcagactggcctgactagagtaaaatagaacattgggcggcaatgacaggagattaagggagagacagttggcagggcgcagtggctcacgcctgtaatcccagcactttgagaggccgaggcgggcggatcacaaggtcaggagatcgagaccatcctggctaacacggtgaaaccctgtctctactaaaaatacaaaaaattagccgggcttggtggcgggcgcctgtagtcccagctactcgggagactgaggcaggagaatggcgtgaacctgggaggtggagattgcagtgagtcgagatcacgccactgcactccagcctgggcgacagagcaagactccgtctcaaaaaaaaaaaaaaaagaaaagaaaaaaaaagggagacacagtgccgggctgattgaaagctttgaaacaaaaacctgttaaagcaaaatgatttattgttccaaatttgtttgttttctgagagcttttagtggagtggagagtgaagtgatgattgtaagctttaagacttctgttttgctcctttccaccctgcttactgaaaagtcttcattgggctgtgccagttttcttaacctaccctctttttgttttttatttttcttgttgtagagacaaagtgtcgccatgttgcccaggctcatctcaaattcctgagctcaagcgaccctcccacttgagcctcccaaagtgctgagattacaggcatgagccaccacacccaacctaattgtggtttttattataaaagacgaacatctcaaatagtaaaaaagtgtataaattatcaaatattgtccccaacatctaaccccattccccaaaggtaattcctgttaatcatttgaggtctatccttttagatcctgtgtgtataaaattttattatatactatataacataaattttacatatgcatattgacatgtaaaataccttttttattttccttcaggatatgcataatcctgaaaacataaataaattcaatttaattattctcagtaaagataagagtcaaaggccaagaagtttgagctcgatcccactgttttgaaattctcttctcctttgtgaaaagctgcattcctcagaggaatgttaacatctcctgaaaagggctatcaaagcttctaatgaaagaggtttaaaaaggcaaaggcaggccaggcacagtgcgttcatgcctgtaatcccagggttttgggaggccaaaacaggagaatcacttgaggtcaggagttcgagaccagcctaggtaatatagcaagacccccccctccaatctctatcaaaaaaaaaaaaaaaaaaaatgcccagtgtgagcatctgtagtcccagctatttgggaagttgaagcagagaatcccttgtgcccaggagtttgaggttacagtgagctatgattgcaccactgcactccggcctgggcaacagagtgagatcctgtctcataaataaataaataggcaaaggcttgttctgatcaccttgtccctgttttccccaagtcaacctagagagcagtagattctagggcaagaacttaagtgagctgactgctcacaaagaaggaaaggagtagtgtgagctagcacttgttgggagcctctgatcaacatacaaggacccgtgttatcaacttctgttcattagggaaagagagttacaagagttaccaaaggggcctatcttaacttttctattggaaacccttcttttcctggagagtgccattggtgccattgctggattgaagacattctaccccactctggttttctcttctctgcagctaataatgggcgtattgggtttgggcttcattgccacttaccttccggagtctgcaatgagtgcttacctggctgctgtggcacttcatatcatgctgtcccagctgactttcatctttgggattatgattagtttccatgccggtcccatctccttcttctatgtgagtaatttcaactcttacccagagttacaaatgccactcctcttgcctccaaagaaaagtggagctcagtagggagactcccgccccttctgaaaggagacacagcctataggcagctcagtcaagagggtactagaaatattttcctttattggagaattagggtcttgattaattgcagatgccagttagaccatgctttcagttgactaaccatttcagctcagccttttaaactatcatgatatacattaaaatttggcctttaagatattgtatctatcacagttcttctcattacctatcttataacagacatgtatcctaaaacatctaaaggatatacaagactaagtagttcctaaatgtaagaatagggtaggagctaagctacagtatattatttgggaaaactaataactattggcttataaacagaacttctagggcctgttcattatactaaaacatacagtgtattctctccttattcttattgagcattactgtccctctttttacaaaattggccacccccaccatgcttgccctcactgttctagtaatacccataaagacctttgtacccagaaactctacttggggacttctttttgggttaatctacagtgtcaatttctagacttaggcaattactacatccctttctaagcctccgtaattttattttctttcaggacataattaattactgtgtagctctcccaaaagcgaattccaccagcattctagtatttctaactgttgttgttgctctgcgaatcaacaaatgtatcagaatttctttcaatcagtatcccattgagtttcccatggaattatttctggtaggtgtttttgatgtctcaaattcatagtttgcataattttagtattttaaaaaaatgctgagttgaattgtgtaaaagctgaatacatttagttttcaatatatgcttatatttgtgaaaacatgcttgttttctttttctaaaatattttaatactacagttgacaactaaaaattgaatctattgtttatgatgtgatattctgatatacatagtgaaatgtttaaatcaagttttttttttttttttttttgacagagtcttgctctgctgcccaggatggagtgcagtggtgcaatcttggctcactgcaacctctgcctcccaggttcaagcaattctcttgcctcagcctcctgagtagctggaattacaggtgtgtgccacaatggcgagctaatttttgtattttttttaatagagacagggtttcaccatgttggccaggccggtcgcaaactcctgacctcaggtgatccacctgtctcggcctcccaaagtgctaggattacaggcgtgagccaccacgcctggcctaattatcatttttaattgttttcgccttgcagccctagcagcagttattatttttgttgtgagaacatttaagatctactctcttagcaattgcaagtacacattattaactatagtcacaatagcacaatagatctccctcacacaatgcttattctccaagtacttttatctattgcctcgttctcataagatttcaaggataaggtttttttttccccttatgaaagaaatacgggctcattctaagtttgaaaaacataaggaagtttaaaaaagtggttgaggaaaagaaattcctatagttgcaccatccaaagtcaactactattgatactttagtattttcagttattcactcctttcttctctcagacaaacatatgacaggcctagcctcaatgttggtgaatttccgtctttttctacataaatgttttatttttattttaatgtagttgaaatcacactgttttcaacttccattccttctcactatgctacaataaggaaattgaggcagctcatccctggacttgaacataggagcacatctagatgagaagatgtcaaactgagaggaccttcctaaaaaattaaaataaaataaaatccaagagttgaggcacaagcaatctcatgttaaatgataacaggcaaagggccaaagaaccaaggaggaaatgaacggccctttcctatggctagaaccagatgcattcacaaagggaacatatgatgttcatggagaaacaattggaagatttgaacatcttgttcaataagaacccatacccaaacctcagccttcagaaagaaatggcctcaaaaatggacatgtatccaacagtacaggtttggctcaagaaccacagagcagaggccaggtgcggtggctcatgcctgtaatcccagcactttaggaggccaaggcaggcagattacccgaggtcgggagttcgagaccagcctgaccaacatggagaaaccctgtctctaataaaaatacaaaactagccgggtgcggtggcatgtgcctgtaatcccagctactcaggagactgaggcaggagaatggcatgaatccaggaggcagagcttgcagtgagccgagatagtgccactgcactgcagcttgggtgaaagagcgagactccgtctcaaaaaaaaaaaaaaaaaaaaaaaaaaaagaaaagaaaacaaacaaacaaacaaaaaaaaaacagaacaaaactcaagaaagcaaaatgcaagcttattcagcaaacacaatctcaacaacagcaattagctgaggatagagtcaagaccagtccttcctaagaaatacagatataccagccaaatctcctaatgatgcctatcttgtagtcctagtttatacagatcactgggcaccctggttgcgactcacgttatgctccgatgttaaggtccctacagatgactttgttgtccacaaaacacttcattttgactgctgccaagatcctagaacatactgcttctgcttctatcccatttttggaatcctgagtttattctccatgtttcaattctaattcttttgactgttcacctctacaaagtagagagagatactagacacaaaaggtaacatattgtaatgtgtgtaatgatttcctacaagagagtacttttcatcaataaggaacaaacccggagatacacacacacattgtgtgtacaacatggatggatttcaaaaacattatgtagcatgaaagaaaaaagacacaaaaggctacatactgtataattccattacatgaattcctagagcaggaaaaactaatctgtcatgacaaaaagattagtggctgcccatgtggaaaaattaaatagtaagtggtagaaaactaatttatcagggtgatggaaatgtttcatgtgttaattagctgttagttagggtggcagttacctggcgtataaattcctcaaaacatatagaactggccgggtgcggtggctcacgcttgtaatcccagcactttgggaggccgaggtgggtggatcacgaggttaggagattgagaccatcctggccaacatggtgaaacaccatctctactaaaaatacaaaaacttagccgggcgaggtggcaggcgcccatagttccagctactcgggaggctgaggcaggagaatggtatgaacctgggaggcagagcttgcagtgagccgagattgcaccactgtactccagcctgggcaacagagcgagattccgtctcaaaaaaaaaaaaaaaaaccgtatagaactgtatatctaaaagctgtgcactttattgtatctaaattataccttaataaaaataaatatatataacaaagaaattgaggcaaatgagatgttaaatgttttttctaatctgtgtcattagtaagtagcagagctagggctcactgtctaataataatatttcttgtttcttttcttttcttttcttttttctttgaggcagaatctcgctctgtcacccagtctggagtgcagtggcatgatctcggcccactgcaacctccgcctcccagattcaagcgattctccttcctcagcctcccgagtagctgggattacaggtgcccaccaccatgcccagctgatttttatatttttagtagagatgggggtttcgccatgttggccaggctggcctcaaactcctgacctcaagtgagctgcctgcctcagtgtcccaacgtgccaggattacaggcatgagccaatgcatctggcctcttgtttcttttctaaaatctgctgataaaatttatcttttacagttataattaacattttaccatgataaagatattttcatcaataaagctcagattttctaagtcagcatttttcattttaagattgctgaattcggggccgggcacggtggctcacgcctataatctcagcactttgggaggccgaggtgggccgaccacctgaggtcaggaattcaagaccagcctggccaacatggtgaaaccttgtctctactaaaaatacaaaaattagccgggcatggtggcgtgtgcctgtaatcccagctactccagaggctaaggcaggagaatcacttaacccgggaggcggaggtcgcagtgagccaagatcatgccactgccctccagcctggacgacagagcaagactccatgtaaaaaaaaaaaaaaaaaaagaaagaaaggttgctgaatttttgggtgtcaatgagaattatttcttttttaagtggtggtctgtggcaaagatgcttaaagttaaccaaataatcatgtgtcccctgcacctcccagtctctcttgcaattaggaggaccctgtgacttttgagccaaagtagaggtgaataggtgcaagttccctcttctttcctcccctgctgtgatgatgacaggggcagtatgttaagaaaatggagactgggagcggtggctcacgcctgtaatcccagcactttgggaggccgagacaggtggatcacgaggtcaggagattgagaccatcctggctaaatggtgaaaccctgtttctactaaaaagacaaaaaaattagctgggcatggtgttgtgcacctgtagtcccagctactcgggaggctgaggcaggagaatggcatgaacccgagaggcggagcttgcagtgagctgagatcatgccactgcactccagcctgggagacagcaagactctgtctcaaaaaaaagaaaaggaaatggaatccctaggtgaaattagctcaaatccctggggcactgcttgcaaagaagctgcctgagagataccaacccaccatggactttgtgtgggcaaaaaaataacttcgatgtgttaaaatgctacaatctcatggcttgtacattgccacagcataacccacttatactaactaatccaggtctatcctcttcaaggttgaaaaatactgccttgggactttagactaaactttcttataactgttacctagttcttgtagaggtgcatattcttttccctttgaatgtttgaaaagctattaattcataaagcccagaagctgaaaggcttgtttttcaaaagattttacaaaaccctgaaggcagatccagcaatcccactattgggtatatatctaaaggaaatgaaatcaatatgttgagtagatacctgcactctcatgttcgctgcagcactatttaaaagacctaagatacggaatcaacccaagtgttcatcaacagataaatggatacatgtggtatatacaggtattagttgacagacatgtaacaaaaaatgatttttaaaaaaatgtggtatacatatacaatggaatactattcagccttaaaaaaaaaggaaatccttctccttaaagcctgggtattttgtttaaaaaaattaaaataaaataaaaaataaaaagaaggaaatcttgtcatttgggacaacatggatgaacccagaggacatgttaagtgaaataagccaggcacagaaagaaaagtactgcatgatctcattgatatgtggaatctaaaaaggttgaactcattgaagtgaagagtagaatggtggttaccagggtctagagttgcgggagagtggtttggggagatgttggccaaaggatacaaaatttcaatttgataagaggaataatttcaagagatcttttgtacaatatagtaactacagttagtaacaatgtatcatattcttgaaaattgccaagagattagattttaagtgttttcaccacaccaaaaaagatatgtaggcatggtagctcacacctgtaatttcagcactttgggaggccgaggcgcgtggatcacctgaggtcaggagttcgataccagcctggccaacagggagaaactctgtttctactaaaaacacaaaattagctgggcatcatggcacatgcctgtaatcccagctacatgggagactgaggcaggagaattgcttgaacccaggaggtgaaggttgcagtgagccgggattgtgccattgcactccagcctgggcaacaagagcaaaactccgtctcaaaaaaaaaaaaaaaaaaaaaaaaaaagatgtatatgtgaagtaatgcatctattaatagctcgattcagccatgccacaatgtgtatatatatatattttaaaacaacatgttgtatatgacaaatatatatgatttttatttgttaattcttaaaaacaaaaccctggatacaaatggtgctctagagctcgggaaacaatgtgtatatggagtttgtagggtgcagtcagagacagcctctcctttcccagcccatctctggcaccttaggaggctgcagctttgtagtcaccagcagacagcagccatgaacagacagcagccctctttttttttttttttttttttttttttttgagacggagtcttgctctgtctcctaggctggagtgcagtggcgcaatctcagctcactgcagcctctgcctcccaggttcaaacgattctcctgcctcagcctcccgagtagctgggattacaggtacacaccaccatgcctggctaatttttttatttttagtagagatggggtttcaccatgttggccaggatggtctcgatctcctgacttcgtgatctgcccaccttggcctcccaaagtgctgggattacaggcatgagccaccatgcccagccctctcttaagagacatcagcaccaaggatcatagtgatgttccttcaagcagtctgtaaacccagatgtatctgacacaggtctcaatcaatttagaaagtttattttgccaaggttaaggaagcccccatgacatagcctctggagggaggtcctaccaacatgttcagggtacagcttgcttttatacattagggagacacaatatatcaatcaatacctgtaagatttacactggcttgatctggaagggtgggacaaattgaaggggtgggggcttccatatcataggcagatttaaaatttttctgattggtaattgattgaaagagttattatcaatagagacgaatgtctgggttacggtaaggggttgtggagacctaagctgtgtcatgcaaatgaagcctccaagtagcaggcttcaaagagaatgggttgtaaatgtttcttgtcagacttaagggtctgttttgaggttaatgctggttggcttttcctgaattccaaaagggtggagggatataatgacgtatgtctgacccctgcttcaatcatggcctgaactagttttttcaggttaacttcggaattcccttggccaagagatgggatccattcagatgactgggggccttagaatattgtttttggtttacacagccttgaaagcaatcaacatgaaccagagttataaggaaaggagagaagtgagagtgcaaagaatgctgtggtttgaccatggctgacagattggtttgtgagccacagtcaagatattcctctgggggccaagctcggtgtctcacccttgtaatcccagcactttgggaggcagaggcaggtggattgctcgaggtcaggagtttgagaccagcctagccaacatgatgaaaccccatctctactaaaaataaaaaaaattagctgggcatagtggtgcacgcctgtagtcctagctactcaggaggtggaggcaggagaattgcttgaacccaggaggtagaggttgcagtgagccaagattgtgccactgcactccagcctggttagcagagcaaagactctgtctcaaaaaaaaaaaaaaaaaaaataagaagaagaagaaagaaagaaaagaagaatatattcctttggagaatgctataaataattacaatgcttcatgaggtgaggtgaggtaggggaggaaacagaggtccagcaataaaataggtgaaggcttacaataattgcaatttaggcattaaccttttttgtgacataatttgtgctcacaggctattgaagcctgcaacacactacctatacacatgtcatgtcaagtgatggggacacagtttctgccacatagcagggattagagatgcagggtagaactagaaaaagacctccctgtttcccttagcagtgaggaaaatgagagagggaggatggaggcgcccacggtctagggtctaaaatgccttttacagcacccacaaagaaattactaatgtttagatgtgctggaggaaactgcacacatctatcaatctgtacttaagagagcagactcggccaggcacagtggctcacgcctgtaatcccagcactttgggaggccgaggtaggaggatcacctgaggtcaggaattcaagaacagccgggccaacttggcaaaaccccatctctactaaaaaaatacaaaaaattagccagatgtggtggcacacgcctgtaatcccagctacttaggaagctgaggcatgagaatcgcttgaacccaggaggcagaggttgcagtgagctgagattgtgccactgcactccagcctgggcaacaagagcaaaacttcatttcaaaaaaaaaaaaaagagagcaaaagagcagactcaatatttaggaaaattttcaaggcaacaactgagatccaggtagactatactgataattcaagggtcccttggctataagaaattatacatatgttcataatttatgtatatttaagctgtatagcaaacaaaaaatgtaacaatagttgtctttggatgagttatttctgtttttcaatgtttcatattttcatttttctctgtgaacaagtattacctttaaactggaaataagagttccttgccatgcttgccatacttcttgcctcttaattatataaaaaccaagactcttcttctctgatccaagctgtaatccagattcttccttccattctaatctgtagacttcctaggggtcttcatctgataacagtatcacaggttagtcaactgctgttctgttcagcgtctggttgaactcctgcagtagatgctggggaaagaagtatgtgttagtaggaagaatgggataaagcaactgtataattgctattttaaaacataggaattgaggtctcttgtctctggtttaatctgcattgacgcagtctttataagctataacagctgctaggttgtctcttttccctctaattaaaagtcagggactagagggagaattgccatttttagaagtaagtgaaaggggggaaaagcaggtagttgctttgctacagaactttttctttgtgcaattaaatgttgctccatattattaagggttaatcatgtttctcttttggtatacctcaacaagcccctaaaaggcatatctgtattactacaatgtacctggaactaaaaacttttgaaactgaaaacttgatacagccattatctgaaaacatgtttatattaatctagatgtttaaagttggtggggagattccccacttcctgataaactctgaaataccctttatttaaagaggagcaaagaggtattttccaagtcattcagtatttaaatggatcgatctcactgaaagccattgagattcaaatatattaaatattaaaacaagaaaaaataaatgaagatgatggggatacagaagttcatggcgtccatttgttcccatcatgttcacagaccaagttgttttgcactctggcttagagaaccaaaagaaacagggaagatctctaatgcctgccttgctccgctgaactagccatgcctctctctccaacttgcatgcatagggactgctgcctgtttcattttctgtcctgccagaggcaatgggcaactctgcttctagaagcgatgcactatatttaggtattcatatgcccccatcccttctttttttaccccctacagattattggcttcactgtgattgcaaacaagataagcatggccacagaaaccagccagacgcttattgacatgattccttataggtcagtaattccacttttcaagattgcttttctctttctgataccctctcttagcctctgaccacacagcctgattgatattttctactagcagtctctggccaaagcaaaattcatttttgaacacagaggttcatgaaaggagaagggctagggacaactccttgtgtcttctctggtcagcctctgtctctcttctcatagttgaacccatccccttatccaggaaaactgttatatgcactgaataccagagaatctcatgttttttttcatagcacatgataggccttctcaactactatacctctctgattaattctcaaggggtggacaagagatgcctcggtttttctagcctctctcctgtggctctgtgttcagaagatgaacgttccttttgccttcacaaacttagactaaatagatgccctgttttatttatttatatatttatttatttatttttgagacaggttctcactctgttgcctaggctggagtgcagtggcgcaatcatggctcactgcagccttgaattctcaggctcaagtgatcctccctcctcagctctctgagtagttgggactacaggtgtacaccgccgtgcactgccacgcctggctaattttttgcatttttagtagagacagcattttgctgtgttgctcaggctagtctcaaaatcccagactcaaacattcctcctgccttggcctcctatagtgctgggattacaggcatgagccacagtgcccggtcagaattggtgcccttgagcaacattgttttcttactctgggtagaaagtgatcttcaaatagcctggcatatggagttcttaaggactcacaatcaatttacattataattcctaccagtgactatgaggcatggctcttgcttctgttaggaaattattttttttaaccttaatcagatgaatcacattagctaagaaaggcaatatactgcagtttcttgactcacagagaggcttttgaagagcattgcccatttcctcacgttgtataataaggaatcctgtaaagagtgaagcatacttgctaaactccaggatcacaaaatgtaggcttttttttttctttttgagacaagtcttgctctgtcgcccaggctggagtgcaatgcgccatctcagctcactgcaacctccacctcccgggttcaagtgattctcctgctcagcctcctgagtagctggaattacaggtgcctgccaccacgcctggctaatttttgtattttttgtagagacagggtttcaccatgttggccaggctgatctcgaactcctggactcaggtgatcctcccacctccacctcccaaagtgctgggattacaggcgtgagtcaccacacccgggcaaatgtaggctattttgacacaatcagtttgaactagtctcataacctacccagttctcaatgaaatctgacgatggctgaatcaacttgaaattccagtcaattaaaaaatgtgggcagacaccacctaggtactagagagtacaaagataagcaagacacgatctctgtcctcaggaaaaaaaataataacaagaacaacagtgggattgacactttacatatttgtattatttcatttgctccccacagtaatgctttgaggtagatattgtcttcttttttacgctaaggaaactaaggcttcccatgtttaaattacttagcacattgctcctccatggcagagctaccatttgaacatatttctccttaattccaaagtctataattataaccactctgttatacttacacaatatgcttctgttatcaatgacttcaaaaccacacagccaggctgggcacagtgcctcatgcctgtaatcccagcagtttgggaagctgaggcaggtggatcacttgaggccaggagtttgagaccagcctggccaacatggtgaaaccccatctctactaaaaatacaaaaactagctgggcatagtggtgtgtgcctgcaatcccagctacttgggaggctaaggcaagagaatcacttgaacccgggagttggaggttgcaataagctaggatcatgccactgcactccagcctgggcaatagagggagactatctcaaaaagtaaaaaagaaaaaagaaaaaacccacacaaccaagttttgcttatctcttataagattcaaagttacagatggacaaatgagcatttcagaagtctaattttaagcgttgctttgagctttctcttttattatgtatttatccagggctgctagagaatagtaagattggacaatttaagttagctcctgctgtgtccatgtccccttttaacctcatttgctaacaagaatcggctgttacagagaacagaaaggaaaaacagtagtttatgttgttatcatactaaatattcaagctttactaatatagattggggtagtaaattacatttactgtgtacctctttgggacagcctcattcttacctagcttcttacaaagacaaaaaggtggaatttgataataagttaaatacctacctgtaagcattcagttatgcttctacttagctcattacctggaaaacgcaaaggagcttgtcagttataaattattttattattttttttgagacagagtctagctctgtcgcccaggctggagtgcagtggcacgatcttggctcactgcaacctccgcctcccgggttcatgccattctcctgcctcagcctcccaagtagctgggactacaagcacctgccaccacgcccggctaatttttgtatttttagtagcgatggggtttcaccgtgttagccaggatggtctcgatctcctgaccttgtgatctgcccacctcggcctcccaaagtgctgggattacaagcgtgagccaccgtgcccggccttaagttataaattataaataagaaattaaaatatacatagtagggccagacacagtggctcatgcctgtaatcccagcactgtgggaggctgaggcaggcgaatcgcttgagctcaggatttcaagaccaacctgggcaacatggtgagactccgtttctaaaaaaaaaaaaaaaaaaaaaaaaaaattagccaggtgtggttgcatgtatctgaaatcctagctacttgggaggctgaggtgggaggatttattgaggaaggatgaggctgcagtgagccatgatcacgccactgcactccagcctgggtgacacagcaagacctggtctcaatataaaaaaaaaaaaagaagaagaagaagaaggaaagaagaagaagaagacatagttggatggtgaagaaaatgatatttagctctttgaggtgctaaaagtgaattctttctactcaaaaataaaattttaaatgcaagaactaataagaaattttaattagataaggtattatttgctttgtggaaatatatatcacaaaatttcttttaagataattttcccaagggtatttacatgattcattttattgaatttggatttttatataatttatcagaaggaaatcaactgttgaggcatacatatttgtctttgatgaaatgattaaagataatcaaaagaatgaataagcgtttcaaatagcaaaccttatctaaaacacttagatttttttttctgacttagaaagtaatctagagaaataaaaaaggaagcatatttgtgcttccagatttgacttaaagaattatgccagtatggatctatagaaaaacaccactctccccaaatcatcaagatttttttttccttctatagtctgttgatattgtgcttgatttctgactgttaaactaatgcttcattctgggataaaccccacttgaccatagtgtattatccttttatatattgactttctaaaatgataagaatttttgcatttgtgtttatgaaggatgttggtctgagtgtctttttttttttttttttcttcttgtgctgtctatgtctggttttggtgtcagagtatattgaatttttttttttttttgagactgagtctcactctatcacccaggctagagtgcagtggcacaatctctgctcactgcaacctctgcctcctgggttcaagagattcccatgcctcagcctccagagtagctgggattacagatgcacgccaccacacccggctaattttttatatttttagtagagataaggtttcaccatgttggccaggctgatctcgaactcctgacctcaagtggtccacccacctcggcctcccaaagtgctgggattgcaggcgtgagccaccgcacccagccatatgccaccgcacccagccgtatgttgacattatagaaagatttggaaagtattgcctcatcttcaacttctggaagagtttctataaaataggcattatttcttccttaaatatccacctattgttcacctattggtatggcctcaaacagtatcaagaaaccatttttcgtgaatcgttaatgtttggcctgttctgtttactgccattgctacctggcagaaacattgaactgcaaaacacaacaacatgttctctcaatggctttcataacttggcttggtttgctggcagttttggcaggctgctgcctcaatcactccgcttgtccctattgttattaaaaaaaaaaaaaaaagaatcaggacagcccagtgttagaatagagtggcggaggtaccaagaaaggattcctgctatccagaaataattccactattctattccagctttctgcttcctgtaacaccagatttcagccttcttcccaagataattttacaagccttctccttatctttggtgagctcctttctgctcatatttctgggcaagaagattgccagtcttcacaattacagtgtcaattccaaccaggtgagaggactactacttcctctgatccttaactctttgttctttaatcaaagcctcctgccaacatgaagcaggagtcttttttaactgaagagccacttggaccatggtttggacagtaatcacaaaggatttttgagaggtgagggatacttaactttgagggcacttgaattaacctgagtgttattgccctagaacagatatgatacagagaggccagaaaattatggcatcatgttgttaagctaggagagtttcacttttcttaattttagctttctttctaccaagtcctccaaccacatactgaggtgcaataagaaatgctgcagaacgtcttataaaaagccagggttgggccaggagtagtggctcacgtctgtaatcccagcactttgggaggccaaggcaggtggatcacgaggtcaggagatcaagaccatcctggctaacacggtgaaaccctgtctctaccaaaaatacaaaaaaaaaattagccgggcatggtggcgggcgcctgtgctcccagctactcgggaggcagaggcaggagaatggcgtgaacccgggaggcggaacttgcagcgagccgagaccgcgccactgcactccagtctgggcgactccatctcaaaaaaaaaaaaaaaaaagcgagggcttctaataccatacagttggcctcccagaaatagtttttgtcttttagccctttccctagaactcaagagggaaatatggaaacaacaggtgttccaatttgacctttttttttttttgagacggagttttgctcttgttacccatgctggagtgcaatggcatgatcttgggtcaccacaacctccacctcccaggttcaagcgattctcctgcctcagccacccgagtagctgggattacagatgctcaccaccatgcccagctaatttttgtatttttagtagagatggggtttcaccacgttggccagactggtctcgaactcctgacctcacaatctgcctgcctcagcctcccaaagtgctgggattacaggtgtgagccaccgcacccagcccaatttgacctttagggtagcacataaggcagggagaatagcattgtgcttctccctgtcatcctaagtcctggtcatcacttgaaagagaataaaaatgccagagtctcattttctcaccttgaaaaagcactttccttgtgatgactagctaaaatgatgatttggtttagtcaagaaaatcagatgtgccatccttttgttctaattttttttttttttttttttttgagatggagtttcgctcttgctgcccaggctggagtgcaatggtgcaatctcggctcaccacaacgtctgtctctcaggttcaagcgattctcctgcctcagactcccgagtagctgggattacaggcatgcgccactatgcctggcaaattttgtatttttagtagagacagggtttctccatgttggtcaggcttgtctcaaactcccgacctcaggtgatccaccagcctcagcctcctaaagtgttgagcttataggtgtgagccacctcatccggccttctaataatatttcaatctgttatttcaagtgatgcaaacaaccctatcttcatataaaaaaaaaaaaccatatgccttcaactcaaaatcagcattcttcaacaaaaacgggggcctaaagcatctgctgtttctttacaggatttaatagccatcggcctttgcaatgtcgtcagttcatttttcagatcttgtgtgtttactggtgctattgctaggactattatccaggataaatctggaggaagacaacaggtatgttgaaatacaatttgatctctaatacataaacatattcatatcaattcatatgtatattcagagtagggaattaaatgggtttaatcttcttgctgttttaatgctatgcttaatgggaaagacctctgggatgaatttggattccatgcttgccttaatttttgctcagattttgtcttaaaagttacttgtcaatgtggaacttgaaagccattttctacagaaatatgtgagaggtttccgtatattagcccacaaaaccccactttccatgtaacatacctaaaggataagaatattttaggtaaactggccaagtgtggtggctcacgcctgtaataccaacactttagaaggccgaagtgggtggatcacttgaggtcaggagtttgagaccagcctggctaacatggtaaaaccccatctctactagaaatacaaaaaaaaagaaaaaaaaaaaaacaattagctgggtgttgtggcgcacacatgtaattccagctacccaggaggctgacgcaggagaatcacttgaacctaggagacagaggttgcaatgagttgagatggtgccactgcactccagcctgggtggcagaatgagattccgtctcaaacaaacaaacaaaaaagaatatttctggtaaacttaccatcatctgctaatgctttccccctgtgggaagatgcattctcacacctagtctggaaaagcaataatacaactctacacaccttggcagcaaagcaaaaattttcctggcttcttcaaaagggcatggcaaggggctttcatgacagggtgtcaggtctttgtctaggagagcctagagaatgtataattgttctacttttgtataagagaaaattatctaggtcagattttctgcaggtattctgagtcagtaaactaaatgtttaggcatgtgttaagcatacatagagagaatggtggtcgaaaagactgtagaggcaaagtgtctaattgcaggcatgagattttataagtctaatgttcatgagttttgttttttgtttttgtttttgttttgagacacagtcttgctctgtcacccaggctggagtgcagtgacgcgatctcggctcactgcaacctccgcctcccaggctcaagtgattttcctgcctcagcctcccgagtagctgggattacaggcatccgccacgacatccagctaacatttgtatttttagcagagatggggttttactatgttggccaggctggtcttgaactcctgaactcaagtgatctgcctgccttggcctcccaaagtgctgggattacaggcatgaaccaccgggcccggcccaatgttcatgagttttgaactgactagataaaattacaacaggctaacctgagaggtgtcccatctcaactatgcagagtgacaaaatgtcagagagctatcggaattgaaactggggttgcccggggaatgagtcagcattcagacgccagagaaacagtggcagaggtcaaagacaagcttctgctgcagaaacatagtaaaaggtgtagccatggtcagaaacgaatgtgtcagcagaatgaacagtcaactttcacatggaaagacaaagtgtcatagtccatgggcaaatatgtggtgaagcataaggtaaaaggtaatacaagtcagaaagattaggcaggggtgagagcctgggtatagagcaggggtgtccaatcttttggcttccctggccccactggaagaaggagaattgtcttgggccacacataaaatgcactaattctaacaatagctgatgagctaaaaaaaaaaaaatcgctaaaatattttataatgttttaagaaagtttacgaatttttgttgggctgcatccaaagctgtcctgggccacatgtggccccgcaggcctcaggttggacaagtttggtctagaataagactacattgtaccattttatgtggaccaagttttgtttgtcacagagcttcttccggacacattggccttttccactactgcttaatagacagagaaatttgggctatgttcagaagaagagtgttttgtacaagcatgcaaaaactttggagtcaaagagactccaaagagacttggagagttttagaagaagaaatggaaatggagattccagagattagttccactaactttttatgacatactttgtttattcagtatataagcataatgtaaatttgggagacaagatgtgcacggctagaaaaaaactaaatcacagtgcaaggaaaattgagtgcagaatgaggacgatttttaaaaagcggcataaatattgcaagaaggagaatgatggcagaagtgggactttcatggagtactgaaagggtttagggtatgtgtagatggaaggaggaagaagggcttcagttcagcctcagagctgtcttaacagcaggattccacttgtgcgtgcaatgcagactggaggaagactggctgtgccaaatgcactcattgattctgggaatagaaaggccaagttttgagagggttttggcagacgattgaatttccaacccctgagcaagcccatttttagcattttagcctgttgaacagaaggtctgcctcaaaggtagcctatggcactcattttgttttccgctgccaccttgttcatctgtgcagcacagttctgccagtgacacctctcaatgcagtgcagcggccctccacagggaggcatgtccctaggaatgctgagaagccctccctgaggccttgacatgccccttgcaaatccctggctcaagcagagaatgttgctgacccctggccctacacatggcagctgcccagactatactcttgagttcctaatctggaccagaaaagacctatgagactcattcatcttcttcattccatgggagtggagttttctctccacctcttatctctggaggccttatgatttttttttttttttcagagacagggtctcactatgttgtccaaactccaggcctcaagtgatcttctcacttcagccccccagagtgctaggattccaggcatgagccaccgtgcgccaacccgctgggggctcttgattcactctgcctgagaatgtccctatttcttcaaagtttcttaggactgcagaaaagagaaatatggggctggctctgaacctctcaaaaataatctgccatcaagggtcactttgtttttattttttatctggcatagatgcaaactgtgtatatgtgtttagatttcacttaatttcttgctgtctagaactcatttccctccagtggctgcagcaaaacctactggtccttctggccacagcctcagcctgaggcattggcaggcctgacccatggcaaaggggatgtgatgagccctagtaggcctgtggccagctgggctgtcccccactccatctttctggtcatcctattcgtaccactgtgcttccgtgttctccaagattaggtttctgtcattgccccctgctttctaaggacctgccttgcccaggctccccgaacagctttaaaaatgggttattgtaaaagagagaaatgaatgcattgcattctttttagaggaagtcaatggggccgtggagagagcctggattttggagtcagatggtcaggggaggttgaacctgactccatgcttcctagatgtatgtgaccttgggcaaattaattttgctctctgaggttctagtcttcatctggaaagtggggataagacaaatttgcccattgtgagaattaaattagatgctaatgggtgcctgtcacttaagagttcaaaaatcatcacttctaccccaagacccaagtgcctgggcaggtgttcatcatctgctattctacttcatggagccccctgtacatggagcaattgatgcctgagggtctgcatgttgattgtggctgtggctatggaaactcacatggctttgactctctggagagaaggcacagtcagtctttgctcaagaaagcctggaaaagtgatggaaaatctggtcagaaaaacaaagcatgcatgagatgtaaaacatgcagacagtgcttgctgtcatcagaccctgttcaggcactgaggctgagctctgagagccatcgagcatcttcctgaggcgcaatgccacagaagatggtcctctgatcccaaaacccattcctatgaatgtgcagccaaggggaacacaattattggcaggcctccaaccctctctgagcagctaattttatgggatttggtgtctagtttgtgctcattttgacttaggatttttgttgttgttgttgttgttgttgttgttttgagatggagttttgctcttgttgccctggctggagtgcattggcgaggtcttggctctgcaacctctgcctcccaggtgcaaacgattctcctgcctcagcctcccaagtagctgggattacaggcgcctgccactacgcccagctaatttttttgtatttttagtagaggtggggtttcaccatgttggccaggctggtgtcgaactcctgacctcaggtgatctgcctggctcggcctcccaaagtgctgggattacaggtgcgagccaccacgcctggcctaacctagttttatacaacttattttgtgtctgcctgcctttgtttccttaaaaataatcagaagaattttggagaaaaaaagtggcagaaaagaaaaggcctgatatagatttcctgtgctaatgaaaatagttttttctataacatcagcaaaggccaactgaagctagagccagaaattagatccagcaacaggctgacatgtcacctggctggagaggctttggggttacctgtctcagttccacagtgtctgaaatgtttgccatcagagctttctgagtttcagttatggtgatccattttcctgagtacttcctacactactctcatgtgattcagcctttccatatcaggccactcactttagctgtgagtcagctgggatggggaaagaaagaagcaggacgttgattgcattgctattattttcggcaatacatttataaggcaaatagcaatgagtagcgagagggaacccagtgggaaggtgtgttttccccccctacgtaaaaaatacagagaaaaattagagaatcattgctgaatggtcctttggtagattagaatcgagagaccccctcagttcttgcttttctgtgccattgttctgatttgtggttataattttgccccatcccctattcccatcgcagtgaaaatgacactggtttctattatttttattactagtggcttacaaaatagaaatttaccaatagaggatataatgagttcaagactatccagagaccattgggcttatcaaggaaactatgcttcttagttttccacctttattttgacaagtgagaatcactgcttaccaagagacactgagcccaaagtagtcaacccaactgggataggatccagagctgctatatacagccttgactcatgtttgtagctttttctttctttctttctttttgatggcactggagcagagagaaactaaagcaggaaaatgggaagtgattatctttgtgttttttaagatgaagctccactgaagctgctagatgggcagttacccaagcagcaaacaggagagtgaggggtgggaaatttacttacatgggaagtagggctgacactgaggagctactagggcttttctttccttatatttattttttttttgagatggagtctcactctgtcgccaggctggagtgcagtggcgtgatcttggctcactgcaatctccgtctcccgggttcaagcgattctcctctctcagcctcccaagtagctggaattacaggcacacaccaccaagcccagctaatttttgtatttttagtagagacggggtttcaccatgttggccaggatggtctccatcttttgaccttgtgatctgccggcctcagcctcccaatgtgctaggattacaggtgtgagccaccgcacccggccaactacggcttttctaaattgtgcaaggagaggttaaacttaggaggagatgcaaatcagattttaggagaattcagattcatagcacagagcagtggcagtaaagattcaaatgcccaggacaacgtggagcttttcagggagcatctttccattcatttagggagtatttattgagtacctagtatgtgtttagcactttgataagacttgaaaatgtcagttcaacaaaaatacacttggactgaactcaactccttttaagaaaaattgacatgcttctcaccaagcagaaggcctcagttgcagacagggaccaatacgttcctgatggtttctctccaactggctctgtctcctcagtttgcatctctggtaggcgcaggtgtgatgctgctcctgatggtgaagatgggacactttttctacacactgccaaatgtaagtagaactgatcaaataactaagtcaacaacgaccagggctctggattgctccttggtgtgtgtgtgcggggggtaaggggctgggggcgggggggcgggcatctccgaggagaattgcattcggattatccccaatggttgctccagcctatctctagtccctttcattcaagataatagtatctggatcacagggttgagggttaaatgatgtgagatatatatatatatatatatatatatatatatatatatatatatacacacacacacacacacacatacacacatatgtatatttatatataagatttatatggtgtgtagatagatagatgtaatagtattgggcctatagtaaacactcaagaaacattagttatagggctgggcaccgtataactgggttatacagttatacaccgtataactgggatacagggcaccgcctgtaatcccagcactttgggaggccaagctgggcagattacctgaagtcaggagttcaagacccgcctggccaacatggagaaacctcatctctaccaaaaatacaaaaattagctggtcatggtggtgcatgcctgtaatcccagctactctgggggctgaggcaggagaatctcttgaacctgggaggtagagattgcagtgagccgagatcccaccactgcactcaagcctgggttacagagtgagactccgtctaaaaaagaaaaaaaagcgttagttataggccaagagtggtgtaatcccagcactttgggaggccaaggtgtgcagatcacttgaggtcaggagttcaagatcagccgggccaacgtggcaaaaccccgtctctactaaaaatataaaaattagctgggtgtggtgacaggtgcctgtaatcccagccattctggaggctgaggcaggagaatcgcttgaacctgggaggctgaagtgagctgagatcacgccattgcactccagcctgggtgaccgagtgagactgtttcaaaaaataaataaataaataaaattaagttattattattattgaatcttctttttattgcttaagctataaagcaagcttcgtaagtaaggattcagtgaaaaatgaccaaaatagacttcagaagccacaccaacatgggcttggaaactcactgtgcattcatgccatctgttttcctacactgcttccagaaggccttgttctgcatttgtgtgaactcagtcctcccattgctgctacactgcctcttggttagttcacaacactagaaggcaggtctgaaagttgtgtcttaactcagtattcagccagcatgcctctatatacaaatgtgtcattcttccctttgtgtgaaactgagcaccctgtagagatgccaggtgtgttaattattagctataatccttctcttcttaggttacagtaggtctatactcagtgaccatcatttccttttaagttttcttcatgttcctgttagccatttttatatcgtacttagggaggtgagagaaggtttatttgtggatgtagcagcttggttacacaccgaggtggctgtccctgaagctggggtggttgtaaatgtgatctccctccttctgaatgcttcctttccacctggtgaatagcaggtgtcagtagagcaggaccatccacaaggctgctgctgccttctgctcatatgattcaaggaccttggagccaaggcatggaatctatgcaaggagggtggaactagtaaaaattgacacgcaagcggtcctctgattcccagtagaggtaatctccagaattcagtttctacagcacctttgttgctatcactattggaatctattttaggagggccactcactgatttactttggacatggatattttttctttacaactaaatgaagcagaattttaaaattccaaacaaacaaaaattatcagagttcactgacgggtagtgataaaatttgggactcctttattataaacacgttggggacagaacagcccttgcttttggctagccatattacatcacattaattttatagcatctagttagcatgtttctgagtgagcagttgtgattataataagatcaatggaatagattaattactgtaacaataaggttctatgagtactaagctataaatgacttcttcctttcttgaaaaactgtgaacagttgcaaaacccttgttagagtccctagtagagcattcaggctaggatctcaactagttacaagaggaccaacacaaattttgaaaaacatgatataaaataatatattcaatattattccaattttgtgaggaagaaaaatgtagaacataccagtggttatctctgggataatggaaattatgtatgagtttaacttgtttttacaccatgagcatgtttcaccttaatatttagaaggataaaaatgttgttgcatattgttttatgaaaagatttgtttcctctccatactccctgcctcaagtcaaaaacctttcaaaaaccctatgaggttgagtttattttccttcccaccgtatttcttcaaattgaaggaagtttggaaattcttgactggaaagaagatagcatagtggaaaagatggtatggtgggaaagaagtaatttctgccaacttcatctttgcttttcgctcctctactgacctgttgtgtctaacgggtcactgggtaccctcagaaagccagagtaagcgtggactcagccattcctcgtggtaagattagttctaattcccaggcagagaatatggaggaatggacagctaggaaagggctaagaaattaaaccaatacaggaatttcatgaccacaagaaaatcttttttttttttttttttgagatgagagtctccctctattgcccaggctggagtgcagtggcatgatctcagctcagctcagctcacttcaacctctgcctcccaggttcaagcaattttcctgcctcagcctcctgagtagctgggattacaggcacctgccaccacgcctggctaatttttgcatttttagtagagatggagtttcgccatgtgggccaggctggtcttgaactcctgacctcaggtgatccacccacctcagcctcccaaagtgctgggattacaggtgtgaacaaaaatgtttctttctttctttctttttttttttttttttgagatggagtttcgctcttgttgcccaggctggagtgcaatggcgcaatctcggctcatggcaacctccgcctcccaggttcaagcgattctcctgcctcagcctcccaagtagctgggattacaggcatgcgtcaccacacccggctaacttttttgtatttttagtagagacggggtttctccatgttggtcaggctggtctcgaacccccaacctcaggtgattccatctgcctcggcctcccaaagtgctgggattacaggtgtgagccaccacgcccagccaggtgtgagcaaaaatgcttcttaaaagtaggttaaattctactttgaagccctgaacgatttttatatgcttgtgcgtataaatcctcattttctcatatttaggaaactttctttccattataaaagtaaacatgctcattttcaaaactttagaaaatgcaaaatagataaaaatgtcattcaccatcacaaataaaaaactattcacattttggcatctatccaaccaatattattttctaaaaatggatatcactttgcatagttgtaacctaactgtacaattttatattcttgttatttaatatatagcatgaaacttcattctataacatttgacatttttggaaaattaggttgtctacatttttgttataaataacaatgagtaattttgtacatctaccattttcttttttttttttttgagacatggtctcactctcttgcccagactggagagcggtggcccaatctcggctcactgcaacctctgcctcccaggttcaaggagttctcccacctcagcctcctgagtagctgggattacaggtgcacgccactactgcctggctaatttttgtatttttagtagagacaaggtttcactatgttggccaggctggtcttgagctcctgacctcaaatgatccactcacctcagcttcccaaagtgctgggattacaggcgtgatccaccatgcctggcacatctacagttttctagatttaagattttttttttttgagacagagtctcactctgtcacccagtctgaagtacagtggtgtgatcttggctcactgaaacctctgcctcccaggttcaagcgattctcatgcctcagcctcccgagtggctgagattacaggcatgtaccaccatgcccggctaatttttgtatttgtagtagagacaggtttttgccacatgggctaaatttgtctggaactcctggcttcaagagattcgcctgcctcagcctcccaaagttctgggattacagacatgagccactgcgtctggccaagatttaggataaatttctgaaagtaaaacaaagtttttgtgtgaaaacatatcagcatttctggatatactgtcaagtgattttccaaaagggcaccaccctatttcaacaaccatgtataaagggtaatatcaattattttattttatttttgtgagacagggtcttgctctttcactgggctggagtgcagtggcatgatcacacctcactgcagcctccatctcccaggcttaagtggtcctcctacctcagtctcctgagtagctgggactgtagttgcatgctaccacacctggctaattttatgttttttgtagagatggtgtctcactatgtcacccaggctggtctcgaactcctgggctcaagtgatcctcctgcctcaccttcacaaagtgctggggattacaggcatgagccaccacacttggctatcagtattttaaatttgctcatttaatttgataaacaaaatggtatttcattagtaaatcattacagtatattatgattcaacatgaagaaaagcccagttggaattgttttggagtttctgtgagtgtaagttctcttaatttatcatcccatctgagaatggtttctagataaggtaggtaacagatatgtcaagcaaaccagacaaggcaaggccaagtagccaaaggcaccagctcccatgggtcttgttccacacaccaaaagtaacagaagcagaaggggatagatgagtataacctttagctatgcctggcgagatgtcagagccctggcacctgtgagtggtcgacttgtgggttgggaaaaagaatttactgacaatagtataggtttgaaaaaggaaagtttattagaagggaagaacactgcgaaaggatgcagtgaggcgcctcagcaagaggactgagtgcgctatggtgggttttccttaggagcattcatagaccttaaggcgggagcttagggttgtaaaacgagtttcagcacagcattccagagatgtatagaaaattttgttacttataaaagttgaaagaggcctggaatcacatgccagtttgagatattagggaagtttgtttacttctaaattcctagataaggagttttgcctccggatggcctgtcagatggtcatcaggtggtctttgctcccttttaaattgctcagataagaagtttttgtctccggggcctgctcaatggtaaggaggtgattttcactttcctcaagttactcttcctctcactgtctatgtgagtaatgaactacctgaatctaaaaggggctattgtcagctttcctggctgaatcagtcaggccttgacgttggcctgaccttgccttgtgtttttggcaaattaaggaggagggcaaagaaaaatgtagagacaaaattagccgtgagtgatggcacgtagtcccagctacttgggaggctgagtggggaggacgtcttgagcccaggagttcaaggctgcaatgagctatgatagcacgccacagtactccagcctgggcaagagcgagaccctgcctcagaaaggaagagaaaagagaaacgtagagaaaatttatttgattggacaatgagttggaacatagacatggtattcatataaaatatcaatgcaaaatatctcaaagtggcaaggctaactttttgtgattccttggtggggatttgtgagttttacaccccaaagggaaaatgaaccatgatttatcttttccccacaggctgtgctggctggtattattctgagcaacgtcattccctaccttgaaaccatttctaacctacccagcctgtggaggcaggaccaatatgactgtgtgagtgtagatgccctggctgaggaaggggagggcagagggaggttggagagagggagaaagaacaaacaaaagagatctgccatggacctaaagaacacaaacaactctttgatgcctagtactccagttttgctttaaaaaggagagtcaaggttgttggtacatgaaaacacgaagacctcattccaactatgcaaaattaaatgaaaaggattaagtggctacagttacatccaaatctagcaaaaagggtttgtcattcatcgcatatttggataactttttttttttttttttgagacggagtctcactctgttgcccaggctggagtgcagtggcgtgatctcagcccactgcaacctccgcctcccgggttcaagtgattctcctgcctcagcctcccgagtagctgggactgcaggagcccaccaccatgcccggctaatttttgtatttttagtagagacagggtttcactatattgaccaggctggtctcaaactcctaaccttgtgatccacgtgcctcagcctcccaaagtgctgggattacaggcgtgagccactgcacccagccttgaatgacttttaatccagttaatgtaaatacatttcaggataggagtctccaatcccaataagggaaggtggtgtcttgtcaggcagaataactgctggagcacactcctctctggagcacaaaaccggaggtcagaaaggggaaacagcaagaaataaaaggtggaggatagaatgtgatgagaggaggacccaggagaggcaaagaaatatgaaaggggataacttttggagccagatccctgaggagctaagaggggacgggtccactgcacagatagtttctattccaggaggaggcataacacttccaaagggacggaagagaatgaggaaacattgagtatagacactgacaagtggcaggtggtgaggaaaatatatatttaaggaatttcagctgacttttcttctgtgaagatgaagtaatggagaaggtgctggggtaggggcctgaaaaggatggtaaagatttgcaacaactcttatacatcttaaaatagcaactaccatttggtgagtattctagttggctttgcaaatggtattcctaatctcaacaaagcctataaggtagacattattactattttgcacatgaggaaattgaagttttgagagagatttgaagacagaggcgaccagggatgcataaaagaattgctaggcatcctggagggccccattgtttgtcatggcaccagtccatgtggctatggaatatttccctaaagcccaggtgtagtaagggagagggtgaaggtgagttgagaaacaggactgatcattttctcagttgaacttgttttcatgatcattttcccctcattcccttttccataaggctctttggatgatgacattctcatcttcaattttcctgggactggacattggactaattatctcagtagtttctgctttcttcatcaccactgttcgttcacacaggtactttgtctcaggtaataggaggttaacaaggcaaggtaagccaactctgacctaaaggcaagtgcatttcctttcagagctaagattcttctcctgggtcaaatccctaacaccaacatttatagaagcatcaatgattatcgggaggtaagaatccaaatgggtcccatttctctgcctaagggatagagtgggccccacctcatgcttagtttttctacaaaatcccttgccattgtttcctgcactgcagatacacatttacaaaggagggggatgtgatgtacactggtagagatgggttctttgtttttatttttttttttggagacagagtcttgctctgtcacccaagctggacagtacagtgcagtggcttgatcttggcttactgcaacctccacctgccaggttcaagcaattctcctgcctcagcctccccagtagctgggattacaggcgtgccccatcatacctggctaattttttgtattttagtaaagacagggtctcaccatgttgcccaggctggtcttggactcctgagctcagtcaatctgcttgcctcagccttctagagtgctaggattacaggcatgactcaacacacccagccaagacgggttcttaagtagctaaattcttatagtattgcagccagttaaagatcatttgtaaatgtactttaaggagagtttggccaagaaaaaggaaatgaagggagaaagaagacagcaggaaaagcagagggtgaaaatgggaggaaataattttctagttcttgtctctaataaagaagaatacaggctgggtgtgttggctcacacctgtaattccagcactttgggaggccaggcatttgagaccagcgtggccaacatggtgaaaccccgtatctactaaaaatacaaaaattagcagggcgtgatggcaggtgcctgtaatcccagctactcaagaggctgaggcaggagaattgcttgaacccgagaggcggaggttgcagtgagccaagatcgcgccattgcactccagcctgggcaacagagtgagactctgtctcaaaaaaaataaaaaaataaaaaagaagaatacagactctctaggagcttctaaggatatattattcttattccataaaataactgagaaatttccctcaacttcacattttgtcttgcagatcatcaccattcctggggtgaaaatcttccagtgctgcagctcaattacatttgtaaatgtttactacctaaagcataagctgttaaaagaggtatctgccctcctgcccgcctttctcaacctgcccactccccgccactggcatctctctcccactctttcaccttctgttccaccattcttcctctggatgagacctctcatgtctttcaggttgatatggtaaaggtgcctcttaaagaagaagaaattttcagcttgtttaattcaagtgacaccaatctacaaggaggaaagatttgcaggtgtttctgcaactgtgatgatctggagccgctgcccagggttagaaatgccttttctttcctatgtttttctccatattttataaacaagtacactagtcatttcttaaaaaaaaaatcaaaacctctaagggattttgacttttagatggaccatgaagaattcagaaattaagatacaaggttcctctcaccttggaggcttgactgaaaaaaaaaaggcacaagattcccccttgaggttcaggttttcacaagaaagtaggtgggaagtgttctgacttctactggttgaacagtgaccagagaacagtttgcctgttgagactgtaattctgtagttgcacctatttccctggctcttagcggccaagctttagatttctgaaaataagtgacttaaagattgttttctgattccaactagggcaaggtcaaggttgctgggcttctcaaggatctgccagggtctcctgatgtcttcctatggccaagaaaatgatgatgggagatgggggaaaggagcggggaggatgagcacaggccgctatttcagatgggaattttacagcatttggaggttatttttactgatgagaattacaaagtgttcattatttccaaactggacttgatctaagtagtcccttcccccagagcaggattgctcatttctagcttttgggtctttcggcaatcacctagtctacagcactcactctggaggggcagctctctctatacacaaagatttacatcctcccccgcaacacacacacacaaatgcctccacccgccatgcaggtgcttgcaaaaccctgagcatccactcttgttcccatacattctaatggagcataggttccactgagctactgagaaggggtttcaccatgttggccaggctagtctcgaactcctgacctcaggcaatccacctgcctcagtctcccaaagtgctgggattacaggggtgagcaccatacctggcttgtttttttctttcataatagtggtatatcttaagattgacaaaatagcatagtgaatcatgcaatatagcatatagctgtcttttaaattgtatgtttagattctaacagccccaagtagctgggattacaggtacatgccaccatgcctggctaattttgtatttttagtagagatcggggtttcaccatattggtcaggctggtctcgaactcaagacctcaggtgatccacctgccttagcctcccaaagtgctgggattacaggcgtgagccaccacacccagctagattctaacagctcttaagacatcaagtaaggggagattggcatgagctcaaaagtcagaaaaactttgtggtagcatcagcctgtgctgggaaatttatgagagaattttagattgaagttgggtaggaaaaaagaggattcccagtccatggacaggcttcgacaaagacaccaaggtagaaataaacgtggggctcttaggatagaggcttagcctgggaagtaaggtcaggcagataacacatgaggggattgtaagaaagataagaacgtagagtagatggaggagagaaaagaaggatctcggatggccaggcgcagtggcttacgcccgtaatcccaaaactttgggaggccgaggcaggcggatcacctggggtcaggagttcgaaactagcctggccaacatggtgaaaccctgtctctactaaaaatacaaaattagcccagcatagtggctcatgcctgtaatcccagctactcgggaggctgaggcaggagaatcgcttgaacccaggaggcggaagttcagtgagccagaatctgtgccactgcactctagcctgggcaacaagagcaaaactccatctcaaaaaaaaaaaaaaaaaggtggctctcagagaattccctctgcctagaggagctcacatctccctgccactgagccaaccctggcctgttccccaaatgcctggccccagtgacctcaagccttgggaacagctctctcctttgaactgcaaactgcagcattatcatctatccacaccacttttcttttcttttctgctatacaatatatactacctcatattgtttttagctttaaatttttaaaatttatttcacaagcaacattgttagaataacattaaaaaaaaaaatagaaacatcacccagaattacaccactctagcaaaggaattcttctcattattccttgtgctttatagttctcatccatatatattcttacttatcctttttattttgagacggagtttcactcttgttaccggggctggagtgggatggtgcgaccttggctcaccacaaactctgcttcctgggttcaagcaattttcctgcctcagcctcccgagtagctgagattacaggcatttaccaccctgtctggctaattttgtatttttagtagagacgtggtttctccatgttggtcaggctggtcttgaactcccaacctcaggtgatctgcctgtctcggcctcccacagtgctaggattacaggcgtgaggcacacccccagcttttgtttttttttttttcttttgagatggagttttgctcttattgcccaggctggagtgcaatggcacaatttcaactccctgcaacttctgccttctgggttcaagcgattctcctgcctcagcctcctaagtagctgggattacaggcatgcaccaccacacctggctaactttgtatttttagtagagatggaatttcgccatgttggtcaggctggtctcgaactcctgacctcagatgatccacccacctcagcctcccaaagttctgggattacaggtgtgagccaccatgcctggccttacttatcccttcaatgaacgtgtgcacactgccaggtagagtctggttcctgtaaatgcagagtccacatttgcatcctgcacatcattgtgttcctggtccttgttactgtccttaagctatagcaggcagtctgggcctttaggaggttgacagcagtggtaaagacagccttgctcatgtaattttttttttttttttttttttggacataaggtcttgctctgttgctcaatctggagtgtggtggtgtggtcacagctcactgcagcctcaacctcccagcttcaagcgatcctctcacctcagcctcctgagtacctgggacaataggcgtgtgccagctttttttggggagggggcaggggggcacgacagggtctcactgtgtcacccaggctggagtgtgcactggtgcaatcttggctcactgcaaccttcatctcccaggctcaagcaatcctcccacctcagcctccccagtaggtggggctacaggctcactgacacgcccagctatttttattcttatttattttttattgttttgtattttttgtagagacagatttttgccatgttgcccaggctggtttcaaactgctgagctcaagggatccacctgctttgaccttccaaagtgctagaattataggcatgagccactgcacccagccttcaagtgctttttgtcttaaggaagtctgaaaggagactgttgcactgatgaaggaagagggtgctgagacaagggactgatgggaaaaaaatacttcacacaaagtattagtaggcactggagactaactaggacccaagcatgaggaaaaggagtaaaagatgttttaagtctggctcactgggacagtgatgaacatcagaagttgggaggggggtgtcgtgggtggtgaagatgaggaaagatgactgtgggggcttcagttgtgagcttgaagtgacagatatccaagtaaaaaatgcacagtacctactctcgggagaagtttcatgagagagggacatgagctggcagagacaagaaatagcatcgttgcaagtccttccggcccttgttggtgtcttaccacagccctcccttaactctgtcgtcccagattctttacacagagcgatttgaaaataaactggatcccgaagcatcctccattaacctgattcactgctcacattttgagagcatgaacacaagccaaactgcatccgaagaccaagtgccatacacagtatcgtccgtgtctcagaaaaatcaagggcaacagtatgaggaggtggaggaagtttggcttcctaataactcatcaagaaacagctcaccaggactgcctgatgtggcggaaagccaggggaggagatcactcatcccttactcagatgcgtctctactgcccagtgtccacaccatcatcctggatttctccatggtacactacgtggattcacgggggttagtcgtattaagacaggtaagtactgaggaggccttggcaggagctctgatccccctcctaccatcccaaccccaccctgatcctgattgaattctgttagtcactgatcagctgctatgagactgctaggccaccagagccttggacaccaaaggcagtacaatataaggtcaatcaaaataaaaagagaatgaaccaattcttttttcttttttcttttttgagatggagcctcactctgttgcccaggctggagtgcagtggcacaatcttggctcactgcaacctccacctcccaggttcaagagattctcctgcctcagcctcctgaatagctggaactacaggcatgtgtcactacgccctgctaatttttgtatttttggtagagacggggtttcaccatgttggccaggttggtctcaaactgctaacctcaagtgatccgcgcacctcggcctaccaaagctctgggattacaggcgtgagccaccatgcccagcctaaaatgaaccaattctgatgtattgagctgcggttggtttggtaagcataaaacattattatttctcaagaaatgaaaaacaggacactctgaacttcactgaaacagcaatctgtgccacgcccagtaactcccagaacatcctgggagtcagctgcaaatctcttcaaggaataggtctgaatgcttcagaaaaaaagcagctcaccaggaattctccacagttcagctgatctgagccagcactgtaaaaggcactgggctgtcttgtactccagtttgaagacgttgggatgaaatgacacctcaaacttggggctggctgtccagtacctgcagggtcttccccacttccttcctcactgacacatcatcaggtgaaaaggacaaggatgattttcccttcaaaagctgtgtccccgggtcctgacttcttttctactcttgggtttctctaacagttctcttttgtcttcctcctatatggtacagacagtttaagtgcacagctaaccatattgatgtcattgtttaatgcctcataagtataatattcctttttagccagcttatcccagtttacagcactctgtctccctcttggtgatggctcaggtttgaacatcctgaacactcatggtgtttgagtgcttcttttgagatttgcacacctcttttgagatttgtgcctttggatggttttccttcttttatcctcagaacctattttgtcatattttcttactcctaagggaatacgactgcctcttaagtgagtccagcttctctttggtctggggcaaaaggaagcttttcatagcagaaagaactctggtttgcagtctgggatgtatgctctgtcttggctcactgtccttctgacccgaggcaagttactaaattgaactgggtctccgtttcctaatctacaaaatgagaggtttggaagagattaagagctttcccatccatgagatccttttatttttcaacaccactttctgactcaattatactttgaaaatctgttgttatttgggcttttccatcttattctactgggctatgttctcccctcctggtcctgggctgtagttgttactttagattttattcagcccacgttgctgagtgtctactacgtgccagactgagctgggcacatgtatatacactatctcatgtaattttcacaactgccttgagagacaggccatactttcccctaagagtctgaggctcacagctcataagtggcctgtccagcattgaaacttttaagtatctgactttatatcatactttctctctgttccatggtatagttgtgccattgtctcccttgctcctcctctttttgtagaggcaccatatgttctggtccttggcagcacccacccacacctggcccatgttgatgactttctgttccatccccaacatggagacaatgtcagacgcctttcactttcagccttcagagattcatggtgtacttttgcactctaaaaatacaggtttcttcatttcctttgtagttgtgtatactgcctccttattggaagaaatcattctatttactttataattgaaaactggaacctaagaaaaatccatcagtccattttttttttttttttttttttttgagacagcatcttgctgtgtcgcccaggctggagtgcagtggcatgatctcggctcactgcaatctccacctcccgggttcaagtgattcttctgcctcagtctcctgagtagctgggactacaggcgcacaccaccacacccgcataatttttgtatttttagtagagacggggtttcaccatattggccaggcttgtctcgaacttctgacctcgtgatctgcttgcctcagcctcccaaagtgctgggattacaggcatgagccaccgcgctcagcctacccatcagtccattcttattggagacagccactcagattaaacttcttcctaattcatgggactttccttttccagcacttgtcatttagagtctgttgtggccctttgccaaatgactttgtgatttgccatatgatcaagaatgacttcatttcctcttggtagtgaaagaagcagagttcgtttcttttgacactttaacttagtgctcagggttggtgtctacttagtcttaagtattaaagtcgatattgatttgctttgaagtgaacttcaagatttattgccccacagtgtatatattggctgaagcaaacttgaggacagtagctgatgtttacttatctgatagtaaacatctgatgttttactaaaatcaaatgcaactttgcaaggcagctctgaatgtgaccctcagggtttctgaattccgttccctactgcatcacttgagcgtctctgagccacatcttgcttcctctgctcagtaaactccagggggaagtgggggtctcatgcaaacactaggccatcatgccaaaatatggttgtttgagatgattctccagagtgtttgcctcacacctgtgcctgtctctatgctagggctttcctcctgcagacgtcctgtcttgatatatactgtttatccccttgagactatgggcagctctccctcctgctccccaccctcacatgacacggtctgattctcttttgcattcccagcactgtagatgttttccggcatagagaactccactcatcaaatgtttgtagagctgaattgggatgcaaggtacatatacccccagacaagtgaagggccaaaggggttttaaaactcggctaattggctgggtgcagtggcccacgcctgtaatcccagcattttgggacgtcgaggcaggcagatcacgaagtcaggagtttgagaccagcctggccaatatggtgaaaccctgtctctattaaaaatacaaaaattagccaggcgtgtggtatgcacctgtagtctcagctacttgggaggctgaggtggacaaatcacttgaacctgggaggcggaggttgcagtgagccgagatcatgccactgcactccatctgggtgacagagtgagactctgtcacaaaaaaccaaaacaaaacaagacaaaaacttagctaattagaaggcctttcctagcaagtataaagccttctgatactggttttctctccccccacagatatgcaatgcctttcaaaacgccaacattttgatactcattgcagggtgtcactgtgagtatccttcaccctatgagagggctgttttgcaccctgggtcctctgctccccaagtatctgacattgtgtgtgttctgggtttggtttttagcttccatagtcagggcatttgagaggaatgatttctttgacgctggcatcaccaagacccagctgttcctcagcgttcacgacgccgtgctgtttgccttgtcaaggaaggtcataggctcctctgagttaagcatcgatgaatccgagacagtgatacgggaaacctactcagaaacagacaaggtcagacaaaccgacaaagcatgaggttgggggaagggattgagggcagtggggggatgggtgaggggtggttgggggctgggagtcaggattcctgatcagatagaggaataatgtccaggaaaggtatttagtatggctgtaccagaatctgggatgttgaaatgcacccttaccacttggtaaatagcagtggatctgagcagccaagtgccctcactgtcatggcatcagggttccattcaagaaatttccctaactgaagagagggtttgcccaacccagcacagacctcaaggatccttctacagcattcttggttagtgtctattaccagttgctaaatattctaaatgtctcccctagctatacctttagaattcctccccaccccacccactcttgggatgaataataatactaatgaactagcagagattcagatctataatcttgtctaatacctcagctttattacctttacattgttgtggtatgagatttactcaagctgaccaaatgcaaaggagaataatatataagtctgaattttcagccttttattaatactgagacctggctgagtgcgatggctcacgcctgtaatcctagcaccttgggaggccgaggcaggtagatcatgagatcaggagttcgagaccatcctagccaacatggtgaaactccttctctactagaactacaaaaattagccaggcatggtggcgggcacctgtagtcccagttgcttgggaggctgaggcagaattgcttgaacccgggaggcagaggttgcagtgagctgagatcacgccactgcactccagcctgggcgacagagtgagactctgtctaaaaaaaaaaaaatactgagacctgggcctactttagcattttcaaatcagtacctgtgtaggttaaaggtttccaaaaacaaaaaaaggaaattaaaacagatgggcactaaaatattatctaatattatctaatgactagaaatcattattaaacaaagcctagttgatgaaatgagacaccacatctgaaacagttaagaccgtacaacgggcgggcgagatggctcacgcctgtaatcccagcactttgggaggccaaggcaggcgaatcactaggtcaggagatcgagaccatcctggtgaaaccccatctctactaaaaatacaaaaaaattagccgggcgtggtggcacgcgcctgtagtcccagctacttgggaggctgaggcaggagaatcgcttgaacccaggaggcagaggttgcagtgagccgagatcgcgccactgcactccagactgggcgacggagtgagactctaaaaaaaaaaacaaaaaaacacacacacacacaactagttaactggtagttaataaaaaaacaactagttaactagtagttaataattagtaatgactaactaattggtttgaattatgcagtctgcttttactataaatggaagtttctctattttttaatttataattatgatactcgatatatttgtttttacatatttagtcatatctattaatgtttccttttcttattatatttactttttatttagaaagtcattccctcttagaaggtaaataagacacattttctagatttttatgtttttattttttatatgttatactctttaatgtaaatagaatgtatttcagtatacaggtattgaagggtaatctttattttttttttatttttgagacagtctcattctgtcacccaggctggagtgcaatggcatggtctcggctcactgcaacctctgcctcctgggttcaagcgattctcctgcctcagccttccaggtagctgggactacaggcgcccgccaccacacctggataatttttatatttttagtagagacagggtttcactatgtaggccaggctggtcttgaactcctgacctcatgatctacccgccccagcctcccaaagtgctgggattacaggcatgagccactgcactcaggcttaatctttattttttatctatgtagctaactattttgggctatatgccatctatcttagttcattagtgctactataacaaaatatctgagactgggtaatttgtaaataatagatatttatttctcacagttctgaatgcgagaagtccaagatcaaggtcctggcagtttcagtgtctgctgagggcttcttccatcttctctcagcagcatccccacatggcagaaggtggaaggacaaaagggtttatgctagccctccagcccttttataaggcactaatccattcacaagggcagagcccttatgacttaatcactccccaaaggcctcacctcttaataccaccacaatgtggatggattttggaagccactcatgcaaatcataccaccatccaaccatctattgaataagccttctttcccctactgatatgttattttcataaaatattatattcttatgaaaactaaagtgtatttctagtttagttgtggatgtcatttttctgtatagcttcagtatcacagtgttttttgtttttgtttttgttttttgagacagagtctcactttgtcgcccagtctggagtgcagtggcacaatctcggctcactgcaacctccgcctcccaggttcacgtgattgtcctgcctcagcgtcctgagtagctgggcttacaggcatgcgccaccacacctggcttatttttgtatttttatttgagacgaggtttcaccatgttgcccaggctggtctcgaactcctgacctcaggtgatctgcccaccttagcctcccaaaatgctgggattacagatgtgagccatcgtgcctagccatcacactgtttttattagtattgctgtataatacactttaacatttggttaagaagtcctatgtcatcagtgttctatttcaaaatttgctaagtcattctcaccaatttattcttccaaaccaacttttgaatcttttgtcaggtccccaccccacaaaaacaaatcttattgaaataatcattagagttgtattaaaaatataaaatcccttgagaatttatatctttatagtattcattcttcttatccagaaacatgaactgtctctacatttattgtcttcttaaatgtttcattcatagtaaggttttgtgactttcttcacatgggaaaatcttagatactttatatgttttacttttttgtttttttgagacagggtctcactctgtcacccaggctgaagtgcagtggcatgatcacagtgcaccacagcctcggcctctcaggctcaagcaatcctccaacctcagcctcctgagtatttgggagtacagacgcacaccactatgcccagctaatatttgtatctttcacagagacggggttttgccatgttgcccaggctagtcttaaactcctgggctccagcaatccacccacctccacctcccaaagtgctgggattacaggcatgagccaccacacctggccatttccattatattttctaactggcaattgctaacatataggaaactcattggtttttattaaattatttggctacctttgtgaatcactttactattcctaagaggtttcactgttaattcctttgggttttccaaataggaaaatattttctaaaaataatactaatctcttatgttccaattgttagaattcttatttcaatatcatatattattgcattaactaaacctctcagaacaagtaataatgatgaatcttgtcttactcctgaatttaatgagaaggatcctgtgtgtctctattaagactagtggtggccaagtgtggtggctcatgcctgcaatcctagcacttcgggaggccaaggaaggcggatcacttgaggccaggagtttgagaccagcctggccaacatgacaaaaccctgtctctacaaaaaatacaaaaaaattagctgggcatgctggcgcgtgcctataaccccagctactcaggaggccaaggcatgagaatcactttaacccaggaagcggaggttgcagtgggctgagatcctgccactgcactccagcctgggcaacagagcgagaccctgtttcaaaaaaaaattaaaaaataaaagactagtggtgatgctggtttaagatggacatatcagccagccgtagtaactcatgcctgtaatgtcagcactttgggagactgaggcagaagaatcacttgaggccaggaatttcagagcaacctggacaacatagtgagactcttatcttgaaaaaaaaaactaaaaatcagccaggtatgatggtgcatacctgtaatcctagctactcgggagcttgaggcaggaggattgcttgagcccagtagtttgaggtcacagtgagctttgattgtgccactgcactctggcctggatgacagagtaagacccggtcaaaaaaaaagatggacattatctactatgtttttaaaaaatattttcctaacgtactaacattcttatattaagacttggtattgaatatgtcaattgttttctactatttaagacagggaagactaggagaggagcaagttctatttcatgtgtattgaattcaaaatgcctgggccaggtgtggcctcacgcctgtaatcctagcactttgggaggtgaggcaggtggatcacttgaggccaggagttcgagactagcctggccaacatggtgaatcctattctcaactaaaaatacgaaaattagtcgggtgtggtggcgcatgcctgtcattccagctacttgggagcctgaggcaggagaatcacttgaacctgggaggcggaagttgcagtgagccaagatcatgccactgtactccagcctgggcaacagagtgatactctgtctaaaacaaaacaaaacaaaacaaaaaaattcaagtggcctattaaacattcaaatggagatgtcaagaatggaagtgaatttatgaacctgcagatcaggggaagggttataaccaaagaatcatcagcatcagcatatagatggtaatgaaaattatgggcccaaaataaaagtccctatggagagagcatagatagacaagagaaaggtcccaggatcaagccctggggcataccaacatctagaagtccagtagaaggagaggagatagcaaaaagaccaaggagcagcaaccaggaaggaaggaggaaaagcagaagagtgtcatatggtggtcgagaagaaaatgtttcaggaaagttgaagtgattaattttgaggaatgctgttacaggctgattcaaggctgatgcaaggcctgtgggcacctgctatgtgacaagctcagtgtctggtactggggatatcaagaaccaggccctgtcatataccacaaggagcttagagtctagtaaggagtaggtttgtaaataaataaagaatatgttactggtactatgatggaagtgtgaatgagatgtagttggaacacaaaagaagctgtggtcctgcctggtcatcttggctctgaatctggggtgatgactaagtggatgtggacaagatggaggaggacaaggtaggcaaagggaatggcacgcacaaagctgagcagtagtcaggcaactctgggtaactttatggtgagagcaaagggcggggaccacagctggaataaagctaaagaagaatggcaagaggccaggtcacacacagccttataggccctgtcaaggattgcactgggggttggcaagacaagtaagatcaagaagacaagatgtttcagaatgttgttaagtccattgctgttttaaatggttggtcatgaaatccggtctagctagaaaagccagagaaattctaagttggaaattgattgagtctgaagaatagtgagtaactgagaaaccagaaggtagaaagaagatgaaaagcagatttatggatgatgtcattggcattttaaagaaaattaaaaaaaattttaatgaaaaataaataaaggttgggcacagtggctcatgcctgtaatcccagcactttgggaggctgaggcaggtggatcacttgagctcaggagtttgagaccagcctggccaacatggtgaaaccctgtctctactaaaaatataaaaattagccagtcgtggtggtgcatatctgtagtcccaactacttgggaggctgaggcaagagaatcacttgaattcgggaagtagaggttgcagtgagccaagatcatgccactgcactccagcctgggcaacagagcaagactctgtgtcaaaattaataataataataaacagaaaagtagatttaggcaagaaatattttctactctgcaaggaacccatggttctggtaccttaagtcctgttgtattctgaaattccttgactgctcaaaaattaaaattctgggtttttttgtttgtttgttttttgagacagtctcactgtgttgctcaggctggagtgcagcggtgtaaacacagctcactgcagtctcagcctcaagcaatcctcctgcctcagcctcctgagtagctaggactacaggcatgtgccatcatgcccaactagtttttaaaataataataattattattattatataataattataattattattattatttgttaagatagaagttttactatgttgcccaggctggccttgaactcctggtctaaagcgattctcctgccccagcctctcaaagtgctgggattacaggtatgagccactgcgttcagcagaaggttaaatttaattagaaattttaacccacctaattgtatttcagaatgacaattcaagatataaaatgagcagcagttttctaggaagccaaaaaaatgtaagtccaggcttcatcaagatccaacagcctgtagaagaggagtcggagttggatttggagctggaatcagaacaagaggctgggctgggtctggacctagacctggatcgggagctggagcctgaaatggagcccaaggctgagaccgagaccaagacccagaccgagatggagccccagcctgagactgagcctgagatggagcccaaccccaaatctaggccaagagctcacacttttcctcagcagcgttactggcctatgtatcatccgtctatggcttccacccagtctcagactcagactcggacatggtcagtggagaggagacgccatcctatggattcatactcaccagagggcaacagcaatgaagatgtctaggagatgaactagaaataaggggtcagataatgctggcaaatcctcctacccaaaaaggggtcaattgtccagagacctagactggatacgaactagcagtacttccttcctgactgtgactcctactacctgccagccttcttccttgctctgcgctgggatcatactcccaaatcacattactaaatgccaacaattatctctgaattccctatccaggctcccctcatttcaccttcagcatatattctagtcatgaatttccttcttcacacaccccacatctctgggctttgtgccagaccatctctaacttaatcctctcatccctgttcccctttctccaaagagatgaagctcaaataaaatgtataactctagtaaca

SEQ ID NO: 93 - DNA, 56255 bp, Homo sapiens
agagcagacctgttcctctccaacactgagcaggtccagtgatccctcatcctgccccaactgagtagcacttggttgaggctgttgtagaatgagaccacaagccaaccacatcctgaggtcttgagatggaaagtttaggaaacatttcataaccacaggtccttcctggcttaagagcaccaaatggcaaatcaccaagaagacataaagatggggttaggagtcatggaaggagttaagacctcaggtgggaaggaagcattatttctgctaagcctgtctgattctcctgaaatggggcatgcataactgcttgcattgtagctgcttgctgttcctgatttctgtttcacaatccagaagcaggttactgcttcactccatcgcagccacttcctcttgaactaagggaggcagggcttgtcttctctcctcagagcagagtctgcgatcttcccagcacagacgtttggacagagcaggctcctaaggtctccagaatgcccgtgccagcctcctggccccaccttcctagtcctttcctgctgatgacgctactgctggggagactcacaggtgagcactgccttcggttaaaatcttttttcctgcccactgagccatggcctgtccctggactttcagggattccggacaatgacaagtgctgccaagaaaggccaaggattaggctttgactgagagcagaaaatcagggagctgagcactttctctgtggatctgcagctggctaccagaggcattgaaccacaggacgattcaaccaccacaacaacaattacttacattttgataatatttcaattgaaaaagcagagaagaatcattatctaaatcctcaccagtcctgaggccctagggccaagtgacatgcccaagtccacagagtaagctcagagacaccctaacagggttatgtggctctaggcccagccctctctcttcaccaaactgaggatgtgaagtctgtaatagtgctcacttgagtagggcagtggtgtggtgtatcctgggagtgttcagccaccatcctccctaagggtgctcctcactttgtcctctgttcccccatgctcctccctcccctgtgacctgattcttaccacccatttctctgtggcctcttcctctttaagaagttccacatttgctgcttactgggtcctatattcctttcctagggcttccataacaaagaactgcaggctgggtggctgaaactacagatatttacttccttgcagttaaggaggctgaagtccaagatcaaggtgtcagcagggttagtttctactgaagtctctctccttggcttatacagggccattttctctctgtgtcttaaacacatgatcttcctctgtgtgtgtctgtgtcctcatctcctcttcttatgagaatatcagtcttgttgtattaaggcccaccccaatgacctcatttaactaaattacttcttaaagaccctgtctcccaaactgtaacgttcagaggtgctggggattagagcttcaacacatgcattttgtgggacacattcagcccataacaggtactacaacctcctttggttctcttaaatttcccatggataatttctttccccttcccaagacaggcaggattggagggcctttcctggtgcagcctgggagaaccctgctcacagctcccagacaagttacctgtcctgatcccttctcaggccatggagctgaccccagaaccacagggctgggcacagcagcctctcaattccccactgggccctgctgtgatgtcacctcacaggccctagagggcaggggtctcacttttcaaattatttttctcacacatacactgtacccaaatgacagcagtaagagtttaacaattgagctcttcctaccatgtagacacagttattagcattttgcctgttttagctccactaatcctcacaacatccctgtgtgaaagctgcaactattatcccctatttccaaacaaagactcaggcagagggaggaacttgtccattcattgtcccctacctcagtcagtggagcagctgagattcaagtccaggtcgaccggctccaaagttcattcttttagtcgtgttatgctactagcagaaatattagaaaatgcagggaagtaaacatagaattaattattgcctaccacacttgttagcaacaaccagagttacaactgtgatgtatgtacttctaaatttgttattaatgtgttggatgctttctatgggccacatattttactttctatgggccagatattttaatgagattttaacgtgtgttgtaattttatttaatacacaaaacaaacttatatactatcacaataggtcacactttgatatatatttgtgaatgtatatgtgtgtgtctatatatacatatatatgtgtgtgtgtgtatatatacatatatgtgtgtgtatatatatttgcaaatgtgtgtatacatatgtgtgtatacatatgtatatgcatgtatgcatataagtaagtgtacatgcacacacaggagatttcattttttatcattgtttctccaagtttctaatttcaatgaaacttttaacaaaatattttatttttatttgacagaactgtatatacttatcatgtataccatattaatgaaatatgtgtacattgcagaatgcctaatttgagctaattaacatatgacctaccttgtatatgtatcatttctgtggtgagatctctcaaaatctgctttcaacaatttttgaggttacgaattgtgttatgaactctagaccccatattgtacaatagatttgtggaactaatttctcctaactaaactgaaattttgtatcctttgaccaatatctctccaaatgcaccccctgcctagtgcctggtaaccaatattctactatctacttctatgagttcaactttttaaaattccacatatgagagacattatgcagtattgtctttctgtgcctggcttattttacttagcataatatcttccaggatcatttatattgttggaaatgataggatttccttctttggtcaggctgattagaattccattgtgtataccaatttcctttctccatttatctgctgatggacatctaggttaatttaatatcctggctattgtaaataatgctgcaatggacatgggagcacagatatctctgtgacatgcttatgtcatttcctttggatgtatgcccaatagtgagattgccagatcatatgatagttctatttttaattttttgaggagcctccatactgtttttgctaatggctctactaatttacattcccactaactatgtgcaagaattcccttttctccacatcctctccaaaactagttatcatcttttttatagtagccattctaacaagtgtgagatgatagctcactgtggttttaatttgcatttaccagatgaatagtaaggctgagtatttttataggtctgatggccattttaatgtcttcttttgagaaatgggttttaagatctttggcccatattttagttgggttgttttcttaatattgagttgtttcacttccttatatattttgtatattgacttttcattagatgcatggctagcaaatatcttcttccattctgctggttgtcttttcactctgttgattgtttccttggctgtgtagaagctttttagtttgttgtaatgccgtttgtctatttttcttttgttgcctgtgctttgggactcatatctgaaaattcattgcccacaccaatgtcatggcacttttcttccagtacttttacacttttagatcctacacttaagtctttaatacattttgaattgatttttgtgtgtcatgtgagaggaaggtctaattttattcctctacagatggatatccaggtttcccaatgccactttttgaagagactgacctttcccaattgtgtctgcttgacatttttgtcaaaggtcaattgagtgtaaatgtgtgcgtttatatctgggctctctggtctgatccatttgtctatgtgtctatttttatgccagtgccatgctgttttgattactatggcacggtagtcaagtttgaaatcaggcaatgtgatgcctccagtctttttgctcaagattgccttttctactcacaattttctatgactaatgtgaacttgaggattgttttgtccatttctgaggaaaatgtcattgaaatattactaataatgaattgaatctgtagatctctttgggtagtatgtatatttttaacaaaagtaattatctaatccacaagcatggatatctttccattatttttgttctatttatttttcatcagggtgttatagctttttttgtggaggtctttcatgtccttgagtaaatctgtttctagctattttagcttttttggtagtaattgtaaatgcgattaccttactgatttcttttttcaataaagtcataataatgacagtaatcaatatacatgataaataggtaaataaaatcataaattagccactgataagggaaaataaaataaggtatgtgtatataacttttatcttatagaaattttcatatattcctattattgatggtattttcacaaaaagatgtccacatttctcaaatgctgttttgcatcaaatgagataatcatgtgtttcttctctttcttctataaatatggtgtattacattctttgtcatttgtatattgaaacattcttgtgttccaggaataaataccacttgctcattgtgtatattccttctaatatgctgctgaactcagctagtgtttggttgaggattattgcatcaacaaaccgagtaataataatgccaactgttaacagaaaggtgtgcagctctacctggcagtgatcttagttttgtattttcatggaagtttagattccagtgggctccatttcagataagcagagtctggctttgggacaatttatggttaaagagtacgacaggaaagtatgctccccagatctggactctaagccaggagagcccaatagataaccagaaatttcttgttgtaatggagtatagcaaaagctgagaggggcattatatttgcatcaaaggccctggggaaaatgtctggccatcatgagtggtttagagactccaagaggcatgaaagacacagccaaagtctctacagagaagagatacttttatttgttaattcatttaaagacactaacaggagggcctgttgattttaatttgtaagtaaaatttgtaaatgaagaatatgttgccacaagcaccccagaaaaaacttactgatgctggattatgtgacattaatatgcatatcacatgaatcttctttgaagaggtgttaccaatgttatatcatcttgtgctcttgaagaaaggcagatgtcattattgatattggaacaggatcctcgcttcaggatggagagccatggcagcactccaaaaggcaacacaaagctgtacatagcatagcacaagaaagtcatcagggtgaaaagccttctcaaattgtggagccaatcagagtagcaaatcagtaagtcatgagtcaaaggcattccctaggaactttccacctgagtttagaatgatcccatcctcattgccattactattgaaaatgttagagtgattcctgctggttgaattttgaggatcactctaacatggccatgaaaagttcatatgaagaggcatactcacagttcctagagaaggaagtagggcaggccatgcaggaagccatgtgggaggagctcccaaggagcaggctcaatcaagcagatgggtaggcaagagagatgggatccctgggcaagtgcctttactgggagtcaaggtggaggacacaagcaaaaaccatgatgggttttactagggtgtttcaatgtcactaggtcacagtagaggaggacaagaagaggaattgtggcagggaccagctttaaaatactggttacctggtcacctgggcagggtgctcacagcttgtttgtgggatattgaagcatgatttttaaaacatgtacacataactggatatctttatttcttcatacaactttgagttgccatgtagcatcctttcatttccacctgaagcactccctttagcatttcttgtaggcaaggtttaatggtcatgaactctgttagcttttgtttatctgagaatatcgtaatttctcccttgtatttgaaggacactttgccaggtatagaattcatgattgacatatttttcctctttcaacattttgaacttaccatccctctatcttctggccttcagtgctttgtataagagctgagctgaaaatcttattgagggtctcttttatgtaaggaatcacttctgtcttgctgctttaaggattctctctttgactttagttttcaacagttgggttataatgtgtcttagtgtgggtctctgagtttatttttgagttcaacttgcatttcttctgtgtcttaataggtagattcctgtattttatctagtctgtgaaggtttttgtccactatgtcttcaaataatcttctattcctttctctctttctcttttttccccctggaactccagtaaggtgtatgttgatacatttgataacgtctcacaattcccttagattctgtgctctatactttattctattttccaccaatacctcagtctcaataatttcaattataccatcttccagttttctgattattcttccacctgcttatacccactgggggacccctctagtgaacttttagttattgtactttcaattcctaagtttctgtttgatttcttcctataatttctctttctttacattctcattttgttaagacatttatattcctttagttcttggtccgttatttcctttacctctcagcatttttaaggcagtgattttaatatctgggtctagtatcagggtggagctaatacatcacaagtgtgcttataagaaggaggaaggagattaattcttggagaatgacgttgaaacatccctgtattccaggatgtttgcatgtgaagatgcaagaggttagagtggtgggaagatgtaactgtgagaaaggaatgtgagaaaactctagaatttgaaaaggcaaaaaacagagcctccagaagacacatagctctgctgaaagctctttaaaaattgtggaaattgaaggtgtaaaacatgatgctttcatatacgtacacatatacatatacgtagtgaaatgattattaaagttaagcaaatggacacatccatcatctcccatagttatgctgcatgtgttgtatgtcaacagcacctaaaatgtgctttttaagcaaaaatacagaattcaatacaacattattaactagaatcctcagattgcacattcaatctctggacttcttcgtcagacttactgcaattttataccttttgacctccccatcacctcccctaagttcacccctagtcaccactgttttattctctatctttgtgtatttgacgttcttcatttcttcttcattgtaccccagtaacactattttggacttctaacccccagaactataaaatgttacatttgttttaagacactaagttttggtaatttgtcacatcagcattaggaaacttatgtaatgtgtttatgctatgggtgaaatattacaaggggcttaaaacaatgttgtatttctactggaagctacatattcagtgtggattggcagttctgcatgcaacggtcattcacgcatccaggcaatggagcaggccccattagagccttgtgggtctcaggaagggagaaattgatccacagaggctcttgcagttacatgcacagcccacaaattatacccatcacttctgctcgtaactcaagggtctaaagaagtcacacggccccacccaatccattgatgcaaaaagtgcaacactccatgtagccacagagtggaggcacatatttagcaaaacatggcacttccaaggagggctcaagagttctactcaggtcctcaacccaaagctctacattgaaattgaacctcttggccaggcatggtggctcacgtctgtaatcccagcagtttggaaggccaaggcagatgcattgcttgagcccaagaggtagacaccagtctgggcaacatggtgaaactgtgtgtctacaaaaaacacaaaaattggccaggtatggtggaacgcacctgtggtcccagctacttgggaggccaaggagaaaggatcacttgagcctgggaggttgaggctagagtgagctgtgattgtaccactgcactccggcctgggcagcagacagagcaagaccctgtcttaaaaaaaagaaaaagaaaaacaaaaagaaaagaaaagaaaaaaagcaaacagaaagaacaaaagaaagtaaggaaacagaaattgaacctctctgtgcctcagtgtcctcgcttgtattacagtcttatgtcacaggccagttgtgagggttaaatgagataatacgtgtagtgtgctgagctcaaggccttttcctggtgtgcacccggtcaatgaaagccattgataaacacttgaggaaacacagaggatcacgtaaggatgaaaaaatgactgctttgtgctcctttccaggggtagctggcgaggaagagctgcaggtgattcagcctgacaagtccatatcagttgcagctggagagtcggccactctgcactgcactgtgacttccctgatccctgtggggcccatccagtggttcagaggagctggaccaggccgggaattaatctacaatcagaaagaaggccacttcccacgggtaacaactgtttcagacctcacaaagagaaacaacatggacttttccatccgcatcagtaacatcaccccagcagatgccggcacctactactgtgtgaagttccggaaagggagccccgaccacgtggagtttaagtctggagcaggcaccgagctgtctgtgcgtggtgagtacagcgtgggcttccttcatcccctagtgtgtgacaataactcaataattacattatccattcttagagcaacagtcaggtgtggtggtggctgagcagccaccctttcatgaactgatgtcaccccttctccagatcacatgagttgaggcttggagatgtcatggcagtcgctcgaggctccacggcttggaaatgatgggacagaaggcatccccagcttgcggctctacagctcttgtgtttccaaagctgatccagccctttggttccacagatgagggaactgacaatttgagtgacttgcccaggcacagggctggaccttgccttctgcctccagagaacgcttccccctcagggtggccaagtctcttctttatgcagcaggcactcactgagaccccactgtgtgccaggctctgccctagatgctgtgcaaacagcagtgaatgaaacagcccaaagctcttccccaccaagcttacattctcttcccttctaatgaggagaaatctgtccagctcatgaagagggtaaattgtgtttttctttatttcatcctcagaaacaccccacgggcaagatttctgggaggcacattcactgttgaatctgatggcctggtgggaggagatgccaatacgtttggcatttgctgtgggtctatttgggaaacccttctgcgatttggggactgagtcacacagttaccatgggctccgagcagagctgcatcatctcagaatgtccctcacctcaggaaagaggtcccacaagtgggtgacttaggggtttcccatataaggctgcaacaatgcttatctggggtttcctcccagaggcccaagagcttcgtcctaagtcctgaattatggaatgtcagcacaggaaggaccttcagaccatccagcccaaccccctttacagatgggagactgaagccaagacatgacaggggccttgtccatggtcacagggccagttagtggcagaattggagccagagtccatatctgaatcgtggcagtctccttccttccccagcgttagacgctgtctccatagaagagcctggtgcatcataggtgctagataaaagctcctcaaacagagccaggtgtcagagagccagcatttctcttttcatcagtttcccaaatgttaagaatgcacctcacattcagatactaaagcttgtttgtgattggaaaacttctcccaaatgtaagccctgtcattccatatcgagattccacgtcaggacatagagagctgctccagtgtgtttacagctgaaaaatactccaatctatggaaatatcaaaatttattttacagtcttctgttgatggatatgtaagttattcccaaccttagctactaaagcaatcatgcaatggatgaccttgtacatgtgtcaccctactcaggcgggagacacccactggaagtggcgttcctaggtcacaggatagtgtgttttcatatttgagaatattgcctgatttccctcctagatgatgtagcaatcagagattacaggcataggccaccacgcctggctaattttgtattttgtagagacagggtttctccttgttgctcaggctggtctcaaactctcaacctcaggtgatccacccactttagcctcccagagtgctcagattacaggcataagccaccgtgcccagccccacttcaaacatttttaatacagtggttttaacatctgcctctagcatcggggtggacacaatacataagaaaggtccttacaagaaggaggaaggagattaattcttagagaaggatttgtgagggtgcaagcaagaggttagagtgatgggaagatgtaactgtgagaaaggaatgtgggcagcctctggaatttggaaaggcaaaaaacggaatctccagaagacacatagctttactaacagctttttaaaaaaatgtgtatatgtaaagcgtaaaacatgatgctttcatgtacatgtatgtatatgaaaatgtacattgcccagtaatgactgaaatcagctccccacaacccttgaacttagacaaggaaggtggctttttcctgattgtgcagataatattggcaaagacactgaaatgcccaggtggtgcctccccagcccaggcagtcacagccagtggtggctcaggtgtgactcagatctgctcactcctagtgaagtactcactcctctttgccatgctctcggcctaaatgatgagctacatgagaaaggagggaggtggggaagggggccagagagcagcaactgtgccagagtctccttataaccagtgctatgagggagaagccatttgctacctcctttaaagatgaggacactgaagctcagagaggagacctgacttgggagcaggtcagggagccaaggctggaaccccgcagcctgactcacagcctttgtctttgtgacactcaactgtggtttttcaagagtggagaaatgctccaaccttctctttctaaactcttgcattgttcagttctacagcaaaaagcattaaaaacaaaacaagaaccctgtaggggtaggagggcctgtcttcacactcccatcagaaaggccctgcgcgtgtctcatgatatgccaagccggttcctaaaggacaggtctcaacacacatgaggcatttaggactcttcccccatgttgtgttgtttcctcttcactcagcagcgtccaatgagcagagtcgagcctcctgcagcccagcagagcacgtatctgcccgttcatggtgctgaggactaaggatgaggagatgaggcatttcctagagagtgtttggggcccatgtgagcaagagttgagattctcccctccggctgtcaggagcccactgtcttttgcttatggctgcagggtaaccaggcctgggcacccaggagggaggcttctccctaacattgcatgaagtctagaatctcaaagggacaattgaggtggcagtcagtgttggagctcaagaagttagaacacttgctctgttaatggacataagtgcttggtgggacacaggaaatgcccactgggacacatggagaatcgggagacagtgccttcattttgttcagccacggcatcttcatctgtagaatagagacaatcatggactcctttaggaaagtcgtaagcgtaaggttctctctgtaaatcacctagcgcactgtaggcacccccaaagtgaggtgttatttcaagatcgtgtgatcttgggccagtcttgccttcccttgagtcctcggtttccccatcggtgagatgctgattatcatggcctattctgggttctgtgaggattggagaggatgtgcacagagcccctaatggtggtgtcattcaggttattactgagcttctgcagaactgtcgttaggagaacacaggcagtatcccagctgcctgggcctcttcccggctctgccacttcctggctctgtgacctgggacaaggtgcttcaccaccataggcctcgatgtcctcaccctttgatggtaacactgacctcacagactgggccgagtctgaaggagtgatattgtgtaaaatgcttagggcatcaacaagcacacagtaaatgctcaataaaggtgagttgtgttagggtgaagctgtgtgacctcagacaggtcagggcttctgtaggccccaagtataaatggggtttgggttggagtccagtggctttcaaccttggctgctcattagaatcattgggaaaactatcaaaaaaaaagtttgcaaagctggacccaggaacccccctaaaatgccaatttaattgcatctaatttgggcctggatatctaaagttcttaatggctccagaagattctcatacacagccccctagcaaaagcggtgccccaggttttggggctttgagaacagctttttgggtcatgggtgcttcaaaacagccattctggaaacattctgggaggccccagaagcctgaacaggacccctcccatgctactggcctcagggcccaagataggagactgggacaaagcctggctcagatgcagcctcagggctggggaaccttctgtcttgaaaacatttgtatctaaacacgtgctggagtcccagcaaatcctcactcctcagccccagaagcctccctccctcagcactcccagatgtcactgaggtatcttttccctccttcttccaaaatgcttccagcttcccctgtgatcttacttgaaagccagttcgccaaacatggtggttgctgctccttttatcatttgggttttttctggcagctgcggtgagtagggtttgagcctttccttggtgtttgtgtgcctctttgttctgttgcctaaagaatagctatgcagctccagaagcagtaatgaccaaacctcatgattacagtcacaggggctatttattaagcacctactacatgccaggctatgcccttgcacttaccctcactcatcttcccagggtggggtttctatctacttttggcccttggccaccaaggatcctctcagagtctcgccctacacaagggctcacatgaggaccccctctgacaaatagagggaggattgaagtgttgagaggtacagagagagcagccagcatcaggctgccaagaagccctcaaaaaatcggaactgaagacagcctctcagccttctagggacacccatgctgctggtgtctcaaagacttgacatcttcaagtgacaccctccttactgtgctctcacattatttcacgcatatcagggagcaagttaatattggcaaagtcaaacgtataatatgtgctttctaagaggacggcagaaggttcaaggtaacaattagcaatttgcagacacccttaaaattcatctacatggagaaactgcactcgttgttctgattctccaatgtgtttgctttcaaggcccagaataggtttctgtctgttggtgtggcctgggtctttgtctcttgtaattaattaacgatgaaaaagctaaccacctttggctttcttagtactcagtgatccttgtttttcacccaaacctgtcctaactgaagattcagattcccaaaaatttcctcttttcaaatttaggacttccagcagattagaacaactaacaacaacagcaaaatgattgttaggaaggccaaaggaaatagcatttatctgaaagataaagaggtgcaatttgggtacactgagtcagtgaaaccctgaatagtgtcccgtatggcaatacaggaccggttttttataggggattttcactaaaggttgtttttggaaacagttcattagctggttgaaaatcctcaactgcaaacccactctcattggttatttcattaaagtactccaggtgaaagagatcaaaatcccacggaccctggcttcagttgttatccaggtctatctactgcaacatcctgtggcttgacctctagcaggtgtgattccaatgctcttacaaactcttggctctacgttaaagctttatccttaattaatgccttttatttgacagaacgaaatatttgtgaaaagaaaaatacggaatgtttcatatttttataatacctaaagagagacctctgtgtatctgtaaagtctgggttaaagatagatctgtgttttttcggggaagcatcttctgtgtttgatccagagcaaaactgcttccattgccccattgaatcctggcgacatcccaggaagtagaaacgccgtcctccgtcctcctgttttgcggatgaggagctgggggtgtcagcccacccctgtcctgggctgagcagcctggttgcagctctcacggtggtgccactttgccattgatccctgtattggcttctataaatgccctctctgaggttagtgagccttccgggggaggacagctaggaccagttaataacatggagggagaccaatcagtaattttgttcctatgcccagattggtggaagtctccctgtgtggagaggactttgaactcaggcctggacttccctctgggccctgcccctacactgtctcacctcacatgggtcctcacctctcccaacctttgcatcctgctctgtaaaatgacaataaggacaccaccctcattaatctttccacattattggaaggataaaaaataatgtctcagaaggttcttaacatctcacacacttatcgttagtgattgtcatctgagtcatgtctcctgattatcgatggtccttttgtagccaaaccctctgcccccgtggtatcgggccctgcggcgagggccacacctcagcacacagtgagcttcacctgcgagtcccacggcttctcacccagagacatcaccctgaaatggttcaaaaatgggaatgagctctcagacttccagaccaacgtggaccccgcaggagacagtgtgtcctacagcatccacagcacagccaaggtggtgctgacccgcgaggacgttcactctcaagtcatctgcgaggtggcccacgtcaccttgcagggggaccctcttcgtgggactgccaacttgtctgagaccatccgaggtagaggaccctcacccagcccaagcccacacctgaccaccaagcccaccccccaccaccctccactcatccagctctactcttgctccagggcttgaaatgcctggaacctaaattcctaactgcccacctcccatgcccctagatgtgccagccacttactaacattttaatggcagtggctgggtgaccacaccacccaccaggtgccaaggactgtgctagccgtttcatttatttcactgatagcaaacacagttaatgagtacctactatgagctaagcctctatgtgcttggtgattttctttattttgctacagttacagcattccaactgcatgccaggggtggtgcttatagatttccctcattcttagcctagtaggagctaccagtccttgagcacctactgtgtgctgggcgttgtgcttagtaatttcattcatatgcaaagagcaccctcaatgtctgagcacctgctgcatgcctagcactgtcctggtgatgccctcaccgtggtgggggagctacgttatggagccctccctggatctgtctgtgccacaaggtcagagcttctgccctgtgctgtttcagttccacccaccttggaggttactcaacagcccgtgagggcagagaaccaggtgaatgtcacctgccaggtgaggaagttctacccccagagactacagctgacctggttggagaatggaaacgtgtccaggacagaaacggcctcaacccttacagaaaacaaggatggtacctacaactggatgagctggctcctggtgaatgtatctgcccacagggatgatgtgaagctcacctgccaggtggagcatgacgggcagccagcggtcagcaaaagccatgacctgaaggtctcagcccacccgaaggagcagggctcaaatactgctcctggtaaggttacttcaaatttttaaattttatctttttctttcatgttaaaattatttatgtttgtcataaaataagctagaagtctataagtataaagtagaattttaaagtcagcatcattctcccaaatctcaccctccaagagtcatcactattaaaagtttgaggtacaacctgacagattttttgacataaatgtgtgctgaatgaggaagaaaggaggcaaggggatcatgtgttcctcacgttctgcatcttgctttttacccctgacagttgttacattcccgtttctcatcagccaccctgtctccttcctactccttctgacctctgccttgtctgttccttcctaaacttttccattcatatctgtgacctgccccctgcagactcctgcatctgctgtgtgaatttcagaaagacatgtggagtttaagcctggaccacgcccccaggtgaccatgagtggtcaaagcaagggcctcctttgggtcccgatggtgatatttgaccaataataatcacaatggctctctgcagatttattatgtgcaagtttctgttcatctatgatctcctttcctgcttcaaccatccagtgagtctggagttttacagaaggggaaaccaggacttgggaagcaatgggggatattgttgaagacaattagatcaaggcattagaccagatgactggcccaaactaattaaggtaagtctgaggtcctgaggacagggtcactaccagcctataatgcaaatttatgctaatttgagaaacgtctctttctgctgggcatcgtcccaaggatgtcaatttggccagtgttcccccatctatgaccaaaatatatcttatttccctctcatataataccaggaggggtgtctattccagaagacttttagaaggcccagccacagactctacggcgttggctttatctactgggtcagtgctgggtcgctgatttgtctgctggaagagtgaagacaggaagtggaggacaacaatgtcccctataatcagagatgtatggaaagtgcatcgtcacatccactgctcacccagttatgcgcccacgcagttgcaagaggagtccgcaattgggtgatctgataatagaggacattttttacaaaaacaatatcattataaacttcataaaatttaaaattttataccattaaatttcataaaattgttaaaataattatctcacatcacctaaaatggagcatacattcaaatttccccaaatttcttttgtaaacgtttttctgtgcaccagatttggtattaatttatctgtaaatgtttggtagtatttttctatgaaatatctgtacctcaagaatattttggggtactttaaaattatgaattcactttcctcaatagtttagggctattcacattattcatttcatattgggtgagatctggcaacttgtgcttttcaaagagtttttggtccattttatctatgtcgtcatatttctgtgtgtagagttgttcataatatcccttatgatccttttgatgtctgcagggtctgtagtgatagccctcgcttcatcctgatatttaaaatgtgccatttcttttttcttcatcatcagacttgctataattttttcccattttattgatcctttcaaaggatcagctgcttcagttggtttttgcattgttttttatattttaatttcattaattttctgctctcttctcttttttattaattcctatctgcagcttgcttcgggtttattttgctctacttcttgtagtttcttgaagtggggatttatattattgaatacagactttttctcttttctgtgtcattttttttgtcatgttctatggctgggagctcatattgtgggggtgggtcccaggtgcctggcctcacggctgttcctcagtcctcagatccctagccagtctgccttcctttttcaccttggaagttctcctatgcctgctcctcatatttccagagttcttagttgtacttctcaaggaggagccggaagagatgaatctgcaccatctatctgaagctgaatttgctttttagacttccatccactcactagagctccgaccagggctgccatttttgggtgctttcagtgtgctggatgtagcatccttgctcatgtgctatggcaggaaatgcgttttaggttgtctaggctggtacacaacatgcaagatgccttatgtgacatactgcaccagcagcgtggcagcctagtgagattgtgcactagggtgtggtgaaggttctcttttgacccacagtcattttgcagtttggcattctttgtccaagtgatactcagagtcaggtttgtgcaaaatttacttttccttttttgtttcttcttttggtttggggaggttagttatagagataattagttatgctgctgcaactgtccccagaaactcagaagatggctgatgatctgtaagtgctttgacccaaacattccctcccacatctcagggtcccacaacttccccatcagggccctagcccagcatagcagcccattgaagctgagattcatccatctctgtggttctgctactcttataatgttctggaacccaatcttctattctttctgccctctggctccaggagataacaatctacactgctgccaagaagtcctctggtttttacaccgagccttaattcatgataagttactcttagcttctcatcgtctttccccaaagaattgatgcccagcaacagccatcaaacacgttagtcctcataactatcatttcccaatccggtttcaaatgcctgatgccaaggaatttccttcccgcttcactgacagtgaaagttttattaattgcaccatagctgcaagccagggcctgcccagctccattcactaccagccctggggtcctcattgccagctgatcttgatgagtggtcagtttccaaacttgcattttagagtctgcttttcagaccatttccactgtcaattttgctaggaggccaactggaggtggatacaggagttcaggaagcatgctagagtgctgtcagggtcaatatgcctgagggagtgaggcagaagtgtaggagagggacgtgctgagccacagtgcaggcaggacaaagacccagctgattctgcagagaagccaagggctgagagagtcccttagagttctgctaattgagtagagaggcgtggccttcctattttcaattcagccaatctttctatgggctgccccctagaaggaggagtgcacttggagagtgcagctctcctcaggggagacaaagtcctagagagccccccagctgagaactgccggcctccaaccttccagccacatatgctgagatctccattccttccttaaggacccatcagcaccattttatttcccagaaaacgtacatgaaaacagaagtaaacatatcttcatttgtttgcttttaacagcaaaaaaatgctcattgtaaaaatgcaaagaatccaaatgtgtgcttccccagatctgactgtgtgtccaacagagagatttcagatggcacctgctctggggttgatgtgagcttgatgtctgagtccctcccaagcatgacagtcatgccagggtgttttctatccaccacagtacattaggcccagcccctcaagggcctccccagctctcaagaacatggggtcaaccctcaccactggggctaaacagagcagcctgcaactctctcactctgaagccatcttcatataaccaaaaagcatgttagttgcttgctgcatgtagaatccaatcaaggagcgcgaggtctgatacaaaaaaaagtgaatttattccaaagctaggttggggaagggacacaacgtgtcctgctttcaaatgtgctgcttcccctttggagaagaaagcagacacttttataaggtaatggggatgggaacaagggcaggggtccctctactagcctggtgacttagctacctgacagttgaggtggcgtcatcctgagcagaagtaagttgcaaacgtggccaagggggcatgctttccatatgccctcctggtggatgaaagtctggaggctacccctggaggtgaagtttctatggtgggtatgctttggtgtgccagctctccaggagagatctgtcttggagtatacagaagaacttgccctgcagggaatgtctggtgagggggaggtgaaaggttatatttgcatttctgaagggctaagtaggaaactgggagcagggggaaaggggaaagaaaacaaagaaaataaactgttttttagcaaactgggggtactcagttatactcatgacacctactttcccttttgtaattcttcctatgaccctgggaaattggacttgtcttgttcaaaaggacgcagtctcaggaatcatcctaagggacataatgatgggcttccctaagtttggatgcgagcaaccttgtgaccctccctaaattctctgagcctcaatttccccatcagaatggaataataatccctgccctacaggcttgtgaggatcaagtgagggactcaggtgccacacatgaatgcatgagtacacattctctccacttcgtccctccgggaggacaacctggcagcctgggacagggtaagggaatgaggaacctctttccctggcttctgccttgggttggagctagggtagccagggtaagatgcagtttcaaaagctttggagcattgatggtcccaggtagcctcaggtggggtaagtgggggcctctgggatggcatcctgggtagccccttcctaacttctcctgtctcctgatttccaggcccagcactggcttctgctgctccacttctcatagctttcctcctgggccccaaggtgctgctggtggttggtgtctctgtcatctatgtctactggaagcagaaggcctgactgtaagtgtgggggatggatgcctgaccaagggctgctccaaaagggcagggccaggaggagggcccagcccacatatcatgcagcatcagggtcagtggagtttagagaaggtgacagagctccctcagcatcctcaggactctcagggtctctaagagtcaggactctaagagtctcccaaccccaggaagtgtgtgagtgcttgaggaggtgagctatagccagggtgtttaaaggtttttacagcacccaaggggtcgcatgaggaggtgagaagaggagcatgcatcaggggctactgagtgggtggtcccttgcaggccatctctagattatttgatgctgatctccatgggcccaaaagaatcctcactgtcaagtcatgttgagaaaccacagatgggcagctcttagggctgtacccattctgaccctctgtgtgcctgagtggaagcaatgaggagagaggcatcaagactcaggaggagggctgagccagcagagtcctatctcagggctgcctctccacttgcaacaggcatcccagaaggagaccagcaccaggaatacaacagcctcccaggaaatgtttcttaaatgatgagcagatgattaaatatggacatgttacccacagctccttccctcctcccctgccacatggaacccccagtctctcctgcctacttccttccttgaatggctctgactgagagaaggggctggtgagaagcttccccagactgagctccaaacacctcccctcccaggacatcttcctgcccacaggctcctgttgctcctttgcagagtccttgattctccagagcagtcttcattcatggtcctgagcagaggccatgggatggggctctggggagtgactcatgacacctccctaggatgtgggaaacacgccaaatctaaacacatcaggacacctctcctccatcgtcttggactctccgtaagccacaaactgcagtccagattctcaagagttattctgccttctggattcctgcctacccaattacccagccttgttgagattctctattgcctcctgaatacaaattaacactcatcctggttttaaggagaaaaatgattatccttcctctttgtttatacgtatgatataatttggatattttttccctacaaatctcaatgtgaaatttcatcccctatgttggaggtggggtcaggtgggaggtgtttgggtcatggggatggattcatcatgaatgacttggtgttatcttggtctattagcacccacaagatctgattgtttaaaagtgcctagcagctccctcttctctttttctcttcctctctccccatgttatgccaactccacttcactgtccactgtgagcagaagcactctgaggccctcagcagcagatgcaagtaccatgcttcttgtacagtctgcagaaccaaaagccaaataaacctctctttataaattacccagcctcatgtattcttttatagcaacatacatggactaagacagtgtcctactcctcacacctagaaagaaagcatctctccctcctctctctgtgatggaaacactagtttttctatcatcctgcaaccttcccaactctgttgctcatggtaaaaatactgtgacagccctaaagctgtgaagtccttcttgatttcttctttgtttatatctcatattcagttctgcttcaaaatgcttatgtcccctggtgagatagatggtaaatgtttgaaagaaaacagaaggctgaattgtagtgtttgtcaatttctatggggtgaatatccccaacatggcccatttcaagcttctaacactttaacaactagaatacacaattcctgaaaatttaacagttggttctcctgagccagtccaagcctgctccggcacacaaaggagttgtactcataacctgcacatctctcacctccaccactcctccatggtcccagctagcatcatctcctcctggaccgcttatagagcctctgatggattgcatttttccagcctcagttattttttggaaaagtcaaatcctgtcattcctcggcttcttccccgcaacagctgcgtggctcactcttctgtccttcagtttattaaaggcaacttatgtaaacctccctatgtaaaatatccattttcctctccaccctagcattccaatgtctcttaatttgattagcttttctccttagcactgtattatattactacatatattatactaaatacagggcagtcctcactttgcatggtagtgcaagattacaaaaacgactgtgaaaatactgaaaccctggaaagcaactctacatccaaaggggaatataatgactactctgtggtcctcataatttttgtcaaaatattagaaaatataatattatcagttgcaaatgtggacagaagggaaaaatatttagtttatggtaattcaaaggattagaaacattgaggattaaattattatttctttgtaaaacatagcaaggatagttggaacagtgcttgtcttcttgtatatttctgatatggaacaagcataagatgatgagaacactctggtataatttgaaatggtcccctttctccttcctcttcaggaagcactactgaatatttctctcatacccactatgaggaccaatcaagctgctgtaggtaaaattcacagaagtgtgggagttcccatgactgggtcctcctgagtttttagctcagactggtcctcactgaacttatagcaattcaccattcatggtgcaggttttctgaccccagcactctttcccatggaggtttctaattcaggaagttgtaattctccatatcaccctgctgtctctctaattttgccctatgacctcatttctccgacagatctaagagcagttgttgttttttgatttgctcagcttgttagttggtgttggtttgagagacttcttgtaggggtcacccaggagatttggttccacccccaaaggcttctgtagccacaagccctcaaatgtgccacacctggaattatggtctctgaagctgcaagctcaatccttggctacagaaccctataggtctgaactctcaaattaggaagggtcatgggacccctggcatgaggtaagagtctctgggacatagagcaggctctatgtcagtcaacctctctccagtactgtccaaggctcccaggtctgggaaccccaagcacagacgtcagcaacttcctagcagtggcaactgtgtccacttcctctttcacaatggaagatggccccagtctcatggccccttcctcccacagcaacttccctcctgggacatcatggcaaggtggggcttctcctcccctgcagagcatagagtctgaggtctcttcatgagagtcattcagacagatatccccagccctgtgtcccagctcacctggacaggccctgccaccttctctgctcataggactcacagttgtgtgcagcctgctctatacaggtgtatttctatgtgatgtctcctctccctctcagtccatctctcctgttcctctggatttccacttgggagcattttcttgtctcctatcccagcatgaggcaagatttggagcactttttctatgagcatctgtgtagaccctaattaggatgcaccttgccctagtcatagtgattctccccagaggccatggctgcaccatgaccttggtgctgagcacatgatctcagcacccatgattctagggctaagcacatgacctcagctcatcaccatggtacccccacctcccccagacattggccgaggttgtcacataacatcataaatccttgagggcagaggatctgttttttaaaattgttgctattactaaaattctacctaacaacaataatgtctagctaatatgtataataataatagtaaaactgaatatctaggtttgaggatacagtcagatactattaggcactttgcatatatcagttcatttaattcccataacaatcttatgaggttggtgtgattattatgtccattttacagttgaggaaactcaagaaacagagaagttaatagtgtccccagggtcacacacttgggagctggtagagcttgatttcagactaggaagttttaatcctaagcccacaggcctaatctttagtcttctggagaggcatccatgggctcccagttcctcatgtgtcccaaagtcttccctcgtcatctgcatctaatgtcgtgagtgggggcgaaatatggtagatgaaggggggagttttagctcatggacttccaggctccccgttctttcaaatattccaattttatccatgttgcaccaagtcaatctaaagttgaaaatgaattctgcacgtgatttctacaaaaattttttacttgaataagcatctatgcatctagcatatcttcattgaaggattggagttccttgagaactccttgacagttccttccttgggaaggcaacttgctgctccaagcacggatcctgccatcttcctgacactattgcatcagttaaaataattttttgtttgtttgtttgtttttttgagacggagtttcgctcttgttgcccaggctggagtgcaatggcgcaatctcagctcactgcaacctccacctcccgggttcaagtgactctcctgcctcagcccccgagtagctgggattacaggcactcgccaccacacctggctaattttgtatttttagtagagccacggtttctccatgttggtcaggctgatcttgaactcctgacctcaggtgatccacctgcctcagcctcccaaaatgttggggttacaagtgtgagccaccgcacctggcctattgcatcaattttggagtcctgtattccaaactatgatttttggaggcatgaaactttatgtctcacaccttccaagccaattgctattttcatggaaggaaatattcctctttcaaccactggtatgttttaccttaaattataaatctttagatattaatatttctgggttttttttcctttttccttcgtaaacagtagactcttatacaaatataaagttttgtacctttaaagttatcactccaataaagacacctattaaaatcagcaaaacatcttgaaatatattttaataatgtacaaatgtattcacaacataatctgattaagagactccactaagtctatagtacctacaacacaatttacagatacctacagtagtttctaggttgctttagtttataattaaatctactgctttaagaaatgccattaatacaaatgcataatctataacattctcattatagtaagaaaaaatatagattcataaaacaaaatgtctttacccattatgtgaagtatgtaaatgattattctcattaaaacataaaaataatgcgtttttagtaataaaagatagatatcattaggccaaagagcattgaagagctccaggaggctccaaagtaaaatctggctatcctcttataaaataagtagaacagcacaatttctgggtattccttaaacataaactatgataattcatttataataattggaccttaagtaaatgacttcttacaaatgaaaataaacaaaactttagaaactaataccaattccctaaatttcgtttttactcatttatgtatgtctaagaaattttaccatgaagtacatattaaaaattatcaattatttctaacttacacattagccaacgtgctcactcatactgtggaaacaaaacttgcttctgaaaataatctacagaaataatatgtaaacacatagagctttgaaatagactaagaacatactatgttctatggatcaaatagcaaaggccttcattacatatatcaataaacacactttggttaatttgggatatactgatattacatgaccttgtgcatacctctgtataccattaaataaatttggacgtttgtagtgacaacacactttctagccccaagtgctggagagaaaataaaaacttaatatgaaaactacttttgtttgttttaaataaagttattaagtggggggaaaaaagccaacactttctgttgcaacataaactgagatctaaaaggttcagagtcaagaatctcttaggttgccccccaacatcgtaaaacacataaattttctccctctatttgagaagtctgatcatgtctagcgttcaaccactttactctgaaggagaagagggcactgtattagtccattctcatactactataaagaactacctgaggccgggcgcaatggctcatgcttgtaattccagaactttgagaggctgaggcgggcggatcacctgaggtcaggagttcaagaccagcctggccaacatggtgaaaccccagctctactaaaatacaaaaattagctgggcatgatggtgggtgcctgtaatcccagctactcaggaggctgaggtgggagaatcgcttgaacccaggaggcagaggttgcagtgagccgagatcatgccattgcactccagcctgggtgacagagtgagactccgtgtcaaaaacaaacaaacaaacaaacaaacaaacaaaactgcctgagactgggtaatttataaataaaagaggtgtaattgactcacagttctgcatggctggggaggcctgaggaaacttacaatcatggcagaaggtgaaggggaaacaaggaatgtcttacatggcagcaggagagagaaagagcaaggcgggaactgccaaacgcttttaaaccatcagatcttgataactcactcactatcatgagaacagcatgcaggaaccacccatgtgatccaatcacctcccaccaggtcactcccttgacacatggggattgtaatttgagatgagatttgggtggggacacagagccaaatcaaatcaggcactaaaagcacatatcactcacagcactggacaggccattagtcccaaccagaagattcttctttcagcctctaagacagttttactctcttaagaggatgtctcccaggactcaaatgcccaatggccctttccattgtcatcaatgtgattccaccaacatagtccaatcattactctaccggtgacattcttcactgcccaaaagccacctgacaacgagatcattgtcaccacacaggccacacaggcaagaaagcaactgctgggcggttcatagagaaaataggtggcgattgcactgacttgaaataattaaaggaaaagtgaggccactggatctctgagtttaaatttctttggtctattagttgtctgccctcccttctaaatcaaacagtgaaatatcttcagtatcatcatcactgtgccttcagagccaaccctgggcaccaccaccctctctgcaagtgctcagctcctcagctgtttctgggaaattttttgacatgttttgtgagatatcttttgttattcctatatttacacctatttaccttactctgtttaggtgtgtctctgtgctgaatcctaagggatttccccacatgatcccccaacccaataacttactacttatatatatatagtcccctagtcaacctattacattttttaaaactgtcctcagtaattatgttttcatttccaaagtctctttttttggttatttttccaagatacctgttacttcatgcctgactattcctgtttcacacatgcctgatgttattttatggattcacttcccttttgctatctttataaggttactgtgtatgctaattttaaagacctttttatattttattttttcatattttctcagttgtgaagtcctcttgattgctgttcttgtttttgagttattgtttttcttgaattggttagctatctctcatggtgctgctgttccccacatcttcagtgattccttcctgcactgccatctttccagaaataaagccccaccccacgtgatggagttatcagggcctcctggagcatggcacctgccacagcctcactgtgcgggctgttcctaactgaggctatggcttcttctctgcttcctcctgagggatgtctctcctttccaatgacagatgtcatagtgcaaacattaaaagtgaagtctgtggtgtgtggcaacctatgctctagttctaaaagcttagtgatcttgagcaaatccattactctctgtgtgcctcaggtttcctcgcctgtaaaaggaggtaggttaatagcagtgcttacttgatagagtcagagtgatgaattaatgaggtaactgacataaaatgcttgacaccatatctggggcacaggacttctgcaataaatgataactgctgctattccttcatgtcacataaagactattgtcttgtttttaagtgtaatttgacacggaataatataattttatcctttttcattttcatttttgtgggtgtggagtaggaggggaagatttcaccctgtgcacatttgccacattgaacagaactttgaatgagaatatgataacctttacatttcatttgacaataacagatgaaggacctaaaacctagcatgtgacagggaagcttccagacaggcctttctaagtcatagatgatacaaacatttctcctaacaaggtggtttttctaaagcacaactgtggcaggaaagcagtgagcccttctcataaaaaaaaattatagccacattttttggttaaaattaattatgagtcaagcattcattatggtttatattattcctaccccatctctacaaggtgcatgttggtgcatgttataacttccatttacataccatcaaaataaggctcagagaagtcaagtgtcttcttgaaagtcacacagctggaaattgtgagagaacaaattaatttgtggattataaggagcaggatgcagagaattcaagagaaagcaattgatctcagagtggcaggggtagtccaagcacatcatataatctgggtctcaggaggcctgggttgctgggagaaagccactggtgggcaattcaccatgtagtagggattcattcaaaagcaccactcgagttcccgctcttcacctggtgtcattagcatcaataatgacctactgggtttcaggcatggtacaatcattatctcctttaatctccactaaaacactgcaatgaaatacttataacccccagtttagagaacaaaattgagcgtagatggctgcaatgatttccccaactccttagcacaccttgttggtcagggcatatatacttcctctctcctcatttcccatctgaacacagtggtgaatgaagtaggtcctctgtgcagaacaaaggatattaaagttgatgtgatgacctcaggaacctgtccgccacattctgcccgaatcataaccctatcccttttccataacccatgatcctcacttcacccgacaaaacagatccttactaaactaaaactactccctctcctggaagaagttgggaaatgatttcttctgctggattcaggcccatgaaagtaccaaagttcagatcagactgaatttgagctacgttttgccagttatatcattaaaaggtttgaataaggaatcatttcaagagcatacctgtttcctctccaacatcaagaggctcctgcgatccctcctgttgccccctgctgagtagcacttggttgaggctggtgcagaacgaagcaacaagccaaccacatcctagggtcctgagatgaagagtttaggacacaactcacaaccacagaccttcttggcccaagaccctcaactggcaaatcatcaagaagacctgaagatggggaagggggccacgtggacagaacacaggcctcagttgaagaggaagcattatttttgctcagcctgtctgattctcctgaaaatggagtatgagtaactctgtgctttgtagctgcctgctgtgcctgatttctaagttacaatctagaagcaagttgctgtcgcaatccatcatagccacttcctcttgaactgagggaggcagggcttgtcttctctcctcagagcagagcctgacatctccccaccacagacgtttgaacagagcaggctcctgaggtctccaggatgcctgtcccagcctcctggccccaccctccttgtcctttcctgctgctgactctattgctgggactcacaggtaagcattgccttgggctagaaccctttctctccgctggcagggctatatcctgtccctggacctttggggattccagacaaccacaagtgctgccaaggaaggccagagatggggcctaagagcaggacatcatggagctgagcactttctctgtggatcagcagctggctaccagaggcatcaagtcacaggatgattgactcaccaccacaattacttacattttgatctatttcatttgactaacacagaacaatcactatttaaatccttaccagtcttgagactctggggctaaacaacctacccaaggacagagtgagctcagagacagcctgagagggctgtgtggctccaggcccagccttctgtattcaatacccagaggaagtgaagtctgaaatggtgcctgcttgagttggacaggggtgcagtgtttcccagggatgttcagccaccgtcctccctaagggtgctccttattttgtcctgtgttcccccatgatcctccctcccctgtgacttgagtcttaacacccatttttttggtcacctcttcctctttaacaagttctgcatttgctgcttattggggcctatattcatttcctagggcttccatagtaaagaaccacagactgggtggctgaaactagacatttacttccttgcagttatggaagccgaagtccaagatcaaagtgtcagcagggttaatttctactgaggtctttatccttggcttgtagaagacagtctccaccctgtgtctcaacccatggtcttccctctgtgtgtgtgtctgtgtcctcatctcctcttcttatgagaccatcaatcgtattggattaaggcccaccccaatgaactcatttaactgaattgcttcttaaaaactctgtctccaaatacagtcacattctgtgttgctagggttggagcttcaacacatgccttttaggggacacattcagcccataacaggtaccataatctcccttgggtctcttgactttgccatggagaatttattttcccttcctcaggaggggcaggttggaaagtctttgctcccagctcccagataggcttcctgtcctcactccttactcaggccatggagctgacaccagggtcacagcgctgggcacagcagcctctcagctccccactgggccctgctgtgatgccacctcacaagtcctagagggcagaaatttcactttccaaatcatttttcttaccatacactgtattcaaatgacagcagtaatagttcagcaattgagatcttcctataacgcaaaaactgttcttagcattctgtgtgttttaactccactaatcctcacaacatccctgtgtgaaagctacaactcatattccctatttgcaaatggggaggcaggctgagagaggaacttgtctatcgttccctacctcaatcagtggagcagatgggattcaagtccaggtcgaccagcttcagagttcctacttttagccttcttatgctacctgcagaaatactagaaaatgcaggaaagcagacacaggattaatcatcacccattacaccagtcagcaacagagttaaaaccctggtatatgtttgtattccgaaagttttgttaatctgttggatgatttctatgtgacaaatattataggtcacagttttatatatatttgtgaatgtgtacacacacacgcacacacacgtgtgcagtggtccccaatctttttggcacctgggactggtttcatggaagataatttttccaaggacccagagtgggtgggtggggaggttggtttcaggatgaaactgttccacctcagatcatcaggcattagttagattctcataaggagcacacaacctagatccctcgcatgcacagttcacaatagggttggcactcctatgagaatctaatgctgccactgatctgacaggaggcagaactcaggcgataacgctcactcactggctgctcacctccggctgtgcggcccagttcataacaggccacggacctgtacccaaccacaacctggggattagagatccctgcatgtgtgcatataagtgagtgtaagtgtgtacacgcacacacatgagatttcattttttatcagtttctccaactttaatttcaattaaagcttaagaaaatacttctaatttgagaacagtatacttctcatgtacaacatattatgacatatgtgtacatttctgaatgactaacttcagctaattaacatatgcataatcttacatattgacaattttgtatggcgagaactcctaaaatctatgcacttcgcaattttgaaggatataaatcatcttattaactatagactccatattgtacaatagatatctggagctaatttctcccatctaaacaaaaattttgtgtcctttgactaatacttaccgaactgcaccccttgtctagccctggaaaccgtcattctactctagttctttgagttcaacttttttagattccacatatgagagagatcatgcggtgtttgtctttctgtgcctggcttgtttcacttagcataataccatcttggttaattcatattgttgcaaatgacaggatttccttcttttgtacaactgattagaattccattgtgtatgtatacaccacattttctttatccatttatctgttgatacgcacctaggttgattccatatcttggctattgtaaataatgctgcaatggacatgggggtgcggatatctctgtgacacgctgatgtcatttcctttggatatacgctcagtagtgagattgctggatcatatgataattctatttttgaattttgaggacactccatactgttttcgctaatggatggcctaatttacattcccaccaactgtgtgggaacagggtttcctgttctccacatactctccaacatctttttgatgatagtcattatcatctttttgataatagttattctaacaagcgtgagatgatagctcactgtggttttaatttgcatttatcttaagaatgatgaggttggatattatttatatgttgactggccattttgatgtcttcttttgagaaatggctatttggctcatattttacttgggttgttttcttatgagtgagttgtttgacttccttatatattttgcatattaactcttcatcagatgtatggtttgaaaatatcttctcccattttgtaggctgtctcttcactctgttgattgtttccttggctgtgtagaaactttttagtttgttgtagtgccatttatttatttctgcttttgttgcctgtgctttggggctcatatccaaaaattcattgcccggaccaatgtcatggaacttttcttctagtacttttacagtttcagatcttacatttaagtctttaatacatttggagttgatttttgtatgtggtatgagacagaggtctaatttcatttctctacacatggatattcaggtttcccaacacccctttttcaagagactgacatttccccattgtgtcttcttgacccttttgtcaaaggtcaattgagtgcaaatgtgtgagtttattgctgggctctctggtctgatccattggtctatgtgtctctttttgtgccagtgccatgctgttttgattactgtggcactgtagaagatttttaaatcaagcagtgtgatacctccagctttgttctttttgctaaagcttgccttagctattcatggttttctatggctaatatgaacttaaggattgttttgtccatttctgtggaatttcattgaaattttactgacattgaattgaatctgtagatctctttgggtagtatgtacattttacaatagtaattctccaatccacaaacataggtatctttctgttatttgttttctatttttttcatccaagttttatagttttcagtgtgtaggtatttcagctccttgattaagtttattcctagctgctttaccttttttggtagcaattgtaagtaaaattgttttactgatttcttttcccactaatttgctataagtgtatgaaactactgatttttaccaattaattttatatcttatatctgtggcctatttgtttgttgattctaaaagtttttagagatttttaagattttctccatataagatagtgtcatatgcaaacagggaaaatttatcttcttcctttgtgatttgaatgccttttatttacttcttttgtgcaattattctggatagaacttctgatactatatgttgaatagaaaacttgagagtgggcatcattgtcttgttcctgatcttagagtaaaaggtgacaacttttcaccattgggtatgatgttagctatggatatgtcctgtatggcccttattgtgttgaggaacatttatttggtatctaatttcttgagagcttttatgattaaaaaatgttaaatattgtcaaatgctttctttgcctgtgttgtaaggtcatatggtttttgtccctctttctgttgaaacactgtaccacatttagagatttatgaatgttgtaccatccttgaattcctgggataaatcttacttgaccatgtggaaacacacagcagcagcagcagcagtagtagtagtagtagtagtagtagtagtagtagtagtagtagtaagacttcccttactacagtcttcaactcattttttagtctacaggaaaaacacattaaagagatgtttgattttctctgttgcccagtcattctccctcctttctacttcagtcatttacccctgaaaatcccccaatctgttaagcaaagcaacaggtaagcagacttcttagtaaaatgcacttttcctcaaaacagaacttttgcgcattcctctctttgagttctctcttccattaatggtagggttgaggaagaaagaaggagataaaagtaacagagaaccctgcctatattatctatatctatagttatattcatatccatatccataaccatatcatcatctaatatccattgaagcctccaatcctcaggaaatctgccaagtaatcactttacaatttttgaatacccaccgtgtgccagatactgtaggaaatcacttacatttctgacatcaggtaaccattatatccaagttcaccctccctcacaaataaggaaacagaagcacaaagtgctcctaggttactcattggtaactggtagagctacgatttgaactcaggcactttgactctagagatcacaggtttcaccattactcttctcaaacacttttgcccttgatcttattccatgaaatttccgcagatgctgctcatgagggcagggaggtgatgtggtggggagaagaggatttgtggttttcttctccttgactcttctgatttctgcatgtatacaagtcgattttttttcaccaattcacatgggaaacacattttctggcaaatttcatgaaagcaattcacttaaaatacaatatttagtctcctgagaaagtgttccactaagcaattcacacattatacacatatttgatgaatacctgctatgtgccaggacctaacaaagaacattgttgaataaaagacaaaaagtagttgcccttttgttgcttatctccactggggagaatgacagtaatcaatacacatgataaataggcaaataaaatagtatattagacagcgataagtgaaaatcaagtgtgtgtttacgacttttattattttatagaagttttcatatattccttttattgatggtttttgtcataaaaagatccccaaatttgtcaaatcgtcttctgtatcaaatgagctaatcatgtgtttcttgtctttcttctataaatatgatatattacattgtttgtcatttgtgcatggaaacatccttgtattccagaaataaatatcacttgctcgtgttgtataattcttctaatatgctgttcaattcagtttgctagtatttggttgaggattgttgcatcaacaaaccaagtagtaataatgccaactgtcaacagaaaggtgtgcagctgtacctggcagcaattttaattttgtgttgcagtggaagtttaaattccgatgggtgtcatttcagatgagcagagcctggcctgtggggcaatttatggttaatgattgaaacaggagggtattatcttcaaatctggaatccaaatcaggagattctagtgggtaaccagtcagttgttttaatggagtacagcgtaggccataaagagcattatttttgcatcaaggccctgaggaaatatatagccatcatgagtggtctagagactccaagaggcatgaaagacacagccaaagtctttacagaggagagatatttttgtttaattcatttaatgacactaacaggagtgtctgttgattttaatttgtaagtaaaatttgtaaatgaagaatatgttgccacaggcatcccaaaaaaaacttacaggtgctggattatgtgacattaatatgcatatcacatgaatcttctttgaagaggtgttaccaatgttatatcatcttgtgctcttggagaaaggtggatgtcattattgatattggaacaggatcctcgcttcaggatggagagccatggcagcactccaaaaggcaacacaaagctgtacatagcatagcacaagaaagtcatcagggtaaaaagccttctcaaattgtggagccaatcagagtagcaaatcagtaagtcatgagtcaaaggcattccctaggaactttccacctgagtttagaatgatcccatcctcattgccattactatagaaaatgttagagtgactcctgctggttgaatcttagaggatcactctaacatggccatgaaaagttcatatgaagaggcatactcacagttcctagagacagaagtagggcaggccatgcaggaagccatgtggaaggagctcccaaggagcaggctcaatcaagcagatgggtaggcaagagagatgggatccctgggcaagtgcctttactgggagtcaaggtggaggacacaagcaaaaacacttttactagagtgtttcaatgtcactaggtcacagtaggggaagacaagaagaggaattgtggcagggaccagctttaaaatactggttacctggtcacctgggcagggtgctcacagcttgtttgtgggatattgaagcatgatttttaaaaaatgtacacataactggatatctttatttcttcatacaactttgagttgccatatagcatcctttcatttccacctgaagcactccctttagcatttcttgtaggcaaggtttaatggtcatgaactctgttagcttttgtttatctgagaatatcataatttctcccttgtatttgaaggacactttgccaggtatagaattcatgattgacatgtttttcctctttcaacattttgaacttaccatccccctatcttctggccttcggtgcattgcataagagctgagctgaaaatcttattgagggtctcttgtatggaagaaatcgcttctgtcttgctgctttaaggagtctcacctggactttaggtgtcaacatttggattataatgtgtcttagtgtgggtctctgagtttatttgtgggttcaacttgcgtttcttctgtgtcttcaatttgtagattcctgtattttaacaagtttgtgaagatttttgtccactctgttttcatataatcttctattcctttctctctttctcttttttccccctggaactctagtaaggtgtatgttgatacatttgataatgtctcacaattcccttagattctgtgctctatactttattctattttccacccacacctcagtctcaataatttcaattattccatcttccagttttctgattattcttccaccggcttatacccattggggggacccctctagtgaacttttagttattgtactttcaattcctaagtttctgtttgatttcttcctataatttctctttctttacattctcattttgttaagacatttatattcctttagttcttggtccgttatttcctttacctctcagcatttttaaggcagtgattttaatatctgggtctagtatcagggtggagctaatacatcacaagggtgcttataagaaggaggaagattaattcttggagaaggacattgaaacatccttgtattccaggatgtttgcaggtgaagatgcaagaggttagagtggtgggaagatgtaactgtgagaaagggatgggagaaacctctagaatttggaaaggcaaaaaacagagcctccagaagacacacagctctgctgaaagcgccttaaaaaatgtagacatggaaggtgtaaaacatggtgctttcatatatgtatacatgtacatatacgtagtgaaatggttattaaagttaagcaaatggacacatccatcatctcccatagttatgctgcatgtgttgtatgtcaacagcacctaaaatgtgcttcttaagcaaaaatactgaattcaatacaacattattaactaaaatcctcagattgcacattcattctctggacttcttcctcagacttatcacaattttgtgtcttttgacctccccatcaactcccccaagttcacccctagtcaccactgttttattctctatctttgtgtatttgacgttcatcatttcttcttcattgtaccccagtaacactattttggacttctaacctccagaactataaaatgttacatttcttttaacacactaagttttggtaatttgtcacatcagcattaggaaacttaggtaatgtgattatgctatgggtgaaaaattaccaggggcttaaaacaaggttatatttctactggaagctacatattcagtgtggattggcagttctgcatgcaacggtcattcacgcatccaggcgatggagcaggccctatcagagcctcgtggtctccggaagggagaaattgatccacagaggctcttgcagttaaatgcacagcccacaaattatacccatcattctgctcataactcaagggtctaaagaagtcacagggccccacccaatccagtgatacaaaaagtgccacactccatgtaccacagagtggaggccataattggcaaaacatggcacttccgaggagggctcaatagttctactcaggtcctcaacccaaagctctacattgaaattgaacctcttggccaggcgcggtggctgacacctataatcccagcaatttgaaaggccaaggcagatggtttgcttgagcccaagagttagagaccactgtgggcaacatggtgaaactgtgtctctagaaaaaatacaaaaattggccaggtatggtggaatgcacctgtggtcccagctacttggcaggccaaggagaaaggatctcttgagcctggaagattgaggctacagtgagctgtgattgcaccactgcactccagcctgggcagcagacagagcaagaccccgtctcaaaaaagaaaagaaaagaaagcaaacagaaagaacagaagaaagtaaggaaaaggaaattgaacctctctgtgcctcagtgttctcgcttgtattacagtcttacgtcacaggccagttgtgagggttaaatgagataatacatgtagtgggctgagctcaaggccttttcctggtgtgcacccagtcaatgaaagccattgataaacacttgaggaaacacagagaatcaggtaaggatgaagaaatgactgctttgtgctcctttccaggagtggcaggtgaggacgagctacaggtgattcagcctgaaaagtccgtatcagttgcagctggagagtcggccactctgcgctgtgctatgacgtccctgatccctgtggggcccatcatgtggtttagaggagctggagcaggccgggaattaatctacaatcagaaagaaggccacttcccacgggtaacaactgtttcagaactcacaaagagaaacaacctggacttttccatcagcatcagtaacatcaccccagcagacgccggcacctactactgtgtgaagttccggaaagggagccctgacgacgtggagtttaagtctggagcaggcactgagctgtctgtgcgcggtgagtacagcgtgggcctcctttgtcccctggtgtgtgacaataactcaataattacattatccattcttggagcaacagccaggtgtggtggtggctgagcagccaccctttcatgaactgatgtcaccctttctccagatcacatgagttgaggcttggagatgtcatggcagtcgctcgaggctccacggcttgtaaatgatgggacagaaggcatccccagtctgcggctctacagctcttgtgtttccaaagctgacccagccctttggttccacagatgagggaactcacaatttgagtgacttgtccaggcacagggctggaccttgccttctgcctccagagaatgcttccccctcagggtggccaagtcccttctttatgcaacaggcagtcactgagaccccactgtgtgccaggctctgccctggatgctgcgcaaacagcagtgaatgaaacagcctaaagcgctcccccaccaagcttacattctcttcccttctaatgaggagaaatccgtccagggcatggagagggtaaatcgtggttgtttttttttttaatttaatcttcagaaacaccccacggggaagatttctcggaggcacattcacggttgaatctgatggcttggtgggaggagatgccaatatgtttggcatttgctgtgggtctatttgggaaacccttctgtgatttggggactgagtcacagagttaccatgggctccgagcagagctgcatcatctcagaatgtccctcacctcaggaaagaggtcccacaagtgggtgacttaggggttccccatataaggtagcaacaatgcttatgtggggtttcctgccagagccccaaaagcctcgtcttaactgctgaattctggcatgtcagcacaggaaggaccttcagaccatccagcccaaccccctttacagatgggagactgaagccaagacatgacaggggccttgtccatggtcacagggccagttagtgacagaattggagccagagtccatatctgaatcgtggcagtctccttccttccccagcattagacgctgtctccatagaagagcctggtgcatcataggtgctagataaaagttccccaaacagagccaggtgtcagagagccagcatttctcttttcatcagtttcccaaatgttaagaatgcacctcacattcagatactaaagctcattggtgactagaaaacttctcccaaatgtaagccctgtcatttcatatcgagattccacatcaggacatagagaactgctccagtttttttacagctgaaaaatactccaatttatggaaataccaaaatttattttacagtcttctgttgatggatatgtaagttattcccaacattgagctactacaacaatcatgcagtggatgaccttgtacatgtgtcaccctactcaggtgggagattcccactggaagtggtgtttctaggtcagaggatagtgtgttttcatatttgagaatattgcctaatttcccttctagatgatgtagcaatcagagattacagacttgagctaccatgcctggctaattttgtattttgtagagacagggtttctccatgttgttcaggctggtctcgaactcccaaactcaggtgatccacccgcctcagcctcccaaactgctgggattacaggcgtgagccaccatgcctggccccacttcaaacatttttaagacagtggttttaacatctggctctagcatcagggtggacacaatacataagaaaggtccttacaagacagaggaaggagattaattctcagagaaggacttgtgaggatataagcaagaggttagagtgatgggaagatgtaactgtgagaaaggaatgtgggcagcctctggaatttggaaaggcaaaaaaacagaacctccagaagacacatagctttactaacagctttttaaaaaaatgtgtatatgtaaagcctaaaacatgatgctttcatgtacatgtatgtacatgaaaatgtacattgctcagtaatgactgaaatcagctccccacaacccttgaacttagacaaggaaggtggctttatcctgattgtgcagataatattggcaaagacactgaaatgcccaggtggtgcctccccagcccaggcagccacagccagtggtggctcaggtgtgactcagatctgctcactcctagtgaagtactcactcctctttgccatgctctcggcctaaatgatgagctacatgagaaaggagggaggtggggaagggggccagagagcagcaactgtgccagagtctccttataaccagtgctatgagggagaagccatttgctacctcctttaaagatgaggacactgaagctcagagaggagacctgacttgggagcaggtcagggagccaaggctggaaccccgcagcctgactcacagcctttgtctttgtgacactcaactgtggtttttcaagagtggagaaatgctccaaccttctctttctaaactcttgcattgttcagttctacagcaaaaagcattaaaaacaaaacaagaaccctgtaggggtaggagggcctgtcttcacactcccatcagaaaggccctgcgcatgtctcatgatatgccaagccggttcctaaaggacaggtctcaacacacatgaggcatttaggactcttcccccatgttgtgttgtttcctcttcactcagcagcgtccaatgagcagagtcgagcctcctgcagcccagcagagcacgtatctgcccgttcatggtgctgaggactaaggatgaggagatgaggcatttcctagagagtgtttggggcccatgtgagcaagagttgagattctcccctccggctgtcaggagcccactgtcttttgcttatggctgcagggtaaccaggcctgggcacccaggagggaggcttctccctaacattgcatgaagtctagaatctcaaagggacaattgaggtggcagtcagtgttggagctcaagaagttagaacacttgctctgttaatggacataagtgcttggtgggacacaggaaatgcccactgggacacatggagaatcgggagacagtgccttcattttgttcagccacggcatcttcatctgtagaatagagacaatcatggactcctttaggaaagtcgtaagcgtaaggttctctctgtaaatcacctagcacactgtaggcacccccaaagtgaggtgttatttcaagatcgtgtgatcttgggccagtcttgccttcccttgagtcctcggtttccccatcggtgagatgctgattatcatggcctattctgggttctgtgaggattggagaggatgtgcacagagcccctaatggtggtgtcattcaggttattactgagcttctgcagaactgtcgttaggagaacacaggcagtatcccagctgcctgggcctcttcccggctctgccacttcctggctctgtgacctgggacaaggtgcttcaccaccataggcctcgatgtcctcaccctttgatggtaacactgacctcacagactgggccgagtctgaaggagtgatattgtgtaaaatgcttagggcatcaacaagcacacagtaaatgctcaataaaggtgagttgtgttagggtgaagctgtgtgacctcagacaggtcagggcatctctaggccccaagtataaatggggtttgggttggagtccagtggctttcaaccttggctgctcattagaatcattgggaaaactatcaaaaaaaaagtttgcaaagctggacccaggaacccccctaaaatgccaatttaattgcatctaatttgggcctggatatctaaagttcttaatggctccagaagattctcatacacagccccctagcaaaagcggtgccccaggttttggggctttgagaacagctttttgggtcatgggtgcttcaaaacagccattctggaaacattctgggaggccccagaagcctgaacaggacccctcccatgctactggcctcagggcccaagataggagactgggacaaagcctggctcagatgcagcctcagggctggggaaccttctgtcttgaaaacatttgtatctaaacacgtgctggagtcccagcaaatcctcactcctcagccccagaagcctccctccctcagcactcccagatgtcactgaggtatcttttccctccttcttccaaaatgcttccagcttcccctgtgatcttacttgaaagccagttcgccaaacatggtggttgctgctccttttatcatttgggttttttctggcagctgcggtgagtagggtttgagcctttccttggtgtttgtgtgcctctttgttctgttgcctaaagaatagctatgcagctccagaagcagtaatgaccaaacctcatgattacagtcacaggggttatttattaagcacctactacatgccaggctatgcccttgcacttaccctcactcatcttcccagggtggggtttctatctacttttggcccttggccaccaaggatcctctcagagtctcgccctacacaagggctcacatgaggaccccctctgacaaatagaaggaggattgaagtgctgagaggtacagagagagcagccagcatcaggctgccaagaagccctcaaaaaatcggaactgaagacagcctctcagccttctagggacacccatgctgctggtgtctcaaagacttgacatcttcaagtgacaccctccttactgtgctctcacattatttcacgcatatcagggagcaagttaatattggcaaagtcaaacgtataatatgtgctttctaagaggacggcagaaggttcaaggtaacaattagcaatttgcagacacccttaaaattcatctacatggagaaactgcactcgttgttctgattctccaatgtgtttgctttcaaggcccagaataggtttctgtctgttggtgtggcctgggtctttgtctcttgtaattaattaacgatgaaaaagctaaccacctttggctttcttagtactcagtgatccttgtttttcacccaaacctgtcctaactgaagattcagattcccaaaaatttcctcttttcaaatttaggacttccagcagattagaacaactaacaacaacagcaaaatgattgttaggaaggccaaaggaaatagcatttatctgaaagataaagaggtgcaatttgggtacactgagtcagtgaaaccctgaatagtgtcccgtatggcaatacaggacaggttttttataggggattttcacaaaaggttgtttttggaaacagttcattagctggttgaaaatcctcaactgcaaacccactctcattggttatttcattaaagtactccaggtgaaagagatcaaaatcccacggaccctggcttcagttgttatccaggtctatctactgcaacatcctgtggcttgacctttagcaggtgtgattccaatgctcttacaaactcttggctctacgttaaagctttatccttaattaatgccttttatttgacagaacgaaatatttgtgaaaagaaaaatacggaatgtttcatatttttataatacctaaagagagacctctgtgtatctgtaaagtctgggttaaagatagatctgtgttttttgggggaagcatcttctgtgtttgatccagagcaaaactgcttccattgccccattgaatcctggcgacatcccaggaagtagaaacgccgtcctccgtcctcctgttttgcggatgaggagctggggttgtcagcccacccctgtcctgggctgagcagcctggttgcagctctcacggtggtgccactttgccattgatccctgtattggcttctataaatgccctctctgaggttagtgagccttccgggggaggacagctaggaccagttaataacatggagggagaccaatcagtaattttgttcctatgcccagattggtggaagtctccctgtgtggagaggactttgaactcaggcctggacttccctctgggccctgcccctactcactgtctgaccatggcctggttctcacctctaagagctgttgtgtcctgatctgtaaaatgagaataaggacactgccttcacgacattattagaaagattaaaaactaacgtctcagaaggttcttaacatgtcaaacgcttatcatcagtgatggtcatctgagtcatgtctcctgattatcgatggtccttttgtagccaaaccctctgcccccgtggtatcgggccctgcggtgagggccacacctgagcacacagtgagcttcacctgcgagtcccatggcttctctcccagagacatcaccctgaaatggttcaaaaatgggaatgagctctcagacttccagaccaacgtggaccccgcaggagacagtgtgtcctacagcatccacagcacagccagggtggtgctgacccgtggggacgttcactctcaagtcatctgcgagatagcccacatcaccttgcagggggaccctcttcgtgggactgccaacttgtctgaggccatccgaggtagaagaccctcacacccagcccaagcccacacctggctgccaagcccactcccctctccccaggctccagagcttgaaaggcctggaatctaattcctaactgtgttgtccacctcccatgcacctaggtgagccggtcacttactatcattttaatggcagctgtcaggggaccagcaaccatgtgccaagctctgggctacagagtttcatttatttcaccaagagcaactacaattagtgagcacctactaggagccaaatcactatgtgctcggcgatttcactgattttgctacagttcttacattccaactgcatgccaggggttgtgcttgtagatttcactcatccttagcctagcagcagctaacagtccttgggcacctactgtgcgccaggcactgtgcttagtaatttcactcatatgcaacgagtgccctcaatgtctgagcacctgctgcctgcctagcactgtcctggtgatgccctcactgtgttggtgggagctacgttatttagccctccctgtgatctgtctgtgccacaagatcagagcttctgccctgtgctgtttcagttccacccaccttggaggttactcaacagcccatgagggcagagaaccaggcaaacgtcacctgccaggtgagcaatttctacccccggggactacagctgacctggttggagaatggaaatgtgtcccggacagaaacagcttcgaccctcatagagaacaaggatggcacctacaactggatgagctggctcctggtgaacacctgtgcccacagggacgatgtggtgctcacctgtcaggtggagcatgatgggcagcaagcagtcagcaaaagctatgccctggagatctcagcgcaccagaaggagcacggctcagatatcacccatggtgcggttacttcccatttttaaattttgtctttttctttaatgttaaaagcaatattcatgcttgtcataaaataagctagaagtctataaatataaagtagaattttaacgtctacattaaaatcctacactccatgggtcaccactacttagaaggttcaaggtaacaattggccatttgtagacacccttaagccccatctaccaggagaaactgtgcgtcaagtctgatgcacaacttgatagatattttgacataaatatacattaaaggaaaaaagagagagggaggtgatccgtttgtttatgaagtcctgtgtctcgccttcttctgcatttctcgccagcacagcaccttgccttttacactttctaacctctaccttgtccctattctatcctaaacttttccatccgcatctgtgacctcagccaccagtctccagcatctgctctataaatttcagaaagacaagtgaagtttaagcctggacagacccccaggtgacctggtcacagcacaggcttcttttgtgttctgatggtgatatttgaccaacaataatcacaaccactctgcacatttactatatgcaaatttctgttcatctctgatctcctttcctgcttcaaacacccagtgagcttggagttttaccaaaggggaaaccaggacttaggaagtaatgagggatgttgttgaagacttcttgtcattagaccaggttattggtccaaagtaatgaaggtaaatctagtccctgaggacaggctcactaccaggctataatgggaatttgtgctaattagagaaactttccctttctgctgcgctttgtcccaaggacccaaatttggccagtgttccccctctctataaccaaaatatgtcttatttccctctcttttaataccaggaggggtccctctactccagtcgaaagacaatctttgagtgctttgacccgaatacatcctcccacatctcagggtcccacaacttccccatcagggcccaaccccagcatagaagccattaaagctgacattcaacatcctttgtgattctgctactcttctaatgatggctggggcccaatcttctattctttctgccctgaggctccaggaaataagaataaggactcaggttccttccaaaacaccctatgatgtttgcgtcatctcctgggtcagtgctgagtcacggatttgttcatgtccctgcctgccagaagaggaaagacacgaaatagaagacaaacaatgtccccaatcatcagagatgtgtggaaggtgcatagtcacgtccactgaaaacttgctcacgcatgcacctgcagttgcacattgagggatcatgtgatcaaggacatttttcacaaaaccagtgtcattgtccacttaaattttaagtgttcaaatcactaaatttcataaagttattaaaataatttcctcatatcatctaaaatggagcatacattcacattttaccaaattttttagaaccattttcctgtgtgttaaatttggttttaatttatctttaaatgcttgtgttttcctttgaaagatctgggccccagggatatttttggatattttataatcatagattcaatgtcgttaatagtttagggttattcacatttttcgtttcctattgagtgagccctggtaagttgtgttttgcataacttttggtccatttcatctaagttgtcatatttatgtgtgtagagttgttcataatatcctctcataacccttttggtgtctgcagggtctgcaatggtatcccacgtttcatcctgatactaaaaatgtgtcatttctcttttctttttcatcagtcatgctagagttttttcccattttattggtgttttcaaaagattgactctttgtttcaatgggtttttgtattgtttttgtgttttcagtttcattaattatctgctctcttctctctttttttttttaaattaattcctatctcctgctttctttgggtttactttgccctactttttgtagtttctttaagtgcgggatttatatttattgacttgagacctcctcttttctatgtcctcccttcatcactttctgtggctgggggctggtatttgggcatagagtccctgctgtttggctgctgggctgttcctcagtcctcaggttcttacctcgctcttccaccttggaagttctcctatgcctgctcctcatgatatttcttgggttcatagttgtacttctcaaggaggcacaggatgagatgagtctgtaccatctggacaaggttgagtcttttcttagacttccaaccacccactggggctgagagagggctgccatttttgggttctttcagtgtgtctgacatggcatcctggcacatatgctaagtctggaaatgcattttaggttgtctaggctggcaggcaaactgcaggatgccttctgtgacgtgctgcatcagtggcatgggagcctagtgagagactgtgccctagggttaggtgagtgttcccttttgactcagccattttgcagtttggcattctctcttcaagcaatatttagggcctggattgtgtagaatttacttttccttttctgtttcttcttttggcttggggaggatatttatagcgacaagtagcgatgccactgcaattgtccccagtaactctgaagtcaactgacaatctttgagtggtttgacccaaatgtctccttccacatttcagggtcccacaacttccccatcagggccctatcccagcatagcagccattgaaactgagattcatgctccgctgtgattctgctactcttctatgatgcccaggacccaattctctattccttctgccctgtggctccaagaaataagaatctgcagtgctgccaagaagtcctctggcttccagctgaactttaactcatgatgaatcactcttagtttctcattgccttcctcccaagagttcatgcccagcaacagctaacaccttagttcttataacgaccatttcccaatctgttttcaaaaggctaatggcaaggaatttccttcctgtggtaacactatcccagtttagtgccagtgaaagtgttatcaatcgcaacacaacagcaagtcacggcttctccagtcccattcaccaccagccctggggtcctcattgctagctgatgagtaatcagattcccaacttatattttagagtcttctttccagaccacttcccaaggacagtttctctgggaggccacctgaggatgcataaagcaatgcaggaggcatcctagagtgctgtcagggtcaacatgcctcaggaatgaggaggcaggagtgtaggaggagggaggtgctgagccacagtgcaggcagtacaaagatgcagctgctcttgcagagaggcaaaaggccggagggtcctgtagatttttttcaaattgaggggaagggctggcccttcatattcccaatgcagtctatctctcatgtgggctgccccttagaaggaataaacttgggcagtgcagctctcctcaaaggagagaaagccccagagagccacccatctgagaactgccggcctgcaacactccaacactccagcggctatagatgctgaggtctccattccttccttaaggacccaccagcaccattttattttaaaaaaaattttttttaatacctttgttacttttaacatccaaaaccccttatttaaaaaatgcaaacagtcccaacatgagcttccgtagatctgactctctgtgtccaacagaaagatttcagatgacatctgcactggggttgaggtaggagagatgatgtctgaggcccttccaagcccgaggcacattccctgactcaccagggaattttccagccagcaggtttaattgggtcttgtccctggagggctccctgagatcatgagaatatggggtcctctccctgcccctggggctaagaagggcagcatgcaactctctcactctgaatccatcctcacaccacctgcccaccctttactaatcattctcatgatcctggagtgttggacttgtcttggactcaggagtcacccttggggacataatgatgggcttccctaggtttggatcctactaatctcctgacactccctaaactctctggcctcagtttccccatcagaatggaataataatccctgccccatgggcgtgtgaggatcaagtgaggaacccagttgccacatatatgaatacctgagcacacactctctccaccttttccctccaggaggataaactggcagcctgggacagggtgagtgagaatgaggagccactttccctggcctttgctttcggctggagtcaggaaagccagagcaggatgcaagttcaaaagcttcagaggattgatgggcccaggtagcctcagatggggtaagtggaggcccctgggatgagctcccaggtggcccctctcatggctcctcctcttccctgatttccagaagcagcgctggctcctactgctccactcctcgtagctctcctcctgggccccaagctgctactggtggttggtgtctctgccatctacatctgctggaaacagaaggcctgactgtaagtttaggagagggaggactgaccaagggctcctccagaaaggcaaggccagcaggagggcccagctcacatgccatgcagcttcagggtcagtggagtttacagaaggtgacagggctccctcaggatactcaggagtctcagggaaccctgtatggggctcccaacccccagggagtgtgcaggagttgggatggtcaagggtattacaggaggtgggatgcttcaagggggttcaaagttgtccccagtggcctaggagtcccatggaaaaggtggacagaggggtctaagtgagggccaactgagtgggtggtcccttggaggccactgctgggactccatgggttcaaagtaatccccaccgtagtgttgagaattcccagataggctgctctgagggctgttcctgctctgaccttctgtgtgcttgagtggaaagcggggaagagggagcatcaggacttggaagaagtgctgagctggcagagtcctatctcaggtctgcctgtccacccataacaggcatcccaagaggagaccagcactagggacatatcaggctctcaggaaacatttcttaaatgatgagcagatgaatgaatgtggatgtgttttccaacagctccttccttccttccctgccatgtaggaccctcagtctctgctgcctcctcctttcttgagaagctcagcctgagagaaggagctggcgagaaccttccccacactcagctccaaacgcctcctctcccaggtcatctgcctgcccacacgctcctgttccaccttcacaagaccatgatgccccaaagcagtgtctctattcacggtcctgagcaggggccatgggattgggctctgggcactgactcatggcacctccctagaaggtgagaaacactccaaatctaaacacaccaggacttctcccatccgtcgccttgggactggccataaaccacagactctctccaggctctcaagagttatcctgtcttctggattcctgcctaccccaactcccccagccttgttgaggttctctactgcctcctgaatacacatgaacccctataccaattttaagaaaaaaatgattctctttcctctttgtccaagcatcctatccctcaaacccaaaaagaaagaagctctcccttctctctctgtgatggagacagtatttcttctagtatcctgcagccttcccagtcctgctgcttgtggtagaaatgctgccacagcccaacattgaggagccctcgatgactgccctttacaactcatattcagttctgcctccaaaatgcatgtgtccacttacatgagatggtaaatgtttaacaatggactttctgaaagggaaaaaccaaaagctgttttgcagtgcttgccaatttctctagtgtaataactcccaacctgaccaatttcacactgccaacagttaaacaaccagattgcaagattcctgaaatttaacaattggttttcagggcccagtccaagcctgctgctggaaacctcagagttaaatccctattctccacacctctcacctccaccacccctccctgtcccagccagcatcatctctttggggaccactcctctggctttcatttttcagccacagtgattctttggaaaagtcaaatcatatcacttctctgcttcttccccaacacagctgcatggctcccgctctccctccttcaagtctctgctcaatgtcacttcattaaaggcaccttctataaactaccttgtataaaatattatttattttctctatcccggcattctaatttctcttatcctaattaatttttctttagcccttattttgatgagtattatgccgaatacaggcagccctcacttttcatggcagtgcaagattgcaaaaatgactgtgcaacctgaaacccaggaaagcagtctccatagtcaa

SEQ ID NO: 94 - DNA, 33955 bp, Homo sapiens
gctaaaattacattaaatcctttctagaatttcgtggctgggacttgagtctggtcttggtccttctactgatggtgaatccagtactgaattggatccaattctggacgagttaccctgtcctagaatcactcacacgtgacagttgacaggtggccccacccggtttgcatggtggacgggtgttctgctaggccggcctctccacacccagagagactgaactggtttctgctcctcagagagtttgcacagagactctgaggaagcagtcacctcaggcctctccatcctagagacggcagaaggacaaacatctcctgctggcacaaggtagggggtgggggatggctggtgttccaaacacccgtgcagagggaacgtgtgcatgtttgggagtgaaggaggaaagcaggggctcgagtggtgagagaaccaggggcagataatgaagtaaaagtggggttgggggagatgctgggggtgtggcggcggggacgctggataaggcagggaggacggggtggctctgcgggtcctctgcctccacaccaagcactcagggatccgtgcctccttccagtctggagtcccaatcgcccctctctccaatttgggggacagggatttctccttgttctcctgccctaactccttctttccgacttctcttgtcccattctccctcagatcctcccttccgcttatgccaaggcttccacagcctcgctctgccgggccttggcattcctagcctgagtgttgaaaccattggccgggacctcaaggcagctggggcagggagaggacggttagaagcccagggcacactgccacaaaaaggctgtgactcattttcagggattgaaaactgcagtccaattcattttaaaattttcgtctctctttggacttcaggctgaaagttctttatagcaacgggcttccagggactatgtgaaattattggtttcactttccttatcacccgcttcttacttcaattaaaattccatttcagccgggtgtggtggctcactcctgtaatcccaacactttgggaggctgaggggggaggattgtttgagcccaggagttcgagatcagcctgggcaacgtgatgagaccccatctccacaccaaaaatttaaaaattagctgggtgtggtggctcatgcctgtagtgccagctattctggaggctgaagtggaaggactgattgagcctgggagttcaaggctgcagtgagccgtgctcatgccactgcactccacctggatgacagagcaagacctggtctcaaaaaacaaaacaaacaaaaatctacttcatatgtaaccattacttcagttttgaaaccattgcctgaagctgacattttgcagttggaaaatggctattccttcccatcttcaggttggctcaggccaagctgagattcaggaccacagagggcaacaaaggtggaagggcccctttcccctttctgtatatttttcccagcctgtctgcagctctttctttttcttcagtgttaggttggcatcccagatgtcaggacccaagtataggcctggtgtgctccttcctgtgagtcatcagacttgtagaaaatattggccctgctaaggagctactcagtggtcatatcacacatatgcacgcacacacacacaagcacccatgcacacacacacacacacacacaaacacacacatacactctgttcttggcccacccccgctggtgtccccacagcagcagtattggcagggcggtagcagtgagttcctctctgtgtactctcagggcctggatgtgtacagaacaggctccactcaggacagatttgagaccccttctccagaccaagaggtggaagtgcaccctcaaaattgaggttctttaaccttagcagacagagaaccacataggggacatgtaaaaaatgtgcattcctcggctccttcaaacgcttgacccactgtcctctgagcagacaaccccttatcccccagccccagagatagagccctgccgatagtccatggttactttctttgaagtctgttccatctagttaagaaaggacagtggtaaagacccacttaccttaccaggcatcataagggccctagcatctgagtcacaggatgtcaccctctgggtctgacatgcacttgaattaactggcatactgcccggcacacagagggaacctagatgtggaacggatatgggtggtgttacaggccgcatgtttgcctgccttccaaattcatatgcagaaatcctaattctcaaggtgatgctatttaggaagtcataactcatgtgagtggagccatgtgggattaagaagtgataggagagcttgctgtctgtctctgctctccactgtgtgaggatacaacaggaagacagccatctggtgaggaagagagggccctcgccagataccggacctgctgacaccttgatcttggacttcccatcttccaggaaggtaagaaataaatgcttggtgtttcagccaccttgtctattctgttgtagcagcctgaactggctaaggtagcagggtctgatgatcaaatgggacagctgtaaaagtgaggtgggaagggggtctacagatactaagttttatgaggaaaacttgtgctttatttgaaaatgacacaaaattttgttctaagaaaaattttcagaattcaaaacttagagccctaagacttttcccaatgatagacttggctttccttgaggtcttggccccagtaggactgctggagtctattacaaaactcatctggaaggacctctgccgttgctgaggcttgaggaaatggttttaaggtcacagtgtaaacaaaactgctgggaagttggaactgggcggagcccactgcagctcagcaaggctgctatggccagactgccagatttctcctctctggtcagggcatgttggtaaacaaggcagcagccccaatcaggggcttatagcagacttaaatgtccccgcctgatggctctgaagagggcagcagacctcccagcacagcattcgagctctgctaagggtcagactgcctcctcaagtgggtgcctgacacccacgtatactgactgggagacacctcccagtaggggccgacagacacctcatacaggagagctctggctggcatctggcaggtgccccactgggtcaaagcttccagaggaaggaacaggcagcaatcttagctgctctgcagcctccgctggtgatacccaggtaaacagggttgggagtggaccaccggcaaactccagcagactggcagcagaggggcctgatggttagaaggaaaagaaacaaacagaaaggattagcacgtcccctcaaagaccccatctgaaggtcaccaacattaaagaccaaaggtggataaatccacaaagataggaaaaaaccagtgcgcaaagcctgaaaattccaaaaacaagaacgcctctcctcctccaaatgatcacaactcctcgccagcaatggaacaaaactggacagaaaatgagtttcacgaactaacagaagtagccttcagaaggtgaataataacaaacaactccaagctaaaggagcatgttctaacaaatgctaggaagataagaaccttgaaaaaaggttagtcgaattgctaattagaataaccaatgtagagaggaacataaatgacctgatggagctaaaaaacagcatgagaactttgtgaagaatactcaagtatcaatagccaaatcaatcaagcggaagaaaggatatcagtgattgaagatcaacttaatgaaataaagagagaagacaagattagagaaaaaagaataaaaaggaatgaacaaagcctccaagaaatgtggtactatgtgaaaagaccaaatctacatttgattggtgtacctgaaagtgacagtgagaatagaaccaagttggaaaacactcttcaggttattatccaggaaaacttccccaacctagcaaggcaggccaacattcaaattcaggaaatacagagaacatcacaaagatactcctcaagaagaggagttctgaaactattccaaacaatagaaaaagagggaatcctccctaactcattttatgaggccagcatcatcctgataccaaaacctggcagagacacaacaaaaaaataaaatttcaggccaatatccctaatgaacattgatgcaaaaatcctggcaaaccgaacccagcattacatcaaaaagcttatccaccacgatcaagttggcttcatacctgggatgcaaggctggttcaacatacacaagtcaataaacgtaatccatcacataaacagaaccgatgacaaaaaccacatgattatctcaatagatgcagaaaagaactttgataaaattcaacaccacttcatgctaaaaactctcaataaactaggtattgatggaacatatccgaaaataatgagagctatttatgacaaacccacagccaatatcatactgaatgggcaaaaactggaagcgttccctttgaaaatcagcacaagacaaggatgccctctctcaccactcctattcaacatagtattggaacttctggccagggcaatcaggcaagagaaagcaataaagtacattcaaacaagagaagaggaagtcaaattgtctctgtttgcagatgacatgattgtatatttagaaaactccatcatctcagcccaaaatctccttaagctgacaagcaacttcagcaaagtctcaggatacaaaatcaatgtgcaaaaatcacaagcattcctatgcaacaataacagacaaacagacagccaaatcatgagtgaagtcccattcacaattgctacaaagagaataaaatacctaggaatacaacttacaagggatgtaaaggacctcttcaaggagatctacaaaccactgctcaaggaaataagagaggacataaacaaatggaaaaacattccatgctcatggataggaagcactaatatcgtgaaaatggccatactgcccaaagtaatttatagattcaatgctatccccattaagctaccactgactttcttcacagaactggaaaaaactactttaaacttcatatggaaccaaaaaggaggctgcatatccaagacaatcctgggcaagaagagcaaagctggaggcaccgtgctacctgacttcaagctatactacaagtctacagtaaccaaaatagcatggtgctggtaccaaatatatagaccaatggaacagaatggaggcctcagaaataacaccacacagctacaaccatctgatctttgacaaacctgacacacacaagcaatggggaaaagatcccctgtttaataaatggtgttgggaaaactggctagccatatgcagaaaactgaaactggaccccttccttacaccttatacaaaaatcaactcaagatggatcaaagacttaaacataagacataggaccataaaaatcctagaagaaaacccgggcaataccattcgggatataggcatgggcaaagacttcctttctaaaacaccaaaagcactggcaacaaaagccaaaattggcaaatgggatctaattaaactaaagagcttctgcacagcaaaagaaactatcatcagagtgaacaggccacctacagaatgggagaagatttttgcaatctatccatctgacaaggggctaatatccagaatctacaaagaacttaaacaaatttactagaaaaaaaacaaccccatcaaaaaatgggcaaagtatatgaacagacccttctccaaagaagatatttatgcagccaacagacatatgaaaaaatgctcatcatcactggtcgttagagaaatgcaaatcaaaaccacaatgagataccatctcacgccagttagaatgacgttcattaaaaagtcaggaaataacagatgttggagaggttgtggaaaaatagaaacacttttacactgttggtgggagtgtagattagttcaaacattgtggaagacagtgtggcaattccttacggatctagaacgagaaataccatttgactcagtgatcccattactgggtatatacccaaaggattataaatcatgctgctataaagacacacgcacacgtatgtttattgtggcactattcacaatagcaaaacttgtccatcaatgatagattaagaaaatgtggcacgtatacaccatggaacactatgcagccataaaaagggatgagtttatgccctttgcagggacgtggataaagctggaaaccaacattctcagcaagctatcacaagatcagaaaaccaaataccacatgttctcactcataggtgagagttgaccaatgagaacacatggacacagggaggggaacatcacacaccagggcctgtcacggggtggggggctaggagaggggtaacattaggagaaatacctaatgtaggtgatgggttgatgggtgcagcaaactaccagggcacgtatatacctatgtaacaaaactacacgttctgcacatgtaacccaaaacttaaagtataataaaaaaaaatttttttttgtagagatggagtcttactatgttgcccaggctggtcttgaactcccggcctcaagtgatcctcctgcctcatcctcccaaagtgctgggattataggcatgagccactgtgagggcctggccatttcagtttcgttaattagcatctatgatagtgcctgatacatgtagtagacactctgtgtttattgagtgactcaatatgttttattacaattacacacacacacacacacacaaaacccatctgtcatggtagaccacttgctgcctgtttgcagctagtttaattaatactggggtgtgcttggtgagagaaaatctcaaccatttaagaggaaagagtttgaacgggttagggacagtgggagaggggagaatggcgatgggagaaaatacaggaatgggcagggggtaccaggaagaaagggaaaagcaaaagaggcagggaggagaagggaagaggaaactggaggaaaggagaaggagctcacataacctccaaccatcctgctcacaccagagggggttttttttgcaggggcagcagggacaggagaggagagagagtttattcaaagttaattttgtttttaaatgtcttcttttatttttcaataaatgattatattctgaatacttggaaaacactctcttcacaaaattgttctttaattgggtctctacaggcctgacctcagttgttccagggtaaagaatttgggcagtgcccacacccacgctgttggataacatttcttcaccataccagtgagggtgaatgtgtacacgcccagcttcctgcctgttactctccacagtatgcgaagaatatccctgacttctagccctgtgcgccttcttttgtttctgctgttgctactaatagccttggagatcatggttggtgagtgtcctgagcacaagaactggctgaggacaaggaggagggagaaaggtagggggtaggcgaatggggcttcatgcaggcttcagacaagtgggtgcctgctcttaaggatgacgtgaggaagaggatccctgggatgttacacccagttcatgggagaccacagcctgaggccctaggcaaggcactggctcacagagggcagttctacaatgctaccccccgccttctactccaggtcactttcctgaacatctgggaccccacaggaattcagcgtgtgtcctgtgataaatgcctctttttcctttctattgaatgtcatgtgtgttcagctagagtttaagtctcaggaggtcatacactggcttgtctgttttgtgcctcagaacttggtagatgttgctaaaagtacttgtgacatgaatcctcctgttaacaccattaacactaagtgcaccccaggggtccctggtaccatcaagtatctcatcccagacagtcagggagagatgggaacagggatccagaaggttgagggagtctgggatggagctgccccgcctctgctagcctggcccagtccagggagtcttgggtcacagaagcgcaggttctaatgggcctcttcccctgtcctggacctcacctgcatctttgtctcacaggtggtcactctctttgcttcaacttcactataaaatcattgtccagacctggacagccctggtgtgaagcgcaggtcttcttgaataaaaatcttttccttcagtacaacagtgacaacaacatggtcaaacctctgggcctcctggggaagaaggtatatgccaccagcacttggggagaattgacccaaacgctgggagaagtggggcgagacctcaggatgctcctttgtgacatcaaaccccagataaagaccagtggtaagtgtggaatggggtgggcaaacagaggcaggcagtaagagaggggagggaagaacacagatggggaggggctttaggtatatctgtgtattgatcattggcccaaccatagaggcacatgggacccaatgggcaggaaagggcaagtctgggcagaaagaatacagacccctaaatgtgcagagaaacacttgacctattggaggatgatggacttctcaaagagtggaggatgatggctttgtgtttggattgcagatccttccactctgcaagtcgagatgttttgtcaacgtgaagcagaacggtgcactggtgcatcctggcagttcgccaccaatggagagaaatccctcctctttgacgcaatgaacatgacctggacagtaattaatcatgaagccagtaagatcaaggagacatggaagaaagacagagggctggaaaagtatttcaggaagctctcaaagggagactgcgatcactggctcagggaattcttagggcactgggaggcaatgccagaaccgacaggtaactgagctgggtgggagaatgtggcagctccctttaaaggtcaaaagccttccctgtgtgggtgtcagtgtgtgtgtgcgatagaaaatttgattgacttctccgtgggcttcctgtctggagagtcagtgatggctataaggatttcccaccatcctccctttcccatcccacctcccactgtttcttcctcagtgtagaaaccccttcccattaaccaatgatccagtcacaatgacccactgctaaatggtcccaagtctatctgtgtcattgcaaacatccaggccttctcttcctctattataattacccttccaccagctctaatgccacttcttaggaagccttccccaccttccccacacagaattaagcaccacccattgtgtcatcctccaaacagttctaaccacagtaatcgtgaaactgtgtggtaatcagatggatatttgctacctctctcagtagaaatctgagctccataaggacaaggcacaacccctattcatcttcatggcccagggcctggtagagtggctgtcacatgagccagtgattatgtggggcaccatgtgttcctggggaaagcaggggctaaggaaagcatatttttatgctttttttttttatgtgacagggcttgtgcttttttttctttttttttttttttttagtgtcaccagtaaatgcttcagatatccactggtcttcttctagtctaccagatagatggatcatcctgggggcattcatcctgttagttttaatgggaattgttctcatctgtgtctggtggcaaaatggtgagtggcaggctggtctctggcccttgaggacgtcttagtctggtaaggactcaagagaggtgaatcatgggtctcatccaagcccccgctccctgatccatctctctccacagaaatggtgcactgccttagtcttgagcccccacactacacagcagggctggcagcacaatgtgcagtgagaggagggatgaagcaatcatctcctctcgaggaggggcaaggtcaaagatctggaacgcctgcctggggtgttgtctccttgccatccggcccaggtttcatccagctctttgacggaaagtttgtttgctgtctgcgtttaccgtgatttagctcagcaggtcccatccccttttcccgttcaccctgagaagacttgctggtggcgcttgtggctgcagcatttactcccagataacatacaagatgtggtataagaaatcctttcaccaccctctaaacattacagtgccgaactacatcctacatttttagtagagatggggtttctccatgttggtcaggctcgtcttgaactcccgacctcaggtgatgctcccgcctcggcctcccaaagcgctgggattacagggggagccaacacacctggctgagagaactattatatgccagacacattgccagacatcttctgctctttggtcctgtttctccgccactgctctgacatgaagaattcatttctttcttccattgctgtctttgtcctcatagtgtcttctctaaattgacccaggcagacctcaacattttcaagtacagcaatttggaaaagttaagtagagctctagggttcaagtcacagttcctggggctctctctgtggagttcaaagttaggattccctctaatgagaaaaataggctactccatctgactcactgaggatcaatgtttctgatgtaagaaatgattctacccttttcattgcttaaacgaataccatgactcagatatgtgtctgttttgcaggggccctgacatgaaaagtgagtttgccaagatcggtgtcacaacaggcttggcaagatatggcttgagtcagataagggccactggtccagaaggggctcgtgtggtgggtggtgtgatggcagcaggaacccagggagtgaatatgctgagataggaaggggtcccacccacagagctgcaggcaaaggggtcccaccttaatccctggtggaaggtgactgagaaggacttaactgccccaaccaagcaggctgggacttcagtgccattgacaatagtgaaggggattggtgagtaggaagggaggcaaaagaacagttttagaagctgggtctgaacagtagggatttaaaggaggtgggacctccatagacacctgggagttcctggcctctagcctcatcctggtaaccgagtcggctgctgaagggcttcctgtctgggcaggagcaggcagggatcaagcgccggtggaggtcagtgcccacagctgagctgaacagaagtgggaggcagagtgggcctggggaaaggtgtattacaattcaaggggaaaaaaatatatctgccaccctttggggagggcctccccactgtgtcgcatggatttctctgtcacggggaagagcagcacccagggaaaaagagctttgtgtgcccatgacacattcctattttgttgtctctggcatttctgggcattgtttctgctgaagtgacagaagagagaaaaagctgatcaaagctaaatgacagagcaaaggggttgacagggagtgtcttttcaaatacacagggacattcaccaagaagggccatttttggatcataaaataaatctcatctgggcgtgatagctcactcctgtaatcccagcactttgggaggccaagttgggtggatcatttgaggtcaggagttcgagaccagcctggccaacatggcgaaaccctgtctctactaaaaatacaaaaattagccgggtgtggtggcatgggcctgtaatcccagctactcgggaggctgagacaggagaatcgcttgaactcaggaggcggagtttgcagtgagctgatattgcgccattgcactccagcctgggtgacagagtgagattccatctcaataaataaataaataaataaatctcaacatatgtaaagggttaaaatcatgcgaagcatcttgtccaagcacaatggaaataaactagaaatcaacagcaggaagctatctggaaaaatcctcaaatgtttggatatcaaataatatgcttccaaataactatatatcaaattaaaaagtacaaggaaaactagaaagtattttgaaatgaatgaaaatgataatacaaaatatcaaaatctatcagacacagataagaaaatgtctagaggcatccacactgaactttttgatctctgaatcaccgtgcatcattgctgccaaattttttgctcatgctcatctctgcctggaattttctttcttacctgaccgaattccagacagctatccaagtccagtttaactgtcacctcctctaagaagtcaccattcttcctggatagaattaactacccccactcgtagctcagaaactctgaccacagaaaaattatcacattgttttatgattgggtgtatgtcagtaaattgatgcgcttacttgaggacattacttttgtaacctgagaatctatcatggctgctatatagtagacgctcaggacatgtgaggacttgagtggcagcggaggtaagggtcatctcctgggtatggagcttggacaagaacctgcactcttctgttccatttcacctcaaccatccatgtccccaaccacatctccaccatcctacctgtaccaagtgctaatcctttgaatcatgtcagtgactatcttcagctcaatcccaatcacaggtcaggagggagggcatcaggtatactgtgagcaaaacagagtatgagatggggccaactggcctctggattaggggcagggcttgtcctgtatgaggacagggagaaatgaggttgctaagtctccccaagacccctgccaaatctcaccatagacataagatgaggtgaatttcatttatcgcctgggcattcacgacctgagaggcttagctctgggtcaagttgagccctctctgtccctggccaacaggagaaaggcaaaggctgaatgagtctcggggactgtctctgctttgcaagtgggccctgaggtgaacagggacctttccaaattaatgcatccacagcggtttggcaaagtcgggctttaaaccagggtcactctccaggggttgcctatgtgatgggtggtctgatggacagaaacacagagggtgggcaagacacaattttgggtggggcagcagcttgatgatctgaccatctgaccatgggaaagtatatcacatgccaaaggttgaggggtctctaggtttaattcctaggaggacataatgaagaaggctgcctgggctccaacaaagcaggctggaggcagggccacacagaccgtgggagaggggattgtgagcagaagggaaggctgaaagtgaaccctagacactctgtgaggacagcaaggactagaaggtgggattcctttgacacctgggtttctggttcacccctgacacaggaatcctggcaaatggcgtcgtgccaagccccaccctcagtgctctggacctgccgcagggatacccttgcccacagctggaagactcttgcccccgctgtgggccttcccactgtgttcccactgatactttgccttccttggctctgaacccctaaaatctctgctggggtctgggtctaactaatgatgaagtaacggaaagtgaacaatcataaactagatgacagagaggcagaatgtgaacaatagcggctgatctctccctgagagagaggtgggatctgagtcctgagagatcacggaggggtcaatcctgagctgatctgacccagggttctgcactcttttgtctccttcctaaaggcagaagatccacctagaggtgataccacggcggcgcagagttgttcacctgtggtcctcgatcgctgacagccttggctcccactgctgtgtgttccctgagtcaagtggaggcggagcctgcaatgagcggagatcgcgcctctgcattccagtcttggcaacagagcaagactccgtctcaaaaaaaaaaaattttttttcagtacatattttttaaaagatagggctgggcacagcagctcacatctataatcccaacactttgggaggcctaggcaggaggatcacttgagcccaggaatctgaagctgcagtgagcctttgctcgtgagattgtggacctatgatcctaccaccagcccacctggttctaacaccccctcctctatgtgtgagagggagagaagaaaagtgagggagaaaagagagataagcaaagaacagagaggaaaaatggaaaataagaggaaattgggggaattaaacagaggggagggcatggatccccgggagttagaagagtagcagcttgtggattactacgcagtggaggaagaagagttgttggaaattatttgagaggtagtataatcatttgtgaggcagttttctgcattcaccatttctcacagactaagttactcataagcaaacgtgcaattcacattacactgaaattcttccctaatacatcatttgcattggaataaagtacggttttcaaacaacctgatatagcagaactgactgtataaattatgtgagcacagtgcaagtaattctttgtttgtttgtttgtttttttgagacagagtctcactctatctcccaggctggagtgtagtggtgcgatcccggctcactgcaacctcgatctcccaggctcaagcgattcccctgcctcagcctcctgagtagctgggattacaggcatgagccaccacgcccggctaatttttgtatttttagtagagacggggtttcaccctgttggccaggctggtctcgaactacggacctcaggtgatctgcccccctcagcctctcaaagtgctgggattatagcatgagccactgagcccagacacaagtagttctttctgataaacactttaacactgaatgcaaaaaaaaaaaaaaaattgtgtgtgtactttttttaattttactttaaaatagacacaccaaacatgtttctaaataaatgtaatatggaaatctttctttttctcctccattctcagtgatgatatggttgtaaattcttatcatctgataatttttatcagatctttacaaattataaacttatttgcaactctgttttcagactatcccttctattatgatcatgaaactgaattaaataggtagctatttttttgacttttactcctttatttttattttcatagttttacaagaatataatatatgtaatctgtcttccattttaaacctaaagtcttcctaatctcttcttcatagtttcaacaaacataaaggtaacaattcaaagcacctgtcgcttcgacaagaagatattttacatatttaaaaaaacagataacaattttaaaatacttgctataagaataaaattgtatttaataagtagaactaaaattttgactgatgttgcaatagatttggtgggggctttttttgtgggtctttttttttttgagtcagggtcttgctctgttgtccaggctggagtacagaggtgtgaacgcagcccactacagccttgaactcctaagctgaaacgatcctcctgcttcagcctcccatactgctgggaccacaggcatgagccatcccacccagctaattttcagattttttttatagatatgggcgtttcactatgttgcctaggctggtctcaaacacctgggctcaggtgatcccctgcctcagcctcccaaatcgctaggattacaggcataagcctctgtgcctggcctctttattatcattattattttatattttcaaactaggaaaaaagctatgcagtaacagaaaattctagttatatttaaaacaggattgtaagagaaacatgttaatgtaattttggttttctcttttttataattttaacattttagattcagggagtacatgtgcagttttgttacatggatatattgtgtgacactgaggtttgagatatgaatgatctcatgtagtgagcagcagcacagtactcaatggcagtttttagtcctcgcccctccatctctcccctcctcatagtccccagtgtctactcttcccatctttatgtccatgtgtacccaaagcttagctcccacttaagaatgagaacatgcagtatttggttttctgttcctatattaattcacttaggataatggcctccagttgcatccatgttgatccaaaggacacaattttgttcttttttatggctgcatggtattccatggtgtatatgtgccacatttcccttatccaatccacaattgatgggcacctaggttgattctacgtctgctgttgtgaatagtgctgcaatgaacatgtgagcatgtgtgtcttttcgctagaatgatttcttttcctttgggtatatgcccagtagtgaaattgctggtcaaatggcagttctgttttaagttctttgagaaacctctgaactgctttctgcagtggctaaactatttcacattttcaccagcagtgtaaagtgttcccttttctctatagcctcatcacccatatgctatttttttactttttccccccaaagtctcaagttttatttaaatagcctccagtgagaacagagtgggccagtgactaccccttccttgtaaagtctattaaccaaaccaaggagagtaagcacaccctgcagccagcctgccagccagtcatgtgataggcggggtgcctctcaatgggggcggccacgaccacggccccagctagctgctgggggagcatccacagtcaatcggattcttgatggtttcatccacagacacaatcaggcacacagcctaagaggccactgccagggcattgatccataccaaagctggctcccacacgaaggcctcaaagttgtcagcaatgtcctcgttgttgatgtccacctcatatcacgtgcccctgggaatgccatgcctgcagcttgttgagaatctctgtggccccaaagccagcattattgtacagctggaatgagacaatctccaaggccttggcatatgccccaatcaacagctgttgttttcctggaatagtctttgaggaatcctggaggtacttggagaactccctctcaatggccctgccaccagccaccactgactcattcccgatggccctcctgatgatcatgatggcatcacacagggaccgctctgtctcctcaataaactgctcactaccaccatggaggatgaaggtgcctgtcttggctttgaggcagccagtaaaaaagttgtacctctcacctttaatcagggtctcttcaaacacctggcgtcgacccagcacatctgctaagaaagcattcgtactggtctggattgagcctccacaggccatcattgtcctcttcagattctcctcaggtacttggccagcacagaacatgttcctgtcagcaaagtactgggcggccacatctccagtggggagttcagacaagacaactttggctccaaaatgatagatcctctctaacttgtcatagagaatgttccactcggcatcaacaatcgcctgataatcctcaaccgtgtggacttttatctaagcattatctttctcagctttcaactcgagctcaacattcaaaagggcaatctagggattttggtatttttgggagggttgcattttaaacccagcataagagaaagtcttcttaaatgcaacaccagctgggctccatcctgtaccttcttgattccaatcattttaagctgcagcaaatcatcacacgtcatcactgcatccaccaccatcttagcaaagaaagctttctgctgtgagatcagttggagctcagagtggtcctggcacactactccagcagcttcctctactccactttatctgccttcttcacagtcacagcaatctctttgatcgtgttaactaccaactgggtggctgtgcagacagctcgaatgttgagctgagggtgtaaaccatccttcacctgcagtttcacctgcttcagaaactctgcagccagcaaggtcactgagatggtgccatcaccgacctcagtgtcttgggatttggcaatgtctactaacgtctttgctgcaagatggacaacatgaagaagtttcagaattgtggccacatcgttagatattgttgctttgcctccgccatccacaataagcttgtccatgccacaggcacccagggtggctcttacagccttggcaatcacctggcaggtactgaggttattcacaagctgggggatgccttgggagctatcagtcccctctttcaacaggataactagtgtgggcatcattttggaagcttattcagtggcccgcgactctcctctcttctccgtgacgggtccgcccagcaatccacctaatttttgactttttaataatcaccattcaggctggtgtgagatggtatctcactgtagttttgttttgcatttctctgatgattagtgatgctgagaattttttcatgtttgttggacacttagtatgtcttcttttgagaagtgtctgttcctgttctttgcccactttttcatggggttatttggtttttgcttgttgaattgtttaagtttcttacagattctggatattagacctttgttggctgcatagtttgcaaatattttctcccattctgtaggctgcctgtttactctgttgatagtttttttttttttttttttttttcccctgcagaagctctttagtttaattaggtctcacttttcaacttttggttttgtcgcaattgcttttgaggacttgttataaattgtttcccaaggccaatgtccagaatggtatttctgaaaatttcttttaggattcttatagtttgaggtcatatatttaaatcttcaatctggctgggtgtggtgaccctcaactgcaatcccagtactttaggaggctgaggcaggtggatcccctgaggtcaggtgttcgagaccagcctgggcaacatggtgaaacccagtctctactaaaaatacaaaaattagttgggtgtggtggcaggtaactgtaatcccagctactcgagagactgaggcaggagaatcgcttgaacccaggaggcagaggttgcagtgagctgagatcatgccactgcactccagcctgggtgacaagagcgagactccttctcaaaaaataaaaaataaataaatattcaatccatcttgagttgatttttgtatatagtgaaagttaagggtccagtttcatttttctgcatataaatagccagctatcccagcaccatttattgaatagggaataccttttcccattgcttatttgtgtcagttttgtcaaagatcagatggctgcagatgtgcagctttatttctgggttttctgttccagccattatcctaagtgaattatgcaggaacagaaaaccaaatacttcatgttctcactatgtactagtaccatgttgttttggttactgtagccttataggatagcttgaagtcaggtgatgtgattgaagtcaggtgatgtgatgcctctcccttttttttttttttttttttttttggcttaggattgctttggctaatggggctgtttttcagttccatatgaattttagaatagttttttctaattgtgtgaaaaataacattggaagtttgataggaatagcattgaatctgtagattgcttcgggcagtatggccattttaatggtactgattcttccaacctgtgagcatggaacgttcttccatttgcttgtgtcatctatgatttctttcagcaggattttgtagttatccctgtagagatctttcatctccttggttagatatacttctaggggtgtgtgtgtgcgtgtgtctgtgtgtgtgtgttgtaaatgggactgcattcttgatttggctctcagcttggacattattggtgtatggaataactaatttgtatacattgattttgtatcctgaaactttactgaaatcatttaccagttctaggagcctcgtggcagagtctttaaggttttctagttactatcatgtcgacagtgaagagtgacagcttgacttcttttcctatttggatgtcttttctttgtttctcttgcctgactgctgtggctgggactgccagtactatgttgaatagaagtggtgagagtgggcatccttgtcttgttgctgttcttaaggggaatgtttccagcttttgcccattcagtatgatgttggctgtgggtttgtcacagacagctcttattattttgaggtatgttccttcagtgactagtttgttgagagtttttgccatgaaggtatgttggattttattgaaagctttttctgcatctactgagatgatcatatggtttttgctttcaattctgctgatgtggtgaatcatatttattactttgcatatgttaaaccaccttgcatcccaggaataaagaaaataggcagctattgtcaggcagtggacaacagacagtgcaagactgctatccttgagagaggggacattcccatggtgagccctacaactgtctgccggggacagttccccatggtgctatgagctgaagtccaaacacagcacaggggcctcactagcatagaaggcagagatcagagattggggcagctaaagtgactggaatttgcaggacaggtcaccaaagaggggattgccaagtggagaggaggggcagaagtctgtgggggaagtccttggccgagtagtgcttgctcagagtgagacctcctgaagtttgccagagaaccactgctatggggttgaaacagagatagtagaggcagagacatgttgcaggacattgggggccagcccagccagagaggagagatgttgttaatactttattaacaccatgaacatcctaaggccatagcttagaaataagggtcacgtcccagagtgagatctacccaacaaagcttaaaatcaatccctgtcaagatgagcaggggagacagagttttgaagttgcatttagaaggtcataggaactgcgtggactttccacagatctacctaatagagcataaaaccaagccttctaaagttcaagatggttaacaggtcattgaattgcctactggaacaaaaatcaacacagttcagaggaaaacaacagaatccagagtttctacaacgtgtcatcaataatagtcaagatataataatgaaaaatctctggacagtatggtggttttgtaaaatggctgccaattctttgacacacttcccatcaagaggtagaatctctgccttttccccttgattctcggtgggtgctatagtctgaatgtgtcccccaaaattcatgtgtcagaaacttaatccgcaatgcaacagtgttgggatgtgaggccttttggaagatgtttaggtcagaccactcaggccaatggtgtgagaaagccaagccacatgtgggtagtaaagtcagtgggcctagacatcaaatcatcttaacccaggcatcagacatgctagtaaaggaatctccatgtcattccaccaagaactgagtcaccactttctggtctttccagccatggaacagagacagacaatagttattgtgccctctccaaatttcctgacccacagaatctataagaacccataaaacggttgttgttttaaactattaatctttggaatggttgttttagttttgttttctttaaaaagcaaaaatcatcagtgcaacctgcaaagtagcaagaaaatgttgctcaagaaaaaaaagcagtcaataaaaacaaactctgaactaatccagatgttggatatagcagacaaagctttactacgtgcacagtcattcatgtcatctgaaaagagaaacagttttctttctttctctccagtcctctccagtgtctggcccctacccctttcctatcacctattcaatcagaaatactgtcagcttccagtattttataggtgccatggaaacttaggtgcttgggcattgagtatttcttttttggcaaagggaatgattttcagactaaccagggagaacaaacactagttaggggaggaacgaacatcagggagtcctaactgctctcggtgagcccaggtttcctgatctacatgaatgacagtcccagataccaatttgcaaatgagaggactggaccattgtttgtgacctttgagagattatggacattatcaaaggtgtctagactacagaaatgggcaaaagataacaaacgtcaagaggggagtatagtttattttgcaaagacgataccagtccaatatcaatcctgtacaagattctagcaacagtttttgagggcctatttggaaaattctgacaaaaaaaacgatgctcatcagaaccttaaattgcttactaaattccccggtatatttttattttttaaattgctgttataaattggcaagtatgagaatacaataacctcaactccaagattttcaacaattttgcatatgtttgtggagaagatggaaatacatgggctggataagggcaactgggtggattaataaactaataatcgccgggcacggtgactcatgcctgtaatcccagcactctgggaggccgaggcgggcggatcacctgaggtcgggagtttgagaccagcctgaccaacatggagaaccctgtctctactaaaaatacaaaattagcctggcatagtggcgcatgtctgtaatcccagctactttggggaggctaaagcaggagaattgcttgaacccgggaggcggaggttgctgtgagatgagattatgccattgtacacctaggcaacaagagcgaaactccatctcaaaaaaaaattaaaataaaataacctaataatcatagttagaggattcaaattaatgaattgatatcaatgttggcataagcctttaatgaagtgtctcaaggctctcaccttggccttctcatagtccatattttacatggatttcttggatgaagacatagaaggcaggatcatcagtttatagaggatacaaagccaggtgagcaaaaagtatcttgagacaaacaaaatggaaccacaacatgctaacacttatgtaatgcagcaaaagcagttctaagaaggatgttgctattgtctagatgtgttctctccaaaattcaggtgttaccactgtgatagtgttaagaggtgggcctttaagagttgattaggtcacgagggctcctcccacctcgatgggattactactcttataaaagaggtttcatgtgccatttggctagcttgtccttctgccttccaccatgtggggatgcagcaagaaggccatcactagacaccaaatgccagtgccttgatcttaaacttctcagtttctagaattgtgagaaaataaatttatggtatttataaatgacccaatctcaggtatttgttataccagcacaaaacagactaagacaggtatttacggcaataaatgcctagattaaaaaagattcagcagaacattaagtctaataaataaataataacaaaagaaaaaaggaagatctcaaataatgtaactttaaatcccaaggaactagaaaaaaaaaagcaaactaagttgatagtcagcagaaggaaggaaataataaaaattaaagcagaaataatcgatgaatttgagactagaaaaacaatagatgagataaacgaaactaagagttggttttatgaaagataaaattgacaaacgtagactaatgaagaaaaacagagaagactcaaatgattaaaattataaatgaaagacatcacaattgatatcacagaaagacaaaagatcatgagagactactataaacaattgtgcacccacaaattgggtaacctagaagaaatggataaattgctagaaacataacctatcaagactgcatcatgaagaaagaaaaccagaatagacaattagtgagaaaggagattgaatcaacaatcaaaaatctcctcaggaagaaaaggccagggtcagatggcttcatcagtaaattctacaagacatttaaagaagaaataacatctgtttttctcaaactcttccaaaaaattgaaggagatggagcacttccaaactccttttacaagagcagcattaccctcacaccaaagccagataagaaaaatataagaaaagaaaattacaggccaatatccccagtgatcacagatgcaaacattctcaacaaaataccagcaaactgaattcaacagcacattaaaaggatcatacaccacgatcaagtgggatttatccctgggatgcaagaatggttcaacatgcaaagcaataaatgtgacacaccatattaacataatgaaggataaaaattatatgatcatctcaacagacacagaaaaagcatttgacaaaatttagcatctttttataaaaaaactctcaacaaattagatgtagaagaaatgtatctcaacataataaagactgtatacaacaagcccacagctaacgtcatactcaaaggtgaaaacctgaaagctttcccccaaaaatcaggaaaaagacaagaatgcccactctcagtgcttctattccagaaagtattagaaatcctagccagagcaattaggcaagagaagaaaataaaatattcagatgagaaaggaacaagttaaattgtctttgtttgcatatgacatgatcttatatatagaaaactctaaaaactactcccccaaaccattagaactaataaataaattcagtaggccagacatggtggctcacaactgtaatcccagtactttggagggctaaggcaggaggattgcttcaggctaggagtttgagacctgcctgggcaacatagtgagaccctcattctcaggaggctaaaaatgggaggatcacttgagcccaggaagtcaagtctgcagtgagccgtgattgtaccactgcactccagcctgggtgacagagtgaccctgtctcaaaaataaataagttaatgtatacaacaaagttgtaggatacaaaatcaacatacaaaaatcagttggatttcaatacactaacaatgtattatctaaaaaataaattaagacacatttataattgcatcaaaaagcataaaatacttaggaataaatttaacaaaggaagtaaaaggtgtgtacactgaaaaatatagacattgatgaaagaaattaaagtagacacaaataaaaggaaagatatcctgtgttcatggattggaagaattaatattgttccaatgtccatactacacaaaatgttttacaggttcattacaatccctatcaaaattccagtgacatttttcacagaaatagaaaatacaatcgtaaaattcaaatggaaccacaaggctgggcacaatagcttatgcctgtaatcccagcactttgggaggctgaggtgggctggtcacctgaggtcaggagttcaagaccagcctggccaacatggtgaaaccccgtctctactaaaaatacaaaaattagccaggcgttgtggtgcacgcctgtagtcccagatactcaggaggctgaggcaggaggatcacttgaatccaggaggcagaggttgcagtgatctaagattatgccatgaactccagcctaggtgatagagcacgactccatctcaaaaaaaaaaaaaaaaatggaaccacaaatgaactcaaatagccaaagcaatctgagaaagaagaacaaaactggagacatcacacttcttgatttcaaattatactacaaagctatagtaatcaaaacagtatggtactggcatcaatgcagacatatagaccaatagtggaacagaacagagagcccagaaataaccccacacatatatggtcaactaattttgacaagggtgtcaagaatatgcaatagggaaaggatagtctcttcagtcaatggtattgagaataagtggtaaccacatccaaagaatgaaattggacctttatcttacaacctatacaaaagttaacccaaaatgtattaagatttaaatgtaagacctgaaactgaaactactagaagaaaacatagggaaaaagcttcttaacattggtcttggtaataattttcttgatgtgacaccagaagcacacaaaagcaaaaataaacagctgggactgtatcaaactaaaaagcttccgcacaataaaggaaacaatcaacagagtgaaaagacaacccacaaaatgggagaaaatacttgcaaaccatgtatctgataaagaattaatatccaatgttcgtctttaacacagaaagaactcatataactcaatagcaaaaacaaaaacaaaacctgcttttcaaaaactggcaaaggacacgaatagacattttattcaaagaaaacctacaagtgggtgacaaatacataaaacggtgctccacattattaataatcggagaaatgcaaatcaaaatcacaatgagatatcaccttgcatctgttaaagtggtgttatcatttaaaaaaaaacacaagaaataacaagtgttggtgagtgtgtggagaaaagagaacccttgcacactgtcagtgggaatgtaaattggtatagccattatggaaaacagtacaaaaaaaagttctattagaaacagagctaacatatgacccagcaatcccacttctaggtatgtatccaaacgaactgaaagcagtatctccaagagatatctgtacccccatgtttattgcagcactgttcacaatagccaagatatggaaacaacctaagtgttcactgacaggccaattaagaaaatgtgatatagatacacagatagatgtagatacagatagatatgcaatggagtattatacagccataaaaaggaggaaatcctgccatttgtgacaatatgggtgaatctggagaacattaggacattatgctacttaagtaagctagacatcaacataaaatattatatgatttttcttcatttggaatctaaaaagtcaaacttaagcagagaatagaacggtcattgtcaggggctgggggagatgttgctcaaagggtcaaactttaaagttggtcaaactttcagttataagatgttaagttggatctaatgtacagcatggtgactatagttaataatactgtattgtttacttgaaatttgctaaaagagtagaccttaagtaccctcaccacacacacaacacacacaatggtaactgtgtgtggtgatggatatgttcattaatgtgattgtggtaatcatacacaatatatatgtacgtaaaatggtcatgtcatatttgtcaaatacatacaattttttttttgaggtggagtctcactctgttgcccagctggggtacagtggcaccatctcagctcactgcaacctgggcctcccaggttcaagcgattctcctgcctcagcctcccgagtagctgggattacaggtgccagccattatgctcagctatttttttttttttttgtatttttagtagagatgcgggtttcactatgttggccaggctggtcttgaactcctgacctcgtgatttgcccgcctcagcctcccaaagtgctagaattaccggcgtgagccactgctccagcctacaatttttatttgtcagttatacctcagtaatgctgaaaaacgcaacaataacaaagccaggtgggatagaaaacaggttagatgacagaatggagatctgcaagcctcacgatgtgatgaatcgatgaactgagaggggatgatcccagctaacacttaggagcctttagcgcactagccattgtgctaagtgctttatgtgctgtgtttcacttaatcctcaccacacttgtgggaagcaaggtgaggcaattattcctatattacggcggggtgatctggtgcttgaagagggtaggtgacttgcccaaagtcacacagccagcaggtgtttgacactgctgtcataagccacactcaacactgtgctgtactaagcaagctgagttgcctgagcttcaatggcattttaaaattatttaaaggactatcacttgggagtaggtgtaggttgctctgagtggtcccaagagaaggaactgggacaaatacttggaagctacaaaacagattgtaactgaatataaggaaaacattctaatgaatagtaagagttgcccaaagatggaaggagctttggtgtgtgaaggtgaaactagctcaatttcccccgagaactgatgtttgccatttttttcctattaaagctagaaatggaccctgcttttcttaatgcttaaaacttacatttgtcttatctgaattcctttttcaggaaaccctccgacttccagataatatcgaggaagtaaaactcacatcaccacatccagataacgagacaccagactcctctccttactcctccataattcctgttttcctaaccaaccatctgcttcccgttgaccaattgttcttccttacccctccttaattcctgttttcctgtgggtagctacactccttccccactatatacaccccaatttaagttggtcgaagatctgagacttatctccacttatctttatttggcagcaccaaagaaagccttcttcccccaaaaatacttgatccagtgattggctttctgtgctgcaagcaacaggacctaaactgaacccctggtgtttcagtaacaaaatattgcattccctacctgtgaattgggggtaatactagcacatgctgcgtaattgttgttttaagtaaataagtgactgtgcagaactcagaacggttcctggtagtcgtagcacagtactttttataagcgtttcttaaatttaaaatgaaaattaatgaacatgttcaagcagacatggggcattgcctgagtcaacgcagaagacaacttctcaggattttccccagttactaccacgtccttcctctaagaacggcctctctttccatcctcaatgaggagagggaaggccatgtttgtagccctgtttgtgcctcatggtctctgcacactaacctcagtttagggtggacacaggaccaagctagactcatcagagtctctctcttggtactgatggtcactgttctgagtttctgttcattgctgcaggtgaggtgagatagactcaggctctgtgcatggagggcagaaaactccagactctgagagaagcatgaatcagatgtgcagagagaagtggagatctcagactacttggtcccagaagagagaagcagcaactgggagaccagctgcttgactgctgagggttctgccatgtctggtccaggccctcccaaggcctggctgcatttcctccctgcctgtgagtgcatgtgtgtaaacacggtagctattttttctttaaaccaatctaaaatgagtttctgttgtttgcaatccacagagatttaactaggatgaacctagatcactgagctgcaaggcaagaactccatgagaggaattccaggtagaaggccaagtaggtgctcaggggagagatttgagaccagaaagtgtcaggcaactcctgtcttcactccctccctctctcaaggctatgtatgcactgttctctatttcctcttttcacggttccatttgtccccctctgctgaacagcttctctctgctatcatccccttccatgtcccctggagctcacctggcttcccagctacacttccctccctgactcaatttgttgagtcagtttgttgagttgatttgctgagtcagtttgtttctcaattctgtttttacattccttggagagagtatctgattggctgtgcttgggccaggcattcattattgattccatccctagtgaacagggggtgtggccacctgggggttggggctgccccttccagggacgtgagcagagcagattccatgaaaggggtatggagaaggaagaatcttagtgcaacagccactcagctgggatgttgtagaggagattcaggcttcaagtggtttcatgacttctaatcttaggaaaggtccttcatttctgttgtaataacaacaacaactagcatttattgaacttctataatgtgtcagatgcccttctaagcacttcacatgcactgacttaacttattcgatgcctgtaaaagtacttagatgggcagtagaggggaggggagggcaacaaaaaacgatgtcactagggtgttgctgtagattggatgtttgtaaccccccaaaattcctatgttgaaacctaatgtgatgatgtttgcagtggagaatttggaagatgattagggcatgaaggtggagccctcatgaatgggattagtgttcttataaaaaagatcccaggccaggcacggtgcctcatgcctgaaatcatagcactttgggaggctgaggcagccagatcataaggtcatgagttcgagaccagcctgaccaacatggtgaaacccagtctctactaaaaatacaaaaattagccaggcgtggtggtgtgcgcctgtaatcccagccactcaggaggctgaggcagaagaatcgtttgaacccaggaggcagaggttgcagtaagcagagattgtgcctctgaactccagcctgggcaacagagcgagactttgtctcaaaaaagaaaagaaaagaaaagaaaaaaatcccagagagctccctaactcctcccacaaggtgaggactcagtgagaagactgctgtctatgaaccaggaagtgggccctcaccagatatcagcgtctgccagcaccatgatcttgaacttctcagccactagaattgtgaggaataaatttctgttgtttagaagcctcccagtctgtggtattctgttacagcagcccagctaagacacaggttatctcattccaacattcaacaaactgacctacgaagtccaatctcaatttgatccactcttactcttaatgatctatcttataaaacagaaacacatcttcctgacattttcatcctcacataaaaattcttctatccattgataaggttttgatgtttaggcttttaaaacaaagatagtttatttctgaaaaaaactgaaaagagaactagaaaaagaagataaatcacaatgcacagtgcaatgaaacttcgtttttaaaaaatagccttattaacatataattgactatacccacttaaaatacacaatttgatgaactttgatcaatgtattcaccagtgaaaccatcaccacaatcaaggtaatgaacacacctatcacctgcaaaagttttcatgtgcttctctgtaatcccttcccttcctactcaaactcatgcctcttgtcacaaggtttctccactctggctgttgggaacgaactattgcctggccaatgcaagctcagaagtttttctgccagcttttttctagtggttgcctctctgtcttgggaagtttcctcacatgcatgtacctggtcgaacttctgctgaagactcagaggaaccctgcacagatctccagagctccctccttccgttgcactctctcctctctggtactctagccaccctggcctccctgaattctcagctctattttccaactcagagtctcttttggttcgcctgtctgcattgcggcttggaaaccctctccaggcagtaagctggagcaagcagcatgttcacttcctttgtctcccttctcttgggccctgcattgcctgttgcccaatgtctgaaaaccattgttccatacatttttttcacagatttttcatttcaggtcacagagtaagtccagtccttgttgctccctcctggctgaagcagatgtcaacacttatttttaaaaaatagaaaatcatttacaacaagctcattgcaaaaaaaaaattcaacaaagtcttataaattataaaagtcagtatttccccttcagtacttgcaactcacagcccagaaataaccactgctcacggtaaacacaacattaaataatttccacttctcccaaaaagacctattgtaaagttgcagatgcaggaaaatctttgatggtgctggagggatttagaaatgaatgcccctgagaaatgctgtcctctcccctgtccacttccctaccacggaacatgtgagctagggctcactctatactgacttctctttcacggtcccaaaggcaggagtgaggtggtcaaagtctctgtgaaggcacataaaatcatgtatgtgaaagtgtttggcaaactttgaaatcatgtacaattcttagttaatattatatattatcatgttatttttaatattaataacttatataacaactagtccttggagggtttgatgataccctcagtcagcattttcatcactagtgaaagtttctcctcataacaatcctgctcaagctctccaaggtctatggcaaaaaataaaaataaaaaataaaaagcattatgttgcttcaaggtcatcttacaatgactgcagttgtgtgggatgagtatgccatatgaggaagaatctccaggccgaagtggtacagtccagacacagcctttagagctaagaggccatttcttttagcctcaaaaatcactcaaatatacccctgcaaaaactttataatttctccctttgatggaatggcaagtaacattgagcttttttctttcttttctattgctaccttttaattttacctcctactctgatctggatctgcaagcaatgggttcctaaatgtcaactctggagataataaacacatagcagagactgatattttcccaccaattatttattctttcaatcctaaaaaatacagacacttaacagtgttctatttacaatgtgcgcatccaggcaaaaatttccggacaggctaaaaagcaagaaaatgcgatccacaatcaggagaaaaatgaatcaacagaaactgattcagaaacaaacaagatgcagatgctgctcacagaagtctagaacgccaaggtgaagcccccactgggttggacattttcttattccttatgtcatttaaagcacaactcccgagattttacgtgatataaccgctagaggcctctctgtcacaggctgtattactcccaggtccccatgttggctgtgttcagattttttgttatatttgtggaaatctgagtgcatgtgacgactgctatttatgggttttgtttttatttttaaagacagggtcttgttctgtcccccaggctggagtacagtggtgtgatcacagctcattgcagtctcgaactcctgggtccaagccatcctcccaactcagcctcaggacttacaggcgagtaccacctcaccaggcttgatttttgtgtttttaaacagactgaacatctttcagtacttcccatccccacccctcccggccctgactccgccaccccaaccccgccccactttgtactacccaagcacatcttgggaacatgatgcggaaagtcagggacgctggaggtgaaggactgatgacgcgctacggtggtcctaggtgcgcgtgccccctctctggagtagtcccgggggtcacgaggatttgaagacaggccctcccttcccactgcccccattcccccgaatgccaagcccctgtgggcaggcgccctgggcaggtgtggttggttgctaaagcctgctgggcccagacatgaaccctgccctagctgggcagcggcgcgggagcaaagttgttctgaggctgccctccccggggcctgctctcccagccctggaggagccggcgcgagacgcgcgggggcggggccgcgcg

SEQ ID NO: 95 - DNA, 63610 bp, Homo sapiens
aaaccttctgctgagccttgtgtcacagtcagtccgcggcgccacaagcctcagtgtttacttctgccgcctgccagccgggcggggaaggggagtacccggccacccctcactttagctcctgcagctttccaaacaaaccagggcgggatgggagtgtcttcttggctgtggaaatcgatcctcctaccttgtcctgaagccacccgccgcctttcctcgtccctcccttcgcggtgattttccggtcccggcgcccggcgagggcgcgcggctggtgtccgccccgcccgaaaggtaggggttcggctgtgctcccgcctggtccccaacgcctcaccctccgggagacccgcagcctcccaccactttgcaccttcctcctcgaatttgggggcggccaccgtgcaactggcgccagccgcggagcaggaggagcttcccgcgactccggaggcgctcggcgcagtcgcccgggattggggctggcgggagcctgagactccgggcagggctgctccctcctctgctcccccgccagatccgcggggaaggaatcgtgcccgcgccgcccctggcccgcgccaccttcctttggtttctgccggcctcgggcttctgcggcccgatgtggcaggcgccgcgagagaggcagcagccggctggagcagcggcccctcaggtctcggagcccggtgcgcctctgcggtcgtcgctcctgggcctcggcgggtcactcttgccggccggcttcgctgcgggtttgcactgcccgggtgagggaaattgggggtgcgggaagaccggtctgggccggggtccgggcggcctggggtctgtgctgccccgaccctccggctttgcagcctctgaggctcagggttgggggtggggacacggagcgctgtttgcccctccacatatcctgccagcaccaaggaggtggcgtgcggaggcgtaaagggaccatgggcgctgggacccgcgagccagccggcgtgcgccgcagccaccgccgagagggcacccggggatcctggagccccagtgaagggcgggagggacgcgcagcctcgcgggtaagcccaggagccgtgggggccgagagaatctgctctgggaccctcttttgtcgaatcgccggcgaggttgtgcaattgggaagccaagaggagtgtccagctcctcgttcactattgttttcttgtaaaagggtctgtacgcgaggagggttgaggggtctggaaggttctggtctcttaccgtataaagtttttcgagaaaccctttttccctccacaatggaactagacctaacaaaacaagctccgaggcagtttaggagaaaggaggacggtgagtaaattgcagtgtttgggctgctgttaattttcaagataagggagaagcaacttgtcattttgaggccgccggctccggagatcccggcaatctcaagcctctttcttgtgtgctgttattttggcttaaaagaaaacctataaaaagcgacgcccagaaaccaaaaacaaacccaaagcaccttcttttaggatttttcagtagcgagggttggcggggacagtggggaggagcaggagggggagaagaggttgctgttgaaaggtaatgtttaaaaacagtgtgtgggggtagggatgaaaataacgtggtgactgctagtgtatcagaaatcacaccgagtctaaagtcgtaagtcccatttgccttacgaggaccagctgggtgctgtgagtaggtggatagttaaggaaactgtagatctgctgaaagctcctcgtggtctgtggtctcgtgtccacgctgacctttgaacctcgtaactcttcgggtctccagcggccacctcttttaggctagcccgaatgtttgactttccggtcctcaatcttcctcacctagctgcagaccataaaactgtctttttatttacagggagatgttaaatatttgggaacatctgctcaggctgccaggttattttccgtttgaaagcatgccgatttgacatttgcaagttggtttatgttgcttcctttttgtttcactaagaacgcttttcataccaagatctgcgaaaaacgatgcccttagactgttatttagtttattgtctctgagtaaggccaaattccacagagggtctttggataatggcaactttgcttataagaagataatttttctagaaagtgttgcattggtctggtttcctaagctgttcttgtggtcatgtagactgggaggggagatcttcattccttgtgatgtcgctttccttgaattgtatttttactatagttccacaatgtctcagtcccagattgcaccatatgttgtttacatggtgcagtaaaatgggactgcaattttgactacatttcagtagatttgttggagatagtttgttcttatgccctatatcaataataataataaaaaacctttgaggctcaagaatagacagtattgacagaataataccattaagagacataccatttaaaaacattagtctgtctcctgtgaaattgtaaatcgtaggtgttctcattcagtggcagacgactggatttcacagcagttttcttctgttggagacatttctgtgttccacatcatgtggaaccttatgggagaagacgtgagtaatgccatgtttcccgcatttccctgataagcatcatctgctaaccatgcagactgccagatggcttccatggaaattgtgcttccatccaggagtggtgaccagagatctgtttagtatgcattttaggtgatgcttattgagaaggtgaaggaagcatggaactcctatttggcacccactctgatttttggtgtgttctcatatgctattttatttaatcttcctgacaaaactcctgcaagaaaggaatttttagccccattttatagcttaaaaaaccaagattgccttaggttgagttgcagtggctcacataaaggtttgactctacctctgcctacaccatcccaggaatcctctgcagtatacattctgcacaaattcttccatttcctgtgcatatctttctcctttgcctggcatatcctccatttatatataccttggtctgaatatgcctttctagttatccccaggctgggctttttgaataggtggtctgcgtactttgccttccttgtgacagctttagactttcaccagccaggaaccttctatcttctgcacatctctgatgtgtcacttaggtgatcagggtctggcgaaatctaggagtttatgctgtcttcaatgggcatattccaaaagttctttcctttctgaatacattttcactgaagctcctactcaagctatatgttacctggaagaggttttcccagggttacatccccaccctcacagttgaaatgaaacattctctcctgtctgtcccaactgtgatggataatagcacacatcacacatcacagtttccaatttaacccttaggggttaaaatggattttgatttggagtgagcttgatgcatggaatagaatgtatacattggatattatagtgttttggtaggaaattttatttacaattccatatcaggatgtcagaaacacaattccctcaccattgtgggatagctggagttctttcccctgatggtgacacctcagcactgaatcagctgcagtgtctcagacttggtcaggaacttgactgtcgtataatcaggctaagaagtgctgagattctggcagtgaggttatgaaagtaaaagataacaggatcagtaagacctggttttcttccttgtgcccatgtttgtttttcttggagagcttttggtcatctaggaggattgtccagtttacctttttactgccacaaacttttgtatctgaccaggggccttcctcttcctgcaccattgagatagagggaaaggaaagcacctagcccttaggagattttcttaaaaacattggaaagctgagtgaaaagttatcttctcccccattctctctttccccttcttatatgcttagcctaagacaaagtatacagatagcatcattgcatactttgcaatgtatttagtgctaggctttgaaagatggtttaaacattgatttactttttatttggttgggaatggaaagatctttaggacatgatgagaacaaggcccccagaagaggagacggcaaggaagctggagattcctccagaggtgggagggttattctcaccttccacaggttgtggaagcaggcctggagttgttatggctgtgggtcagagtcactatgctgaaagatgggggcaacaagggagcagaaagtgtttttttcagtggactttgggtgatattccatgtggtcatccatgagatgggacttccctaatggtcaaccaacattcactgaatgtccaccatgtaacaagagatgttcttgtgggtggggttgggagcgtgccgtgttggacacagcaaagcccctgctcttacagagcttatgttttatggggggcagagtcaaaaaatgagttacaaatacatgaggcatgagtgaatttgggtcgtttgagaaacagaaggtgcagtgtgagaagagagtggttaagacaatatgtagttaaagaagagtgcaaaagacggagtgggaggagatgtagtcagtaagataggaaggcagattttgtggagtttgaatcgtattctagttagaattggcatgcctggagatttttgatgagagcctaattcagtcttcacccagtcatgataggctttcctgtctcttctttttctttctttttgaggtggagtcttgctctgtcacccaggctggagtgcagtggctcgatctccgctcactaaaacctctgcctcctgaatttaagtgattctcctgtctcagcctcccaagtagctgggattacaggcatgcaccaccacacctggctattttctgtattttttttgtagagatggggtttcgccatgttggccaagctggtcttgaactcctgaattcaggtgatccgcccacttcggcctcctaaagtgttgggattacaggcgtgagccaccacacgcggccccttcctgtctctctgtctctctttctctctctcacacacataaacacacaaatttctacccttagttgcctttttttctttctactaatttaccataactgatttcccctctcttttccctagggcagagcacaggaatatcacaaagacaggcagagctcagagacgcctatacagtattccttttatcctcttgtcctttgatttcaagatgtctcatcatcaccactctattagtatctagggagacttggcacaatttttagatagaaaattatttttgagattctttggcccattgttaactcacatacttaactaacatacaaaacaactaaattatggcttttctgattaacacagtggcataaaacctgaaacctcaggagacctatctcacattcaatgatatccaaaggctgaaagtaaagggatggagaaaagtctggcaagcaaatggaaaacagaaaaaagcaggggttgctattctaattttagacaaaacagactttaaaccaacaaaaaccacaaaagacaaagatagtgatatggtttggatctgtgcccccacccaaatctcatattcaattgtaatcctcagtgttggaggtggggcctgatgggaggtgattggatatggggggcagtttctaatcgtttaacaccatccccctgggtgctgttcttctgatactgagtgagttcttacaagatctggttgtttagcctccccccgccctccccccacccccgcctttcctcctactccaattatgtaagatgtgcctgcttccccttcaccttttgccaggagacttctgtgagtttcctgaggcctcccagtcatgctttccgtacagcctgaagaaccgtgagccaattaaacctctttgctttttatattacctagtctcaggtatttctttctttcttttttttttggatagggtctcactctgttgaacaagctgaaatgcagtggcacaatcattcttcactgcagcctcagcctcatgggcacaagcaatcttaccatctcagcctcctaggtagctgggactgcagatacacaccgccacacccggctgattttttaaaaaattatttgtagagacggggtctcactgagttgcccagtctagtcttgaacttctgggctcaagcaatcctcctgcctcggcctcccaaagtgtcgggattacaggcataagccactgtgcccaaactcaggtatttctttatagcagtgtgagaatgaactaatacagatgggcaatacataatgataaagggttcaattcaacaggaagacctaactatccaaaatatatatgcagccaacacaggagcacccagattcacaaggtaagacctatgaagagacttagatttccacacaataacagtgggagactttaacaccccactggcagtattagacagataatcaaggccaaaaactaacaaagatattcaggacctgaacttgacagaatgtacctaatagacatctacagaactctccaccacaaaatgacagaatatacattcttctcatctgcacatggcacatactctaaaaccaaccacacaaatggatataaaacaatcctcagcaaattcaaaaaaaccaaaatcataccaaccacactcttagaccacaatgcaataaaaatagaaatcaatactaagaaaataactcaaaaccatacaattatatgaaaattaaagaacttgctcctgaatgactttttggaaaacagtgaaattaaggcagaaatcagttctctgaaactaatcagaacaaagatacagtataccagatctctgggacacagctaaagcactgctaagagggaagtttatagtgccaaatgcctacatcaaaaattcaaaaagatcccaaattaacaacctaacatcacatctagagaaactagaggaacaagagctaaccaagcctaaagctagcagaagatgagaaataaccagtagtagacttgacttgaaggaaattgagacagaaaacaaacaaacaaaaaaaaaaccccaaaaaaacccatgcaaaatgccatataaacacagacctcttgtctttgagctgattctatgaaatcacctttcccataccattagattttagtcttaagaggtatcagcctgttgcttctgacctcttagtggggttttcagcttaggaaatattccattacaaatatttaggcaggaaacctagaaggaagtctcaaatgcttttattaaaatcttatgcaactttaatatgtaagagtccttaatgtattaaggggtggaggaagcagatatagggaatgtgtacattttctatggttagcatagggccaaagaataaaaggagattgtagattttatttttttaattctgtcttttttgtggataactcattgcatttaaaaactgtaagatgggttaagcagttgcatttagatgagagcagtgaggtgatagataatccaggcattcaaatagggtacaaatgaatttttcaactacattttagaacagcaattaaatgtaatttataatcttatttaattgataggttgtggtaattaaaggagctttctgttgtaagtgatcttgtgagataaaggacattgctgtcaaaatatttttaatatttaaagccaatatttcaggtagatgtcgaagtgatttagctaattattattcttttatcccagatatgctacaattaaatgataaataattggattttttgataaacgggatgtaaggagatatgtgtgttttctgatcaccaagtaactataaatattttgcacacactgaattttttggagggcaaatctggctctcttattgcaaaacacttttttttttttttttttttttacaaatttgatgtgtatggttcttctgctttagtcatagaataaaaaatcatattcttacaaaaatcttatattcaagctctctatgaccatcaatgattttcattattttttttctgcttaaaaatccagagaatttctctcactgatttttgaggttttctgccatcttatgttgctaactttctttttattgtcctgtttgacgctgtagccacgcaggtctcctagtgcttcagctcaggctgttctttgacactcagtgccattctccttctcctccacactctcccatctaagccagattataacgtgttcagtttccagcttcataacttatcactgcatgactccgaacaaatagcctaacttctctgagccttactttccttatctataaatttgaaataatatccacatcacagtaattgtgataatgaaaaaaacacatacaaatatttgagcatagtttctgccaaatatcaaatatttaatcagtgttatctgccactattactattataactctgtttttatagctattatgacaattctattcttcctcaattagttaaaaattgactttccccagaaaccctttctgattgttcttatatacctctaattttttctcagatctgtttcctcttagcacctggcttccctttggactatgttaatctacctatgttattatatttctttcatcattcttcagcgaacagcaacaaatactttgcatctatcatatgccaagtactctgctattataaagggatccatgggcatatagtagagggattcagtgtgtgtgtgtgtgtgtgtgtgtgtgtgtgtgcatgcatgtatgtacatatgctttcaagtggagttagggagagaaaatctgtaggttgaatagagctatgaatttttcagaataaactaggcttaaggagcaaaaaccgttctctccgaatgttcttgaaatctgagattttttttttttatggttcaaaacatagaaacactgtagttatctctgatcttgaaacagctttacatatgctttcttggactcctatgtcatcatccagatgcagggtagagatagaaagggaagtcctccttgaagaacagaatcctaacagattattccaatttatattggggagtgggaatgttgtgggaggggaattggggggcagggtgagaggagagggagaacattccgggcagcaggaacagtatgaccaaaggcgctgagacatgaaactgccaagaaggattgagaagtgcacaaagtttggtgttactagagtcaagcatttcaggagatgagtcaagagtcaagcatttcaggagataaggcaggacaggccgtaggagccagctggatcagacttagaggcctatggcttatatatttatatctctctataaggcacttagggaggtaggtctatataaacaatttataacaggtaaattctacatgttgcttctaaatttggacttggggcttacaatatggcatgtaatacattccttccaattgctgttgtcaccagaatatgatgaaaacattagttaagttaatatataattgatatttagcactctcacttttaataacttgagtgaaggatagaaatgtgaagtgtcatttgtgacttttgaggtgggggattctgtatgaagtttgatagtagagatgggatttgacgggattgagacatccaatgagaagagtcaagaggatcactacaaatgtgtggcctcgaacctttcagtaccttcttcatatattttacacagtagaaagccaagtgctttctattcacagcttcattttacacaattatgtgtatgacaatgtacaaatacattttcatcaatatttggtttgtatttctttgttggcattgcaattaagttttgacttccttcccctctccactcctttgatttgatatatcaatgtgttattcatagcttatgcaatacctgatgttaatatttagctctaaaaaattttacatttttactccaaaaatatgttttctaagtttgagtgttgtccagtagattttaactctgtctttttgtggtgtttcctcttccttggaaattaagcattaggacccaaaacaccctaaccgcaagagcttaaaattcccagagaagaattagatgtgaaagaaacaactctataacttacttgaactttaattagcctgaaagtggaatgtcagggagaggtctgcaaggaggctaggaaaacagagcaaagcagaatatcagcatatttgcagcactgtgcaggggagatcatacccttattgaggggtccatgcttaccaaacaactttttaattatcactcatggatttgcctatagaagttgccaatctactgattcaaatatacagacttcttggcccttatatttttctttttctttctttctttttttttttttttctttttgagatggagttttgctcttgttgcccaggcaagagtgcagtggcgcaatcttggcttacagcaacctccgcctcctgggttaagcgattctcctgcctcagccttccaagtagctgggataccaggcatgtaccaccacacctggctaatttttttgtatttttagtagagacggggtttgtccatgttggtcaggctggtctcaaactcccgacctcaggtgatctgcccgactcagcctcccaaagtgctgggattacaggcataagccaccatgccaggctcttttttttttttttttttttttttctgagacaaggtcttgctctgtcgcccaggctggaatatcgtggtgcaatcttggctcactgcaacctctgcttcccagctcaagcgatcctccagccttagcctctggagtagctaggaacacagatgtgagccactatgcctggctcatttttgtgtgtgtgtgtgtatttttcctggagatggggtttcaccatgttgcccaggctgttctccaactcctgagctcagagcgatccatcaaccttggcctcgcaaagtgctaggattacaggcgtgagccactgtgcctggcccaattttttttttttatttaaatgaattacttcagcatttccagttataaagcagcctcttaagaattctgcttctcaggtgaacagacaactcaagtgtctgaacccgcagggctgagctgccaactcctggctgtgtaactcctcccagataatgcccctccctgaggtcctagctgggcttccaagacccctatttcttggatagctccatcttctctaatgttttgtaaagtttttatggaaatatatcagacatacagaggagtgcacaaagcatataagtatagttcaataaatttccttacagtgaatgcacccaggcaagctgcctccagatgaagaaataggacaatacaggccctccagaagggtaccatgtgttcccacccagtcactattactactcacatgtaaccactactctgacttttgccaccatagattaattctttcctgtttctctttcacattaattagcgcctggtattctgaatgacctaggatattaggatccgtctggctgagggtgagccttgggcaccccaacgagggtgtaattggttcagttgtgcccccctcccccccccgctccaagagatatttagaagtcctaatccccagtacctcagattgtgaccttatttggaaatagagtcatggcagatgtaattagttaagatgaggtcacactggagtagggtgggtccctaatgcaatatgattagtgtccaggtgaagacagaaacacgggaaaacaccacgtgaagacagagaattgtagtgatgcatccacaagccaaggaatgcccaagattggtggcagagccaaagctaggaagaggcaaggaaagattcctctctacagttttcagagggagcatggccctgctaacaccttgatttcagacttctggcctccagaactgtgagacagtaaatatcggttgttctaagctacccagtatgtggcactttgtttcagcagtcctaggcactaatacagaggttctgccatggtactgatccctcttctctgcatcccctgagtacacttggttcttggtcttgaagatggtccaactgagtagtggctacaccctgtccaagctgtggctctctaaactgactcaaaaactgcctctcttgcttctgcttactccctgtctgtgatgtgccctgggggcagacaagtttcattatcattatattggtttttcttcatttcttgactctgctctttactacactttgagattgagccagtttgcttcctgacatgctccaggttgagccttgcagacctgcccttctgcaccttgcctgggtctctgctgaagtgttcttattcatcctcctagaccagattggggccacacctctggtgtccagtttttcccagttcctttggccccaaaaatatctttgataggaaaaaaaaaaatcagctcactttattttttaaatgaaatcctgattttccaaatagtgtggcatgttgtaaataaaggcttcattatgctgaactttggcatgtcaaagattccttcttctttgataaaatagaaaagccctcagtttaaaaagcagcccaacaattagactttggttagtaatagggaaccatgcagagcatactagacatgggatgttccttactcattgaaagatcgtctttaaactgccttacaacttttttttttttaaattttatttatttatttattttttgagatggagtcttgctctgtcacccaggctggggtgtagtggtgtgatctcagctcactgcaacctctgcctctgggtttcaagcgattctcctgcctcagcctcctgagtagctgggattacaggcacttgccatcaagcctagctaatttttgtatttttagtagagacggggtttcaccatgttggtcaggttggtctcaaactcctgacctcaggtgatccaccccccttgacctcccaaagtcctaggattacaggcgtgagccactgcgcctgtgaacttatctgttttttattttgggctgagtttctggtgttaggggaatcacaaggacagtactgttgtgaagtccccagagtgactctctaggctcaggccagttcctgtgttcttgctttgggacctagggactctgctggtggcatttcttttaaatcctcttagcacagactgtcctttggtctttaatgtcctcagcctagagtggatgtacattcttcaactgtccctttcttttctgttcagaagcagtggaatattgctagcaactatgggaaagtcttcaagacatttttaaaaatcaccaactttcagaagtttaggtaatcctagttttggtttctggtctatttgacattcttaattctcttgttaagcctctttcagcttctagctcctgttgtttatactgggaagtattttgcccttggaggagggagttttaggctaattatatattatatataatgcacattttatgtaattgaaaaaatataaaacagtacactttgtagttcagaggtcagggatagagcaaggggttatgtgtatgttatgttttattgtctgtgtttaaatgtgtgactacatgggcttgcctttagtacatccatactctctcggctcagacagtccttacaccctgagatttcatggcatgtgatagatgggtataattatctgtgatggatggttggatggatagatggatgagataggttggttggatagatggatggatgagatgggctgagatggatggatacatggatatatggatagatgaacaaatgatagggctgctccatctgcttggtcggttttctcactaaactattatgctagtgatatgaatttcagttgatttcaggggtgcctcctgaagcttggaagcgttttcctaagcccaggaggatttcttaagcttcagagatctagaactgataactccttagcttggctatggaatgtactaaaatattgttctagtaggttgtgaaagtgaggccaaacagactccattgtaaccctcagtgtactggggtgacgtttttcattgggagcccagatttttttttttaatttaccttcttggggattgcgtacacttctgtagaagatacttttcttctcccctctgccccagaagagaaatgccctttgaattttgtattgtattttctagactgggttgttttataatgtgaataatgtcgtcagtaaatagttatccatcttttgaaagatctaccttttaatgttttctcagattcttctttatagaaaataacgttaacagtgaaagaattccatacatgagtcttcacatttttgtcagtgaaaacaaaattatttttttaatttttaaaaattatgcaatattatttattttattttaatttccttattgttacatattatatgtatgtattttgggggcacatgttatagtttgatacattcatataatcacatcaggataattaggatatttgagtcttcacatatttgttaactagatttcagtttacacttgataataaaccttgttacaatgtctttgaggtaacatttgccgttcatgtaagtagatcattgtttatagtcacatcatttataagtctaaccacttcaagactaaagaccaggctcgttcatgctctgtttaatagtcccctttatcagacattgtctatggtatgtggtaggcacttcacagtcccttgattctaaaaacaatgtggtaaccttcctgtaaggttgtgccttggattattttctggccagaacacagaacaaagcattccagagaaaccttggtttgtttatctactttcttcaatgcgctcattttttcagccccgtcagtatggttatcaggaagagaaattggttataagaagactattttctgcatctactttctcttcaatatgttttgttttcaacagcgttattatagattcacataaactggaaatctttttctgttttatttcctttttcagagattcatagtgttttaaatatctaggtatcttcggatgacttgagctaccaaaggtttatgttacatgacttaaactaccaaaaacatgtttatgttttagaaaaaaattctatttaaaaatgaaacgacaattctaaagtatttctagcaatttgtacgattcactagcttagtaaactgtttttaccagattggcaaaaagtgatttggctccaaaatgacatttagataatcaagtctctgaaaacaacctaatttctactccaaggaatgtacaaatttgtgatgtatttgtttgatagaatagagcatttaaaaagaatgaaccagatctttaggcaccatatggatagacctaaaaattaaaaatatagagtgataaacacaaatttcagaatattatgtatttgctattcaaatgttaacactgaaaacaatatcatatactctataatgtttatgaatatgtatgtgtgggtatgtgtttttgtgtgtatatataaaaaggggactgactatgtatcaaatccatgatactgggaggagaggaatgggggtagggaagggaccataaatctagtttaaaaatatctttcagaagagatggttatttttggtaatgagctcatgggcatttattaaattaacatttggacctctattaatgtttttgtgataaatatgcataatatttcctaatgaaatagatcacaactaggagccatacatttatcaagattctgggaatgagactgaagctattgttaggcacacctaatatttcatgatgtcattctgtgcaaattgaaaattaacagaatgaattttgaacatgaggaaagcttcaagttgatctcactcttgggaagcttacaggttgggaataaggaccctggcagcaaactgcctaagagcaaaccagccttgataccttttagcttaagaccttgggcaagtcatttaacttctctaggtctcagtctccttttctgtagagtcagaatagtagtgcacatctccatctcagtgctattgtggggattatatgagtttgtgcctgtgaaacctggaatgtagtaagtgtgcaaaaaagattagctattattttcttttcttatttgtatttatttatttttttgagacagagtcttgctctttctcccacgctggagtgcagtggtgagatctcagctcactgcaacctccgcctccgggtttaagcgtttctcttgcctcagcctccctagtagctggaattacaggcgcctgccaccatgcctggctaattttttgtatttttcgtagagacggggttttgccatgttggccaggctggtctcgaactcctgacctcaggtgatctgcccgccttggcctcccaaagtgctgggattacaggtgtgagccaccgcgcctggcctgcgctattattattttcatcactgcccctgctatctgcagcctcggttctttgagtgtaccattttcattctcacctcagaatctttgcaaatgcttcttcctctgcctggaatgttctttctttctaccctgttttatctgattaactcctcttcatccttcagagacacttcctgtccttccctatctggatcagtccctagtcaccctacaattggaacttgatgattacttgtgaactacttgttaatttctgcctttcttgatgaactgtaaactgtttttcttcttcgctgctgtatctccaaagcctaaaacagtgtccagcacagagtagtcagtgagaaattctttattgaagaaatcaacaaagttaccctagaaagtgaaaacattcagagttaaatttagcaagaaatgattttgaaattcactttgccttaaggatcaatccactggttttaggaaataaatctaggattgtttcatttcataaaaaaatctatcatatgtattgatttatttgtaataataaattataagttgccctaaattaagattcacctcatatttgtaacttagctctaggaaatcatctgattgatagtggtatatgtgttgtcacattttcatttgctgtggagagcaggacagtttcaacacgggaattttaaggtttggtatatgctcatctgattgttcacccttaagctaactcatttctttcttttaaaaatagcagaaaaggtaagggaaaaaaatcagattggagaggatatttcctaagggccagaataatccaggcttattcagaataaattggcataataagtatttgaaaacagaactttcaaatatcagatgaaatgttatttataacttttaagcaaactaaaacagtaaactctttggaagggggacttttagaatcaggaaagacagaaacttgttcccccttagttgtagttttatttaccctgggagaaaaacataagaatgctttcaagtgtaaggaagggctgtgtattcagatatcagcatactgctccaagaaagacatcagagagttttgaactgattgaaagcccaaatctattggatcagttgaggagcagagcaaaatatgaccaagcaataaacgagtaccttcaaagcttttaagaaattcttatagtttgtataggtggttgggaggtgaaattccagggctaggaatataatgtaaagccctacaatgaaaaagaagactgcaaattgtggccttaggggactttccctgccccgttcagagacacatgatttttttttaacagaaatccctggaaaaattactttagagccatgttttcttgcattctgcattttcattaatggtagtatactgaaatcacaaattcattcattcttttcttcatcagagcacatttacttagttttaagtactttccaagctcagaataaggtcaccattcttctatggaagtgaaacatctcttctttagaattgtgcaaaattaattactggttggggtatgaccttgggggtataggatataacatgtttttggacatttgaatgtgtggactcacaaaactctgctaataaccacttaacctatttattaatcatctgcctcaaaatcagggctgaagacttttgaaataatgtagttagaagactctgtacagtgaccatactttgggaaaccctggtttaagtaacattcgaatgttcctgttcaccctaaattcttgccactcaaagcaggggcttcagactagcagcactggcattcttttttttttttttgcatgatttgggagcttgctggaaatgcagataaccaggccctgccctagacatgctgaatcagaatgagcaacttaacaggatgctcaggtgatgccaatggctattaaagtttgttaagcactgctctgcccactcctgccaaatggactttagaacatactagtaatgtgtgacccactttccaagaatgcatcctgtattaggcagtccaaatattagcaaggtcttcctagtactgagctcaaacttaactccttgaattttgcattcactggccttggcataactgcttggtagccatcagaaccaagtaaaatcctcttcatgaaggaccttcaagcctgtgactaggctgtcttgtttccttccttgatttaagcttccccaggtgtaactaaatccctgtttcccccagtatgacagtgcttgaggtttctttaccaacttatccagactaaataatctttttttttttttttgagatggagtctcgctctgttgcccaggctgaaattcagtgacatgatcttggctcactggagcctctgcctcccaggttcaaggaattctccctgcctcagcctcccgagtagttgggattacaggtgtgagccactgcgctcgtcccagactgaataatcttaaaggacccttccaactttaaaattgtgatggattctttagtaataagtaatagtggatagaagatgatggaaactcaggaactatactttctatacatttaaggagagaataatcctgaggcacaaatatatcatgatccataatttctttaggttcaaaattctgtctcatggtgaagacttctctaatagtaggcattaaacagcactcctttgcttttctcttgatttctaaatgggtttgctacttaacacttcaaaagtgaaatgtatatagagatatatgaaaataagcactttcagtttctttgaaaattgaaacatttatgtacttaaaaaaattctctgtaatctacaattcagcacatcagctgattttgtttttctttaatgcctttcagtacagtacattctcatttaatgtcattaataggtttttggaaactacaaccttaagcaaaacatttttgttcattgtcattttattattgatgaaaaaaattggttttgatgtaccttactttgctgaaagtcatagtttccaagaacttatgaacaataagtgaggatttactataaggtgttacatatgcatatgtctaacaaatggaaataatcttcatgtagtcaacttttaaaaactttctttggtaaaatctattttttatgttactatatgattttcataatcaagcataattatttccctgtttaagggcattagagttcataaatggcctatgaaataaaatatttgccaattttaaggtatttgttttctaagaattttttaaaataaatatattctaacagagaccatagcagcagaaaaaccccaccttcatcctcttaaggtcccagctgggtccaagaattaaattgacataagttagattaacaggagaaaagcatgcacattaattttacaagttttatgtggcatgggagccctcataaagaagtaaagacgcaaagaagcagttagagccagttacgggcatggctcattttattgtatttcatagatattgtgctttttacacattgaaggtttgtggccaccctttgtccaataagcctattggtaccattttcccacagtatgtactcacttcttaccattgtgttacatcttggtaatcttaatatttcagattttttcattattattatatctgttatggtgatctatgatcactgatctttttataaaatatatatttttttctttctttttaaattttatttatttattttatttttttgagacggagtcttgctgtgttgcccaggctggagcgcagtgacgccatcttggctcactgcaacctccgcctcctgggttcatgccattctcctgcctcagcctcgcgagtagctgggactacaggcacccgccaccatgcctggctaattttttgtatttttagtagagacggggtttcaccgtgttagccaggatggtctcgatctcctgacctcgtgatctgcccgcctcggcctcccaaagtgctgggattacaggcgtgagccaccgcgcccagctgatcactgatctttgatgttactattgtaattgttttgggacaccacaaactacaccactataagacagtcagcgtaatctataaatgtttatgtgttctgaatggaccaccgaccagttttttccctgtttttcttcctccccttgggcttccgtattctctgagacacaacaatattgaaattagtccaattaataatcctccaatagcctctaagtattcaagtgaaaggatgagttgtatatctctcactttaaatcaaacgctagtaatgattaagcttagtgaggaaagcctgttgaaagccaatacagaccagaaactatgcctcttgagatagttaaccaagttgtgaatgcataggaaaagttcttattacaagtgcttctccagtgaatacacaaatggtaaagtgaaagccttattgctgatatatagagagtattagtggtctgaatagaacatcaaacaagccacaaaattttcttgagccaaagcctgatcccaaacaaggctctaactcttttccatgaagactaagggaacctgcagaagaaaagttgtaagtcatgaggtttaaggaaagaaactctccataacacaaaagtgcaaggtgaagaagcaagtgttaaagaagaggctgcaacaagttatccagatctagctaagataaatgatgaaggtggctacactgaacagtagattttcattgtagacagacagtcttctagtggaagaagatggcttctgggacttttatagctagagagaagtcaatgcctggcttcaaagcttcaaagggctggctcaccctcttgttaggggctaatgcagctgttgacttttaagttgaagccagtactcatttaccattccgaaaatcctacaacccttacaaattatgctaaatcagccaagtgcggtagcttacgcctgtaatcccagcatttgggaggccaaggcaggaggatcacttgagcacaggagtttgaggccagcctgggaatcatagggagaacccatctattaaaaaataattgtcctaaatctactcatcctgtgtgctataaaggaacagcatggtttactgaatagtttaagccagttattgagacctgctgcttagaagaaaaagattgttttcaaaatattattgctctacagtgcacctaattacccaagagctctggtggtgttgtatgaggagtttaatgttgttttcatgcctgctaaaacaacgtctattctgcagtctctgaatcaaggaataatttcaacattcaagtcttattatttaagaaatatagtttgtaaagctctaggtgtcacatagatagtgtgtctaggggtcacatagatagtgacccctctgatggatgtgggtaaagtaaattcaaagccttctggaaagaattcaccattctatatgccattaagaacgtttgtgatttatgggaggtcaaaatatccactttaacagaagtttggaagaagttgattacaactctcagggatgactttgagggcttccagattgtagtggaggaagaaactgcagattgatgggaatagcaagagaactagaattagcagtagagcctgaagaagtgactgaattgttacaaactcataataaaactttaatgaatgaggattgcttcttatgcaggagcaaagaaagtgattccttgagatgaaatcagctcctagtgagaatgctctgaactttgttgaaatgacaacaaagggttaggaatagtagataaatttagttgataaaacagtggcagggttcgagaggattgactgtaattttgaaagaagttctgtggctaaaatgctatcaaagagcattacatggtacggagaaatattttgtgaagggaaatgtcagttgacacagcaaacgtcattgttttattttaagacattgtcacagccaccccaacctttagcaaccaccagcctgataagttagtagccataagcactgagtcaagatcatccactagcaaaaagattataactcagtgaaggctcatatgatcaatcattagcatttttagcagtaaaatattttaaaattaagatatgcacattggtttttagacacaatgctattactgcacacttatagactgttgtataaacataacttacatccattgggaaactgaaaaatttgtgacttgctttattgtgatatttgctttattgcagtggtgtggaactgaacatgcaatatctcttcagtgtgtctgaatttattttttatttatttgtttattttttttgagacggagtctcgctctgtcgcccagcctggagtgcagtggcacaatctcggttcactgcaacctccacctcccggttcaagcgattctcctgcctcagcttcctgggtagctgggactacaggtgcctgccaccgcgcctgactgattttttgtctttttagtagagactgggtttcaccatgttagccaggatggtcttgatctcctgacctcgtgatccacctgcctcagcctcccacagtgctgggattacaggtgtgagccaccgcgcccggcctgaacttatatactagattgaacataataaactgtgaaaatgcagctaaattgtgtggggaggcttaaaagataagagttatttcaacaagctctgtctcaacatcttgtctttgaagataaggatgttgccattttttctagtataaagagggtatcttccatgtgggaatttcattttctgcttttaagaaacagcacaagggttaatgagatattcatgcagctgctatttttcaagtgcctttaacttaaataggcaaaataccggaatattaataccataataatggacttaaaatactccataaaccatgctgttcttttatagcacacaggcagagtagatttagcataattgtttttaacgtcctaaagagcatgcattttgtgtgtgcgtgtctgtgtgtgtgtgttagtcttgtgtaaaaatagctgtagcaagagaggtttgagatttttttcatttttttttttttagaaagtagcccacggcacatttttaaactagttgttctaatacttcacccacacttctttttccctcactttcttctagatatttttattcttcttgatctcctcctcattctcctctctccttctgtcccttcctcttctaatgattttcagagaaatagatacttctctcacctcacctctgcatttcaaaataaagctgcgtgtatgtgtggagagaagctggaaaagaagacagatggttctttcattaccaggttacttgggattaattgagctgggtatgttattatttttaaggagactgagctgggtcctttggaaagccagttctgaaaggcaggcaataatgtaatatgtactgttggattttttgttttgtttttgtgtttggtaatttcatcatcctggaaaacattttttaggagatcagaagtgagtttactaaaatggcgttttccttaaagttttaaaaatgactttacatttttctggggcagctgaaccattcttagaaacatactatctttatgttttatttcagcatttgcaagtgaggaagcagcacaaccctgggttttagataatttctaacagagaggccccagcaattcagcaggcagcgtcctgagtctttggcagcctggtccctctttcgcaaattctccacctttgcgaacagagggtctttaggacacagattcttaaaagtgcaggtaagcaaaggcaacaccaccattgtctcaaattgcttaaatgtaaacttgagcacttgtaatgttcttatacaatgcttctcttgtgggtgatgttaaaatcccctcttctatgaatacaggtgcctgctatttttttctcttactagttttgcagcctgggggcctataagactgctaatgtaacccatgacccttcagcatatcccacagttgagctatgagagtcttaaatattatttttattctcagttgaatgggccttctttgggactcttcttaaccaatacataagtgaggagtaagaaaactcttaaaattagaacattatatgcatcacaaatattatagaaattctactgttaaccagctttatattgggcaagagggtttccctctttgggccttgttttctcaatagaattaattccagttctctgtctttaagtgcaacaattaatgatagtttcattaaagtaccttctaattttttaggctgatttttcttactttttttggaatcctatgcacagatttcagacatcaatgtataactttattctgaaaaaagatctagagttcagatgtctaccaggaatgaactacatgttttacccatgaatatatgcaggcactcaatgatttattaaggttcatcagagaatgattattctagcaaatttgtttggagatctttttgggaaagacacttattgactgataacattatgctttagtagtgctggccaatatggacactcataatggtcttgtgatttagtcctagggaacctcttaagctcttgcttgttcctattgagattgctcatgagggtttcaaagtccttccccagcgtggtccttagccactggacttgcagaactcttgaggacctgaatcaaggctggaggtagggctggatcctcaggttttactgccagcaacacctcaatttagtggaatctggactgtaatcatcttggtgatttgtaaagctgtttttcttgtcaatctttaccatttctggcatcaaaaagatggaagtattttgagagtctttgtgatgctcctggactctagtacgtgcttgggttcaagtcccagctctgtcacttttgatttgggtatcccgggggaagttataacttctctgtgctttggtgtctttatctgtatgatagggatgacgataaagcctttcgtaaaggttggttttgaggattaaaataagtctatgtctaaagcatttaaaactgttctatcacataagcgtttagttaattttaactgcttttttttcttttttttttttgagacggagtcttgctctgttgcccaggctggagtgcagtggcacgattttggctcactgcaacctctgcctcccgggttcaagcaattctcctgcctcagcttcccaagtagcttgggactacaggcgtgcaccaccacgtctagctaatttttgtattatttagtagagcggggtttcactatatgttggccaggctggtctcgagctcctgacctctagtgacccacctgccttggcctcccaaagtgctgggattacaggcttgagccaccgtgcccggtcctaattttaactttttattggcacctgtcatacagtgtttattcttctgtccttattctctagcctagggtgagaaaaattccagtctttatccttaccttgttaaacattgctagagtcaccatggtatttgcttcaacacctaggacacaatatctgaatccttctcaacattataatggatccaaatgagaatgaaacctatttcatgaaacctatttgccaactcagattgtttatagagttcttgatttttatttgcttgcttcaaaacataaatttgaaatgttgtttacaaatctgagttttttgtttgtttttactaaatttcagagcagttttattatgaaaagcataaaaaagatatggtttctatagccagaaatagggtctaattctaagatgagttttgccagtgaattaatactattttgaatgcctttcactttatattcaaaagcagatgagtaaagcttcctgtcacagatactttaagatgttaaaatgattgtgcagcaataatagcacagtaatggaaacttaatttttcgaggctgttattagcacaaagtcatgagttctttagcatctctaccaggacattaggaagctaagtttttagggagggcttggtgcatgggaagctgatacttcactaattttaaaagaagaattgaaacaagattaggagagtctttaccatgtgccagttacttacctaagtattttatatttactacttgtaatagctctattaggaagtattattatttcttattttacagccaaggaagctgaagtgtaaaaagattaggcaaattcccagggtgatacaactcatcagaagaagagctgagactcaaactcagggggtctgattgtcaagcaaacaatcttaacacctaattatgctactacctacaaagaataaattgccaatgaattattaagaccaaatcatggaagtcttaaataccaggcaaagtgacaagatgagagctgcacttcgaggattttatgccaagtacagcgtgtgggctggtttaaagggaagaaagattagagatcattgctagtagctaaggtgagaagtaatgagaacatgggtttaggaaacaggattaagataacagcttgaaaacacctgtatttaggtggacagaggaagaagaggaaatctagaaacacaggcagagaagtagaggagggaggccgtgtagtgctacccaaggggagattctggaactgaaaaccgtagagatcagagaggattggaacaaaaacaaagacgagtgggtttggagatagtaatttatttattcatttattgacttttttactcatgaaataagtaaatattattgtgcacccataatgtgacaggaattgtgctggaggggaacccgtgtaaaatgttcttctttattaccaactttgctacttattagcaagatagcctttgacaagttttttttttttaaacttttcaaaatcctggctgcctcttctgtagtatgatacgtaagtcctcactgtgtctaaatgcccccaactcttgcggtcttcccagctctaagatctgtaattcttgggttcaagttgtaaattgcaataattggaaatgttgtaaatatgtggccaatgattcagttggcacttaggtgaatcagaaggagatgcaagataaggtgtgtgtcctatagctgtaatgtgaatggaggaatcctacatattttccctcaaaaatactggtagtatcatactgacactaatagtagatggaaggatgagactgaaaataatacaggaaagacagtgtccagggaattaaaaacaaaaaacaaaaaacaaaaaaccccacaaacattccctagagtggtgagggaaatttttctcaaagccacttattttcaaagggaatctgactagtttcttcagagaaacttctgttgattgaaaactttcaaaggtcaagccctaaagactcttaaaagatgtagcataaaacttagaatgagctgccagttcccctcaaaaactgttttctgtgaagccctgatcttctcggctggatacaattccttttttctctgaccttctccagcagtgcttctcaaacacacagatcacatggggtttgccaaaatccacttgactcagtggatcaaaggttggagctgagactctgcagctctaccaacttcccaggtgatgccagtactgctggtccatggaccacactttgaataacagaggtgtaaaatagtttgctttaattctcgtagcagataatggaaataattttgaaacagtgtaacagctccttcaccagactgtgagctctattctccatatcctaaagtcgagtacgtacacattatgaaattcttgatattaatagataagagattcttacctcggtcagtgatttgtattattcaatagcagtaataatttgaactggtataggtagggcttttttttaaactgagataagcaccagcatgcaatataactgagataggcaccacaatgcaatataaagttttcatataaagttaaacgtgtttaccatatggcccatgaaaacgtatatccacccaagaagttgcacttgaatgtttaatgcagttttatttacaataaccaaaaattgcaaagaaaccaaatgtgtattgcctgataaataacttgtgaactgataaattaattgtggtatgaccatacaatgggatgctatttagcaacaaaaaggaatgaactcctggtacaagcaacaacttgagcatttttttaaaaagtattatgttaattgacagaagtcagaaataagatatatattatatgattcaatttatatgaaattttagaaaagcaaaactatagtgatagcagatcaggctgctaggggccaggaagtgggaagaaggaagtgactacaaagaggaacaaaggaacttttgaggttgatgacaatgtttagaatcatgacttcagtggttgttacctgatacacttaaaagtggcgaattttagtgtataaaaattttatccccagctactcaggaggctgaggcaggaggattacttgagcccagaagttagagaccaggctggacagtatagtgagaccctgtctcaaaaaaaggaaaaaaatgaataaaggcaattttaaaaattacacacaggctgggcatggtggctgatgcctgtaatcccagcactttgggaggccgaggtgggtggatcacttgaggttaggagttcgagaccagcctggccaacatggcaaaaccccatctctattaaaaatacaaagaattagccaggcatggtggcacgtgcctatagtcccagctacttgggaggctgaagcaggagaaattgcttgaacccgggtggtggaggttgcagtgagccaagattgcatcactacacttcagcctgggcaacagagcaagactccatctcaaaaaaaaaaaaaaaaagtagccacagtcatcaacctgttaacaacatctaatgcttcttggaagctgatatcttattagcaggatgttaataagagaatacagggacaatttttactttaagagaataaatgggcatggaaagaaaatgtgaataaacagtaggaacaaaagaagttccctaaaagcttacttgtgtacttgcaatggacctgagtctgaagagagagctcttgaaaacaggaactccagttcttctatttttagcatcccatatagttgctattagctgaatgattttagtgtgtcctgttgtgctattaaagaagaaaattctgctgagaagtcatttctctcctttttatattctttgcagtgagcacaccccactttcaggagaggatctggtcatctgctttggcagaaggcttatctttaattaagtgaaaagatctgtctacatgtgctaaggacagtgaaagcactggtgaaagcactggctttgttgaaaagctgaaagagaagggtgtttgtgcatatgcatgtcggaaccagcttcatatcattgtattagcagaagagttgggggaggagagggaaagaaagttaattatacgtgttccctttctgcaatgcagaaagaaaatagttatattcttagaaatcagtcaaaatgtatacagctgatctaatttgttgacactacacaactcaatatttttggaggggggcataaatcagattttctgttaatttactcagcaatgtcagagtttttttcttaacttgtattaaatagcattagtttataacttcagattaaatttagccttttcgttgtaatattgtatgtttaaaaaatctatatgtgctgttttttatttctttaattatggtctattgagaatttcgtcatccttctagcagaaaatcccatcaaccagactactgattccttaggatttctctctttaattatgagattaatagcttttcatattataatgtttctaaagaagtgtgtttgataaatgcataatttaatgtgtatcatccccttgttttatttttaaaagatattattaaatgattatttaacagttcatactcttaaaaatatggttattatagttttctataagccacaatttcaaagtgtgggctttgaaatcagatctcagtttgaattctggccagtgctctgggtattaaacatatctagcatggggatgaaaatatccgtgatttcatccttatgtgaaaaagggcttagtactgtgctggccatttagtaagtggttaataaactgtgctatcatttacatgatcatcgctgccagaggttgtagatccttgggatatgaatgaagctgatctcacgcatttggactacctaattagtaataaggaccaaacctaaaagagaggtagtaaatgaattgaggaggactgaggcctttccattcatcactgtggagtcctgtacattaaggctcaggtcatatggagatggctgggtctgtgaggcttaggcttaggggacctatgaggctggaccaaaaaaaatctagacattaatgcatggctagagttggaggttctgttgtagatttgctcatgtaggcatgtgactgcagattataatcacaaattgagtaataagtacaaagaggaaggaaggcaggatgtgaaatctgttggccatgttccacacagtctggagtgtatgtcagtgtgagctgaagaccagcagagactaggatggatgacggcctgtccaggggctgaatggacacaggtgtcagcagggccacctggtaaaggtatggaggtgagccatgaacaaggttacctgcttaaggggaaggttgtggcttaaatctagatgctgctgagatattagacattaggtgcccacaggctgtgtggaggtagaagggggatgtgcttctcttatttgcacaaagatgtgagttactgaggagtattattgaacagcagcatgttgggtttgagaagagacctagtagtagaaagagtagtatgtctgccactgaggaagcagggaacagaagggtgcctcaccccagggcagatggggacatggtttaggatcctagtgactaaaaaaaaaaaaaaaaaaatggaagtttggctgcagagctgctagggtgactaggaaagagaagaatgcagacgttggaaaagtgtggtatagtttaagcacccagcagcaggaacccaggtccagtggatgagatgaccaggatcactactggatccacaggaacctgacccaactgttaagctgctagtcgagggctcctcagactctctttctgtgggtcagaatcagtcccagtgcctggggtggctgggcttgcagatgggcattaggaagcacctgcttccagactgaaacagaactggggatggaggagacagggaggtgaggtttgtgtgtgctcagcatccggaatagagaacgccaagggtctttcttccttggtgttgcatattgactgagatacccaccgggtttttctattaggttggttttaaatgacaaaaaccacaattacttttgcactaacctaatgcttgataagtagaacaatgtttctagaattattgctgaacatgcttttttctagctggttggaaaagcaagctccctttggtttgagaaagcattaggggagtctaaaaaaaaacctgacatttttttcaagtgtttctccgtagagtttgtttttataaacaatgctagcatggttgggaggagcagaactgggaacagggttgggagtaacaggcttttatttcagctgagtttgaatcaaaagtattataagctttacctccatttcatcaattactagaattgatattgcttaaggagcttgcaggattgcttaagttggagaaatgttcagtaatgtttagtctggtagcaaaaggaggggcctgtgctcacttgtgaaagctcacatctagggggaggtagtataacgcatggcctgtggcctgatagagacagatttgagtcctcgttctgctacttgtcagctcaacaaagtcgttgcttctcccagagttttggtttcctcctctacaaaataggaattgtaagtctaccacttcttttgcaaggtggttgtcaggatgtcatgaggtaatacaccaaaagcaattatcacatgccttggcacaggctaagcactcatacatcttaatgcttctaatcagttgttattcattgagcatttaccacgtgctaggcatttagggtaaaaaaaaataatacaaagcatctagttatgggatctgtatctgttacagtctctgtatttcagaaattcttccatggttctattgtatttcttagagcagtgattctcaaaattttagtgtgcataagaatcaaattggtggatgctgtttaaatgcacattcctgagccccagagattcagattaagtagaggctcaggagtgtgcatgttaacaagtccccgcctggtgcagactcttgagcctgccctagagtcacctcctttcaccaatatctgaatttacccttctagacttcaagataccaatggaacaccattaggaattttcagattagaattatctcttttagatttgccttgtgctttttatcttgagagacaggataacaccaggaatggaactctgagaaagaaatgattgaaccataaatctatttctgtcttccttaaactgtgtgacctcagacaactcaaccttataaaccttcagttttcctcattcatcaagaagacaacacctgcacacccatctaacaagcttattttgagccttaaatggagggatggacatataaaagattttttatgaactttgatgctccacacaaaatatgcttttactattaaagcaaagtgaaacatttgtcaagattgagtttaatttggcatatataggttacttatacattgggttacatatcttagttggagaatatgtgaacatttgtcctctgccagtgagtccttctttcccttgccatcctctacccacatttttgtaaaggatgttttagggaccctgattttaggagcatctgcagccacaaagctggcattggtcctgtttaatgtcaagatcttgaaaactcttttttttggtaatcaaagctatattaaagggccttatgtctttttaaaagcagataacctcttaaattctgtttttttctttgaatgtttttgctcaaagcaaaatgcccttccacttatacaatataattagataattggtttatttgtggaagctttttcctgtgagcaagcagaggaaccatgtttatcacaaggatatcctggctggcccgtgtcctttgcaacttgaatactgaagctgtgaattgtacatgaaatacgatagtgccttaacttcctaaatgtttttcaggtggcgtgtgcagtagctgttcaagagtgggttcgttttattgtttgaaaacagagcattctctcacacttctttgtttttaattagaccacatattagtgaatgaaaaacaacaaaacaataacacaagtctcgcttacccatacctccgtgttctgtagaataatacataaattgcccaaagagtatgttttggagaatacataggaattttgacttgtaaatactgacttctttccctagaccttcatatactgtcttagatgtaaatacattaaaaaattttgctgatactggtaagttttatccttgttggatctttgcataaatgtcattcttttttttttttttttttttttttttttttttgggaaagggagtctcactctgtcgcccaggctggagtgcagtggcgtgatctcggctcactgcaacctctgcctcttgggttcaagcaattctctgccttagcctcctgaatgggtgggattgcaggtgcctgccatcacgcccggctaatttttttgcatttttagtagagacggtgtttcaccatcttggccaggttggtattgaactcctgacctcgtgatccacctgcctcagcctcccaaagtgctgggattacaggcatgagccactgcgcccagccaaatgaagttattcttagtggagccttaaatgtttgatttgagcatttaataagatgttcctcactattttggcccatggtaaactgccttccaggaccatctaataacccaaagaggtagatggtgtgttctcacttgtaaacacatgaggaccctcaggtcagaagaggtagactgatttaccttagggtccccacaccatatgtagagttaggctgtgaatcttgtcttctgatttccaaccagtgttgactcttcacagggattatgtatacctaattagaagtatgtgtgaactaaagtttgctcattaacttgcttatttatttgctttctcctgacatagttttcatttctaactaatttagaatagtggcatgtgggggtggtgactgcattaatagcagcaagaaccaacagctgacagcaagggaggagtgaaaagcaactcaaccagataatcatgccagtttaggactgcttagcaaatagccccacacacccattagctgcagagggtttcaactgtaagaaagcccagaacaattatatttgttgagctgaccccatattatcaagaaaagtttaaattatgtttagtatattctacttatgaaggcaaagggagtggtttattttaagatttccatttgaacatatttaccattaaaaagaaggcaatgccatattatttggaaatttattcaaccagactcccaggttctatactgcatcgccatgattgaggttaataggcatggataggagtgaaaggagtggcacatgcagttgtttagacgaactagaaacttgataagggagacagagaagcagtgtacctgtttaaagtcacaggcgttgaaataggtctattatggaaccatatgttaaatttgtcttttacatttaattacataagacaatggaaacttttccttttttcctttgaagcaaaagagaaaaccaaacatgttttataggtttttaaaatatattctataaaggctttttttgcatttacattttagagaggattgtgtcaaggtttttgtctgtctgcaaatgtgtaatgaataatattgtcaatttaatacaaaacaagcaagtagctgaatatacctgaactgtgatgtggaaaaatcaaataggtggatctaaaagtatataaaaattgaggatgagggaaatgttttttcagtagcttttttcctcagttaaaaattagaaaatgacttgtaaaaattataatgtataacattttaacatcatttcaagcactgaagaaatgaaatattcacagtttaaggcatctattcactttctactgagagagaaaatagataggttttaatgtttgtgaaaaaagttttggatatggaatagatgtgtaaaattttattctgaaggaattatttctttcttacctaccatgagaaagtagtagggggaggcccctacctttgagaccgtggaactgtttattggcctaaacatacattatgttgtgcttattgataaaaggagagacagaaaaaacattatctttctgcacgtttagtgagtatttccaaaattacatgcccacatcatttttttctatagttccttttgtatattttttccaataatgcttatatttgagccattgtgaaaatccatttgtataacaacctggcctttgctttggacttcattccttgtgtttcaggtgagccagccatgagagggtatcttgtggccatattcctgagtgctgtcttcctctattatgtactgcattgcatattatggggaacgaatgtctattggtaagtttcattttgttatttaaaaataactctcaacctagtctttcacacaaatccacaaattatagtagagggtcctatgaaaaaaacttgtaccattttgaatattttcttgctttccattgtaaattggggttttaccattccagtatcctatagattgtatctcgaacaatttaaaagttgacaagcaacacctactttctattgacttcccagggaagccatggtgttaaccatctttgggttataacattctttctttatgctatagatcatctccttgagttaatggcgtaattactgggctcagtggtacttttggaacctaaaatgcttgcttaagagattattgataaaatacagatattacatatggtttcctttgtttaaatatatttggtgaacgatgatatatgtatcttctgaaatagctttgacttgaaataccacatataaaactttgaagaggcacagatagttttactgaagagaaagcctctgtaatagggattttaaccttctcattgtcagtcctttggctaggaaaaaagttttgatgacctttaaatcccaagcgggtggcagtacataattatgctaaaataaatcacataacttcctgtcttagacaaagagtcagtattttttgccagtgtttcatagtacatcttagatcatgtttctaacttgtgcttacttgatgaaaaaaagctgatgcttctgcatttgatttcattactggttgattgaaaaataattgtaatgcttttcatggaaggacgttaggcaaatggccactggaaaaaacccaatgccaggtggatagttttggccctaaagttttaggctttggacccaaatatcgggctagagaattttgaagtctgattatgtactaaatgaggactacatcaaggggatctatccctacatctttgccacattctctgtcctacccttagtagtagaagacaaaaatagaagagaaagcaaaaagcttactagattgctactttcctacaaatcctattgttggtcacagggaaaatgataaagaaggtgatgaaaaggatctaaatcagcagtcttttgtcatcagggttgaagtgaccatgtcactcctcagctaacacattactatagtcacagcaagtaccttgggatattagctcagacagttgtttgtgcaatgaacttgcttccttaaaaatgatttaagacatataattgtgtttttcttttaaaaagtcacccaaaggttgtcttcacaatatcctaaaactgttttctatgttttaatgactttagaaatcaaataatatcttcatgttatcctccaaatataattgagattttttggtctagtgtgctggtccaccatatttatgtatcttccttatgtataaatcaaggagtccttgccattgtggtattcacaaaagatgttttcctgcgtaaggagtttactagcctcacagttcagaaacctagcaattctaactatggggattttgtacccacaaaaatggaaaattgtgtctgtccatgaagggtttagggtatttccttcattttgaattctgctgattatagaagaaaattgattagtttttaaatatgaattcttcacataactgatgatcattaataagtttttgtattaagctgttttcctctttcccagctaagtctggatcctgccatccaccacccctttcatttattttccttgttgtgctctgtcatgtttcacaatacccttttaaattgtggagacaagtactccattcaggagcacacaagggcctaacttatgccaagaatagagaagagttagaaatgactctcaatagtgtgatttgtagagtcccccggatcccaaggcaagggtctatggaacctgttcaggtcaggtgtttctgtggtgttcgctgccggtgtgcgtcagcagatgtggcaggaggaggtaaatagccacgtgcccttggggtgagtttcggtttctccagctttcagggacttctaaaaagtgagcctggttgcagcttctacaatgcagtaatcctggcccttctctgaaggtcctttgaatcattgctcttggaatcacttctgggttgctcatcacctcagcttttccaccctccctttccttacatccatgaatctcaggtgtgtgtagggcttggagaaggtactggcagacctcaagaggtgcagggagtatttttgtttgctgccacagaacctctcagtggtggcatgaatgagttcccagggcatttgcttccctttgggcagggtgcccgattctggtttctgactgacattatttttgtctcatagggtggcacctgtggaaatgaaacggagaaataagatccagccttgtttatcaaagccagcttttgcctctctgctgaggtaaaaatataccagaaaaacctgtggcatacaaaatattctaaatgtgcttgtaatcattttccacacttgtttatttttttaatgcaaatcttagcagtataaagtggacaccccatatttaaggaagagcttgaatatcctgtctctttttgtgcttttagtcagagctctgcatatattttaagaaaaggcattgaggaactcaatcaaaccagtattcttttcacacaggtgaggctagagaggtctatttgtgtttgattataaaaaagcgaattgttctttagggttttatttttcccccttgttgctctcatgttattttccacccttattaatttgtggcttctccttccttgcctctaggttaaactttttgagtagaaattttcccttttattaacttttaatgaactacatagaatgcaaataatgattaatctacataaaatgtcaatgattgttgattgtggctcttgggctttgtaaagaatttactcttctattcacatatgttcttttcctccatcactttgactttgacagattgctggtcaaaatgctctagataacaagaaataaaaatctgttcaaggcatgtttaattgggtaaaacaggcacaatctgttcagcattttttctatgaagcattaaaaattcattttttttcctattgtcttttattactgcaccttgttattactgttttttaactctttggggctacagatccctttacaatcaatcaactctctggaaaactgcaaatacataagactttttcgtatatgattccaagtttgctatggctgcctgtagcctttccaggggtgtgcgtccagtgaggaccactgcaaaactggaatagtgttttaaacttttttgaacatgactcaggaagaaatacattttacttgggatctagtgcaaacacatatttatataataagaaaaaaaaagaatttttacctttactactccagatgtactgtgttctgttccattcactttttaaaaagatgccgatcgtgactcacaaaattgattttctgagccacatacgggttgcagaccacaggttaaaatgctactctagaattaaggtactccataactttagtgaaaaaagatatcctttcctttctgagaaaacccaaaagggttaaagtatttatgcaagattattcagcaatatgtaagtctacagtgtaagcgacaggtagatttatgtttatcatgtggacagtattctctgagggcagtcccctagagtgtacttgaggccactttctcagaaacagaaaagccagcagcaatttggagaagctcttctgggaaacctggagcttttatcttcagtgttataaagagaacatcttcccttataattaggcttgggtgtggatttcagctgtcatttatgggatagtgaccccagacttgtcatagctgatacaacttcacatatatggtacttttaaatttagaaatagcttagcatcagcacttttataatattactttgttttttcctatatatggctattattttatcacttgctcttcgtttgtttttaagttttgtttttacttcctgagttgtaacataattttcatcttagtggctgcaaagtgttttcatttcagttgtgtagttccattaagtaccccattctatgcaatatttcagcacggtttaaagttatttttaaaaattaaaaaaaattatacatttttgtatagccagtataatgatatggattatatgctgtagttacttttagttttgattttaaaagcttgcaaatatagtaggtatttggcaaaatcattctttatcctttccttccaggtttcatcagtttcacccttttctgtgtgcggctgattttagaaagattgcttccttgtatggtagcgataagtttgatttgccctatgggatgagaacatcaggtcagtagtagtattcttacctggttctgttaaatttgagtggtgtttgatgagaatggcatgttaatataattttaagggcttttattctttctgcttcctaatgatttccaatggatatgattttgggatggaatgaaatgaattacattttaaaatataaattatcactccttttgaggcagtatagaaccaaaggataacaggggtagatttgttgttgttgagaaactactttttacatttgctctgccgccatgtgatccatgtaagttctggtgccttactttattctaatttagaattagcaggaaaacctgagggttagcttccttcctagcttcccatggcttctttttacctgtgagttttatctcatcagcgattcttatctccttaagcagtcttttaatttaaccagtggatattttatttttgttaagtttagagataattattccatcttctaatgataaaacactttcccttctgcttgttgataagtgattggccctatatagcattaagttctagatttttgagggatcataaaagcccaaggtgacaagccttcaacattgtgagtcatattttgcttattcaactgatcctgtgagggtgggggttgtatttttttgttttattttttattttaaaactattttgcagagaatttgagaatttaattgggttaaacttactatttctattctaacatcaatttcagaatcgtgctattttaaaattatatgattgtttttcagattaaatgtgttgttttttggggaggttttggaaagtgtctttagagcatttacgattttgaatgggcctgctgaagtagtgctggctaattgcagttgtatcattaatttttcacagaataaatcaatgtggccatgctggttggaaatgggtttgtgtgggagggagtaaggtggtttactaagtactaaaaagacatgattatccttttattcataacactccatttgttttctagcggaatattttcgacttgctctttcaaaactgcagagttgtgatctctttgatgagtttgacaagtgagtttatttccttgcttctagtctggcttttagcttcagctaagctggttcaaaatatgtaccccaagaaatgtaagatgtatttactcaggaaaatttcatagcgtttgtgcataaccaaaatttctagtagtaatttgacacttaaatacctataaaattaatttagacgctgcataactggttggctcaaaagtttgcagaatcttgatgatgatcaacactggtcccaaatcaggacatttttaacctacattcatttttttctaagttgttcctacttaagaattagttcaccccctgctaatcagctcatggcttccctttataggctgtttcccatacttttccatgcatcctccaaactactgatgagattctttctgtctcacttgttaaggagattattagattttggaagcagctctcttcttttttaatcagaattacatttgaaggacaaatatacttgctttgatgttttctgactacaaaagtaatttagtttttagacaattttgtcattaaataaccccatataaattgaattgccaaaaatagacttcttcactgttgggcttattttacagaggtaggtttatttcacaaagtttcaagccacactttagaatttggccagggtgccagtgtgataatatgggtagtctacagatgtaaggcctccattaaaaaggaaaatggcagaacttaccctcttgcccaagagaataggagtgctattttttgggtgcagagagtgagggtagtggatagaggtctgaaagtgtagacagagtttgccataagagcagcgttagattttgtccaggtttatctcatttttctctgttggagaccaagatgcttgacgtgaagtgtgtatttgtgtaatgtgtattggttcatttcagttttttataacttcaaactatgccatcaacctaatcaattttaattttgattgcatatcaatagcaaccataaattttttcaacccccaaatttatgtagctctgatttgtagaatattgttttttgcagacctttcacatatgtgctttatgttgattctctctaattctgtaagtttctggagaaactgaggctaggcacacagtttgttacacttggtaaatgccagacccaggatgtgaacctagatagttcaactccagtgcctggatgtctgagttaagagtaataaaggtggccgggtgctgtggctgatgcctgcaatcccccagcactttgggaagctgaggcgggcagatcgtgaggtcggagttcgagaccagcctggccaacatagtgaaacccagtctctactaaaaatacaaaaattagcctggcatgatggcgcatgcctgtagtcccagctacttgggaggctgaggcaggagaattgcttgaaccagggaggcggaggttgcagtgagccgagatccaccactgtactccagcttgggcgacagagcaagacttcgtctcaaaaaaaaaaaaaaaagataattgtgagtccttgcagcaattatctgcaaatatttgtaaagatgcttgactccatacatgcaagctactgtcaggattctggaggctatatgactagaagttttgttcttgactaatttttatctaagaactagactgtgctttatttagttgctttcataaccccttgtcccacaggtgttcatctgtttgtgtatgcctccatcaggctaatttttctcttcttgctgccttggtcttgctgtttcctgcccctttcctcctgtcaccagaatctccccactccccaccatcatgctaagttcatttcttagcattacctttcttgggagagaagtagagtgtagctggtgaggagggattgaaaatcatgctgactgcaggagtcctttagtctgaagttgccaagagtctgaagtgaagtaaatgtatagtcagagactctagataaagaatgaatggcaaataaccctgtaggatccccacagagggagcacagtgacacatgttttgtaacatcacagatgttcagttagcattgctgagttgtgtgttcgacctgggcaaaccttatcgagtatttcaaaaatagataagaatatatttatgacactattatcttctatttgcatagcacttttcagaggggttcacatgtagtattaaattttgcctatattttaagtgagtcattctacctttatcatgtgcccaatgtacaacacataggaaaaaaccaaccaggctgtgcctgagcaatacatttttagtaaactccagaaaggcagaatggactgaattgcctgaatgctgcctctgagtcaacttagttcctcaagtgaccttatgtagttctcatttctcttctcagcctgggaataaagctctagaagaaagatgtctgagaacagtctttctttctcaggcagagaatttagactgcctttggcaggagagtcctccctgagcccctggcttgtgaatttgtgagctgggcccacacgtccaaggaggaaggtattgatatttaggctggcttgtccttcatcatgggtctgtaggtcagagaggaggagctgaggtagaagggattactttcaagttactttcctcctttttctgctttctttactgatatttatataattgctggccttgctctctgctcattttttcctacctgtgctctagaaggtgctcgacgtagtttgagttataacagctaagcacattattttccttgctttttattctccttccatcctctttgtcccttctagaaagggtcagatgttgttggtgctgttgtttcaaatctgaatcctttaagattctaccagatataagttgtagttttgtcagatatctcgtccagcatgtatgatgccctcagttgggatagattccactgtgaatgggaaaactcaaaatatcagttgtgattgtaagaaggaagttctccatttgtccagttttcatgtaaatgaactctgcaggtaaacttgccagggctggttctgtgagcatcagggaccaaggctgcttctctatcttgacgccaccattcctaaatatacaacttgttccttctggtctggtatgatggctggagttccaccgatcacgcctacctccctgccagccaggaggaggaaagggcgaagggcataccccaaccctttaagacatgccttcttcttaagggcatctcccagaaatcccatataacacttccttacctccaatgatgtgctggaaccagttggtaccaacttgtgagagctgtatctctttgtattcagctccatatttagtgccatcaaggtgaaagcttgaaatggccaaggtgagagtattcgtaccatgggaattggcaaacattacaaatcagggctttgcccattcatactcctccccctcccccagaactgattgttaaacattgactagcaaccactgtttgcatcccattggataggactccatcacaaggccacccctagctggaatgtggaccggaaaatgtagtttgtattccaggtgactgtgtgctcacctttaaaagcaaacatgattttaacagatgaaggaaacaagattattggggaacaaatagctgtctttaccaatattctgcatcatttccctggtccccatctgtttttatgcctggtcactttcaggattctgaagtcaaatatctgactctgctctctaacaactgagttcagtgcatcttttttatctgctgctgctactgatttctcatggacacaggctcttctctttattctccaaagcacagccaacataaggtgactaagtttaacaaacttcactgaagactgaggattttttaagagaattgcatcacagaaaaggaatactaaaaatatggccatattccaaggccctaatccttcctggctgtccatgtagctcctcagcaccagtctgccccctagtcctaaggattattgctttctcctcagtggaagtacatcctcacacagctagaaacagcagcaaccctaaatgatcaaatctcagctcccacttaaaatgcacagacaagctccccatccccaaccaccaacattccttctgaaagcatgccaagttttatgaagaatgctttagtcctgcagcacaggtggttatatagtaactagacataaatatcttacctgactaaagcacctgtgtcaagtcagttgcctgctaaatggacaaggatttgtaaaagctgcctggttgctctctcaagcagcatccattatgtcagcatcagcaaagctgggttagattgactaccagccaggccaggagcatgtctttagaaaacttaaaaaagaattagacattagtggtgtatttattgaaaaagagtcctaactctaaacggaatatcaatatctgcctccctactttagacattctgctgttttgcagagtttctttacattgcaggatttttagcaaggagagcttgaggatgaggggaagttgcgattctacatcaacagagtgaatcatttgtggtgaatatgcagaagcagcccctgcctgctttctagcatcggctgtggtcagatgttgggtaaaggtatagaagtctcagtacttttgccaaaggaaatggtctcttccatcagagagtaacatacaagacctaagtgattcccttacttcacaaaagagcaaaccgagatcagagaggtcagattactacaccaaggtcctaagaggtgctaagcggaggagccagaactagcaaccaggtctccaactacagttccttgtgtagtttgaggatctcctggctgcaagtaatagtcttcactaggagtgatttaaactacgtggacatttattatctcctgtattgcgtagacatgtggattcaggtctgcatatttgtggttccagcttgcagtgtggggctgcttatggctgtacagactgtggattgcacaactccagggagtaccgattcattcatatagttatctgaatggtgctcccggacattggactgtgtacaacttgcacatatgtttggagtggccctggttgggggattgagttagtggctcagtgatgtcaaggctccagggtagtttttctgtggctgtctttttctctgatgtgtagctgctctaactttttgttatcacgtgtcaatgtctaagcagaaaggaagaagtgagtaatgaagtatcctgttcacatgattcttttggcagcagcaaaatctcttccaaaagcatctaatagacttccctaatatcttattgcccagggatgggtcacatggctatgtctagatgaaacattggcagagacaatgagctcactattataggcttaggaaagcagggatctgctagcaaggcacatggggtaatgggtgttgggaatgtgagtggtatgatttgccatagattgttacactgaaggtagagtcatgtattttaatgtacatgatggtattgaagggaaaatgcatgtcaaaaagcatttgtaaaataaaacacatcatagatcatttgaaatgggcaactcaagtttgcttgctctatattgattgtgtttaatgtttccctctgcataaggtaatgactcttccagcttttgcctgactttatgagaaacacagctttcacctgggggaagtgtaatctcttactaccactgctttagcagctttccagatttccattaacaggttccaaaacaattattttgttttctgggtaagcagtttagagcatacgcattttcctccgtgtttccagggtggttggaggagtaaaaagtaattccttctccaaacacaaagtagggaaataacctccatatacttaatgtaacaaccaaactgaattctaaaatgcacagcctgtgaatcaggaagtgttgtagatgggaggatacagagatataaatgatactattctttcctctagggactcacaatttactgcagctatttctacatgaaagttatgttaattaaatatgtgaagttttacagtcacccaaaggacactgaaagtcattgttccacacataaaaaggcagaggaagccagaatcacaagccaaatggatgaagtcaaggagagaatgaatcagtcctttcagagtatggggtacttgctagagagtgagggaagcaatgagtaacgaggagtgcgattcagacagcttatctgtaccattccatacttcccagagccatggtggtactatgaatactagctgtagataaagtgttattgccaaagagtagtcctagggatgccctcaaaagagtttctatgtgattttcagaaaaatgcgtaaatctttgcaatatcctttaccaggaggaaaagtggactttcattgataaggtttcctttcaaaagcattggcatgatttcctatagtaaaggcccttctctctttctgtttgtcccctataagctgacaggaaaaaaaagtagaatgaaactcctaaaaatatggtgacgtagagctgcaaagaatctttggaatgggcgttctaaatgaggcaatgtctatgttatttcttcctgttttttaaaagtccttgaactgctgggaccataagtaggagaggctgagtatgaggaattgccctgcagaagagatctgcctgaaaccctagacccctcttttttcttggcttatagggtatgtgggtggaggtccaggaccttgagtctgagtgatgaccagtgataatggcacatgtatatgacagatggtagctactcttaccatgatactctttgggccacgcattatctagggcttgatgaccatctgtaactcagtgtgatagagtggaaacttctgtgaacactaaggtctaagctatcagttcattgttgagcaatgttatataactgaccacgtctaagactgagctcagtcaatcccattactgggtatatacccaaaagattataaatcattatactatatagacattatactatatagactttatactacatgcacatgtatgtttattgcagcactgttcacaatagcaaagacttggaaccaacccaaatgcccatcaatgatagattgaataaagaaaatgtgacacatagacaccatggaatactatgcagccataaaaaagaatgagttcatgtcctttgcagggacatggatgaagctggaaactatcattctcagcaaactaacacaggaacagaaaaccaaacactgcatgttctcactcataagtgggaggtgaacaatgagaacacgtggacacaggaaggggaacatcacacactggggcctgtcgcagggttgggggctaggggagggatagcattaggagaaatacctaatgtagatgatgtgttgatgggtgcagcaaaccaccacggcacttgtatacttatgtaacaaacctgcacgttctgcacatgtatcccagaacttaaagtataaaaaaaaaaaaaaatagactgagctgagtaacctttctggggtcaacttcagatatttggcttgttgttcaggagtcttttgtagaggacaggggctctggtggtatgctggtggcttgttggcctttgcccctgcatgttccatgtaggtggagtcaggtagcccagtgtcagactgggaactccaggccaggatggatgcaggagcccctgaggcacctgggctcagggcgaggcagccccttttcttgacagaggattggcctacagccttcattgaatggagaggattagactagataccatctatagatattccccctctacccctatgcaggttatctcatgggaacagctgttatttcaatcttgtcttagccatgccttccccagtgcccagccttgcttaacattcctagtggagatggagccagctttaggaggtgtagcctctgatctgaattaaactgaccctgaggttatggaaagggcaagcaagctgggagtgtgagaatcgccccctcctatagcatattcatgggatgatttggggaggataatggcaataataccctgagaggaaagggttttgaatattcagcagctcccatctcagccatactacatggccccacagcagagagcctttgataaagttggctttctagaatagggattgaaatcaaacttgcttgtaaaagcatctagagttatgttactttcttatttagaaacagagagcccaggaccatgaggcttccgcctgctggacagcaaggacttccagtagcttctcagctgttttcccagtcactttcagaagcaaggctgctatagctaattgatgtatgcaagatgtaattacagccattgatagggaaaatatcagcaatatgatgcccttggaagctcagaaaaaagtcaaaaggctgtaccatgactctcacaatagccagatctgaatataaaatctagtctcttctggtgatggagaaaaggaagtgtcatccatacaagatgaatttacactctgaaccccaggaggtcctgcacgtaggaagtgcctacaatccaagtaccatgctctttactgcctctcctgcttccagcactgtccctggggtcatccaaaccagtacagtaacccagctggcctctcttctgaaaacatctccaacttcaacaatactttgagataccatattgctggtatttcaaaaactgctgccagcagggaggaggccaatggcgtgtccatagatcatgttcagcctccaagtggtctcataatcaacaaagaatctgaagtttacaagatgcttcaggagaaacaggagttgaatgaacccctgaaacagtctacctctttcctgattttgcaggaaatcctggagtctgagataaaaggggatctcaacaaccctcaggattcagaagtgttactcagctcagtctattactcagtggctgcatcaattggaaatgctcagaaggtgcccatgtgtgacaaatgtggtcctggcattgtaggcatgtttgtaaagctgcggggaccatcatcccctccctgaatgttacgtgtgcactgattgtgacactcacccgaaagagaagggctttttttttttttttttccatcaaatctactgtgaagagcatgcccaggagcaagtcacaccacttgagggtacgatgtggtcatcatgttccccaagtgatccagcagacctgcactgaccaccgttctccagccagcctctgctgcagctagttctctaaatgttctggccttgtctcttgaaagttctgtacttattcccccaccccacaacccgcttaccttggttttatccctgctcattgaaccttgagtcccttgtcttggttaactgactcacactgactgtgtggtgcccgcccacttttacaatgaatggcaaactgtttttgttcagtgtccccttgccggcaacactgtgtaccttcctcccctcagttcttctctgctgcaaatggacatcagccacatttgaaccaaatcaaatataatatgtctgacattgatttcatttttgctccatctatagactcccagaaaaaagaaataaaaaaaatgcaaagaaaatttaaatgaacaaacagacccttctggaacctactgtgacatgagatgtgtccacaaggcgaggtttcaggcacacactgaaggagcatctgctggacagccctccccgcccccaagtccttaccaacctgtgccactggtacttatttttcttgactgattaggtagacactgatttaggcatgactctttaatatttgagagcatagagcttccaattaaaatatgttaaaagtattttttaaattttaaaccttacaatcagatgaactgtactactcaaaaaaggtaaatttaatgaatataggagtgtgtacatcatctcctgtttacctgacaaagccaatgcttggctcttttaaacagtttccgaattctcacattctccatgtttctgggttctacagtgtttgtacagttttgctactcattgatttcctaaaatccttaaggtcttgagttcatctggtctgctgatttcacgggtcttagggaaacagtgttctctttagactttccatgccatgagggccctggaaggatagcctcaacaactttcccttctgtggttttgttccctagcgggcaaggacacagtctattttgtcatttctccaggcctgcctgggtgagggtaagagctgggagagagatggaccagcaacacgaagttcccctttgtgttctactttaaagctgtttgccaggaacaccgcgtgaacttttagtttgtattggttaagctccaaggaccagtccatgtttgagaaattgaagtgagcatgggcagggtacagaaaactgcacttttctcaccagattccaaactgtccatctccacacttgtgcagcagagagccagaggtagaatcttcgaggagtgggtaatgctggcaaagaatgtagacctgcataatgtaaaacacaaatgcagagtcctatatggaggtgtgtttcacagtctcaagttctggatccacatgctagttccactttggagtatgactttaaaatgttacataatagatttctgaacctctttcttcatttgtatactgggaatatcaggcttacttatctcaataggtgggtatgagaatcaaatgagagaacatgtatgggctgataatagttgctgacaatgatatgctcttcctatagaatgttactcattgaatcttgtatctttttaatacagctctagacttgtaagtcgcagttggttctttttctacttgcgcaacaagtggaatttggcactgggtttctgacagtatgcatggattcttggaatcagttttgtaaaagatggctcaatctctcacttgtccatctgtccaacagcataccctgtaaaaagtgtgtggtggttggtaatggaggagttttgaagaataagacattaggagaaaaaatcgactcctatgatgtaataataaggtaaatatattttctatttgctaccctagaattgtttcaaaagaatatggtttcttgccttaatacagctgtgttttgacaggaaggggagatgtttccatttggttttttttttattgcacaaccttctctcttggttgttggctagagttagacctagatttcaggttactcatttagcaagtatttgttaagtctccttagtgtgctagcatgcttctagccacaggagagatagcaatggataagaacaatgtttgtgctccctgtggagggaagaaaatgagtaattaaatatataaaaataataaatgccatacataatttaaaaaggatataacagagaatctttgaatggctcctttgtaatgattgaccactttgagaaagagacatctaagcagggcccaagtgaccacacagcaacagccatatgaagattatggtagagcagtccaggcagaaaggatgtttgctgcagggcctcaggaggagatgatcctgagtttgagaggagtagcaaagaaacccagtgaagctggaaagtagcaggcagggggagagtggtggaattggaagctgaagcggtgagcaaagatcaggctgcataggactttgtaagctaggattagaaacttggattttaagtgcaacaggaagctttttaagggttttaagcaagagaacaaagcagtctggttatgtcttaaatattctggctgtggcatggacaatggaatgtgggggacaagggtggaaatgaagaggccaattaggttgctgtattcgggtataatatgatggtggcttgggacaggattgttgtaggagaggaagagatatgtggactgactgaagatgtgttttagacatagagttatcgggatttgttgccgtattagatgtgaagagtaatgagaataaagaaatcaaggatgcctcctactctgttttcagcttaggagattggctggagagtggtatcatttattaagttggggaagactggtataggagcaggtttagaggaaaaccatgatatgaacatgttagatttgagatgcttgttagatttgcagtgggtttgtcgagtaggcagttggataaacaggttaaaatcttgatggtgtgtggcctataagctgtatttaaaccatggactgggtgagatttcccaaggagagactgagagagagagaagagagtgaggactgagcctcagagaactcaaaatttagaggttgagcaaagaaaaaggaatgtgtaaaagagatgaagaggatccaccagtgaggtaagaagaaaatcgggagaaggtgatcacagaagccaagagagcaaagtgttccaggacagaaggagtgaccaactgtatcccagtgctggtgagaggtcatgcaagataaggacagagtggtgaccattggactggtgacctgaggctcattgacactcccaataaaagcaggcttagaggcgtgatgtggcaagaagcccggctggactaggtcgaagagggaatgcagagaatgtacacctgaatgtacagatgaagatgtagagaaaccaatgtagtccagggattttgcttcaaagaggagttgagaaatcagatggcagttagagatggttatgcaatcagggttttttttttgtttgttttcttcttttgaaaagattggaggcactatagtacattggttaactggtggaaatgagaaagagattggggtggtaaaagagaggggaagggggttcagaacacaagtgtggttaatgtttcataatggaaaggagagccaggattgtggttacaactaccaagagtccctctgatgtagtgaggggaaaatacggacctttctatctctatttttttagtgaaaggtcaagataaggtcatcatctgggataagtgtgtgtgtgtgtgtgtgtgtgtgtgtgttaggagtagctatgaatagtttaaagaatggcaaagttagcatactgaggcaatacattaggatggtttggcagctttgggggttttgtggggttacaagctgcctagggtttctgcatggtgaggtcaccttattttctgtttactatccattttgaggaagctgtgataatttacctacaaaacaattttgaagcaatcacaggtttctctacccataattgtctaaatctgataatttagagccacaggaaacccttgcaggaaaatatcatgggtacaacattttgaaagtcatctcaagtgttaataagtctgttcgtcttatattacgtagagtcagtagcaaagggcaaaacagtatttatctctttggggacactgttttggaaacaaagcatttctttttttatagcatggcttcataatgtgtgcataaatagtgcatgtccaaccttggctttcagcatacacaaacccaacagtagatcctttgtggttctttagtttactctagcaatagacattcatttggttgtgcttgaatataatatagcagatttatattgttaaccttatttcagagtacaacaattttgatgggtctttaaaccaacttaaatgtgattcttcttacctgtcagtcacacacatccatgtgctacatgactgtgtggctttgagcaagtaattttctctccaggggtttgtcctccaagttctctttcaactctggtatcctgtggctctgtgttcccacttttttaaatttagtcttcagttcccctggaggtaagactgaattatcattggctccacaattaattttcaaatacaaatgaacatttctgcctttgatcaaccaactatttcatgaaaaggaatgatctccttggccattatgtgtgaaagattgatctattgctttgtggcttcagagcacaggataaaaggctgatgtttgtccaactctgaaacctctgagaactgtgatgggaatggcagatactgcacttggtctacatatcttgtatgttttactatccacagaatgaataatggtcctgttttaggacatgaagaagaagttgggagaaggacaaccttccgacttttttatccagaatctgttttttcagatcctattcacaatgaccctaatacgacagtgattctcactgcttttaagccacatgatttaaggtggctgttggaattgttgatgggtgacaaaatagtaagtaggcaaaattgttctgccttcagattacctttagtgctttttttccttaaaaaacagacagccacactgttctattctctatattttttactttcagaacactaatggtttttggaagaaaccagccttaaacctgatttataaaccttatcaaatccgaatattagatcctttcattatcagaacagcagcttatgaactgcttcattttccaaaagtgtttcccaaaaatcaggtatgtatttatctctgcatggtttcaaactacagatctggctgaggtaggatagagggtcctgggaactctcagaaactgtatgagaaccacagctcatgagatgatttctgagggccatctctgagttagtaaaagtagttatctatggatattatctttatgtttttcatttatgttgcaaggaaatgtaattttaagttgggtttttttcctgcccttgtagggccttcctggggtctctttgtgcatgccgaaacaatttatctttcataactctgtcttcagtgttctgcagtgaggagagtctgactgggtgggctgacgggcaggcttgtgctcagagtagctggcctggcttcaggccaagtgcatggctttgcaggctaaaaagaagtgtctgagatgctctgataaaaatatcacaggaaagccagaggaaaggtgaggaaggacaataaagtagtccagaaacatttctgtggtcagaggaaatgttggcattaaattctcaagaaatggtagctacagcaatattgaaagagttcttgaaacttcaaaatgaaatctcattgactttcactcctgtttgccttctttccctagaaaacaatactctagacccatacagtggcagagatattttttactggaagcttgagtaactgtataacatgacaccttggttgaaatgagtttttcacccctttttaaagtagggaaaaatccaaagaaataaatatacatcatgtattttcatgatgtatatttagcatgataagaattgtgattaagaaattcaaaagtgttatatgctgaaaacaaatgttagtgttgcacactgaaataaaggaatattaaaaatcaaaaaggaagtcaccagtctattctcttccctctacaacccatgtaacctctcaagcttttctaccttttatgtgcttccagactatttgctatgcattcataaacacataatctttttgtttgttcagtataattatgattataccataggtattgttgttattttcttttttctctttatttaactcttcccctatttatagacactcagatatatccaacattttcttctctttaaataatatagcagtacatgtgtttataggggttttctgcccatttgtcggatttctgtaggatggacttctggaagtggaatgctcaagtcaaaaagcatacatgttttaaatttaaacctgacttcctagtaattttgagggtaaaggacagcttctgaatgtgtgttttgtgagttttcacttcctatattcctaagtgaagtatgatcaggtatatctcttgcttcttcattttaggtaatatctttaattccaaaagcacaggaagaccctgagcatacttagtgatgacattagaactagctgtagctacatcaaagtcccagtaggacatggtgtcccagaaatcaaatgctgtatttcaagagaagtcagccatgtcagatgctgtccagaggttgaatgtaaataataaaccctggttttagaaacgtggaggtcatattggtgatatatattaacaagaaagaaggaaaaagcctgcttgaattgggttgaagagaacctgggacatgagcaagcagcaacaaatctttagtggactttttgctagaacaaggatcgtagaaatgaagcaatagttggaagatgatataggatcgaagaagcgtgttttatttttggtctgtgtatatgctgaagggaatggttcagcagaaagaaacactgatgatgaggggagaaagtagttaagtacagaagtaaaattgttgagaagtgatatgggataaaatatacactagtgaaaagttgctgaagttacatctcatccattataagaggaataagcactgcaaatgtgagtaaagatacaggtaagatggtagatttggagttgggatgatgaagccactcttttgactgcttttgtttccttaaaaaaataaagattaactagtcaaattaggaagaagactagggctgttgcaggatacaaagttataaattctcatcttggagagtaggaatggaaatttactagtcaaacgtaactggattgctaggcaatacttactgcctgtttgagagttgggtcataaattcaacattcaaccaggtaaacgtatttttctcttgccctattctgttgctggggtgtgggtacagggtgactgcagtgcttattcctcttataagagtttgtcaggtggtaatataggttctgtgggtgatggctgcagaagagctggtctatataaaggaatggttataaagacggatgaaggactcttaagatgtgaagaaaggaagtagaagacatgaaaaggggcaaggagaaggaaaaagcaatgggatcaatgaggctgaatgactcctaggttacaatggtacataggataaagaaaattttatgctgaaggcagttaatgctttcggacaagtttgcctcctggaattgatttggttgtgcttcttcgatttttttttcttttcctcaaaatcatagtaagtcatatgtaatttcaatgggaactataagaaacactttattgaaagtgttatgtaaaaagcttaagatgtatcttgtttttcgctttgaaggccatctcagtgagaattacaatttctgaaagccaagaccctcttgtcaaatatctatcacactggttttcaagatatatgtaagataaggaaagaggatgcttggtttttctttctaaaagtataatggtgcagctgagattgtgatattgctatgtatgcatttggaatatttattttctagtcagatactgttacaatttatcattgaagtactagattagcctttccctagagttagtttaaatggtgagtataaaatatagctattcgaaggcgaatttatatgaagtcttttatcatgattccatccgtttgtgaatgaagctgtccttatatttcatacacgtgttcaaaattcccaggctttgcttttgccataaggagcctgactcatcatgtttttgtgttttttaaaacaatacagcaacattctcttccttaagcctcacagtattctttcattggatagttgtcctctgggctaataccacagctatattttattttaaagacttcctaagatttcaatcacagtttatatattttttagagttaaggtatatatgcatactctttggggcttgagccttataatgagagtttagttatttctctccttattaaatgtttagaaatccctgttttatatgattcagccaaccaaatatgctttggtaacaagtagctccttttgcttaaaaaagtttttttcatcccctcccccagaaacctaaacacccaacaacaggaattattgccatcacattggcgttttacatatgtcacgaagttcacctagctggttttaaatacaacttttctgacctcaagagtcctttgcactactatgggaatgccaccatgtctttgatgaataaggtaatatactgtactttaggtaatatacatatgctttggactaatctttgagggatggaaagcccatattttctcttctcacactcattttactgagggaccacgttttgaagggttgagggcttgatggtgattacagggctaccaagggctgtaactagaactcatgtccaggatcattttactacagcatgaaatcccaatttatgggcctcatggttattgccaagtgtcatcaaacccatataagtacagaaccttactttagatattatatttgcactattgaaattcaggcaacctgctgtgtttgagatattacaaattcaccttgcattgctgtgcttaattattctcatttgtttttaagtagacaagatggtgtagaatattttaaccctacaagagaatcttcatgatcaaaaaggttaccaactttcatactggatcacacttctcttgaatagggattaatagtgaggatttgtattttattttttttaacaattttagtttaaattttttttttttttttgagagtctcactctgtcacccaggctggagtgcactggcatgatctcggcttactgcaacctgcaccccgcaggttgaagtgattctcctgcttcagtctccctagtttctgggataacaggcgcccgccaccacgaccggctaattttttttttttttttttgtatttttgtagagatgagtttttgccatgttggccaggctggtctcgaactcctggcctcatgtgatctgcccgccttagcctcccagagtgctgggattacaggcatgggccactgtgcctggctaaggatttgtaatttacttgactgggaaggagtttcctagttttgtaattctaacttaaattagtagtgcatcacaagtgatgggattaaaatgttatctgtatacttttaatattgaaatattacttgataaaaagtatatggatatatctcatgaaatcagtccccttgaatcaccccactatataagctgagaaagtggtataaatcaggttagatttagtattgtcttttgtccctcacccccaccctctgtccccaccaggtaagacaagcacttaagtatttcaagaatgaggtaccccaacagactttggattaggctgatttctcctccgccctaaactttcctgtagcacttgtggtatttcaagtgtcatctaaagagcagaatattaaaacaacttcctcaggaagaaaacttggatattcatgtatagaacagtaatttttaacacatcttaaactgaaccaggcattataatagtttatctccaggctgattttgtttgtttttaaactgatttctaggggcttcttccattaaagtgaacaactcaaaattttggtctccagatttgtattgtaccatgattcggtctaccagggtttgatatgaaggagtcttacttatgtgagagttgaaatggaaagagtgggctgtagggaaagcttttgcacaagaaccagcaaggaaagtaatttaaaaggctatcaaaagttaaaagtacatgcaactcgttacttaacattcgagttctttattcggatttttttagatataaagtactccattggtgctgctaatactttgagattgggaaagaatgatggtaattgtatttttcttctttagaacgcgtatcacaatgtgactgcagagcagctctttttgaaggacattatagaaaaaaacctcgtaatcaacttgactcaagattgactctacagactcagaagatgatgctaacagtgttagttttatttttgtactgcaatttttagtttaaaatatgttggatgcactcgtcaaataattatgtatactgtctgttgctgcctggtgattcataaccaccagcttaatttctgtgaatactgtatatttaacttatgaaaaccaagaaatgtaaagataacaggaaaataagttttgattgcattgtttttaaaataagctagttttctgaggtgttttcacacgtctttttatagttacttcatcttagatttttgaagggatatgacttcctactaaggatttagtttaccacaacaattctgactacaataagacattttgaggaggatatttggctactgtaaacatggctggtggaaaatcacgattgtggcttgatgtggcaagccgaaaccacttggctctggaaatctaagttcatactggtttaattaagctctctcctgacaacccccagaattaaatgaaccatgattgtgaagagtaatttggtacaatgaaggcagtgtttgtttttaagttaaaggaaatgggctaaacataaagttcttattagataagtaaataactaaagaaagaatacaattactaaactctgatggctttgtattattttaaagaaatgaagtttaactttatacagtgaagctaagctaggcaagctcaagaaggaaaaaaaaatcttgaacattatttttttttgcctgacttacttattcattaaattttgaaggttttccacttgaagtaaattaggaaaggtaaagaagataacagaacaagtaaacacttaagaaaagtcaagctgaggccgggcagggtggctcacacctgtaatcctaacaaacactttgggaggccgagggaggcagctggattgcctgaactcaggagttcaagaccagcctggccaacatggtgaaacctcatctctactaaaatacaaaataattagctgggcgtggtggtatgcgctgtagtcccaggtactcgggaggctgaggcacgagaattgcttgagcccgggaggcagaggttgcagtgagccaagatcgcgccactgcacttcagcctgggtgacagagtgaggctgtcttctaaaaaatataaaaagtgaagttgggatttttggatttaaatggtacaaaaagaatatctcattttcccatgattaaagctaatcttcagatggaaagcttgcctggctacctagggtgcaccagagaatctgatccaatgcaagccagtcaatcctacaaatgtggtgagctagtcttccttcctatattttaataaatgtaaccaaaggccatctggaggtaggggaatgagaggtgaagaaacagaaaaatagaggttataaggatggaactaaaagttgtcagaagaggtatgagctgaagaaagaattactctcttttgaccaataaatacaattgggaaacactggaaaaccatggcttgattactgacaaccaacctgcctctctaaagagggtgtataaagggtgaaatacattagatttggctcagaaacagaatgcggtacttataaagcagaataaaggggagaacagtagtagttgatctaacccagattagacatgaataccagcatatgtttgcagagtcccacagttttgattcctcttataactttttgaggtgcaaaaggaaggtaccagaactggaatcacatgtaatcaatcagtgtgattttcccctcataccacacagccataggctgcagtgtggctgctgaagttcaattgatataaagtaaatcaggcttcaaaaagaatggtgctgtgggtacacaaggacataaagatgggaacgatagacactgaggactgcggcggggggagcgaggggagcggggagggcaagggctgaaagactatgtattgggtactatgctcacaacctggatgatgggatcattcataccacaaacctcagtatcacacaatatacccatgtaacaacctgcactctgcacatgtacccttagaatctaaaataaaagttgaaattattttttt

SEQ ID NO: 96 - DNA, 26273 bp, Homo sapiens
tgcggggagccgagccgccggcgctcgacgcgcgcgctctcgcgagacccgcgggatcacgtgacgcccgggcgcggcgcagctcacgtgacaagcgctgccggccgcggtgtcttcttcgtgccggcgtcgcagtggccgggcctcttgcgtctggtaacgccgctgtctctaacgccagcccttggcgcccgcgccccgccaccgcagcgcccggcagtccgcggcccaaccgccgcccgcgcccccgctccccgcaccgtacccggccgcctcgcgccatggcggcccccggcagcgcccggcgacccctgctgctgctactgctgttgctgctgctcggtgagggggtcgaggcggggcctgggagcggcgggaccgggcggagccgaggtccctgggtcttgagggcgggggactgccgggtcgttgtcccgcgggtcgccccgcacccactgctcctggtcccggccggctctgcccgcgggcgggtgtttctctcggggtcgtagggtcggagcggagctcaatggcaggtgcttgggggaccaggaggtctcatcccaggacctggctcctctaaggtctgtctcactgaactcagtttttctgtggtggtgagtgcgaaagggaacttccgatggcttgctcggcggtctggtgctttcaggtcgttaagtttcctggcaagttgaggcggtgagatctagacgaggctgcgccgccgaaggtggcagggacgtctgtggtctcagctcccgggtgggtgacctagatcaagctcttcccaacatggatttcacccaggacagggagaagccggtgcgagcattccccacctttgtacttgaacctttctcctctttcagcggtgtggaggagatgcgagtgtatttatgttattgtgaattcacatgtatgttaaaataatttttaaagttatctttgggatttcacaagattccgtagtagacaagatgagggaaagctggcctcagactcacggtggcaatgttcatgtctagtaagtagtttaaagagcgccgttcctgtaggccgaaatgcgggaccagggaacacgtggggaagcacccttctcttctgtcagtttatagagctcagatgggcagtaggtgctcaatattgtattgactagtgaatttcgttctcatttattgtcttaataagaggatgtgtgctgtctctttaagacagtccggattgccccccgccaacactattctttcacctcctccccccgccgccctcccccgtaatatgagaagattatcttaaatgccaggatctgaaaggtgatgtagaatcaagctgggggagtgtgtgtgagttaagtagatatagaaatacactcctgtacacatctgccttgacttctttaaatccctcagtcccatccagctgtaaaactctgttactgtgagtgaatggatcttggcttcccttttttgttttgcctgttgtgtaaaatgaattctttgaactgcctgaatagccacagagatgaacttattccaatagtaagcctgaagccttgctcagctcctgcgacagggtcaggtgtagttaatgaaaggagttgcagaaacaagttttgtcatgtcacagcaactgcattgttctttgttacagatgctcacaagcctcataactttgatgttttgtttcatgttttaaaaactcacttcaggccgggagcagtggctcacgcctttaatcccaacactttgggtggccgaggcagatggatcatggcgtcaggagttcgagaccagcctggccaatatggcgaaacccggtctctacaaaaatacaaaaattagctgggcatggtggcgcacgcctgtaatcccagctacttggtaggctgaggcagaagaattgcttgaacccgggaagcagaggttgcagtgagctgagatcaagccactgcactccagcctgggcaactgagggagactccgtctcaaaacaaaaaaaaaattaactttaaaaatgaagagaaaaaatccataactccctaatattgtgattggaatattgcttgtgtaatcagtcttctaagatctgttccattatatcttttatgtttacaatcttaactttttttttttgaggcggagttgctctgtgcccaggctggagtgcagtggcacaacctcggctcactacaacttctgcctcctgggttcgagcaattcttctgcctcagcttcctgagtagctgggattacaggcacccgccactatgctaggctaatttatgtatttttggtagagactaggtttaactatgttggttagactggtctcgatctcccgacctcgtgatccgcctccctctgcctcccaaagtgctgggagtacgggtttgagccaccgtacttggcccaagaattttttttttttttttttgaggcagagtctcactctgtcacccaggctggagtgcagtggcgtgatctccgttcactgcagcctccgcctcttgtgttcaagcagttctcctgcctcagcctccctagtagctgggactacaggtgcgcgccaccatgcctggctaatttttgtagttttagtagagatggggtttcaccatgctggccaggctggtctcgaactgacctcgtgatccacctgcctcagactcccaaagtgctgggattacagccatgagccaccgtgcctagccaaaatccaacttttaaaaaaggccttttaacaacttgcatttaaagatatttaaaatgtttattttaatgtgcgatttcaccaaaaatccttttttcttaaaaaaagaaactgctcaattacaaatttccactatattaataattaggcattgtttaaagctactgtgtttgaatacttagaaagctcaaacatgaactgaaacttgtcctgatagataggattagctgtgattgcgtaatgtgaccctttaaaccattgatgtcagcaggatgaccgccttaccctttccacttgaacaactgtcacttaggaggtttgaacaattttatactcggctgggtgcagtggttcacgcctgtaatctcagcactttgggaggcccaggtgggcggatcagctgaagtcaggggtttgagaccagcctggccaatgtggtgaaaccccgtctctactaagaatacaaaaattagccaggcgtggtgtggtggcaggcgcctgtaattccagctacgtgggaggctgaggcaggagaattgcttgaacctgggaggcaggggttgcagggagctgagatcgtgccattgcactccagcctgggcaacaaaatcgaaactcaatgtcaaaaaaaaaaaaaaaaaaagaaaaagaaaagaaagaaaagctgggtgtggtggctcatgcctgtaatcccagcactttgggaggctgaggcaggccgatcactaggtcaagagatcgagaccatcctggccacaacatggtgaaactccatctctattctttttaaaaatatttttaaaaagttagccaggcgtagtggcacaggcctgtagtcccagttactcaggaggctgaggcaggagaactgcttgaacccggaaggtggaggttgcagtgagccgagatcgtgccactgctcttcagggcaacagagcgagactccatctcaaaaaaacaaagaaaaaaattttttttctactaaccgatgttacctttgattgtgcagattgtcagttatgcggtggaaagaatgaatttgtcagcagatttgaggtcagaatgtctttgtagccctgtaattttgaatttgtattgcattagccccatcccagacaacgttaccctttcttctctgtacccaagacttttattgcatgtgcttctacatggtaacatctgttcggctgcactgggattatttttgcctgtgtatctcccttccttaactgacaggtagtaagtgctgagtacatatatgaagaaaggatcaattttatagcagtggctctcaaccaaacatatgcacggatccacacgatcagctttttagaaatatacataccacagcgaggcacagtggctcatgcctgtcatctcagtgctttgaggctaaggcaggaggattgcttgagatcagcctgggcaacatggcgagaccagtgtctctacaaaaaaaattaaaaagaaatatacggccgggcacggtggctgtcacgtgtaatcctaacactttgggaggccgaggtgggtggattgcctgagctcaggagttcgagaccagcctgggcaatatggtgaaatcccatctctactaaaatacaaaaaaaattagtcgggcatggtggcgtacccctgtagtcatagctacttggaaggctgaggtaggagaattgcttgagcccgggaggcggaggttgcagtgagcgaagatcatgctactggactccagcctgggtgacagagtgagactctgtttccatttaaaaaaaaaaaaaaaaaatatatatatatatatatatatatatatatatatatatatatatatatttacacacacacacacttataccttgcctctagaggttgtgattcagtgcctgggatggtatttttttcctttagttcttcataaatgattgtgcatcattggttaagtagaataaaaataccatatttaaaagaatcaagccaagaaaaactaagatgtgatttcttttttttttttttttttttttgagacggagtctcgctctgtcgcccaggctggagtgcagtggtgcgatctcggctcactgcaagctccgcctcccaggttcacgccattctcctgcctcagcctcccgagtaccagggattacaggcatgcgccaccatgcccggctaattttgtatttttagtggtgacagggtttctccatgtttggtcaggctggtctcaaacgcctaacctcaggtgatctgcccacctcggcctcccaaagtgctgggattacaggcggtagccaccacacccagcctaagatgtaatttcttaataaattgttttttcttctttttttgagacagtctctttatgttgtccagtctggagtgcagtggcacgatctcagctcactgcaacctccacctcccgggttcaagtgattcttctgcctcagcctcccgagtagctgagactacaggcatgcgccaccatgcccgtctaatttttgtatatattttttagtagagacggggtttcaccatgctagctaggctagtctcaaactcctgacctcaggtgatccgcctgcctcagcctcccaaagtgctgggattacaggctgggattacgggctgtgcccggcctaattttttaaaatgaagttttttactcatttcttcagatggtaatctttaatgtcaaaagcgagtatttcttaatttttatttattttaattcaaaaaaattaaattttttttttaagagacaaggtcttgctgtgttgaccagcctggtctggaactcctaacctcaagcagtcctccgcttcctcagcctcccaaagtgctgagattacaggcatgagccactgcacccagccagtgtttcctcattggaagcccgttccctcagtcatcaagtgctggagaggcagcgtggctcagaagtggcacgtcctgtgagtcagaagaccccttctagatctaggtctccgccactcactagctgtgtgacctgggtgggttagttgacctctctatgccttaatctccctatgaagagttgtcatgataactgggatgtgcttagagcagcacctggcacaaagtaagtgcattccaagtgcttgttaaatgagatagtttttgatgttttgtgtcagatactgaggattgaatgatgaacttgatgggaaccctctgtacctgtgcagatgtttaataacagctgacatcaaagctggcgtcagtgccgggcaccaaatgctcagctgctccgacagccctgaggccttggcactctctcctcctgctcgtgggtgcagagactggggattgggctctgctactggccatggttgcacagctagtaagtgctgcaagaacctccaagaactgagggctgtgactcagaagcacgcatgcttcccacagcggcacttgtttcagagaacagaatttctcccaagtgggggtattttgaagccacagttactcctttatgtgatccctggagaagtggtcctgttcgtgtctgagtacaggactgccggagatagcagtcaccagtaggccagggtgcccaccttggagatgctgccaacggctgtcctgttgggctgtgacacctgtcaggttactggaaacattgtaacttacttgaggttttttgtctttttttttttttgctacccagttgccactgttgtggaggtttttaaaaaaacttctgacccttatagcatacatacatttcctcctcaagctctgtgtgctgatgctcttattttcttctataccaaaattgccttctgagggtaagtttattttaataactcaaaattcctgggtctctccagagtaatacaggcatcttgtgctgccaaagcttactttaaatttatttaaatgatatttctttgttttcctctgaaagctgagacctggctgggcatggtggcttacacccataatcccagcactttgtgaggctgaggcaggtggatcacttgaggcgaggagttggagaccagcctggccaacatggcaaaaccctgtctaccccgtctctactaaaaatacaaaaagtagccagacatggtggtacaaacctgtagtcccagctactcaggaggctgaggcacgagaatcgcttgaacctgggaggtggagggctactgcactccagcctgggcaagagtgagactcagtctctaaaaaataaaaataaaaaagctgaaaccctcagcatatttactaagtgaaaaaaaaattgtataattgaaaaatgacttagtttgaaatatttcctaatgaagtgcttcgggtcagtgaaaagtgtttgaggaaacttataaaagggcagcttaataaaagccagcctatggctgctcccatgtgggcatccgggttgtcagtggtgactgtgggccctgtgactcctcacctgagggcggggtgggcagtctccctgtccacgctgagctccagtcaagtgttaagtctctggcgtctgctgtgtctgcctgtccgctgcttctgccttgctggcgtctgctgtagcttctgtacactcatctgatctttcacaagagtgagaatattttgtctgtttttagaaacctttactatgtcaaaaataagtggtagaatcttccctagattctctagattcattggaaatgccgttagtatgatcctgcctcagtgttgcagagtgtggcttgaaaaaccaagcaaagcagacagtagattggaggtttccttgcacgccctactttgtttcattgtcgtgtagcaccttttctttttctttttttttttttgagacagagttttgctcttgtcacccaggctggagggcagtggtgcaatctcgactcactgcaacctcggcctccctggttcaagtgattctcctgcctcagcctccctagtacctgggattacaggcgcctgccaccatgcccagataatttttgtatttttagtagagacgaggtttcaccatgttgggtaggctggtcttgaactcctgacttcatgatccacctgcctcagcttcccaccaaagtgctgggattacaggcgtgagccactgtgcccggcagcaccttttctttatggacatagattttggtatttcctttaccaaagggaagataggtgggactacttctggttatatgcttcgctttaggcttgaagaacagttgctgtaaagattttattttgtgaaagacccaaggttgaaatgagtcggattcattggaatccattacttttccagggaataggattttaaatgaaaagctaagcatcctctctttcaatatctgccctcacagtgtgcctgagttgcatttacacttagagtgacagatgagactcgggtgtgtgtgtggttggaaggctgtgctcacgcagtgtgagatcagcccctgggtggtgagtgctcactggactggcatgcacgaacttgtagtggcagagacaagtgaaagcatgtcatttctgcacggattccagtggtggcagataggtgtttggcgttagaacaggcagaaacacctgttttccaatctgtaatgaaagaactgtgtaataacgtgcaatttgtacaattaccagtgtctctaccgtagtgatcagattacatttgttgccaaacatcttgatcagggaagtggagtatgagtaagtcagagaggaaatatttagcagtgaccactgtccagctggaaagacctatagagcttccattctgtccctttgcttcaggatggggaagggaagccactccaccgatgtgtagtgctgtgaggacctttctgaaattgggcaaagagctcagcactttgagtccatgagaaataaaactgaccagacgttaagtagcaggtgaggaccacagtgaaagatcctgcagcctctcccatggatttctgcagatgggtgagttgtgccttcaaggcaccacgtcttacagagatcctctgagaaaggcggaacagcgtatgcctaggatgatgcagaaattgacatgtgccttcctgataagtgttctggaataaagcactaaatagcaatagactaggttggcaaactcaatcagatgggcttagagataacaattccagaatagtatccgaaagggacagggcaccaggtgaactggctgcgtaatccatgtgtctggttgttcattgaatttaagaaacacagtggaggctgggtgcagtggctgacacctataatcccagcaccttgggaggccaaggtgggtggatcacctgaggtcaggagttcaagaccagcctggccaaagtggcaaaaccccgtcgctactaaaaacagaaattagctgggtttggtggcacgtgcctgcagttccagctacttgggaggctgaggcaggagaattgcttgaacctgggaggtggaggttgcagtgagctgagatcacgccactgcaccccagcctggcgacagtgagactccgtctcaaaaaaaaaaaaagagaaacagtggaatcttgtaataaaagccatcactgctacagctgtggaaaatggaaatactcggtcgtattttctggacagtttttgatggtctccgtcttccctggaattgacaggcctcatgcattgtgcgtcagcagcaatgtttatggtgaaaaatggcaacgggaccgcgtgcataatggccaacttctctgctgccttctcagtgaactacgacaccaagagtggccctaaggtaggaaacaccagggcacttcatgcttcccttgtgtgtgtggaaagatgatttttaacatttcaaccaagtctttgaaaaatggccccatctgaacatggtgcttttcctatctgcatatctccttctggtgttgtcagtaacctgcgctgtcatgtgccatagccacaggcacagtaacaaacctgtatatgtgctgcacctcactgttcatcatgaacattttcctttttttttttttttttttttttgagacggagtctcgctctgtcacccaggctggagtgcagtggcgcgatctctgctcactgcaagctccgcctcctgggttcatgccattctcctgcctcagcctccccagtagctggggctacaggcgctcgccaccacgcacagctaatattttgtatttttagtagagatggggtttcactgtgttagccttgatggtctcagtctcctgacctcgtgatccacccgccttggcctcccaaagtgctgggattacaggtgtgagccaccgcgcccagcctatcatcaacatttttctagttttcttttttttttttgagatggaatcttggtttgtcgcccaggctggagtgcagtggtacgatctgagctcgccacaacctccgtctcctgggttcaagcagttctcctgccttagcctcctgagtagctgggactacaggtgcccaccaccacgcctggctgatttttgtatttttggtagagacggggtttcaccatgttggccagggtggtctcaaactcctgacctcaagtgatctgcctgccttggcctcccaaagtgttggaattacaggggtgagccacccctcccagctctagttttcttcgtgattgtcttttataatcataatgtaatactttattatgttaattcaccataatttgttacacactcccctattagtaattggtaagttgtcttgaatctttttcatgctctgtgaatgtggcttttttgatttagagagttatactgcaagaaatgtatataaatggttggttgacatgcaatgcaaacactgtactagtttgattaaaatgttccttagtggttttgttgaaatggctttgtgtttctttgggatgactaaagccttttggaataacaaaatattttaaaaatccaagacatagtaagatcttatctcttttttaaaaaaaaaaaaaaaagccagacatggtggagtgtgcctgtggtcccagctacttgggaggctgaggtgggaggattgcttgagcctgtgaggtcgaggctgcagtgagctatgatcttgccactgcactccagcctgggtgacagagcgagaccatctccaaaaaaaaaaaaaaaaaaaaaaaatccagtctcaaattataaatacttgtcaaagccttttttcttttttctgagacagagttgcactctgtcccccaggtggctggagtacagtgccaagatctcggctcactgtgtcttccacctcccaggtttgagtgagtctcgtgcctcagcctcctcagtaggtgggacatcaggtgcatgccaccatggccagctaattatttgtatttttagtagagacggggttttgctatgttggccaggctggtcttaaactactggcctcaagtgatctgcccaccttggcctcccaaagtgctgggattacaggtgtgagctaccgtacctggcctccaagcactttttttttttttttttttttttttgaggcagagttttgctcttgtcacccaggctggagtacaatggcgcgttcttggctcactgcaacctctgcctcttgggttcaagcaattcttctgcctcagcctcccaagtagctaggattacaggcatgcgcccagctaatttttgtatttttagtagagacagggattctccatgttggtcaggctggtctcaaactcctgacctcaggtgatcttcccacgtcggcctccccaagtgctgggattacaggcgtggcccagcgtacctggtctccaagcactttttatttaatttctacatcacttttttaatgtttggttttggtggttggattttttaaatattctattataaattatgtttcacaagtgaggtcacctatatgctgttatgcactttgttatttcacagaacatgtctttatcaccttgtgtagtttcgtgttgttttttggcccacgttagtatactgcttcactgtagttcatttgacctatctagtttactttgatgaacattaagtggttttccagttgctcgttttgcttatagtagtaaatttaaacatttctgctataaacaccttctttgtttaaagaaacattatttaaatgaacatttctatagtaaaaaagtagtgatagcttttctcaaatatatatctcaccctgaagctggtgtgaattgtttcaatttcaagacgctttaaattctgttataaattatattaacataaaatgaatttatggggttgttttgttttgtttggagacagagtcttgctctgttgcccaggctggagtgcagtggtgcagtcgtagttcactgcagcctcaaacctaggctcaagcaatcctcctgcctcagcctcctgagtagctgggacgacaggcagacaccaccatgtctgattagtttattttgtttttgtagagatggggtcttgctatgttgcccaggctggtcttgaactcctgggctcaagcaatccccccacctcagcctcccagagtgttagcattacaggtgtgagccaccatgcccagctgcaaatttttgattatatgaattattaagccaactttctcttacacctgaaatacttttcagtcttttactgacatgtaatactaacctttttttggtttatattaaaaatgagtacctcagtagtgatatcttagttggaaatgaagtataagtttatatcagacttacagaaaatctctttctttgaacttttaataacctgcatcccaattgggttacatttaattgtgtttattctagaacatgacctttgacctgccatcagatgccacagtggtgctcaaccgcagctcctgtggaaaagagaacacttctgaccccagtctcgtgattgcttttggaagaggacatacactcactctcaatttcacgagaaatgcaacacgttacagcgtccagctcatgagttttgtttataacttgtcagacacacaccttttccccaatgcgagctccaaaggtaagaaccaaaatgggccgattatgaagtgatagaaaattgggttggaggattgtctaaagttacttttacctaagaagtacaggctgggtgtggtggctcacacctgtaatcctagcactttgggaggctaaggcagacagatcacttgaggtcaggagtttgagaccagcctggccaacattgcgaaacactgtctctactaaaaatactaaaattagccaggtgtggtggcgggcacctgtaatcccagctactcgggaggctgaggcaggagaatcgcttgaacccaggaggcagaggttgcagtgagccgagatggtgccactgcactccagcctaggcgaccaagtgagactgtctctaaaaaataaaaaacacacagccaggcgcggtggctcacgcctgtaatcccagcactttgggaggccgaggcgggcagatcatgaggtcaggagttcgagaccagcctgatcaacatggtgaaaccccctctctactaaaaatacaaaaattagctgggcgtggtggcgcgcgcctgtagtcccagctactcaggaggttgaggcaagagaatcgcctgaacccagaaggcggaggttgcagtgagccgagatcacgccactgtgctccagcttgggcgacagggcgagactctgtctcaaaaaaaataaaaaacacataaagtaaactaagtactataagtagtttgcaattgtgattttttttttttaatctagaaatcaagactggaatctataactgacatcagggctaaaataaaaaacacataaactaagtactgcaagtagtttgcaattgtgattttttttttttttaatctagaaatcaagactgtggaatctataactgacatcagggcagatatagataaaaaatacagatgtgttagtggcacccaggtccacatgaacaacgtgaccgtaacgctccatgatgccaccatccaggcgtacctttccaacagcagcttcagccggggaggtaggacgctgacccttggccctctggtgctagtggttgggtagctgggctgcagtggctgcgggtgacctcactgctctgtgtcctggtgctgggctctgcctggaacgcgtgtgcacacagccggcgacgtctctgcagaacgttctcatccttcttcctagggcaggtgacttgtagatgagggtagacacatgttgattaaaaagggtggaatattgaagtgaaatatcccgggacagagacagatgttgtgtggtctcccgtgggagctaaagcagtgggagtcggcggggggcgggtagagagagaggtgatcaccaggggctggggttaagttggtcagaagatagagcgtttccggaagacaggaggaattagtacagcatgtgactgcagttaataatgtattctggcttgaatattgctaagtagattttaactcttctcaccataaaaaagtaagtgtttgattttagctgtcacacatgtaggtgtatttcaaaacatcctgacacacatggtaaacgtatacaattattacttgaaaatgtcagaagggcaaagcagttgaaacctttgtgcttctactggggcagagatgatgggaccagggtcacagatctcttgcagtttgagccagttgccttcacacagagacatagtcttatctccatccagctctggccggccagcttagggacaggtgcagaaagaccaacgctgcctctctgaggaggtcagggctgcgatgatgtacctgctaacccagccgccgggctctggggtcaggcagggtccaggccacctcctagccctgtgatcttgagcagggtagtttacctctcattttctttgcatgtggcatgagattaaaagcctgtcttcaaaggttgttggaattaaaagagaaatgtatgcaaaatgtgtatctcagcatctggcacagagttaagtagcaagcacctggtaaatcctgttacttttgaggagcttctctcccgagcctcacagtccaggtcataggttgttgtcattttgctgaagcgtgagggcctgtgatttgccttagggtgagctttcccggctgatagaaatatgtatggagacatcccttagggtgggctttcctggctgctagaaatatatggagacatcacagccttctctaatcttgagagctactgtggagacctttggtttgcaacattcctcagcagtcttgcttaaaggctgaggagtgactgctgggctccacaggaggatcgtccgtctcactcctccccgaggagcaggtactcttgcaggtcggcaccccatggtgctgggccggtcttgcccacctccaatttccatacagcccatgagctaagaacggcttttcgatttataaatgtaacataccaaaaatcagaaaacgaatatttcttgacacataaagattatgtaaaattcagtgtccataagttaaattttcttggaacacagccacactcatttatttacacattatctgtggctgcttttgtattaacagtggcagggctgtgttgtcttgacagagagccacggcccacaaagtctgaaatatttactgtctgtagctttgcggcagactttgccttccctggtgagtgggtgaaaaggagcccaacttggaaaccccgggtgtgactgggacttgatggggccacgtgggctcccataggggaggcttggaaggaaacacacttaggagctgggtcctctgtaggtgctgctgcctttaatcctcaacacagggccccgggggccgtggtgacagccgctttcctggtgcagcctctgttcacacggagcctggagtcgtgtctgcttcatcaggaagagcgggctagagtcctctcacatgggccgcgtgtgtctgaggacggacgcctggcagcctgtctaggtgtgttcatgctctcagacacacctcagccagagctaaagataacttcagctaggggcagtgctccctaccaagtgggagttagcgtaacacatgggggtgactagtgttcacggttatcgatttccaaattatctgggctccacacctagctggctacctctgggctgcatcaatgtggcttgaagaggaaaaggaagggcacgcactctctgtcagagcttgggaaatgagagagaattggatgctgaccttgtccggggactccctactggctaggcctggacacggttgcagaacgtgtctcctccccatgtcgctctgtgaccgaggggtgcgcatggcatgaccgctcactcactcctgcctggaagtgaagggctgctaggtggaggtcagcaaggatgttgagtgccctgagacgggtggcaggattctctagatgaaaaataaggcttcacaggtccagagaagcttgctaggttcttttgagaaacctgtttcttcaggttaataattacttttaagatagactattttttagagcagtcttaggtttctgtgtattctctgccgctgcgcatgtacagccttcctctgtgtccagatcctggacgttggttccttttttaatggagaacacgcatgtgattccaaatggaaaaaggcccgacagcccagccctggccacttgcccctcctggaggcagccagtgtggagatgccagtgtgcctggggcgtggcctcctagagggagtcagtgtggagatgccggtgtgcctggggcgtggcctcctggagggaaccagtgtggagatgtcggtgtgcctggggtgtggcctcctggagggagtcagtgtggagatgcccgtgtgcctggggcatggcctcctggagggaaccagtgtggagatgtcagtgtgcctggggtgtggcctcctggagggagtcagtgtggagatgcccgtgtgcctggggcatggcctcctggagggaaccagtgtggagatgtcagtgtgcctggggcgtggcctcctggagggagtcagtgtggagatgcccgtgtgcctggggcatggcctcctggagggaaccagcgtggagatgccggtgtgcctggggcgtggcctcctagagggagtcagtgtggagatgcccgtgtgcctggggcgtggcctcctggagggaaccagtgtggagatgcccgtgtgcctggggcgtggcctcctagagggagtcagtgtggagatgcccgtgtgcctggggcgtggcctcctggagggaaccagtgtggagatgcccgtgtgcctggggcgtggcctcccggagggagtcagtgtggagatgcccgtgtgcctggggcgtggcctactagagggagtcagtgtggagatgcccgtgtgcctggggcgtggcctcctggagggaaccagtgcggagatgtcggtgtgcctggggcgtggcctcccggagggagtcagtgtggagatgtcggtgtgcctggggcgtggcctcctggagggagccagtgcggagatgcccgtgtgcctggggcggggcctcctggagggaaccagcgtggagatgcccatgtgcctggggcgtggcctcctagagggagtcagtgtggagatgcccgtgtgcctggggcgtggcctcctggagggaaccagtgtggagatgccagtgtgcctggggcgtggcctcctagagggagtcagtgtggagatgcccgtgtgcctggggcgtggcctcctggagggaaccagtgtggagatgtcggtgtgcctggggcgtggcctcctagagggagtcagtgtggagatgcccgtgtgcctggggcgtggcctcctggagggaaccagtgtggagatgtcggtgtgcctggggcgtggcctcctagagggagtcagtgtggagatgcccgtgtgcctggggcgtggcctcctggagggaaccagtgtggagatgtcggtgtgcctggggcgtggcctcctagagggagtcagtgtggagatgcccatgtgcctggggcgtggcctcctggaggcagccagtgtggagatgccagtgtgcctggggcgtggcctcctagagggagtcagtgtggagatgcccgtgtgcctggggcatggcctcctggagggaaccagtgtggagatgccagtgtgcctggggcgtggcctcctgagggagtcagtgtggagatgcccgtgtgcctggggcgtggcctcctggagggaaccagtgtggagatgtcggtgtgtctggggtgtggcctcctagagggaaccagtgtggagatgtcggtgtgcctggggcgtggcctcctggagggagtcagtgcggagatgcccgtgtgcctggggcgtggcctcccggagggagtcagtgtggagatgcccgtgtgcctggggcgtggcctcctggagggagccagtgcggagatgccagtgtgcctggggcggggcctcctggagggaaccagcgtggagatgccggtgtgcctggggcgcggcgtcctggaggctgggcttcctgcctgggtggcgcttcaccagaaagcctcatgtatcttgtctttttttttttttttttttttttttgagagggagtcttgctctgttgcccaggctggagtgcggtggtgccatctcggctcactgcaacctctgcctcccgggttcaagcgattctcctccctcagcctcctgagtagctgggattacaggtgcacatcaccacgtctggttaatttttatatttttagtagaggggggcgttgcaccatgttggccaggctggtcttgagctcctgacctcccaaagtgctgggattataggtgtgagccaccgtgcccggcccatcttgcctttcaatacatcatcttatctaaaaaagctcggggacctcatagattttattttaaaaggaaatgaagcacaagccacctttgaatggactttcctgttggttttgtaccttccttcctgagtatcttcaaagtagggcacatgtggctgggcacggtggctcagtcctgtaatcccagcactttgggaactcgaggtgggtggatcacctcaggtcaggaattcgagaccagcctggccaacatggcgaaaacccgtctctactaaaaatataaaaattagtcgggcgtggtggcaggtgcctgtagtcccccctactcaggaggctgaggcaggagaattgcttgaacccgagaggtggaggttgcagtgagctgagatcatgctactgcactccagcccagctgacagagtgagattccatctcaaaaacaaaaaaacaaagtagggcagatgactgtcactccagagggtctgagtgcagctctgcctgaggctggagtcagccagatatccatccaaaccggatttccagcccaggcccatatggggttagcagatctacagtgaggctcagccaggcttttgggtttatgagttcaccgggaggagtggggtgtcttcgtcttttatcctcagggtctgataggtgcacgcttgttgaatgaatcagaggactgcctgactcctgttaggagttgaaaatgaaggtcaccgtgtctcatctcccacccaatttggcatgattttttttttttttttttgaggcagagtcccgctctgtcaccccaggctggagtgcagtggcgtgatctctgctcactgcaagctccgcctcctgggttcacgccattcttctgcctcagcctcccaagtaggtgggactgtaggcgcccgccaccacgcctggctaatttttgtatttttagtagagacggggtttcaccgtgttaaccaggatggtcttgatctcctgacctcgtgatccgcccgcctcggcctcccaaagtgctgggattacaggcgtgagccaccgtgcccagctgcagcatttttttttcattcctaggaacagagtctgactcctagcttaaatggaaggaatcgatggtaaaacattggaggtggaggttgcagtgagctgagatggcgccgctgcactctagcctgggtggcagagcaactgagactctgtctcaaaaaaaaaaaaaaagaactaccatcagaaaggcggagaggatgagagtccctcaggacaggtgaaaggggcaggagaaggtcagaggcctgacacacccaacattgtcacaaaaaactgtaagagaggctgtgggagctatgagtcgggaacctgggtgcaaaccaatctcatcctcacagacacccttgagggtctgaattgcagcttgcaggttgatgtgagtatctgctgttgccgggagaggaggaggggccttcagagcacatgagctttggaaaggcccggctgtgtgctgctctccggagggtgctggaggaggtgtgacagtggaccctcaggtctccccagaggctcctgtgccaccatctccccccgggcagcgcagggcactctccagtgcgttccgtgatgagctctccgtcactgtcctccgccctcagcaggaaagactttggtatttagtacgcattcagggaaggagagtgtgggtttgcgtttgtaattcaggtagaaggacgagggcattttatccacacttatttctcaagttccagttttttaaactggtggttagacctgatgatgttttatttgtgtttccagcttcttgtgaccactctacagaaacagggtgggaaatgaatgtgccacatggatcacaggtgaaaaacaattgtcaaagcagcgtaggttacactttttctgtgcgtcgtgtggccatctagactagaatttggacaagactggccggttttgcacatttaacttttgcctgtttaaccctggtctgtaacattttataaaggaaccgtgaagctgcttttttttttttttttttgagacagggtctcccaggctggagtgcagtggcacaataactgctcactgcagcctcagcctcccaggctccagtgaccctccctagtcagccttctgagtagctaggactaaggcgcatgccaccatgcctggctcattttttaaaaaaactttgtggagatgggggtctccctatgttgcccaggctggccttgaactcctgggctcaagcagtcctccttccttggcctctcaaagccctggaattacaggcatgagccactgcgcccagcaagtgaagctgttttggaaaggactggtcaacctgcagcttcgccaagggcagtgagcaagggtccctgagcacatcccaggttgggacggctcccagtggccgtcagtgcctctcacttcagagtttggtgtggttactgcagctcctctctgccatcttgtgctctgtccagaaggggcttttacaccggggtgcgggggcactcctgtgtgtgtctcagaacccgttggggtgcagtcataggcgacgttgcctgtctctttcctgccctgagtagatgggatatgaaggtgggaattggccactgaatgttgagatggaagcggaagcagcaggtgactgatggagttatgagtggcagattccctgcagggttgcccaccctggatatgtggggctcacgcgtggtgactcagcctagcagagatgtggaaaggatcgaattgggtggaaattatataaatattattcttgagtatccacagaaacaaggtggtaaaagaaagaacctgatttcaaggttgatggtgtgttagtgagagtgttggccacagaagactcggtagagctctacctagggttcagtctgtcttgactttgaatataaatttgtgttgtgaacatcttggtgggtgaattgctgaaggacagagtcacattcagactgctgggcattccccaggggtgccatgtgcccccccacccccacggattccctgaactgtgccctcttgtctggggatttcagacgcacccacactcactgccttctccctcgtgaggatgcttgcccatcccccacagccccctccccaaatgaagacccaacacagctggctagccttgcccgcctttgagtctctgctcacacgtggggtcctcatggagactgcctgacccctgtcctgccagagggcctccttggctgctctgcgtcccacctggccggtctgtgtgtgctgcagaccctctgtttccctctgggtagtgtttccagcacgatcctggcgctcacccgacagctcagggagcagtgtctgagtcgtcaccatttcccatggggtgaggtggccggccacgcagcacagcttcctgcgtccactccttcgtgacagcgttcaaggctttctcaccctcactttaggaagagggtggcacagtggcccctgtccagccacggggcttggggtgtggtgggcggtgcctgctgcccaggcagaaccgtcctgggtagtgggaggtggaggctgagggtgccccacgggcctgtgcctaccgccctgagccgtctgcaggacccagctctttcctgcgcgtctagaaaggcattagcgagagccaccttgggagactgagaaaatagtcaccaaggacgccagagtccacagatgtagttttgtttctgagtttggatcttactgtaactgctgatggttatgagaaacccagacctgaatctccctccactgcacctgcagagacacgctgtgaacaagacaggccttccccaaccacagcgccccctgcgccacccagcccctcgccctcacccgtgcccaagagcccctctgtggacaagtacaacgtgagcggcaccaacgggacctgcctgctggccagcatggggctgcagctgaacctcacctatgagaggaaggacaacacggtagggctggggcctcacctgggagagggggacggcacggtagggctggagcctctgctccctgtgcactgagaacacgcgtctctgcacgtcatgctgttaagtcaggatgggagcttagcttgcaggacgtgaccctagaggacaagagctggcgtctgtgtcagtgagtccattttgtaggatcacagccgtcctgctggttccatcatccaaggctggtgtcccagcatggcctattgggcagtgtggcccacagagcctacaacttggcccctgatagaacctaagttttctttacatatttatcatggaaacatttaagtgttacatttttatagttttcttttgaaatagtttttctcccctagtagtgacaggctgtggggttgtgggggtcgacttgcgtgccgtggggtgagtttgcagggctgactgctgcagggggaggtggtgctgctggttgccctccacgcggggacgctgcactccaagagcagctgtcacggggtcagggagagtcatcttgggatcccgaaatctgtactagtgtggtctttcagtgttttccttctggttttggttaaaacaaatgtggccttgaattcacggtttcaggactgtttgtcttttcgagagtgtggaggacctgagctagggtggtgacttgcttgcttgtcttatgcagacggtgacaaggcttctcaacatcaaccccaacaagacctcggccagcgggagctgcggcgcccacctggtgactctggagctgcacagcgagggcaccaccgtcctgctcttccagttcgggatggtgaggctggggcggcacctctctgggggcgcccactgtgtctccaccacatctttttgtgccctgggtctgctcatgggaggcagcgttaggaaggaggcggcctcacttttttctgccttccctttatcctgggctttttagttccttggttcccctcccccctttccattccattcatagatgcagcagatgatgtgggcggggctgctgtgcccacagttggagtggctgcaggggagggcatgcaggccgtgcggccttctggcttcagatgctgctgccctgtggttccgtggtggcatttctgcctgggaggactcctgtgcagttagcaacataagacatgaagcatataattgtcacttgtcagtctttttaaatcgctgtgcaaatgaattaacagttcagtttcttataattttagctttccaaatcatgctttcctgtgctgtgatagctcctgcagtccccgttttccagagactgactctcaagaggtctggaaggaccagcctgggcagcacagggaggctccatttctgcaaataataaaacgagttagctgggcgtagtggcgcacacctgtggtcccagctacttgggaggctgaggtgggaggatcacttgagcccaggagttaaggttgcgatgagccgtgatcactccactgcactccagcctgggtgacagagcaagactctcagagaagggtctggaaggaactaaccaaaattttcattccccagagatacacaacgccttttatagacaagatcttttgcagttttgttctaatactagaaatgtaggaagtcaggtttattacccaatgaccattcacgtttgatgataaatgtgtgaatctactggggttaaagatcatctttctatgaatctgctccgtgattaaagatcatttttctttttaagaatgcaagttctagccggtttttcctacaaggaatccagttgaatacaattcttcctgacgccagaggtgagaacccacaatctctgcgagccccgcccccgcccgcgcgcccagggtattctggagccactagacctctgtgtgtgttgcagaccctgcctttaaagctgccaacggctccctgcgagcgctgcaggccacagtcggcaattcctacaagtgcaacgcggaggagcacgtccgtgtcacgaaggcgttttcagtcaatatattcaaagtgtgggtccaggctttcaaggtggaaggtggccagtttggctctggtgagtgtcaccgagggcagctgtcgcggggtgtggaggacgtgcttcagactccgcctgtggacgtttagtcgcttccgtgtgggctggggcgacgcccctgttcctctgcaaggagctgtttcttcttgccggtctgagattctagaggtaactccccctgctttagagaggcccagcgtgtctctcagctgggagcccctggtaccatttgagagtaagggaatcattttaagaaacagtggtggcgcttctcccatgaacgttgaatacaacactgtcatctgatgtgcacagaggccctggacgcagcacagctgtccggccacagcccctgattccagacgggggagagacgtgtgtggtttcctcgccgtgcagagagcaccagtctctgcagcggcttccccaagtgacaattccagctagagctggaaccttccgccagggttcctctttgccttttggctgatgtgggggagtggtggggagagaggcctgtttgcaggcccctgtgtgagcagagccctgacaccatccgtctgtcttggcagtggaggagtgtctgctggacgagaacagcatgctgatccccatcgctgtgggtggtgccctggcggggctggtcctcatcgtcctcatcgcctacctcgtcggcaggaagaggagtcacgcaggctaccagactatctagcctggtgcacgcaggcacagcagctgcaggggcctctgttcctttctctgggcttagggtcctgtcgaaggggaggcacactttctggcaaacgtttctcaaatctgcttcatccaatgtgaagttcatcttgcagcatttactatgcacaacagagtaactatcgaaatgacggtgttaattttgctaactgggttaaatattttgctaactggttaaacattaatatttaccaaagtaggattttgagggtgggggtgctctctctgagggggtgggggtgccgctgtctctgaggggtgggggtgccgctgtctctgaggggtgggggtgccgctctctctgagggggtgggggtgccgctttctctgagggggtgggggtgccgctctctctgagggggtgggggtgctgctctctccgaggggtggaatgccgctgtctctgaggggtgggggtgccgctctaaattggctccatatcatttgagtttagggttctggtgtttggtttcttcattctttactgcactcagatttaagccttacaaagggaaagcctctggccgtcacacgtaggacgcatgaaggtcactcgtggtgaggctgacatgctcacacattacaacagtagagagggaacatcctaagacagaggaactccagagatgagtgtctggagcgcttcagttcagctttaaaggccaggacgggccacacgtggctggcggcctcgttccagtggcggcacgtccttgggcgtctctaatgtctgcagctcaagggctggcacttttttaaatataaaaatgggtgttatttttatttttatttgtaaagtgatttttggtcttctgttgacattcggggtgatcctgttctgcgctgtgtacaatgtgagatcggtgcgttctcctgatgttttgccgtggcttggggattgtacacgggaccagctcacgtaatgcattgcctgtaacaatgtaataaaaagcctctttctttt

SEQ ID NO: 97 - DNA, 4197 bp, Homo sapiens
agttaaaagggtgggagcgtccgggggcccatctctctcgggtggagtcttctgacagctggtgcgcctgcccgggaacatcctcctggactcaatcatggcttgtgtgagtgtggggacccccccccaaggtccaggggatagggcaggaactgatggccagaggagagctgggcagatcgggagcagattctagccccagctgtgtggcctggaaccagtgccttctcttttctggacctcagtggccacatctgtaaaatgggggtgggcgccatggtccctcaaggccttctctgcattgataattgtctggattcctccagggtctgaaagcacagttatttctgcccagggttgacattctgcagctctctgagaagtgagcgtgggaagggtgtggccaactgggggacacccaggccactatccctttccccctcctccaccccaaagagcctcctgtcccctcccccctgcagctgtcccggtcaccaggccagggcagagttaccctctgctccagagaacgctgaaaagttgccaggacccgagacaagctgcccaggatgggcccttctaggtcgggggtggagggtggttgtgtccaggctggtggcggggggggcgggggaaattcccttccaccacccccaagctgggaggttggggtggcagggaggtgagaatcttcctcgggccccagggaaagggttcaagtttctggcagaagaaaccactcaaaccagttaactcttgcccacccactcggggtgccagggaacagcagtgcccagcagtttgctcaatcttgttaaccctgagccagcccagccacagcccgactgcagggctattctccctaatgcagagaggccgtgtttttcagggtctcctctctagcccctgggcctctttgcagagaggggcttgaaggagaatagtggggtcgcccgcccctagccacttcctctccagcagaggggccggcccctccattcagtgtgacggtgggccaagtgtcggcccctccccagcctgatcctctccatctgcgatgggacagagcaccccatctcccaagtcactcttgagtccaaaattcccaagccaatctgcaaaatcttctagagcctgtcttctagaaccttcacgttacagactgaagccaaccccggtgggaatagggactttcccaggaccacatagacaatcggaggctggaaattacagctcaatcctttccccaggcttccccttggcttggtcagaggatgccgggcgggaacaaccccactcccacccccagccacccccggacacttcgagcagtggaggccttgtcctctaacccggctgggccggggcttgtctgtgcagggtctggtcgccagcaacctgaatctcaaacctggagagtgccttcgagtgcgaggcgaggtggctcctgacgctaagaggtgagaagtgaagtcggggtggtgggcggcagggacgggcttggtccagcagggagggcgtggccggccaagcccacatctcctccctggccgggagcgggttaacggccagccgccgatgctgcgttttctgggtgactcacttcccccgcagggtctgggcgcccccaccgttgccgccccctcccccgctccctccctgctgtagcctcttaaactaaaccagctgcagcctcgtcatctgtaataccttgactcccccgcccccacccctttccggtctgggcgggacctgtcgctggggagggcggggagaggagtggggcgggcgtcaccgccgccttccccctgagtccctccttcctgcgtctggtcattcattcattcactggctcagtccggtccttcttccttcacttctcattcactcagacggctgccttattttctcggcagttaggtgaccttggaccagtcaaccaacctcacctagcctcagtttgttagaaaaacaaggggggaggtggttgtgtggaggaagtgagatgcggctggcgcagtgacagtgaggaggatgaggatcagctgatattgttaagagccgcacacttctcatgcactaatttcatttcaaccaaaccctcagaggcaggtattgctattatcaccactcaacaaatgtatttattattttatttatttatttattattttattattttatttatttattttttgagacacagtctcaccctgtcgcccaggctggagtgcaatggcgtgatctcggctcaccacaacctccgcctcccgggttcaaacgattctccggcttcagcctcctgagtagccgggattacaggggcccaccacaacgcccagctaatttatgtacttttagtagagacggggtttcaccatgttggccaggctggtctcgaactcctgacctcatgatctgcccgctcgcctcggcctcccaaagtgctggggttacaggcatgagccaccgtgcccgggagtattattattattatttgttaattcgccccataattactaagcatctttttctggtgtgccccacttgtgctgggcaccgggaatacagagatgtacaagacaggacgggaggtcaccatctggagggagtcactgaccttgaccaaacgggctaggatgctaatgacttcaagaatcaagcgagccctcctgtgcagcccccattgtacagatgagcaaacaggggaagaggggcaggagcaggtggcatggccagagctagaatccaggtttcttgtctctgttagtgagttcttccagcaaggtgcgttcatgggatactgagtgacagattagtcggtcagtggggctggagctggccgaggtggcctcatgcccacccgttaccccccagcttcgtgctgaacctgggcaaagacagcaacaacctgtgcctgcacttcaaccctcgcttcaacgcccacggcgacgccaacaccatcgtgtgcaacagcaaggacggcggggcctgggggaccgagcagcgggaggctgtctttcccttccagcctggaagtgttgcagaggtgggctgcagaccggaaccggggaccagggacaggggctgggtgggctggggcggggctgggttagtgactagagaccttggccctgcctgctctttcccctccccttccctcccttcctgtgtgatggccagtgtctgcccctctttgaacctcagtggttgattacaataaaacgaaggggaaaaaaaaaggctgggcttggtggctcatgcctgtaatcccagcactttgggaggccgaggcgggcggatcacctgaggtcgggagttcgagaccagcctgaccaacatggagaaaccctgtctcgactaaaaatacaaaaaattagctaggcgtgatggcgcatgcctgtaatcccagctactcaggaggctgaggcaggagaattggttgaacccgggaggcggaggttgcagtgagccgagattgcaccactgcactccagcctggccaacaagagcaaaactctgtctcaaaaaaaaaaaaaaaaattagccagcgtgctggctcatgcctgtaatcctggcactttgggagaccaaagtgggtggatcacctgaggtcaggagttcgagaccagcctgaccaacatggtgaaaccccgtctctatataaatacaaaaattagctgggcgtggtggcacacaactgtagtcctagctactcaggaggctgagacaggagaatcacttgaacctgggaggcggaggttgcagtgagccgagattatgccactgtactccagcctgggcgacagaggagactccatctcaaaaaaaaaaaaaaatctatcataggattagagtaaaaagaaagaaaaaatattataaatgtacctccgcaggctcagccacaaactggggctgtgtcagggccacatgaggaacgggttctggaagggcccatggcatgtgggcccggctcactgctctcctctacccccaggtgtgcatcaccttcgaccaggccaacctgaccgtcaagctgccagatggatacgaattcaagttccccaaccgcctcaacctggaggccatcaactacatggcagctgacggtgacttcaagatcaaatgtgtggcctttgactgaaatcagccagcccatggcccccaataaaggcagctgcctctgctccctctgaa

SEQ ID NO: 98 - DNA, 5643 bp, Homo sapiens
gagagcgccgagacgcgcggggcgcggagatgtgcaagtggcgaagcttgaccgagagcaggctggagcagccgcccaactcctggcgcgggatctgctgaggggtcacgattttaggtgatgggcaagtcagaaagtcagatggatataactgatatcaacactccaaagccaaagaagaaacagcgatggactccactggagatcagcctctcggtccttgtcctgctcctcaccatcatagctgtgacaatgatcgcactctatgcaacctacgatgatggtatttgcaagtcatcagactgcataaaatcagctgctcgactgatccaaaacatggatgccaccactgagccttgtacagactttttcaaatatgcttgcggaggctggttgaaacgtaatgtcattcccgagaccagctcccgttacggcaactttgacattttaagagatgaactagaagtcgttttgaaagatgtccttcaagaacccaaaactgaagatatagtagcagtgcagaaagcaaaagcattgtacaggtcttgtataaatgaatctgctattgatagcagaggtggagaacctctactcaaactgttaccagacatatatgggtggccagtagcaacagaaaactgggagcaaaaatatggtgcttcttggacagctgaaaaagctattgcacaactgaattctaaatatgggaaaaaagtccttattaatttgtttgttggcactgatgataagaattctgtgaatcatgtaattcatattgaccaacctcgacttggcctcccttctagagattactatgaatgcactggaatctataaagaggcttgtacagcatatgtggattttatgatttctgtggccagattgattcgtcaggaagaaagattgcccatcgatgaaaaccagcttgctttggaaatgaataaagttatggaattggaaaaagaaattgccaatgctacggctaaacctgaagatcgaaatgatccaatgcttctgtataacaagatgacattggcccagatccaaaataacttttcactagagatcaatgggaagccattcagctggttgaatttcacaaatgaaatcatgtcaactgtgaatattagtattacaaatgaggaagatgtggttgtttatgctccagaatatttaaccaaacttaagcccattcttaccaaatattctgccagagatcttcaaaatttaatgtcctggagattcataatggatcttgtaagcagcctcagccgaacctacaaggagtccagaaatgctttccgcaaggccctttatggtacaacctcagaaacagcaacttggagacgttgtgcaaactatgtcaatgggaatatggaaaatgctgtggggaggctttatgtggaagcagcatttgctggagagagtaaacatgtggtcgaggatttgattgcacagatccgagaagtttttattcagactttagatgacctcacttggatggatgccgagacaaaaaagagagctgaagaaaaggccttagcaattaaagaaaggatcggctatcctgatgacattgtttcaaatgataacaaactgaataatgagtacctcgagttgaactacaaagaagatgaatacttcgagaacataattcaaaatttgaaattcagccaaagtaaacaactgaagaagctccgagaaaaggtggacaaagatgagtggataagtggagcagctgtagtcaatgcattttactcttcaggaagaaatcagatagtcttcccagccggcattctgcagccccccttctttagtgcccagcagtccaactcattgaactatgggggcatcggcatggtcataggacacgaaatcacccatggcttcgatgacaatggcagaaactttaacaaagatggagacctcgttgactggtggactcaacagtctgcaagtaactttaaggagcaatcccagtgcatggtgtatcagtatggaaacttttcctgggacctggcaggtggacagcaccttaatggaattaatacactgggagaaaacattgctgataatggaggtcttggtcaagcatacagagcctatcagaattatattaaaaagaatggcgaagaaaaattacttcctggacttgacctaaatcacaaacaactatttttcttgaactttgcacaggtgtggtgtggaacctataggccagagtatgcggttaactccattaaaacagatgtgcacagtccaggcaatttcaggattattgggactttgcagaactctgcagagttttcagaagcctttcactgccgcaagaattcatacatgaatccagaaaagaagtgccgggtttggtgatcttcaaaagaagcattgcagcccttggctagacttgccaacaccacagaaatggggaattctctaatcgaaagaaaatgggccctaggggtcactgtactgacttgagggtgattaacagagagggcaccatcacaatacagataacattaggttgtcctagaaagggtgtggagggaggaagggggtctaaggtctatcaagtcaatcatttctcactgtgtacataatgcttaatttctaaagataatattactgtttatttctgtttctcatatggtctaccagtttgctgatgtccctagaaaacaatgcaaaacctttgaggtagaccaggatttctaatcaaaagggaaaagaagatgttgaagaatacagttaggcaccagaagaacagtaggtgacactatagtttaaaacacattgcctaactactagtttttacttttatttgcaacatttacagtccttcaaaatccttccaaagaattcttatacacattggggccttggagcttacatagttttaaactcatttttgccatacatcagttattcattctgtgatcatttattttaagcactcttaaagcaaaaaatgaatgtctaaaattgttttttgttgtacctgctttgactgatgctgagattcttcaggcttcctgcaattttctaagcaatttcttgctctatctctcaaaacttggtatttttcagagatttatataaatgtaaaaataataatttttatatttaattattaactacatttatgagtaactattattataggtaatcaatgaatattgaagtttcagcttaaaataaacagttgtgaaccaagatctataaagcgatatacagatgaaaatttgagactatttaaacttataaatcatattgatgaaaagatttaagcacaaactttagggtaaaaattgccattggacagttgtctagagatatatatacttgtggttttcaaattggactttcaaaattaaatctgtccctgagagtgtctctgataaaagggcaaatctgcacctatgtagctctgcatctcctgtcttttcaggtttgtcatcagatggaaatattttgataataaattgaaattgtgaactcattgctccctaagactgtgacaactgtctaactttagaagtgcatttctgaatagaaatgggaggcctctgatggaccttctagaattataagtcacaaagagttctggaaaagaactgtttactgcttgataggaattcatcttttgaggcttctgttcctctcttttcctgttgtattgactattttcgttcattacttgattaagattttacaaaagaggagcacttccaaaattcttatttttcctaacaaaagatgaaagcagggaatttctatctaaatgatgagtattagttccctgtctcttgaaaaatgcccatttgcctttaaaaaaaaaagttacagaaatactataacatatgtacataaattgcataaagcataagtatacagttcaataaacttaactttaactgaacaatggccctgtagccagcacctgtaagaaacagagcagtaccagcgctctaaaagcacctccttgtcactttattactcccagaacaacaactatcctgacttctaatatcattcactagctttgcctggttttgtcttttatgcagatagaatcaatcagtatgtattcttttgtgcctggcttctttctctcagccttacatttgtgagattcctctgtattgtgctgattgtggatcttttcattctcattgcagaataatgttctattgtgggacttattacaatttgttcatcctattgttgatgggcacttgagaactttccattttggcgctattacaaatagtgcaactatgaatgtactgcatgttaccatcttacttgagcctttaatggacttatttcttcaaatccttccaaaaattattataagcattgaaattatagtttcaagccaactgtggatacccttaccctttcctcctttatcacaaccaccgttacaagtatacttatatttccctaaaatacatttaaaacttacctaagtgacatttgtagttggagtaataggagcttccagctctaataaaacagctgtctctaacttattttatttccatcatgtcagagcaggtgaagagccagaagtgaagagtgactagtacaaattataaaaagccactagactcttcactgttagctttttaaaacattaggctcccatccctatggaggaacaactctccagtgcctggatcccctctgtctacaaatataagattttctgggcctaaaggatagatcaaagtcaaaaatagcaatgcctccctatccctcacacatccagacatcatgaattttacatggtactcttgttgagttctgtagagccttctgatgtctctaaagcactaccgattctttggagttgtcacatcagataagacatatctctaattccatccataaatccagttctactatggctgagttctggtcaaagaaagaaagtttagaagctgagacacaaagggttgggagctgatgaaactcacaaatgatggtaggaagaagctctcgacaatacccgttggcaaggagtctgcctccatgctgcagtgttcgagtggattgtaggtgcaagatggaaaggattgtaggtgcaagctgtccagagaaaagagtccttgttccagccctattctgccactcctgacagggtgaccttgggtatttgcaatattcctttgggcctctgcttctctcacctaaaaaaagagaattagattatattggtggttctcagcaagagaaggagtatgtgtccaatgctgccttcccatgaatctgtctcccagttatgaatcagtgggcaggataaactgaaaactcccatttacgtgtctgaatcgagtgagacaaaattttagtccaaataacaagtaccaaagttttatcaagtttgggtctgtgctgctgttactgttaaccatttaagtggggcaaaaccttgctaattttctcaaaagcatttatcattcttgttgccacagctggagctctcaaactaaaagacatttgttattttggaaagaagaaagactctattctcaaagtttcctaatcagaaatttttatcagtttccagtctcaaaaatacaaaataaaaacaaacgtttttaatactattgcttttatgcctagtcaactctg

SEQ ID NO: 99 - DNA, 5734 bp, Homo sapiens
acattcctactgagtatgacgaatggttgttgatggttatcactggagattgaaaactgggattcctttttcaccaggaattggtgcctaccatggctggggatacacagtgatggatttgtgacttgctcctctgaaagctggcccaagggtgtacagcatatgaatgtgggggagtttacactacacacgctcttggctattttaggtgatgggcaagtcagaaagtcagatggatataactgatatcaacactccaaagccaaagaagaaacagcgatggactccactggagatcagcctctcggtccttgtcctgctcctcaccatcatagctgtgacaatgatcgcactctatgcaacctacgatgatggtatttgcaagtcatcagactgcataaaatcagctgctcgactgatccaaaacatggatgccaccactgagccttgtacagactttttcaaatatgcttgcggaggctggttgaaacgtaatgtcattcccgagaccagctcccgttacggcaactttgacattttaagagatgaactagaagtcgttttgaaagatgtccttcaagaacccaaaactgaagatatagtagcagtgcagaaagcaaaagcattgtacaggtcttgtataaatgaatctgctattgatagcagaggtggagaacctctactcaaactgttaccagacatatatgggtggccagtagcaacagaaaactgggagcaaaaatatggtgcttcttggacagctgaaaaagctattgcacaactgaattctaaatatgggaaaaaagtccttattaatttgtttgttggcactgatgataagaattctgtgaatcatgtaattcatattgaccaacctcgacttggcctcccttctagagattactatgaatgcactggaatctataaagaggcttgtacagcatatgtggattttatgatttctgtggccagattgattcgtcaggaagaaagattgcccatcgatgaaaaccagcttgctttggaaatgaataaagttatggaattggaaaaagaaattgccaatgctacggctaaacctgaagatcgaaatgatccaatgcttctgtataacaagatgacattggcccagatccaaaataacttttcactagagatcaatgggaagccattcagctggttgaatttcacaaatgaaatcatgtcaactgtgaatattagtattacaaatgaggaagatgtggttgtttatgctccagaatatttaaccaaacttaagcccattcttaccaaatattctgccagagatcttcaaaatttaatgtcctggagattcataatggatcttgtaagcagcctcagccgaacctacaaggagtccagaaatgctttccgcaaggccctttatggtacaacctcagaaacagcaacttggagacgttgtgcaaactatgtcaatgggaatatggaaaatgctgtggggaggctttatgtggaagcagcatttgctggagagagtaaacatgtggtcgaggatttgattgcacagatccgagaagtttttattcagactttagatgacctcacttggatggatgccgagacaaaaaagagagctgaagaaaaggccttagcaattaaagaaaggatcggctatcctgatgacattgtttcaaatgataacaaactgaataatgagtacctcgagttgaactacaaagaagatgaatacttcgagaacataattcaaaatttgaaattcagccaaagtaaacaactgaagaagctccgagaaaaggtggacaaagatgagtggataagtggagcagctgtagtcaatgcattttactcttcaggaagaaatcagatagtcttcccagccggcattctgcagccccccttctttagtgcccagcagtccaactcattgaactatgggggcatcggcatggtcataggacacgaaatcacccatggcttcgatgacaatggcagaaactttaacaaagatggagacctcgttgactggtggactcaacagtctgcaagtaactttaaggagcaatcccagtgcatggtgtatcagtatggaaacttttcctgggacctggcaggtggacagcaccttaatggaattaatacactgggagaaaacattgctgataatggaggtcttggtcaagcatacagagcctatcagaattatattaaaaagaatggcgaagaaaaattacttcctggacttgacctaaatcacaaacaactatttttcttgaactttgcacaggtgtggtgtggaacctataggccagagtatgcggttaactccattaaaacagatgtgcacagtccaggcaatttcaggattattgggactttgcagaactctgcagagttttcagaagcctttcactgccgcaagaattcatacatgaatccagaaaagaagtgccgggtttggtgatcttcaaaagaagcattgcagcccttggctagacttgccaacaccacagaaatggggaattctctaatcgaaagaaaatgggccctaggggtcactgtactgacttgagggtgattaacagagagggcaccatcacaatacagataacattaggttgtcctagaaagggtgtggagggaggaagggggtctaaggtctatcaagtcaatcatttctcactgtgtacataatgcttaatttctaaagataatattactgtttatttctgtttctcatatggtctaccagtttgctgatgtccctagaaaacaatgcaaaacctttgaggtagaccaggatttctaatcaaaagggaaaagaagatgttgaagaatacagttaggcaccagaagaacagtaggtgacactatagtttaaaacacattgcctaactactagtttttacttttatttgcaacatttacagtccttcaaaatccttccaaagaattcttatacacattggggccttggagcttacatagttttaaactcatttttgccatacatcagttattcattctgtgatcatttattttaagcactcttaaagcaaaaaatgaatgtctaaaattgttttttgttgtacctgctttgactgatgctgagattcttcaggcttcctgcaattttctaagcaatttcttgctctatctctcaaaacttggtatttttcagagatttatataaatgtaaaaataataatttttatatttaattattaactacatttatgagtaactattattataggtaatcaatgaatattgaagtttcagcttaaaataaacagttgtgaaccaagatctataaagcgatatacagatgaaaatttgagactatttaaacttataaatcatattgatgaaaagatttaagcacaaactttagggtaaaaattgccattggacagttgtctagagatatatatacttgtggttttcaaattggactttcaaaattaaatctgtccctgagagtgtctctgataaaagggcaaatctgcacctatgtagctctgcatctcctgtcttttcaggtttgtcatcagatggaaatattttgataataaattgaaattgtgaactcattgctccctaagactgtgacaactgtctaactttagaagtgcatttctgaatagaaatgggaggcctctgatggaccttctagaattataagtcacaaagagttctggaaaagaactgtttactgcttgataggaattcatcttttgaggcttctgttcctctcttttcctgttgtattgactattttcgttcattacttgattaagattttacaaaagaggagcacttccaaaattcttatttttcctaacaaaagatgaaagcagggaatttctatctaaatgatgagtattagttccctgtctcttgaaaaatgcccatttgcctttaaaaaaaaaagttacagaaatactataacatatgtacataaattgcataaagcataagtatacagttcaataaacttaactttaactgaacaatggccctgtagccagcacctgtaagaaacagagcagtaccagcgctctaaaagcacctccttgtcactttattactcccagaacaacaactatcctgacttctaatatcattcactagctttgcctggttttgtcttttatgcagatagaatcaatcagtatgtattcttttgtgcctggcttctttctctcagccttacatttgtgagattcctctgtattgtgctgattgtggatcttttcattctcattgcagaataatgttctattgtgggacttattacaatttgttcatcctattgttgatgggcacttgagaactttccattttggcgctattacaaatagtgcaactatgaatgtactgcatgttaccatcttacttgagcctttaatggacttatttcttcaaatccttccaaaaattattataagcattgaaattatagtttcaagccaactgtggatacccttaccctttcctcctttatcacaaccaccgttacaagtatacttatatttccctaaaatacatttaaaacttacctaagtgacatttgtagttggagtaataggagcttccagctctaataaaacagctgtctctaacttattttatttccatcatgtcagagcaggtgaagagccagaagtgaagagtgactagtacaaattataaaaagccactagactcttcactgttagctttttaaaacattaggctcccatccctatggaggaacaactctccagtgcctggatcccctctgtctacaaatataagattttctgggcctaaaggatagatcaaagtcaaaaatagcaatgcctccctatccctcacacatccagacatcatgaattttacatggtactcttgttgagttctgtagagccttctgatgtctctaaagcactaccgattctttggagttgtcacatcagataagacatatctctaattccatccataaatccagttctactatggctgagttctggtcaaagaaagaaagtttagaagctgagacacaaagggttgggagctgatgaaactcacaaatgatggtaggaagaagctctcgacaatacccgttggcaaggagtctgcctccatgctgcagtgttcgagtggattgtaggtgcaagatggaaaggattgtaggtgcaagctgtccagagaaaagagtccttgttccagccctattctgccactcctgacagggtgaccttgggtatttgcaatattcctttgggcctctgcttctctcacctaaaaaaagagaattagattatattggtggttctcagcaagagaaggagtatgtgtccaatgctgccttcccatgaatctgtctcccagttatgaatcagtgggcaggataaactgaaaactcccatttacgtgtctgaatcgagtgagacaaaattttagtccaaataacaagtaccaaagttttatcaagtttgggtctgtgctgctgttactgttaaccatttaagtggggcaaaaccttgctaattttctcaaaagcatttatcattcttgttgccacagctggagctctcaaactaaaagacatttgttattttggaaagaagaaagactctattctcaaagtttcctaatcagaaatttttatcagtttccagtctcaaaaatacaaaataaaaacaaacgtttttaatactattgcttttatgcctagtcaactctg

SEQ ID NO: 100 - DNA, 5757 bp, Homo sapiens
aggagagcgagctgagggagaaaggtccaaagggcgcgagcgcccagggcgctgggagcccgtgggacgggcacggggagggcagagccagccgaggggagcggctgccgggaggtgcgctgagcagggtccgcagctaaggtccagcgcgatccgagcgcccaggaccctgcggccgtggaggaggcgtgccctgggaaggagccgctactgggacctgaagaattttaggtgatgggcaagtcagaaagtcagatggatataactgatatcaacactccaaagccaaagaagaaacagcgatggactccactggagatcagcctctcggtccttgtcctgctcctcaccatcatagctgtgacaatgatcgcactctatgcaacctacgatgatggtatttgcaagtcatcagactgcataaaatcagctgctcgactgatccaaaacatggatgccaccactgagccttgtacagactttttcaaatatgcttgcggaggctggttgaaacgtaatgtcattcccgagaccagctcccgttacggcaactttgacattttaagagatgaactagaagtcgttttgaaagatgtccttcaagaacccaaaactgaagatatagtagcagtgcagaaagcaaaagcattgtacaggtcttgtataaatgaatctgctattgatagcagaggtggagaacctctactcaaactgttaccagacatatatgggtggccagtagcaacagaaaactgggagcaaaaatatggtgcttcttggacagctgaaaaagctattgcacaactgaattctaaatatgggaaaaaagtccttattaatttgtttgttggcactgatgataagaattctgtgaatcatgtaattcatattgaccaacctcgacttggcctcccttctagagattactatgaatgcactggaatctataaagaggcttgtacagcatatgtggattttatgatttctgtggccagattgattcgtcaggaagaaagattgcccatcgatgaaaaccagcttgctttggaaatgaataaagttatggaattggaaaaagaaattgccaatgctacggctaaacctgaagatcgaaatgatccaatgcttctgtataacaagatgacattggcccagatccaaaataacttttcactagagatcaatgggaagccattcagctggttgaatttcacaaatgaaatcatgtcaactgtgaatattagtattacaaatgaggaagatgtggttgtttatgctccagaatatttaaccaaacttaagcccattcttaccaaatattctgccagagatcttcaaaatttaatgtcctggagattcataatggatcttgtaagcagcctcagccgaacctacaaggagtccagaaatgctttccgcaaggccctttatggtacaacctcagaaacagcaacttggagacgttgtgcaaactatgtcaatgggaatatggaaaatgctgtggggaggctttatgtggaagcagcatttgctggagagagtaaacatgtggtcgaggatttgattgcacagatccgagaagtttttattcagactttagatgacctcacttggatggatgccgagacaaaaaagagagctgaagaaaaggccttagcaattaaagaaaggatcggctatcctgatgacattgtttcaaatgataacaaactgaataatgagtacctcgagttgaactacaaagaagatgaatacttcgagaacataattcaaaatttgaaattcagccaaagtaaacaactgaagaagctccgagaaaaggtggacaaagatgagtggataagtggagcagctgtagtcaatgcattttactcttcaggaagaaatcagatagtcttcccagccggcattctgcagccccccttctttagtgcccagcagtccaactcattgaactatgggggcatcggcatggtcataggacacgaaatcacccatggcttcgatgacaatggcagaaactttaacaaagatggagacctcgttgactggtggactcaacagtctgcaagtaactttaaggagcaatcccagtgcatggtgtatcagtatggaaacttttcctgggacctggcaggtggacagcaccttaatggaattaatacactgggagaaaacattgctgataatggaggtcttggtcaagcatacagagcctatcagaattatattaaaaagaatggcgaagaaaaattacttcctggacttgacctaaatcacaaacaactatttttcttgaactttgcacaggtgtggtgtggaacctataggccagagtatgcggttaactccattaaaacagatgtgcacagtccaggcaatttcaggattattgggactttgcagaactctgcagagttttcagaagcctttcactgccgcaagaattcatacatgaatccagaaaagaagtgccgggtttggtgatcttcaaaagaagcattgcagcccttggctagacttgccaacaccacagaaatggggaattctctaatcgaaagaaaatgggccctaggggtcactgtactgacttgagggtgattaacagagagggcaccatcacaatacagataacattaggttgtcctagaaagggtgtggagggaggaagggggtctaaggtctatcaagtcaatcatttctcactgtgtacataatgcttaatttctaaagataatattactgtttatttctgtttctcatatggtctaccagtttgctgatgtccctagaaaacaatgcaaaacctttgaggtagaccaggatttctaatcaaaagggaaaagaagatgttgaagaatacagttaggcaccagaagaacagtaggtgacactatagtttaaaacacattgcctaactactagtttttacttttatttgcaacatttacagtccttcaaaatccttccaaagaattcttatacacattggggccttggagcttacatagttttaaactcatttttgccatacatcagttattcattctgtgatcatttattttaagcactcttaaagcaaaaaatgaatgtctaaaattgttttttgttgtacctgctttgactgatgctgagattcttcaggcttcctgcaattttctaagcaatttcttgctctatctctcaaaacttggtatttttcagagatttatataaatgtaaaaataataatttttatatttaattattaactacatttatgagtaactattattataggtaatcaatgaatattgaagtttcagcttaaaataaacagttgtgaaccaagatctataaagcgatatacagatgaaaatttgagactatttaaacttataaatcatattgatgaaaagatttaagcacaaactttagggtaaaaattgccattggacagttgtctagagatatatatacttgtggttttcaaattggactttcaaaattaaatctgtccctgagagtgtctctgataaaagggcaaatctgcacctatgtagctctgcatctcctgtcttttcaggtttgtcatcagatggaaatattttgataataaattgaaattgtgaactcattgctccctaagactgtgacaactgtctaactttagaagtgcatttctgaatagaaatgggaggcctctgatggaccttctagaattataagtcacaaagagttctggaaaagaactgtttactgcttgataggaattcatcttttgaggcttctgttcctctcttttcctgttgtattgactattttcgttcattacttgattaagattttacaaaagaggagcacttccaaaattcttatttttcctaacaaaagatgaaagcagggaatttctatctaaatgatgagtattagttccctgtctcttgaaaaatgcccatttgcctttaaaaaaaaaagttacagaaatactataacatatgtacataaattgcataaagcataagtatacagttcaataaacttaactttaactgaacaatggccctgtagccagcacctgtaagaaacagagcagtaccagcgctctaaaagcacctccttgtcactttattactcccagaacaacaactatcctgacttctaatatcattcactagctttgcctggttttgtcttttatgcagatagaatcaatcagtatgtattcttttgtgcctggcttctttctctcagccttacatttgtgagattcctctgtattgtgctgattgtggatcttttcattctcattgcagaataatgttctattgtgggacttattacaatttgttcatcctattgttgatgggcacttgagaactttccattttggcgctattacaaatagtgcaactatgaatgtactgcatgttaccatcttacttgagcctttaatggacttatttcttcaaatccttccaaaaattattataagcattgaaattatagtttcaagccaactgtggatacccttaccctttcctcctttatcacaaccaccgttacaagtatacttatatttccctaaaatacatttaaaacttacctaagtgacatttgtagttggagtaataggagcttccagctctaataaaacagctgtctctaacttattttatttccatcatgtcagagcaggtgaagagccagaagtgaagagtgactagtacaaattataaaaagccactagactcttcactgttagctttttaaaacattaggctcccatccctatggaggaacaactctccagtgcctggatcccctctgtctacaaatataagattttctgggcctaaaggatagatcaaagtcaaaaatagcaatgcctccctatccctcacacatccagacatcatgaattttacatggtactcttgttgagttctgtagagccttctgatgtctctaaagcactaccgattctttggagttgtcacatcagataagacatatctctaattccatccataaatccagttctactatggctgagttctggtcaaagaaagaaagtttagaagctgagacacaaagggttgggagctgatgaaactcacaaatgatggtaggaagaagctctcgacaatacccgttggcaaggagtctgcctccatgctgcagtgttcgagtggattgtaggtgcaagatggaaaggattgtaggtgcaagctgtccagagaaaagagtccttgttccagccctattctgccactcctgacagggtgaccttgggtatttgcaatattcctttgggcctctgcttctctcacctaaaaaaagagaattagattatattggtggttctcagcaagagaaggagtatgtgtccaatgctgccttcccatgaatctgtctcccagttatgaatcagtgggcaggataaactgaaaactcccatttacgtgtctgaatcgagtgagacaaaattttagtccaaataacaagtaccaaagttttatcaagtttgggtctgtgctgctgttactgttaaccatttaagtggggcaaaaccttgctaattttctcaaaagcatttatcattcttgttgccacagctggagctctcaaactaaaagacatttgttattttggaaagaagaaagactctattctcaaagtttcctaatcagaaatttttatcagtttccagtctcaaaaatacaaaataaaaacaaacgtttttaatactattgcttttatgcctagtcaactctg

SEQ ID NO: 101 - DNA, 1343 bp, Homo sapiens
aggagagcgagctgagggagaaaggtccaaagggcgcgagcgcccagggcgctgggagcccgtgggacgggcacggggagggcagagccagccgaggggagcggctgccgggaggtgcgctgagcagggtccgcagctaaggtccagcgcgatccgagcgcccaggaccctgcggccgtggaggaggcgtgccctgggaaggagccgctactgggacctgaagagtgaggggagggagaggggcccagagggtgacctggaggagggctctggaagtcacgtcaggttggctcttcaggttcatttccatagttccctgcggcctctgccttggggagttatgttttgttaccgagatccgcgctaccagattgcaccggggctgatttgggggctgggaatttgccattctgctgtacagacactgatttttttttcttctttttaaaaagcaagattttaggtgatgggcaagtcagaaagtcagatggatataactgatatcaacactccaaagccaaagaagaaacagcgatggactccactggagatcagcctctcggtccttgtcctgctcctcaccatcatagctgtgacaatgatcgcactctatgcaacctacgatgatggtatttgcaagtcatcagactgcataaaatcaggcatggtagcacgcgcctataatcccagagggaggagaattgcttgaacccaggaggcagaggttgaagcgagccaagattgcacgactgcactccagcctggaagacagcgcaagactctatctccaaaaaaaagaaaaagacaacagagaattgaggggtctgcagaagcatatgttagaagtgtggtcctaaattatccagaggccagagaagccaagctaagacgtgatcaatacagtttacaagagaaagtgggaccacctccacctgtatagtcatgcaggttgtacactgcatatttgtcgatggcagccttgacagacaggcttgtggaacatcaagacctggatgaaacacctctcagaactgtccactccttttattttaattctgcacataccaagaaaacttttgatgattacttaattattaatacaaggagaggtggcattctgttacttgaaagatattttcatcatggtgagataatgcacagcggtccccttcttatcctctgaggatcccccaagacctcagtggatgtctgacactggactgaaccctatatatgctatattttttctgtatacatacctatgataaagtttaatttataaattagacaaagattaataacaataattaataaaaaataaaacgattaaaaaaaaaaaaaaa

SEQ ID NO: 102 - DNA, 5619 bp, Homo sapiens
cagcccgccactgccacccggccccgtgcgctcattggtcgggatgtgtcggctcagcagcctccaacttctcccgaatcccactgattttaggtgatgggcaagtcagaaagtcagatggatataactgatatcaacactccaaagccaaagaagaaacagcgatggactccactggagatcagcctctcggtccttgtcctgctcctcaccatcatagctgtgacaatgatcgcactctatgcaacctacgatgatggtatttgcaagtcatcagactgcataaaatcagctgctcgactgatccaaaacatggatgccaccactgagccttgtacagactttttcaaatatgcttgcggaggctggttgaaacgtaatgtcattcccgagaccagctcccgttacggcaactttgacattttaagagatgaactagaagtcgttttgaaagatgtccttcaagaacccaaaactgaagatatagtagcagtgcagaaagcaaaagcattgtacaggtcttgtataaatgaatctgctattgatagcagaggtggagaacctctactcaaactgttaccagacatatatgggtggccagtagcaacagaaaactgggagcaaaaatatggtgcttcttggacagctgaaaaagctattgcacaactgaattctaaatatgggaaaaaagtccttattaatttgtttgttggcactgatgataagaattctgtgaatcatgtaattcatattgaccaacctcgacttggcctcccttctagagattactatgaatgcactggaatctataaagaggcttgtacagcatatgtggattttatgatttctgtggccagattgattcgtcaggaagaaagattgcccatcgatgaaaaccagcttgctttggaaatgaataaagttatggaattggaaaaagaaattgccaatgctacggctaaacctgaagatcgaaatgatccaatgcttctgtataacaagatgacattggcccagatccaaaataacttttcactagagatcaatgggaagccattcagctggttgaatttcacaaatgaaatcatgtcaactgtgaatattagtattacaaatgaggaagatgtggttgtttatgctccagaatatttaaccaaacttaagcccattcttaccaaatattctgccagagatcttcaaaatttaatgtcctggagattcataatggatcttgtaagcagcctcagccgaacctacaaggagtccagaaatgctttccgcaaggccctttatggtacaacctcagaaacagcaacttggagacgttgtgcaaactatgtcaatgggaatatggaaaatgctgtggggaggctttatgtggaagcagcatttgctggagagagtaaacatgtggtcgaggatttgattgcacagatccgagaagtttttattcagactttagatgacctcacttggatggatgccgagacaaaaaagagagctgaagaaaaggccttagcaattaaagaaaggatcggctatcctgatgacattgtttcaaatgataacaaactgaataatgagtacctcgagttgaactacaaagaagatgaatacttcgagaacataattcaaaatttgaaattcagccaaagtaaacaactgaagaagctccgagaaaaggtggacaaagatgagtggataagtggagcagctgtagtcaatgcattttactcttcaggaagaaatcagatagtcttcccagccggcattctgcagccccccttctttagtgcccagcagtccaactcattgaactatgggggcatcggcatggtcataggacacgaaatcacccatggcttcgatgacaatggcagaaactttaacaaagatggagacctcgttgactggtggactcaacagtctgcaagtaactttaaggagcaatcccagtgcatggtgtatcagtatggaaacttttcctgggacctggcaggtggacagcaccttaatggaattaatacactgggagaaaacattgctgataatggaggtcttggtcaagcatacagagcctatcagaattatattaaaaagaatggcgaagaaaaattacttcctggacttgacctaaatcacaaacaactatttttcttgaactttgcacaggtgtggtgtggaacctataggccagagtatgcggttaactccattaaaacagatgtgcacagtccaggcaatttcaggattattgggactttgcagaactctgcagagttttcagaagcctttcactgccgcaagaattcatacatgaatccagaaaagaagtgccgggtttggtgatcttcaaaagaagcattgcagcccttggctagacttgccaacaccacagaaatggggaattctctaatcgaaagaaaatgggccctaggggtcactgtactgacttgagggtgattaacagagagggcaccatcacaatacagataacattaggttgtcctagaaagggtgtggagggaggaagggggtctaaggtctatcaagtcaatcatttctcactgtgtacataatgcttaatttctaaagataatattactgtttatttctgtttctcatatggtctaccagtttgctgatgtccctagaaaacaatgcaaaacctttgaggtagaccaggatttctaatcaaaagggaaaagaagatgttgaagaatacagttaggcaccagaagaacagtaggtgacactatagtttaaaacacattgcctaactactagtttttacttttatttgcaacatttacagtccttcaaaatccttccaaagaattcttatacacattggggccttggagcttacatagttttaaactcatttttgccatacatcagttattcattctgtgatcatttattttaagcactcttaaagcaaaaaatgaatgtctaaaattgttttttgttgtacctgctttgactgatgctgagattcttcaggcttcctgcaattttctaagcaatttcttgctctatctctcaaaacttggtatttttcagagatttatataaatgtaaaaataataatttttatatttaattattaactacatttatgagtaactattattataggtaatcaatgaatattgaagtttcagcttaaaataaacagttgtgaaccaagatctataaagcgatatacagatgaaaatttgagactatttaaacttataaatcatattgatgaaaagatttaagcacaaactttagggtaaaaattgccattggacagttgtctagagatatatatacttgtggttttcaaattggactttcaaaattaaatctgtccctgagagtgtctctgataaaagggcaaatctgcacctatgtagctctgcatctcctgtcttttcaggtttgtcatcagatggaaatattttgataataaattgaaattgtgaactcattgctccctaagactgtgacaactgtctaactttagaagtgcatttctgaatagaaatgggaggcctctgatggaccttctagaattataagtcacaaagagttctggaaaagaactgtttactgcttgataggaattcatcttttgaggcttctgttcctctcttttcctgttgtattgactattttcgttcattacttgattaagattttacaaaagaggagcacttccaaaattcttatttttcctaacaaaagatgaaagcagggaatttctatctaaatgatgagtattagttccctgtctcttgaaaaatgcccatttgcctttaaaaaaaaaagttacagaaatactataacatatgtacataaattgcataaagcataagtatacagttcaataaacttaactttaactgaacaatggccctgtagccagcacctgtaagaaacagagcagtaccagcgctctaaaagcacctccttgtcactttattactcccagaacaacaactatcctgacttctaatatcattcactagctttgcctggttttgtcttttatgcagatagaatcaatcagtatgtattcttttgtgcctggcttctttctctcagccttacatttgtgagattcctctgtattgtgctgattgtggatcttttcattctcattgcagaataatgttctattgtgggacttattacaatttgttcatcctattgttgatgggcacttgagaactttccattttggcgctattacaaatagtgcaactatgaatgtactgcatgttaccatcttacttgagcctttaatggacttatttcttcaaatccttccaaaaattattataagcattgaaattatagtttcaagccaactgtggatacccttaccctttcctcctttatcacaaccaccgttacaagtatacttatatttccctaaaatacatttaaaacttacctaagtgacatttgtagttggagtaataggagcttccagctctaataaaacagctgtctctaacttattttatttccatcatgtcagagcaggtgaagagccagaagtgaagagtgactagtacaaattataaaaagccactagactcttcactgttagctttttaaaacattaggctcccatccctatggaggaacaactctccagtgcctggatcccctctgtctacaaatataagattttctgggcctaaaggatagatcaaagtcaaaaatagcaatgcctccctatccctcacacatccagacatcatgaattttacatggtactcttgttgagttctgtagagccttctgatgtctctaaagcactaccgattctttggagttgtcacatcagataagacatatctctaattccatccataaatccagttctactatggctgagttctggtcaaagaaagaaagtttagaagctgagacacaaagggttgggagctgatgaaactcacaaatgatggtaggaagaagctctcgacaatacccgttggcaaggagtctgcctccatgctgcagtgttcgagtggattgtaggtgcaagatggaaaggattgtaggtgcaagctgtccagagaaaagagtccttgttccagccctattctgccactcctgacagggtgaccttgggtatttgcaatattcctttgggcctctgcttctctcacctaaaaaaagagaattagattatattggtggttctcagcaagagaaggagtatgtgtccaatgctgccttcccatgaatctgtctcccagttatgaatcagtgggcaggataaactgaaaactcccatttacgtgtctgaatcgagtgagacaaaattttagtccaaataacaagtaccaaagttttatcaagtttgggtctgtgctgctgttactgttaaccatttaagtggggcaaaaccttgctaattttctcaaaagcatttatcattcttgttgccacagctggagctctcaaactaaaagacatttgttattttggaaagaagaaagactctattctcaaagtttcctaatcagaaatttttatcagtttccagtctcaaaaatacaaaataaaaacaaacgtttttaatactattgcttttatgcctagtcaactctg

SEQ ID NO: 103 - DNA, 5818 bp, Homo sapiens
aggagagcgagctgagggagaaaggtccaaagggcgcgagcgcccagggcgctgggagcccgtgggacgggcacggggagggcagagccagccgaggggagcggctgccgggaggtgcgctgagcagggtccgcagctaaggtccagcgcgatccgagcgcccaggaccctgcggccgtggaggaggcgtgccctgggaaggagccgctactgggacctgaagagtgaggggagggagaggggcccagagggtgacctggaggagggctctggaagtcacgtcagattttaggtgatgggcaagtcagaaagtcagatggatataactgatatcaacactccaaagccaaagaagaaacagcgatggactccactggagatcagcctctcggtccttgtcctgctcctcaccatcatagctgtgacaatgatcgcactctatgcaacctacgatgatggtatttgcaagtcatcagactgcataaaatcagctgctcgactgatccaaaacatggatgccaccactgagccttgtacagactttttcaaatatgcttgcggaggctggttgaaacgtaatgtcattcccgagaccagctcccgttacggcaactttgacattttaagagatgaactagaagtcgttttgaaagatgtccttcaagaacccaaaactgaagatatagtagcagtgcagaaagcaaaagcattgtacaggtcttgtataaatgaatctgctattgatagcagaggtggagaacctctactcaaactgttaccagacatatatgggtggccagtagcaacagaaaactgggagcaaaaatatggtgcttcttggacagctgaaaaagctattgcacaactgaattctaaatatgggaaaaaagtccttattaatttgtttgttggcactgatgataagaattctgtgaatcatgtaattcatattgaccaacctcgacttggcctcccttctagagattactatgaatgcactggaatctataaagaggcttgtacagcatatgtggattttatgatttctgtggccagattgattcgtcaggaagaaagattgcccatcgatgaaaaccagcttgctttggaaatgaataaagttatggaattggaaaaagaaattgccaatgctacggctaaacctgaagatcgaaatgatccaatgcttctgtataacaagatgacattggcccagatccaaaataacttttcactagagatcaatgggaagccattcagctggttgaatttcacaaatgaaatcatgtcaactgtgaatattagtattacaaatgaggaagatgtggttgtttatgctccagaatatttaaccaaacttaagcccattcttaccaaatattctgccagagatcttcaaaatttaatgtcctggagattcataatggatcttgtaagcagcctcagccgaacctacaaggagtccagaaatgctttccgcaaggccctttatggtacaacctcagaaacagcaacttggagacgttgtgcaaactatgtcaatgggaatatggaaaatgctgtggggaggctttatgtggaagcagcatttgctggagagagtaaacatgtggtcgaggatttgattgcacagatccgagaagtttttattcagactttagatgacctcacttggatggatgccgagacaaaaaagagagctgaagaaaaggccttagcaattaaagaaaggatcggctatcctgatgacattgtttcaaatgataacaaactgaataatgagtacctcgagttgaactacaaagaagatgaatacttcgagaacataattcaaaatttgaaattcagccaaagtaaacaactgaagaagctccgagaaaaggtggacaaagatgagtggataagtggagcagctgtagtcaatgcattttactcttcaggaagaaatcagatagtcttcccagccggcattctgcagccccccttctttagtgcccagcagtccaactcattgaactatgggggcatcggcatggtcataggacacgaaatcacccatggcttcgatgacaatggcagaaactttaacaaagatggagacctcgttgactggtggactcaacagtctgcaagtaactttaaggagcaatcccagtgcatggtgtatcagtatggaaacttttcctgggacctggcaggtggacagcaccttaatggaattaatacactgggagaaaacattgctgataatggaggtcttggtcaagcatacagagcctatcagaattatattaaaaagaatggcgaagaaaaattacttcctggacttgacctaaatcacaaacaactatttttcttgaactttgcacaggtgtggtgtggaacctataggccagagtatgcggttaactccattaaaacagatgtgcacagtccaggcaatttcaggattattgggactttgcagaactctgcagagttttcagaagcctttcactgccgcaagaattcatacatgaatccagaaaagaagtgccgggtttggtgatcttcaaaagaagcattgcagcccttggctagacttgccaacaccacagaaatggggaattctctaatcgaaagaaaatgggccctaggggtcactgtactgacttgagggtgattaacagagagggcaccatcacaatacagataacattaggttgtcctagaaagggtgtggagggaggaagggggtctaaggtctatcaagtcaatcatttctcactgtgtacataatgcttaatttctaaagataatattactgtttatttctgtttctcatatggtctaccagtttgctgatgtccctagaaaacaatgcaaaacctttgaggtagaccaggatttctaatcaaaagggaaaagaagatgttgaagaatacagttaggcaccagaagaacagtaggtgacactatagtttaaaacacattgcctaactactagtttttacttttatttgcaacatttacagtccttcaaaatccttccaaagaattcttatacacattggggccttggagcttacatagttttaaactcatttttgccatacatcagttattcattctgtgatcatttattttaagcactcttaaagcaaaaaatgaatgtctaaaattgttttttgttgtacctgctttgactgatgctgagattcttcaggcttcctgcaattttctaagcaatttcttgctctatctctcaaaacttggtatttttcagagatttatataaatgtaaaaataataatttttatatttaattattaactacatttatgagtaactattattataggtaatcaatgaatattgaagtttcagcttaaaataaacagttgtgaaccaagatctataaagcgatatacagatgaaaatttgagactatttaaacttataaatcatattgatgaaaagatttaagcacaaactttagggtaaaaattgccattggacagttgtctagagatatatatacttgtggttttcaaattggactttcaaaattaaatctgtccctgagagtgtctctgataaaagggcaaatctgcacctatgtagctctgcatctcctgtcttttcaggtttgtcatcagatggaaatattttgataataaattgaaattgtgaactcattgctccctaagactgtgacaactgtctaactttagaagtgcatttctgaatagaaatgggaggcctctgatggaccttctagaattataagtcacaaagagttctggaaaagaactgtttactgcttgataggaattcatcttttgaggcttctgttcctctcttttcctgttgtattgactattttcgttcattacttgattaagattttacaaaagaggagcacttccaaaattcttatttttcctaacaaaagatgaaagcagggaatttctatctaaatgatgagtattagttccctgtctcttgaaaaatgcccatttgcctttaaaaaaaaaagttacagaaatactataacatatgtacataaattgcataaagcataagtatacagttcaataaacttaactttaactgaacaatggccctgtagccagcacctgtaagaaacagagcagtaccagcgctctaaaagcacctccttgtcactttattactcccagaacaacaactatcctgacttctaatatcattcactagctttgcctggttttgtcttttatgcagatagaatcaatcagtatgtattcttttgtgcctggcttctttctctcagccttacatttgtgagattcctctgtattgtgctgattgtggatcttttcattctcattgcagaataatgttctattgtgggacttattacaatttgttcatcctattgttgatgggcacttgagaactttccattttggcgctattacaaatagtgcaactatgaatgtactgcatgttaccatcttacttgagcctttaatggacttatttcttcaaatccttccaaaaattattataagcattgaaattatagtttcaagccaactgtggatacccttaccctttcctcctttatcacaaccaccgttacaagtatacttatatttccctaaaatacatttaaaacttacctaagtgacatttgtagttggagtaataggagcttccagctctaataaaacagctgtctctaacttattttatttccatcatgtcagagcaggtgaagagccagaagtgaagagtgactagtacaaattataaaaagccactagactcttcactgttagctttttaaaacattaggctcccatccctatggaggaacaactctccagtgcctggatcccctctgtctacaaatataagattttctgggcctaaaggatagatcaaagtcaaaaatagcaatgcctccctatccctcacacatccagacatcatgaattttacatggtactcttgttgagttctgtagagccttctgatgtctctaaagcactaccgattctttggagttgtcacatcagataagacatatctctaattccatccataaatccagttctactatggctgagttctggtcaaagaaagaaagtttagaagctgagacacaaagggttgggagctgatgaaactcacaaatgatggtaggaagaagctctcgacaatacccgttggcaaggagtctgcctccatgctgcagtgttcgagtggattgtaggtgcaagatggaaaggattgtaggtgcaagctgtccagagaaaagagtccttgttccagccctattctgccactcctgacagggtgaccttgggtatttgcaatattcctttgggcctctgcttctctcacctaaaaaaagagaattagattatattggtggttctcagcaagagaaggagtatgtgtccaatgctgccttcccatgaatctgtctcccagttatgaatcagtgggcaggataaactgaaaactcccatttacgtgtctgaatcgagtgagacaaaattttagtccaaataacaagtaccaaagttttatcaagtttgggtctgtgctgctgttactgttaaccatttaagtggggcaaaaccttgctaattttctcaaaagcatttatcattcttgttgccacagctggagctctcaaactaaaagacatttgttattttggaaagaagaaagactctattctcaaagtttcctaatcagaaatttttatcagtttccagtctcaaaaatacaaaataaaaacaaacgtttttaatactattgcttttatgcctagtcaactctg

SEQ ID NO: 104 - DNA, 5989 bp, Homo sapiens
aggagagcgagctgagggagaaaggtccaaagggcgcgagcgcccagggcgctgggagcccgtgggacgggcacggggagggcagagccagccgaggggagcggctgccgggaggtgcgctgagcagggtccgcagctaaggtccagcgcgatccgagcgcccaggaccctgcggccgtggaggaggcgtgccctgggaaggagccgctactgggacctgaagagtgaggggagggagaggggcccagagggtgacctggaggagggctctggaagtcacgtcaggttggctcttcaggttcatttccatagttccctgcggcctctgccttggggagttatgttttgttaccgagatccgcgctaccagattgcaccggggctgatttgggggctgggaatttgccattctgctgtacagacactgatttttttttcttctttttaaaaagcaagattttaggtgatgggcaagtcagaaagtcagatggatataactgatatcaacactccaaagccaaagaagaaacagcgatggactccactggagatcagcctctcggtccttgtcctgctcctcaccatcatagctgtgacaatgatcgcactctatgcaacctacgatgatggtatttgcaagtcatcagactgcataaaatcagctgctcgactgatccaaaacatggatgccaccactgagccttgtacagactttttcaaatatgcttgcggaggctggttgaaacgtaatgtcattcccgagaccagctcccgttacggcaactttgacattttaagagatgaactagaagtcgttttgaaagatgtccttcaagaacccaaaactgaagatatagtagcagtgcagaaagcaaaagcattgtacaggtcttgtataaatgaatctgctattgatagcagaggtggagaacctctactcaaactgttaccagacatatatgggtggccagtagcaacagaaaactgggagcaaaaatatggtgcttcttggacagctgaaaaagctattgcacaactgaattctaaatatgggaaaaaagtccttattaatttgtttgttggcactgatgataagaattctgtgaatcatgtaattcatattgaccaacctcgacttggcctcccttctagagattactatgaatgcactggaatctataaagaggcttgtacagcatatgtggattttatgatttctgtggccagattgattcgtcaggaagaaagattgcccatcgatgaaaaccagcttgctttggaaatgaataaagttatggaattggaaaaagaaattgccaatgctacggctaaacctgaagatcgaaatgatccaatgcttctgtataacaagatgacattggcccagatccaaaataacttttcactagagatcaatgggaagccattcagctggttgaatttcacaaatgaaatcatgtcaactgtgaatattagtattacaaatgaggaagatgtggttgtttatgctccagaatatttaaccaaacttaagcccattcttaccaaatattctgccagagatcttcaaaatttaatgtcctggagattcataatggatcttgtaagcagcctcagccgaacctacaaggagtccagaaatgctttccgcaaggccctttatggtacaacctcagaaacagcaacttggagacgttgtgcaaactatgtcaatgggaatatggaaaatgctgtggggaggctttatgtggaagcagcatttgctggagagagtaaacatgtggtcgaggatttgattgcacagatccgagaagtttttattcagactttagatgacctcacttggatggatgccgagacaaaaaagagagctgaagaaaaggccttagcaattaaagaaaggatcggctatcctgatgacattgtttcaaatgataacaaactgaataatgagtacctcgagttgaactacaaagaagatgaatacttcgagaacataattcaaaatttgaaattcagccaaagtaaacaactgaagaagctccgagaaaaggtggacaaagatgagtggataagtggagcagctgtagtcaatgcattttactcttcaggaagaaatcagatagtcttcccagccggcattctgcagccccccttctttagtgcccagcagtccaactcattgaactatgggggcatcggcatggtcataggacacgaaatcacccatggcttcgatgacaatggcagaaactttaacaaagatggagacctcgttgactggtggactcaacagtctgcaagtaactttaaggagcaatcccagtgcatggtgtatcagtatggaaacttttcctgggacctggcaggtggacagcaccttaatggaattaatacactgggagaaaacattgctgataatggaggtcttggtcaagcatacagagcctatcagaattatattaaaaagaatggcgaagaaaaattacttcctggacttgacctaaatcacaaacaactatttttcttgaactttgcacaggtgtggtgtggaacctataggccagagtatgcggttaactccattaaaacagatgtgcacagtccaggcaatttcaggattattgggactttgcagaactctgcagagttttcagaagcctttcactgccgcaagaattcatacatgaatccagaaaagaagtgccgggtttggtgatcttcaaaagaagcattgcagcccttggctagacttgccaacaccacagaaatggggaattctctaatcgaaagaaaatgggccctaggggtcactgtactgacttgagggtgattaacagagagggcaccatcacaatacagataacattaggttgtcctagaaagggtgtggagggaggaagggggtctaaggtctatcaagtcaatcatttctcactgtgtacataatgcttaatttctaaagataatattactgtttatttctgtttctcatatggtctaccagtttgctgatgtccctagaaaacaatgcaaaacctttgaggtagaccaggatttctaatcaaaagggaaaagaagatgttgaagaatacagttaggcaccagaagaacagtaggtgacactatagtttaaaacacattgcctaactactagtttttacttttatttgcaacatttacagtccttcaaaatccttccaaagaattcttatacacattggggccttggagcttacatagttttaaactcatttttgccatacatcagttattcattctgtgatcatttattttaagcactcttaaagcaaaaaatgaatgtctaaaattgttttttgttgtacctgctttgactgatgctgagattcttcaggcttcctgcaattttctaagcaatttcttgctctatctctcaaaacttggtatttttcagagatttatataaatgtaaaaataataatttttatatttaattattaactacatttatgagtaactattattataggtaatcaatgaatattgaagtttcagcttaaaataaacagttgtgaaccaagatctataaagcgatatacagatgaaaatttgagactatttaaacttataaatcatattgatgaaaagatttaagcacaaactttagggtaaaaattgccattggacagttgtctagagatatatatacttgtggttttcaaattggactttcaaaattaaatctgtccctgagagtgtctctgataaaagggcaaatctgcacctatgtagctctgcatctcctgtcttttcaggtttgtcatcagatggaaatattttgataataaattgaaattgtgaactcattgctccctaagactgtgacaactgtctaactttagaagtgcatttctgaatagaaatgggaggcctctgatggaccttctagaattataagtcacaaagagttctggaaaagaactgtttactgcttgataggaattcatcttttgaggcttctgttcctctcttttcctgttgtattgactattttcgttcattacttgattaagattttacaaaagaggagcacttccaaaattcttatttttcctaacaaaagatgaaagcagggaatttctatctaaatgatgagtattagttccctgtctcttgaaaaatgcccatttgcctttaaaaaaaaaagttacagaaatactataacatatgtacataaattgcataaagcataagtatacagttcaataaacttaactttaactgaacaatggccctgtagccagcacctgtaagaaacagagcagtaccagcgctctaaaagcacctccttgtcactttattactcccagaacaacaactatcctgacttctaatatcattcactagctttgcctggttttgtcttttatgcagatagaatcaatcagtatgtattcttttgtgcctggcttctttctctcagccttacatttgtgagattcctctgtattgtgctgattgtggatcttttcattctcattgcagaataatgttctattgtgggacttattacaatttgttcatcctattgttgatgggcacttgagaactttccattttggcgctattacaaatagtgcaactatgaatgtactgcatgttaccatcttacttgagcctttaatggacttatttcttcaaatccttccaaaaattattataagcattgaaattatagtttcaagccaactgtggatacccttaccctttcctcctttatcacaaccaccgttacaagtatacttatatttccctaaaatacatttaaaacttacctaagtgacatttgtagttggagtaataggagcttccagctctaataaaacagctgtctctaacttattttatttccatcatgtcagagcaggtgaagagccagaagtgaagagtgactagtacaaattataaaaagccactagactcttcactgttagctttttaaaacattaggctcccatccctatggaggaacaactctccagtgcctggatcccctctgtctacaaatataagattttctgggcctaaaggatagatcaaagtcaaaaatagcaatgcctccctatccctcacacatccagacatcatgaattttacatggtactcttgttgagttctgtagagccttctgatgtctctaaagcactaccgattctttggagttgtcacatcagataagacatatctctaattccatccataaatccagttctactatggctgagttctggtcaaagaaagaaagtttagaagctgagacacaaagggttgggagctgatgaaactcacaaatgatggtaggaagaagctctcgacaatacccgttggcaaggagtctgcctccatgctgcagtgttcgagtggattgtaggtgcaagatggaaaggattgtaggtgcaagctgtccagagaaaagagtccttgttccagccctattctgccactcctgacagggtgaccttgggtatttgcaatattcctttgggcctctgcttctctcacctaaaaaaagagaattagattatattggtggttctcagcaagagaaggagtatgtgtccaatgctgccttcccatgaatctgtctcccagttatgaatcagtgggcaggataaactgaaaactcccatttacgtgtctgaatcgagtgagacaaaattttagtccaaataacaagtaccaaagttttatcaagtttgggtctgtgctgctgttactgttaaccatttaagtggggcaaaaccttgctaattttctcaaaagcatttatcattcttgttgccacagctggagctctcaaactaaaagacatttgttattttggaaagaagaaagactctattctcaaagtttcctaatcagaaatttttatcagtttccagtctcaaaaatacaaaataaaaacaaacgtttttaatactattgcttttatgcctagtcaactctg

SEQ ID NO: 105 - protein, 750 aa, Homo sapiens
MGKSESQMDITDINTPKPKKKQRWTPLEISLSVLVLLLTIIAVTMIALYATYDDGICKSSDCIKSAARLIQNMDATTEPCTDFFKYACGGWLKRNVIPETSSRYGNFDILRDELEVVLKDVLQEPKTEDIVAVQKAKALYRSCINESAIDSRGGEPLLKLLPDIYGWPVATENWEQKYGASWTAEKAIAQLNSKYGKKVLINLFVGTDDKNSVNHVIHIDQPRLGLPSRDYYECTGIYKEACTAYVDFMISVARLIRQEERLPIDENQLALEMNKVMELEKEIANATAKPEDRNDPMLLYNKMTLAQIQNNFSLEINGKPFSWLNFTNEIMSTVNISITNEEDVVVYAPEYLTKLKPILTKYSARDLQNLMSWRFIMDLVSSLSRTYKESRNAFRKALYGTTSETATWRRCANYVNGNMENAVGRLYVEAAFAGESKHVVEDLIAQIREVFIQTLDDLTWMDAETKKRAEEKALAIKERIGYPDDIVSNDNKLNNEYLELNYKEDEYFENIIQNLKFSQSKQLKKLREKVDKDEWISGAAVVNAFYSSGRNQIVFPAGILQPPFFSAQQSNSLNYGGIGMVIGHEITHGFDDNGRNFNKDGDLVDWWTQQSASNFKEQSQCMVYQYGNFSWDLAGGQHLNGINTLGENIADNGGLGQAYRAYQNYIKKNGEEKLLPGLDLNHKQLFFLNFAQVWCGTYRPEYAVNSIKTDVHSPGNFRIIGTLQNSAEFSEAFHCRKNSYMNPEKKCRVW

SEQ ID NO: 106 - protein, 750 aa, Homo sapiens; identical to SEQ ID NO: 105

SEQ ID NO: 107 - protein, 750 aa, Homo sapiens; identical to SEQ ID NO: 105

SEQ ID NO: 108 - protein, 80 aa, Homo sapiens
MGKSESQMDITDINTPKPKKKQRWTPLEISLSVLVLLLTIIAVTMIALYATYDDGICKSSDCIKSGMVARAYNPRGRRIA

SEQ ID NO: 109 - protein, 750 aa, Homo sapiens; identical to SEQ ID NO: 105

SEQ ID NO: 110 - protein, 750 aa, Homo sapiens; identical to SEQ ID NO: 105

SEQ ID NO: 111 - protein, 750 aa, Homo sapiens; identical to SEQ ID NO: 105

SEQ ID NO: 112 - DNA, 5619 bp, Homo sapiens; identical to SEQ ID NO: 102

SEQ ID NO: 113 - DNA, 5643 bp, Homo sapiens; identical to SEQ ID NO: 98

SEQ ID NO: 114 - DNA, 4493 bp, Homo sapiens
tttgcttataaactgctgaattaatcctacttgagtatttaaccaagtcttactgtctaattttgctgagattttcagtgatataccaaagcaaaacaaaacaaaacaacagcaacaaaaaacaaaagattttaggtgatgggcaagtcagaaagtcagatggatataactgatatcaacactccaaagccaaagaagaaacagcgatggactccactggagatcagcctctcggtccttgtcctgctcctcaccatcatagctgtgacaatgatcgcactctatgcaacctacgatgatggtatttgcaagtcatcagactgcataaaatcagctgctcgactgatccaaaacatggatgccaccactgagccttgtacagactttttcaaatatgcttgcggaggctggttgaaacgtaatgtcattcccgagaccagctcccgttacggcaactttgacattttaagagatgaactagaagtcgttttgaaagatgtccttcaagaacccaaaactgaagatatagtagcagtgcagaaagcaaaagcattgtacaggtcttgtataaatgaatctgctattgatagcagaggtggagaacctctactcaaactgttaccagacatatatgggtggccagtagcaacagaaaactgggagcaaaaatatggtgcttcttggacagctgaaaaagctattgcacaactgaattctaaatatgggaaaaaagtccttattaatttgtttgttggcactgatgataagaattctgtgaatcatgtaattcatattgaccaacctcgacttggcctcccttctagagattactatgaatgcactggaatctataaagaggcttgtacagcatatgtggattttatgatttctgtggccagattgattcgtcaggaagaaagattgcccatcgatgaaaaccagcttgctttggaaatgaataaagttatggaattggaaaaagaaattgccaatgctacggctaaacctgaagatcgaaatgatccaatgcttctgtataacaagatgacattggcccagatccaaaataacttttcactagagatcaatgggaagccattcagctggttgaatttcacaaatgaaatcatgtcaactgtgaatattagtattacaaatgaggaagatgtggttgtttatgctccagaatatttaaccaaacttaagcccattcttaccaaatattctgccagagatcttcaaaatttaatgtcctggagattcataatggatcttgtaagcagcctcagccgaacctacaaggagtccagaaatgctttccgcaaggccctttatggtacaacctcagaaacagcaacttggagacgttgtgcaaactatgtcaatgggaatatggaaaatgctgtggggaggctttatgtggaagcagcatttgctggagagagtaaacatgtggtcgaggatttgattgcacagatccgagaagtttttattcagactttagatgacctcacttggatggatgccgagacaaaaaagagagctgaagaaaaggccttagcaattaaagaaaggatcggctatcctgatgacattgtttcaaatgataacaaactgaataatgagtacctcgagttgaactacaaagaagatgaatacttcgagaacataattcaaaatttgaaattcagccaaagtaaacaactgaagaagctccgagaaaaggtggacaaagatgagtggataagtggagcagctgtagtcaatgcattttactcttcaggaagaaatcagatagtcttcccagccggcattctgcagccccccttctttagtgcccagcagtccaactcattgaactatgggggcatcggcatggtcataggacacgaaatcacccatggcttcgatgacaatggcagaaactttaacaaagatggagacctcgttgactggtggactcaacagtctgcaagtaactttaaggagcaatcccagtgcatggtgtatcagtatggaaacttttcctgggacctggcaggtggacagcaccttaatggaattaatacactgggagaaaacattgctgataatggaggtcttggtcaagcatacagagcctatcagaattatattaaaaagaatggcgaagaaaaattacttcctggacttgacctaaatcacaaacaactatttttcttgaactttgcacaggtgtggtgtggaacctataggccagagtatgcggttaactccattaaaacagatgtgcacagtccaggcaatttcaggattattgggactttgcagaactctgcagagttttcagaagcctttcactgccgcaagaattcatacatgaatccagaaaagaagtgccgggtttggtgatcttcaaaagaagcattgcagcccttggctagacttgccaacaccacagaaatggggaattctctaatcgaaagaaaatgggccctaggggtcactgtactgacttgagggtgattaacagagagggcaccatcacaatacagataacattaggttgtcctagaaagggtgtggagggaggaagggggtctaaggtctatcaagtcaatcatttctcactgtgtacataatgcttaatttctaaagataatattactgtttatttctgtttctcatatggtctaccagtttgctgatgtccctagaaaacaatgcaaaacctttgaggtagaccaggatttctaatcaaaagggaaaagaagatgttgaagaatacagttaggcaccagaagaacagtaggtgacactatagtttaaaacacattgcctaactactagtttttacttttatttgcaacatttacagtccttcaaaatccttccaaagaattcttatacacattggggccttggagcttacatagttttaaactcatttttgccatacatcagttattcattctgtgatcatttattttaagcactcttaaagcaaaaaatgaatgtctaaaattgttttttgttgtacctgctttgactgatgctgagattcttcaggcttcctgcaattttctaagcaatttcttgctctatctctcaaaacttggtatttttcagagatttatataaatgtaaaaataataatttttatatttaattattaactacatttatgagtaactattattataggtaatcaatgaatattgaagtttcagcttaaaataaacagttgtgaaccaagatctataaagcgatatacagatgaaaatttgagactatttaaacttataaatcatattgatgaaaagatttaagcacaaactttagggtaaaaattgccattggacagttgtctagagatatatatacttgtggttttcaaattggactttcaaaattaaatctgtccctgagagtgtctctgataaaagggcaaatctgcacctatgtagctctgcatctcctgtcttttcaggtttgtcatcagatggaaatattttgataataaattgaaattgtgaactcattgctccctaagactgtgacaactgtctaactttagaagtgcatttctgaatagaaatgggaggcctctgatggaccttctagaattataagtcacaaagagttctggaaaagaactgtttactgcttgataggaattcatcttttgaggcttctgttcctctcttttcctgttgtattgactattttcgttcattacttgattaagattttacaaaagaggagcacttccaaaattcttatttttcctaacaaaagatgaaagcagggaatttctatctaaatgatgagtattagttccctgtctcttgaaaaatgcccatttgcctttaaaaaaaaaagttacagaaatactataacatatgtacataaattgcataaagcataagtatacagttcaataaacttaactttaactgaacaatggccctgtagccagcacctgtaagaaacagagcagtaccagcgctctaaaagcacctccttgtcactttattactcccagaacaacaactatcctgacttctaatatcattcactagctttgcctggttttgtcttttatgcagatagaatcaatcagtatgtattcttttgtgcctggcttctttctctcagccttacatttgtgagattcctctgtattgtgctgattgtggatcttttcattctcattgcagaataatgttctattgtgggacttattacaatttgttcatcctattgttgatgggcacttgagaactttccattttggcgctattacaaatagtgcaactatgaatgtactgcatgttaccatcttacttgagcctttaatggacttatttcttcaaatccttccaaaaattattataagcattgaaattatagtttcaagccaactgtggatacccttaccctttcctcctttatcacaaccaccgttacaagtatacttatatttccctaaaatacatttaaaacttacctaa

SEQ ID NO: 115 - DNA, 4464 bp, Homo sapiens
aacaaaaaacaaaaggttgtgactgagacctgtcaaattcatttggctctatatactttgcattcagcaacaaaattttgacttctcaacagcaaaaatattttaggtgatgggcaagtcagaaagtcagatggatataactgatatcaacactccaaagccaaagaagaaacagcgatggactccactggagatcagcctctcggtccttgtcctgctcctcaccatcatagctgtgacaatgatcgcactctatgcaacctacgatgatggtatttgcaagtcatcagactgcataaaatcagctgctcgactgatccaaaacatggatgccaccactgagccttgtacagactttttcaaatatgcttgcggaggctggttgaaacgtaatgtcattcccgagaccagctcccgttacggcaactttgacattttaagagatgaactagaagtcgttttgaaagatgtccttcaagaacccaaaactgaagatatagtagcagtgcagaaagcaaaagcattgtacaggtcttgtataaatgaatctgctattgatagcagaggtggagaacctctactcaaactgttaccagacatatatgggtggccagtagcaacagaaaactgggagcaaaaatatggtgcttcttggacagctgaaaaagctattgcacaactgaattctaaatatgggaaaaaagtccttattaatttgtttgttggcactgatgataagaattctgtgaatcatgtaattcatattgaccaacctcgacttggcctcccttctagagattactatgaatgcactggaatctataaagaggcttgtacagcatatgtggattttatgatttctgtggccagattgattcgtcaggaagaaagattgcccatcgatgaaaaccagcttgctttggaaatgaataaagttatggaattggaaaaagaaattgccaatgctacggctaaacctgaagatcgaaatgatccaatgcttctgtataacaagatgacattggcccagatccaaaataacttttcactagagatcaatgggaagccattcagctggttgaatttcacaaatgaaatcatgtcaactgtgaatattagtattacaaatgaggaagatgtggttgtttatgctccagaatatttaaccaaacttaagcccattcttaccaaatattctgccagagatcttcaaaatttaatgtcctggagattcataatggatcttgtaagcagcctcagccgaacctacaaggagtccagaaatgctttccgcaaggccctttatggtacaacctcagaaacagcaacttggagacgttgtgcaaactatgtcaatgggaatatggaaaatgctgtggggaggctttatgtggaagcagcatttgctggagagagtaaacatgtggtcgaggatttgattgcacagatccgagaagtttttattcagactttagatgacctcacttggatggatgccgagacaaaaaagagagctgaagaaaaggccttagcaattaaagaaaggatcggctatcctgatgacattgtttcaaatgataacaaactgaataatgagtacctcgagttgaactacaaagaagatgaatacttcgagaacataattcaaaatttgaaattcagccaaagtaaacaactgaagaagctccgagaaaaggtggacaaagatgagtggataagtggagcagctgtagtcaatgcattttactcttcaggaagaaatcagatagtcttcccagccggcattctgcagccccccttctttagtgcccagcagtccaactcattgaactatgggggcatcggcatggtcataggacacgaaatcacccatggcttcgatgacaatggcagaaactttaacaaagatggagacctcgttgactggtggactcaacagtctgcaagtaactttaaggagcaatcccagtgcatggtgtatcagtatggaaacttttcctgggacctggcaggtggacagcaccttaatggaattaatacactgggagaaaacattgctgataatggaggtcttggtcaagcatacagagcctatcagaattatattaaaaagaatggcgaagaaaaattacttcctggacttgacctaaatcacaaacaactatttttcttgaactttgcacaggtgtggtgtggaacctataggccagagtatgcggttaactccattaaaacagatgtgcacagtccaggcaatttcaggattattgggactttgcagaactctgcagagttttcagaagcctttcactgccgcaagaattcatacatgaatccagaaaagaagtgccgggtttggtgatcttcaaaagaagcattgcagcccttggctagacttgccaacaccacagaaatggggaattctctaatcgaaagaaaatgggccctaggggtcactgtactgacttgagggtgattaacagagagggcaccatcacaatacagataacattaggttgtcctagaaagggtgtggagggaggaagggggtctaaggtctatcaagtcaatcatttctcactgtgtacataatgcttaatttctaaagataatattactgtttatttctgtttctcatatggtctaccagtttgctgatgtccctagaaaacaatgcaaaacctttgaggtagaccaggatttctaatcaaaagggaaaagaagatgttgaagaatacagttaggcaccagaagaacagtaggtgacactatagtttaaaacacattgcctaactactagtttttacttttatttgcaacatttacagtccttcaaaatccttccaaagaattcttatacacattggggccttggagcttacatagttttaaactcatttttgccatacatcagttattcattctgtgatcatttattttaagcactcttaaagcaaaaaatgaatgtctaaaattgttttttgttgtacctgctttgactgatgctgagattcttcaggcttcctgcaattttctaagcaatttcttgctctatctctcaaaacttggtatttttcagagatttatataaatgtaaaaataataatttttatatttaattattaactacatttatgagtaactattattataggtaatcaatgaatattgaagtttcagcttaaaataaacagttgtgaaccaagatctataaagcgatatacagatgaaaatttgagactatttaaacttataaatcatattgatgaaaagatttaagcacaaactttagggtaaaaattgccattggacagttgtctagagatatatatacttgtggttttcaaattggactttcaaaattaaatctgtccctgagagtgtctctgataaaagggcaaatctgcacctatgtagctctgcatctcctgtcttttcaggtttgtcatcagatggaaatattttgataataaattgaaattgtgaactcattgctccctaagactgtgacaactgtctaactttagaagtgcatttctgaatagaaatgggaggcctctgatggaccttctagaattataagtcacaaagagttctggaaaagaactgtttactgcttgataggaattcatcttttgaggcttctgttcctctcttttcctgttgtattgactattttcgttcattacttgattaagattttacaaaagaggagcacttccaaaattcttatttttcctaacaaaagatgaaagcagggaatttctatctaaatgatgagtattagttccctgtctcttgaaaaatgcccatttgcctttaaaaaaaaaagttacagaaatactataacatatgtacataaattgcataaagcataagtatacagttcaataaacttaactttaactgaacaatggccctgtagccagcacctgtaagaaacagagcagtaccagcgctctaaaagcacctccttgtcactttattactcccagaacaacaactatcctgacttctaatatcattcactagctttgcctggttttgtcttttatgcagatagaatcaatcagtatgtattcttttgtgcctggcttctttctctcagccttacatttgtgagattcctctgtattgtgctgattgtggatcttttcattctcattgcagaataatgttctattgtgggacttattacaatttgttcatcctattgttgatgggcacttgagaactttccattttggcgctattacaaatagtgcaactatgaatgtactgcatgttaccatcttacttgagcctttaatggacttatttcttcaaatccttccaaaaattattataagcattgaaattatagtttcaagccaactgtggatacccttaccctttcctcctttatcacaaccaccgttacaagtatacttatatttccctaaaatacatttaaaacttacctaa

SEQ ID NO: 116 - DNA, 7635 bp, Homo sapiens
ttttacttttcttaaccggaagatcttttcattatcccacctcttcatcttgcttttaacctgatttcctattatataattaatgcttaaatctcacaagggttggtcggtgcggggctggtgtgtccttttgtagatgaaagtttaagacctcttaactggtttcagtctatttgtctggtttcaaaataagggtaattgcaaccaaatatccctctttagcttctcgatcaagtcgattcctcccccatatatgattcaaatggcaattttattaaactgaaaactagtacctgacttgcagcgtcagcatttggaaagtgcttgtcggcaaatcgactgtatgaaggcgtgtagcttcatcccctgccatttttgtgggttctagcactttaaaaaattgtctggtaatttcttggacttaaccctgtgtctttggttgtagagcagcactaaccaggggagtaatatggttggcacttcgtgtccagaactccgtatttcaggctgggaaacacctaattaatgtctgggaaacaagaagatgatttatcctgagtacctctgtcctcagcttctgcagacacagtttaaatatggaaactgtttctccttcttcctgtgcctcagtttccatagaacaaactgtaattgcatagcacagcttcaggaacctgcagatataagttaatgttataatgtgcagtgaagatgaaaactgcttagctaagtctaagtctgtaagtcaatgagatttcctttttaacaaatcagttatccaggtttcctgctttgactgtctgatatagtaatgcttatgctcaactggtataagaattgctgctttacattgctttgaaattaagcttacacttaaaatagtaatttattctgttggtaatattgtcgagctgaagtttgcaggttcttgttatcttagacctcctaattctctattctcgtctgtggcagtgtccacttttccgtttaaactttttatttaacacatcttcagttgaagtgaaatattttaagaatacaggtatgtttttgcgtaccctgctttatatgggactataagcctcaacttggtattttttttttttttgtattcttttgtttacttgtcccccttactcttctctatgggattgggtgtggttaagttggatattcaggtatttggggtttagtcatatgttccacagtgagattccagatactgtcccctgatgtcttaaagaaaaattgtgaaccttccagaattaactggaaatgaacgacaaagttaattaggagattaaacttgcatcatttctgcttttgctcaatgcttttgaaaaaaggctactaagagcaaaagacttcctttaagaatttacagggcatttacaagagggggagatggaggaagactttgcaggtgattcaaagattatattgttttgatgcagcttctgtcactgtcttcatttctctgtaactgtttctgcaaacttgggtgctgacccattaagagcccagctgcttcagtacccagtctcaagggtaaggaggagaagccaagggaaagtaacttacagggagaaagaaatgcttatccactagctttactacaccacaaggcatggagtttccacagagcacctgtaatttaaccctgaggctgccctggttcaccccttcgctttactttacagggacactgactgtcatttctaaggaagaactaagaaaaaaaaaagtccttttataccagtaaaacatttctctacattgtcttctgacatatgcggggggaacaatattcaggaaagggaaatactttagcaaatgtgcttaacattcaggtgttctttaggacagtcatgaaacatggggagactgggagaattattattgtttacctctctgtaaagtgtccagagtattattaaatttgttcccctctttcctttgcccaaccaatacactattaaaataggactacaatcaatgcaattccatatcataaccccaggggtggtgagactaagccagcatgccttacataaccattaagtaagacattttaacattcaggtacattacattccacttttatttagcagacacggttttcattgtgtaataaaatatttttatttgatagtctgtccttgcttatagcctcatgtaatcaaggggacagcatgtttaagactttgtatccagaactttaaggtctagctgtggttcgcttattaataattcactgggaaggttaatttctagttttctgctgggtctcccagaccatacttcaaatgtagaatatgtttcttctttctcctatgcctcagtttccacaaaacacacccttagagaattgtgtgtgttcaacaaagatctttaactataagagcatttctgagccgccacttcatcctgggaccaaattctaagagcaatttgtattgagctataaacagctaatctgctagtttaagatgttcttttatacagtcatgcagaaaaatggaaattgtgtgttctaatccttggagactggctgataaagtgtcactaggcccctgatgaaatttaatatttaggcttatatccccttaattttccccctaaatttctacagtacgcttttactgcatgatgatacagctttattttgaacagtgaccaaatgtgttctttacaaagaatattgacgagttgtgtagtcttgaacacgttgcctgacttctctgtgccccagtttcctaattctttattctattctgtggcagtgtccactttttggtttaaagtttttaacacatctccagttgaggtgaaagattttaggaatacaggtatgtttttgcataccctgctttatacaggactacaagtatcaacttggtaactttttgtactattttgtttacttatcccccttactcccctcttaaatgggattgggcgtggttaggttggatattcaggtatcttttggtacagtgagtgaccattttcagaatgttgtctaaccagttaatagatactggtatcagtagtagtagtaattttgaactgtaaaaataaaggttgtttttatgactaaaataaactacttcatgtgttcattcgttttgctgtttatctatattaatatttcaaattattgcttagtcaaaacctcaaggtattagtcactggtttttgagcttataaaggaagccactggagcaagatataaaattaaccattgatgttagtccagagttcaaaaggattttaggtgatgggcaagtcagaaagtcagatggatataactgatatcaacactccaaagccaaagaagaaacagcgatggactccactggagatcagcctctcggtccttgtcctgctcctcaccatcatagctgtgacaatgatcgcactctatgcaacctacgatgatggtatttgcaagtcatcagactgcataaaatcagctgctcgactgatccaaaacatggatgccaccactgagccttgtacagactttttcaaatatgcttgcggaggctggttgaaacgtaatgtcattcccgagaccagctcccgttacggcaactttgacattttaagagatgaactagaagtcgttttgaaagatgtccttcaagaacccaaaactgaagatatagtagcagtgcagaaagcaaaagcattgtacaggtcttgtataaatgaatctgctattgatagcagaggtggagaacctctactcaaactgttaccagacatatatgggtggccagtagcaacagaaaactgggagcaaaaatatggtgcttcttggacagctgaaaaagctattgcacaactgaattctaaatatgggaaaaaagtccttattaatttgtttgttggcactgatgataagaattctgtgaatcatgtaattcatattgaccaacctcgacttggcctcccttctagagattactatgaatgcactggaatctataaagaggcttgtacagcatatgtggattttatgatttctgtggccagattgattcgtcaggaagaaagattgcccatcgatgaaaaccagcttgctttggaaatgaataaagttatggaattggaaaaagaaattgccaatgctacggctaaacctgaagatcgaaatgatccaatgcttctgtataacaagatgacattggcccagatccaaaataacttttcactagagatcaatgggaagccattcagctggttgaatttcacaaatgaaatcatgtcaactgtgaatattagtattacaaatgaggaagatgtggttgtttatgctccagaatatttaaccaaacttaagcccattcttaccaaatattctgccagagatcttcaaaatttaatgtcctggagattcataatggatcttgtaagcagcctcagccgaacctacaaggagtccagaaatgctttccgcaaggccctttatggtacaacctcagaaacagcaacttggagacgttgtgcaaactatgtcaatgggaatatggaaaatgctgtggggaggctttatgtggaagcagcatttgctggagagagtaaacatgtggtcgaggatttgattgcacagatccgagaagtttttattcagactttagatgacctcacttggatggatgccgagacaaaaaagagagctgaagaaaaggccttagcaattaaagaaaggatcggctatcctgatgacattgtttcaaatgataacaaactgaataatgagtacctcgagttgaactacaaagaagatgaatacttcgagaacataattcaaaatttgaaattcagccaaagtaaacaactgaagaagctccgagaaaaggtggacaaagatgagtggataagtggagcagctgtagtcaatgcattttactcttcaggaagaaatcagatagtcttcccagccggcattctgcagccccccttctttagtgcccagcagtccaactcattgaactatgggggcatcggcatggtcataggacacgaaatcacccatggcttcgatgacaatggcagaaactttaacaaagatggagacctcgttgactggtggactcaacagtctgcaagtaactttaaggagcaatcccagtgcatggtgtatcagtatggaaacttttcctgggacctggcaggtggacagcaccttaatggaattaatacactgggagaaaacattgctgataatggaggtcttggtcaagcatacagagcctatcagaattatattaaaaagaatggcgaagaaaaattacttcctggacttgacctaaatcacaaacaactatttttcttgaactttgcacaggtgtggtgtggaacctataggccagagtatgcggttaactccattaaaacagatgtgcacagtccaggcaatttcaggattattgggactttgcagaactctgcagagttttcagaagcctttcactgccgcaagaattcatacatgaatccagaaaagaagtgccgggtttggtgatcttcaaaagaagcattgcagcccttggctagacttgccaacaccacagaaatggggaattctctaatcgaaagaaaatgggccctaggggtcactgtactgacttgagggtgattaacagagagggcaccatcacaatacagataacattaggttgtcctagaaagggtgtggagggaggaagggggtctaaggtctatcaagtcaatcatttctcactgtgtacataatgcttaatttctaaagataatattactgtttatttctgtttctcatatggtctaccagtttgctgatgtccctagaaaacaatgcaaaacctttgaggtagaccaggatttctaatcaaaagggaaaagaagatgttgaagaatacagttaggcaccagaagaacagtaggtgacactatagtttaaaacacattgcctaactactagtttttacttttatttgcaacatttacagtccttcaaaatccttccaaagaattcttatacacattggggccttggagcttacatagttttaaactcatttttgccatacatcagttattcattctgtgatcatttattttaagcactcttaaagcaaaaaatgaatgtctaaaattgttttttgttgtacctgctttgactgatgctgagattcttcaggcttcctgcaattttctaagcaatttcttgctctatctctcaaaacttggtatttttcagagatttatataaatgtaaaaataataatttttatatttaattattaactacatttatgagtaactattattataggtaatcaatgaatattgaagtttcagcttaaaataaacagttgtgaaccaagatctataaagcgatatacagatgaaaatttgagactatttaaacttataaatcatattgatgaaaagatttaagcacaaactttagggtaaaaattgccattggacagttgtctagagatatatatacttgtggttttcaaattggactttcaaaattaaatctgtccctgagagtgtctctgataaaagggcaaatctgcacctatgtagctctgcatctcctgtcttttcaggtttgtcatcagatggaaatattttgataataaattgaaattgtgaactcattgctccctaagactgtgacaactgtctaactttagaagtgcatttctgaatagaaatgggaggcctctgatggaccttctagaattataagtcacaaagagttctggaaaagaactgtttactgcttgataggaattcatcttttgaggcttctgttcctctcttttcctgttgtattgactattttcgttcattacttgattaagattttacaaaagaggagcacttccaaaattcttatttttcctaacaaaagatgaaagcagggaatttctatctaaatgatgagtattagttccctgtctcttgaaaaatgcccatttgcctttaaaaaaaaaagttacagaaatactataacatatgtacataaattgcataaagcataagtatacagttcaataaacttaactttaactgaacaatggccctgtagccagcacctgtaagaaacagagcagtaccagcgctctaaaagcacctccttgtcactttattactcccagaacaacaactatcctgacttctaatatcattcactagctttgcctggttttgtcttttatgcagatagaatcaatcagtatgtattcttttgtgcctggcttctttctctcagccttacatttgtgagattcctctgtattgtgctgattgtggatcttttcattctcattgcagaataatgttctattgtgggacttattacaatttgttcatcctattgttgatgggcacttgagaactttccattttggcgctattacaaatagtgcaactatgaatgtactgcatgttaccatcttacttgagcctttaatggacttatttcttcaaatccttccaaaaattattataagcattgaaattatagtttcaagccaactgtggatacccttaccctttcctcctttatcacaaccaccgttacaagtatacttatatttccctaaaatacatttaaaacttacctaa

SEQ ID NO: 117 - DNA, 5989 bp, Homo sapiens; identical to SEQ ID NO: 104

SEQ ID NO: 118 - DNA, 5818 bp, Homo sapiens; identical to SEQ ID NO: 103

SEQ ID NO: 119 - DNA, 5757 bp, Homo sapiens; identical to SEQ ID NO: 100

SEQ ID NO: 120 - DNA, 1343 bp, Homo sapiens; identical to SEQ ID NO: 101

SEQ ID NO: 121 - DNA, 5734 bp, Homo sapiens; identical to SEQ ID NO: 99

SEQ ID NO: 122 - DNA, 733 bp, Homo sapiens
aaacagcaggaaatagaaacttaagagaaatacacacttctgagaaactgaaacgacaggggaaaggaggtctcactgagcaccgtcccagcatccggacaccacagcggcccttcgctccacgcagaaaaccacacttctcaaaccttcactcaacacttccttccccaaagccagaagatgcacaaggaggaacatgaggtggctgtgctgggggcaccccccagcaccatccttccaaggtccaccgtgatcaacatccacagcgagacctccgtgcccgaccatgtcgtctggtccctgttcaacaccctcttcttgaactggtgctgtctgggcttcatagcattcgcctactccgtgaagtctagggacaggaagatggttggcgacgtgaccggggcccaggcctatgcctccaccgccaagtgcctgaacatctgggccctgattctgggcatcctcatgaccattggattcatcctgttactggtattcggctctgtgacagtctaccatattatgttacagataatacaggaaaaacggggttactagtagccgcccatagcctgcaacctttgcactccactgtgcaatgctggccctgcacgctggggctgttgcccctgcccccttggtcctgcccctagatacagcagtttatacccacacacctgtctacagtgtcattcaataaagtgcacgtgcttgtgaaaaaaaaaaaaaaaaa

SEQ ID NO: 123 - DNA, 3384 bp, Homo sapiens
agggggcggggcgggccaagggcgggggcgggaaggggcggagtcaggcggaagccggggagaaggcccaggaagtgacggccgcctcccggctaccggggacttctggagtccgagaagtcaacggcgcggttgctgcggccgccgcgctccccggcccgaggcgatggagaacggagcggtgtacagccccactacggaggaggacccgggccccgccagaggcccccggagcggcctcgctgcctactttttcatgggccggctcccattgctccggcgcgttctcaagggcttgcagctgttgctgtctctgctggccttcatctgtgaagaagttgtatcacaatgtactttatgtggaggactttatttttttgagtttgtaagctgcagtgcctttcttctgagtctccttatactgattgtgtattgcactccattttatgagagagttgataccacaaaagtaaaatcatcggatttttatattactttgggaacaggatgtgtgtttttgttggcatccatcatttttgtttccacacatgacaggacttcagctgagattgctgcaattgtgtttggatttatagcaagttttatgttcctacttgactttatcactatgctgtatgaaaaacgacaggagtcccagctgagaaaacctgaaaataccactagggctgaagccctcactgagccacttaatgcctaaagactctggggagcagatgttacctaaggtagtgaccctgcattgtggtgcctgagccctggcagaagctcttgtaaaatttgttaattgtttaaaccacttcttttggagagcaaggggaaggtcaagaaggcagttttatcaatattgtgtcagtcaccacaaagtaggccagataagttaaaaaaaatttttttttaaataataattgaaacttatctcaaatggagattttggtgggaggaggagaaaacaattgtttttaaatcacacagctcaacggttgataaatgattctgtcattctgttacaggtcattcttttactaggcttagcttccaaattatgctttatagctgtataaacatcgtgattatattcatctacttagaaattgttttatttttaaattaatttgcttagctgtttgttttgatgcttagattatgttctgttaatgggaatttaacatatttaagaaaccaatatttaaaatgttggtctaggtttttttccttaacatatattaccaggctttactgtatttcactcagccttaaatgttataatatttttggataacggttattaattctttgagaccttcgtatagcctataaaatgtatgggagatgttggtattttatgtgtataaaagcaacaatatcagcaacttcgtgtttatactgcaccttggttgttgatgtcaagtaaaaaaaagattgttttgtaacacataaaaaaatggaagaaactgataccacacctaaggaccaaagataagaaagactttttgcccaagacagtgaaagtaattataaaaacaagctttgaccacttaccaagtatctgaagagatgagttcatactatgatttagaaagtggttcaattcccctgttggcatatgattatttttactaaaattaatacagctctgtgggtcttccttagtgttttctttgaagccaatctgttttttttaggacaccagcctttggtttttcatctgttcgagatgcctcttctctgtctccttatcagatagaaatggagtcatgtgctgctgcttcatctagcagaggttggcctctggctctgacactttttgtcagttgtctttaggtggtcctgaatcttgggcccttttgattgtgaatactgtgtagcaggatcttgagagtccttgttcttacataggcattgctctagtttgtctttggcaaaaaaaaaaaaaaaaaaaagtaaatatccagggaaccctgcccagactaatactgttggtggcataagagaatcaagccattctcaagagataacttcataaccagaattgtctgttggctagcagctgtcacagataggcagggcacttgggatatgacctttctgtccaggtgattcacagactagacctttcttatcctcctcctagagttttgacttgggactctagtgttaagatgatgagcccgtgcatcaggtccttctgcactttggtggaagtctcccagggtaggtttcctatttgaaacagtggaatcatgtttccagtgataaagtttaatgacctcatccttttttttttttctcatctgccatttgtgtgtcttagatgggttttaattgcatgaatgtggctaatgtggttctcagaaattggtcagtatggcccaacatagcttctgctctgtcttactgactcaatacctttaggatttgtatcagagtttggatactagtgttagtggtggtgtcaccactacttaattgggagataatgaaaccaatcatggatgctgtttttattgggcatgtcatctaagagaggagaaatagctgggttttgggtctaattatgaataaggactgattcagaaaacgagtttatggtaggtagactaaagtttcacatcagactgtaccattgtgatttagacctatctaaaattcagagcatatcatctgggctacctcagggtcaccacccatgtattgggcttagtcaggattgacagatacattctcagctggcctgtcatataaaacatactgtcattgagcttaagctccgcttgttctgaggtttcacctccatgtgtttcattggtgcaaaagtggatctcttagttggtcacttaattctttctttttcagaaagatagtatgttcactggtatatttggtcactcttagaaccttccttcacattgttttttatgggacccatgaatggttagcctttcttttctattgtagaaggaaataaataggagtaaaaagaccattgtagtaaataagttcaaggggaacttgggaccagaaaccactgttatgtacaaaaaaatggcaaattcaataaactcaaatttaaaataatttttaaattaacagttatgataaattttatattttatacaaatagattgcttagaatggttctcaagaattataagagaaatgaactcacagtacaaaaattttataattactatacttgtgttttgtttgggggctgggaaatgtatttttacattgtagccaatcattttatatttgtcaatttaaatcttatgggtcttttttttttatctctcttgatgtcagattttatagtctttttaaataaatccatttaattaaaacgttaaaaaaaaaaaaaaaaaa

SEQ ID NO: 124 - DNA, 2796 bp, Homo sapiens
agcgagctcctcctccttcccctccccactctccccgagtctagggcccccggggcgtatgacgccggagccctctgaccgcacctctgaccacaacaaacccctactccacccgtcttgtttgtcccacccttggtgacgcagagccccagcccagaccccgcccaaagcactcatttaactggtattgcggagccacgaggcttctgcttactgcaactcgctccggccgctgggcgtagctgcgactcggcggagtcccggcggcgcgtccttgttctaacccggcgcgccatgaccgtcgcgcggccgagcgtgcccgcggcgctgcccctcctcggggagctgccccggctgctgctgctggtgctgttgtgcctgccggccgtgtggggtgactgtggccttcccccagatgtacctaatgcccagccagctttggaaggccgtacaagttttcccgaggatactgtaataacgtacaaatgtgaagaaagctttgtgaaaattcctggcgagaaggactcagtgatctgccttaagggcagtcaatggtcagatattgaagagttctgcaatcgtagctgcgaggtgccaacaaggctaaattctgcatccctcaaacagccttatatcactcagaattattttccagtcggtactgttgtggaatatgagtgccgtccaggttacagaagagaaccttctctatcaccaaaactaacttgccttcagaatttaaaatggtccacagcagtcgaattttgtaaaaagaaatcatgccctaatccgggagaaatacgaaatggtcagattgatgtaccaggtggcatattatttggtgcaaccatctccttctcatgtaacacagggtacaaattatttggctcgacttctagtttttgtcttatttcaggcagctctgtccagtggagtgacccgttgccagagtgcagagaaatttattgtccagcaccaccacaaattgacaatggaataattcaaggggaacgtgaccattatggatatagacagtctgtaacgtatgcatgtaataaaggattcaccatgattggagagcactctatttattgtactgtgaataatgatgaaggagagtggagtggcccaccacctgaatgcagaggaaaatctctaacttccaaggtcccaccaacagttcagaaacctaccacagtaaatgttccaactacagaagtctcaccaacttctcagaaaaccaccacaaaaaccaccacaccaaatgctcaagcaacacggagtacacctgtttccaggacaaccaagcattttcatgaaacaaccccaaataaaggaagtggaaccacttcaggtactacccgtcttctatctgggcacacgtgtttcacgttgacaggtttgcttgggacgctagtaaccatgggcttgctgacttagccaaagaagagttaagaagaaaatacacacaagtatacagactgttcctagtttcttagacttatctgcatattggataaaataaatgcaattgtgctcttcatttaggatgctttcattgtctttaagatgtgttaggaatgtcaacagagcaaggagaaaaaaggcagtcctggaatcacattcttagcacacctacacctcttgaaaatagaacaacttgcagaattgagagtgattcctttcctaaaagtgtaagaaagcatagagatttgttcgtatttagaatgggatcacgaggaaaagagaaggaaagtgatttttttccacaagatctgtaatgttatttccacttataaaggaaataaaaaatgaaaaacattatttggatatcaaaagcaaataaaaacccaattcagtctcttctaagcaaaattgctaaagagagatgaaccacattataaagtaatctttggctgtaaggcattttcatctttccttcgggttggcaaaatattttaaaggtaaaacatgctggtgaaccaggggtgttgatggtgataagggaggaatatagaatgaaagactgaatcttcctttgttgcacaaatagagtttggaaaaagcctgtgaaaggtgtcttctttgacttaatgtctttaaaagtatccagagatactacaatattaacataagaaaagattatatattatttctgaatcgagatgtccatagtcaaatttgtaaatcttattcttttgtaatatttatttatatttatttatgacagtgaacattctgattttacatgtaaaacaagaaaagttgaagaagatatgtgaagaaaaatgtatttttcctaaatagaaataaatgatcccattttttggtatcatgtagtatgtgaaatttattcttaaacgtgactactttatttctaaataagaaattccctacctgcttcctacaagcagttcagaatgccatgccttggttgtcctagtgtgaataattttcagctactttaaaattatattgtactttctcaagcatgtcatatcctttcctattagagtatctatattacttgttactgatttacctgaaggcaatctgattaatttctaggtttttaccatattcttgtcatcttgccaattacattttaagtgttagactagactaagatgtactagttgtatagaatataactagatttattatggcaatgtttattttgtcattttgcttcatctgttttgttgttgaagtactttaaatttcatacgttcatggcatttcactgtaaagactttaatgtgtatttcttaaaataaaactttttttcctccttaa

SEQ ID NO: 125 - DNA, 2914 bp, Homo sapiens
agcgagctcctcctccttcccctccccactctccccgagtctagggcccccggggcgtatgacgccggagccctctgaccgcacctctgaccacaacaaacccctactccacccgtcttgtttgtcccacccttggtgacgcagagccccagcccagaccccgcccaaagcactcatttaactggtattgcggagccacgaggcttctgcttactgcaactcgctccggccgctgggcgtagctgcgactcggcggagtcccggcggcgcgtccttgttctaacccggcgcgccatgaccgtcgcgcggccgagcgtgcccgcggcgctgcccctcctcggggagctgccccggctgctgctgctggtgctgttgtgcctgccggccgtgtggggtgactgtggccttcccccagatgtacctaatgcccagccagctttggaaggccgtacaagttttcccgaggatactgtaataacgtacaaatgtgaagaaagctttgtgaaaattcctggcgagaaggactcagtgatctgccttaagggcagtcaatggtcagatattgaagagttctgcaatcgtagctgcgaggtgccaacaaggctaaattctgcatccctcaaacagccttatatcactcagaattattttccagtcggtactgttgtggaatatgagtgccgtccaggttacagaagagaaccttctctatcaccaaaactaacttgccttcagaatttaaaatggtccacagcagtcgaattttgtaaaaagaaatcatgccctaatccgggagaaatacgaaatggtcagattgatgtaccaggtggcatattatttggtgcaaccatctccttctcatgtaacacagggtacaaattatttggctcgacttctagtttttgtcttatttcaggcagctctgtccagtggagtgacccgttgccagagtgcagagaaatttattgtccagcaccaccacaaattgacaatggaataattcaaggggaacgtgaccattatggatatagacagtctgtaacgtatgcatgtaataaaggattcaccatgattggagagcactctatttattgtactgtgaataatgatgaaggagagtggagtggcccaccacctgaatgcagaggaaaatctctaacttccaaggtcccaccaacagttcagaaacctaccacagtaaatgttccaactacagaagtctcaccaacttctcagaaaaccaccacaaaaaccaccacaccaaatgctcaagcaacacggagtacacctgtttccaggacaaccaagcattttcatgaaacaaccccaaataaaggaagtggaaccacttcaggtactacccgtcttctatctggttctcgtcctgtcacccaggctggtatgcggtggtgtgatcgtagctcactgcagtctcgaactcctgggttcaagcgatccttccacttcagcctcccaagtagctggtactacagggcacacgtgtttcacgttgacaggtttgcttgggacgctagtaaccatgggcttgctgacttagccaaagaagagttaagaagaaaatacacacaagtatacagactgttcctagtttcttagacttatctgcatattggataaaataaatgcaattgtgctcttcatttaggatgctttcattgtctttaagatgtgttaggaatgtcaacagagcaaggagaaaaaaggcagtcctggaatcacattcttagcacacctacacctcttgaaaatagaacaacttgcagaattgagagtgattcctttcctaaaagtgtaagaaagcatagagatttgttcgtatttagaatgggatcacgaggaaaagagaaggaaagtgatttttttccacaagatctgtaatgttatttccacttataaaggaaataaaaaatgaaaaacattatttggatatcaaaagcaaataaaaacccaattcagtctcttctaagcaaaattgctaaagagagatgaaccacattataaagtaatctttggctgtaaggcattttcatctttccttcgggttggcaaaatattttaaaggtaaaacatgctggtgaaccaggggtgttgatggtgataagggaggaatatagaatgaaagactgaatcttcctttgttgcacaaatagagtttggaaaaagcctgtgaaaggtgtcttctttgacttaatgtctttaaaagtatccagagatactacaatattaacataagaaaagattatatattatttctgaatcgagatgtccatagtcaaatttgtaaatcttattcttttgtaatatttatttatatttatttatgacagtgaacattctgattttacatgtaaaacaagaaaagttgaagaagatatgtgaagaaaaatgtatttttcctaaatagaaataaatgatcccattttttggtatcatgtagtatgtgaaatttattcttaaacgtgactactttatttctaaataagaaattccctacctgcttcctacaagcagttcagaatgccatgccttggttgtcctagtgtgaataattttcagctactttaaaattatattgtactttctcaagcatgtcatatcctttcctattagagtatctatattacttgttactgatttacctgaaggcaatctgattaatttctaggtttttaccatattcttgtcatcttgccaattacattttaagtgttagactagactaagatgtactagttgtatagaatataactagatttattatggcaatgtttattttgtcattttgcttcatctgttttgttgttgaagtactttaaatttcatacgttcatggcatttcactgtaaagactttaatgtgtatttcttaaaataaaactttttttcctccttaa

SEQ ID NO: 126 - DNA, 1784 bp, Homo sapiens
agcgagctcctcctccttcccctccccactctccccgagtctagggcccccggggcgtatgacgccggagccctctgaccgcacctctgaccacaacaaacccctactccacccgtcttgtttgtcccacccttggtgacgcagagccccagcccagaccccgcccaaagcactcatttaactggtattgcggagccacgaggcttctgcttactgcaactcgctccggccgctgggcgtagctgcgactcggcggagtcccggcggcgcgtccttgttctaacccggcgcgccatgaccgtcgcgcggccgagcgtgcccgcggcgctgcccctcctcggggagctgccccggctgctgctgctggtgctgttgtgcctgccggccgtgtggggtgactgtggccttcccccagatgtacctaatgcccagccagctttggaaggccgtacaagttttcccgaggatactgtaataacgtacaaatgtgaagaaagctttgtgaaaattcctggcgagaaggactcagtgatctgccttaagggcagtcaatggtcagatattgaagagttctgcaatcgtagctgcgaggtgccaacaaggctaaattctgcatccctcaaacagccttatatcactcagaattattttccagtcggtactgttgtggaatatgagtgccgtccaggttacagaagagaaccttctctatcaccaaaactaacttgccttcagaatttaaaatggtccacagcagtcgaattttgtaaaaagaaatcatgccctaatccgggagaaatacgaaatggtcagattgatgtaccaggtggcatattatttggtgcaaccatctccttctcatgtaacacagggtacaaattatttggctcgacttctagtttttgtcttatttcaggcagctctgtccagtggagtgacccgttgccagagtgcagagaaatttattgtccagcaccaccacaaattgacaatggaataattcaaggggaacgtgaccattatggatatagacagtctgtaacgtatgcatgtaataaaggattcaccatgattggagagcactctatttattgtactgtgaataatgatgaaggagagtggagtggcccaccacctgaatgcagaggaaaatctctaacttccaaggtcccaccaacagttcagaaacctaccacagtaaatgttccaactacagaagtctcaccaacttctcagaaaaccaccacaaaaaccaccacaccaaatgctcaagcaacacggagtacacctgtttccaggacaaccaagcattttcatgaaacaaccccaaataaaggaagtggaaccacttcaggtactacccgtcttctatctggttctcgtcctgtcacccaggctggtatgcggtggtgtgatcgtagctcactgcagtctcgaactcctgggttcaagcgatccttccacttcagcctcccaagtagctggtactacaggtgtgtgccacgacacccggctaagtttttgaaatttattttttgtagagacaggattttcctatgttgcccaggctggtttcaaactcctggccgtaagcgatttttccggcctcccaaaacgttgcgattataagtgtgagccactgcacctggccccacattttctttatccatttgtacattgatggacacttaagatgattccatatctttgctattgtgaatagtgcttcaataaatatgtgaatgcacataaaaaaaaaaaaaaaaaaaaaaaaaaaaaaaaaa

SEQ ID NO: 127 - DNA, 2911 bp, Homo sapiens
agcgagctcctcctccttcccctccccactctccccgagtctagggcccccggggcgtatgacgccggagccctctgaccgcacctctgaccacaacaaacccctactccacccgtcttgtttgtcccacccttggtgacgcagagccccagcccagaccccgcccaaagcactcatttaactggtattgcggagccacgaggcttctgcttactgcaactcgctccggccgctgggcgtagctgcgactcggcggagtcccggcggcgcgtccttgttctaacccggcgcgccatgaccgtcgcgcggccgagcgtgcccgcggcgctgcccctcctcggggagctgccccggctgctgctgctggtgctgttgtgcctgccggccgtgtggggtgactgtggccttcccccagatgtacctaatgcccagccagctttggaaggccgtacaagttttcccgaggatactgtaataacgtacaaatgtgaagaaagctttgtgaaaattcctggcgagaaggactcagtgatctgccttaagggcagtcaatggtcagatattgaagagttctgcaatcgtagctgcgaggtgccaacaaggctaaattctgcatccctcaaacagccttatatcactcagaattattttccagtcggtactgttgtggaatatgagtgccgtccaggttacagaagagaaccttctctatcaccaaaactaacttgccttcagaatttaaaatggtccacagcagtcgaattttgtaaaaagaaatcatgccctaatccgggagaaatacgaaatggtcagattgatgtaccaggtggcatattatttggtgcaaccatctccttctcatgtaacacagggtacaaattatttggctcgacttctagtttttgtcttatttcaggcagctctgtccagtggagtgacccgttgccagagtgcagagaaatttattgtccagcaccaccacaaattgacaatggaataattcaaggggaacgtgaccattatggatatagacagtctgtaacgtatgcatgtaataaaggattcaccatgattggagagcactctatttattgtactgtgaataatgatgaaggagagtggagtggcccaccacctgaatgcagaggaaaatctctaacttccaaggtcccaccaacagttcagaaacctaccacagtaaatgttccaactacagaagtctcaccaacttctcagaaaaccaccacaaaaaccaccacaccaaatgctcaagcaacacggagtacacctgtttccaggacaaccaagcattttcatgaaacaaccccaaataaaggaagtggaaccacttcaggtactacccgtcttctatctgagacggtgtttcaccgtgttatccaggatggtcttgatctcctggcctcgagatctgcctgcctcggcctcccaaagtgctgggattacaggcgtgagccaccgcacctggccagggcacacgtgtttcacgttgacaggtttgcttgggacgctagtaaccatgggcttgctgacttagccaaagaagagttaagaagaaaatacacacaagtatacagactgttcctagtttcttagacttatctgcatattggataaaataaatgcaattgtgctcttcatttaggatgctttcattgtctttaagatgtgttaggaatgtcaacagagcaaggagaaaaaaggcagtcctggaatcacattcttagcacacctacacctcttgaaaatagaacaacttgcagaattgagagtgattcctttcctaaaagtgtaagaaagcatagagatttgttcgtatttagaatgggatcacgaggaaaagagaaggaaagtgatttttttccacaagatctgtaatgttatttccacttataaaggaaataaaaaatgaaaaacattatttggatatcaaaagcaaataaaaacccaattcagtctcttctaagcaaaattgctaaagagagatgaaccacattataaagtaatctttggctgtaaggcattttcatctttccttcgggttggcaaaatattttaaaggtaaaacatgctggtgaaccaggggtgttgatggtgataagggaggaatatagaatgaaagactgaatcttcctttgttgcacaaatagagtttggaaaaagcctgtgaaaggtgtcttctttgacttaatgtctttaaaagtatccagagatactacaatattaacataagaaaagattatatattatttctgaatcgagatgtccatagtcaaatttgtaaatcttattcttttgtaatatttatttatatttatttatgacagtgaacattctgattttacatgtaaaacaagaaaagttgaagaagatatgtgaagaaaaatgtatttttcctaaatagaaataaatgatcccattttttggtatcatgtagtatgtgaaatttattcttaaacgtgactactttatttctaaataagaaattccctacctgcttcctacaagcagttcagaatgccatgccttggttgtcctagtgtgaataattttcagctactttaaaattatattgtactttctcaagcatgtcatatcctttcctattagagtatctatattacttgttactgatttacctgaaggcaatctgattaatttctaggtttttaccatattcttgtcatcttgccaattacattttaagtgttagactagactaagatgtactagttgtatagaatataactagatttattatggcaatgtttattttgtcattttgcttcatctgttttgttgttgaagtactttaaatttcatacgttcatggcatttcactgtaaagactttaatgtgtatttcttaaaataaaactttttttcctccttaa

SEQ ID NO: 128 - DNA, 2889 bp, Homo sapiens
agcgagctcctcctccttcccctccccactctccccgagtctagggcccccggggcgtatgacgccggagccctctgaccgcacctctgaccacaacaaacccctactccacccgtcttgtttgtcccacccttggtgacgcagagccccagcccagaccccgcccaaagcactcatttaactggtattgcggagccacgaggcttctgcttactgcaactcgctccggccgctgggcgtagctgcgactcggcggagtcccggcggcgcgtccttgttctaacccggcgcgccatgaccgtcgcgcggccgagcgtgcccgcggcgctgcccctcctcggggagctgccccggctgctgctgctggtgctgttgtgcctgccggccgtgtggggtgactgtggccttcccccagatgtacctaatgcccagccagctttggaaggccgtacaagttttcccgaggatactgtaataacgtacaaatgtgaagaaagctttgtgaaaattcctggcgagaaggactcagtgatctgccttaagggcagtcaatggtcagatattgaagagttctgcaatcgtagctgcgaggtgccaacaaggctaaattctgcatccctcaaacagccttatatcactcagaattattttccagtcggtactgttgtggaatatgagtgccgtccaggttacagaagagaaccttctctatcaccaaaactaacttgccttcagaatttaaaatggtccacagcagtcgaattttgtaaaaagaaatcatgccctaatccgggagaaatacgaaatggtcagattgatgtaccaggtggcatattatttggtgcaaccatctccttctcatgtaacacagggtacaaattatttggctcgacttctagtttttgtcttatttcaggcagctctgtccagtggagtgacccgttgccagagtgcagagaaatttattgtccagcaccaccacaaattgacaatggaataattcaaggggaacgtgaccattatggatatagacagtctgtaacgtatgcatgtaataaaggattcaccatgattggagagcactctatttattgtactgtgaataatgatgaaggagagtggagtggcccaccacctgaatgcagaggaaaatctctaacttccaaggtcccaccaacagttcagaaacctaccacagtaaatgttccaactacagaagtctcaccaacttctcagaaaaccaccacaaaaaccaccacaccaaatgctcaagcaacacggagtacacctgtttccaggacaaccaagcattttcatgaaacaaccccaaataaaggaagtggaaccacttcaggtactacccgtcttctatctgctctgcaagttagaccttttgaagtgtctgggtcatcccacatttcttcaaaaaagatgatgtgcatcctctaggtcactccagttcttggagggcacacgtgtttcacgttgacaggtttgcttgggacgctagtaaccatgggcttgctgacttagccaaagaagagttaagaagaaaatacacacaagtatacagactgttcctagtttcttagacttatctgcatattggataaaataaatgcaattgtgctcttcatttaggatgctttcattgtctttaagatgtgttaggaatgtcaacagagcaaggagaaaaaaggcagtcctggaatcacattcttagcacacctacacctcttgaaaatagaacaacttgcagaattgagagtgattcctttcctaaaagtgtaagaaagcatagagatttgttcgtatttagaatgggatcacgaggaaaagagaaggaaagtgatttttttccacaagatctgtaatgttatttccacttataaaggaaataaaaaatgaaaaacattatttggatatcaaaagcaaataaaaacccaattcagtctcttctaagcaaaattgctaaagagagatgaaccacattataaagtaatctttggctgtaaggcattttcatctttccttcgggttggcaaaatattttaaaggtaaaacatgctggtgaaccaggggtgttgatggtgataagggaggaatatagaatgaaagactgaatcttcctttgttgcacaaatagagtttggaaaaagcctgtgaaaggtgtcttctttgacttaatgtctttaaaagtatccagagatactacaatattaacataagaaaagattatatattatttctgaatcgagatgtccatagtcaaatttgtaaatcttattcttttgtaatatttatttatatttatttatgacagtgaacattctgattttacatgtaaaacaagaaaagttgaagaagatatgtgaagaaaaatgtatttttcctaaatagaaataaatgatcccattttttggtatcatgtagtatgtgaaatttattcttaaacgtgactactttatttctaaataagaaattccctacctgcttcctacaagcagttcagaatgccatgccttggttgtcctagtgtgaataattttcagctactttaaaattatattgtactttctcaagcatgtcatatcctttcctattagagtatctatattacttgttactgatttacctgaaggcaatctgattaatttctaggtttttaccatattcttgtcatcttgccaattacattttaagtgttagactagactaagatgtactagttgtatagaatataactagatttattatggcaatgtttattttgtcattttgcttcatctgttttgttgttgaagtactttaaatttcatacgttcatggcatttcactgtaaagactttaatgtgtatttcttaaaataaaactttttttcctccttaa

SEQ ID NO: 129 - DNA, 2881 bp, Homo sapiens
agcgagctcctcctccttcccctccccactctccccgagtctagggcccccggggcgtatgacgccggagccctctgaccgcacctctgaccacaacaaacccctactccacccgtcttgtttgtcccacccttggtgacgcagagccccagcccagaccccgcccaaagcactcatttaactggtattgcggagccacgaggcttctgcttactgcaactcgctccggccgctgggcgtagctgcgactcggcggagtcccggcggcgcgtccttgttctaacccggcgcgccatgaccgtcgcgcggccgagcgtgcccgcggcgctgcccctcctcggggagctgccccggctgctgctgctggtgctgttgtgcctgccggccgtgtggggtgactgtggccttcccccagatgtacctaatgcccagccagctttggaaggccgtacaagttttcccgaggatactgtaataacgtacaaatgtgaagaaagctttgtgaaaattcctggcgagaaggactcagtgatctgccttaagggcagtcaatggtcagatattgaagagttctgcaatcgtagctgcgaggtgccaacaaggctaaattctgcatccctcaaacagccttatatcactcagaattattttccagtcggtactgttgtggaatatgagtgccgtccaggttacagaagagaaccttctctatcaccaaaactaacttgccttcagaatttaaaatggtccacagcagtcgaattttgtaaaaagaaatcatgccctaatccgggagaaatacgaaatggtcagattgatgtaccaggtggcatattatttggtgcaaccatctccttctcatgtaacacagggtacaaattatttggctcgacttctagtttttgtcttatttcaggcagctctgtccagtggagtgacccgttgccagagtgcagagaaatttattgtccagcaccaccacaaattgacaatggaataattcaaggggaacgtgaccattatggatatagacagtctgtaacgtatgcatgtaataaaggattcaccatgattggagagcactctatttattgtactgtgaataatgatgaaggagagtggagtggcccaccacctgaatgcagaggaaaatctctaacttccaaggtcccaccaacagttcagaaacctaccacagtaaatgttccaactacagaagtctcaccaacttctcagaaaaccaccacaaaaaccaccacaccaaatgctcaagcaacacggagtacacctgtttccaggacaaccaagcattttcatgaaacaaccccaaataaaggaagtggaaccacttcaggtactacccgtcttctatctgttctgtttatgtgatgaatcacatttattgatttggatatgttgagccaaccttgcatcccaggaataaagcctacttgatcgtgggcacacgtgtttcacgttgacaggtttgcttgggacgctagtaaccatgggcttgctgacttagccaaagaagagttaagaagaaaatacacacaagtatacagactgttcctagtttcttagacttatctgcatattggataaaataaatgcaattgtgctcttcatttaggatgctttcattgtctttaagatgtgttaggaatgtcaacagagcaaggagaaaaaaggcagtcctggaatcacattcttagcacacctacacctcttgaaaatagaacaacttgcagaattgagagtgattcctttcctaaaagtgtaagaaagcatagagatttgttcgtatttagaatgggatcacgaggaaaagagaaggaaagtgatttttttccacaagatctgtaatgttatttccacttataaaggaaataaaaaatgaaaaacattatttggatatcaaaagcaaataaaaacccaattcagtctcttctaagcaaaattgctaaagagagatgaaccacattataaagtaatctttggctgtaaggcattttcatctttccttcgggttggcaaaatattttaaaggtaaaacatgctggtgaaccaggggtgttgatggtgataagggaggaatatagaatgaaagactgaatcttcctttgttgcacaaatagagtttggaaaaagcctgtgaaaggtgtcttctttgacttaatgtctttaaaagtatccagagatactacaatattaacataagaaaagattatatattatttctgaatcgagatgtccatagtcaaatttgtaaatcttattcttttgtaatatttatttatatttatttatgacagtgaacattctgattttacatgtaaaacaagaaaagttgaagaagatatgtgaagaaaaatgtatttttcctaaatagaaataaatgatcccattttttggtatcatgtagtatgtgaaatttattcttaaacgtgactactttatttctaaataagaaattccctacctgcttcctacaagcagttcagaatgccatgccttggttgtcctagtgtgaataattttcagctactttaaaattatattgtactttctcaagcatgtcatatcctttcctattagagtatctatattacttgttactgatttacctgaaggcaatctgattaatttctaggtttttaccatattcttgtcatcttgccaattacattttaagtgttagactagactaagatgtactagttgtatagaatataactagatttattatggcaatgtttattttgtcattttgcttcatctgttttgttgttgaagtactttaaatttcatacgttcatggcatttcactgtaaagactttaatgtgtatttcttaaaataaaactttttttcctccttaa

SEQ ID NO: 130 - DNA, 1447 bp, Homo sapiens
aaagcactcatttaactggtattgcggagccacgaggcttctgcttactgcaactcgctccggccgctgggcgtagctgcgactcggcggagtcccggcggcgcgtccttgttctaacccggcgcgccatgaccgtcgcgcggccgagcgtgcccgcggcgctgcccctcctcggggagctgccccggctgctgctgctggtgctgttgtgcctgccggccgtgtggggtgactgtggccttcccccagatgtacctaatgcccagccagctttggaaggccgtacaagttttcccgaggatactgtaataacgtacaaatgtgaagaaagctttgtgaaaattcctggcgagaaggactcagtgatctgccttaagggcagtcaatggtcagatattgaagagttctgcaatcgtagctgcgaggtgccaacaaggctaaattctgcatccctcaaacagccttatatcactcagaattattttccagtcggtactgttgtggaatatgagtgccgtccaggttacagaagagaaccttctctatcaccaaaactaacttgccttcagaatttaaaatggtccacagcagtcgaattttgtaaaaagaaatcatgccctaatccgggagaaatacgaaatggtcagattgatgtaccaggtggcatattatttggtgcaaccatctccttctcatgtaacacagggtacaaattatttggctcgacttctagtttttgtcttatttcaggcagctctgtccagtggagtgacccgttgccagagtgcagagaaatttattgtccagcaccaccacaaattgacaatggaataattcaaggggaacgtgaccattatggatatagacagtctgtaacgtatgcatgtaataaaggattcaccatgattggagagcactctatttattgtactgtgaataatgatgaaggagagtggagtggcccaccacctgaatgcagaggaaaatctctaacttccaaggtcccaccaacagttcagaaacctaccacagtaaatgttccaactacagaagtctcaccaacttctcagaaaaccaccacaaaaaccaccacaccaaatgctcaagcaacacggagtacacctgtttccaggacaaccaagcattttcatgaaacaaccccaaataaaggaagtggaaccacttcaggtactacccgtcttctatctggttctcgtcctgtcacccaggctggtatgcggtggtgtgatcgtagctcactgcagtctcgaactcctgggttcaagcgatccttccacttcagcctcccaagtagctggtactacaggtttctctccatggaagaggagaagaccagaggcatctagtcagacatcttgaagccactccccatgatactgtcttaggaaaacaatcaacatgtagcattcatggataccaaagggaa

SEQ ID NO: 131 - DNA, 4716 bp, Homo sapiens
atagctgactgtgccgtcccttcccctcacccgctccacgccctcctgggccgagtggagttgggtggtgtcgggagcctctccctgaggggcaccgcgtcttcaggagctgggcctccagtgcggcgcgatgtcaggcgcggtgacagctctgtgagtccgaggccgcggccgtggcgctgggcggctgcggggcctgaccggtccgctcatggtgccgccacgacgccatcgcggggcaggaaggccaggggtgctgagttcttcacctccttttagactgagatctgccaagttttccggcattgctcttgaggatctcagaagggctcttaagacaagactgcaaatggtgtgtgtatttgtcatgaaccgaatgaattcccagaacagtggtttcactcagcgcaggcgaatggctcttgggattgttattcttctgcttgttgatgtgatatgggttgcttcctctgaacttacttcgtatgtttttacccagtacaacaaaccattcttcagcacctttgcaaaaacatctatgtttgttttgtaccttttgggctttattatttggaagccatggagacaacagtgtacaagaggacttcgcggaaagcatgctgctttttttgcagatgctgaaggttactttgctgcttgcacaacagatacaactatgaatagttctttgagtgaacctctgtatgtgcctgtgaaattccatgatcttccaagtgaaaaacctgagagcacaaacattgatactgaaaaaacccccaaaaagtctcgtgtgaggttcagtaatatcatggagattcgacagcttccgtcaagtcatgcattggaagcaaagttgtctcgcatgtcatatcctgtgaaagaacaagaatccatactgaaaactgtggggaaacttactgcaactcaagtagcgaaaattagcttttttttttgctttgtgtggtttttggcaaatttgtcatatcaagaagcactttcagacacacaagttgctatagttaatattttatcttcaacttccggactttttaccttaatccttgctgcagtatttccaagtaacagtggagatagatttaccctttctaaactattagctgtaattttaagacttgataaagaaggaaatggatataaaatattgaacttcattggaggcgttgtactggtaaacctggcagggtctgaaaaacctgctggaagagacacagtaggttccatttggtctcttgctggagccatgctctatgctgtctatattgttatgattaagagaaaagtagatagagaagacaagttggatattccaatgttctttggttttgtaggtttgtttaatctgctgctcttatggccaggtttctttttacttcattatactggatttgaggacttcgagtttcccaataaagtagtattaatgtgcattatcattaatggccttattggaacagtactctcagagttcctgtggttgtggggctgctttcttacctcatcattgataggcacacttgcactaagccttacaatacctctgtccataatagctgacatgtgtatgcaaaaggtgcagttttcttggttattttttgcaggagctatccctgtatttttttcattttttattgtaactctcctatgccattataataattgggatcctgtgatggtgggaatcagaagaatatttgcttttatatgcagaaaacatcgaattcagagagttccagaagacagcgaacagtgtgagagtctcatttctatgcacagtgtttctcaggaggatggagctagttagctgtctgttgtctgtagcccagatggaatcttgctctgtcgcccaagctggagtgcagtggcgagatctcgggtcactgcaacctctacctcctgggctcaagcgattctcctgcctcagcctcccgagtagctgggactacaggcgcacgccaccacacccagctaatttttgtatttttagtagagacggggtttcaccatgttggtcaggatggtctcgatctcttgaactcgtgatccgccctccttggcttcccaaagtgctgggattataggcgtgagccaccgcgcccggcccacagcatcatttttcaagggtctctagggtgaccaggtgtccgggtttgccaaggacagtcccagtttctacctgctgtcctaggacaatcatgaatagtgcccctttcagtttcaaaagtgtcatagtttagacattaaattacctgaccacccttatatgccccatgtttcttaacatctaggctgctgacaaaattcacattttctgactgtcagtctagtgttctctatactagactgatacggatccacaaaggaagcaatattggccaacaattaatcttcagtctttggattagtgagaggtgacaacgtgctggcagccgtcacagccctcgctcactctccccgcctcctctgcctggtttcccagtttgacggcacttgaggagcccttcagcccgccgctgcactgtgggagccccttcctgggctggccgaggccggaggcggctcccccagcttgcggggaggtgtggagggagaggcgagggcgggaacaggggctgcgcgcggtgcttgcgggccagcgcgagttctgggtgggtgtgggctcggcgggccccgcactcggagcggccggcaggccctgccggccccgggcaatgaggggcttagcacccgggccagcggctgcggagggtgtgccgggtcccccagcagtgccggcccaccggcgctgcgctcgatttctcgccgggccttagctgcctccccgcggggcagggctcgggacctgcagcccgccatgcctgagccttcccagctccgtgggctcctgtgtggccagagcgccccctgctccgcggtgcccagtcccatcaactacccaagggctgaggagtgcgggcgcagggcgcgggactggcgggcagctccacctgtggcccctgtgcgggatccgctgggtgaagccggctgggctcctgactctggtggggacttggagaacctttgtgtctagctcagggattgtaaacgcaccaatcagcgccctgtcaaaacagaccactcgctctctgtaaaatggaccaatcagaggatgtgggtggggccagataagagaataaaagcgggctgcccgagcccccagtggcgactcgctggggttcccttaccgagctgtgggagctttgttctttcgctttttgcaataaatcttgctgctgctcactctttgggtccacactgcctttatgagctgtaacactcacggtgaaggtccgcagcttcactcctgagccggcgagaccacgaacccaccagaaggaagaaactccgaacatcagaaggaaccaactccggacatgccgcctttaagaactgtaacactcaccgcgaggagccacggcttcattctggaagtcagtgagaccgagaacccactgagtccggacacattaggatgttagagtcccaccttcaaagcatttttctcctggagtggactttgcacaaatggtaggccaattgtggagtcagtgaagaaccaggctaatccagcttgttttattggccccagtttttcttctcagggccgtaaaccagttattaccaggaaacaaaagcaaagtaagtattaagttttgaattggtattgaggagaaacatctaaaatcaagtctcgccaatctaattaaattagattcccaaaccggaagaagctttgcaattactgccaaaatgtctcagagggcattaggttaattgaagctggagaggagtgagaaaagaggcagctgctagtcactgagaataaggactctctatttgctgtgaggtttgtaggggcagcactttgctgttggggtttggtaaggggatttgttttaaaattggaattatattttgttggcttttaatcataagcagggaaatacatttttcctacgcctaagaatttacataagctaatttgttccataattagaaaaatccttgcttttagcatatggactgtaacaataggggttgtaactcgtgagtcgtgtgacacattgtttccctttggtgaagttttactttaagatctgttgagtatatccagggagagagatgaaggtcaagacatgcttatttttacagagagagagagagagagagagaaagagattcattaaactttgagttatactttatttttatttatttatttttttgagatggggtcttgctctgtcacccaggctggagtacagtggcatgatcttggctcattgcaacctccactaccagggctcaagtgattctcccacctcagcctctcaagttgctgggactacaggtgcacaccaacaagcctggctaagttttttgatttttagtagcaatgaggtcttgctattttgcctaggctggtctcgaactcctggcctcaagcaatctgcctgccttagcttcccaaagtgctaggattacagatgtgagccaccgtgcctggcccatattttactcagtaggaatctttgctatttgctatgatttttaattcttcttgtatcttaattttgcttccccaatgagtatgttaaatgttctttaaaatcttcctgtaaaaaagtaaacatattaaacagcagttctctaattgaa

SEQ ID NO: 132 - DNA, 10478 bp, Homo sapiens
acggagtgcccaccagcagcaccacctcctgccctcggtggcagcaggagcgccttgaccgaaaccgtgaaggtctctaggggcggagggagcgggagctgacaggggcgccggagccctgcgcccaccgctggcaattgaggaagccgtgcgtgcgccctcgcctcggctccccggggaggcgtcgctgccttaactgtcttccccgctccaaaacagaaggatgatttcttttcccagctgtttcttttaaaatgactggatgttttgatagaggtgggtggaggagcatggagaatccttttcttttaccacttgaagagattggaaaggtgccttcaagacccacagcaaatcacttactctccgataaccaaattccactccagcagatcagggacagaaaagacacttttagaaacagtgtctagacgctgtccccagggatggattcctctggatggagaggggtgctgagttcttcacctccttttagactgagatctgccaagttttccggcattgctcttgaggatctcagaagggctcttaagacaagactgcaaatggtgtgtgtatttgtcatgaaccgaatgaattcccagaacagtggtttcactcagcgcaggcgaatggctcttgggattgttattcttctgcttgttgatgtgatatgggttgcttcctctgaacttacttcgtatgtttttacccagtacaacaaaccattcttcagcacctttgcaaaaacatctatgtttgttttgtaccttttgggctttattatttggaagccatggagacaacagtgtacaagaggacttcgcggaaagcatgctgctttttttgcagatgctgaaggttactttgctgcttgcacaacagatacaactatgaatagttctttgagtgaacctctgtatgtgcctgtgaaattccatgatcttccaagtgaaaaacctgagagcacaaacattgatactgaaaaaacccccaaaaagtctcgtgtgaggttcagtaatatcatggagattcgacagcttccgtcaagtcatgcattggaagcaaagttgtctcgcatgtcatatcctgtgaaagaacaagaatccatactgaaaactgtggggaaacttactgcaactcaagtagcgaaaattagcttttttttttgctttgtgtggtttttggcaaatttgtcatatcaagaagcactttcagacacacaagttgctatagttaatattttatcttcaacttccggactttttaccttaatccttgctgcagtatttccaagtaacagtggagatagatttaccctttctaaactattagctgtaattttaagacttgataaagaaggaaatggatataaaatattgaacttcattggaggcgttgtactggtaaacctggcagggtctgaaaaacctgctggaagagacacagtaggttccatttggtctcttgctggagccatgctctatgctgtctatattgttatgattaagagaaaagtagatagagaagacaagttggatattccaatgttctttggttttgtaggtttgtttaatctgctgctcttatggccaggtttctttttacttcattatactggatttgaggacttcgagtttcccaataaagtagtattaatgtgcattatcattaatggccttattggaacagtactctcagagttcctgtggttgtggggctgctttcttacctcatcattgataggcacacttgcactaagccttacaatacctctgtccataatagctgacatgtgtatgcaaaaggtgcagttttcttggttattttttgcaggagctatccctgtatttttttcattttttattgtaactctcctatgccattataataattgggatcctgtgatggtgggaatcagaagaatatttgcttttatatgcagaaaacatcgaattcagagagttccagaagacagcgaacagtgtgagagtctcatttctatgcacagtgtttctcaggaggatggagctagttagctgtctgttgtctgtagcccagcttgataatggaactatacagcgaagagacaatctctggcaagtttttgtagaaaaaatgtttcagtgcctagtctgaaaaataacagtttgagttctttgaaactctaaaatatatttttctcatacctgttttcttcattttcataatgaagcactttgctatgtagctgtgtacatatcactacagttataggaagtttcagtctacagtccatccaaaggaccaacctgccttacacatctcaaggaattcagctgttgaaatcatttgaactaatcaaggaataaatcctaatgttctgggactttattttcacatgttaaatgctggaatatattatgaaaatgttttcaagaaatcacttaagtgttcatagaccagtatttctgacaggtaaaatgctaaaataagctacctgtaataagtgtggattatatttttgggttttgtagaatattgcaaattaaccacacaaaaaatgtttaatttatgcaacaagcatgtttgtgcaaatttcatgggactttaaaaagaataagtatttgagaaaatatctggttcacttacactacatttactgtattattcttttatagcattaggtgccttgtattttaaatctgtgacaaaccatggcaaatttttaaaggggaagtattattataaaatgaagaaatatgtatttctaaaggctatattgctgtaaacttaattgataaagctctgtttaatttagagttttgaagaaatagtctcccttcaattaagaaattttcataatggaatgatttaaattgaagtgacaaagagtattattaaaatacaatgtttatacgtctatttgtgtattgtagatgtatcaagtgatttctaatttttttcacatatgaatgtgccagattactctagaactagatgtctcttctttaaataattttagttttcctgaataaatttgtaatggttaaagtaccaagtaagtaaggcgagaagggattctgtttttaaaatcacatcagaacttttcctctactaagattataaattaaatgtaaaatactcctaattgcaattcttaaacttaggccttacatgtacttattatgcaactgctcctggactctattcaccatagatatcagtaaacgtatgtcccaggattcacaggcttttgattaatcaatattcttttcaagtttgctgtgaagagtttagttctcttcaaaatttcttaactaatctgatttttaagaattctctttgcagtgtttagcttcctattcacattcttaaaattgctttggtgttaccatgagtctaaaatgaagtttagccttccttttgtttcattctgagaacttctatattatattacctttaaaaattgtttatgatattaaatttaaaatacaaacagctctctttttttttttttttttttttaatcatccagcccaaagtggcaaaaacagctcttttctcatttggcaccaccaataacgcaagttaaaaataatgttgagtttattatacttttgacctgtttagctcaacagggtgaaggcatgtaaagaatgtggacttctgaggaattttcttttaaaaagaacataatgaagtaacattttaattactcaaggactacttttggttgaagtttataatctagatacctctactttttgtttttgctgttcgacagttcacaaagaccttcagcaatttacagggtaaaatcgttgaagtagtggaggtgaaactgaaatttaaaattattctgtaaatactatagggaaagaggctgagcttagaatcttttggttgttcatgtgttctgtgctcttatcatcacacaggtcatgtgttgttactcaggattctggaagtactaagccgtagttaacaggctggatagatcttcagccaatcttctttcattatactgctgcttttctgtttcttaaaaaacaaaaatcaatgaacaacttcttcagaaggaagcaccactgttcaattggttaactgaaagtatgaatcactgccgctttgcttgcccacctgtttgctttttctcacaggttttatttatctgaatgattgttgcatttgaatactgtagccatggtgagtgagcagttgaagacttcctttctgcaccttcatagttaagggttcatcttctcaagaaataaagttgtgctgggttgtttcaattctgtagatcacctagaaactaggtaacaaggcccttggatcacaatgagcacattgcaggtctttggaaatgctgggaaggggttacattcaagtaactgctgacgtccttcctctctgtcagacccatgttggcctgtaattatatttttctgaatctaaaaacaaatagaaatttctgatatcttttcagtctccttcttttctttccattcatcacttaaatctcattattgtataacgtttcaaattatgacctggattgaaggaagtctgttttgtcagggactttgttaggtgaacatcagaatctcaactacaacaaagctgaaaaatgaggcagccttaacagtaaatgcttttgggccgggcgtggtggctcacgcctgtagtcccagcactttgggaggccgaggcgggcggatcacgaggtcaggagatcgagaccatcctggttaacacagtgaaaccccgtctctactaaaaatacaaagaattagccgggcgtggtggcggcgcctgtagtcccagctgctcgggaggctgaggcagcagaatggcgtgaacccgggaggcggagcctgcagtgagccgagatcgtgcccctgcactccagcctgggcgacagcgagactccgtctcaaaaaaaaaaaaagtgaatacttttgaaatgaatgctttttgaagcttagaagaaccattaggtttatgtaatgcacccatacttattcctttaaataaattttaatttaaaaacattgagatattggcttctgtcaacctgatttaattaattctttacattaagctgattttccccctggcagctgacaaataagttcattgttcttgtagaagtgagctcacaaggttaaatgtgaatgttctcaaaggtacacagccttgtttcagaagaattttaatgcccgctgtaaaatcaatcatgcagagccaatttgaggtatgactccagggtatgcaaggtatgacttctctggaagccaagtcttttcacagggcactgtggtaatacccatagcactaatcctcagtgtgctggttgaagaaataaaatgtttttaaagaaggataaaggaggaattaattagaaaatttttttccacatattagcaaataaatgaaatgtcattttcatattaagtaagtatagttatgatcttcgtttctacctactctccttttgaaatattctttattactaaataatattttaggaggagttaacagaaataattacctgtaacatctgcagataaacttacatagctaacattgtgtgctgacttttttaaatggtgaagtggcattaatgagatgttcagtttacagaatttgaagtttgagttctattttaatagtctgccgtgtcccccaaatcccatttagataaattgaggttgatttttcacatagacttgcaatttttagacaccacattttttttatagtaacagcctcatttgcctgtacaataactaataatacagtatttcataggtacattgtatgtgcacaggaaatttttctttaaatcttaagagcctttaataaacgggatattttaatattttaatgttactacatttaaaaaatagtgttttcctacaaaattttctgtattcagtatacgttaactatgaaaatgtcaaacaatgaaatcattgaaatatatttaaggaaaaattaccaaccaaaagtaatgagtaccctctatgtgcatatttactggaatgttcatgtgaaatggtaacatttccaataacagcattttgaatctggggtgacacaaacatgatttttatttttgagctagggattttgatggagaagcacctagatgaagacaccatttcattcatgatattttaaaattagaaaagtaaagcttctaaattgaaactcttaacaggtcacttcatgaaatttttagttttaaatttaattttacatgagatgtctttctgaagagctacttttattaactttcacttagatcgttgtatgctaggcattcagtatttctctacttgattttcctatgcctagttgtgattacagcaagtatttaataataaagtcagtcatgtgagagtatccattaatttcagtgggtccttggaaggcaggcagaagatttctgtccaagagtcttatttttgacatgagatgaaattctttttttttttttgagatggggtctcactctgtcacccaggctggagtgcagtggcaggatcttggctcactgcaacctcccaagctcaagccatcctcccacctcagtctcctgagtagttgggactactggcatgtgcccccattcctgattagtttttttgtatttttggtagagatggggtcttgctatattgcctaatttttgtgtttttagtagagatggggtttcaccatgttggccaggctgctcttgaactcctgagctcaagtaatctgcccgccctggcctcccaaagtgctgggattacaggcatgagccaccatgcctggctaaaaccaattctttagattgtttttgccaccatttgcttacttggaatagctttcacatttatttttcttatgaagaaatccagtgtcagtcagaccatgtaacatcaaagcaaaatttcattgaagcctatccttgtcttaattattctaaaataaagtacaataaagtgaattattttgccctttgtagtagcatagtgttaagttatatatatattttaatatgcatactcctaagtaaagtttcagagaccacatgctggagagcagtggctttcagacagcatcagcatcacctgaaggccttgttgaatacacattattggaagagaggggagaacacaggctcatgcctgtaattccagtgctttgggagactgaggcaggaggatcacgtgagcccaggagttcaagatcaggctgggcaatacagcaagacccctgtctctacaaaaacaaaaacaaaaaacaaacaggcatggtagtgcatacctgtagtctgagctgcttgggagtctgaggcaggaggatcacttgaacccaggagttcgaggctgcagtgagttattattgggccactgcagtccagcctgggcagcaaagtgagaccctgtctgttaaaaaaacaaaaccaaaaacttgattgctgggggccaccctagagtttctgattcagtaggtctggcggtggggatggtgggcctggtaatttgcctttctaacaagcgtccaggtaatgccccagctgctggtcccaggaccacactttgcagattattactctgagaagagcactaactctgacgttggattccttctgttcctcattagtgaatttatttgggggagattattcaatctggtagatccgcatttacttagctgtgaagtggaggttaatgcaacctgcctgagactgtgagaatgagaaactctaattgaaataccaggcccagcgtgcctggatgcttgaaaaatgctgactcccatggtccgtccttccctcactcttctcagctataaagtgagaagcgaaattcagtatcttttaagattcctctcaggtgtaaaatgctgtgattctaaaagtttaattttgtagttccagagacaatgccaaacacctgtgtgtgcttagtgctttgtaaagagtggtaataacagtgacaccacataggccgtagttttgtagttccagagacaatgccaaacacctgtgtgtacttagtgctttgtaaagagtgaataacagtgacaccacataggccatagttttgtagttccagagacaatgccaaacacctatgtgtacttagtgctttgtaaagagtggtaataacagtgacaccacataggccgtaattttgtttttgcttttgttagggtgttcagcatcttgactccttaaataaggttttcagtcagatttataaagcagcattgaagaagttgtattatatttgagtacagttggaatccatggcagttttatggaggccaaatatatcagatgaataggctaatttccctgagttgctggccttattagtccctactctgttgccccctggttacctaatgcatgttcaaaaggtatagttttcatcacctgcttgatcttgattttcagacagcatcaaatcagttgcaaaacaaatccaagctaaaattttgagtgtatgattaatttactatagcatgtaattatgcagtattttattttttattttttattttttttgagacagagtctcactccattgcccaggctgaagtgcagtggcacgatctcggctcactctaacctctgcctcctgggttcaagtgattctcctgcctcagcctcccgaatagctgggattacagacatgcaccaccacgcccagctaattttttgtatttatagtagagaggaggttttaccatgttggccaggttggtcttgaactcttgacctcaagtgatctacacgcctcggcctcccaaagtgctgggattacgggtgtgagccactgcgcccagctatccagtattttatttaaaagttgtcactagggtgttcactattgtgaatttataatcttaaaagttggggatgctaaaagtaccagactaaaatactacgaggttttctcatcttttaattccattttgttagaaaaaaataatcacaaccggggttcttttacctttccccagccatctagactgctttactgcaatgttgggaagattgcatacaataaaaactgtagctagttgattgggatttgggaaaattgaatcaagcatttgcattcatccagaatggtcttaaactgctgactgtggggtgcccacaggatgagcactggtggcatgggtgggaggaatttccttggatactgcaattgcatttgaaagatctattttccaaaacctgagcagagagaggctaggaggaatgcagacaggacattgaaaatgcgaattccctttactagtagaacatgaaatatctgataatggtttaaaaaaaataagtgccaggatacattgtagtataaaggttcaactagtataatttaaaatgagtctttatattcaggccaggtgcggtggctcacacctgtaatcccagcactttgggagtccgaggcgggtggatcacctgagattaggagttcaaaaccagtgtgaccaacatggagaaaccccttctctactaaaaatacaaaaaattagccaggcatggtggtgcacgcctgtagtcccagctacttgtgaggctgaggtaggagaatcgcttgaacccaagaggcagaggttgcagtgagctgagatcacaccactgcactccagcctgggtgacagagcgagaccctgtttcaaaaaaataagaaataaaaagtgagtcttcatattcaaattagtatatgaggttaggcaacaattcttatatgggaccaggtatatttaatttgcctttctttgcagtcatcctagtaaatccttgtaaagggttattttatatacaattttgtagtatattctaaatcccctttggcaaataaagctgaagttatctagtgtcagcatactgtgatttgtatatttatataagacaagattgcatcattctgattaagttgcagcattttagttttatctgataggcctgtattgagtaatcagtagctatgtgcaaatattaagtcaacttaattaccagacccagaaggccagaggtaatcaaagagtactttcggaagatgaaatatttataatgagttatggaaacaatgttttagaaatgtttttcttggtgtaatttaatgcagatttttacctcaattttgttaaaaaacttgataatttgatccctccatctatttaatatttaatattttcagattctagagtatttaaaatttaaacacaattataaaattaattataattcctacttatgttagctatgatttagggccaaaactaccctggttttgtcttgcaacttgaaacattgtgtattttaaactatataatttgggaacattattttatagactgtggataaccaaatataagatttgtgatttttaatgcttcatttgtgtaaaatcatttgtatattctatttatagtatgcattttctagctcattaaaagtacagaaaaacctcaaa

SEQ ID NO: 133 - DNA, 10163 bp, Homo sapiens
atagctgactgtgccgtcccttcccctcacccgctccacgccctcctgggccgagtggagttgggtggtgtcgggagcctctccctgaggggcaccgcgtcttcaggagctgggcctccagtgcggcgcgatgtcaggcgcggtgacagctctgtgagtccgaggccgcggccgtggcgctgggcggctgcggggcctgaccggtccgctcatggtgccgccacgacgccatcgcggggcaggaaggccaggggtgctgagttcttcacctccttttagactgagatctgccaagttttccggcattgctcttgaggatctcagaagggctcttaagacaagactgcaaatggtgtgtgtatttgtcatgaaccgaatgaattcccagaacagtggtttcactcagcgcaggcgaatggctcttgggattgttattcttctgcttgttgatgtgatatgggttgcttcctctgaacttacttcgtatgtttttacccagtacaacaaaccattcttcagcacctttgcaaaaacatctatgtttgttttgtaccttttgggctttattatttggaagccatggagacaacagtgtacaagaggacttcgcggaaagcatgctgctttttttgcagatgctgaaggttactttgctgcttgcacaacagatacaactatgaatagttctttgagtgaacctctgtatgtgcctgtgaaattccatgatcttccaagtgaaaaacctgagagcacaaacattgatactgaaaaaacccccaaaaagtctcgtgtgaggttcagtaatatcatggagattcgacagcttccgtcaagtcatgcattggaagcaaagttgtctcgcatgtcatatcctgtgaaagaacaagaatccatactgaaaactgtggggaaacttactgcaactcaagtagcgaaaattagcttttttttttgctttgtgtggtttttggcaaatttgtcatatcaagaagcactttcagacacacaagttgctatagttaatattttatcttcaacttccggactttttaccttaatccttgctgcagtatttccaagtaacagtggagatagatttaccctttctaaactattagctgtaattttaagacttgataaagaaggaaatggatataaaatattgaacttcattggaggcgttgtactggtaaacctggcagggtctgaaaaacctgctggaagagacacagtaggttccatttggtctcttgctggagccatgctctatgctgtctatattgttatgattaagagaaaagtagatagagaagacaagttggatattccaatgttctttggttttgtaggtttgtttaatctgctgctcttatggccaggtttctttttacttcattatactggatttgaggacttcgagtttcccaataaagtagtattaatgtgcattatcattaatggccttattggaacagtactctcagagttcctgtggttgtggggctgctttcttacctcatcattgataggcacacttgcactaagccttacaatacctctgtccataatagctgacatgtgtatgcaaaaggtgcagttttcttggttattttttgcaggagctatccctgtatttttttcattttttattgtaactctcctatgccattataataattgggatcctgtgatggtgggaatcagaagaatatttgcttttatatgcagaaaacatcgaattcagagcttgataatggaactatacagcgaagagacaatctctggcaagtttttgtagaaaaaatgtttcagtgcctagtctgaaaaataacagtttgagttctttgaaactctaaaatatatttttctcatacctgttttcttcattttcataatgaagcactttgctatgtagctgtgtacatatcactacagttataggaagtttcagtctacagtccatccaaaggaccaacctgccttacacatctcaaggaattcagctgttgaaatcatttgaactaatcaaggaataaatcctaatgttctgggactttattttcacatgttaaatgctggaatatattatgaaaatgttttcaagaaatcacttaagtgttcatagaccagtatttctgacaggtaaaatgctaaaataagctacctgtaataagtgtggattatatttttgggttttgtagaatattgcaaattaaccacacaaaaaatgtttaatttatgcaacaagcatgtttgtgcaaatttcatgggactttaaaaagaataagtatttgagaaaatatctggttcacttacactacatttactgtattattcttttatagcattaggtgccttgtattttaaatctgtgacaaaccatggcaaatttttaaaggggaagtattattataaaatgaagaaatatgtatttctaaaggctatattgctgtaaacttaattgataaagctctgtttaatttagagttttgaagaaatagtctcccttcaattaagaaattttcataatggaatgatttaaattgaagtgacaaagagtattattaaaatacaatgtttatacgtctatttgtgtattgtagatgtatcaagtgatttctaatttttttcacatatgaatgtgccagattactctagaactagatgtctcttctttaaataattttagttttcctgaataaatttgtaatggttaaagtaccaagtaagtaaggcgagaagggattctgtttttaaaatcacatcagaacttttcctctactaagattataaattaaatgtaaaatactcctaattgcaattcttaaacttaggccttacatgtacttattatgcaactgctcctggactctattcaccatagatatcagtaaacgtatgtcccaggattcacaggcttttgattaatcaatattcttttcaagtttgctgtgaagagtttagttctcttcaaaatttcttaactaatctgatttttaagaattctctttgcagtgtttagcttcctattcacattcttaaaattgctttggtgttaccatgagtctaaaatgaagtttagccttccttttgtttcattctgagaacttctatattatattacctttaaaaattgtttatgatattaaatttaaaatacaaacagctctctttttttttttttttttttttaatcatccagcccaaagtggcaaaaacagctcttttctcatttggcaccaccaataacgcaagttaaaaataatgttgagtttattatacttttgacctgtttagctcaacagggtgaaggcatgtaaagaatgtggacttctgaggaattttcttttaaaaagaacataatgaagtaacattttaattactcaaggactacttttggttgaagtttataatctagatacctctactttttgtttttgctgttcgacagttcacaaagaccttcagcaatttacagggtaaaatcgttgaagtagtggaggtgaaactgaaatttaaaattattctgtaaatactatagggaaagaggctgagcttagaatcttttggttgttcatgtgttctgtgctcttatcatcacacaggtcatgtgttgttactcaggattctggaagtactaagccgtagttaacaggctggatagatcttcagccaatcttctttcattatactgctgcttttctgtttcttaaaaaacaaaaatcaatgaacaacttcttcagaaggaagcaccactgttcaattggttaactgaaagtatgaatcactgccgctttgcttgcccacctgtttgctttttctcacaggttttatttatctgaatgattgttgcatttgaatactgtagccatggtgagtgagcagttgaagacttcctttctgcaccttcatagttaagggttcatcttctcaagaaataaagttgtgctgggttgtttcaattctgtagatcacctagaaactaggtaacaaggcccttggatcacaatgagcacattgcaggtctttggaaatgctgggaaggggttacattcaagtaactgctgacgtccttcctctctgtcagacccatgttggcctgtaattatatttttctgaatctaaaaacaaatagaaatttctgatatcttttcagtctccttcttttctttccattcatcacttaaatctcattattgtataacgtttcaaattatgacctggattgaaggaagtctgttttgtcagggactttgttaggtgaacatcagaatctcaactacaacaaagctgaaaaatgaggcagccttaacagtaaatgcttttgggccgggcgtggtggctcacgcctgtagtcccagcactttgggaggccgaggcgggcggatcacgaggtcaggagatcgagaccatcctggttaacacagtgaaaccccgtctctactaaaaatacaaagaattagccgggcgtggtggcggcgcctgtagtcccagctgctcgggaggctgaggcagcagaatggcgtgaacccgggaggcggagcctgcagtgagccgagatcgtgcccctgcactccagcctgggcgacagcgagactccgtctcaaaaaaaaaaaaagtgaatacttttgaaatgaatgctttttgaagcttagaagaaccattaggtttatgtaatgcacccatacttattcctttaaataaattttaatttaaaaacattgagatattggcttctgtcaacctgatttaattaattctttacattaagctgattttccccctggcagctgacaaataagttcattgttcttgtagaagtgagctcacaaggttaaatgtgaatgttctcaaaggtacacagccttgtttcagaagaattttaatgcccgctgtaaaatcaatcatgcagagccaatttgaggtatgactccagggtatgcaaggtatgacttctctggaagccaagtcttttcacagggcactgtggtaatacccatagcactaatcctcagtgtgctggttgaagaaataaaatgtttttaaagaaggataaaggaggaattaattagaaaatttttttccacatattagcaaataaatgaaatgtcattttcatattaagtaagtatagttatgatcttcgtttctacctactctccttttgaaatattctttattactaaataatattttaggaggagttaacagaaataattacctgtaacatctgcagataaacttacatagctaacattgtgtgctgacttttttaaatggtgaagtggcattaatgagatgttcagtttacagaatttgaagtttgagttctattttaatagtctgccgtgtcccccaaatcccatttagataaattgaggttgatttttcacatagacttgcaatttttagacaccacattttttttatagtaacagcctcatttgcctgtacaataactaataatacagtatttcataggtacattgtatgtgcacaggaaatttttctttaaatcttaagagcctttaataaacgggatattttaatattttaatgttactacatttaaaaaatagtgttttcctacaaaattttctgtattcagtatacgttaactatgaaaatgtcaaacaatgaaatcattgaaatatatttaaggaaaaattaccaaccaaaagtaatgagtaccctctatgtgcatatttactggaatgttcatgtgaaatggtaacatttccaataacagcattttgaatctggggtgacacaaacatgatttttatttttgagctagggattttgatggagaagcacctagatgaagacaccatttcattcatgatattttaaaattagaaaagtaaagcttctaaattgaaactcttaacaggtcacttcatgaaatttttagttttaaatttaattttacatgagatgtctttctgaagagctacttttattaactttcacttagatcgttgtatgctaggcattcagtatttctctacttgattttcctatgcctagttgtgattacagcaagtatttaataataaagtcagtcatgtgagagtatccattaatttcagtgggtccttggaaggcaggcagaagatttctgtccaagagtcttatttttgacatgagatgaaattctttttttttttttgagatggggtctcactctgtcacccaggctggagtgcagtggcaggatcttggctcactgcaacctcccaagctcaagccatcctcccacctcagtctcctgagtagttgggactactggcatgtgcccccattcctgattagtttttttgtatttttggtagagatggggtcttgctatattgcctaatttttgtgtttttagtagagatggggtttcaccatgttggccaggctgctcttgaactcctgagctcaagtaatctgcccgccctggcctcccaaagtgctgggattacaggcatgagccaccatgcctggctaaaaccaattctttagattgtttttgccaccatttgcttacttggaatagctttcacatttatttttcttatgaagaaatccagtgtcagtcagaccatgtaacatcaaagcaaaatttcattgaagcctatccttgtcttaattattctaaaataaagtacaataaagtgaattattttgccctttgtagtagcatagtgttaagttatatatatattttaatatgcatactcctaagtaaagtttcagagaccacatgctggagagcagtggctttcagacagcatcagcatcacctgaaggccttgttgaatacacattattggaagagaggggagaacacaggctcatgcctgtaattccagtgctttgggagactgaggcaggaggatcacgtgagcccaggagttcaagatcaggctgggcaatacagcaagacccctgtctctacaaaaacaaaaacaaaaaacaaacaggcatggtagtgcatacctgtagtctgagctgcttgggagtctgaggcaggaggatcacttgaacccaggagttcgaggctgcagtgagttattattgggccactgcagtccagcctgggcagcaaagtgagaccctgtctgttaaaaaaacaaaaccaaaaacttgattgctgggggccaccctagagtttctgattcagtaggtctggcggtggggatggtgggcctggtaatttgcctttctaacaagcgtccaggtaatgccccagctgctggtcccaggaccacactttgcagattattactctgagaagagcactaactctgacgttggattccttctgttcctcattagtgaatttatttgggggagattattcaatctggtagatccgcatttacttagctgtgaagtggaggttaatgcaacctgcctgagactgtgagaatgagaaactctaattgaaataccaggcccagcgtgcctggatgcttgaaaaatgctgactcccatggtccgtccttccctcactcttctcagctataaagtgagaagcgaaattcagtatcttttaagattcctctcaggtgtaaaatgctgtgattctaaaagtttaattttgtagttccagagacaatgccaaacacctgtgtgtgcttagtgctttgtaaagagtggtaataacagtgacaccacataggccgtagttttgtagttccagagacaatgccaaacacctgtgtgtacttagtgctttgtaaagagtgaataacagtgacaccacataggccatagttttgtagttccagagacaatgccaaacacctatgtgtacttagtgctttgtaaagagtggtaataacagtgacaccacataggccgtaattttgtttttgcttttgttagggtgttcagcatcttgactccttaaataaggttttcagtcagatttataaagcagcattgaagaagttgtattatatttgagtacagttggaatccatggcagttttatggaggccaaatatatcagatgaataggctaatttccctgagttgctggccttattagtccctactctgttgccccctggttacctaatgcatgttcaaaaggtatagttttcatcacctgcttgatcttgattttcagacagcatcaaatcagttgcaaaacaaatccaagctaaaattttgagtgtatgattaatttactatagcatgtaattatgcagtattttattttttattttttattttttttgagacagagtctcactccattgcccaggctgaagtgcagtggcacgatctcggctcactctaacctctgcctcctgggttcaagtgattctcctgcctcagcctcccgaatagctgggattacagacatgcaccaccacgcccagctaattttttgtatttatagtagagaggaggttttaccatgttggccaggttggtcttgaactcttgacctcaagtgatctacacgcctcggcctcccaaagtgctgggattacgggtgtgagccactgcgcccagctatccagtattttatttaaaagttgtcactagggtgttcactattgtgaatttataatcttaaaagttggggatgctaaaagtaccagactaaaatactacgaggttttctcatcttttaattccattttgttagaaaaaaataatcacaaccggggttcttttacctttccccagccatctagactgctttactgcaatgttgggaagattgcatacaataaaaactgtagctagttgattgggatttgggaaaattgaatcaagcatttgcattcatccagaatggtcttaaactgctgactgtggggtgcccacaggatgagcactggtggcatgggtgggaggaatttccttggatactgcaattgcatttgaaagatctattttccaaaacctgagcagagagaggctaggaggaatgcagacaggacattgaaaatgcgaattccctttactagtagaacatgaaatatctgataatggtttaaaaaaaataagtgccaggatacattgtagtataaaggttcaactagtataatttaaaatgagtctttatattcaggccaggtgcggtggctcacacctgtaatcccagcactttgggagtccgaggcgggtggatcacctgagattaggagttcaaaaccagtgtgaccaacatggagaaaccccttctctactaaaaatacaaaaaattagccaggcatggtggtgcacgcctgtagtcccagctacttgtgaggctgaggtaggagaatcgcttgaacccaagaggcagaggttgcagtgagctgagatcacaccactgcactccagcctgggtgacagagcgagaccctgtttcaaaaaaataagaaataaaaagtgagtcttcatattcaaattagtatatgaggttaggcaacaattcttatatgggaccaggtatatttaatttgcctttctttgcagtcatcctagtaaatccttgtaaagggttattttatatacaattttgtagtatattctaaatcccctttggcaaataaagctgaagttatctagtgtcagcatactgtgatttgtatatttatataagacaagattgcatcattctgattaagttgcagcattttagttttatctgataggcctgtattgagtaatcagtagctatgtgcaaatattaagtcaacttaattaccagacccagaaggccagaggtaatcaaagagtactttcggaagatgaaatatttataatgagttatggaaacaatgttttagaaatgtttttcttggtgtaatttaatgcagatttttacctcaattttgttaaaaaacttgataatttgatccctccatctatttaatatttaatattttcagattctagagtatttaaaatttaaacacaattataaaattaattataattcctacttatgttagctatgatttagggccaaaactaccctggttttgtcttgcaacttgaaacattgtgtattttaaactatataatttgggaacattattttatagactgtggataaccaaatataagatttgtgatttttaatgcttcatttgtgtaaaatcatttgtatattctatttatagtatgcattttctagctcattaaaagtacagaaaaacctcaaa

SEQ ID NO: 134 - DNA, 10868 bp, Homo sapiens
gggggcggggccgcgcggagggcaagccgggggcggggccggggccagagcagatctccgggcctccgcggccatagctgactgtgccgtcccttcccctcacccgctccacgccctcctgggccgagtggagttgggtggtgtcgggagcctctccctgaggggcaccgcgtcttcaggagctgggcctccagtgcggcgcgatgtcaggcgcggtgacagctctgtgagtccgaggccgcggccgtggcgctgggcggctgcggggcctgaccggtccgctcatggtgccgccacgacgccatcgcggggcaggaaggccaggtaggcaggcagggaagggccccgacatcaccggagcccaaaccgggacggagtgcccaccagcagcaccacctcctgccctcggtggcagcaggagcgccttgaccgaaaccgtgaaggtctctaggggcggagggagcgggagctgacaggggcgccggagccctgcgcccaccgctggcaattgaggaagccgtgcgtgcgccctcgcctcggctccccggggaggcgtcgctgccttaactgtcttccccgctccaaaacagaaggatgatttcttttcccagctgtttcttttaaaatgactggatgttttgatagaggtgggtggaggagcatggagaatccttttcttttaccacttgaagagattggaaaggtgccttcaagacccacagcaaatcacttactctccgataaccaaattccactccagcagatcagggacagaaaagacacttttagaaacagtgtctagacgctgtccccagggatggattcctctggatggagaggggtgctgagttcttcacctccttttagactgagatctgccaagttttccggcattgctcttgaggatctcagaagggctcttaagacaagactgcaaatggtgtgtgtatttgtcatgaaccgaatgaattcccagaacagtggtttcactcagcgcaggcgaatggctcttgggattgttattcttctgcttgttgatgtgatatgggttgcttcctctgaacttacttcgtatgtttttacccagtacaacaaaccattcttcagcacctttgcaaaaacatctatgtttgttttgtaccttttgggctttattatttggaagccatggagacaacagtgtacaagaggacttcgcggaaagcatgctgctttttttgcagatgctgaaggttactttgctgcttgcacaacagatacaactatgaatagttctttgagtgaacctctgtatgtgcctgtgaaattccatgatcttccaagtgaaaaacctgagagcacaaacattgatactgaaaaaacccccaaaaagtctcgtgtgaggttcagtaatatcatggagattcgacagcttccgtcaagtcatgcattggaagcaaagttgtctcgcatgtcatatcctgtgaaagaacaagaatccatactgaaaactgtggggaaacttactgcaactcaagtagcgaaaattagcttttttttttgctttgtgtggtttttggcaaatttgtcatatcaagaagcactttcagacacacaagttgctatagttaatattttatcttcaacttccggactttttaccttaatccttgctgcagtatttccaagtaacagtggagatagatttaccctttctaaactattagctgtaattttaagcattggaggcgttgtactggtaaacctggcagggtctgaaaaacctgctggaagagacacagtaggttccatttggtctcttgctggagccatgctctatgctgtctatattgttatgattaagagaaaagtagatagagaagacaagttggatattccaatgttctttggttttgtaggtttgtttaatctgctgctcttatggccaggtttctttttacttcattatactggatttgaggacttcgagtttcccaataaagtagtattaatgtgcattatcattaatggccttattggaacagtactctcagagttcctgtggttgtggggctgctttcttacctcatcattgataggcacacttgcactaagccttacaatacctctgtccataatagctgacatgtgtatgcaaaaggtgcagttttcttggttattttttgcaggagctatccctgtatttttttcattttttattgtaactctcctatgccattataataattgggatcctgtgatggtgggaatcagaagaatatttgcttttatatgcagaaaacatcgaattcagagagttccagaagacagcgaacagtgtgagagtctcatttctatgcacagtgtttctcaggaggatggagctagttagctgtctgttgtctgtagcccagcttgataatggaactatacagcgaagagacaatctctggcaagtttttgtagaaaaaatgtttcagtgcctagtctgaaaaataacagtttgagttctttgaaactctaaaatatatttttctcatacctgttttcttcattttcataatgaagcactttgctatgtagctgtgtacatatcactacagttataggaagtttcagtctacagtccatccaaaggaccaacctgccttacacatctcaaggaattcagctgttgaaatcatttgaactaatcaaggaataaatcctaatgttctgggactttattttcacatgttaaatgctggaatatattatgaaaatgttttcaagaaatcacttaagtgttcatagaccagtatttctgacaggtaaaatgctaaaataagctacctgtaataagtgtggattatatttttgggttttgtagaatattgcaaattaaccacacaaaaaatgtttaatttatgcaacaagcatgtttgtgcaaatttcatgggactttaaaaagaataagtatttgagaaaatatctggttcacttacactacatttactgtattattcttttatagcattaggtgccttgtattttaaatctgtgacaaaccatggcaaatttttaaaggggaagtattattataaaatgaagaaatatgtatttctaaaggctatattgctgtaaacttaattgataaagctctgtttaatttagagttttgaagaaatagtctcccttcaattaagaaattttcataatggaatgatttaaattgaagtgacaaagagtattattaaaatacaatgtttatacgtctatttgtgtattgtagatgtatcaagtgatttctaatttttttcacatatgaatgtgccagattactctagaactagatgtctcttctttaaataattttagttttcctgaataaatttgtaatggttaaagtaccaagtaagtaaggcgagaagggattctgtttttaaaatcacatcagaacttttcctctactaagattataaattaaatgtaaaatactcctaattgcaattcttaaacttaggccttacatgtacttattatgcaactgctcctggactctattcaccatagatatcagtaaacgtatgtcccaggattcacaggcttttgattaatcaatattcttttcaagtttgctgtgaagagtttagttctcttcaaaatttcttaactaatctgatttttaagaattctctttgcagtgtttagcttcctattcacattcttaaaattgctttggtgttaccatgagtctaaaatgaagtttagccttccttttgtttcattctgagaacttctatattatattacctttaaaaattgtttatgatattaaatttaaaatacaaacagctctctttttttttttttttttttttaatcatccagcccaaagtggcaaaaacagctcttttctcatttggcaccaccaataacgcaagttaaaaataatgttgagtttattatacttttgacctgtttagctcaacagggtgaaggcatgtaaagaatgtggacttctgaggaattttcttttaaaaagaacataatgaagtaacattttaattactcaaggactacttttggttgaagtttataatctagatacctctactttttgtttttgctgttcgacagttcacaaagaccttcagcaatttacagggtaaaatcgttgaagtagtggaggtgaaactgaaatttaaaattattctgtaaatactatagggaaagaggctgagcttagaatcttttggttgttcatgtgttctgtgctcttatcatcacacaggtcatgtgttgttactcaggattctggaagtactaagccgtagttaacaggctggatagatcttcagccaatcttctttcattatactgctgcttttctgtttcttaaaaaacaaaaatcaatgaacaacttcttcagaaggaagcaccactgttcaattggttaactgaaagtatgaatcactgccgctttgcttgcccacctgtttgctttttctcacaggttttatttatctgaatgattgttgcatttgaatactgtagccatggtgagtgagcagttgaagacttcctttctgcaccttcatagttaagggttcatcttctcaagaaataaagttgtgctgggttgtttcaattctgtagatcacctagaaactaggtaacaaggcccttggatcacaatgagcacattgcaggtctttggaaatgctgggaaggggttacattcaagtaactgctgacgtccttcctctctgtcagacccatgttggcctgtaattatatttttctgaatctaaaaacaaatagaaatttctgatatcttttcagtctccttcttttctttccattcatcacttaaatctcattattgtataacgtttcaaattatgacctggattgaaggaagtctgttttgtcagggactttgttaggtgaacatcagaatctcaactacaacaaagctgaaaaatgaggcagccttaacagtaaatgcttttgggccgggcgtggtggctcacgcctgtagtcccagcactttgggaggccgaggcgggcggatcacgaggtcaggagatcgagaccatcctggttaacacagtgaaaccccgtctctactaaaaatacaaagaattagccgggcgtggtggcggcgcctgtagtcccagctgctcgggaggctgaggcagcagaatggcgtgaacccgggaggcggagcctgcagtgagccgagatcgtgcccctgcactccagcctgggcgacagcgagactccgtctcaaaaaaaaaaaaagtgaatacttttgaaatgaatgctttttgaagcttagaagaaccattaggtttatgtaatgcacccatacttattcctttaaataaattttaatttaaaaacattgagatattggcttctgtcaacctgatttaattaattctttacattaagctgattttccccctggcagctgacaaataagttcattgttcttgtagaagtgagctcacaaggttaaatgtgaatgttctcaaaggtacacagccttgtttcagaagaattttaatgcccgctgtaaaatcaatcatgcagagccaatttgaggtatgactccagggtatgcaaggtatgacttctctggaagccaagtcttttcacagggcactgtggtaatacccatagcactaatcctcagtgtgctggttgaagaaataaaatgtttttaaagaaggataaaggaggaattaattagaaaatttttttccacatattagcaaataaatgaaatgtcattttcatattaagtaagtatagttatgatcttcgtttctacctactctccttttgaaatattctttattactaaataatattttaggaggagttaacagaaataattacctgtaacatctgcagataaacttacatagctaacattgtgtgctgacttttttaaatggtgaagtggcattaatgagatgttcagtttacagaatttgaagtttgagttctattttaatagtctgccgtgtcccccaaatcccatttagataaattgaggttgatttttcacatagacttgcaatttttagacaccacattttttttatagtaacagcctcatttgcctgtacaataactaataatacagtatttcataggtacattgtatgtgcacaggaaatttttctttaaatcttaagagcctttaataaacgggatattttaatattttaatgttactacatttaaaaaatagtgttttcctacaaaattttctgtattcagtatacgttaactatgaaaatgtcaaacaatgaaatcattgaaatatatttaaggaaaaattaccaaccaaaagtaatgagtaccctctatgtgcatatttactggaatgttcatgtgaaatggtaacatttccaataacagcattttgaatctggggtgacacaaacatgatttttatttttgagctagggattttgatggagaagcacctagatgaagacaccatttcattcatgatattttaaaattagaaaagtaaagcttctaaattgaaactcttaacaggtcacttcatgaaatttttagttttaaatttaattttacatgagatgtctttctgaagagctacttttattaactttcacttagatcgttgtatgctaggcattcagtatttctctacttgattttcctatgcctagttgtgattacagcaagtatttaataataaagtcagtcatgtgagagtatccattaatttcagtgggtccttggaaggcaggcagaagatttctgtccaagagtcttatttttgacatgagatgaaattctttttttttttttgagatggggtctcactctgtcacccaggctggagtgcagtggcaggatcttggctcactgcaacctcccaagctcaagccatcctcccacctcagtctcctgagtagttgggactactggcatgtgcccccattcctgattagtttttttgtatttttggtagagatggggtcttgctatattgcctaatttttgtgtttttagtagagatggggtttcaccatgttggccaggctgctcttgaactcctgagctcaagtaatctgcccgccctggcctcccaaagtgctgggattacaggcatgagccaccatgcctggctaaaaccaattctttagattgtttttgccaccatttgcttacttggaatagctttcacatttatttttcttatgaagaaatccagtgtcagtcagaccatgtaacatcaaagcaaaatttcattgaagcctatccttgtcttaattattctaaaataaagtacaataaagtgaattattttgccctttgtagtagcatagtgttaagttatatatatattttaatatgcatactcctaagtaaagtttcagagaccacatgctggagagcagtggctttcagacagcatcagcatcacctgaaggccttgttgaatacacattattggaagagaggggagaacacaggctcatgcctgtaattccagtgctttgggagactgaggcaggaggatcacgtgagcccaggagttcaagatcaggctgggcaatacagcaagacccctgtctctacaaaaacaaaaacaaaaaacaaacaggcatggtagtgcatacctgtagtctgagctgcttgggagtctgaggcaggaggatcacttgaacccaggagttcgaggctgcagtgagttattattgggccactgcagtccagcctgggcagcaaagtgagaccctgtctgttaaaaaaacaaaaccaaaaacttgattgctgggggccaccctagagtttctgattcagtaggtctggcggtggggatggtgggcctggtaatttgcctttctaacaagcgtccaggtaatgccccagctgctggtcccaggaccacactttgcagattattactctgagaagagcactaactctgacgttggattccttctgttcctcattagtgaatttatttgggggagattattcaatctggtagatccgcatttacttagctgtgaagtggaggttaatgcaacctgcctgagactgtgagaatgagaaactctaattgaaataccaggcccagcgtgcctggatgcttgaaaaatgctgactcccatggtccgtccttccctcactcttctcagctataaagtgagaagcgaaattcagtatcttttaagattcctctcaggtgtaaaatgctgtgattctaaaagtttaattttgtagttccagagacaatgccaaacacctgtgtgtgcttagtgctttgtaaagagtggtaataacagtgacaccacataggccgtagttttgtagttccagagacaatgccaaacacctgtgtgtacttagtgctttgtaaagagtgaataacagtgacaccacataggccatagttttgtagttccagagacaatgccaaacacctatgtgtacttagtgctttgtaaagagtggtaataacagtgacaccacataggccgtaattttgtttttgcttttgttagggtgttcagcatcttgactccttaaataaggttttcagtcagatttataaagcagcattgaagaagttgtattatatttgagtacagttggaatccatggcagttttatggaggccaaatatatcagatgaataggctaatttccctgagttgctggccttattagtccctactctgttgccccctggttacctaatgcatgttcaaaaggtatagttttcatcacctgcttgatcttgattttcagacagcatcaaatcagttgcaaaacaaatccaagctaaaattttgagtgtatgattaatttactatagcatgtaattatgcagtattttattttttattttttattttttttgagacagagtctcactccattgcccaggctgaagtgcagtggcacgatctcggctcactctaacctctgcctcctgggttcaagtgattctcctgcctcagcctcccgaatagctgggattacagacatgcaccaccacgcccagctaattttttgtatttatagtagagaggaggttttaccatgttggccaggttggtcttgaactcttgacctcaagtgatctacacgcctcggcctcccaaagtgctgggattacgggtgtgagccactgcgcccagctatccagtattttatttaaaagttgtcactagggtgttcactattgtgaatttataatcttaaaagttggggatgctaaaagtaccagactaaaatactacgaggttttctcatcttttaattccattttgttagaaaaaaataatcacaaccggggttcttttacctttccccagccatctagactgctttactgcaatgttgggaagattgcatacaataaaaactgtagctagttgattgggatttgggaaaattgaatcaagcatttgcattcatccagaatggtcttaaactgctgactgtggggtgcccacaggatgagcactggtggcatgggtgggaggaatttccttggatactgcaattgcatttgaaagatctattttccaaaacctgagcagagagaggctaggaggaatgcagacaggacattgaaaatgcgaattccctttactagtagaacatgaaatatctgataatggtttaaaaaaaataagtgccaggatacattgtagtataaaggttcaactagtataatttaaaatgagtctttatattcaggccaggtgcggtggctcacacctgtaatcccagcactttgggagtccgaggcgggtggatcacctgagattaggagttcaaaaccagtgtgaccaacatggagaaaccccttctctactaaaaatacaaaaaattagccaggcatggtggtgcacgcctgtagtcccagctacttgtgaggctgaggtaggagaatcgcttgaacccaagaggcagaggttgcagtgagctgagatcacaccactgcactccagcctgggtgacagagcgagaccctgtttcaaaaaaataagaaataaaaagtgagtcttcatattcaaattagtatatgaggttaggcaacaattcttatatgggaccaggtatatttaatttgcctttctttgcagtcatcctagtaaatccttgtaaagggttattttatatacaattttgtagtatattctaaatcccctttggcaaataaagctgaagttatctagtgtcagcatactgtgatttgtatatttatataagacaagattgcatcattctgattaagttgcagcattttagttttatctgataggcctgtattgagtaatcagtagctatgtgcaaatattaagtcaacttaattaccagacccagaaggccagaggtaatcaaagagtactttcggaagatgaaatatttataatgagttatggaaacaatgttttagaaatgtttttcttggtgtaatttaatgcagatttttacctcaattttgttaaaaaacttgataatttgatccctccatctatttaatatttaatattttcagattctagagtatttaaaatttaaacacaattataaaattaattataattcctacttatgttagctatgatttagggccaaaactaccctggttttgtcttgcaacttgaaacattgtgtattttaaactatataatttgggaacattattttatagactgtggataaccaaatataagatttgtgatttttaatgcttcatttgtgtaaaatcatttgtatattctatttatagtatgcattttctagctcattaaaagtacagaaaaacctcaaatctgtccttatacaaatatttgatttctagtttccttttattaaaacattttcactca

SEQ ID NO: 135 - DNA, 10483 bp, Homo sapiens
cgctcggcgaccagagcctcgcattacttcccctagctccgccaagcctcgctgcatacgcgaccgcgcgcagtccgccgtcgcgcccctatgacgtcacccgcgcgccaccgcttccgggctggggactgggggcggggccgcgcggagggcaagccgggggcggggccggggccagagcagatctccgggcctccgcggccatagctgactgtgccgtcccttcccctcacccgctccacgccctcctgggccgagtggagttgggtggtgtcgggagcctctccctgaggggcaccgcgtcttcaggagctgggcctccagtgcggcgcgatgtcaggcgcggtgacagctctgtgagtccgaggccgcggccgtggcgctgggcggctgcggggcctgaccggtccgctcatggtgccgccacgacgccatcgcggggcaggaaggccaggggtgctgagttcttcacctccttttagactgagatctgccaagttttccggcattgctcttgaggatctcagaagggctcttaagacaagactgcaaatggtgtgtgtatttgtcatgaaccgaatgaattcccagaacagtggtttcactcagcgcaggcgaatggctcttgggattgttattcttctgcttgttgatgtgatatgggttgcttcctctgaacttacttcgtatgtttttacccagtacaacaaaccattcttcagcacctttgcaaaaacatctatgtttgttttgtaccttttgggctttattatttggaagccatggagacaacagtgtacaagaggacttcgcggaaagcatgctgctttttttgcagatgctgaaggttactttgctgcttgcacaacagatacaactatgaatagttctttgagtgaacctctgtatgtgcctgtgaaattccatgatcttccaagtgaaaaacctgagagcacaaacattgatactgaaaaaacccccaaaaagtctcgtgtgaggttcagtaatatcatggagattcgacagcttccgtcaagtcatgcattggaagcaaagttgtctcgcatgtcatatcctgtgaaagaacaagaatccatactgaaaactgtggggaaacttactgcaactcaagtagcgaaaattagcttttttttttgctttgtgtggtttttggcaaatttgtcatatcaagaagcactttcagacacacaagttgctatagttaatattttatcttcaacttccggactttttaccttaatccttgctgcagtatttccaagtaacagtggagatagatttaccctttctaaactattagctgtaattttaagcattggaggcgttgtactggtaaacctggcagggtctgaaaaacctgctggaagagacacagtaggttccatttggtctcttgctggagccatgctctatgctgtctatattgttatgattaagagaaaagtagatagagaagacaagttggatattccaatgttctttggttttgtaggtttgtttaatctgctgctcttatggccaggtttctttttacttcattatactggatttgaggacttcgagtttcccaataaagtagtattaatgtgcattatcattaatggccttattggaacagtactctcagagttcctgtggttgtggggctgctttcttacctcatcattgataggcacacttgcactaagccttacaatacctctgtccataatagctgacatgtgtatgcaaaaggtgcagttttcttggttattttttgcaggagctatccctgtatttttttcattttttattgtaactctcctatgccattataataattgggatcctgtgatggtgggaatcagaagaatatttgcttttatatgcagaaaacatcgaattcagagagttccagaagacagcgaacagtgtgagagtctcatttctatgcacagtgtttctcaggaggatggagctagttagctgtctgttgtctgtagcccagcttgataatggaactatacagcgaagagacaatctctggcaagtttttgtagaaaaaatgtttcagtgcctagtctgaaaaataacagtttgagttctttgaaactctaaaatatatttttctcatacctgttttcttcattttcataatgaagcactttgctatgtagctgtgtacatatcactacagttataggaagtttcagtctacagtccatccaaaggaccaacctgccttacacatctcaaggaattcagctgttgaaatcatttgaactaatcaaggaataaatcctaatgttctgggactttattttcacatgttaaatgctggaatatattatgaaaatgttttcaagaaatcacttaagtgttcatagaccagtatttctgacaggtaaaatgctaaaataagctacctgtaataagtgtggattatatttttgggttttgtagaatattgcaaattaaccacacaaaaaatgtttaatttatgcaacaagcatgtttgtgcaaatttcatgggactttaaaaagaataagtatttgagaaaatatctggttcacttacactacatttactgtattattcttttatagcattaggtgccttgtattttaaatctgtgacaaaccatggcaaatttttaaaggggaagtattattataaaatgaagaaatatgtatttctaaaggctatattgctgtaaacttaattgataaagctctgtttaatttagagttttgaagaaatagtctcccttcaattaagaaattttcataatggaatgatttaaattgaagtgacaaagagtattattaaaatacaatgtttatacgtctatttgtgtattgtagatgtatcaagtgatttctaatttttttcacatatgaatgtgccagattactctagaactagatgtctcttctttaaataattttagttttcctgaataaatttgtaatggttaaagtaccaagtaagtaaggcgagaagggattctgtttttaaaatcacatcagaacttttcctctactaagattataaattaaatgtaaaatactcctaattgcaattcttaaacttaggccttacatgtacttattatgcaactgctcctggactctattcaccatagatatcagtaaacgtatgtcccaggattcacaggcttttgattaatcaatattcttttcaagtttgctgtgaagagtttagttctcttcaaaatttcttaactaatctgatttttaagaattctctttgcagtgtttagcttcctattcacattcttaaaattgctttggtgttaccatgagtctaaaatgaagtttagccttccttttgtttcattctgagaacttctatattatattacctttaaaaattgtttatgatattaaatttaaaatacaaacagctctctttttttttttttttttttttaatcatccagcccaaagtggcaaaaacagctcttttctcatttggcaccaccaataacgcaagttaaaaataatgttgagtttattatacttttgacctgtttagctcaacagggtgaaggcatgtaaagaatgtggacttctgaggaattttcttttaaaaagaacataatgaagtaacattttaattactcaaggactacttttggttgaagtttataatctagatacctctactttttgtttttgctgttcgacagttcacaaagaccttcagcaatttacagggtaaaatcgttgaagtagtggaggtgaaactgaaatttaaaattattctgtaaatactatagggaaagaggctgagcttagaatcttttggttgttcatgtgttctgtgctcttatcatcacacaggtcatgtgttgttactcaggattctggaagtactaagccgtagttaacaggctggatagatcttcagccaatcttctttcattatactgctgcttttctgtttcttaaaaaacaaaaatcaatgaacaacttcttcagaaggaagcaccactgttcaattggttaactgaaagtatgaatcactgccgctttgcttgcccacctgtttgctttttctcacaggttttatttatctgaatgattgttgcatttgaatactgtagccatggtgagtgagcagttgaagacttcctttctgcaccttcatagttaagggttcatcttctcaagaaataaagttgtgctgggttgtttcaattctgtagatcacctagaaactaggtaacaaggcccttggatcacaatgagcacattgcaggtctttggaaatgctgggaaggggttacattcaagtaactgctgacgtccttcctctctgtcagacccatgttggcctgtaattatatttttctgaatctaaaaacaaatagaaatttctgatatcttttcagtctccttcttttctttccattcatcacttaaatctcattattgtataacgtttcaaattatgacctggattgaaggaagtctgttttgtcagggactttgttaggtgaacatcagaatctcaactacaacaaagctgaaaaatgaggcagccttaacagtaaatgcttttgggccgggcgtggtggctcacgcctgtagtcccagcactttgggaggccgaggcgggcggatcacgaggtcaggagatcgagaccatcctggttaacacagtgaaaccccgtctctactaaaaatacaaagaattagccgggcgtggtggcggcgcctgtagtcccagctgctcgggaggctgaggcagcagaatggcgtgaacccgggaggcggagcctgcagtgagccgagatcgtgcccctgcactccagcctgggcgacagcgagactccgtctcaaaaaaaaaaaaagtgaatacttttgaaatgaatgctttttgaagcttagaagaaccattaggtttatgtaatgcacccatacttattcctttaaataaattttaatttaaaaacattgagatattggcttctgtcaacctgatttaattaattctttacattaagctgattttccccctggcagctgacaaataagttcattgttcttgtagaagtgagctcacaaggttaaatgtgaatgttctcaaaggtacacagccttgtttcagaagaattttaatgcccgctgtaaaatcaatcatgcagagccaatttgaggtatgactccagggtatgcaaggtatgacttctctggaagccaagtcttttcacagggcactgtggtaatacccatagcactaatcctcagtgtgctggttgaagaaataaaatgtttttaaagaaggataaaggaggaattaattagaaaatttttttccacatattagcaaataaatgaaatgtcattttcatattaagtaagtatagttatgatcttcgtttctacctactctccttttgaaatattctttattactaaataatattttaggaggagttaacagaaataattacctgtaacatctgcagataaacttacatagctaacattgtgtgctgacttttttaaatggtgaagtggcattaatgagatgttcagtttacagaatttgaagtttgagttctattttaatagtctgccgtgtcccccaaatcccatttagataaattgaggttgatttttcacatagacttgcaatttttagacaccacattttttttatagtaacagcctcatttgcctgtacaataactaataatacagtatttcataggtacattgtatgtgcacaggaaatttttctttaaatcttaagagcctttaataaacgggatattttaatattttaatgttactacatttaaaaaatagtgttttcctacaaaattttctgtattcagtatacgttaactatgaaaatgtcaaacaatgaaatcattgaaatatatttaaggaaaaattaccaaccaaaagtaatgagtaccctctatgtgcatatttactggaatgttcatgtgaaatggtaacatttccaataacagcattttgaatctggggtgacacaaacatgatttttatttttgagctagggattttgatggagaagcacctagatgaagacaccatttcattcatgatattttaaaattagaaaagtaaagcttctaaattgaaactcttaacaggtcacttcatgaaatttttagttttaaatttaattttacatgagatgtctttctgaagagctacttttattaactttcacttagatcgttgtatgctaggcattcagtatttctctacttgattttcctatgcctagttgtgattacagcaagtatttaataataaagtcagtcatgtgagagtatccattaatttcagtgggtccttggaaggcaggcagaagatttctgtccaagagtcttatttttgacatgagatgaaattctttttttttttttgagatggggtctcactctgtcacccaggctggagtgcagtggcaggatcttggctcactgcaacctcccaagctcaagccatcctcccacctcagtctcctgagtagttgggactactggcatgtgcccccattcctgattagtttttttgtatttttggtagagatggggtcttgctatattgcctaatttttgtgtttttagtagagatggggtttcaccatgttggccaggctgctcttgaactcctgagctcaagtaatctgcccgccctggcctcccaaagtgctgggattacaggcatgagccaccatgcctggctaaaaccaattctttagattgtttttgccaccatttgcttacttggaatagctttcacatttatttttcttatgaagaaatccagtgtcagtcagaccatgtaacatcaaagcaaaatttcattgaagcctatccttgtcttaattattctaaaataaagtacaataaagtgaattattttgccctttgtagtagcatagtgttaagttatatatatattttaatatgcatactcctaagtaaagtttcagagaccacatgctggagagcagtggctttcagacagcatcagcatcacctgaaggccttgttgaatacacattattggaagagaggggagaacacaggctcatgcctgtaattccagtgctttgggagactgaggcaggaggatcacgtgagcccaggagttcaagatcaggctgggcaatacagcaagacccctgtctctacaaaaacaaaaacaaaaaacaaacaggcatggtagtgcatacctgtagtctgagctgcttgggagtctgaggcaggaggatcacttgaacccaggagttcgaggctgcagtgagttattattgggccactgcagtccagcctgggcagcaaagtgagaccctgtctgttaaaaaaacaaaaccaaaaacttgattgctgggggccaccctagagtttctgattcagtaggtctggcggtggggatggtgggcctggtaatttgcctttctaacaagcgtccaggtaatgccccagctgctggtcccaggaccacactttgcagattattactctgagaagagcactaactctgacgttggattccttctgttcctcattagtgaatttatttgggggagattattcaatctggtagatccgcatttacttagctgtgaagtggaggttaatgcaacctgcctgagactgtgagaatgagaaactctaattgaaataccaggcccagcgtgcctggatgcttgaaaaatgctgactcccatggtccgtccttccctcactcttctcagctataaagtgagaagcgaaattcagtatcttttaagattcctctcaggtgtaaaatgctgtgattctaaaagtttaattttgtagttccagagacaatgccaaacacctgtgtgtgcttagtgctttgtaaagagtggtaataacagtgacaccacataggccgtagttttgtagttccagagacaatgccaaacacctgtgtgtacttagtgctttgtaaagagtgaataacagtgacaccacataggccatagttttgtagttccagagacaatgccaaacacctatgtgtacttagtgctttgtaaagagtggtaataacagtgacaccacataggccgtaattttgtttttgcttttgttagggtgttcagcatcttgactccttaaataaggttttcagtcagatttataaagcagcattgaagaagttgtattatatttgagtacagttggaatccatggcagttttatggaggccaaatatatcagatgaataggctaatttccctgagttgctggccttattagtccctactctgttgccccctggttacctaatgcatgttcaaaaggtatagttttcatcacctgcttgatcttgattttcagacagcatcaaatcagttgcaaaacaaatccaagctaaaattttgagtgtatgattaatttactatagcatgtaattatgcagtattttattttttattttttattttttttgagacagagtctcactccattgcccaggctgaagtgcagtggcacgatctcggctcactctaacctctgcctcctgggttcaagtgattctcctgcctcagcctcccgaatagctgggattacagacatgcaccaccacgcccagctaattttttgtatttatagtagagaggaggttttaccatgttggccaggttggtcttgaactcttgacctcaagtgatctacacgcctcggcctcccaaagtgctgggattacgggtgtgagccactgcgcccagctatccagtattttatttaaaagttgtcactagggtgttcactattgtgaatttataatcttaaaagttggggatgctaaaagtaccagactaaaatactacgaggttttctcatcttttaattccattttgttagaaaaaaataatcacaaccggggttcttttacctttccccagccatctagactgctttactgcaatgttgggaagattgcatacaataaaaactgtagctagttgattgggatttgggaaaattgaatcaagcatttgcattcatccagaatggtcttaaactgctgactgtggggtgcccacaggatgagcactggtggcatgggtgggaggaatttccttggatactgcaattgcatttgaaagatctattttccaaaacctgagcagagagaggctaggaggaatgcagacaggacattgaaaatgcgaattccctttactagtagaacatgaaatatctgataatggtttaaaaaaaataagtgccaggatacattgtagtataaaggttcaactagtataatttaaaatgagtctttatattcaggccaggtgcggtggctcacacctgtaatcccagcactttgggagtccgaggcgggtggatcacctgagattaggagttcaaaaccagtgtgaccaacatggagaaaccccttctctactaaaaatacaaaaaattagccaggcatggtggtgcacgcctgtagtcccagctacttgtgaggctgaggtaggagaatcgcttgaacccaagaggcagaggttgcagtgagctgagatcacaccactgcactccagcctgggtgacagagcgagaccctgtttcaaaaaaataagaaataaaaagtgagtcttcatattcaaattagtatatgaggttaggcaacaattcttatatgggaccaggtatatttaatttgcctttctttgcagtcatcctagtaaatccttgtaaagggttattttatatacaattttgtagtatattctaaatcccctttggcaaataaagctgaagttatctagtgtcagcatactgtgatttgtatatttatataagacaagattgcatcattctgattaagttgcagcattttagttttatctgataggcctgtattgagtaatcagtagctatgtgcaaatattaagtcaacttaattaccagacccagaaggccagaggtaatcaaagagtactttcggaagatgaaatatttataatgagttatggaaacaatgttttagaaatgtttttcttggtgtaatttaatgcagatttttacctcaattttgttaaaaaacttgataatttgatccctccatctatttaatatttaatattttcagattctagagtatttaaaatttaaacacaattataaaattaattataattcctacttatgttagctatgatttagggccaaaactaccctggttttgtcttgcaacttgaaacattgtgtattttaaactatataatttgggaacattattttatagactgtggataaccaaatataagatttgtgatttttaatgcttcatttgtgtaaaatcatttgtatattctatttatagtatgcattttctagctcattaaaagtacagaaaaacctcaaatctgtccttatacaaatatttgatttctagtttccttttattaaaacattttcactca

SEQ ID NO: 136 - DNA, 2375 bp, Homo sapiens
gggggcggggccgcgcggagggcaagccgggggcggggccggggccagagcagatctccgggcctccgcggccatagctgactgtgccgtcccttcccctcacccgctccacgccctcctgggccgagtggagttgggtggtgtcgggagcctctccctgaggggcaccgcgtcttcaggagctgggcctccagtgcggcgcgatgtcaggcgcggtgacagctctgtgagtccgaggccgcggccgtggcgctgggcggctgcggggcctgaccggtccgctcatggtgccgccacgacgccatcgcggggcaggaaggccaggtaggcaggcagggaagggccccgacatcaccggagcccaaaccgggacggagtgcccaccagcagcaccacctcctgccctcggtggcagcaggagcgccttgaccgaaaccgtgaaggtctctaggggcggagggagcgggagctgacaggggcgccggagccctgcgcccaccgctggcaattgaggaagccgtgcgtgcgccctcgcctcggctccccggggaggcgtcgctgccttaactgtcttccccgctccaaaacagaaggatgatttcttttcccagctgtttcttttaaaatgactggatgttttgatagaggtgggtggaggagcatggagaatccttttcttttaccacttgaagagattggaaaggtgccttcaagacccacagcaaatcacttactctccgataaccaaattccactccagcagatcagggacagaaaagacacttttagaaacagtgtctagacgctgtccccagggatggattcctctggatggagaggggtgctgagttcttcacctccttttagactgagatctgccaagttttccggcattgctcttgaggatctcagaagggctcttaagacaagactgcaaatggtgtgtgtatttgtcatgaaccgaatgaattcccagaacagtggtttcactcagcgcaggcgaatggctcttgggattgttattcttctgcttgttgatgtgatatgggttgcttcctctgaacttacttcgtatgtttttacccagtacaacaaaccattcttcagcacctttgcaaaaacatctatgtttgttttgtaccttttgggctttattatttggaagccatggagacaacagtgtacaagaggacttcgcggaaagcatgctgctttttttgcagatgctgaaggttactttgctgcttgcacaacagatacaactatgaatagttctttgagtgaacctctgtatgtgcctgtgaaattccatgatcttccaagtgaaaaacctgagagcacaaacattgatactgaaaaaacccccaaaaagtctcgtgtgaggttcagtaatatcatggagattcgacagcttccgtcaagtcatgcattggaagcaaagttgtctcgcatgtcatatcctgtgaaagaacaagaatccatactgaaaactgtggggaaacttactgcaactcaagtagcgaaaattagcttttttttttgctttgtggtaggtcttttatgatatgtttgcatatgatgtttgaaacttgaattttaagactgtatacataccaacaatataggattgaagtgtgagacaattaggttgtttaatcatgactttaaactctgctatttgataccggtaggaagttagggtatcaaaattaataaatgcttgatatacctcaaagagttagaattcattaagtcctataacacttcagctatttacatatatacacaaacttacaaacacacacaggttgggaagttcttcagaatttagcattgcctcatgctcaaaattatgaatagagttattttacactgtgatatatgtatatacaaaggctagtaaatatccagataagagtttactgtatgcattgatttttttcaaataagtgttttgcagttttatattcatataaatgaggttaagtattattttgtcaagtactcagtatatttctacagaatttctggttgtattatttatagtttctttttaaagatagaaactgaaaactgtgcttaagatttcacatagaataatgatggagtaaataaagtattgttattttgggctaagctgggattagagacttgtctgagttagaactctaacatgtagaatttaaaaaatgaatttctgtgatattttatgtgtacatcattggaagtagcctaatccaaggttttttaaatatgagcctttaagattcaaatttgtactgagcatcttaaacccctaaacaatgaaatgctaatgtcaatgttattagcctgattataaaatttttttaatgtcaaaaaaaaaaaaaaaaaaa

SEQ ID NO: 137 - DNA, 10385 bp, Homo sapiens
cgctcggcgaccagagcctcgcattacttcccctagctccgccaagcctcgctgcatacgcgaccgcgcgcagtccgccgtcgcgcccctatgacgtcacccgcgcgccaccgcttccgggctggggactgggggcggggccgcgcggagggcaagccgggggcggggccggggccagagcagatctccgggcctccgcggccatagctgactgtgccgtcccttcccctcacccgctccacgccctcctgggccgagtggagttgggtggtgtcgggagcctctccctgaggggcaccgcgtcttcaggagctgggcctccagtgcggcgcgatgtcaggcgcggtgacagctctgtgagtccgaggccgcggccgtggcgctgggcggctgcggggcctgaccggtccgctcatggtgccgccacgacgccatcgcggggcaggaaggccaggggtgctgagttcttcacctccttttagactgagatctgccaagttttccggcattgctcttgaggatctcagaagggctcttaagacaagactgcaaatggtgtgtgtatttgtcatgaaccgaatgaattcccagaacagtggtttcactcagcgcaggcgaatggctcttgggattgttattcttctgcttgttgatgtgatatgggttgcttcctctgaacttacttcgtatgtttttacccagtacaacaaaccattcttcagcacctttgcaaaaacatctatgtttgttttgtaccttttgggctttattatttggaagccatggagacaacagtgtacaagaggacttcgcggaaagcatgctgctttttttgcagatgctgaaggttactttgctgcttgcacaacagatacaactatgaatagttctttgagtgaacctctgtatgtgcctgtgaaattccatgatcttccaagtgaaaaacctgagagcacaaacattgatactgaaaaaacccccaaaaagtctcgtgtgaggttcagtaatatcatggagattcgacagcttccgtcaagtcatgcattggaagcaaagttgtctcgcatgtcatatcctgtgaaagaacaagaatccatactgaaaactgtggggaaacttactgcaactcaagtagcgaaaattagcttttttttttgctttgtgtggtttttggcaaatttgtcatatcaagaagcactttcagacacacaagttgctatagttaatattttatcttcaacttccggactttttaccttaatccttgctgcagtatttccaagtaacagtggagatagatttaccctttctaaactattagctgtaattttaagcattggaggcgttgtactggtaaacctggcagggtctgaaaaacctgctggaagagacacagtaggttccatttggtctcttgctggagccatgctctatgctgtctatattgttatgattaagagaaaagtagatagagaagacaagttggatattccaatgttctttggttttgtaggtttgtttaatctgctgctcttatggccaggtttctttttacttcattatactggatttgaggacttcgagtttcccaataaagtagtattaatgtgcattatcattaatggccttattggaacagtactctcagagttcctgtggttgtggggctgctttcttacctcatcattgataggcacacttgcactaagccttacaatacctctgtccataatagctgacatgtgtatgcaaaaggtgcagttttcttggttattttttgcaggagctatccctgtatttttttcattttttattgtaactctcctatgccattataataattgggatcctgtgatggtgggaatcagaagaatatttgcttttatatgcagaaaacatcgaattcagagcttgataatggaactatacagcgaagagacaatctctggcaagtttttgtagaaaaaatgtttcagtgcctagtctgaaaaataacagtttgagttctttgaaactctaaaatatatttttctcatacctgttttcttcattttcataatgaagcactttgctatgtagctgtgtacatatcactacagttataggaagtttcagtctacagtccatccaaaggaccaacctgccttacacatctcaaggaattcagctgttgaaatcatttgaactaatcaaggaataaatcctaatgttctgggactttattttcacatgttaaatgctggaatatattatgaaaatgttttcaagaaatcacttaagtgttcatagaccagtatttctgacaggtaaaatgctaaaataagctacctgtaataagtgtggattatatttttgggttttgtagaatattgcaaattaaccacacaaaaaatgtttaatttatgcaacaagcatgtttgtgcaaatttcatgggactttaaaaagaataagtatttgagaaaatatctggttcacttacactacatttactgtattattcttttatagcattaggtgccttgtattttaaatctgtgacaaaccatggcaaatttttaaaggggaagtattattataaaatgaagaaatatgtatttctaaaggctatattgctgtaaacttaattgataaagctctgtttaatttagagttttgaagaaatagtctcccttcaattaagaaattttcataatggaatgatttaaattgaagtgacaaagagtattattaaaatacaatgtttatacgtctatttgtgtattgtagatgtatcaagtgatttctaatttttttcacatatgaatgtgccagattactctagaactagatgtctcttctttaaataattttagttttcctgaataaatttgtaatggttaaagtaccaagtaagtaaggcgagaagggattctgtttttaaaatcacatcagaacttttcctctactaagattataaattaaatgtaaaatactcctaattgcaattcttaaacttaggccttacatgtacttattatgcaactgctcctggactctattcaccatagatatcagtaaacgtatgtcccaggattcacaggcttttgattaatcaatattcttttcaagtttgctgtgaagagtttagttctcttcaaaatttcttaactaatctgatttttaagaattctctttgcagtgtttagcttcctattcacattcttaaaattgctttggtgttaccatgagtctaaaatgaagtttagccttccttttgtttcattctgagaacttctatattatattacctttaaaaattgtttatgatattaaatttaaaatacaaacagctctctttttttttttttttttttttaatcatccagcccaaagtggcaaaaacagctcttttctcatttggcaccaccaataacgcaagttaaaaataatgttgagtttattatacttttgacctgtttagctcaacagggtgaaggcatgtaaagaatgtggacttctgaggaattttcttttaaaaagaacataatgaagtaacattttaattactcaaggactacttttggttgaagtttataatctagatacctctactttttgtttttgctgttcgacagttcacaaagaccttcagcaatttacagggtaaaatcgttgaagtagtggaggtgaaactgaaatttaaaattattctgtaaatactatagggaaagaggctgagcttagaatcttttggttgttcatgtgttctgtgctcttatcatcacacaggtcatgtgttgttactcaggattctggaagtactaagccgtagttaacaggctggatagatcttcagccaatcttctttcattatactgctgcttttctgtttcttaaaaaacaaaaatcaatgaacaacttcttcagaaggaagcaccactgttcaattggttaactgaaagtatgaatcactgccgctttgcttgcccacctgtttgctttttctcacaggttttatttatctgaatgattgttgcatttgaatactgtagccatggtgagtgagcagttgaagacttcctttctgcaccttcatagttaagggttcatcttctcaagaaataaagttgtgctgggttgtttcaattctgtagatcacctagaaactaggtaacaaggcccttggatcacaatgagcacattgcaggtctttggaaatgctgggaaggggttacattcaagtaactgctgacgtccttcctctctgtcagacccatgttggcctgtaattatatttttctgaatctaaaaacaaatagaaatttctgatatcttttcagtctccttcttttctttccattcatcacttaaatctcattattgtataacgtttcaaattatgacctggattgaaggaagtctgttttgtcagggactttgttaggtgaacatcagaatctcaactacaacaaagctgaaaaatgaggcagccttaacagtaaatgcttttgggccgggcgtggtggctcacgcctgtagtcccagcactttgggaggccgaggcgggcggatcacgaggtcaggagatcgagaccatcctggttaacacagtgaaaccccgtctctactaaaaatacaaagaattagccgggcgtggtggcggcgcctgtagtcccagctgctcgggaggctgaggcagcagaatggcgtgaacccgggaggcggagcctgcagtgagccgagatcgtgcccctgcactccagcctgggcgacagcgagactccgtctcaaaaaaaaaaaaagtgaatacttttgaaatgaatgctttttgaagcttagaagaaccattaggtttatgtaatgcacccatacttattcctttaaataaattttaatttaaaaacattgagatattggcttctgtcaacctgatttaattaattctttacattaagctgattttccccctggcagctgacaaataagttcattgttcttgtagaagtgagctcacaaggttaaatgtgaatgttctcaaaggtacacagccttgtttcagaagaattttaatgcccgctgtaaaatcaatcatgcagagccaatttgaggtatgactccagggtatgcaaggtatgacttctctggaagccaagtcttttcacagggcactgtggtaatacccatagcactaatcctcagtgtgctggttgaagaaataaaatgtttttaaagaaggataaaggaggaattaattagaaaatttttttccacatattagcaaataaatgaaatgtcattttcatattaagtaagtatagttatgatcttcgtttctacctactctccttttgaaatattctttattactaaataatattttaggaggagttaacagaaataattacctgtaacatctgcagataaacttacatagctaacattgtgtgctgacttttttaaatggtgaagtggcattaatgagatgttcagtttacagaatttgaagtttgagttctattttaatagtctgccgtgtcccccaaatcccatttagataaattgaggttgatttttcacatagacttgcaatttttagacaccacattttttttatagtaacagcctcatttgcctgtacaataactaataatacagtatttcataggtacattgtatgtgcacaggaaatttttctttaaatcttaagagcctttaataaacgggatattttaatattttaatgttactacatttaaaaaatagtgttttcctacaaaattttctgtattcagtatacgttaactatgaaaatgtcaaacaatgaaatcattgaaatatatttaaggaaaaattaccaaccaaaagtaatgagtaccctctatgtgcatatttactggaatgttcatgtgaaatggtaacatttccaataacagcattttgaatctggggtgacacaaacatgatttttatttttgagctagggattttgatggagaagcacctagatgaagacaccatttcattcatgatattttaaaattagaaaagtaaagcttctaaattgaaactcttaacaggtcacttcatgaaatttttagttttaaatttaattttacatgagatgtctttctgaagagctacttttattaactttcacttagatcgttgtatgctaggcattcagtatttctctacttgattttcctatgcctagttgtgattacagcaagtatttaataataaagtcagtcatgtgagagtatccattaatttcagtgggtccttggaaggcaggcagaagatttctgtccaagagtcttatttttgacatgagatgaaattctttttttttttttgagatggggtctcactctgtcacccaggctggagtgcagtggcaggatcttggctcactgcaacctcccaagctcaagccatcctcccacctcagtctcctgagtagttgggactactggcatgtgcccccattcctgattagtttttttgtatttttggtagagatggggtcttgctatattgcctaatttttgtgtttttagtagagatggggtttcaccatgttggccaggctgctcttgaactcctgagctcaagtaatctgcccgccctggcctcccaaagtgctgggattacaggcatgagccaccatgcctggctaaaaccaattctttagattgtttttgccaccatttgcttacttggaatagctttcacatttatttttcttatgaagaaatccagtgtcagtcagaccatgtaacatcaaagcaaaatttcattgaagcctatccttgtcttaattattctaaaataaagtacaataaagtgaattattttgccctttgtagtagcatagtgttaagttatatatatattttaatatgcatactcctaagtaaagtttcagagaccacatgctggagagcagtggctttcagacagcatcagcatcacctgaaggccttgttgaatacacattattggaagagaggggagaacacaggctcatgcctgtaattccagtgctttgggagactgaggcaggaggatcacgtgagcccaggagttcaagatcaggctgggcaatacagcaagacccctgtctctacaaaaacaaaaacaaaaaacaaacaggcatggtagtgcatacctgtagtctgagctgcttgggagtctgaggcaggaggatcacttgaacccaggagttcgaggctgcagtgagttattattgggccactgcagtccagcctgggcagcaaagtgagaccctgtctgttaaaaaaacaaaaccaaaaacttgattgctgggggccaccctagagtttctgattcagtaggtctggcggtggggatggtgggcctggtaatttgcctttctaacaagcgtccaggtaatgccccagctgctggtcccaggaccacactttgcagattattactctgagaagagcactaactctgacgttggattccttctgttcctcattagtgaatttatttgggggagattattcaatctggtagatccgcatttacttagctgtgaagtggaggttaatgcaacctgcctgagactgtgagaatgagaaactctaattgaaataccaggcccagcgtgcctggatgcttgaaaaatgctgactcccatggtccgtccttccctcactcttctcagctataaagtgagaagcgaaattcagtatcttttaagattcctctcaggtgtaaaatgctgtgattctaaaagtttaattttgtagttccagagacaatgccaaacacctgtgtgtgcttagtgctttgtaaagagtggtaataacagtgacaccacataggccgtagttttgtagttccagagacaatgccaaacacctgtgtgtacttagtgctttgtaaagagtgaataacagtgacaccacataggccatagttttgtagttccagagacaatgccaaacacctatgtgtacttagtgctttgtaaagagtggtaataacagtgacaccacataggccgtaattttgtttttgcttttgttagggtgttcagcatcttgactccttaaataaggttttcagtcagatttataaagcagcattgaagaagttgtattatatttgagtacagttggaatccatggcagttttatggaggccaaatatatcagatgaataggctaatttccctgagttgctggccttattagtccctactctgttgccccctggttacctaatgcatgttcaaaaggtatagttttcatcacctgcttgatcttgattttcagacagcatcaaatcagttgcaaaacaaatccaagctaaaattttgagtgtatgattaatttactatagcatgtaattatgcagtattttattttttattttttattttttttgagacagagtctcactccattgcccaggctgaagtgcagtggcacgatctcggctcactctaacctctgcctcctgggttcaagtgattctcctgcctcagcctcccgaatagctgggattacagacatgcaccaccacgcccagctaattttttgtatttatagtagagaggaggttttaccatgttggccaggttggtcttgaactcttgacctcaagtgatctacacgcctcggcctcccaaagtgctgggattacgggtgtgagccactgcgcccagctatccagtattttatttaaaagttgtcactagggtgttcactattgtgaatttataatcttaaaagttggggatgctaaaagtaccagactaaaatactacgaggttttctcatcttttaattccattttgttagaaaaaaataatcacaaccggggttcttttacctttccccagccatctagactgctttactgcaatgttgggaagattgcatacaataaaaactgtagctagttgattgggatttgggaaaattgaatcaagcatttgcattcatccagaatggtcttaaactgctgactgtggggtgcccacaggatgagcactggtggcatgggtgggaggaatttccttggatactgcaattgcatttgaaagatctattttccaaaacctgagcagagagaggctaggaggaatgcagacaggacattgaaaatgcgaattccctttactagtagaacatgaaatatctgataatggtttaaaaaaaataagtgccaggatacattgtagtataaaggttcaactagtataatttaaaatgagtctttatattcaggccaggtgcggtggctcacacctgtaatcccagcactttgggagtccgaggcgggtggatcacctgagattaggagttcaaaaccagtgtgaccaacatggagaaaccccttctctactaaaaatacaaaaaattagccaggcatggtggtgcacgcctgtagtcccagctacttgtgaggctgaggtaggagaatcgcttgaacccaagaggcagaggttgcagtgagctgagatcacaccactgcactccagcctgggtgacagagcgagaccctgtttcaaaaaaataagaaataaaaagtgagtcttcatattcaaattagtatatgaggttaggcaacaattcttatatgggaccaggtatatttaatttgcctttctttgcagtcatcctagtaaatccttgtaaagggttattttatatacaattttgtagtatattctaaatcccctttggcaaataaagctgaagttatctagtgtcagcatactgtgatttgtatatttatataagacaagattgcatcattctgattaagttgcagcattttagttttatctgataggcctgtattgagtaatcagtagctatgtgcaaatattaagtcaacttaattaccagacccagaaggccagaggtaatcaaagagtactttcggaagatgaaatatttataatgagttatggaaacaatgttttagaaatgtttttcttggtgtaatttaatgcagatttttacctcaattttgttaaaaaacttgataatttgatccctccatctatttaatatttaatattttcagattctagagtatttaaaatttaaacacaattataaaattaattataattcctacttatgttagctatgatttagggccaaaactaccctggttttgtcttgcaacttgaaacattgtgtattttaaactatataatttgggaacattattttatagactgtggataaccaaatataagatttgtgatttttaatgcttcatttgtgtaaaatcatttgtatattctatttatagtatgcattttctagctcattaaaagtacagaaaaacctcaaatctgtccttatacaaatatttgatttctagtttccttttattaaaacattttcactca

SEQ ID NO: 138 - DNA, 10522 bp, Homo sapiens
cgctcggcgaccagagcctcgcattacttcccctagctccgccaagcctcgctgcatacgcgaccgcgcgcagtccgccgtcgcgcccctatgacgtcacccgcgcgccaccgcttccgggctggggactgggggcggggccgcgcggagggcaagccgggggcggggccggggccagagcagatctccgggcctccgcggccatagctgactgtgccgtcccttcccctcacccgctccacgccctcctgggccgagtggagttgggtggtgtcgggagcctctccctgaggggcaccgcgtcttcaggagctgggcctccagtgcggcgcgatgtcaggcgcggtgacagctctgtgagtccgaggccgcggccgtggcgctgggcggctgcggggcctgaccggtccgctcatggtgccgccacgacgccatcgcggggcaggaaggccaggggtgctgagttcttcacctccttttagactgagatctgccaagttttccggcattgctcttgaggatctcagaagggctcttaagacaagactgcaaatggtgtgtgtatttgtcatgaaccgaatgaattcccagaacagtggtttcactcagcgcaggcgaatggctcttgggattgttattcttctgcttgttgatgtgatatgggttgcttcctctgaacttacttcgtatgtttttacccagtacaacaaaccattcttcagcacctttgcaaaaacatctatgtttgttttgtaccttttgggctttattatttggaagccatggagacaacagtgtacaagaggacttcgcggaaagcatgctgctttttttgcagatgctgaaggttactttgctgcttgcacaacagatacaactatgaatagttctttgagtgaacctctgtatgtgcctgtgaaattccatgatcttccaagtgaaaaacctgagagcacaaacattgatactgaaaaaacccccaaaaagtctcgtgtgaggttcagtaatatcatggagattcgacagcttccgtcaagtcatgcattggaagcaaagttgtctcgcatgtcatatcctgtgaaagaacaagaatccatactgaaaactgtggggaaacttactgcaactcaagtagcgaaaattagcttttttttttgctttgtgtggtttttggcaaatttgtcatatcaagaagcactttcagacacacaagttgctatagttaatattttatcttcaacttccggactttttaccttaatccttgctgcagtatttccaagtaacagtggagatagatttaccctttctaaactattagctgtaattttaagacttgataaagaaggaaatggatataaaatattgaacttcattggaggcgttgtactggtaaacctggcagggtctgaaaaacctgctggaagagacacagtaggttccatttggtctcttgctggagccatgctctatgctgtctatattgttatgattaagagaaaagtagatagagaagacaagttggatattccaatgttctttggttttgtaggtttgtttaatctgctgctcttatggccaggtttctttttacttcattatactggatttgaggacttcgagtttcccaataaagtagtattaatgtgcattatcattaatggccttattggaacagtactctcagagttcctgtggttgtggggctgctttcttacctcatcattgataggcacacttgcactaagccttacaatacctctgtccataatagctgacatgtgtatgcaaaaggtgcagttttcttggttattttttgcaggagctatccctgtatttttttcattttttattgtaactctcctatgccattataataattgggatcctgtgatggtgggaatcagaagaatatttgcttttatatgcagaaaacatcgaattcagagagttccagaagacagcgaacagtgtgagagtctcatttctatgcacagtgtttctcaggaggatggagctagttagctgtctgttgtctgtagcccagcttgataatggaactatacagcgaagagacaatctctggcaagtttttgtagaaaaaatgtttcagtgcctagtctgaaaaataacagtttgagttctttgaaactctaaaatatatttttctcatacctgttttcttcattttcataatgaagcactttgctatgtagctgtgtacatatcactacagttataggaagtttcagtctacagtccatccaaaggaccaacctgccttacacatctcaaggaattcagctgttgaaatcatttgaactaatcaaggaataaatcctaatgttctgggactttattttcacatgttaaatgctggaatatattatgaaaatgttttcaagaaatcacttaagtgttcatagaccagtatttctgacaggtaaaatgctaaaataagctacctgtaataagtgtggattatatttttgggttttgtagaatattgcaaattaaccacacaaaaaatgtttaatttatgcaacaagcatgtttgtgcaaatttcatgggactttaaaaagaataagtatttgagaaaatatctggttcacttacactacatttactgtattattcttttatagcattaggtgccttgtattttaaatctgtgacaaaccatggcaaatttttaaaggggaagtattattataaaatgaagaaatatgtatttctaaaggctatattgctgtaaacttaattgataaagctctgtttaatttagagttttgaagaaatagtctcccttcaattaagaaattttcataatggaatgatttaaattgaagtgacaaagagtattattaaaatacaatgtttatacgtctatttgtgtattgtagatgtatcaagtgatttctaatttttttcacatatgaatgtgccagattactctagaactagatgtctcttctttaaataattttagttttcctgaataaatttgtaatggttaaagtaccaagtaagtaaggcgagaagggattctgtttttaaaatcacatcagaacttttcctctactaagattataaattaaatgtaaaatactcctaattgcaattcttaaacttaggccttacatgtacttattatgcaactgctcctggactctattcaccatagatatcagtaaacgtatgtcccaggattcacaggcttttgattaatcaatattcttttcaagtttgctgtgaagagtttagttctcttcaaaatttcttaactaatctgatttttaagaattctctttgcagtgtttagcttcctattcacattcttaaaattgctttggtgttaccatgagtctaaaatgaagtttagccttccttttgtttcattctgagaacttctatattatattacctttaaaaattgtttatgatattaaatttaaaatacaaacagctctctttttttttttttttttttttaatcatccagcccaaagtggcaaaaacagctcttttctcatttggcaccaccaataacgcaagttaaaaataatgttgagtttattatacttttgacctgtttagctcaacagggtgaaggcatgtaaagaatgtggacttctgaggaattttcttttaaaaagaacataatgaagtaacattttaattactcaaggactacttttggttgaagtttataatctagatacctctactttttgtttttgctgttcgacagttcacaaagaccttcagcaatttacagggtaaaatcgttgaagtagtggaggtgaaactgaaatttaaaattattctgtaaatactatagggaaagaggctgagcttagaatcttttggttgttcatgtgttctgtgctcttatcatcacacaggtcatgtgttgttactcaggattctggaagtactaagccgtagttaacaggctggatagatcttcagccaatcttctttcattatactgctgcttttctgtttcttaaaaaacaaaaatcaatgaacaacttcttcagaaggaagcaccactgttcaattggttaactgaaagtatgaatcactgccgctttgcttgcccacctgtttgctttttctcacaggttttatttatctgaatgattgttgcatttgaatactgtagccatggtgagtgagcagttgaagacttcctttctgcaccttcatagttaagggttcatcttctcaagaaataaagttgtgctgggttgtttcaattctgtagatcacctagaaactaggtaacaaggcccttggatcacaatgagcacattgcaggtctttggaaatgctgggaaggggttacattcaagtaactgctgacgtccttcctctctgtcagacccatgttggcctgtaattatatttttctgaatctaaaaacaaatagaaatttctgatatcttttcagtctccttcttttctttccattcatcacttaaatctcattattgtataacgtttcaaattatgacctggattgaaggaagtctgttttgtcagggactttgttaggtgaacatcagaatctcaactacaacaaagctgaaaaatgaggcagccttaacagtaaatgcttttgggccgggcgtggtggctcacgcctgtagtcccagcactttgggaggccgaggcgggcggatcacgaggtcaggagatcgagaccatcctggttaacacagtgaaaccccgtctctactaaaaatacaaagaattagccgggcgtggtggcggcgcctgtagtcccagctgctcgggaggctgaggcagcagaatggcgtgaacccgggaggcggagcctgcagtgagccgagatcgtgcccctgcactccagcctgggcgacagcgagactccgtctcaaaaaaaaaaaaagtgaatacttttgaaatgaatgctttttgaagcttagaagaaccattaggtttatgtaatgcacccatacttattcctttaaataaattttaatttaaaaacattgagatattggcttctgtcaacctgatttaattaattctttacattaagctgattttccccctggcagctgacaaataagttcattgttcttgtagaagtgagctcacaaggttaaatgtgaatgttctcaaaggtacacagccttgtttcagaagaattttaatgcccgctgtaaaatcaatcatgcagagccaatttgaggtatgactccagggtatgcaaggtatgacttctctggaagccaagtcttttcacagggcactgtggtaatacccatagcactaatcctcagtgtgctggttgaagaaataaaatgtttttaaagaaggataaaggaggaattaattagaaaatttttttccacatattagcaaataaatgaaatgtcattttcatattaagtaagtatagttatgatcttcgtttctacctactctccttttgaaatattctttattactaaataatattttaggaggagttaacagaaataattacctgtaacatctgcagataaacttacatagctaacattgtgtgctgacttttttaaatggtgaagtggcattaatgagatgttcagtttacagaatttgaagtttgagttctattttaatagtctgccgtgtcccccaaatcccatttagataaattgaggttgatttttcacatagacttgcaatttttagacaccacattttttttatagtaacagcctcatttgcctgtacaataactaataatacagtatttcataggtacattgtatgtgcacaggaaatttttctttaaatcttaagagcctttaataaacgggatattttaatattttaatgttactacatttaaaaaatagtgttttcctacaaaattttctgtattcagtatacgttaactatgaaaatgtcaaacaatgaaatcattgaaatatatttaaggaaaaattaccaaccaaaagtaatgagtaccctctatgtgcatatttactggaatgttcatgtgaaatggtaacatttccaataacagcattttgaatctggggtgacacaaacatgatttttatttttgagctagggattttgatggagaagcacctagatgaagacaccatttcattcatgatattttaaaattagaaaagtaaagcttctaaattgaaactcttaacaggtcacttcatgaaatttttagttttaaatttaattttacatgagatgtctttctgaagagctacttttattaactttcacttagatcgttgtatgctaggcattcagtatttctctacttgattttcctatgcctagttgtgattacagcaagtatttaataataaagtcagtcatgtgagagtatccattaatttcagtgggtccttggaaggcaggcagaagatttctgtccaagagtcttatttttgacatgagatgaaattctttttttttttttgagatggggtctcactctgtcacccaggctggagtgcagtggcaggatcttggctcactgcaacctcccaagctcaagccatcctcccacctcagtctcctgagtagttgggactactggcatgtgcccccattcctgattagtttttttgtatttttggtagagatggggtcttgctatattgcctaatttttgtgtttttagtagagatggggtttcaccatgttggccaggctgctcttgaactcctgagctcaagtaatctgcccgccctggcctcccaaagtgctgggattacaggcatgagccaccatgcctggctaaaaccaattctttagattgtttttgccaccatttgcttacttggaatagctttcacatttatttttcttatgaagaaatccagtgtcagtcagaccatgtaacatcaaagcaaaatttcattgaagcctatccttgtcttaattattctaaaataaagtacaataaagtgaattattttgccctttgtagtagcatagtgttaagttatatatatattttaatatgcatactcctaagtaaagtttcagagaccacatgctggagagcagtggctttcagacagcatcagcatcacctgaaggccttgttgaatacacattattggaagagaggggagaacacaggctcatgcctgtaattccagtgctttgggagactgaggcaggaggatcacgtgagcccaggagttcaagatcaggctgggcaatacagcaagacccctgtctctacaaaaacaaaaacaaaaaacaaacaggcatggtagtgcatacctgtagtctgagctgcttgggagtctgaggcaggaggatcacttgaacccaggagttcgaggctgcagtgagttattattgggccactgcagtccagcctgggcagcaaagtgagaccctgtctgttaaaaaaacaaaaccaaaaacttgattgctgggggccaccctagagtttctgattcagtaggtctggcggtggggatggtgggcctggtaatttgcctttctaacaagcgtccaggtaatgccccagctgctggtcccaggaccacactttgcagattattactctgagaagagcactaactctgacgttggattccttctgttcctcattagtgaatttatttgggggagattattcaatctggtagatccgcatttacttagctgtgaagtggaggttaatgcaacctgcctgagactgtgagaatgagaaactctaattgaaataccaggcccagcgtgcctggatgcttgaaaaatgctgactcccatggtccgtccttccctcactcttctcagctataaagtgagaagcgaaattcagtatcttttaagattcctctcaggtgtaaaatgctgtgattctaaaagtttaattttgtagttccagagacaatgccaaacacctgtgtgtgcttagtgctttgtaaagagtggtaataacagtgacaccacataggccgtagttttgtagttccagagacaatgccaaacacctgtgtgtacttagtgctttgtaaagagtgaataacagtgacaccacataggccatagttttgtagttccagagacaatgccaaacacctatgtgtacttagtgctttgtaaagagtggtaataacagtgacaccacataggccgtaattttgtttttgcttttgttagggtgttcagcatcttgactccttaaataaggttttcagtcagatttataaagcagcattgaagaagttgtattatatttgagtacagttggaatccatggcagttttatggaggccaaatatatcagatgaataggctaatttccctgagttgctggccttattagtccctactctgttgccccctggttacctaatgcatgttcaaaaggtatagttttcatcacctgcttgatcttgattttcagacagcatcaaatcagttgcaaaacaaatccaagctaaaattttgagtgtatgattaatttactatagcatgtaattatgcagtattttattttttattttttattttttttgagacagagtctcactccattgcccaggctgaagtgcagtggcacgatctcggctcactctaacctctgcctcctgggttcaagtgattctcctgcctcagcctcccgaatagctgggattacagacatgcaccaccacgcccagctaattttttgtatttatagtagagaggaggttttaccatgttggccaggttggtcttgaactcttgacctcaagtgatctacacgcctcggcctcccaaagtgctgggattacgggtgtgagccactgcgcccagctatccagtattttatttaaaagttgtcactagggtgttcactattgtgaatttataatcttaaaagttggggatgctaaaagtaccagactaaaatactacgaggttttctcatcttttaattccattttgttagaaaaaaataatcacaaccggggttcttttacctttccccagccatctagactgctttactgcaatgttgggaagattgcatacaataaaaactgtagctagttgattgggatttgggaaaattgaatcaagcatttgcattcatccagaatggtcttaaactgctgactgtggggtgcccacaggatgagcactggtggcatgggtgggaggaatttccttggatactgcaattgcatttgaaagatctattttccaaaacctgagcagagagaggctaggaggaatgcagacaggacattgaaaatgcgaattccctttactagtagaacatgaaatatctgataatggtttaaaaaaaataagtgccaggatacattgtagtataaaggttcaactagtataatttaaaatgagtctttatattcaggccaggtgcggtggctcacacctgtaatcccagcactttgggagtccgaggcgggtggatcacctgagattaggagttcaaaaccagtgtgaccaacatggagaaaccccttctctactaaaaatacaaaaaattagccaggcatggtggtgcacgcctgtagtcccagctacttgtgaggctgaggtaggagaatcgcttgaacccaagaggcagaggttgcagtgagctgagatcacaccactgcactccagcctgggtgacagagcgagaccctgtttcaaaaaaataagaaataaaaagtgagtcttcatattcaaattagtatatgaggttaggcaacaattcttatatgggaccaggtatatttaatttgcctttctttgcagtcatcctagtaaatccttgtaaagggttattttatatacaattttgtagtatattctaaatcccctttggcaaataaagctgaagttatctagtgtcagcatactgtgatttgtatatttatataagacaagattgcatcattctgattaagttgcagcattttagttttatctgataggcctgtattgagtaatcagtagctatgtgcaaatattaagtcaacttaattaccagacccagaaggccagaggtaatcaaagagtactttcggaagatgaaatatttataatgagttatggaaacaatgttttagaaatgtttttcttggtgtaatttaatgcagatttttacctcaattttgttaaaaaacttgataatttgatccctccatctatttaatatttaatattttcagattctagagtatttaaaatttaaacacaattataaaattaattataattcctacttatgttagctatgatttagggccaaaactaccctggttttgtcttgcaacttgaaacattgtgtattttaaactatataatttgggaacattattttatagactgtggataaccaaatataagatttgtgatttttaatgcttcatttgtgtaaaatcatttgtatattctatttatagtatgcattttctagctcattaaaagtacagaaaaacctcaaatctgtccttatacaaatatttgatttctagtttccttttattaaaacattttcactca

SEQ ID NO: 139 - DNA, 10752 bp, Homo sapiens
gggggcggggccgcgcggagggcaagccgggggcggggccggggccagagcagatctccgggcctccgcggccatagctgactgtgccgtcccttcccctcacccgctccacgccctcctgggccgagtggagttgggtggtgtcgggagcctctccctgaggggcaccgcgtcttcaggagctgggcctccagtgcggcgcgatgtcaggcgcggtgacagctctgtgagtccgaggccgcggccgtggcgctgggcggctgcggggcctgaccggtccgctcatggtgccgccacgacgccatcgcggggcaggaaggccaggtaggcaggcagggaagggccccgacatcaccggagcccaaaccgggacggagtgcccaccagcagcaccacctcctgccctcggtggcagcaggagcgccttgaccgaaaccgtgaaggtctctaggggcggagggagcgggagctgacaggggcgccggagccctgcgcccaccgctggcaattgaggaagccgtgcgtgcgccctcgcctcggctccccggggaggcgtcgctgccttaactgtcttccccgctccaaaacagaaggatgatttcttttcccagctgtttcttttaaaatgactggatgttttgatagaggtgggtggaggagcatggagaatccttttcttttaccacttgaagagattggaaaggtgccttcaagacccacagcaaatcacttactctccgataaccaaattccactccagcagatcagggacagaaaagacacttttagaaacagtgtctagacgctgtccccagggatggattcctctggatggagaggggtgctgagttcttcacctccttttagactgagatctgccaagttttccggcattgctcttgaggatctcagaagggctcttaagacaagactgcaaatggtgtgtgtatttgtcatgaaccgaatgaattcccagaacagtggtttcactcagcgcaggcgaatggctcttgggattgttattcttctgcttgttgatgtgatatgggttgcttcctctgaacttacttcgtatgtttttacccagtacaacaaaccattcttcagcacctttgcaaaaacatctatgtttgttttgtaccttttgggctttattatttggaagccatggagacaacagtgtacaagaggacttcgcggaaagcatgctgctttttttgcagatgctgaaggttactttgctgcttgcacaacagatacaactatgaatagttctttgagtgaacctctgtatgtgcctgtgaaattccatgatcttccaagtgaaaaacctgagagcacaaacattgatactgaaaaaacccccaaaaagtctcgtgtgaggttcagtaatatcatggagattcgacagcttccgtcaagtcatgcattggaagcaaagttgtctcgcatgtcatatcctgtgaaagaacaagaatccatactgaaaactgtggggaaacttactgcaactcaagtagcgaaaattagcttttttttttgctttgtgtggtttttggcaaatttgtcatatcaagaagcactttcagacacacaagttgctatagttaatattttatcttcaacttccggactttttaccttaatccttgctgcagtatttccaagtaacagtggagatagatttaccctttctaaactattagctgtaattttaagcattggaggcgttgtactggtaaacctggcagggtctgaaaaacctgctggaagagacacagtaggttccatttggtctcttgctggagccatgctctatgctgtctatattgttatgattaagagaaaagtagatagagaagacaagttggatattccaatgttctttggttttgtaggtttgtttaatctgctgctcttatggccaggtttctttttacttcattatactggatttgaggacttcgagtttcccaataaagtagtattaatgtgcattatcattaatggccttattggaacagtactctcagagttcctgtggttgtggggctgctttcttacctcatcattgataggcacacttgcactaagccttacaatacctctgtccataatagctgacatgtgtatgcaaaaggtgcagttttcttggttattttttgcaggagctatccctgtatttttttcattttttattgtaactctcctatgccattataataattgggatcctgtgatggtgggaatcagaagaatatttgcttttatatgcagaaaacatcgaattcagagagttccagaagacagcgaacagtgtgagagtctcatttctatgcacagtgtttctcaggaggatggagctagttagctgtctgttgtctgtagcccagcttgataatggaactatacagcgaagagacaatctctgcactttgctatgtagctgtgtacatatcactacagttataggaagtttcagtctacagtccatccaaaggaccaacctgccttacacatctcaaggaattcagctgttgaaatcatttgaactaatcaaggaataaatcctaatgttctgggactttattttcacatgttaaatgctggaatatattatgaaaatgttttcaagaaatcacttaagtgttcatagaccagtatttctgacaggtaaaatgctaaaataagctacctgtaataagtgtggattatatttttgggttttgtagaatattgcaaattaaccacacaaaaaatgtttaatttatgcaacaagcatgtttgtgcaaatttcatgggactttaaaaagaataagtatttgagaaaatatctggttcacttacactacatttactgtattattcttttatagcattaggtgccttgtattttaaatctgtgacaaaccatggcaaatttttaaaggggaagtattattataaaatgaagaaatatgtatttctaaaggctatattgctgtaaacttaattgataaagctctgtttaatttagagttttgaagaaatagtctcccttcaattaagaaattttcataatggaatgatttaaattgaagtgacaaagagtattattaaaatacaatgtttatacgtctatttgtgtattgtagatgtatcaagtgatttctaatttttttcacatatgaatgtgccagattactctagaactagatgtctcttctttaaataattttagttttcctgaataaatttgtaatggttaaagtaccaagtaagtaaggcgagaagggattctgtttttaaaatcacatcagaacttttcctctactaagattataaattaaatgtaaaatactcctaattgcaattcttaaacttaggccttacatgtacttattatgcaactgctcctggactctattcaccatagatatcagtaaacgtatgtcccaggattcacaggcttttgattaatcaatattcttttcaagtttgctgtgaagagtttagttctcttcaaaatttcttaactaatctgatttttaagaattctctttgcagtgtttagcttcctattcacattcttaaaattgctttggtgttaccatgagtctaaaatgaagtttagccttccttttgtttcattctgagaacttctatattatattacctttaaaaattgtttatgatattaaatttaaaatacaaacagctctctttttttttttttttttttttaatcatccagcccaaagtggcaaaaacagctcttttctcatttggcaccaccaataacgcaagttaaaaataatgttgagtttattatacttttgacctgtttagctcaacagggtgaaggcatgtaaagaatgtggacttctgaggaattttcttttaaaaagaacataatgaagtaacattttaattactcaaggactacttttggttgaagtttataatctagatacctctactttttgtttttgctgttcgacagttcacaaagaccttcagcaatttacagggtaaaatcgttgaagtagtggaggtgaaactgaaatttaaaattattctgtaaatactatagggaaagaggctgagcttagaatcttttggttgttcatgtgttctgtgctcttatcatcacacaggtcatgtgttgttactcaggattctggaagtactaagccgtagttaacaggctggatagatcttcagccaatcttctttcattatactgctgcttttctgtttcttaaaaaacaaaaatcaatgaacaacttcttcagaaggaagcaccactgttcaattggttaactgaaagtatgaatcactgccgctttgcttgcccacctgtttgctttttctcacaggttttatttatctgaatgattgttgcatttgaatactgtagccatggtgagtgagcagttgaagacttcctttctgcaccttcatagttaagggttcatcttctcaagaaataaagttgtgctgggttgtttcaattctgtagatcacctagaaactaggtaacaaggcccttggatcacaatgagcacattgcaggtctttggaaatgctgggaaggggttacattcaagtaactgctgacgtccttcctctctgtcagacccatgttggcctgtaattatatttttctgaatctaaaaacaaatagaaatttctgatatcttttcagtctccttcttttctttccattcatcacttaaatctcattattgtataacgtttcaaattatgacctggattgaaggaagtctgttttgtcagggactttgttaggtgaacatcagaatctcaactacaacaaagctgaaaaatgaggcagccttaacagtaaatgcttttgggccgggcgtggtggctcacgcctgtagtcccagcactttgggaggccgaggcgggcggatcacgaggtcaggagatcgagaccatcctggttaacacagtgaaaccccgtctctactaaaaatacaaagaattagccgggcgtggtggcggcgcctgtagtcccagctgctcgggaggctgaggcagcagaatggcgtgaacccgggaggcggagcctgcagtgagccgagatcgtgcccctgcactccagcctgggcgacagcgagactccgtctcaaaaaaaaaaaaagtgaatacttttgaaatgaatgctttttgaagcttagaagaaccattaggtttatgtaatgcacccatacttattcctttaaataaattttaatttaaaaacattgagatattggcttctgtcaacctgatttaattaattctttacattaagctgattttccccctggcagctgacaaataagttcattgttcttgtagaagtgagctcacaaggttaaatgtgaatgttctcaaaggtacacagccttgtttcagaagaattttaatgcccgctgtaaaatcaatcatgcagagccaatttgaggtatgactccagggtatgcaaggtatgacttctctggaagccaagtcttttcacagggcactgtggtaatacccatagcactaatcctcagtgtgctggttgaagaaataaaatgtttttaaagaaggataaaggaggaattaattagaaaatttttttccacatattagcaaataaatgaaatgtcattttcatattaagtaagtatagttatgatcttcgtttctacctactctccttttgaaatattctttattactaaataatattttaggaggagttaacagaaataattacctgtaacatctgcagataaacttacatagctaacattgtgtgctgacttttttaaatggtgaagtggcattaatgagatgttcagtttacagaatttgaagtttgagttctattttaatagtctgccgtgtcccccaaatcccatttagataaattgaggttgatttttcacatagacttgcaatttttagacaccacattttttttatagtaacagcctcatttgcctgtacaataactaataatacagtatttcataggtacattgtatgtgcacaggaaatttttctttaaatcttaagagcctttaataaacgggatattttaatattttaatgttactacatttaaaaaatagtgttttcctacaaaattttctgtattcagtatacgttaactatgaaaatgtcaaacaatgaaatcattgaaatatatttaaggaaaaattaccaaccaaaagtaatgagtaccctctatgtgcatatttactggaatgttcatgtgaaatggtaacatttccaataacagcattttgaatctggggtgacacaaacatgatttttatttttgagctagggattttgatggagaagcacctagatgaagacaccatttcattcatgatattttaaaattagaaaagtaaagcttctaaattgaaactcttaacaggtcacttcatgaaatttttagttttaaatttaattttacatgagatgtctttctgaagagctacttttattaactttcacttagatcgttgtatgctaggcattcagtatttctctacttgattttcctatgcctagttgtgattacagcaagtatttaataataaagtcagtcatgtgagagtatccattaatttcagtgggtccttggaaggcaggcagaagatttctgtccaagagtcttatttttgacatgagatgaaattctttttttttttttgagatggggtctcactctgtcacccaggctggagtgcagtggcaggatcttggctcactgcaacctcccaagctcaagccatcctcccacctcagtctcctgagtagttgggactactggcatgtgcccccattcctgattagtttttttgtatttttggtagagatggggtcttgctatattgcctaatttttgtgtttttagtagagatggggtttcaccatgttggccaggctgctcttgaactcctgagctcaagtaatctgcccgccctggcctcccaaagtgctgggattacaggcatgagccaccatgcctggctaaaaccaattctttagattgtttttgccaccatttgcttacttggaatagctttcacatttatttttcttatgaagaaatccagtgtcagtcagaccatgtaacatcaaagcaaaatttcattgaagcctatccttgtcttaattattctaaaataaagtacaataaagtgaattattttgccctttgtagtagcatagtgttaagttatatatatattttaatatgcatactcctaagtaaagtttcagagaccacatgctggagagcagtggctttcagacagcatcagcatcacctgaaggccttgttgaatacacattattggaagagaggggagaacacaggctcatgcctgtaattccagtgctttgggagactgaggcaggaggatcacgtgagcccaggagttcaagatcaggctgggcaatacagcaagacccctgtctctacaaaaacaaaaacaaaaaacaaacaggcatggtagtgcatacctgtagtctgagctgcttgggagtctgaggcaggaggatcacttgaacccaggagttcgaggctgcagtgagttattattgggccactgcagtccagcctgggcagcaaagtgagaccctgtctgttaaaaaaacaaaaccaaaaacttgattgctgggggccaccctagagtttctgattcagtaggtctggcggtggggatggtgggcctggtaatttgcctttctaacaagcgtccaggtaatgccccagctgctggtcccaggaccacactttgcagattattactctgagaagagcactaactctgacgttggattccttctgttcctcattagtgaatttatttgggggagattattcaatctggtagatccgcatttacttagctgtgaagtggaggttaatgcaacctgcctgagactgtgagaatgagaaactctaattgaaataccaggcccagcgtgcctggatgcttgaaaaatgctgactcccatggtccgtccttccctcactcttctcagctataaagtgagaagcgaaattcagtatcttttaagattcctctcaggtgtaaaatgctgtgattctaaaagtttaattttgtagttccagagacaatgccaaacacctgtgtgtgcttagtgctttgtaaagagtggtaataacagtgacaccacataggccgtagttttgtagttccagagacaatgccaaacacctgtgtgtacttagtgctttgtaaagagtgaataacagtgacaccacataggccatagttttgtagttccagagacaatgccaaacacctatgtgtacttagtgctttgtaaagagtggtaataacagtgacaccacataggccgtaattttgtttttgcttttgttagggtgttcagcatcttgactccttaaataaggttttcagtcagatttataaagcagcattgaagaagttgtattatatttgagtacagttggaatccatggcagttttatggaggccaaatatatcagatgaataggctaatttccctgagttgctggccttattagtccctactctgttgccccctggttacctaatgcatgttcaaaaggtatagttttcatcacctgcttgatcttgattttcagacagcatcaaatcagttgcaaaacaaatccaagctaaaattttgagtgtatgattaatttactatagcatgtaattatgcagtattttattttttattttttattttttttgagacagagtctcactccattgcccaggctgaagtgcagtggcacgatctcggctcactctaacctctgcctcctgggttcaagtgattctcctgcctcagcctcccgaatagctgggattacagacatgcaccaccacgcccagctaattttttgtatttatagtagagaggaggttttaccatgttggccaggttggtcttgaactcttgacctcaagtgatctacacgcctcggcctcccaaagtgctgggattacgggtgtgagccactgcgcccagctatccagtattttatttaaaagttgtcactagggtgttcactattgtgaatttataatcttaaaagttggggatgctaaaagtaccagactaaaatactacgaggttttctcatcttttaattccattttgttagaaaaaaataatcacaaccggggttcttttacctttccccagccatctagactgctttactgcaatgttgggaagattgcatacaataaaaactgtagctagttgattgggatttgggaaaattgaatcaagcatttgcattcatccagaatggtcttaaactgctgactgtggggtgcccacaggatgagcactggtggcatgggtgggaggaatttccttggatactgcaattgcatttgaaagatctattttccaaaacctgagcagagagaggctaggaggaatgcagacaggacattgaaaatgcgaattccctttactagtagaacatgaaatatctgataatggtttaaaaaaaataagtgccaggatacattgtagtataaaggttcaactagtataatttaaaatgagtctttatattcaggccaggtgcggtggctcacacctgtaatcccagcactttgggagtccgaggcgggtggatcacctgagattaggagttcaaaaccagtgtgaccaacatggagaaaccccttctctactaaaaatacaaaaaattagccaggcatggtggtgcacgcctgtagtcccagctacttgtgaggctgaggtaggagaatcgcttgaacccaagaggcagaggttgcagtgagctgagatcacaccactgcactccagcctgggtgacagagcgagaccctgtttcaaaaaaataagaaataaaaagtgagtcttcatattcaaattagtatatgaggttaggcaacaattcttatatgggaccaggtatatttaatttgcctttctttgcagtcatcctagtaaatccttgtaaagggttattttatatacaattttgtagtatattctaaatcccctttggcaaataaagctgaagttatctagtgtcagcatactgtgatttgtatatttatataagacaagattgcatcattctgattaagttgcagcattttagttttatctgataggcctgtattgagtaatcagtagctatgtgcaaatattaagtcaacttaattaccagacccagaaggccagaggtaatcaaagagtactttcggaagatgaaatatttataatgagttatggaaacaatgttttagaaatgtttttcttggtgtaatttaatgcagatttttacctcaattttgttaaaaaacttgataatttgatccctccatctatttaatatttaatattttcagattctagagtatttaaaatttaaacacaattataaaattaattataattcctacttatgttagctatgatttagggccaaaactaccctggttttgtcttgcaacttgaaacattgtgtattttaaactatataatttgggaacattattttatagactgtggataaccaaatataagatttgtgatttttaatgcttcatttgtgtaaaatcatttgtatattctatttatagtatgcattttctagctcattaaaagtacagaaaaacctcaaatctgtccttatacaaatatttgatttctagtttccttttattaaaacattttcactca

SEQ ID NO: 140 - DNA, 9894 bp, Homo sapiens
acaagctctccatgtgagctgacaggcgagtggaaacccctcgagtcacgctgcccggcggcggagggagcgctcgcccgcagtggcaacagctgcaccaccgtccccgtcgctctgccttcctcttctgcagcctctgctcttctgattacctccctcccccgtcctttggtgatttttttttttcaagaaggagagggcggggtaggtgtccgttccctcccctcttccccctcctttgccttcttggtttgaatttcctcccccggcgttgcactggcacacagtgcaagaggcaatacccgcacggagggagaacgaaggctgagactcccctgccgctccaagcccggaagaactggagcctggaggggggtgaggggagaagaggaagcgggaggggcttggcttcctcgcgtatttgaggacagcccatctcccttcaagaaccctacggagagtcggactgcatctccgcagcgagctcttggagcgccgccggccgggaggcgaaggatgcaggcggctccgcgcgccggctgcggggcagcgctcctgctgtggattgtcagcagctgcctctgcagagcctggacggctccctccacgtcccaaaaatgtgatgagccacttgtctctggactcccccatgtggctttcagcagctcctcctccatctctggtagctattctcccggctatgccaagataaacaagagaggaggtgctgggggatggtctccatcagacagcgaccattatcaatggcttcaggttgactttggcaatcggaagcagatcagtgccattgcaacccaaggaaggtatagcagctcagattgggtgacccaataccggatgctctacagcgacacagggagaaactggaaaccctatcatcaagatgggaatatctgggcatttcccggaaacattaactctgacggtgtggtccggcacgaattacagcatccgattattgcccgctatgtgcgcatagtgcctctggattggaatggagaaggtcgcattggactcagaattgaagtttatggctgttcttactgggctgatgttatcaactttgatggccatgttgtattaccatatagattcagaaacaagaagatgaaaacactgaaagatgtcattgccttgaactttaagacgtctgaaagtgaaggagtaatcctgcacggagaaggacagcaaggagattacattaccttggaactgaaaaaagccaagctggtcctcagtttaaacttaggaagcaaccagcttggccccatatatggccacacatcagtgatgacaggaagtttgctggatgaccaccactggcactctgtggtcattgagcgccaggggcggagcattaacctcactctggacaggagcatgcagcacttccgtaccaatggagagtttgactacctggacttggactatgagataacctttggaggcatccctttctctggcaagcccagctccagcagtagaaagaatttcaaaggctgcatggaaagcatcaactacaatggcgtcaacattactgatcttgccagaaggaagaaattagagccctcaaatgtgggaaatttgagcttttcttgtgtggaaccctatacggtgcctgtctttttcaacgctacaagttacctggaggtgcccggacggcttaaccaggacctgttctcagtcagtttccagtttaggacatggaaccccaatggtctcctggtcttcagtcactttgcggataatttgggcaatgtggagattgacctcactgaaagcaaagtgggtgttcacatcaacatcacacagaccaagatgagccaaatcgatatttcctcaggttctgggttgaatgatggacagtggcacgaggttcgcttcctagccaaggaaaattttgctattctcaccatcgatggagatgaagcatcagcagttcgaactaatagtccccttcaagttaaaactggcgagaagtacttttttggaggttttctgaaccagatgaataactcaagtcactctgtccttcagccttcattccaaggatgcatgcagctcattcaagtggacgatcaacttgtaaatttatacgaagtggcacaaaggaagccgggaagtttcgcgaatgtcagcattgacatgtgtgcgatcatagacagatgtgtgcccaatcactgtgagcatggtggaaagtgctcgcaaacatgggacagcttcaaatgcacttgtgatgagacaggatacagtggggccacctgccacaactctatctacgagccttcctgtgaagcctacaaacacctaggacagacatcaaattattactggatagatcctgatggcagcggacctctggggcctctgaaagtttactgcaacatgacagaggacaaagtgtggaccatagtgtctcatgacttgcagatgcagacgcctgtggtcggctacaacccagaaaaatactcagtgacacagctcgtttacagcgcctccatggaccagataagtgccatcactgacagtgccgagtactgcgagcagtatgtctcctatttctgcaagatgtcaagattgttgaacaccccagatggaagcccttacacttggtgggttggcaaagccaacgagaagcactactactggggaggctctgggcctggaatccagaaatgtgcctgcggcatcgaacgcaactgcacagatcccaagtactactgtaactgcgacgcggactacaagcaatggaggaaggatgctggtttcttatcatacaaagatcacctgccagtgagccaagtggtggttggagatactgaccgtcaaggctcagaagccaaattgagcgtaggtcctctgcgctgccaaggagacaggaattattggaatgccgcctctttcccaaacccatcctcctacctgcacttctctactttccaaggggaaactagcgctgacatttctttctacttcaaaacattaaccccctggggagtgtttcttgaaaatatgggaaaggaagatttcatcaagctggagctgaagtctgccacagaagtgtccttttcatttgatgtgggaaatgggccagtagagattgtagtgaggtcaccaacccctctcaacgatgaccagtggcaccgggtcactgcagagaggaatgtcaagcaggccagcctacaggtggaccggctaccgcagcagatccgcaaggccccaacagaaggccacacccgcctggagctctacagccagttatttgtgggtggtgctgggggccagcagggcttcctgggctgcatccgctccttgaggatgaatggggtgacacttgacctggaggaaagagcaaaggtcacatctgggttcatatccggatgctcgggccattgcaccagctatggaacaaactgtgaaaatggaggcaaatgcctagagagataccacggttactcctgcgattgctctaatactgcatatgatggaacattttgcaacaaagatgttggtgcattttttgaagaagggatgtggctacgatataactttcaggcaccagcaacaaatgccagagactccagcagcagagtagacaacgctcccgaccagcagaactcccacccggacctggcacaggaggagatccgcttcagcttcagcaccaccaaggcgccctgcattctcctctacatcagctccttcaccacagacttcttggcagtcctcgtcaaacccactggaagcttacagattcgatacaacctgggtggcacccgagagccatacaatattgacgtagaccacaggaacatggccaatggacagccccacagtgtcaacatcacccgccacgagaagaccatctttctcaagctcgatcattatccttctgtgagttaccatctgccaagttcatccgacaccctcttcaattctcccaagtcgctctttctgggaaaagttatagaaacagggaaaattgaccaagagattcacaaatacaacaccccaggattcactggttgcctctccagagtccagttcaaccagatcgcccctctcaaggccgccttgaggcagacaaacgcctcggctcacgtccacatccagggcgagctggtggagtccaactgcggggcctcgccgctgaccctctcccccatgtcgtccgccaccgacccctggcacctggatcacctggattcagccagtgcggattttccatataatccaggacaaggccaagctataagaaatggagtcaacagaaactcggctatcattggaggcgtcattgctgtggtgattttcaccatcctgtgcaccctggtcttcctgatccggtacatgttccgccacaagggcacctaccataccaacgaagcaaagggggcggagtcggcagagagcgcggacgccgccatcatgaacaacgaccccaacttcacagagaccattgatgaaagcaaaaaggaatggctcatttgaggggtggctacttggctatgggatagggaggagggaattactagggaggagagaaagggacaaaagcaccctgcttcatactcttgagcacatccttaaaatatcagcacaagttgggggaggcaggcaatggaatataatggaatattcttgagactgatcacaaaaaaaaaaacctttttaatatttctttatagctgagttttcccttctgtatcaaaacaaaataatacaaaaaatgcttttagagtttaagcaatggttgaaatttgtaggtactatctgtcttattttgtgtgtgtttagaggtgttctaaagacccgtggtaacagggcaagttttctacgtttttaagagcccttagaacgtgggtattttttttcttgagaaaagctaatgcacctacagatggcccccaacattctcttccttttgcttctagtcaaccttaatgggctgttacagaaactagttcgtgtttatatactatttcctttgatgtcctataagtcggaaaagaaaggggcaaagagaacctattatttgccagtttttaagcagagctcaatctatgccagctctctggcatctggggttcctgactgataccagcagttgaaggaagagagtgcatggcacctggtgtgtaacgacacaatcagcacaactggagagaggcattaaagaaccagggaaggtagtttgatttttcattgaattctacaagctaatattgttccacgtatgtagtcttagaccaatagctgtaactatcagctgcaataccatggtgaccagctgttacaaaagattttttcctgttttatctgaaacatactggatttatatatgtataagcgcctcaatggggaattagagccagatgttatgatttgtttgctctttttcttttatagtttagttatagcaaaaatatggataatttctagtgaatgcataaattaggttgcgtttcttattttgctttaaatctctggtagtttttccacccctgtgacacaatcctaatagacagtgtcctgtaaatggacacaacacaataaagtcaagttattattgctgttactctggatgatatggaaaacactgccatattttaaatcaactactccacgtgtttttccatccaatcacactgctgtgattcagggatctttcttctaagacggacacatttgaacctcaggttcatcacaaacctggtacctgttgcttcccagaggatggagaagtgtagttaatcacacctcttagtttaatctgaaatcttgacccagttatttaacaaataaatacctcattgattatatttaaaagtaatacacttcctgtaaacaaatggggacaatgcatccaaaaaatctttttaaacagattacacaaaaattatttccagaaaggctaccatttatcatcattatatttcaagcctcttatacttaataagcactttctaaaaagtcttgagatcccaccattctgaggaattcaatatgatcactttttccttctttgcctgggagaggttaagaggaggtttcgaaggtatagatgctattgttctgatggcccggctgaataaaatggaaattctagtttgttagaattatgcattctttttcaagattctcagtgtgcctaacttattggagcacatcagtttcttgggtaatggaaaacattacctagagttgccagtggcacattacaccagtacagagcacattccaaaggagacattggaccagttaattcccatacaagtcaaggtaacagaacaaaagggaatcctgatgcccttttaccattgctggttgagctcaggcactgtcatggacacccttaattttaaaaggttttaatcattcttctataaaatacatttaaaatggaaaaatacttaatatcactaaatatcagaacaatgtaacatttacaaatgacatattgaaagcaaaggctgttttatttagccaagatgattaccattaggagttactttatgtattgttgaaagcaaattttaaacatgatgttttagaagtgtttctgatttttaaacctggtttacaggtattacttctgcacttaccaaataatgccagatggaaatttattatttcttgcaattcccatgatagctctgttctttatgcattgtctcaacactttcccttttttcccaaaatgagtagagaattaaagccacccaaaacagcttctgctactaaaatgttctcatcctttctcctccctctccttttcctgccacaaaaggtgaaaaatgagatccaatcctctcaccaaaatttcaaacctaggacactggaatgactgcagggatcagtggttctcccatatcaccatcaattaagacatataggacactgtcttccttcaagagggttacaatgtggccatcagacaggaaaccaaacggtggataaagtattaagtaactaagtgccaaataaatgctggaaatcttgacctctccttgggattatgggtgtaacaaaaatccctacatctgtttatgaaggccatattcagtacattttaaatggtaaataatctgtttatgtgaagaaaaagaattaagtctttcttccaactctctccttggatagcctagcacagtgcagcctccataaccatgacattcccgcccaagctctcagtgcctaatcctgctttgtcattcacatctcacaaaatcttgacatcttacattccaatacattatcaagcaagcacaagtatgctggtagtagcctctttaaataatatgtatagacaacaacaacgacaaaaaatagactgttttaaagtttcagggaaagttggtggctgatttaaagttgtgcaggaaacatcttctgtgtatgaagcaaatgtcgatgttttgaaaaaagctaggagatgactttgaatgaatgcaaggttagtgagatcctaagctctcaaaatagcatattccctagagctcaagaaagctggtccaggaggttgaaaaagctattttgttgttaaattattttctggcccttcttaatatttaaaaatgtatttccccttgtggctttcaaccacctgctcaaaaaaagagacttgttacatgaaagttttcattaaagagctgaaaacaagaatttagagagccattcctagaaaatgtcctactgccctgcatttgacaaacaagcatcctttactaacaagagcaggaattcagaggcacaagaaaaagcattggcatgagccaaagagtctgtcttaatgttacttttgaaaatctgctgagcggccaccatatgcaggctgagagctgggcacaggcgaagccattggaagcacttcaggaacaagcacacagctgtgggacttgaacatgcaagtgttcaggttgtgtcaagaagcttttctttccttctatgatggaatctgttcttttctatcctacttttttctctcttcctctcctcaccacattataccctgctcttacgcagtaaacgttttaatggcccgtttatgtctcatgcctccaaacaacactgaatttgaaaccccccattttttcttttcaccaccctgttgagcaattttcccaaaaaaagggcagcaattattaaattgaattcaagtaagccagccaaagataggtcctaaattgctagtcccagtagaaccacctgatcctaaaccagtgcgaaacaaacagtaacaatgtccccagctgacttcagctaagaaccaatggctcctacccccgccccgcttttttttgttgttttttgttttgttttgagacggagtcttgctctgtcccccaggctggagtgcactggcgcaatctcgggctcactgcaacctcctcctcctcccacattgaggcgattctcctgcctcagcctcccaagtagctgggattacaggcacccgccatcacacccagctaatttttttttttttttgtattattagtagaagccaggtttcaccatgttggccagggtggtctcgaactcctgacctcaagtgatccgtccacctcggccttgcaaattgctgggattacaggtgtgagccaccgtgccgagccagccccattttttaaatgatgttttggttaagagtggaccatgagaattagctgacagcatcccctttctctctccctgccttggtgggaccctccctgtgtgaccttggtcaagtcctcgaacttttgtcccgtatttaagatggagctgttttacctacttcataagacagttgcgaggtgccattgattcttgactgcaaaataccttgaaacccttatataaagactgaagtcaacggagcctagtgaaagacttactttgtggcttgtggttgaaagtcacatcaaaagacaaatgtggccacgttcaggaattggagacttactggcatggctctacagctgctcagttattaatcatgcagactaacctgtcaacactgggagatgcaacatagcaaaaggacagagaaattagaattttttgtgcagaaagccctaaattcccacctgaatgtaacttacagctcccttacctactctcacacatgccctcaaacatgctagattggcttatacataggccaacacaaaatacaaacgtgacgtgttcatgtagcctagtggctatatgcctattctccatgtaccctgcatggtagtgctgcaaactttaaagtacatttctttcacagcagtattttttttcataagtggcatataaatgtcattcaatgaaatggggaaatcacgttgagaagttggtctgtcatctcccattgagcaaagactggcaggagataataaaaataaatatgggcacacatgtattaatatacagcacgcatttacaagtttattttccagataaaattgtgctataagaacagctctaccaagacagtctgcaccatttccaagtctcagttaatttacagcaactgctgctttcggagatggctgtgaaaatatggaagttcctctcaagtaggccaagaaacagttctagattttactaagttttattttgtcaggttttttaaattttttcagtgagcgtggtgactgcagaggttagtgctgtgaaaagctgggctaaatattctttctgtaaagtcaaacaggattccatcccctgtgaaataacacaaaatttcactctctaaaagcaacagcatgtaaactagaatgaaagaaggaaattatgtacgtatgcctaatattctttgtgaatgtctttcatttaactaaaattatattagaaaccagattgataaataaaaaattcaaagtagttttaattatcctaaaa

SEQ ID NO: 141 - DNA, 3093 bp, Homo sapiens
cttttgctttcaaacgaggccagggcagggcagaagggttttgacagccagaggggtacggtaaggaggaggaagaggaggaggaggcggaggaggaggaggagccgaggagggaaccgagaagggaagagaagggagggcttccctccgcctcgctcgccgcccgggctcacaggagctggcggcggcggcggcggcggcggcgtctcctgctctccgcggctgttgctgctgctcgcgctccgccgcccgggagatgcttcctcgcgcggcgcagcgctgaggccgtgcgtgcgccccggctgcgctgcgcgctccccacatacacaagctctccatgtgagctgacaggcgagtggaaacccctcgagtcacgctgcccggcggcggagggagcgctcgcccgcagtggcaacagctgcaccaccgtccccgtcgctctgccttcctcttctgcagcctctgctcttctgattacctccctcccccgtcctttggtgatttttttttttcaagaaggagagggcggggtaggtgtccgttccctcccctcttccccctcctttgccttcttggtttgaatttcctcccccggcgttgcactggcacacagtgcaagaggcaatacccgcacggagggagaacgaaggctgagactcccctgccgctccaagcccggaagaactggagcctggaggggggtgaggggagaagaggaagcgggaggggcttggcttcctcgcgtatttgaggacagcccatctcccttcaagaaccctacggagagtcggactgcatctccgcagcgagctcttggagcgccgccggccgggaggcgaaggatgcaggcggctccgcgcgccggctgcggggcagcgctcctgctgtggattgtcagcagctgcctctgcagagcctggacggctccctccacgtcccaaaaatgtgatgagccacttgtctctggactcccccatgtggctttcagcagctcctcctccatctctggtagctattctcccggctatgccaagataaacaagagaggaggtgctgggggatggtctccatcagacagcgaccattatcaatggcttcaggttgactttggcaatcggaagcagatcagtgccattgcaacccaaggaaggtatagcagctcagattgggtgacccaataccggatgctctacagcgacacagggagaaactggaaaccctatcatcaagatgggaatatctgggcatttcccggaaacattaactctgacggtgtggtccggcacgaattacagcatccgattattgcccgctatgtgcgcatagtgcctctggattggaatggagaaggtcgcattggactcagaattgaagtttatggctgttcttactgggctgatgttatcaactttgatggccatgttgtattaccatatagattcagaaacaagaagatgaaaacactgaaagatgtcattgccttgaactttaagacgtctgaaagtgaaggagtaatcctgcacggagaaggacagcaaggagattacattaccttggaactgaaaaaagccaagctggtcctcagtttaaacttaggaagcaaccagcttggccccatatatggccacacatcagtgatgacaggaagtttgctggatgaccaccactggcactctgtggtcattgagcgccaggggcggagcattaacctcactctggacaggagcatgcagcacttccgtaccaatggagagtttgactacctggacttggactatgagataacctttggaggcatccctttctctggcaagcccagctccagcagtagaaagaatttcaaaggctgcatggaaagcatcaactacaatggcgtcaacattactgatcttgccagaaggaagaaattagagccctcaaatgtgggaaatttgagcttttcttgtgtggaaccctatacggtgcctgtctttttcaacgctacaagttacctggaggtgcccggacggcttaaccaggacctgttctcagtcagtttccagtttaggacatggaaccccaatggtctcctggtcttcagtcactttgcggataatttgggcaatgtggagattgacctcactgaaagcaaagtgggtgttcacatcaacatcacacagaccaagatgagccaaatcgatatttcctcaggttctgggttgaatgatggacagtggcacgaggttcgcttcctagccaaggaaaattttgctattctcaccatcgatggagatgaagcatcagcagttcgaactaatagtccccttcaagttaaaactggcgagaagtacttttttggaggttttctgaaccagatgaataactcaagtcactctgtccttcagccttcattccaaggatgcatgcagctcattcaagtggacgatcaacttgtaaatttatacgaagtggcacaaaggaagccgggaagtttcgcgaatgtcagcattgacatgtgtgcgatcatagacagatgtgtgcccaatcactgtgagcatggtggaaagtgctcgcaaacatgggacagcttcaaatgcacttgtgatgagacaggatacagtggggccacctgccacaactctatctacgagccttcctgtgaagcctacaaacacctaggacagacatcaaattattactggatagatcctgatggcagcggacctctggggcctctgaaagtttactgcaacatgacagaggacaaagtgtggaccatagtgtctcatgacttgcagatgcagacgcctgtggtcggctacaacccagaaaaatactcagtgacacagctcgtttacagcgcctccatggaccagataagtgccatcactgacagtgccgagtactgcgagcagtatgtctcctatttctgcaagatgtcaagattgttgaacaccccaggcctactaatctgcagaatagctgacgcaaggaaaaggagtggttgagacagcaagttccttgtattgttatattttgcatatgtcaaaacaagaaagaacacaatttaataaaaatctttaatttgtgttttaaagaagctaatgtttactg

SEQ ID NO: 142 - DNA, 4087 bp, Homo sapiens
tctcccgagaacctcaccccccggtattcccctcaccctgaagtaagggagtctccctcttcccctcagctcctaaccaaggtgctcagtaccgcggctagggtgcccagcgggaggctgggtagttaccggaggaggcagagccggtcgcacgcctgggtcccagcggaggcccagtcgactctcgacccgggccccagcctccttgcgtggcgaaggtcgtgcctcaggtctcctggcgaacctggccgcccggaagcggagagtgactcctccccttcgtcccctcggtgcccgccaggcggcgccgtcggctgggcccggattcccctgcggcttcgatccctttccactgggtattgagattggcgaggggagaggcgcagaaacggcgtgatgcagaaagcctcagtgttgctcttcctggcctgggtctgcttcctcttctacgctggcattgccctcttcaccagtggcttcctgctcacccgtttggagctcaccaaccatagcagctgccaagagcccccaggccctgggtccctgccatgggggagccaagggaaacctggggcctgctggatggcttcccgattttcgcgggttgtgttggtgctgatagatgctctgcgatttgacttcgcccagccccagcattcacacgtgcctagagagcctcctgtctccctacccttcctgggcaaactaagctccttgcagaggatcctggagattcagccccaccatgcccggctctaccgatctcaggttgaccctcctaccaccaccatgcagcgcctcaaggccctcaccactggctcactgcctacctttattgatgctggtagtaacttcgccagccacgccatagtggaagacaatctcattaagcagctcaccagtgcaggaaggcgtgtagtcttcatgggagatgatacctggaaagaccttttccctggtgctttctccaaagctttcttcttcccatccttcaatgtcagagacctagacacagtggacaatggcatcctggaacacctctaccccaccatggacagtggtgaatgggacgtgctgattgctcacttcctgggtgtggaccactgtggccacaagcatggccctcaccaccctgaaatggccaagaaacttagccagatggaccaggtgatccagggacttgtggagcgtctggagaatgacacactgctggtagtggctggggaccatgggatgaccacaaatggagaccatggaggggacagtgagctggaggtctcagctgctctctttctgtatagccccacagcagtcttccccagcaccccaccagaggagccagaggtgattcctcaagttagccttgtgcccacgctggccctgctgctgggcctgcccatcccatttgggaatatcggggaagtgatggctgagctattctcagggggtgaggactcccagccccactcctctgctttagcccaagcctcagctctccatctcaatgctcagcaggtgtcccgatttcttcatacctactcagctgctactcaggaccttcaagctaaggagcttcatcagctgcagaacctcttctccaaggcctctgctgactaccagtggcttctccagagccccaagggggctgaggcgacactgccgactgtgattgctgagctgcagcagttcctgcggggagctcgggccatgtgcatcgagtcttgggctcgtttctctctggtccgcatggcggggggtactgctctcttggctgcttcctgctttatctgcctgctggcatctcagtgggcaatatccccaggctttccattctgccctctactcctgacacctgtggcctggggcctggttggggccatagcgtatgctggactcctgggaactattgagctgaagctagatctagtgcttctaggggctgtggctgcagtgagctcattcctcccttttctgtggaaagcctgggctggctgggggtccaagaggcccctggcaaccctgtttcccatccctgggcccgtcctgttactcctgctgtttcgcttggctgtgttcttctctgatagttttgttgtagctgaggccagggccacccccttccttttgggctcattcatcctgctcctggttgtccagcttcactgggagggccagctgcttccacctaagctactcacaatgccccgccttggcacttcagccacaacaaaccccccacggcacaatggtgcatatgccctgaggcttggaattgggttgcttttatgtacaaggctagctgggctttttcatcgttgccctgaagagacacctgtttgccactcctctccctggctgagtcctctggcatccatggtgggtggtcgagccaagaatttgtggtatggagcttgtgtggcggcgctggtggccctgttagctgccgtgcgcttgtggcttcgccgctatggtaatctcaagagccccgagccacccatgctctttgtgcgctggggactgcccctaatggcattgggtactgctgcctactgggcattggcgtcgggggcagatgaggctcccccccgtctccgggtcctggtctctggggcatccatggtgctgcctcgggctgtagcagggctggctgcttcagggctcgcgctgctgctctggaagcctgtgacagtgctggtgaaggctggggcaggcgctccaaggaccaggactgtcctcactcccttctcaggcccccccacttctcaagctgacttggattatgtggtccctcaaatctaccgacacatgcaggaggagttccggggccggttagagaggaccaaatctcagggtcccctgactgtggctgcttatcagttggggagtgtctactcagctgctatggtcacagccctcaccctgttggccttcccacttctgctgttgcatgcggagcgcatcagccttgtgttcctgcttctgtttctgcagagcttccttctcctacatctgcttgctgctgggatacccgtcaccacccctggtccttttactgtgccatggcaggcagtctcggcttgggccctcatggccacacagaccttctactccacaggccaccagcctgtctttccagccatccattggcatgcagccttcgtgggattcccagagggtcatggctcctgtacttggctgcctgctttgctagtgggagccaacacctttgcctcccacctcctctttgcagtaggttgcccactgctcctgctctggcctttcctgtgtgagagtcaagggctgcggaagagacagcagcccccagggaatgaagctgatgccagagtcagacccgaggaggaagaggagccactgatggagatgcggctccgggatgcgcctcagcacttctatgcagcactgctgcagctgggcctcaagtacctctttatccttggtattcagattctggcctgtgccttggcagcctccatccttcgcaggcatctcatggtctggaaagtgtttgcccctaagttcatatttgaggctgtgggcttcattgtgagcagcgtgggacttctcctgggcatagctttggtgatgagagtggatggtgctgtgagctcctggttcaggcagctatttctggcccagcagaggtagcctagtctgtgattactggcacttggctacagagagtgcttgagaacagtgtagcctggcctgtacaggtactggatgatctgcaagacaggctcagccatactcttactatcatgcagccaggggccgctgacatctaggacttcattattctataattcaggaccacagtggagtatgatccctaactcctgatttggatgcatctgagggacaaggggggcggtctccgaagtggaataaaataggccgggcgtggtgacttgcacctataatcccagcactttgggaggcagaggtgggaggattgcttggtcccaggagttcaagaccagcctgtggaacataacaagaccccgtctctactatttaaaaaaaagtgtaataaaatgataatataattaaaaaaaaaaaaaaaaaa

SEQ ID NO: 143 - DNA, 2482 bp, Homo sapiens
cgcaggcgccgccgccgccgcacttccgggtgccattgcaggatgcagaaagcctcagtgttgctcttcctggcctgggtctgcttcctcttctacgctggcattgccctcttcaccagtggcttcctgctcacccgtttggagctcaccaaccatagcagctgccaagagcccccaggccctgggtccctgccatgggggagccaagggaaacctggggcctgctggatggcttcccgattttcgcgggttgtgttggtgctgatagatgctctgcgatttgacttcgcccagccccagcattcacacgtgcctagagagcctcctgtctccctacccttcctgggcaaactaagctccttgcagaggatcctggagattcagccccaccatgcccggctctaccgatctcaggttgaccctcctaccaccaccatgcagcgcctcaaggccctcaccactggctcactgcctacctttattgatgctggtagtaacttcgccagccacgccatagtggaagacaatctcattaagcagctcaccagtgcaggaaggcgtgtagtcttcatgggagatgatacctggaaagaccttttccctggtgctttctccaaagctttcttcttcccatccttcaatgtcagagacctagacacagtggacaatggcatcctggaacacctctaccccaccatggacagtggtgaatgggacgtgctgattgctcacttcctgggtgtggaccactgtggccacaagcatggccctcaccaccctgaaatggccaagaaacttagccagatggaccaggtgatccagggacttgtggagcgtctggagaatgacacactgctggtagtggctggggaccatgggatgaccacaaatggagaccatggaggggacagtgagctggaggtctcagctgctctctttctgtatagccccacagcagtcttccccagcaccccaccagaggagccagaggtgattcctcaagttagccttgtgcccacgctggccctgctgctgggcctgcccatcccatttgggaatatcggggaagtgatggctgagctattctcagggggtgaggactcccagccccactcctctgctttagcccaagcctcagctctccatctcaatgctcagcaggtgtcccgatttcttcatacctactcagctgctactcaggaccttcaagctaaggagcttcatcagctgcagaacctcttctccaaggcctctgctgactaccagtggcttctccagagccccaagggggctgaggcgacactgccgactgtgattgctgagctgcagcagttcctgcggggagctcgggccatgtgcatcgagtcttgggctcgtttctctctgagcttccttctcctacatctgcttgctgctgggatacccgtcaccacccctggtccttttactgtgccatggcaggcagtctcggcttgggccctcatggccacacagaccttctactccacaggccaccagcctgtctttccagccatccattggcatgcagccttcgtgggattcccagagggtcatggctcctgtacttggctgcctgctttgctagtgggagccaacacctttgcctcccacctcctctttgcagtaggttgcccactgctcctgctctggcctttcctgtgtgagagtcaagggctgcggaagagacagcagcccccagggaatgaagctgatgccagagtcagacccgaggaggaagaggagccactgatggagatgcggctccgggatgcgcctcagcacttctatgcagcactgctgcagctgggcctcaagtacctctttatccttggtattcagattctggcctgtgccttggcagcctccatccttcgcaggcatctcatggtctggaaagtgtttgcccctaagttcatatttgaggctgtgggcttcattgtgagcagcgtgggacttctcctgggcatagctttggtgatgagagtggatggtgctgtgagctcctggttcaggcagctatttctggcccagcagaggtagcctagtctgtgattactggcacttggctacagagagtgcttgagaacagtgtagcctggcctgtacaggtactggatgatctgcaagacaggctcagccatactcttactatcatgcagccaggggccgctgacatctaggacttcattattctataattcaggaccacagtggagtatgatccctaactcctgatttggatgcatctgagggacaaggggggcggtctccgaagtggaataaaataggccgggcgtggtgacttgcacctataatcccagcactttgggaggcagaggtgggaggattgcttggtcccaggagttcaagaccagcctgtggaacataacaagaccccgtctctactatttaaaaaaaagtgtaataaaatgataatataattaaaaaaaaaaaaaaaaaa

SEQ ID NO: 144 - DNA, 2934 bp, Homo sapiens
tctcccgagaacctcaccccccggtattcccctcaccctgaagtaagggagtctccctcttcccctcagctcctaaccaaggtgctcagtaccgcggctagggtgcccagcgggaggctgggtagttaccggaggaggcagagccggtcgcacgcctgggtcccagcggaggcccagtcgactctcgacccgggccccagcctccttgcgtggcgaaggtcgtgcctcaggtctcctggcgaacctggccgcccggaagcggagagtgactcctccccttcgtcccctcggtgcccgccaggcggcgccgtcggctgggcccggattcccctgcggcttcgatccctttccactgggtattgagattggcgaggggagaggcgcagaaacggcgtactctagtgcagtggttcaatctcggctcactgcaacctccgcctccccgattcaagcgattctcctgcgtcagcctccccagtagctgagactacaggatgcagaaagcctcagtgttgctcttcctggcctgggtctgcttcctcttctacgctggcattgccctcttcaccagtggcttcctgctcacccgtttggagctcaccaaccatagcagctgccaagagcccccaggccctgggtccctgccatgggggagccaagggaaacctggggcctgctggatggcttcccgattttcgcgggttgtgttggtgctgatagatgctctgcgatttgacttcgcccagccccagcattcacacgtgcctagagagcctcctgtctccctacccttcctgggcaaactaagctccttgcagaggatcctggagattcagccccaccatgcccggctctaccgatctcaggttgaccctcctaccaccaccatgcagcgcctcaaggccctcaccactggctcactgcctacctttattgatgctggtagtaacttcgccagccacgccatagtggaagacaatctcattaagcagctcaccagtgcaggaaggcgtgtagtcttcatgggagatgatacctggaaagaccttttccctggtgctttctccaaagctttcttcttcccatccttcaatgtcagagacctagacacagtggacaatggcatcctggaacacctctaccccaccatggacagtggtgaatgggacgtgctgattgctcacttcctgggtgtggaccactgtggccacaagcatggccctcaccaccctgaaatggccaagaaacttagccagatggaccaggtgatccagggacttgtggagcgtctggagaatgacacactgctggtagtggctggggaccatgggatgaccacaaatggagaccatggaggggacagtgagctggaggtctcagctgctctctttctgtatagccccacagcagtcttccccagcaccccaccagaggagccagaggtgattcctcaagttagccttgtgcccacgctggccctgctgctgggcctgcccatcccatttgggaatatcggggaagtgatggctgagctattctcagggggtgaggactcccagccccactcctctgctttagcccaagcctcagctctccatctcaatgctcagcaggtgtcccgatttcttcatacctactcagctgctactcaggaccttcaagctaaggagcttcatcagctgcagaacctcttctccaaggcctctgctgactaccagtggcttctccagagccccaagggggctgaggcgacactgccgactgtgattgctgagctgcagcagttcctgcggggagctcgggccatgtgcatcgagtcttgggctcgtttctctctgagcttccttctcctacatctgcttgctgctgggatacccgtcaccacccctggtccttttactgtgccatggcaggcagtctcggcttgggccctcatggccacacagaccttctactccacaggccaccagcctgtctttccagccatccattggcatgcagccttcgtgggattcccagagggtcatggctcctgtacttggctgcctgctttgctagtgggagccaacacctttgcctcccacctcctctttgcagtaggttgcccactgctcctgctctggcctttcctgtgtgagagtcaagggctgcggaagagacagcagcccccagggaatgaagctgatgccagagtcagacccgaggaggaagaggagccactgatggagatgcggctccgggatgcgcctcagcacttctatgcagcactgctgcagctgggcctcaagtacctctttatccttggtattcagattctggcctgtgccttggcagcctccatccttcgcaggcatctcatggtctggaaagtgtttgcccctaagttcatatttgaggctgtgggcttcattgtgagcagcgtgggacttctcctgggcatagctttggtgatgagagtggatggtgctgtgagctcctggttcaggcagctatttctggcccagcagaggtagcctagtctgtgattactggcacttggctacagagagtgcttgagaacagtgtagcctggcctgtacaggtactggatgatctgcaagacaggctcagccatactcttactatcatgcagccaggggccgctgacatctaggacttcattattctataattcaggaccacagtggagtatgatccctaactcctgatttggatgcatctgagggacaaggggggcggtctccgaagtggaataaaataggccgggcgtggtgacttgcacctataatcccagcactttgggaggcagaggtgggaggattgcttggtcccaggagttcaagaccagcctgtggaacataacaagaccccgtctctactatttaaaaaaaagtgtaataaaatgataatataattaaaaaaaaaaaaaaaaaa

SEQ ID NO: 145 - DNA, 6887 bp, Homo sapiens
acttccgggtgccattgcaggatgcagaaagcctcagtgttgctcttcctggcctgggtctgcttcctcttctacgctggcattgccctcttcaccagtggcttcctgctcacccgtttggagctcaccaaccatagcagctgccaagagcccccaggccctgggtccctgccatgggggagccaagggaaacctggggcctgctggatggcttcccgattttcgcgggttgtgttggtgctgatagatgctctgcgatttgacttcgcccagccccagcattcacacgtgcctagagagcctcctgtctccctacccttcctgggcaaactaagctccttgcagaggatcctggagattcagccccaccatgcccggctctaccgatctcaggttgaccctcctaccaccaccatgcagcgcctcaaggccctcaccactggctcactgcctacctttattgatgctggtagtaacttcgccagccacgccatagtggaagacaatctcattaagcagctcaccagtgcaggaaggcgtgtagtcttcatgggagatgatacctggaaagaccttttccctggtgctttctccaaagctttcttcttcccatccttcaatgtcagagacctagacacagtggacaatggcatcctggaacacctctaccccaccatggacagtggtgaatgggacgtgctgattgctcacttcctgggtgtggaccactgtggccacaagcatggccctcaccaccctgaaatggccaagaaacttagccagatggaccaggtgatccagggacttgtggagcgtctggagaatgacacactgctggtagtggctggggaccatgggatgaccacaaatggagaccatggaggggacagtgagctggaggtctcagctgctctctttctgtatagccccacagcagtcttccccagcaccccaccagaggagccagaggtgattcctcaagttagccttgtgcccacgctggccctgctgctgggcctgcccatcccatttgggaatatcggggaagtgatggctgagctattctcagggggtgaggactcccagccccactcctctgctttagcccaagcctcagctctccatctcaatgctcagcaggtgtcccgatttcttcatacctactcagctgctactcaggaccttcaagctaaggagcttcatcagctgcagaacctcttctccaaggcctctgctgactaccagtggcttctccagagccccaagggggctgaggcgacactgccgactgtgattgctgagctgcagcagttcctgcggggagctcgggccatgtgcatcgagtcttgggctcgtttctctctggtccgcatggcggggggtactgctctcttggctgcttcctgctttatctgcctgctggcatctcagtgggcaatatccccaggctttccattctgccctctactcctgacacctgtggcctggggcctggttggggccatagcgtatgctggactcctgggaactattgagctgaagctagatctagtgcttctaggggctgtggctgcagtgagctcattcctcccttttctgtggaaagcctgggctggctgggggtccaagaggcccctggcaaccctgtttcccatccctgggcccgtcctgttactcctgctgtttcgcttggctgtgttcttctctgatagttttgttgtagctgaggccagggccacccccttccttttgggctcattcatcctgctcctggttgtccagcttcactgggagggccagctgcttccacctaagctactcacaatgccccgccttggcacttcagccacaacaaaccccccacggcacaatggtgcatatgccctgaggcttggaattgggttgcttttatgtacaaggctagctgggctttttcatcgttgccctgaagagacacctgtttgccactcctctccctggctgagtcctctggcatccatggtgggtggtcgagccaagaatttgtggtatggagcttgtgtggcggcgctggtggccctgttagctgccgtgcgcttgtggcttcgccgctatggtaatctcaagagccccgagccacccatgctctttgtgcgctggggactgcccctaatggcattgggtactgctgcctactgggcattggcgtcgggggcagatgaggctcccccccgtctccgggtcctggtctctggggcatccatggtgctgcctcgggctgtagcagggctggctgcttcagggctcgcgctgctgctctggaagcctgtgacagtgctggtgaaggctggggcaggcgctccaaggaccaggactgtcctcactcccttctcaggcccccccacttctcaagctgacttggattatgtggtccctcaaatctaccgacacatgcaggaggagttccggggccggttagagaggaccaaatctcagggtcccctgactgtggctgcttatcagttggggagtgtctactcagctgctatggtcacagccctcaccctgttggccttcccacttctgctgttgcatgcggagcgcatcagccttgtgttcctgcttctgtttctgcagagcttccttctcctacatctgcttgctgctgggatacccgtcaccacccctggtccttttactgtgccatggcaggcagtctcggcttgggccctcatggccacacagaccttctactccacaggccaccagcctgtctttccagccatccattggcatgcagccttcgtgggattcccagagggtcatggctcctgtacttggctgcctgctttgctagtgggagccaacacctttgcctcccacctcctctttgcagtaggttgcccactgctcctgctctggcctttcctgtgtgagagtcaagggctgcggaagagacagcagcccccagggaatgaagctgatgccagagtcagacccgaggaggaagaggagccactgatggagatgcggctccgggatgcgcctcagcacttctatgcagcactgctgcagctgggcctcaagtacctctttatccttggtattcagattctggcctgtgccttggcagcctccatccttcgcaggcatctcatggtctggaaagtgtttgcccctaagttcatatttgaggctgtgggcttcattgtgagcagcgtgggacttctcctgggcatagctttggtgatgagagtggatggtgctgtgagctcctggttcaggcagctatttctggcccagcagaggtagcctagtctgtgattactggcacttggctacagagagtgcttgagaacagtgtagcctggcctgtacaggtactggatgatctgcaagacaggctcagccatactcttactatcatgcagccaggggccgctgacatctaggacttcattattctataattcaggaccacagtggagtatgatccctaactcctgatttggatgcatctgagggacaaggggggcggtctccgaagtggaataaaataggccgggcgtggtgacttgcacctataatcccagcactttgggaggcagaggtgggaggattgcttggtcccaggagttcaagaccagcctgtggaacataacaagaccccgtctctactatttaaaaaaaagtgtaataaaatgataatataattatgtgtgtctgagatgtgggggagccccactgttctataggggttgtgaggaggatcagtctctcctgccaccaggcacagatgagatcagtcatcttaggaaagcctggctgcacctgagaacctttatgaagtggttggagttgtctgaattcactgcctccacctcttcccaaatcaatcctattatcccaccgctattttcctttgccatgcaacacattttgttaagttcctgttctttgtctgataaagagagaagactgagaagacaagcccaggcatcatgcagcaccgactttaactgtctgaagccccaaatagtgctatgcccccgctccactgggccttttcactatagaacaccctttgcccttcccttctgtggaagcctcccttgtttcccaacctgtgccactctttatcagatctacatgcccatcttatgtagcattccaccttgtcccattcattattcctgacttgaagccaaaattgtgtgaatccactggttcttttctcatgtgtatgttttgtgccctctgttcaccccagcactcctgtcatgtttgaaatgctggcatgaaatcctcctagagatgtccatcaaaagagttgggaagaggccctggagagaagcatcaggactgggatttgaggtttgacagtacctagaacaagaggagctgataccactgaaaaacagaacagatgttaaaaccatgggatagcacctacttttagctggcataaagtagagaagctgagtagtagtggttgtgaagtataaacgttcactgctgtggtaggtagctaagggaagaattgaaattatttttattgttactatcattttaaagacatatttttgctctattgtccaggctggagggcagtggtgcaatcatagctccctgtagtttcaaactcctgggctcaagtgatccatctcagcctcctcagtatctgggaccatgcctggctaatttttaaatttctgtacagacagagtcttgctacattgcccaggctgttcgtgaactcctggcctcaagcgatccttccaccttggcctctcaaagcactaggattacaggtgtgagccacagcacctggctaagttcagattattaatggccagtggtccctagtgttacagatgccaaatagtaagatgatgaaaagtatggttcagctgggtgtggtgcctcatgcctgtaatctcagcactttggggagccaaggcgggtggatcacctgaggtcaggagtttgagaccagcctggccaacatggcaaaaccccatctctactaaaaatacaaaaattagccaggtgtggtggtgtgcacctgtaattccggctactcaggaggctgaggcaggagaatcgcttgaacctgggaggcagaggttacagtgagccaagatcacgctactgcactccagcctgggagacagagccagactctctctcaaaaaaaaaaaaaaaaaaaaagggataggttgttaaccatggtagaaagaggtttaataatgcaagggggtgaagttggccccagctggcctgtaagatgaattagaaaaacgcttctccccaagtctggtggacacaactcccaagcatagttcggtgagcaaatggtgtctttttgagaaaggggaaaaaaaccaaaacaaaaacctttcctccatccctagcacccatggaaggattttaggccctagttcctccacttctcagccaggtaccctgcactttttgcagtagcctccttgcctggagcctaaggctaatttgctgatctgccaaccactgtctattctttctcctggtgtatctataagattctattagataaagacattagtacattgatttacgctattaaaaattatttctagccaggcactgtggcatgtccctatagtcccagctacttgggaggcagaggtgggaggatcacttgaggatagcaagactccgtctctacaaaaataaaaaaattagccaggcatggtcccagctatgtagaggctgaggtggatcacttgagcccaggagttagaggctgtagtgcacaatgaatgcacctgtgaatagccactgcactccagcctgggcaacatagatcctctctcttttaaaaagaaaaattatcttatccctcccttttccttgaaatcagagtccattccacactaactcaatgattctttttttttttcctttaattttttgtagaggtgggggtcttgctgtcttgcctaggctggtcttgaactcctggcctcaagccatcctcctgcctcgacctcctcaagtgttgggattgcaggtgtgagccattgcacccagccctgattcttttttaaaaaagctttattgaaatgcaatttaccataaaatttacccatgtaaggtgtaagatttaatggtttttgtgtatttacagaattgtacaaccatcaccagaatcaattttagaacattttcaccaaccccaaaagaaaatctactgtttagatatcaccctccaatcctccccaacccctggctagcactaatctgctgtttctctatatatttgcccattttggatatttcacagaaatgggatcataataatatgtggtcttttgtgactggcatcttccacttagtataatgttttccggtttcatctatatagcagcacacagcagtacttcattctttttcttttttaaaattgaagtaaaattcatataaaattcaccattttaaagtgtataatttagtggccgttagtacattcacaacgttgtacaattatcatcattatcaattccagaatgttttcattaccccaaaaagaaaccctgtacccttaagcagtcattccttctcttctcccccttaactcctggtaccactaatttgttttctgtctctatagatttgcctgttctggacatttcatataaatgggctcatacagtagtgcctttttctgtcttatcttcctttactcagcctaatgttttcagagttcatctatgttgtagcatgtattggtacttcattcctctttatggccaaataatactctattgcatggatataccacattttgtttatccattcatccattgatagccatttggatttacacattttggttattatgtaatgctgctataaacatttgtgta

SEQ ID NO: 146 - DNA, 7379 bp, Homo sapiens
cattgcaggtgagccagggtctcccgagaacctcaccccccggtattcccctcaccctgaagtaagggagtctccctcttcccctcagctcctaaccaaggtgctcagtaccgcggctagggtgcccagcgggaggctgggtagttaccggaggaggcagagccggtcgcacgcctgggtcccagcggaggcccagtcgactctcgacccgggccccagcctccttgcgtggcgaaggtcgtgcctcaggtctcctggcgaacctggccgcccggaagcggagagtgactcctccccttcgtcccctcggtgcccgccaggcggcgccgtcggctgggcccggattcccctgcggcttcgatccctttccactgggtattgagattggcgaggggagaggcgcagaaacggcgtactctagtgcagtggttcaatctcggctcactgcaacctccgcctccccgattcaagcgattctcctgcgtcagcctccccagtagctgagactacaggatgcagaaagcctcagtgttgctcttcctggcctgggtctgcttcctcttctacgctggcattgccctcttcaccagtggcttcctgctcacccgtttggagctcaccaaccatagcagctgccaagagcccccaggccctgggtccctgccatgggggagccaagggaaacctggggcctgctggatggcttcccgattttcgcgggttgtgttggtgctgatagatgctctgcgatttgacttcgcccagccccagcattcacacgtgcctagagagcctcctgtctccctacccttcctgggcaaactaagctccttgcagaggatcctggagattcagccccaccatgcccggctctaccgatctcaggttgaccctcctaccaccaccatgcagcgcctcaaggccctcaccactggctcactgcctacctttattgatgctggtagtaacttcgccagccacgccatagtggaagacaatctcattaagcagctcaccagtgcaggaaggcgtgtagtcttcatgggagatgatacctggaaagaccttttccctggtgctttctccaaagctttcttcttcccatccttcaatgtcagagacctagacacagtggacaatggcatcctggaacacctctaccccaccatggacagtggtgaatgggacgtgctgattgctcacttcctgggtgtggaccactgtggccacaagcatggccctcaccaccctgaaatggccaagaaacttagccagatggaccaggtgatccagggacttgtggagcgtctggagaatgacacactgctggtagtggctggggaccatgggatgaccacaaatggagaccatggaggggacagtgagctggaggtctcagctgctctctttctgtatagccccacagcagtcttccccagcaccccaccagaggagccagaggtgattcctcaagttagccttgtgcccacgctggccctgctgctgggcctgcccatcccatttgggaatatcggggaagtgatggctgagctattctcagggggtgaggactcccagccccactcctctgctttagcccaagcctcagctctccatctcaatgctcagcaggtgtcccgatttcttcatacctactcagctgctactcaggaccttcaagctaaggagcttcatcagctgcagaacctcttctccaaggcctctgctgactaccagtggcttctccagagccccaagggggctgaggcgacactgccgactgtgattgctgagctgcagcagttcctgcggggagctcgggccatgtgcatcgagtcttgggctcgtttctctctggtccgcatggcggggggtactgctctcttggctgcttcctgctttatctgcctgctggcatctcagtgggcaatatccccaggctttccattctgccctctactcctgacacctgtggcctggggcctggttggggccatagcgtatgctggactcctgggaactattgagctgaagctagatctagtgcttctaggggctgtggctgcagtgagctcattcctcccttttctgtggaaagcctgggctggctgggggtccaagaggcccctggcaaccctgtttcccatccctgggcccgtcctgttactcctgctgtttcgcttggctgtgttcttctctgatagttttgttgtagctgaggccagggccacccccttccttttgggctcattcatcctgctcctggttgtccagcttcactgggagggccagctgcttccacctaagctactcacaatgccccgccttggcacttcagccacaacaaaccccccacggcacaatggtgcatatgccctgaggcttggaattgggttgcttttatgtacaaggctagctgggctttttcatcgttgccctgaagagacacctgtttgccactcctctccctggctgagtcctctggcatccatggtgggtggtcgagccaagaatttgtggtatggagcttgtgtggcggcgctggtggccctgttagctgccgtgcgcttgtggcttcgccgctatggtaatctcaagagccccgagccacccatgctctttgtgcgctggggactgcccctaatggcattgggtactgctgcctactgggcattggcgtcgggggcagatgaggctcccccccgtctccgggtcctggtctctggggcatccatggtgctgcctcgggctgtagcagggctggctgcttcagggctcgcgctgctgctctggaagcctgtgacagtgctggtgaaggctggggcaggcgctccaaggaccaggactgtcctcactcccttctcaggcccccccacttctcaagctgacttggattatgtggtccctcaaatctaccgacacatgcaggaggagttccggggccggttagagaggaccaaatctcagggtcccctgactgtggctgcttatcagttggggagtgtctactcagctgctatggtcacagccctcaccctgttggccttcccacttctgctgttgcatgcggagcgcatcagccttgtgttcctgcttctgtttctgcagagcttccttctcctacatctgcttgctgctgggatacccgtcaccacccctggtccttttactgtgccatggcaggcagtctcggcttgggccctcatggccacacagaccttctactccacaggccaccagcctgtctttccagccatccattggcatgcagccttcgtgggattcccagagggtcatggctcctgtacttggctgcctgctttgctagtgggagccaacacctttgcctcccacctcctctttgcagtaggttgcccactgctcctgctctggcctttcctgtgtgagagtcaagggctgcggaagagacagcagcccccagggaatgaagctgatgccagagtcagacccgaggaggaagaggagccactgatggagatgcggctccgggatgcgcctcagcacttctatgcagcactgctgcagctgggcctcaagtacctctttatccttggtattcagattctggcctgtgccttggcagcctccatccttcgcaggcatctcatggtctggaaagtgtttgcccctaagttcatatttgaggctgtgggcttcattgtgagcagcgtgggacttctcctgggcatagctttggtgatgagagtggatggtgctgtgagctcctggttcaggcagctatttctggcccagcagaggtagcctagtctgtgattactggcacttggctacagagagtgcttgagaacagtgtagcctggcctgtacaggtactggatgatctgcaagacaggctcagccatactcttactatcatgcagccaggggccgctgacatctaggacttcattattctataattcaggaccacagtggagtatgatccctaactcctgatttggatgcatctgagggacaaggggggcggtctccgaagtggaataaaataggccgggcgtggtgacttgcacctataatcccagcactttgggaggcagaggtgggaggattgcttggtcccaggagttcaagaccagcctgtggaacataacaagaccccgtctctactatttaaaaaaaagtgtaataaaatgataatataattatgtgtgtctgagatgtgggggagccccactgttctataggggttgtgaggaggatcagtctctcctgccaccaggcacagatgagatcagtcatcttaggaaagcctggctgcacctgagaacctttatgaagtggttggagttgtctgaattcactgcctccacctcttcccaaatcaatcctattatcccaccgctattttcctttgccatgcaacacattttgttaagttcctgttctttgtctgataaagagagaagactgagaagacaagcccaggcatcatgcagcaccgactttaactgtctgaagccccaaatagtgctatgcccccgctccactgggccttttcactatagaacaccctttgcccttcccttctgtggaagcctcccttgtttcccaacctgtgccactctttatcagatctacatgcccatcttatgtagcattccaccttgtcccattcattattcctgacttgaagccaaaattgtgtgaatccactggttcttttctcatgtgtatgttttgtgccctctgttcaccccagcactcctgtcatgtttgaaatgctggcatgaaatcctcctagagatgtccatcaaaagagttgggaagaggccctggagagaagcatcaggactgggatttgaggtttgacagtacctagaacaagaggagctgataccactgaaaaacagaacagatgttaaaaccatgggatagcacctacttttagctggcataaagtagagaagctgagtagtagtggttgtgaagtataaacgttcactgctgtggtaggtagctaagggaagaattgaaattatttttattgttactatcattttaaagacatatttttgctctattgtccaggctggagggcagtggtgcaatcatagctccctgtagtttcaaactcctgggctcaagtgatccatctcagcctcctcagtatctgggaccatgcctggctaatttttaaatttctgtacagacagagtcttgctacattgcccaggctgttcgtgaactcctggcctcaagcgatccttccaccttggcctctcaaagcactaggattacaggtgtgagccacagcacctggctaagttcagattattaatggccagtggtccctagtgttacagatgccaaatagtaagatgatgaaaagtatggttcagctgggtgtggtgcctcatgcctgtaatctcagcactttggggagccaaggcgggtggatcacctgaggtcaggagtttgagaccagcctggccaacatggcaaaaccccatctctactaaaaatacaaaaattagccaggtgtggtggtgtgcacctgtaattccggctactcaggaggctgaggcaggagaatcgcttgaacctgggaggcagaggttacagtgagccaagatcacgctactgcactccagcctgggagacagagccagactctctctcaaaaaaaaaaaaaaaaaaaaagggataggttgttaaccatggtagaaagaggtttaataatgcaagggggtgaagttggccccagctggcctgtaagatgaattagaaaaacgcttctccccaagtctggtggacacaactcccaagcatagttcggtgagcaaatggtgtctttttgagaaaggggaaaaaaaccaaaacaaaaacctttcctccatccctagcacccatggaaggattttaggccctagttcctccacttctcagccaggtaccctgcactttttgcagtagcctccttgcctggagcctaaggctaatttgctgatctgccaaccactgtctattctttctcctggtgtatctataagattctattagataaagacattagtacattgatttacgctattaaaaattatttctagccaggcactgtggcatgtccctatagtcccagctacttgggaggcagaggtgggaggatcacttgaggatagcaagactccgtctctacaaaaataaaaaaattagccaggcatggtcccagctatgtagaggctgaggtggatcacttgagcccaggagttagaggctgtagtgcacaatgaatgcacctgtgaatagccactgcactccagcctgggcaacatagatcctctctcttttaaaaagaaaaattatcttatccctcccttttccttgaaatcagagtccattccacactaactcaatgattctttttttttttcctttaattttttgtagaggtgggggtcttgctgtcttgcctaggctggtcttgaactcctggcctcaagccatcctcctgcctcgacctcctcaagtgttgggattgcaggtgtgagccattgcacccagccctgattcttttttaaaaaagctttattgaaatgcaatttaccataaaatttacccatgtaaggtgtaagatttaatggtttttgtgtatttacagaattgtacaaccatcaccagaatcaattttagaacattttcaccaaccccaaaagaaaatctactgtttagatatcaccctccaatcctccccaacccctggctagcactaatctgctgtttctctatatatttgcccattttggatatttcacagaaatgggatcataataatatgtggtcttttgtgactggcatcttccacttagtataatgttttccggtttcatctatatagcagcacacagcagtacttcattctttttcttttttaaaattgaagtaaaattcatataaaattcaccattttaaagtgtataatttagtggccgttagtacattcacaacgttgtacaattatcatcattatcaattccagaatgttttcattaccccaaaaagaaaccctgtacccttaagcagtcattccttctcttctcccccttaactcctggtaccactaatttgttttctgtctctatagatttgcctgttctggacatttcatataaatgggctcatacagtagtgcctttttctgtcttatcttcctttactcagcctaatgttttcagagttcatctatgttgtagcatgtattggtacttcattcctctttatggccaaataatactctattgcatggatataccacattttgtttatccattcatccattgatagccatttggatttacacattttggttattatgtaatgctgctataaacatttgtgta

SEQ ID NO: 147 - DNA, 6894 bp, Homo sapiens
acttccgggtgccattgcaggatgcagaaagcctcagtgttgctcttcctggcctgggtctgcttcctcttctacgctggcattgccctcttcaccagtggcttcctgctcacccgtttggagctcaccaaccatagcagctgccaagagcccccaggccctgggtccctgccatgggggagccaagggaaacctggggcctgctggatggcttcccgattttcgcgggttgtgttggtgctgatagatgctctgcgatttgacttcgcccagccccagcattcacacgtgcctagagagcctcctgtctccctacccttcctgggcaaactaagctccttgcagaggatcctggagattcagccccaccatgcccggctctaccgatctcaggttgaccctcctaccaccaccatgcagcgcctcaaggccctcaccactggctcactgcctacctttattgatgctggtagtaacttcgccagccacgccatagtggaagacaatctcattaagcagctcaccagtgcaggaaggcgtgtagtcttcatgggagatgatacctggaaagaccttttccctggtgctttctccaaagctttcttcttcccatccttcaatgtcagagacctagacacagtggacaatggcatcctggaacacctctaccccaccatggacagtggtgaatgggacgtgctgattgctcacttcctgggtgtggaccactgtggccacaagcatggccctcaccaccctgaaatggccaagaaacttagccagatggaccaggtgatccagggacttgtggagcgtctggagaatgacacactgctggtagtggctggggaccatgggatgaccacaaatggagaccatggaggggacagtgagctggaggtctcagctgctctctttctgtatagccccacagcagtcttccccagcaccccaccagaggagccagaggtgattcctcaagttagccttgtgcccacgctggccctgctgctgggcctgcccatcccatttgggaatatcggggaagtgatggctgagctattctcagggggtgaggactcccagccccactcctctgctttagcccaagcctcagctctccatctcaatgctcagcaggtgtcccgatttcttcatacctactcagctgctactcaggaccttcaagctaaggagcttcatcagctgcagaacctcttctccaaggcctctgctgactaccagtggcttctccagagccccaagggggctgaggcgacactgccgactgtgattgctgagctgcagcagttcctgcggggagctcgggccatgtgcatcgagtcttgggctcgtttctctctggtccgcatggcggggggtactgctctcttggctgcttcctgctttatctgcctgctggcatctcagtgggcaatatccccaggctttccattctgccctctactcctgacacctgtggcctggggcctggttggggccatagcgtatgctggactcctgggaactattgagctgaagctagatctagtgcttctaggggctgtggctgcagtgagctcattcctcccttttctgtggaaagcctgggctggctgggggtccaagaggcccctggcaaccctgtttcccatccctgggcccgtcctgttactcctgctgtttcgcttggctgtgttcttctctgatagttttgttgtagctgaggccagggccacccccttccttttgggctcattcatcctgctcctggttgtccagcttcactgggagggccagctgcttccacctaagctactcacaatgccccgccttggcacttcagccacaacaaaccccccacggcacaatggtgcatatgccctgaggcttggaattgggttgcttttatgtacaaggctagctgggctttttcatcgttgccctgaagagacacctgtttgccactcctctccctggctgagtcctctggcatccatggtgggtggtcgagccaagaatttgtggtatggagcttgtgtggcggcgctggtggccctgttagctgccgtgcgcttgtggcttcgccgctatggtaatctcaagagccccgagccacccatgctctttgtgcgctggggactgcccctaatggcattgggtactgctgcctactgggcattggcgtcgggggcagatgaggctcccccccgtctccgggtcctggtctctggggcatccatggtgctgcctcgggctgtagcagggctggctgcttcagggctcgcgctgctgctctggaagcctgtgacagtgctggtgaaggctggggcaggcgctccaaggaccaggactgtcctcactcccttctcaggcccccccacttctcaagctgacttggattatgtggtccctcaaatctaccgacacatgcaggaggagttccggggccggttagagaggaccaaatctcagggtcccctgactgtggctgcttatcagttggggagtgtctactcagctgctatggtcacagccctcaccctgttggccttcccacttctgctgttgcatgcggagcgcatcagccttgtgttcctgcttctgtttctgcagagcttccttctcctacatctgcttgctgctgggatacccgtcaccacccctggtccttttactgtgccatggcaggcagtctcggcttgggccctcatggccacacagaccttctactccacaggccaccagcctgtctttccagccatccattggcatgcagccttcgtgggattcccagagggtcatggctcctgtacttggctgcctgctttgctagtgggagccaacacctttgcctcccacctcctctttgcaggcagtaggttgcccactgctcctgctctggcctttcctgtgtgagagtcaagggctgcggaagagacagcagcccccagggaatgaagctgatgccagagtcagacccgaggaggaagaggagccactgatggagatgcggctccgggatgcgcctcagcacttctatgcagcactgctgcagctgggcctcaagtacctctttatccttggtattcagattctggcctgtgccttggcagcctccatccttcgcaggcatctcatggtctggaaagtgtttgcccctaagttcatatttgaggctgtgggcttcattgtgagcagcgtgggacttctcctgggcatagctttggtgatgagagtggatggtgctgtgagctcctggttcaggcagctatttctggcccagcagaggtagcctagtctgtgattactggcacttggctacagagagtgcttgagaacagtgtagcctggcctgtacaggtactggatgatctgcaagacaggctcagccatactcttactatcatgcagccaggggccgctgacatctaggacttcattattctataattcaggaccacagtggagtatgatccctaactcctgatttggatgcatctgagggacaaggggggcggtctccgaagtggaataaaataggccgggcgtggtgacttgcacctataatcccagcactttgggaggcagaggtgggaggattgcttggtcccaggagttcaagaccagcctgtggaacataacaagaccccgtctctactatttaaaaaaaagtgtaataaaatgataatataattatgtgtgtctgagatgtgggggagccccactgttctataggggttgtgaggaggatcagtctctcctgccaccaggcacagatgagatcagtcatcttaggaaagcctggctgcacctgagaacctttatgaagtggttggagttgtctgaattcactgcctccacctcttcccaaatcaatcctattatcccaccgctattttcctttgccatgcaacacattttgttaagttcctgttctttgtctgataaagagagaagactgagaagacaagcccaggcatcatgcagcaccgactttaactgtctgaagccccaaatagtgctatgcccccgctccactgggccttttcactatagaacaccctttgcccttcccttctgtggaagcctcccttgtttcccaacctgtgccactctttatcagatctacatgcccatcttatgtagcattccaccttgtcccattcattattcctgacttgaagccaaaattgtgtgaatccactggttcttttctcatgtgtatgttttgtgccctctgttcaccccagcactcctgtcatgtttgaaatgctggcatgaaatcctcctagagatgtccatcaaaagagttgggaagaggccctggagagaagcatcaggactgggatttgaggtttgacagtacctagaacaagaggagctgataccactgaaaaacagaacagatgttaaaaccatgggatagcacctacttttagctggcataaagtagagaagctgagtagtagtggttgtgaagtataaacgttcactgctgtggtaggtagctaagggaagaattgaaattatttttattgttactatcattttaaagacatatttttgctctattgtccaggctggagggcagtggtgcaatcatagctccctgtagtttcaaactcctgggctcaagtgatccatctcagcctcctcagtatctgggaccatgcctggctaatttttaaatttctgtacagacagagtcttgctacattgcccaggctgttcgtgaactcctggcctcaagcgatccttccaccttggcctctcaaagcactaggattacaggtgtgagccacagcacctggctaagttcagattattaatggccagtggtccctagtgttacagatgccaaatagtaagatgatgaaaagtatggttcagctgggtgtggtgcctcatgcctgtaatctcagcactttggggagccaaggcgggtggatcacctgaggtcaggagtttgagaccagcctggccaacatggcaaaaccccatctctactaaaaatacaaaaattagccaggtgtggtggtgtgcacctgtaattccggctactcaggaggctgaggcaggagaatcgcttgaacctgggaggcagaggttacagtgagccaagatcacgctactgcactccagcctgggagacagagccagactctctctcaaaaaaaaaaaaaaaaaaaaagggataggttgttaaccatggtagaaagaggtttaataatgcaagggggtgaagttggccccagctggcctgtaagatgaattagaaaaacgcttctccccaagtctggtggacacaactcccaagcatagttcggtgagcaaatggtgtctttttgagaaaggggaaaaaaaccaaaacaaaaacctttcctccatccctagcacccatggaaggattttaggccctagttcctccacttctcagccaggtaccctgcactttttgcagtagcctccttgcctggagcctaaggctaatttgctgatctgccaaccactgtctattctttctcctggtgtatctataagattctattagataaagacattagtacattgatttacgctattaaaaattatttctagccaggcactgtggcatgtccctatagtcccagctacttgggaggcagaggtgggaggatcacttgaggatagcaagactccgtctctacaaaaataaaaaaattagccaggcatggtcccagctatgtagaggctgaggtggatcacttgagcccaggagttagaggctgtagtgcacaatgaatgcacctgtgaatagccactgcactccagcctgggcaacatagatcctctctcttttaaaaagaaaaattatcttatccctcccttttccttgaaatcagagtccattccacactaactcaatgattctttttttttttcctttaattttttgtagaggtgggggtcttgctgtcttgcctaggctggtcttgaactcctggcctcaagccatcctcctgcctcgacctcctcaagtgttgggattgcaggtgtgagccattgcacccagccctgattcttttttaaaaaagctttattgaaatgcaatttaccataaaatttacccatgtaaggtgtaagatttaatggtttttgtgtatttacagaattgtacaaccatcaccagaatcaattttagaacattttcaccaaccccaaaagaaaatctactgtttagatatcaccctccaatcctccccaacccctggctagcactaatctgctgtttctctatatatttgcccattttggatatttcacagaaatgggatcataataatatgtggtcttttgtgactggcatcttccacttagtataatgttttccggtttcatctatatagcagcacacagcagtacttcattctttttcttttttaaaattgaagtaaaattcatataaaattcaccattttaaagtgtataatttagtggccgttagtacattcacaacgttgtacaattatcatcattatcaattccagaatgttttcattaccccaaaaagaaaccctgtacccttaagcagtcattccttctcttctcccccttaactcctggtaccactaatttgttttctgtctctatagatttgcctgttctggacatttcatataaatgggctcatacagtagtgcctttttctgtcttatcttcctttactcagcctaatgttttcagagttcatctatgttgtagcatgtattggtacttcattcctctttatggccaaataatactctattgcatggatataccacattttgtttatccattcatccattgatagccatttggatttacacattttggttattatgtaatgctgctataaacatttgtgtataa

SEQ ID NO: 148 - DNA, 7293 bp, Homo sapiens
ccgggtgccattgcaggtgagccagggtctcccgagaacctcaccccccggtattcccctcaccctgaagtaagggagtctccctcttcccctcagctcctaaccaaggtgctcagtaccgcggctagggtgcccagcgggaggctgggtagttaccggaggaggcagagccggtcgcacgcctgggtcccagcggaggcccagtcgactctcgacccgggccccagcctccttgcgtggcgaaggtcgtgcctcaggtctcctggcgaacctggccgcccggaagcggagagtgactcctccccttcgtcccctcggtgcccgccaggcggcgccgtcggctgggcccggattcccctgcggcttcgatccctttccactgggtattgagattggcgaggggagaggcgcagaaacggcgtgatgcagaaagcctcagtgttgctcttcctggcctgggtctgcttcctcttctacgctggcattgccctcttcaccagtggcttcctgctcacccgtttggagctcaccaaccatagcagctgccaagagcccccaggccctgggtccctgccatgggggagccaagggaaacctggggcctgctggatggcttcccgattttcgcgggttgtgttggtgctgatagatgctctgcgatttgacttcgcccagccccagcattcacacgtgcctagagagcctcctgtctccctacccttcctgggcaaactaagctccttgcagaggatcctggagattcagccccaccatgcccggctctaccgatctcaggttgaccctcctaccaccaccatgcagcgcctcaaggccctcaccactggctcactgcctacctttattgatgctggtagtaacttcgccagccacgccatagtggaagacaatctcattaagcagctcaccagtgcaggaaggcgtgtagtcttcatgggagatgatacctggaaagaccttttccctggtgctttctccaaagctttcttcttcccatccttcaatgtcagagacctagacacagtggacaatggcatcctggaacacctctaccccaccatggacagtggtgaatgggacgtgctgattgctcacttcctgggtgtggaccactgtggccacaagcatggccctcaccaccctgaaatggccaagaaacttagccagatggaccaggtgatccagggacttgtggagcgtctggagaatgacacactgctggtagtggctggggaccatgggatgaccacaaatggagaccatggaggggacagtgagctggaggtctcagctgctctctttctgtatagccccacagcagtcttccccagcaccccaccagaggagccagaggtgattcctcaagttagccttgtgcccacgctggccctgctgctgggcctgcccatcccatttgggaatatcggggaagtgatggctgagctattctcagggggtgaggactcccagccccactcctctgctttagcccaagcctcagctctccatctcaatgctcagcaggtgtcccgatttcttcatacctactcagctgctactcaggaccttcaagctaaggagcttcatcagctgcagaacctcttctccaaggcctctgctgactaccagtggcttctccagagccccaagggggctgaggcgacactgccgactgtgattgctgagctgcagcagttcctgcggggagctcgggccatgtgcatcgagtcttgggctcgtttctctctggtccgcatggcggggggtactgctctcttggctgcttcctgctttatctgcctgctggcatctcagtgggcaatatccccaggctttccattctgccctctactcctgacacctgtggcctggggcctggttggggccatagcgtatgctggactcctgggaactattgagctgaagctagatctagtgcttctaggggctgtggctgcagtgagctcattcctcccttttctgtggaaagcctgggctggctgggggtccaagaggcccctggcaaccctgtttcccatccctgggcccgtcctgttactcctgctgtttcgcttggctgtgttcttctctgatagttttgttgtagctgaggccagggccacccccttccttttgggctcattcatcctgctcctggttgtccagcttcactgggagggccagctgcttccacctaagctactcacaatgccccgccttggcacttcagccacaacaaaccccccacggcacaatggtgcatatgccctgaggcttggaattgggttgcttttatgtacaaggctagctgggctttttcatcgttgccctgaagagacacctgtttgccactcctctccctggctgagtcctctggcatccatggtgggtggtcgagccaagaatttgtggtatggagcttgtgtggcggcgctggtggccctgttagctgccgtgcgcttgtggcttcgccgctatggtaatctcaagagccccgagccacccatgctctttgtgcgctggggactgcccctaatggcattgggtactgctgcctactgggcattggcgtcgggggcagatgaggctcccccccgtctccgggtcctggtctctggggcatccatggtgctgcctcgggctgtagcagggctggctgcttcagggctcgcgctgctgctctggaagcctgtgacagtgctggtgaaggctggggcaggcgctccaaggaccaggactgtcctcactcccttctcaggcccccccacttctcaagctgacttggattatgtggtccctcaaatctaccgacacatgcaggaggagttccggggccggttagagaggaccaaatctcagggtcccctgactgtggctgcttatcagttggggagtgtctactcagctgctatggtcacagccctcaccctgttggccttcccacttctgctgttgcatgcggagcgcatcagccttgtgttcctgcttctgtttctgcagagcttccttctcctacatctgcttgctgctgggatacccgtcaccacccctggtccttttactgtgccatggcaggcagtctcggcttgggccctcatggccacacagaccttctactccacaggccaccagcctgtctttccagccatccattggcatgcagccttcgtgggattcccagagggtcatggctcctgtacttggctgcctgctttgctagtgggagccaacacctttgcctcccacctcctctttgcaggcagtaggttgcccactgctcctgctctggcctttcctgtgtgagagtcaagggctgcggaagagacagcagcccccagggaatgaagctgatgccagagtcagacccgaggaggaagaggagccactgatggagatgcggctccgggatgcgcctcagcacttctatgcagcactgctgcagctgggcctcaagtacctctttatccttggtattcagattctggcctgtgccttggcagcctccatccttcgcaggcatctcatggtctggaaagtgtttgcccctaagttcatatttgaggctgtgggcttcattgtgagcagcgtgggacttctcctgggcatagctttggtgatgagagtggatggtgctgtgagctcctggttcaggcagctatttctggcccagcagaggtagcctagtctgtgattactggcacttggctacagagagtgcttgagaacagtgtagcctggcctgtacaggtactggatgatctgcaagacaggctcagccatactcttactatcatgcagccaggggccgctgacatctaggacttcattattctataattcaggaccacagtggagtatgatccctaactcctgatttggatgcatctgagggacaaggggggcggtctccgaagtggaataaaataggccgggcgtggtgacttgcacctataatcccagcactttgggaggcagaggtgggaggattgcttggtcccaggagttcaagaccagcctgtggaacataacaagaccccgtctctactatttaaaaaaaagtgtaataaaatgataatataattatgtgtgtctgagatgtgggggagccccactgttctataggggttgtgaggaggatcagtctctcctgccaccaggcacagatgagatcagtcatcttaggaaagcctggctgcacctgagaacctttatgaagtggttggagttgtctgaattcactgcctccacctcttcccaaatcaatcctattatcccaccgctattttcctttgccatgcaacacattttgttaagttcctgttctttgtctgataaagagagaagactgagaagacaagcccaggcatcatgcagcaccgactttaactgtctgaagccccaaatagtgctatgcccccgctccactgggccttttcactatagaacaccctttgcccttcccttctgtggaagcctcccttgtttcccaacctgtgccactctttatcagatctacatgcccatcttatgtagcattccaccttgtcccattcattattcctgacttgaagccaaaattgtgtgaatccactggttcttttctcatgtgtatgttttgtgccctctgttcaccccagcactcctgtcatgtttgaaatgctggcatgaaatcctcctagagatgtccatcaaaagagttgggaagaggccctggagagaagcatcaggactgggatttgaggtttgacagtacctagaacaagaggagctgataccactgaaaaacagaacagatgttaaaaccatgggatagcacctacttttagctggcataaagtagagaagctgagtagtagtggttgtgaagtataaacgttcactgctgtggtaggtagctaagggaagaattgaaattatttttattgttactatcattttaaagacatatttttgctctattgtccaggctggagggcagtggtgcaatcatagctccctgtagtttcaaactcctgggctcaagtgatccatctcagcctcctcagtatctgggaccatgcctggctaatttttaaatttctgtacagacagagtcttgctacattgcccaggctgttcgtgaactcctggcctcaagcgatccttccaccttggcctctcaaagcactaggattacaggtgtgagccacagcacctggctaagttcagattattaatggccagtggtccctagtgttacagatgccaaatagtaagatgatgaaaagtatggttcagctgggtgtggtgcctcatgcctgtaatctcagcactttggggagccaaggcgggtggatcacctgaggtcaggagtttgagaccagcctggccaacatggcaaaaccccatctctactaaaaatacaaaaattagccaggtgtggtggtgtgcacctgtaattccggctactcaggaggctgaggcaggagaatcgcttgaacctgggaggcagaggttacagtgagccaagatcacgctactgcactccagcctgggagacagagccagactctctctcaaaaaaaaaaaaaaaaaaaaagggataggttgttaaccatggtagaaagaggtttaataatgcaagggggtgaagttggccccagctggcctgtaagatgaattagaaaaacgcttctccccaagtctggtggacacaactcccaagcatagttcggtgagcaaatggtgtctttttgagaaaggggaaaaaaaccaaaacaaaaacctttcctccatccctagcacccatggaaggattttaggccctagttcctccacttctcagccaggtaccctgcactttttgcagtagcctccttgcctggagcctaaggctaatttgctgatctgccaaccactgtctattctttctcctggtgtatctataagattctattagataaagacattagtacattgatttacgctattaaaaattatttctagccaggcactgtggcatgtccctatagtcccagctacttgggaggcagaggtgggaggatcacttgaggatagcaagactccgtctctacaaaaataaaaaaattagccaggcatggtcccagctatgtagaggctgaggtggatcacttgagcccaggagttagaggctgtagtgcacaatgaatgcacctgtgaatagccactgcactccagcctgggcaacatagatcctctctcttttaaaaagaaaaattatcttatccctcccttttccttgaaatcagagtccattccacactaactcaatgattctttttttttttcctttaattttttgtagaggtgggggtcttgctgtcttgcctaggctggtcttgaactcctggcctcaagccatcctcctgcctcgacctcctcaagtgttgggattgcaggtgtgagccattgcacccagccctgattcttttttaaaaaagctttattgaaatgcaatttaccataaaatttacccatgtaaggtgtaagatttaatggtttttgtgtatttacagaattgtacaaccatcaccagaatcaattttagaacattttcaccaaccccaaaagaaaatctactgtttagatatcaccctccaatcctccccaacccctggctagcactaatctgctgtttctctatatatttgcccattttggatatttcacagaaatgggatcataataatatgtggtcttttgtgactggcatcttccacttagtataatgttttccggtttcatctatatagcagcacacagcagtacttcattctttttcttttttaaaattgaagtaaaattcatataaaattcaccattttaaagtgtataatttagtggccgttagtacattcacaacgttgtacaattatcatcattatcaattccagaatgttttcattaccccaaaaagaaaccctgtacccttaagcagtcattccttctcttctcccccttaactcctggtaccactaatttgttttctgtctctatagatttgcctgttctggacatttcatataaatgggctcatacagtagtgcctttttctgtcttatcttcctttactcagcctaatgttttcagagttcatctatgttgtagcatgtattggtacttcattcctctttatggccaaataatactctattgcatggatataccacattttgtttatccattcatccattgatagccatttggatttacacattttggttattatgtaatgctgctataaacatttgtgta

SEQ ID NO: 149 - DNA, 2846 bp, Homo sapiens
ccgggtgccattgcaggtgagccagggtctcccgagaacctcaccccccggtattcccctcaccctgaagtaagggagtctccctcttcccctcagctcctaaccaaggtgctcagtaccgcggctagggtgcccagcgggaggctgggtagttaccggaggaggcagagccggtcgcacgcctgggtcccagcggaggcccagtcgactctcgacccgggccccagcctccttgcgtggcgaaggtcgtgcctcaggtctcctggcgaacctggccgcccggaagcggagagtgactcctccccttcgtcccctcggtgcccgccaggcggcgccgtcggctgggcccggattcccctgcggcttcgatccctttccactgggtattgagattggcgaggggagaggcgcagaaacggcgtgatgcagaaagcctcagtgttgctcttcctggcctgggtctgcttcctcttctacgctggcattgccctcttcaccagtggcttcctgctcacccgtttggagctcaccaaccatagcagctgccaagagcccccaggccctgggtccctgccatgggggagccaagggaaacctggggcctgctggatggcttcccgattttcgcgggttgtgttggtgctgatagatgctctgcgatttgacttcgcccagccccagcattcacacgtgcctagagagcctcctgtctccctacccttcctgggcaaactaagctccttgcagaggatcctggagattcagccccaccatgcccggctctaccgatctcaggttgaccctcctaccaccaccatgcagcgcctcaaggccctcaccactggctcactgcctacctttattgatgctggtagtaacttcgccagccacgccatagtggaagacaatctcattaagcagctcaccagtgcaggaaggcgtgtagtcttcatgggagatgatacctggaaagaccttttccctggtgctttctccaaagctttcttcttcccatccttcaatgtcagagacctagacacagtggacaatggcatcctggaacacctctaccccaccatggacagtggtgaatgggacgtgctgattgctcacttcctgggtgtggaccactgtggccacaagcatggccctcaccaccctgaaatggccaagaaacttagccagatggaccaggtgatccagggacttgtggagcgtctggagaatgacacactgctggtagtggctggggaccatgggatgaccacaaatggagaccatggaggggacagtgagctggaggtctcagctgctctctttctgtatagccccacagcagtcttccccagcaccccaccagaggagccagaggtgattcctcaagttagccttgtgcccacgctggccctgctgctgggcctgcccatcccatttgggaatatcggggaagtgatggctgagctattctcagggggtgaggactcccagccccactcctctgctttagcccaagcctcagctctccatctcaatgctcagcaggtgtcccgatttcttcatacctactcagctgctactcaggaccttcaagctaaggagcttcatcagctgcagaacctcttctccaaggcctctgctgactaccagtggcttctccagagccccaagggggctgaggcgacactgccgactgtgattgctgagctgcagcagttcctgcggggagctcgggccatgtgcatcgagtcttgggctcgtttctctctgagcttccttctcctacatctgcttgctgctgggatacccgtcaccacccctggtccttttactgtgccatggcaggcagtctcggcttgggccctcatggccacacagaccttctactccacaggccaccagcctgtctttccagccatccattggcatgcagccttcgtgggattcccagagggtcatggctcctgtacttggctgcctgctttgctagtgggagccaacacctttgcctcccacctcctctttgcagtaggttgcccactgctcctgctctggcctttcctgtgtgagagtcaagggctgcggaagagacagcagcccccagggaatgaagctgatgccagagtcagacccgaggaggaagaggagccactgatggagatgcggctccgggatgcgcctcagcacttctatgcagcactgctgcagctgggcctcaagtacctctttatccttggtattcagattctggcctgtgccttggcagcctccatccttcgcaggcatctcatggtctggaaagtgtttgcccctaagttcatatttgaggctgtgggcttcattgtgagcagcgtgggacttctcctgggcatagctttggtgatgagagtggatggtgctgtgagctcctggttcaggcagctatttctggcccagcagaggtagcctagtctgtgattactggcacttggctacagagagtgcttgagaacagtgtagcctggcctgtacaggtactggatgatctgcaagacaggctcagccatactcttactatcatgcagccaggggccgctgacatctaggacttcattattctataattcaggaccacagtggagtatgatccctaactcctgatttggatgcatctgagggacaaggggggcggtctccgaagtggaataaaataggccgggcgtggtgacttgcacctataatcccagcactttgggaggcagaggtgggaggattgcttggtcccaggagttcaagaccagcctgtggaacataacaagaccccgtctctactatttaaaaaaaagtgtaataaaatgataatataatta

SEQ ID NO: 150 - DNA, 3110 bp, Homo sapiens
gcaggtgagccagggtctcccgagaacctcaccccccggtattcccctcaccctgaagtaagggagtctccctcttcccctcagctcctaaccaaggtgctcagtaccgcggctagggtgcccagcgggaggctgggtagttaccggaggaggcagagccggtcgcacgcctgggtcccagcggaggcccagtcgactctcgacccgggccccagcctccttgcgtggcgaaggtcgtgcctcaggtctcctggcgaacctggccgcccggaagcggagagtgactcctccccttcgtcccctcggtgcccgccaggcggcgccgtcggctgggcccggattcccctgcggcttcgatccctttccactgggtattgagattggcgaggggagaggcgcagaaacggcgtgtaagagagcctgactaccaattggaataagtttccctcctgactgttcacatgtacaggcagcattagcatttcctgcctgtacatgtgaacgttcctatgctctacccctcgaagatcctgattcagtagatctggggtgggacctcatgaaacggcgtctccctctgttgtccagactctagtgcagtggttcaatctcggctcactgcaacctccgcctccccgattcaagcgattctcctgcgtcagcctccccagtagctgagactacaggatgcagaaagcctcagtgttgctcttcctggcctgggtctgcttcctcttctacgctggcattgccctcttcaccagtggcttcctgctcacccgtttggagctcaccaaccatagcagctgccaagagcccccaggccctgggtccctgccatgggggagccaagggaaacctggggcctgctggatggcttcccgattttcgcgggttgtgttggtgctgatagatgctctgcgatttgacttcgcccagccccagcattcacacgtgcctagagagcctcctgtctccctacccttcctgggcaaactaagctccttgcagaggatcctggagattcagccccaccatgcccggctctaccgatctcaggttgaccctcctaccaccaccatgcagcgcctcaaggccctcaccactggctcactgcctacctttattgatgctggtagtaacttcgccagccacgccatagtggaagacaatctcattaagcagctcaccagtgcaggaaggcgtgtagtcttcatgggagatgatacctggaaagaccttttccctggtgctttctccaaagctttcttcttcccatccttcaatgtcagagacctagacacagtggacaatggcatcctggaacacctctaccccaccatggacagtggtgaatgggacgtgctgattgctcacttcctgggtgtggaccactgtggccacaagcatggccctcaccaccctgaaatggccaagaaacttagccagatggaccaggtgatccagggacttgtggagcgtctggagaatgacacactgctggtagtggctggggaccatgggatgaccacaaatggagaccatggaggggacagtgagctggaggtctcagctgctctctttctgtatagccccacagcagtcttccccagcaccccaccagaggagccagaggtgattcctcaagttagccttgtgcccacgctggccctgctgctgggcctgcccatcccatttgggaatatcggggaagtgatggctgagctattctcagggggtgaggactcccagccccactcctctgctttagcccaagcctcagctctccatctcaatgctcagcaggtgtcccgatttcttcatacctactcagctgctactcaggaccttcaagctaaggagcttcatcagctgcagaacctcttctccaaggcctctgctgactaccagtggcttctccagagccccaagggggctgaggcgacactgccgactgtgattgctgagctgcagcagttcctgcggggagctcgggccatgtgcatcgagtcttgggctcgtttctctctgagcttccttctcctacatctgcttgctgctgggatacccgtcaccacccctggtccttttactgtgccatggcaggcagtctcggcttgggccctcatggccacacagaccttctactccacaggccaccagcctgtctttccagccatccattggcatgcagccttcgtgggattcccagagggtcatggctcctgtacttggctgcctgctttgctagtgggagccaacacctttgcctcccacctcctctttgcagtaggttgcccactgctcctgctctggcctttcctgtgtgagagtcaagggctgcggaagagacagcagcccccagggaatgaagctgatgccagagtcagacccgaggaggaagaggagccactgatggagatgcggctccgggatgcgcctcagcacttctatgcagcactgctgcagctgggcctcaagtacctctttatccttggtattcagattctggcctgtgccttggcagcctccatccttcgcaggcatctcatggtctggaaagtgtttgcccctaagttcatatttgaggctgtgggcttcattgtgagcagcgtgggacttctcctgggcatagctttggtgatgagagtggatggtgctgtgagctcctggttcaggcagctatttctggcccagcagaggtagcctagtctgtgattactggcacttggctacagagagtgcttgagaacagtgtagcctggcctgtacaggtactggatgatctgcaagacaggctcagccatactcttactatcatgcagccaggggccgctgacatctaggacttcattattctataattcaggaccacagtggagtatgatccctaactcctgatttggatgcatctgagggacaaggggggcggtctccgaagtggaataaaataggccgggcgtggtgacttgcacctataatcccagcactttgggaggcagaggtgggaggattgcttggtcccaggagttcaagaccagcctgtggaacataacaagaccccgtctctactatttaaaaaaaagtgtaataaaatgataatataatta

SEQ ID NO: 151 - DNA, 5643 bp, Homo sapiens
acttccgggtgccattgcaggatgcagaaagcctcagtgttgctcttcctggcctgggtctgcttcctcttctacgctggcattgccctcttcaccagtggcttcctgctcacccgtttggagctcaccaaccatagcagctgccaagagcccccaggccctgggtccctgccatgggggagccaagggaaacctggggcctgctggatggcttcccgattttcgcgggttgtgttggtgctgatagatgctctgcgatttgacttcgcccagccccagcattcacacgtgcctagagagcctcctgtctccctacccttcctgggcaaactaagctccttgcagaggatcctggagattcagccccaccatgcccggctctaccgatctcaggttgaccctcctaccaccaccatgcagcgcctcaaggccctcaccactggctcactgcctacctttattgatgctggtagtaacttcgccagccacgccatagtggaagacaatctcattaagcagctcaccagtgcaggaaggcgtgtagtcttcatgggagatgatacctggaaagaccttttccctggtgctttctccaaagctttcttcttcccatccttcaatgtcagagacctagacacagtggacaatggcatcctggaacacctctaccccaccatggacagtggtgaatgggacgtgctgattgctcacttcctgggtgtggaccactgtggccacaagcatggccctcaccaccctgaaatggccaagaaacttagccagatggaccaggtgatccagggacttgtggagcgtctggagaatgacacactgctggtagtggctggggaccatgggatgaccacaaatggagaccatggaggggacagtgagctggaggtctcagctgctctctttctgtatagccccacagcagtcttccccagcaccccaccagaggagccagaggtgattcctcaagttagccttgtgcccacgctggccctgctgctgggcctgcccatcccatttgggaatatcggggaagtgatggctgagctattctcagggggtgaggactcccagccccactcctctgctttagcccaagcctcagctctccatctcaatgctcagcaggtgtcccgatttcttcatacctactcagctgctactcaggaccttcaagctaaggagcttcatcagctgcagaacctcttctccaaggcctctgctgactaccagtggcttctccagagccccaagggggctgaggcgacactgccgactgtgattgctgagctgcagcagttcctgcggggagctcgggccatgtgcatcgagtcttgggctcgtttctctctgagcttccttctcctacatctgcttgctgctgggatacccgtcaccacccctggtccttttactgtgccatggcaggcagtctcggcttgggccctcatggccacacagaccttctactccacaggccaccagcctgtctttccagccatccattggcatgcagccttcgtgggattcccagagggtcatggctcctgtacttggctgcctgctttgctagtgggagccaacacctttgcctcccacctcctctttgcaggcagtaggttgcccactgctcctgctctggcctttcctgtgtgagagtcaagggctgcggaagagacagcagcccccagggaatgaagctgatgccagagtcagacccgaggaggaagaggagccactgatggagatgcggctccgggatgcgcctcagcacttctatgcagcactgctgcagctgggcctcaagtacctctttatccttggtattcagattctggcctgtgccttggcagcctccatccttcgcaggcatctcatggtctggaaagtgtttgcccctaagttcatatttgaggctgtgggcttcattgtgagcagcgtgggacttctcctgggcatagctttggtgatgagagtggatggtgctgtgagctcctggttcaggcagctatttctggcccagcagaggtagcctagtctgtgattactggcacttggctacagagagtgcttgagaacagtgtagcctggcctgtacaggtactggatgatctgcaagacaggctcagccatactcttactatcatgcagccaggggccgctgacatctaggacttcattattctataattcaggaccacagtggagtatgatccctaactcctgatttggatgcatctgagggacaaggggggcggtctccgaagtggaataaaataggccgggcgtggtgacttgcacctataatcccagcactttgggaggcagaggtgggaggattgcttggtcccaggagttcaagaccagcctgtggaacataacaagaccccgtctctactatttaaaaaaaagtgtaataaaatgataatataattatgtgtgtctgagatgtgggggagccccactgttctataggggttgtgaggaggatcagtctctcctgccaccaggcacagatgagatcagtcatcttaggaaagcctggctgcacctgagaacctttatgaagtggttggagttgtctgaattcactgcctccacctcttcccaaatcaatcctattatcccaccgctattttcctttgccatgcaacacattttgttaagttcctgttctttgtctgataaagagagaagactgagaagacaagcccaggcatcatgcagcaccgactttaactgtctgaagccccaaatagtgctatgcccccgctccactgggccttttcactatagaacaccctttgcccttcccttctgtggaagcctcccttgtttcccaacctgtgccactctttatcagatctacatgcccatcttatgtagcattccaccttgtcccattcattattcctgacttgaagccaaaattgtgtgaatccactggttcttttctcatgtgtatgttttgtgccctctgttcaccccagcactcctgtcatgtttgaaatgctggcatgaaatcctcctagagatgtccatcaaaagagttgggaagaggccctggagagaagcatcaggactgggatttgaggtttgacagtacctagaacaagaggagctgataccactgaaaaacagaacagatgttaaaaccatgggatagcacctacttttagctggcataaagtagagaagctgagtagtagtggttgtgaagtataaacgttcactgctgtggtaggtagctaagggaagaattgaaattatttttattgttactatcattttaaagacatatttttgctctattgtccaggctggagggcagtggtgcaatcatagctccctgtagtttcaaactcctgggctcaagtgatccatctcagcctcctcagtatctgggaccatgcctggctaatttttaaatttctgtacagacagagtcttgctacattgcccaggctgttcgtgaactcctggcctcaagcgatccttccaccttggcctctcaaagcactaggattacaggtgtgagccacagcacctggctaagttcagattattaatggccagtggtccctagtgttacagatgccaaatagtaagatgatgaaaagtatggttcagctgggtgtggtgcctcatgcctgtaatctcagcactttggggagccaaggcgggtggatcacctgaggtcaggagtttgagaccagcctggccaacatggcaaaaccccatctctactaaaaatacaaaaattagccaggtgtggtggtgtgcacctgtaattccggctactcaggaggctgaggcaggagaatcgcttgaacctgggaggcagaggttacagtgagccaagatcacgctactgcactccagcctgggagacagagccagactctctctcaaaaaaaaaaaaaaaaaaaaagggataggttgttaaccatggtagaaagaggtttaataatgcaagggggtgaagttggccccagctggcctgtaagatgaattagaaaaacgcttctccccaagtctggtggacacaactcccaagcatagttcggtgagcaaatggtgtctttttgagaaaggggaaaaaaaccaaaacaaaaacctttcctccatccctagcacccatggaaggattttaggccctagttcctccacttctcagccaggtaccctgcactttttgcagtagcctccttgcctggagcctaaggctaatttgctgatctgccaaccactgtctattctttctcctggtgtatctataagattctattagataaagacattagtacattgatttacgctattaaaaattatttctagccaggcactgtggcatgtccctatagtcccagctacttgggaggcagaggtgggaggatcacttgaggatagcaagactccgtctctacaaaaataaaaaaattagccaggcatggtcccagctatgtagaggctgaggtggatcacttgagcccaggagttagaggctgtagtgcacaatgaatgcacctgtgaatagccactgcactccagcctgggcaacatagatcctctctcttttaaaaagaaaaattatcttatccctcccttttccttgaaatcagagtccattccacactaactcaatgattctttttttttttcctttaattttttgtagaggtgggggtcttgctgtcttgcctaggctggtcttgaactcctggcctcaagccatcctcctgcctcgacctcctcaagtgttgggattgcaggtgtgagccattgcacccagccctgattcttttttaaaaaagctttattgaaatgcaatttaccataaaatttacccatgtaaggtgtaagatttaatggtttttgtgtatttacagaattgtacaaccatcaccagaatcaattttagaacattttcaccaaccccaaaagaaaatctactgtttagatatcaccctccaatcctccccaacccctggctagcactaatctgctgtttctctatatatttgcccattttggatatttcacagaaatgggatcataataatatgtggtcttttgtgactggcatcttccacttagtataatgttttccggtttcatctatatagcagcacacagcagtacttcattctttttcttttttaaaattgaagtaaaattcatataaaattcaccattttaaagtgtataatttagtggccgttagtacattcacaacgttgtacaattatcatcattatcaattccagaatgttttcattaccccaaaaagaaaccctgtacccttaagcagtcattccttctcttctcccccttaactcctggtaccactaatttgttttctgtctctatagatttgcctgttctggacatttcatataaatgggctcatacagtagtgcctttttctgtcttatcttcctttactcagcctaatgttttcagagttcatctatgttgtagcatgtattggtacttcattcctctttatggccaaataatactctattgcatggatataccacattttgtttatccattcatccattgatagccatttggatttacacattttggttattatgtaatgctgctataaacatttgtgtataa

SEQ ID NO: 152 - DNA, 2210 bp, Homo sapiens
gcgaggcagccagcgagggagagagcgagcgggcgagccggagcgaggaagggaaagcgcaagagagagcgcacacgcacacacccgccgcgcgcactcgcgcacggacccgcacggggacagctcggaagtcatcagttccatgggcgagatgctgctgctggcgagatgtctgctgctagtcctcgtctcctcgctgctggtatgctcgggactggcgtgcggaccgggcagggggttcgggaagaggaggcaccccaaaaagctgacccctttagcctacaagcagtttatccccaatgtggccgagaagaccctaggcgccagcggaaggtatgaagggaagatctccagaaactccgagcgatttaaggaactcacccccaattacaaccccgacatcatatttaaggatgaagaaaacaccggagcggacaggctgatgactcagaggtgtaaggacaagttgaacgctttggccatctcggtgatgaaccagtggccaggagtgaaactgcgggtgaccgagggctgggacgaagatggccaccactcagaggagtctctgcactacgagggccgcgcagtggacatcaccacgtctgaccgcgaccgcagcaagtacggcatgctggcccgcctggcggtggaggccggcttcgactgggtgtactacgagtccaaggcacatatccactgctcggtgaaagcagagaactcggtggcggccaaatcgggaggctgcttcccgggctcggccacggtgcacctggagcagggcggcaccaagctggtgaaggacctgagccccggggaccgcgtgctggcggcggacgaccagggccggctgctctacagcgacttcctcactttcctggaccgcgacgacggcgccaagaaggtcttctacgtgatcgagacgcgggagccgcgcgagcgcctgctgctcaccgccgcgcacctgctctttgtggcgccgcacaacgactcggccaccggggagcccgaggcgtcctcgggctcggggccgccttccgggggcgcactggggcctcgggcgctgttcgccagccgcgtgcgcccgggccagcgcgtgtacgtggtggccgagcgtgacggggaccgccggctcctgcccgccgctgtgcacagcgtgaccctaagcgaggaggccgcgggcgcctacgcgccgctcacggcccagggcaccattctcatcaaccgggtgctggcctcgtgctacgcggtcatcgaggagcacagctgggcgcaccgggccttcgcgcccttccgcctggcgcacgcgctcctggctgcactggcgcccgcgcgcacggaccgcggcggggacagcggcggcggggaccgcgggggcggcggcggcagagtagccctaaccgctccaggtgctgccgacgctccgggtgcgggggccaccgcgggcatccactggtactcgcagctgctctaccaaataggcacctggctcctggacagcgaggccctgcacccgctgggcatggcggtcaagtccagctgaagccggggggccgggggaggggcgcgggagggggcggggcggggcagcaacagcaacgcaaagcaaaaagacactcggaaaaggcgcacgaaccagactgagttataataagaataagaataataaagtaggacagtccaaagtagactctaaggaaacaaggaccccgggaagttttgttgttgtgcttagttgatatatattttttgaatttttttggttattgttttattttggttattttttcctcctctcctggctatttatttgtttggtatgaatagatgttttaaataatatgaaccggaccttcaagagccttaaatagtttgtttcttggataatttattatgatcatgtgaactgtactcacgggggaaagattattttgtgaggccaagcaacctgctcagagtctatttttctacatgtccctcgtcccggctgtcagaaagcaaacctctgtccccgccatccctcccttccatctcctgcttctcagcaagtgcaaactcaaacgtgcttcatgggggtccacaaattatatttttatacacagaattgtaaattagattttttgagagatcaatacttaactgaattacatttcatttttgaaatagtgtaaaatatgaaaatatattattttaatttaactagaaaaaaaaaa

SEQ ID NO: 153 - DNA, 733 bp, Homo sapiens
tgaagcctggagtggggtcccgagccgctacactaaatagatttaatgtgcgctctggggccgccaggaaagacgctcaggcctcgctaggagcatcggctgtttcaggacctggagaaaggcccccagctctaccctgagaggacgtgctcctccacgctcctccgcaaatgctgtccctcttccccagcccagggcccggctcttcgaggtgtaaggacaagttgaacgctttggccatctcggtgatgaaccagtggccaggagtgaaactgcgggtgaccgagggctgggacgaagatggccaccactcagaggagtctctgcactacgagggccgcgcagtggacatcaccacgtctgaccgcgaccgcagcaagtacggcatgctggcccgcctggcggtggaggccggcttcgactgggtgtactacgagtccaaggcacatatccactgctcggtgaaagcaggcaaggaaaggaaaccactgcttagagacactaggtacagggcatcaagagggtgcagcccagccccgccaggacgaggcgccgacttctcattcagggttgacggagccaagagtttgtgcaaaatgtatgcatggtggttgctgccagcctccctcatgactaaatgcatatctattcctgtcaaaacgtgtatcacaatgtacttgaaactgttatctttgtgctctattgtttgaataattaaagaaattacagagac

SEQ ID NO: 154 - DNA, 943 bp, Homo sapiens
tgaagcctggagtggggtcccgagccgctacactaaatagatttaatgtgcgctctggggccgccaggaaagacgctcaggcctcgctaggagcatcggctgtttcaggacctggagaaaggcccccagctctaccctgagaggacgtgctcctccacgctcctccgcaaatgctgtccctcttccccagcccagggcccggctcttcgaggtgtaaggacaagttgaacgctttggccatctcggtgatgaaccagtggccaggagtgaaactgcgggtgaccgagggctgggacgaagatggccaccactcagaggagtctctgcactacgagggccgcgcagtggacatcaccacgtctgaccgcgaccgcagcaagtacggcatgctggcccgcctggcggtggaggccggcttcgactgggtgtactacgagtccaaggcacatatccactgctcggtgaaagcaggtggtcagcaggttccaggctggtgtttacaatctcggaggaagtgcgatggtttctgttcttttgacagttcagtctgatttcaagtcagtcgaaagcgaaccagaagcaccgggcacagcagctcctctggctgtgtagacagacctggcaatgtggccgtgcagcccagacgatcagagagaagccaggcgttgaccaagccccaaggcaaggaaaggaaaccactgcttagagacactaggtacagggcatcaagagggtgcagcccagccccgccaggacgaggcgccgacttctcattcagggttgacggagccaagagtttgtgcaaaatgtatgcatggtggttgctgccagcctccctcatgactaaatgcatatctattcctgtcaaaacgtgtatcacaatgtacttgaaactgttatctttgtgctctattgtttgaataattaaagaaattacagagac

SEQ ID NO: 155 - DNA, 873 bp, Homo sapiens
tgaagcctggagtggggtcccgagccgctacactaaatagatttaatgtgcgctctggggccgccaggaaagacgctcaggcctcgctaggagcatcggctgtttcaggacctggagaaaggcccccagctctaccctgagaggacgtgctcctccacgctcctccgcaaatgctgtccctcttccccagcccagggcccggctcttcgaggtgtaaggacaagttgaacgctttggccatctcggtgatgaaccagtggccaggagtgaaactgcgggtgaccgagggctgggacgaagatggccaccactcagaggagtctctgcactacgagggccgcgcagtggacatcaccacgtctgaccgcgaccgcagcaagtacggcatgctggcccgcctggcggtggaggccggcttcgactgggtgtactacgagtccaaggcacatatccactgctcggtgaaagcagttcagtctgatttcaagtcagtcgaaagcgaaccagaagcaccgggcacagcagctcctctggctgtgtagacagacctggcaatgtggccgtgcagcccagacgatcagagagaagccaggcgttgaccaagccccaaggcaaggaaaggaaaccactgcttagagacactaggtacagggcatcaagagggtgcagcccagccccgccaggacgaggcgccgacttctcattcagggttgacggagccaagagtttgtgcaaaatgtatgcatggtggttgctgccagcctccctcatgactaaatgcatatctattcctgtcaaaacgtgtatcacaatgtacttgaaactgttatctttgtgctctattgtttgaataattaaagaaattacagagac

SEQ ID NO: 156 - DNA, 4066 bp, Homo sapiens
ccagcgccggggcgtggaatgtgtggctttccagggggttacgagaagccgaacacttccagacttaactctgtttgctcttcgggcagataggaaggtgatttcacccgctccttccccacccacctgcccgccccccatctcttcctcttcctggaggagaatggaggtcaagggtccagctggagaagtttagggtgtggtgggggtgaggacggtaacagacgtggttcattatggccctgatttgatgagtcttgctacaatggccttccccatcctacctctgccctggcttgtaacttggggagaccttcactttgggggcgtcggccctttccaagtcaggagtggaaatggaaggagaggctgggaatccccctcccacaaacatgaagtggtctcctggtactgtacgaacgaacgaacgtagccttgggcattggagctcagagcccccacgtttcccgttgcctctgtggttttctttcccaccactacccccaccctgcacctccccaccaaagaattctcaactggaaaagccaggaggcggttctgacaaaaggcaggggctccaggggagactccgcccgtccctgggtggctggctgtatcgcagagctggctttgcgattgcgtgtccgcaattgtgcccatcagagtgtgaatgtattgatatttctttaaggatgctctttcgttcttccaagcccgaggtaccttaggggagggacttagaacttattggcattgcatcactttagttttcaacctgcttgcataagaattaagagcgaataaatattagtgtggggggaggggaagctaagcaaaatatgaattcctctctctctccccacctcctttgagatttctgagctgccaatctcccagccaattctagactttctgaaactccatgcacgtataactgaagccagaaatgggtttccttgcaaatataggtcaacatcctttttattgccctattaaaatattcaagtcctacctttagggctaggtgcgtacagcggctgatggagtggcgctggtggggcgcaagtgcagggggagggtactgacggcagagagagaggagctacctccgtgccgccctgcttcccgacccgattcccaggcttgcttgaggccgagaaaggcgaggggcaggcaaggtagcctgctccagctgtcggaagggagaggaatgggaaatggtcctgatttccttgctctccctcatctgctcccgaccaccttaaatctggaccgcgagtgtggacgcgcgcgccagtgccagacagcagcgcgatccacaattaactctgcacgggccatggggtgcccgttgcgtgcagctggctggagggagttctccggctagcccgaggcgcccatcctctcgtcaccctcactccccgcggaggaggggccttgccagggtccctcggaacccgagaggagggaggcactgcggagagagcggcgggggcgtggatacccgaggtcccagagccagagtgggtcagcttctgccctgctctgcgggaggccaataccgcagaaggggtcctgggctcgcacaccttcccagggcttgggccttgcagccctgctgcaaagctgcaagcgcacagagccgcgcagcgaggcagacgcctgcagccccacttactcccgggttatcgatcccccgcggctagggtttcagtgcgcgaggggctgggctggagccgccgggctctgctgctccacgcgcgggagcgcaggcaccgcaggagctaacagcagcgccgggctcgctgtagtgtccccggcggcgggggcgcggagatgggggcgcccgcgcaggggccggggcgcatcgcgggctccgccggcctgccctgggacgcgcccccatccccagtccgccgcctgcctggcctctaggcctccgcgtcccagccggagcccccagcccgggggcctccccccgacccccgtccgccctgccgggggacgcagggcccagcggccccgcgcccggccactctcgccgccgcgcgcacaggcagcatttgaacttctgaccttctgtcaacttccctcagacgaacgaaacgaaaacaaatacttttttccttgggcagtggctattcccgttcccaacacaaaaggagggggaaggacggcccaagtgggggttgggtgaggagagccaggccgggattatcaggcagaccccacaaaggtcccctaaaaccgaggggggtaggggctggcagtctgtgaggtatccccggttgatccctcccctaccttccttctcccgattccaggagttaagggtgggggaggaagggatggggaaggcggaggctcgggtgctgagggcaggggcggggtgcaggaggcggcaggggagccccaggccggcgggaggtttggggagcctgctcggccgccctcattttaaataaccacctaggctctgccccaggtgcgtgaccctcttcttctgtctccctccctgtctctgggtctctaatgtgactgccgcccaagtccctcaaccatggcgagatcgtccccagtggaactttcggagcagttccggaacgcaggagctgccggttaatattaacccgggagaggaaagcgcagacagacacgctctccccgcgcgggcctaggtgccaggcgagggtgctggcggccagggggctcctaaggggcaggaggccagagggccggatctgaagcctggagtggggtcccgagccgctacactaaatagatttaatgtgcgctctggggccgccaggaaagacgctcaggcctcgctaggagcatcggctgtttcaggacctggagaaaggcccccagctctaccctgagaggacgtgctcctccacgctcctccgcaaatgctgtccctcttccccagcccagggcccggctcttcgaggtgtaaggacaagttgaacgctttggccatctcggtgatgaaccagtggccaggagtgaaactgcgggtgaccgagggctgggacgaagatggccaccactcagaggagtctctgcactacgagggccgcgcagtggacatcaccacgtctgaccgcgaccgcagcaagtacggcatgctggcccgcctggcggtggaggccggcttcgactgggtgtactacgagtccaaggcacatatccactgctcggtgaaagcagagaactcggtggcggccaaatcgggaggctgcttcccgggctcggccacggtgcacctggagcagggcggcaccaagctggtgaaggacctgagccccggggaccgcgtgctggcggcggacgaccagggccggctgctctacagcgacttcctcactttcctggaccgcgacgacggcgccaagaaggtcttctacgtgatcgagacgcgggagccgcgcgagcgcctgctgctcaccgccgcgcacctgctctttgtggcgccgcacaacgactcggccaccggggagcccgaggcgtcctcgggctcggggccgccttccgggggcgcactggggcctcgggcgctgttcgccagccgcgtgcgcccgggccagcgcgtgtacgtggtggccgagcgtgacggggaccgccggctcctgcccgccgctgtgcacagcgtgaccctaagcgaggaggccgcgggcgcctacgcgccgctcacggcccagggcaccattctcatcaaccgggtgctggcctcgtgctacgcggtcatcgaggagcacagctgggcgcaccgggccttcgcgcccttccgcctggcgcacgcgctcctggctgcactggcgcccgcgcgcacggaccgcggcggggacagcggcggcggggaccgcgggggcggcggcggcagagtagccctaaccgctccaggtgctgccgacgctccgggtgcgggggccaccgcgggcatccactggtactcgcagctgctctaccaaataggcacctggctcctggacagcgaggccctgcacccgctgggcatggcggtcaagtccagctgaagccggggggccgggggaggggcgcg

SEQ ID NO: 157 - DNA, 4364 bp, Homo sapiens
ccagcgccggggcgtggaatgtgtggctttccagggggttacgagaagccgaacacttccagacttaactctgtttgctcttcgggcagataggaaggtgatttcacccgctccttccccacccacctgcccgccccccatctcttcctcttcctggaggagaatggaggtcaagggtccagctggagaagtttagggtgtggtgggggtgaggacggtaacagacgtggttcattatggccctgatttgatgagtcttgctacaatggccttccccatcctacctctgccctggcttgtaacttggggagaccttcactttgggggcgtcggccctttccaagtcaggagtggaaatggaaggagaggctgggaatccccctcccacaaacatgaagtggtctcctggtactgtacgaacgaacgaacgtagccttgggcattggagctcagagcccccacgtttcccgttgcctctgtggttttctttcccaccactacccccaccctgcacctccccaccaaagaattctcaactggaaaagccaggaggcggttctgacaaaaggcaggggctccaggggagactccgcccgtccctgggtggctggctgtatcgcagagctggctttgcgattgcgtgtccgcaattgtgcccatcagagtgtgaatgtattgatatttctttaaggatgctctttcgttcttccaagcccgaggtaccttaggggagggacttagaacttattggcattgcatcactttagttttcaacctgcttgcataagaattaagagcgaataaatattagtgtggggggaggggaagctaagcaaaatatgaattcctctctctctccccacctcctttgagatttctgagctgccaatctcccagccaattctagactttctgaaactccatgcacgtataactgaagccagaaatgggtttccttgcaaatataggtcaacatcctttttattgccctattaaaatattcaagtcctacctttagggctaggtgcgtacagcggctgatggagtggcgctggtggggcgcaagtgcagggggagggtactgacggcagagagagaggagctacctccgtgccgccctgcttcccgacccgattcccaggcttgcttgaggccgagaaaggcgaggggcaggcaaggtagcctgctccagctgtcggaagggagaggaatgggaaatggtcctgatttccttgctctccctcatctgctcccgaccaccttaaatctggaccgcgagtgtggacgcgcgcgccagtgccagacagcagcgcgatccacaattaactctgcacgggccatggggtgcccgttgcgtgcagctggctggagggagttctccggctagcccgaggcgcccatcctctcgtcaccctcactccccgcggaggaggggccttgccagggtccctcggaacccgagaggagggaggcactgcggagagagcggcgggggcgtggatacccgaggtcccagagccagagtgggtcagcttctgccctgctctgcgggaggccaataccgcagaaggggtcctgggctcgcacaccttcccagggcttgggccttgcagccctgctgcaaagctgcaagcgcacagagccgcgcagcgaggcagacgcctgcagccccacttactcccgggttatcgatcccccgcggctagggtttcagtgcgcgaggggctgggctggagccgccgggctctgctgctccacgcgcgggagcgcaggcaccgcaggagctaacagcagcgccgggctcgctgtagtgtccccggcggcgggggcgcggagatgggggcgcccgcgcaggggccggggcgcatcgcgggctccgccggcctgccctgggacgcgcccccatccccagtccgccgcctgcctggcctctaggcctccgcgtcccagccggagcccccagcccgggggcctccccccgacccccgtccgccctgccgggggacgcagggcccagcggccccgcgcccggccactctcgccgccgcgcgcacaggcagcatttgaacttctgaccttctgtcaacttccctcagacgaacgaaacgaaaacaaatacttttttccttgggcagtggctattcccgttcccaacacaaaaggagggggaaggacggcccaagtgggggttgggtgaggagagccaggccgggattatcaggcagaccccacaaaggtcccctaaaaccgaggggggtaggggctggcagtctgtgaggtatccccggttgatccctcccctaccttccttctcccgattccaggagttaagggtgggggaggaagggatggggaaggcggaggctcgggtgctgagggcaggggcggggtgcaggaggcggcaggggagccccaggccggcgggaggtttggggagcctgctcggccgccctcattttaaataaccacctaggctctgccccaggtgcgtgaccctcttcttctgtctccctccctgtctctgggtctctaatgtgactgccgcccaagtccctcaaccatggcgagatcgtccccagtggaactttcggagcagttccggaacgcaggagctgccggttaatattaacccgggagaggaaagcgcagacagacacgctctccccgcgcgggcctaggtgccaggcgagggtgctggcggccagggggctcctaaggggcaggaggccagagggccggatctgaagcctggagtggggtcccgagccgctacactaaatagatttaatgtgcgctctggggccgccaggaaagacgctcagtttgctcttcaaacttgctggacgccattctatgctggggccaagaacacaagagcggaggaagggaacaggttaaagaaaacaagaaacacaatcagaccacagaaaagccaggcagaaaagggttcgacgggcaaaaagaatgtggctgtccagataaagaatgtctgtcccggccccggcctgtgctgcaagtggcaactcacctagccgcctgccacccaggctcccgcccaccgcgcagccccgccagcggcttctcgcctcccctctgcctcggatagggttagggcctgaggcctcgctaggagcatcggctgtttcaggacctggagaaaggcccccagctctaccctgagaggacgtgctcctccacgctcctccgcaaatgctgtccctcttccccagcccagggcccggctcttcgaggtgtaaggacaagttgaacgctttggccatctcggtgatgaaccagtggccaggagtgaaactgcgggtgaccgagggctgggacgaagatggccaccactcagaggagtctctgcactacgagggccgcgcagtggacatcaccacgtctgaccgcgaccgcagcaagtacggcatgctggcccgcctggcggtggaggccggcttcgactgggtgtactacgagtccaaggcacatatccactgctcggtgaaagcagagaactcggtggcggccaaatcgggaggctgcttcccgggctcggccacggtgcacctggagcagggcggcaccaagctggtgaaggacctgagccccggggaccgcgtgctggcggcggacgaccagggccggctgctctacagcgacttcctcactttcctggaccgcgacgacggcgccaagaaggtcttctacgtgatcgagacgcgggagccgcgcgagcgcctgctgctcaccgccgcgcacctgctctttgtggcgccgcacaacgactcggccaccggggagcccgaggcgtcctcgggctcggggccgccttccgggggcgcactggggcctcgggcgctgttcgccagccgcgtgcgcccgggccagcgcgtgtacgtggtggccgagcgtgacggggaccgccggctcctgcccgccgctgtgcacagcgtgaccctaagcgaggaggccgcgggcgcctacgcgccgctcacggcccagggcaccattctcatcaaccgggtgctggcctcgtgctacgcggtcatcgaggagcacagctgggcgcaccgggccttcgcgcccttccgcctggcgcacgcgctcctggctgcactggcgcccgcgcgcacggaccgcggcggggacagcggcggcggggaccgcgggggcggcggcggcagagtagccctaaccgctccaggtgctgccgacgctccgggtgcgggggccaccgcgggcatccactggtactcgcagctgctctaccaaataggcacctggctcctggacagcgaggccctgcacccgctgggcatggcggtcaagtccagctgaagccggggggccgggggaggggcgcg

SEQ ID NO: 158 - DNA, 2153 bp, Homo sapiens
tccgccgccgcgcccgcctacaaggccctgagggagactgcggagggtgagtgcgcggtgggctcggctgaccgttggccctgcggccggcgccctaggctacctcccttcgcctccccgcgcctccccgcgcctccccgcctccccgcctccccgcctcctcggctctggttccaacaccccagcgccaagccggggaggcggggaggacttcttaagtgtgccgctcgggagcctcccgctcgtcccgccccgaggggcgtgaggaggggaggggctgcggacttcggactcgggcctggagaccgcctcctacccagagccggagcccgcaacccgctcaggcggcgacggagccatgtcgccgctgctggggctccggtccgagctgcaggacacctgcacctcgctgggactgatgctgtcggtggtgctgctcatggggctggcccgcgtagtcgcccggcagcagctgcacaggccggtggcccacgccttcgtcctggagtttctagccaccttccagctctgctgctgcacccacgagctgcaactgctgagcgaacagcaccccgcgcaccccacctggacgctgacgctcgtctacttcttctcgcttgtgcatggcctgactctggtgggcacgtccagcaacccgtgcggcgtgatgatgcagatgatgctggggggcatgtcccccgagacgggtgcggtgaggctattggctcagctggttagtgccctgtgcagcaggtactgcacaagcgccttgtggagcttgggtctgacccagtatcacgtcagcgagaggagcttcgcttgcaagaatcccatccgagtcgacttgctcaaagcggtcatcacagaggccgtctgctcctttctcttccacagcgctctgctgcacttccaggaagtccgaaccaagcttcgtatccacctgctggctgcactcatcacctttttggtctatgcaggaggaagtctaacaggagctgtatttaatccagctttggcactttcgctacatttcatgtgttttgatgaagcattccctcagttttttatagtatactggctggctccttctttaggtatattgttgatgattttgatgttcagctttttccttccatggctgcataacaaccatacaattaataaaaaggaataactgttccaaagactcagactaacatacaggacagtccagctggatgtgataaagattttatcacctcatatggaaaacaccggctgcactggattcatcagtgttaacttcctttgaggaagctgccttatagttttcatcactgggactttaaaaaaaaattactgtgaaaatgaggtattctgtacttctcagttaagacttgttctttgagtgatgtattaaatgctgctagaaaagcctcattacattaaatataaatcaatcttaaatgataattgttaactttgatgaaaaacgagtacaggatgagaagggaagtaaaggtgatagtaagatcaacgaatttgtgtatcaagtgtcacccaaatgaacagaatttttaactataaaagtacaaggcgtcaacttacagaactggggagaggatactttcagccaccacctcacaaaatgataccatcaagcagtgtcatctttcaacaggaaagttgcttttagaagtagaatatatattcactcacatgcaagcgatttcctacattttaagtacattaaaatctaatacctaaaatagtttctctaaatagacaatctcactagctccagccaagtggttattctttaatagaatataataaaacaaaacacccatacaaagtcaggatttaagcttttcacattctcctttgaaccaacagctagctaccttatgaagtagggagggcatgtatttttaatctccattttacagataaggaaactaagcctagatgggtttgctgccctggcttagatcacatagagccaaataccatctctagtcttcaacttcaatccaaaaattcttctcggtcacgattatgactaaagggaaatcaagggttcatagaaacattaaatactttataataacgttaaaacttgtttagaaattaactagtattttttgaggtttaaagaaccttccagttttact

SEQ ID NO: 159 - DNA, 2017 bp, Homo sapiens
acaaggccctgagggagactgcggagggtgagtgcgcggtgggctcggctgaccgttggccctgcggccggcgccctaggctacctcccttcgcctccccgcgcctccccgcgcctccccgcctccccgcctccccgcctcctcggctctggttccaacaccccagcgccaagccggggaggcggggaggacttcttaagtgtgccgctcgggagcctcccgctcgtcccgccccgaggggcgtgaggaggggaggggctgcggacttcggactcgggcctggagaccgcctcctacccagagccggagcccgcaacccgctcaggcggcgacggagccatgtcgccgctgctggggctccggtccgagctgcaggacacctgcacctcgctgggactgatgctgtcggtggtgctgctcatggggctggcccgcgtagtcgcccggcagcagctgcacaggccggtggcccacgccttcgtcctggagtttctagccaccttccagctctgctgctgcacccacgagctgcaactgctgagcgaacagcaccccgcgcaccccacctggacgctgacgctcgtctacttcttctcgcttgtgcatggcctgactctggtgggcacgtccagcaacccgtgcggcgtgatgatgcagatgatgctggggggcatgtcccccgagacgggtgcggtgaggctattggctcagctggttagtgccctgtgcagcaggtactgcacaagcgccttgtggagcttgggtctgacccagtatcacgtcagcgagaggagcttcgcttgcaagaatcccatccgagtcgacttgctcaaagcggtcatcacagaggccgtctgctcctttctcttccacagcgctctgctgcacttccaggaagtccgaaccaagcttcgtatccacctgctggctgcactcatcacctttttggtctatgcaggtatattgttgatgattttgatgttcagctttttccttccatggctgcataacaaccatacaattaataaaaaggaataactgttccaaagactcagactaacatacaggacagtccagctggatgtgataaagattttatcacctcatatggaaaacaccggctgcactggattcatcagtgttaacttcctttgaggaagctgccttatagttttcatcactgggactttaaaaaaaaattactgtgaaaatgaggtattctgtacttctcagttaagacttgttctttgagtgatgtattaaatgctgctagaaaagcctcattacattaaatataaatcaatcttaaatgataattgttaactttgatgaaaaacgagtacaggatgagaagggaagtaaaggtgatagtaagatcaacgaatttgtgtatcaagtgtcacccaaatgaacagaatttttaactataaaagtacaaggcgtcaacttacagaactggggagaggatactttcagccaccacctcacaaaatgataccatcaagcagtgtcatctttcaacaggaaagttgcttttagaagtagaatatatattcactcacatgcaagcgatttcctacattttaagtacattaaaatctaatacctaaaatagtttctctaaatagacaatctcactagctccagccaagtggttattctttaatagaatataataaaacaaaacacccatacaaagtcaggatttaagcttttcacattctcctttgaaccaacagctagctaccttatgaagtagggagggcatgtatttttaatctccattttacagataaggaaactaagcctagatgggtttgctgccctggcttagatcacatagagccaaataccatctctagtcttcaacttcaatccaaaaattcttctcggtcacgattatgactaaagggaaatcaagggttcatagaaacattaaatactttataataacgttaaaacttgtttagaaattaactagtattttttgaggtttaaagaaccttccagttttact

SEQ ID NO: 160 - DNA, 4412 bp, Homo sapiens; identical to SEQ ID NO: 10

SEQ ID NO: 161 - DNA, 1943 bp, Homo sapiens
aatagtggatgagctgtgagtgcgcgcgcgtgcgcggggccgcgacctgtgccggctcgagcccgctgggcactcggaggcgcgcacgtcgttccccgccctcccgccgccgcccgccctcgctctctcgcgctaccctcccgccgcccgcggtcctccgtcggttctctcgttagtccacggtctggtcttcagctacccgccttcgtctccgagtttgcgactcgcggaccggcgtccccggcgcgaagaggctggactcggattcgttgcctgagcaatggctgccatccggaagaaactggtgattgttggtgatggagcctgtggaaagacatgcttgctcatagtcttcagcaaggaccagttcccagaggtgtatgtgcccacagtgtttgagaactatgtggcagatatcgaggtggatggaaagcaggtagagttggctttgtgggacacagctgggcaggaagattatgatcgcctgaggcccctctcctacccagataccgatgttatactgatgtgtttttccatcgacagccctgatagtttagaaaacatcccagaaaagtggaccccagaagtcaagcatttctgtcccaacgtgcccatcatcctggttgggaataagaaggatcttcggaatgatgagcacacaaggcgggagctagccaagatgaagcaggagccggtgaaacctgaagaaggcagagatatggcaaacaggattggcgcttttgggtacatggagtgttcagcaaagaccaaagatggagtgagagaggtttttgaaatggctacgagagctgctctgcaagctagacgtgggaagaaaaaatctgggtgccttgtcttgtgaaaccttgctgcaagcacagcccttatgcggttaattttgaagtgctgtttattaatcttagtgtatgattactggcctttttcatttatctataatttacctaagattacaaatcagaagtcatcttgctaccagtatttagaagccaactatgattattaacgatgtccaacccgtctggcccaccagggtccttttgacactgctctaacagccctcctctgcactcccacctgacacaccaggcgctaattcaaggaatttcttaacttcttgcttctttctagaaagagaaacagttggtaacttttgtgaattaggctgtaactactttataactaacatgtcctgcctattatctgtcagctgcaaggtactctggtgagtcaccacttcagggctttactccgtaacagattttgttggcatagctctggggtgggcagttttttgaaaatgggctcaaccagaaaagcccaagttcatgcagctgtggcagagttacagttctgtggtttcatgttagttaccttatagttactgtgtaattagtgccacttaatgtatgttaccaaaaataaatatatctaccccagactagatgtagtattttttgtataattggatttcctaatactgtcatcctcaaagaaagtgtattggttttttaaaaaagaaagtgtatttggaaataaagtcagatggaaaattcattttttaaattcccgttttgtcactttttctgataaaagatggccatattaccccttttcggccccatgtatctcagtaccccatggagctgggctaagtaaataggaattggtttcacgcctgaggcaattagacactttggaagatggcataacctgtctcacctggacttaagcatctggctctaattcacagtgctcttttctcctcactgtatccaggttccctcccagaggagccaccagttctcatgggtggcactcagtctctcttctctccagctgactaaactttttttctgtaccagttaatttttccaactactaatagaataaaggcagttttctaaacttcctgtaaaaaaaaa

SEQ ID NO: 162 - DNA, 2038 bp, Homo sapiens
aatagtggatgagctgtgagtgcgcgcgcgtgcgcggggccgcgacctgtgccggctcgagcccgctgggcactcggaggcgcgcacgtcgttccccgccctcccgccgccgcccgccctcgctctctcgcgctaccctcccgccgcccgcggtcctccgtcggttctctcgttagtccacggtctggtcttcagctacccgccttcgtctccgagtttgcgactcgcggaccggcgtccccggcgcgaagaggctggactcggattcgttgcctgagagatggtgtcttgctatgttgcccagacagatcttgtactcctgggctcaagttgtcctcctgcctcagcctcccaaagtgctgggattaaagatcaatggctgccatccggaagaaactggtgattgttggtgatggagcctgtggaaagacatgcttgctcatagtcttcagcaaggaccagttcccagaggtgtatgtgcccacagtgtttgagaactatgtggcagatatcgaggtggatggaaagcaggtagagttggctttgtgggacacagctgggcaggaagattatgatcgcctgaggcccctctcctacccagataccgatgttatactgatgtgtttttccatcgacagccctgatagtttagaaaacatcccagaaaagtggaccccagaagtcaagcatttctgtcccaacgtgcccatcatcctggttgggaataagaaggatcttcggaatgatgagcacacaaggcgggagctagccaagatgaagcaggagccggtgaaacctgaagaaggcagagatatggcaaacaggattggcgcttttgggtacatggagtgttcagcaaagaccaaagatggagtgagagaggtttttgaaatggctacgagagctgctctgcaagctagacgtgggaagaaaaaatctgggtgccttgtcttgtgaaaccttgctgcaagcacagcccttatgcggttaattttgaagtgctgtttattaatcttagtgtatgattactggcctttttcatttatctataatttacctaagattacaaatcagaagtcatcttgctaccagtatttagaagccaactatgattattaacgatgtccaacccgtctggcccaccagggtccttttgacactgctctaacagccctcctctgcactcccacctgacacaccaggcgctaattcaaggaatttcttaacttcttgcttctttctagaaagagaaacagttggtaacttttgtgaattaggctgtaactactttataactaacatgtcctgcctattatctgtcagctgcaaggtactctggtgagtcaccacttcagggctttactccgtaacagattttgttggcatagctctggggtgggcagttttttgaaaatgggctcaaccagaaaagcccaagttcatgcagctgtggcagagttacagttctgtggtttcatgttagttaccttatagttactgtgtaattagtgccacttaatgtatgttaccaaaaataaatatatctaccccagactagatgtagtattttttgtataattggatttcctaatactgtcatcctcaaagaaagtgtattggttttttaaaaaagaaagtgtatttggaaataaagtcagatggaaaattcattttttaaattcccgttttgtcactttttctgataaaagatggccatattaccccttttcggccccatgtatctcagtaccccatggagctgggctaagtaaataggaattggtttcacgcctgaggcaattagacactttggaagatggcataacctgtctcacctggacttaagcatctggctctaattcacagtgctcttttctcctcactgtatccaggttccctcccagaggagccaccagttctcatgggtggcactcagtctctcttctctccagctgactaaactttttttctgtaccagttaatttttccaactactaatagaataaaggcagttttctaaacttcctgtaaaaaaaaa

SEQ ID NO: 163 - DNA, 2082 bp, Homo sapiens
aatagtggatgagctgtgagtgcgcgcgcgtgcgcggggccgcgacctgtgccggctcgagcccgctgggcactcggaggcgcgcacgtcgttccccgccctcccgccgccgcccgccctcgctctctcgcgctaccctcccgccgcccgcggtcctccgtcggttctctcgttagtccacggtctggtcttcagctacccgccttcgtctccgagtttgcgactcgcggaccggcgtccccggcgcgaagaggctggactcggattcgttgcctgagcaatggctgccatccggaagaaactggtgattgttggtgatggagcctgtggaaagacatgcttgctcatagtcttcagcaaggaccagttcccagaggtgtatgtgcccacagtgtttgagaactatgtggcagatatcgaggtggatggaaagcaggtagagttggctttgtgggacacagctgggcaggaagattatgatcgcctgaggcccctctcctacccagataccgatgttatactgatgtgtttttccatcgacagccctgatagtttagaaaacatcccagaaaagtggaccccagaagtcaagcatttctgtcccaacgtgcccatcatcctggttgggaataagaaggatcttcggaatgatgagcacacaaggcgggagctagccaagatgaagcaggagcctcactgtgtcgccaggctggagtgctgtggcacgatcttggctcaactgcaacctccgcctcccagatttaagcgattcccctgcctcagcctcctgagtagctggggttacaggcgcccactaccacacccaggagccggtgaaacctgaagaaggcagagatatggcaaacaggattggcgcttttgggtacatggagtgttcagcaaagaccaaagatggagtgagagaggtttttgaaatggctacgagagctgctctgcaagctagacgtgggaagaaaaaatctgggtgccttgtcttgtgaaaccttgctgcaagcacagcccttatgcggttaattttgaagtgctgtttattaatcttagtgtatgattactggcctttttcatttatctataatttacctaagattacaaatcagaagtcatcttgctaccagtatttagaagccaactatgattattaacgatgtccaacccgtctggcccaccagggtccttttgacactgctctaacagccctcctctgcactcccacctgacacaccaggcgctaattcaaggaatttcttaacttcttgcttctttctagaaagagaaacagttggtaacttttgtgaattaggctgtaactactttataactaacatgtcctgcctattatctgtcagctgcaaggtactctggtgagtcaccacttcagggctttactccgtaacagattttgttggcatagctctggggtgggcagttttttgaaaatgggctcaaccagaaaagcccaagttcatgcagctgtggcagagttacagttctgtggtttcatgttagttaccttatagttactgtgtaattagtgccacttaatgtatgttaccaaaaataaatatatctaccccagactagatgtagtattttttgtataattggatttcctaatactgtcatcctcaaagaaagtgtattggttttttaaaaaagaaagtgtatttggaaataaagtcagatggaaaattcattttttaaattcccgttttgtcactttttctgataaaagatggccatattaccccttttcggccccatgtatctcagtaccccatggagctgggctaagtaaataggaattggtttcacgcctgaggcaattagacactttggaagatggcataacctgtctcacctggacttaagcatctggctctaattcacagtgctcttttctcctcactgtatccaggttccctcccagaggagccaccagttctcatgggtggcactcagtctctcttctctccagctgactaaactttttttctgtaccagttaatttttccaactactaatagaataaaggcagttttctaaacttcctgtaaaaaaaaa

SEQ ID NO: 164 - DNA, 1883 bp, Homo sapiens
aatagtggatgagctgtgagtgcgcgcgcgtgcgcggggccgcgacctgtgccggctcgagcccgctgggcactcggaggcgcgcacgtcgttccccgccctcccgccgccgcccgccctcgctctctcgcgctaccctcccgccgcccgcggtcctccgtcggttctctcgttagtccacggtctggtcttcagctacccgccttcgtctccgagtttgcgactcgcggaccggcgtccccggcgcgaagaggctggactcggattcgttgcctgagcaatggctgccatccggaagaaactggtgattgttggtgatggagcctgtggaaagacatgcttgctcatagtcttcagcaaggaccagttcccagaggtgtatgtgcccacagtgtttgagaactatgtggaagattatgatcgcctgaggcccctctcctacccagataccgatgttatactgatgtgtttttccatcgacagccctgatagtttagaaaacatcccagaaaagtggaccccagaagtcaagcatttctgtcccaacgtgcccatcatcctggttgggaataagaaggatcttcggaatgatgagcacacaaggcgggagctagccaagatgaagcaggagccggtgaaacctgaagaaggcagagatatggcaaacaggattggcgcttttgggtacatggagtgttcagcaaagaccaaagatggagtgagagaggtttttgaaatggctacgagagctgctctgcaagctagacgtgggaagaaaaaatctgggtgccttgtcttgtgaaaccttgctgcaagcacagcccttatgcggttaattttgaagtgctgtttattaatcttagtgtatgattactggcctttttcatttatctataatttacctaagattacaaatcagaagtcatcttgctaccagtatttagaagccaactatgattattaacgatgtccaacccgtctggcccaccagggtccttttgacactgctctaacagccctcctctgcactcccacctgacacaccaggcgctaattcaaggaatttcttaacttcttgcttctttctagaaagagaaacagttggtaacttttgtgaattaggctgtaactactttataactaacatgtcctgcctattatctgtcagctgcaaggtactctggtgagtcaccacttcagggctttactccgtaacagattttgttggcatagctctggggtgggcagttttttgaaaatgggctcaaccagaaaagcccaagttcatgcagctgtggcagagttacagttctgtggtttcatgttagttaccttatagttactgtgtaattagtgccacttaatgtatgttaccaaaaataaatatatctaccccagactagatgtagtattttttgtataattggatttcctaatactgtcatcctcaaagaaagtgtattggttttttaaaaaagaaagtgtatttggaaataaagtcagatggaaaattcattttttaaattcccgttttgtcactttttctgataaaagatggccatattaccccttttcggccccatgtatctcagtaccccatggagctgggctaagtaaataggaattggtttcacgcctgaggcaattagacactttggaagatggcataacctgtctcacctggacttaagcatctggctctaattcacagtgctcttttctcctcactgtatccaggttccctcccagaggagccaccagttctcatgggtggcactcagtctctcttctctccagctgactaaactttttttctgtaccagttaatttttccaactactaatagaataaaggcagttttctaaacttcctgtaaaaaaaaa

SEQ ID NO: 165 - DNA, 1820 bp, Homo sapiens
aatagtggatgagctgtgagtgcgcgcgcgtgcgcggggccgcgacctgtgccggctcgagcccgctgggcactcggaggcgcgcacgtcgttccccgccctcccgccgccgcccgccctcgctctctcgcgctaccctcccgccgcccgcggtcctccgtcggttctctcgttagtccacggtctggtcttcagctacccgccttcgtctccgagtttgcgactcgcggaccggcgtccccggcgcgaagaggtgtatgtgcccacagtgtttgagaactatgtggcagatatcgaggtggatggaaagcaggtagagttggctttgtgggacacagctgggcaggaagattatgatcgcctgaggcccctctcctacccagataccgatgttatactgatgtgtttttccatcgacagccctgatagtttagaaaacatcccagaaaagtggaccccagaagtcaagcatttctgtcccaacgtgcccatcatcctggttgggaataagaaggatcttcggaatgatgagcacacaaggcgggagctagccaagatgaagcaggagccggtgaaacctgaagaaggcagagatatggcaaacaggattggcgcttttgggtacatggagtgttcagcaaagaccaaagatggagtgagagaggtttttgaaatggctacgagagctgctctgcaagctagacgtgggaagaaaaaatctgggtgccttgtcttgtgaaaccttgctgcaagcacagcccttatgcggttaattttgaagtgctgtttattaatcttagtgtatgattactggcctttttcatttatctataatttacctaagattacaaatcagaagtcatcttgctaccagtatttagaagccaactatgattattaacgatgtccaacccgtctggcccaccagggtccttttgacactgctctaacagccctcctctgcactcccacctgacacaccaggcgctaattcaaggaatttcttaacttcttgcttctttctagaaagagaaacagttggtaacttttgtgaattaggctgtaactactttataactaacatgtcctgcctattatctgtcagctgcaaggtactctggtgagtcaccacttcagggctttactccgtaacagattttgttggcatagctctggggtgggcagttttttgaaaatgggctcaaccagaaaagcccaagttcatgcagctgtggcagagttacagttctgtggtttcatgttagttaccttatagttactgtgtaattagtgccacttaatgtatgttaccaaaaataaatatatctaccccagactagatgtagtattttttgtataattggatttcctaatactgtcatcctcaaagaaagtgtattggttttttaaaaaagaaagtgtatttggaaataaagtcagatggaaaattcattttttaaattcccgttttgtcactttttctgataaaagatggccatattaccccttttcggccccatgtatctcagtaccccatggagctgggctaagtaaataggaattggtttcacgcctgaggcaattagacactttggaagatggcataacctgtctcacctggacttaagcatctggctctaattcacagtgctcttttctcctcactgtatccaggttccctcccagaggagccaccagttctcatgggtggcactcagtctctcttctctccagctgactaaactttttttctgtaccagttaatttttccaactactaatagaataaaggcagttttctaaacttcctgtaaaaaaaaa

SEQ ID NO: 166 - DNA, 1691 bp, Homo sapiens
aatagtggatgagctgtgagtgcgcgcgcgtgcgcggggccgcgacctgtgccggctcgagcccgctgggcactcggaggcgcgcacgtcgttccccgccctcccgccgccgcccgccctcgctctctcgcgctaccctcccgccgcccgcggtcctccgtcggttctctcgttagtccacggtctggtcttcagctacccgccttcgtctccgagtttgcgactcgcggaccggcgtccccggcgcgaagaggctggactcggattcgttgcctgagcaatggctgccatccggaagaaactggtgattgttggtgatggagcctgtggaaagacatgcttgctcatagtcttcagcaaggaccagttcccagaggtgtatgtgcccacagtgtttgagaactatgtggcagatatcgaggtggatggaaagcaggagccggtgaaacctgaagaaggcagagatatggcaaacaggattggcgcttttgggtacatggagtgttcagcaaagaccaaagatggagtgagagaggtttttgaaatggctacgagagctgctctgcaagctagacgtgggaagaaaaaatctgggtgccttgtcttgtgaaaccttgctgcaagcacagcccttatgcggttaattttgaagtgctgtttattaatcttagtgtatgattactggcctttttcatttatctataatttacctaagattacaaatcagaagtcatcttgctaccagtatttagaagccaactatgattattaacgatgtccaacccgtctggcccaccagggtccttttgacactgctctaacagccctcctctgcactcccacctgacacaccaggcgctaattcaaggaatttcttaacttcttgcttctttctagaaagagaaacagttggtaacttttgtgaattaggctgtaactactttataactaacatgtcctgcctattatctgtcagctgcaaggtactctggtgagtcaccacttcagggctttactccgtaacagattttgttggcatagctctggggtgggcagttttttgaaaatgggctcaaccagaaaagcccaagttcatgcagctgtggcagagttacagttctgtggtttcatgttagttaccttatagttactgtgtaattagtgccacttaatgtatgttaccaaaaataaatatatctaccccagactagatgtagtattttttgtataattggatttcctaatactgtcatcctcaaagaaagtgtattggttttttaaaaaagaaagtgtatttggaaataaagtcagatggaaaattcattttttaaattcccgttttgtcactttttctgataaaagatggccatattaccccttttcggccccatgtatctcagtaccccatggagctgggctaagtaaataggaattggtttcacgcctgaggcaattagacactttggaagatggcataacctgtctcacctggacttaagcatctggctctaattcacagtgctcttttctcctcactgtatccaggttccctcccagaggagccaccagttctcatgggtggcactcagtctctcttctctccagctgactaaactttttttctgtaccagttaatttttccaactactaatagaataaaggcagttttctaaacttcctgtaaaaaaaaa

SEQ ID NO: 167 - DNA, 1822 bp, Homo sapiens
aatagtggatgagctgtgagtgcgcgcgcgtgcgcggggccgcgacctgtgccggctcgagcccgctgggcactcggaggcgcgcacgtcgttccccgccctcccgccgccgcccgccctcgctctctcgcgctaccctcccgccgcccgcggtcctccgtcggttctctcgttagtccacggtctggtcttcagctacccgccttcgtctccgagtttgcgactcgcggaccggcgtccccggcgcgaagaggctggactcggattcgttgcctgagcaatggctgccatccggaagaaactggtgattgttggtgatggagcctgtggaaagacatgcttgctcatagtcttcagcaaggaccagttcccagaggtgtatgtgcccacagtgtttgagaactatgtggcagatatcgaggtggatggaaagcagaaaacatcccagaaaagtggaccccagaagtcaagcatttctgtcccaacgtgcccatcatcctggttgggaataagaaggatcttcggaatgatgagcacacaaggcgggagctagccaagatgaagcaggagccggtgaaacctgaagaaggcagagatatggcaaacaggattggcgcttttgggtacatggagtgttcagcaaagaccaaagatggagtgagagaggtttttgaaatggctacgagagctgctctgcaagctagacgtgggaagaaaaaatctgggtgccttgtcttgtgaaaccttgctgcaagcacagcccttatgcggttaattttgaagtgctgtttattaatcttagtgtatgattactggcctttttcatttatctataatttacctaagattacaaatcagaagtcatcttgctaccagtatttagaagccaactatgattattaacgatgtccaacccgtctggcccaccagggtccttttgacactgctctaacagccctcctctgcactcccacctgacacaccaggcgctaattcaaggaatttcttaacttcttgcttctttctagaaagagaaacagttggtaacttttgtgaattaggctgtaactactttataactaacatgtcctgcctattatctgtcagctgcaaggtactctggtgagtcaccacttcagggctttactccgtaacagattttgttggcatagctctggggtgggcagttttttgaaaatgggctcaaccagaaaagcccaagttcatgcagctgtggcagagttacagttctgtggtttcatgttagttaccttatagttactgtgtaattagtgccacttaatgtatgttaccaaaaataaatatatctaccccagactagatgtagtattttttgtataattggatttcctaatactgtcatcctcaaagaaagtgtattggttttttaaaaaagaaagtgtatttggaaataaagtcagatggaaaattcattttttaaattcccgttttgtcactttttctgataaaagatggccatattaccccttttcggccccatgtatctcagtaccccatggagctgggctaagtaaataggaattggtttcacgcctgaggcaattagacactttggaagatggcataacctgtctcacctggacttaagcatctggctctaattcacagtgctcttttctcctcactgtatccaggttccctcccagaggagccaccagttctcatgggtggcactcagtctctcttctctccagctgactaaactttttttctgtaccagttaatttttccaactactaatagaataaaggcagttttctaaacttcctgtaaaaaaaaa

SEQ ID NO: 168 - DNA, 3018 bp, Homo sapiens
gtggagaccgaggcgatggcaaccaggagaagccaaacttggtcccccggctcgcggagtgcctgcgagcggtgctcatggcgctctatgagctcttctctcacccggtcgagcgcagttaccgcgcggggctctgctccaaagccgcgctgttcctgctgctggccgctgcgctcacgtacatcccgccgctgctggtggccttccggagccacggtgagcctgccccggccgctgtgccacgaggctccccgggcgcgctcggccagggccggcctccctaaccgcctccctaccgccctctttaactcagggttttggctgaagcggagcagctacgaggagcagccgaccgtgcgcttccaacaccaggtgctgctcgtggccctgctcggacccgaaagcgacgggttcctcgcctggagcacgttccccgccttcaaccggctgcaaggggatcgcctgcgcgtcccgctcgtttcgactagagaagaagacaggaaccaggatgggaagacggacatgttacattttaagctggagcttcccctgcagtccacggagcacgttctcggtgtgcagctcatcctgactttctcctatcgattacacaggatggcgaccctcgtgatgcagagcatggcgtttctccagtcctcctttcctgtcccgggatcccagttatacgtgaacggagacctgaggctgcagcagaagcagccgctgagctgtggtggcctagatgcccgatacaacatatccgtgatcaacgggaccagcccctttgcctatgactacgacctcacccatattgttgctgcctaccaggagaggaacgttaccaccgtcctgaatgatcccaaccccatctggctggtgggcagggccgcagatgctccatttgtgattaatgctatcatccgataccctgtggaagtcatttcttatcagccaggattctgggagatggtaaagttcgcctgggtgcagtatgtcagcatcctgcttatcttcctctgggtgtttgaaagaatcaagatcttcgtgtttcagaatcaggtggtgaccaccattcctgtgacagtgacgccccggggagacttgtgtaaggagcacttatcctagaaaggccatttctgaagactcagcaggaccgtggctgcctcattgtcatcttctgggaacatcttaggaccttttgaaagagcccagcggacacctgcgggcttgtgtgcttttccctcagagacaacggttctttccggttttgctctacacagttccgtatcttcagagctcctgcagaattgtcagggactagtttgtggaaaggtctgagagttcctggaggctataattagctttttgggttttccttctttgccttagcgttgaatttcaggagaaaattgcagtcagttcagacatcttggaaagagtcccatctctggtcaagcagagacttttcctctgttgaactgaggaacacactgtgcatttctaccttctgttgtgagccactcttactcttttcagggctctcttgtgacaaacatgccaatcactagcactttgcacccctgggcttctccatttcccattcacagctttgatttccagagctgaggcctttaactggagacctggaggggcagggcccaagggcaagggccgcattagcacaggcaatcagggagggccgctgaaggacacttggaccgtccacctgccccagcccaacagtcagtcatctgtcatcagctcagctgagcagccctggatctttgccgtactgtgactgggctctttgccctatttttccctctgtctgtgcccctggatggcaggctgaagtcagaggggctgtttcattctcagccccctcagcagcactgggggaagaaagcattgtcacaacaggttctttctggccctcacccaacagcctgggcacttggccctcctcctccttgacagccctcccccttcctgcaaaggacaggggcgacaggggttggtgttgggattggctcccgctgcctgacaaccacaagtttatttggaaggctagcgggaagcccagcggctggcgtttcccttgactaaggaacagggtgcccatcagagtggggcgggcagctttgggaaggacacaagaagcagtaagagtgtaaagaggatgctggcctgggcaggccagtccagcctggccactagcagaataccaagcagtccagtggattaccctcgtggctaagcaagtgtctgcaggagcagagatggctggaaggggcctctgcacacggaagatggcttgttcagcccattcacctcctgaggatgtgggcagtctcctccaagaacacatggagctgcttcctgatcccaagcaggtcattgccactggaaggacatggccccggtgatccatgcttcatgcccacccagaaacacacccctcagtgtgtgcctcagtttactttggagatcagttgtcgtttttagtgctcctttaggcttactaaaacagttttggaaacaaagctattttgaagtattcaagcagaggaattccctaacactgacccccttgtctttttttaatattcaggctgttttatatgcctaaatttttttcttaagatctaaacgaaaaatagtttcttgtttaaattcacataaggcaatgagatatggaaagatgacaagatacgtataaacattggtttgcattttattaaattattctaatgcaaatcttgtataaagaacccatgatgttttgtaactttctaattaaaatgttcaaaatgaggccgagcatggtggttcattcctgtaatctcaacactttgggaggccaaggtgggaggatcacttgagcccaggagcttgaggctgcagtgtgctatgattgcaccactgtactgtagcctgggtgacagagtgagaccctatctgttaaaataaataaataaataaataaaaaagtcaaaatggaaaaaaaaaaaaaaaaaa

SEQ ID NO: 169 - DNA, 3048 bp, Homo sapiens
gtggagaccgaggcgatggcaaccaggagaagccaaacttggtcccccggctcgcggagtgcctgcgagcggtgctcatggcgctctatgagctcttctctcacccggtcgagcgcagttaccgcgcggggctctgctccaaagccgcgctgttcctgctgctggccgctgcgctcacgtacatcccgccgctgctggtggccttccggagccacgggttttggctgaagcggagcagctacgaggagcagccgaccgtgcgcttccaacaccaggtgctgctcgtggccctgctcggacccgaaagcgacgggttcctcgcctggagcacgttccccgccttcaaccggctgcaaggggatcgcctgcgcgtcccgctcgtttcgtggaggagataatgcctgttgtgtacagcaagacagtgggtcattgtgtatttacagaagtgatgtggattcctcccagactcattagtgaccagggctgctgggcctgtttgggtttcctagactagagaagaagacaggaaccaggatgggaagacggacatgttacattttaagctggagcttcccctgcagtccacggagcacgttctcggtgtgcagctcatcctgactttctcctatcgattacacaggatggcgaccctcgtgatgcagagcatggcgtttctccagtcctcctttcctgtcccgggatcccagttatacgtgaacggagacctgaggctgcagcagaagcagccgctgagctgtggtggcctagatgcccgatacaacatatccgtgatcaacgggaccagcccctttgcctatgactacgacctcacccatattgttgctgcctaccaggagaggaacgttaccaccgtcctgaatgatcccaaccccatctggctggtgggcagggccgcagatgctccatttgtgattaatgctatcatccgataccctgtggaagtcatttcttatcagccaggattctgggagatggtaaagttcgcctgggtgcagtatgtcagcatcctgcttatcttcctctgggtgtttgaaagaatcaagatcttcgtgtttcagaatcaggtggtgaccaccattcctgtgacagtgacgccccggggagacttgtgtaaggagcacttatcctagaaaggccatttctgaagactcagcaggaccgtggctgcctcattgtcatcttctgggaacatcttaggaccttttgaaagagcccagcggacacctgcgggcttgtgtgcttttccctcagagacaacggttctttccggttttgctctacacagttccgtatcttcagagctcctgcagaattgtcagggactagtttgtggaaaggtctgagagttcctggaggctataattagctttttgggttttccttctttgccttagcgttgaatttcaggagaaaattgcagtcagttcagacatcttggaaagagtcccatctctggtcaagcagagacttttcctctgttgaactgaggaacacactgtgcatttctaccttctgttgtgagccactcttactcttttcagggctctcttgtgacaaacatgccaatcactagcactttgcacccctgggcttctccatttcccattcacagctttgatttccagagctgaggcctttaactggagacctggaggggcagggcccaagggcaagggccgcattagcacaggcaatcagggagggccgctgaaggacacttggaccgtccacctgccccagcccaacagtcagtcatctgtcatcagctcagctgagcagccctggatctttgccgtactgtgactgggctctttgccctatttttccctctgtctgtgcccctggatggcaggctgaagtcagaggggctgtttcattctcagccccctcagcagcactgggggaagaaagcattgtcacaacaggttctttctggccctcacccaacagcctgggcacttggccctcctcctccttgacagccctcccccttcctgcaaaggacaggggcgacaggggttggtgttgggattggctcccgctgcctgacaaccacaagtttatttggaaggctagcgggaagcccagcggctggcgtttcccttgactaaggaacagggtgcccatcagagtggggcgggcagctttgggaaggacacaagaagcagtaagagtgtaaagaggatgctggcctgggcaggccagtccagcctggccactagcagaataccaagcagtccagtggattaccctcgtggctaagcaagtgtctgcaggagcagagatggctggaaggggcctctgcacacggaagatggcttgttcagcccattcacctcctgaggatgtgggcagtctcctccaagaacacatggagctgcttcctgatcccaagcaggtcattgccactggaaggacatggccccggtgatccatgcttcatgcccacccagaaacacacccctcagtgtgtgcctcagtttactttggagatcagttgtcgtttttagtgctcctttaggcttactaaaacagttttggaaacaaagctattttgaagtattcaagcagaggaattccctaacactgacccccttgtctttttttaatattcaggctgttttatatgcctaaatttttttcttaagatctaaacgaaaaatagtttcttgtttaaattcacataaggcaatgagatatggaaagatgacaagatacgtataaacattggtttgcattttattaaattattctaatgcaaatcttgtataaagaacccatgatgttttgtaactttctaattaaaatgttcaaaatgaggccgagcatggtggttcattcctgtaatctcaacactttgggaggccaaggtgggaggatcacttgagcccaggagcttgaggctgcagtgtgctatgattgcaccactgtactgtagcctgggtgacagagtgagaccctatctgttaaaataaataaataaataaataaaaaagtcaaaatggaaaaaaaaaaaaaaaaaaaaaa

SEQ ID NO: 170 - DNA, 2925 bp, Homo sapiens
gtggagaccgaggcgatggcaaccaggagaagccaaacttggtcccccggctcgcggagtgcctgcgagcggtgctcatggcgctctatgagctcttctctcacccggtcgagcgcagttaccgcgcggggctctgctccaaagccgcgctgttcctgctgctggccgctgcgctcacgtacatcccgccgctgctggtggccttccggagccacgggttttggctgaagcggagcagctacgaggagcagccgaccgtgcgcttccaacaccaggtgctgctcgtggccctgctcggacccgaaagcgacgggttcctcgcctggagcacgttccccgccttcaaccggctgcaaggggatcgcctgcgcgtcccgctcgtttcgactagagaagaagacaggaaccaggatgggaagacggacatgttacattttaagctggagcttcccctgcagtccacggagcacgttctcggtgtgcagctcatcctgactttctcctatcgattacacaggatggcgaccctcgtgatgcagagcatggcgtttctccagtcctcctttcctgtcccgggatcccagttatacgtgaacggagacctgaggctgcagcagaagcagccgctgagctgtggtggcctagatgcccgatacaacatatccgtgatcaacgggaccagcccctttgcctatgactacgacctcacccatattgttgctgcctaccaggagaggaacgttaccaccgtcctgaatgatcccaaccccatctggctggtgggcagggccgcagatgctccatttgtgattaatgctatcatccgataccctgtggaagtcatttcttatcagccaggattctgggagatggtaaagttcgcctgggtgcagtatgtcagcatcctgcttatcttcctctgggtgtttgaaagaatcaagatcttcgtgtttcagaatcaggtggtgaccaccattcctgtgacagtgacgccccggggagacttgtgtaaggagcacttatcctagaaaggccatttctgaagactcagcaggaccgtggctgcctcattgtcatcttctgggaacatcttaggaccttttgaaagagcccagcggacacctgcgggcttgtgtgcttttccctcagagacaacggttctttccggttttgctctacacagttccgtatcttcagagctcctgcagaattgtcagggactagtttgtggaaaggtctgagagttcctggaggctataattagctttttgggttttccttctttgccttagcgttgaatttcaggagaaaattgcagtcagttcagacatcttggaaagagtcccatctctggtcaagcagagacttttcctctgttgaactgaggaacacactgtgcatttctaccttctgttgtgagccactcttactcttttcagggctctcttgtgacaaacatgccaatcactagcactttgcacccctgggcttctccatttcccattcacagctttgatttccagagctgaggcctttaactggagacctggaggggcagggcccaagggcaagggccgcattagcacaggcaatcagggagggccgctgaaggacacttggaccgtccacctgccccagcccaacagtcagtcatctgtcatcagctcagctgagcagccctggatctttgccgtactgtgactgggctctttgccctatttttccctctgtctgtgcccctggatggcaggctgaagtcagaggggctgtttcattctcagccccctcagcagcactgggggaagaaagcattgtcacaacaggttctttctggccctcacccaacagcctgggcacttggccctcctcctccttgacagccctcccccttcctgcaaaggacaggggcgacaggggttggtgttgggattggctcccgctgcctgacaaccacaagtttatttggaaggctagcgggaagcccagcggctggcgtttcccttgactaaggaacagggtgcccatcagagtggggcgggcagctttgggaaggacacaagaagcagtaagagtgtaaagaggatgctggcctgggcaggccagtccagcctggccactagcagaataccaagcagtccagtggattaccctcgtggctaagcaagtgtctgcaggagcagagatggctggaaggggcctctgcacacggaagatggcttgttcagcccattcacctcctgaggatgtgggcagtctcctccaagaacacatggagctgcttcctgatcccaagcaggtcattgccactggaaggacatggccccggtgatccatgcttcatgcccacccagaaacacacccctcagtgtgtgcctcagtttactttggagatcagttgtcgtttttagtgctcctttaggcttactaaaacagttttggaaacaaagctattttgaagtattcaagcagaggaattccctaacactgacccccttgtctttttttaatattcaggctgttttatatgcctaaatttttttcttaagatctaaacgaaaaatagtttcttgtttaaattcacataaggcaatgagatatggaaagatgacaagatacgtataaacattggtttgcattttattaaattattctaatgcaaatcttgtataaagaacccatgatgttttgtaactttctaattaaaatgttcaaaatgaggccgagcatggtggttcattcctgtaatctcaacactttgggaggccaaggtgggaggatcacttgagcccaggagcttgaggctgcagtgtgctatgattgcaccactgtactgtagcctgggtgacagagtgagaccctatctgttaaaataaataaataaataaataaaaaagtcaaaatggaaaaaaaaaaaaaaaaaaaaaa

SEQ ID NO: 171 - DNA, 7009 bp, Homo sapiens
cggcgaggcggggagggccccggactccgacggcggctcggacgccgactcggaggtgggtccggggagcccgactcggaccgcggaggtgagcgggagctgaggctgaggagaggggagcttggggggcgcctgctgccaagggcagcggaggaggaaatggcaggtcctaatcaactctgcattcgccgctggactaccaagcatgtagctgtgtggctgaaggatgaaggcttttttgaatatgtggacattttatgcaataagcaccgacttgatggaatcacattgctaacattgactgaatatgatctccggtctcctcctctggaaatcaaagtcttaggggacattaaaaggttaatgctctcagtccgaaaattgcagaaaatacatattgatgttttagaagagatgggctacaacagtgacagtcccatgggttccatgacccctttcatcagtgctcttcagagtacagactggctctgtaatggggagctttcccatgactgtgacggacccataactgacttgaattctgatcagtaccagtacatgaatggtaaaaacaaacattctgttcgaagattggacccagaatactggaagactatactgagttgtatatatgtttttatagtatttggatttacatctttcattatggttatagtccatgagcgagtgcctgacatgcagacctatccaccactcccagatatattcttagacagcgttcctagaatcccatgggcctttgccatgacggaagtatgtggcatgattctgtgctatatttggctcctggttcttcttcttcacaagcacaggtcaatacttctgcgaaggctctgtagtctgatgggaactgtattcttgcttcgctgctttaccatgtttgtgacctccctctccgtgccaggacaacacctgcagtgtactggaaagatatatggcagtgtatgggagaaattacatcgagcctttgccatttggagtggctttggtatgaccctgactggcgttcacacatgtggagattacatgtttagtggccacacagtcgtcctaactatgctgaatttctttgtcaccgaatgtaagtatctttttagtgcttctatgcgtattaggtaactagctgcagtgaaggctgtgggaagggtgtcagatcctgtgaagaatggcaaaacagcctgacctgagaaacgtgactgagaagcattggaaggaatgtagctttaaaatgatctttctgtccttttcctagatacaccaagaagctggaatttcttgcacactttatcctgggttctcaacctctttggaatcttcttcatcttggctgcccatgaacattattctattgatgtgtttattgctttttatataacaacaagactctttttgtactaccatactctggccaataccagagcatatcagcagagtaggagagcaaggatttggtttcccatgttctctttttttgaatgcaatgttaatggcacagtacctaatgaatattgttggccattttcaaaaccagcaataatgaaaagactaattggatgaatactatctttctaatgaatttgtgattaaatatataatagttgttgaaaatgagtaactttgcgttctccccctaggttgttcttagatgcctggcttatgtgttgacaaagtaaagttttctgttctgagcaaagttatgattataaaaagcaagaaagaacaatcaagagtccttatgtagctatttgaacagaaagcttaagtagatgttttctgccccttctctttaggaagacttaatgttgtgattgaagtcaggctgtacccttacctgttgagtatttgcttattgaactttaaacaagtcaacttgagcagtttgctggttgaggaattttcattgatttccagtagggctctagtcaagaaataatatgttttgaagctccttattacctttagaagaagaaaccctaacaagtgacagtacttgttctttggactaatctttgtttcattttaaaaaatgcaaccctgggacatgatctgttttactgacaaagagtttttgccttctgaaccatctttaaatatactgagcataccaggatgcctgaaataagaagagaatgaaagaggccatagatgacgtgacagagtactggctaggatgccattggtctcctcattaatgcaaatgtagggctggcatatttcaccaaagatgcaacaaaagatgcagtgccagtgtgaccctcagtgagtattcatgagggaaaaatggctgcatccataaaaataaatgggcttaatgttagtggtataggtacccagaataacttctttgtgctatagttgttagatgacagttcaattttatgcttttttaatggtgttattaaatgagccaaataggagtgttttaccagatgttagataaagttcttaatgccgttaagtagggaggtatgcatgcaaagaattgttttctcctgaaaagaaacttacagcacgcaaaatataactttttggtttttgaaatttatcattcttggctgttggaagtaaacagtctcagacatacttggatatgaaaaagtttcgttgttttttacttttaaatataatggtgtatatacattctttctatttagtcttaatttggcagtcaggaagtgatataacttagctgctatttacaacactagaaatttagtactttaagtaatttcacatctatgataacatttgttactttatttttaatgatttttttacagtagttatgacagtaggatggttatggaattggaatttaaactcccaactaatgagcttaagctgcttggaatattaattatgtagtttttacattccattttaaaacaaaaacttagaaaaggtgctggcattctgaggcctgcaattaggccacatagcagaagcttgctccttccttatctgggtgaaatattttatttttgcactttgagtcatattcccacccctgtataagctacataggagcctgaatgaattgggtaggaaaggaaattatgcaaacaagtctcagctagtgctgaatgaccccaatttgggtctgctgtgaacatcatttttgtatttctcacttgagaaatgctgcaaggcaattcaacttttatgcttttaaatctcacaactcagaatctgatatcttaaatcactgattctgttacatgctaggaacaaaatgccaacatctcatgtaaagaagttgcataatcatgaaaaataaaggatgtttcctatgccagttagagtggtttgacccttcaggtaaaaagatatgttactgttatttttctacgtgacagaacagactgaatttagctagggaggcagtgatgttggcttttgggaaagggttcaaaaaactgtatggcaacattaatgctaaaatgttaagccgagtgcagtggtgcaaggctatagtcccaggttctgaggaggctgaggcaggaggattgcttgaggccaggagttagaaactagagtgtgttataacgcctatgaataaccactgcattccagcccgggcaaggtagcaagacccattctcttaaaaacatggctgggtgcaatggctcacgcctgtaatcccagcactttgggaggccaaggcaggcggatggcttgaggtcaggagttcgagattagcctggccaatatggtgaaacctcatctctactaaaactacaaaaattagctgggcatggtggcacgcacttgtaatcccagctacttgggagactgaggaacaagaaacacttgaacccaggaggtggagtttgcattgagctgagatcactccactgcactccagcctaggtgacagagtgagactccatctcaaaacgaaacaaaacaaaacaaaacaaattagagtgggtgcagtgtctaatgcctgtaatcgcagcactttgggaggctaaggcaggaggatcacttgagctcaggtaaaagagaccagcctgggcaacaaagtgagacctcatccccacaaaaagttgtttagaaaattagctgggcgtggtgatgcatgcctgtggtcccagctacatgggaggctgaggcagaaggatcacttgagcccaaggaggttgaggctacagtgagctgtaatcatgccactgcactccagccttggggacagagtgagaccctgcctcaatcaatcaatcaatcaataacaaaaacttaaatagctattaacctcagtcttctttccttcatataaattctattctaagaccaaatagaaaaataaatgtaactaactttgcagagctattgacattgagagacctaacaacagactgcaatggggattgtaaaataacttttcagccttgcacttgctcatatatgttttgagaaaaatgtaagttaggtataacttattgttttaactattataaggcagtgtttacataaattaatcatctctttcttggaaaacattgagacaaatttattttcagttttacttaaacatgaaacctgtattttagttgctttttgttttgtccagaaatttccagattttgtcttcattttttttcctggttaaaatctaaaccatagtgaagatagtatttatgtttacattttatctgtgaatgtggctaagcagagaagctacatggctttggtctacatattttttgaccttgtatttggttctgtagttgcagacttgtgaaggcttacatcatcatggagactttagtaaggaaggaaccaaaaggtttttggtttggggatgcaaactggaggttatgttacaagtcttcaatgcattttctgtgttcctggcagcagtgttgcctttttttttcttttccttttttttttttaaagaccaggtagggtagtgttattgaagggtaattgaagagtggtagagagtaagaggttttgaaggaggcaggtttgctgttatcacaaaataatttgggggaaacctttcgtggctgtgctgcaagaattctttatgtggctatcctctccatagttttctgaccagaattgcaagggcaaaaatagaacttctagctctatttatttgtatcctttgaaatcagaacttatccttagaaccagtcagttaaataatgcggactatgcctataatcccagcactttaggaggctgaggcaggcagatcacgaggtcaggagttcgaggccagcctggccaatgtggtgaaactccgtctctactaaaaatacaaaaattagccgggcgtggtggtgcacgcccatgcctgtagtcccagctactcgggaggctgaggcagaagaatcgcttgaacccaggaggcggaggttgcagtgagccgagatactgccactacacttcagtctgggtgacagagcgagactccatctcaaaaaaacaaaacaaaataaaataataatgtgggctattcagaagaaaaagtcagtgacagagagaccagaacccattggatcaagagacctgcagggattataactctttactctgtgagcagcggtgtttcgtgccctgtctctgcctgtgtgtttttactaagaattccagaaatcctgtaatttgtaaatgggaaacagaggaaccagattgttttatagctgataagaaacagtctgttttagaaacatctgtttggaaagtattactcatgtattcacaaagtcatatttataacactagtcttctttgactgtattcaacaaaaggcagtttcaccattaatttcatagtaagcttttttaaaggattctagatctaaattgcctaagaatgttaaccacattcttgttttaaactctctaatttaataaatgtaattattttatagtcttttatagacttacattttcttcatactaaaggtaatgataatatagtcatttgccagtactttaaggtattcaggcatttgagacaagaaagctgtcttgtagaatagtccaattgctttcttaaacagtactggtttcatttagacagtttctaagccagcaaaggtgtcaattttaatgccaacttgacagtttaacagttagtgtttgtaagcagtttagcctgaattatcccatactgctgtagaggagaattgttagtaacatcaaaggtcagaatgcttcaggtgactaataagaatggaaagagactgagtaggttttttgtttcttttccctgtctttgagtaactttgaatgactaaaattagtatgaaactaggttttggacccccttctcacctcacccggatgtaatgccaccaatttcaaataactaaaatgtgaccaattactttgcttcaagttctatacaaatatctctgaaatctgtaagccatatttcagctattctggtttttataatacattctaccctaaattaaccaaaggactttttattcagtgtattccatgtttcagcataaggaaagtttgtgcctgatatggcaggagaaagaacactatggtaatttcattgttacttcaggtctctttcaatctgaagaactgggttgtctggagaattgaacatagccaagcaatattatcaattagtaatgtcatcttaaaaatgttcacttttactaagttttattcagaggatctatgtattattagaaaaatgaagtatttctgacatggaacaaagaaagtggaaactggtacttaatgggggaagcaaaattagctgggactaaaacggacatgttttgttttgtgaattctacctaaatgtctctctatccacagagaaactagtattacttgaagatgtgaaagttcctgtggtagccataccttgaagcacagtgtttgtacataagtaaatatcttgattctaaattaaatccagatttaactaatatatattattttatatctttgttgtattaaaatgtttaaaaacactaaaaataaaacatttgaaagttgga

SEQ ID NO: 172 - DNA, 6782 bp, Homo sapiens
cggcgaggcggggagggccccggactccgacggcggctcggacgccgactcggaggtgggtccggggagcccgactcggaccgcggaggcagcggaggaggaaatggcaggtcctaatcaactctgcattcgccgctggactaccaagcatgtagctgtgtggctgaaggatgaaggcttttttgaatatgtggacattttatgcaataagcaccgacttgatggaatcacattgctaacattgactgaatatgatctccggtctcctcctctggaaatcaaagtcttaggggacattaaaaggttaatgctctcagtccgaaaattgcagaaaatacatattgatgttttagaagagatgggctacaacagtgacagtcccatgggttccatgacccctttcatcagtgctcttcagagtacagactggctctgtaatggggagctttcccatgactgtgacggacccataactgacttgaattctgatcagtaccagtacatgaatggtaaaaacaaacattctgttcgaagattggacccagaatactggaagactatactgagttgtatatatgtttttatagtatttggatttacatctttcattatggttatagtccatgagcgagtgcctgacatgcagacctatccaccactcccagatatattcttagacagcgttcctagaatcccatgggcctttgccatgacggaagtatgtggcatgattctgtgctatatttggctcctggttcttcttcttcacaagcacaggtcaatacttctgcgaaggctctgtagtctgatgggaactgtattcttgcttcgctgctttaccatgtttgtgacctccctctccgtgccaggacaacacctgcagtgtactggaaagatatatggcagtgtatgggagaaattacatcgagcctttgccatttggagtggctttggtatgaccctgactggcgttcacacatgtggagattacatgtttagtggccacacagtcgtcctaactatgctgaatttctttgtcaccgaatatacaccaagaagctggaatttcttgcacactttatcctgggttctcaacctctttggaatcttcttcatcttggctgcccatgaacattattctattgatgtgtttattgctttttatataacaacaagactctttttgtactaccatactctggccaataccagagcatatcagcagagtaggagagcaaggatttggtttcccatgttctctttttttgaatgcaatgttaatggcacagtacctaatgaatattgttggccattttcaaaaccagcaataatgaaaagactaattggatgaatactatctttctaatgaatttgtgattaaatatataatagttgttgaaaatgagtaactttgcgttctccccctaggttgttcttagatgcctggcttatgtgttgacaaagtaaagttttctgttctgagcaaagttatgattataaaaagcaagaaagaacaatcaagagtccttatgtagctatttgaacagaaagcttaagtagatgttttctgccccttctctttaggaagacttaatgttgtgattgaagtcaggctgtacccttacctgttgagtatttgcttattgaactttaaacaagtcaacttgagcagtttgctggttgaggaattttcattgatttccagtagggctctagtcaagaaataatatgttttgaagctccttattacctttagaagaagaaaccctaacaagtgacagtacttgttctttggactaatctttgtttcattttaaaaaatgcaaccctgggacatgatctgttttactgacaaagagtttttgccttctgaaccatctttaaatatactgagcataccaggatgcctgaaataagaagagaatgaaagaggccatagatgacgtgacagagtactggctaggatgccattggtctcctcattaatgcaaatgtagggctggcatatttcaccaaagatgcaacaaaagatgcagtgccagtgtgaccctcagtgagtattcatgagggaaaaatggctgcatccataaaaataaatgggcttaatgttagtggtataggtacccagaataacttctttgtgctatagttgttagatgacagttcaattttatgcttttttaatggtgttattaaatgagccaaataggagtgttttaccagatgttagataaagttcttaatgccgttaagtagggaggtatgcatgcaaagaattgttttctcctgaaaagaaacttacagcacgcaaaatataactttttggtttttgaaatttatcattcttggctgttggaagtaaacagtctcagacatacttggatatgaaaaagtttcgttgttttttacttttaaatataatggtgtatatacattctttctatttagtcttaatttggcagtcaggaagtgatataacttagctgctatttacaacactagaaatttagtactttaagtaatttcacatctatgataacatttgttactttatttttaatgatttttttacagtagttatgacagtaggatggttatggaattggaatttaaactcccaactaatgagcttaagctgcttggaatattaattatgtagtttttacattccattttaaaacaaaaacttagaaaaggtgctggcattctgaggcctgcaattaggccacatagcagaagcttgctccttccttatctgggtgaaatattttatttttgcactttgagtcatattcccacccctgtataagctacataggagcctgaatgaattgggtaggaaaggaaattatgcaaacaagtctcagctagtgctgaatgaccccaatttgggtctgctgtgaacatcatttttgtatttctcacttgagaaatgctgcaaggcaattcaacttttatgcttttaaatctcacaactcagaatctgatatcttaaatcactgattctgttacatgctaggaacaaaatgccaacatctcatgtaaagaagttgcataatcatgaaaaataaaggatgtttcctatgccagttagagtggtttgacccttcaggtaaaaagatatgttactgttatttttctacgtgacagaacagactgaatttagctagggaggcagtgatgttggcttttgggaaagggttcaaaaaactgtatggcaacattaatgctaaaatgttaagccgagtgcagtggtgcaaggctatagtcccaggttctgaggaggctgaggcaggaggattgcttgaggccaggagttagaaactagagtgtgttataacgcctatgaataaccactgcattccagcccgggcaaggtagcaagacccattctcttaaaaacatggctgggtgcaatggctcacgcctgtaatcccagcactttgggaggccaaggcaggcggatggcttgaggtcaggagttcgagattagcctggccaatatggtgaaacctcatctctactaaaactacaaaaattagctgggcatggtggcacgcacttgtaatcccagctacttgggagactgaggaacaagaaacacttgaacccaggaggtggagtttgcattgagctgagatcactccactgcactccagcctaggtgacagagtgagactccatctcaaaacgaaacaaaacaaaacaaaacaaattagagtgggtgcagtgtctaatgcctgtaatcgcagcactttgggaggctaaggcaggaggatcacttgagctcaggtaaaagagaccagcctgggcaacaaagtgagacctcatccccacaaaaagttgtttagaaaattagctgggcgtggtgatgcatgcctgtggtcccagctacatgggaggctgaggcagaaggatcacttgagcccaaggaggttgaggctacagtgagctgtaatcatgccactgcactccagccttggggacagagtgagaccctgcctcaatcaatcaatcaatcaataacaaaaacttaaatagctattaacctcagtcttctttccttcatataaattctattctaagaccaaatagaaaaataaatgtaactaactttgcagagctattgacattgagagacctaacaacagactgcaatggggattgtaaaataacttttcagccttgcacttgctcatatatgttttgagaaaaatgtaagttaggtataacttattgttttaactattataaggcagtgtttacataaattaatcatctctttcttggaaaacattgagacaaatttattttcagttttacttaaacatgaaacctgtattttagttgctttttgttttgtccagaaatttccagattttgtcttcattttttttcctggttaaaatctaaaccatagtgaagatagtatttatgtttacattttatctgtgaatgtggctaagcagagaagctacatggctttggtctacatattttttgaccttgtatttggttctgtagttgcagacttgtgaaggcttacatcatcatggagactttagtaaggaaggaaccaaaaggtttttggtttggggatgcaaactggaggttatgttacaagtcttcaatgcattttctgtgttcctggcagcagtgttgcctttttttttcttttccttttttttttttaaagaccaggtagggtagtgttattgaagggtaattgaagagtggtagagagtaagaggttttgaaggaggcaggtttgctgttatcacaaaataatttgggggaaacctttcgtggctgtgctgcaagaattctttatgtggctatcctctccatagttttctgaccagaattgcaagggcaaaaatagaacttctagctctatttatttgtatcctttgaaatcagaacttatccttagaaccagtcagttaaataatgcggactatgcctataatcccagcactttaggaggctgaggcaggcagatcacgaggtcaggagttcgaggccagcctggccaatgtggtgaaactccgtctctactaaaaatacaaaaattagccgggcgtggtggtgcacgcccatgcctgtagtcccagctactcgggaggctgaggcagaagaatcgcttgaacccaggaggcggaggttgcagtgagccgagatactgccactacacttcagtctgggtgacagagcgagactccatctcaaaaaaacaaaacaaaataaaataataatgtgggctattcagaagaaaaagtcagtgacagagagaccagaacccattggatcaagagacctgcagggattataactctttactctgtgagcagcggtgtttcgtgccctgtctctgcctgtgtgtttttactaagaattccagaaatcctgtaatttgtaaatgggaaacagaggaaccagattgttttatagctgataagaaacagtctgttttagaaacatctgtttggaaagtattactcatgtattcacaaagtcatatttataacactagtcttctttgactgtattcaacaaaaggcagtttcaccattaatttcatagtaagcttttttaaaggattctagatctaaattgcctaagaatgttaaccacattcttgttttaaactctctaatttaataaatgtaattattttatagtcttttatagacttacattttcttcatactaaaggtaatgataatatagtcatttgccagtactttaaggtattcaggcatttgagacaagaaagctgtcttgtagaatagtccaattgctttcttaaacagtactggtttcatttagacagtttctaagccagcaaaggtgtcaattttaatgccaacttgacagtttaacagttagtgtttgtaagcagtttagcctgaattatcccatactgctgtagaggagaattgttagtaacatcaaaggtcagaatgcttcaggtgactaataagaatggaaagagactgagtaggttttttgtttcttttccctgtctttgagtaactttgaatgactaaaattagtatgaaactaggttttggacccccttctcacctcacccggatgtaatgccaccaatttcaaataactaaaatgtgaccaattactttgcttcaagttctatacaaatatctctgaaatctgtaagccatatttcagctattctggtttttataatacattctaccctaaattaaccaaaggactttttattcagtgtattccatgtttcagcataaggaaagtttgtgcctgatatggcaggagaaagaacactatggtaatttcattgttacttcaggtctctttcaatctgaagaactgggttgtctggagaattgaacatagccaagcaatattatcaattagtaatgtcatcttaaaaatgttcacttttactaagttttattcagaggatctatgtattattagaaaaatgaagtatttctgacatggaacaaagaaagtggaaactggtacttaatgggggaagcaaaattagctgggactaaaacggacatgttttgttttgtgaattctacctaaatgtctctctatccacagagaaactagtattacttgaagatgtgaaagttcctgtggtagccataccttgaagcacagtgtttgtacataagtaaatatcttgattctaaattaaatccagatttaactaatatatattattttatatctttgttgtattaaaatgtttaaaaacactaaaaataaaacatttgaaagttgga

SEQ ID NO: 173 - DNA, 6901 bp, Homo sapiens
gctgccggcgcggcggtgacggcggccgggacgatgcctgcgcgcagtcgccaccgcccccgcctccactccggctccccgccccgggctccgcccccgccgcttgaggcgcttcactccggcgaggcggggagggccccggactccgacggcggctcggacgccgactcggaggtgggtccggggagcccgactcggaccgcggaggcagcggaggaggaaatggcaggtcctaatcaactctgcattcgccgctggactaccaagcatgtagctgtgtggctgaaggatgaaggcttttttgaatatgtggacattttatgcaataagcaccgacttgatggaatcacattgctaacattgactgaatatgatctccggtctcctcctctggaaatcaaagtcttaggggacattaaaaggttaatgctctcagtccgaaaattgcagaaaatacatattgatgttttagaagagatgggctacaacagtgacagtcccatgggttccatgacccctttcatcagtgctcttcagagtacagactggctctgtaatggggagctttcccatgactgtgacggacccataactgacttgaattctgatcagtaccagtacatgaatggtaaaaacaaacattctgttcgaagattggacccagaatactggaagactatactgagttgtatatatgtttttatagtatttggatttacatctttcattatggttatagtccatgagcgagtgcctgacatgcagacctatccaccactcccagatatattcttagacagcgttcctagaatcccatgggcctttgccatgacggaagtatgtggcatgattctgtgctatatttggctcctggttcttcttcttcacaagcacaggtcaatacttctgcgaaggctctgtagtctgatgggaactgtattcttgcttcgctgctttaccatgtttgtgacctccctctccgtgccaggacaacacctgcagtgtactggaaagatatatggcagtgtatgggagaaattacatcgagcctttgccatttggagtggctttggtatgaccctgactggcgttcacacatgtggagattacatgtttagtggccacacagtcgtcctaactatgctgaatttctttgtcaccgaatatacaccaagaagctggaatttcttgcacactttatcctgggttctcaacctctttggaatcttcttcatcttggctgcccatgaacattattctattgatgtgtttattgctttttatataacaacaagactctttttgtactaccatactctggccaataccagagcatatcagcagagtaggagagcaaggatttggtttcccatgttctctttttttgaatgcaatgttaatggcacagtacctaatgaatattgttggccattttcaaaaccagcaataatgaaaagactaattggatgaatactatctttctaatgaatttgtgattaaatatataatagttgttgaaaatgagtaactttgcgttctccccctaggttgttcttagatgcctggcttatgtgttgacaaagtaaagttttctgttctgagcaaagttatgattataaaaagcaagaaagaacaatcaagagtccttatgtagctatttgaacagaaagcttaagtagatgttttctgccccttctctttaggaagacttaatgttgtgattgaagtcaggctgtacccttacctgttgagtatttgcttattgaactttaaacaagtcaacttgagcagtttgctggttgaggaattttcattgatttccagtagggctctagtcaagaaataatatgttttgaagctccttattacctttagaagaagaaaccctaacaagtgacagtacttgttctttggactaatctttgtttcattttaaaaaatgcaaccctgggacatgatctgttttactgacaaagagtttttgccttctgaaccatctttaaatatactgagcataccaggatgcctgaaataagaagagaatgaaagaggccatagatgacgtgacagagtactggctaggatgccattggtctcctcattaatgcaaatgtagggctggcatatttcaccaaagatgcaacaaaagatgcagtgccagtgtgaccctcagtgagtattcatgagggaaaaatggctgcatccataaaaataaatgggcttaatgttagtggtataggtacccagaataacttctttgtgctatagttgttagatgacagttcaattttatgcttttttaatggtgttattaaatgagccaaataggagtgttttaccagatgttagataaagttcttaatgccgttaagtagggaggtatgcatgcaaagaattgttttctcctgaaaagaaacttacagcacgcaaaatataactttttggtttttgaaatttatcattcttggctgttggaagtaaacagtctcagacatacttggatatgaaaaagtttcgttgttttttacttttaaatataatggtgtatatacattctttctatttagtcttaatttggcagtcaggaagtgatataacttagctgctatttacaacactagaaatttagtactttaagtaatttcacatctatgataacatttgttactttatttttaatgatttttttacagtagttatgacagtaggatggttatggaattggaatttaaactcccaactaatgagcttaagctgcttggaatattaattatgtagtttttacattccattttaaaacaaaaacttagaaaaggtgctggcattctgaggcctgcaattaggccacatagcagaagcttgctccttccttatctgggtgaaatattttatttttgcactttgagtcatattcccacccctgtataagctacataggagcctgaatgaattgggtaggaaaggaaattatgcaaacaagtctcagctagtgctgaatgaccccaatttgggtctgctgtgaacatcatttttgtatttctcacttgagaaatgctgcaaggcaattcaacttttatgcttttaaatctcacaactcagaatctgatatcttaaatcactgattctgttacatgctaggaacaaaatgccaacatctcatgtaaagaagttgcataatcatgaaaaataaaggatgtttcctatgccagttagagtggtttgacccttcaggtaaaaagatatgttactgttatttttctacgtgacagaacagactgaatttagctagggaggcagtgatgttggcttttgggaaagggttcaaaaaactgtatggcaacattaatgctaaaatgttaagccgagtgcagtggtgcaaggctatagtcccaggttctgaggaggctgaggcaggaggattgcttgaggccaggagttagaaactagagtgtgttataacgcctatgaataaccactgcattccagcccgggcaaggtagcaagacccattctcttaaaaacatggctgggtgcaatggctcacgcctgtaatcccagcactttgggaggccaaggcaggcggatggcttgaggtcaggagttcgagattagcctggccaatatggtgaaacctcatctctactaaaactacaaaaattagctgggcatggtggcacgcacttgtaatcccagctacttgggagactgaggaacaagaaacacttgaacccaggaggtggagtttgcattgagctgagatcactccactgcactccagcctaggtgacagagtgagactccatctcaaaacgaaacaaaacaaaacaaaacaaattagagtgggtgcagtgtctaatgcctgtaatcgcagcactttgggaggctaaggcaggaggatcacttgagctcaggtaaaagagaccagcctgggcaacaaagtgagacctcatccccacaaaaagttgtttagaaaattagctgggcgtggtgatgcatgcctgtggtcccagctacatgggaggctgaggcagaaggatcacttgagcccaaggaggttgaggctacagtgagctgtaatcatgccactgcactccagccttggggacagagtgagaccctgcctcaatcaatcaatcaatcaataacaaaaacttaaatagctattaacctcagtcttctttccttcatataaattctattctaagaccaaatagaaaaataaatgtaactaactttgcagagctattgacattgagagacctaacaacagactgcaatggggattgtaaaataacttttcagccttgcacttgctcatatatgttttgagaaaaatgtaagttaggtataacttattgttttaactattataaggcagtgtttacataaattaatcatctctttcttggaaaacattgagacaaatttattttcagttttacttaaacatgaaacctgtattttagttgctttttgttttgtccagaaatttccagattttgtcttcattttttttcctggttaaaatctaaaccatagtgaagatagtatttatgtttacattttatctgtgaatgtggctaagcagagaagctacatggctttggtctacatattttttgaccttgtatttggttctgtagttgcagacttgtgaaggcttacatcatcatggagactttagtaaggaaggaaccaaaaggtttttggtttggggatgcaaactggaggttatgttacaagtcttcaatgcattttctgtgttcctggcagcagtgttgcctttttttttcttttccttttttttttttaaagaccaggtagggtagtgttattgaagggtaattgaagagtggtagagagtaagaggttttgaaggaggcaggtttgctgttatcacaaaataatttgggggaaacctttcgtggctgtgctgcaagaattctttatgtggctatcctctccatagttttctgaccagaattgcaagggcaaaaatagaacttctagctctatttatttgtatcctttgaaatcagaacttatccttagaaccagtcagttaaataatgcggactatgcctataatcccagcactttaggaggctgaggcaggcagatcacgaggtcaggagttcgaggccagcctggccaatgtggtgaaactccgtctctactaaaaatacaaaaattagccgggcgtggtggtgcacgcccatgcctgtagtcccagctactcgggaggctgaggcagaagaatcgcttgaacccaggaggcggaggttgcagtgagccgagatactgccactacacttcagtctgggtgacagagcgagactccatctcaaaaaaacaaaacaaaataaaataataatgtgggctattcagaagaaaaagtcagtgacagagagaccagaacccattggatcaagagacctgcagggattataactctttactctgtgagcagcggtgtttcgtgccctgtctctgcctgtgtgtttttactaagaattccagaaatcctgtaatttgtaaatgggaaacagaggaaccagattgttttatagctgataagaaacagtctgttttagaaacatctgtttggaaagtattactcatgtattcacaaagtcatatttataacactagtcttctttgactgtattcaacaaaaggcagtttcaccattaatttcatagtaagcttttttaaaggattctagatctaaattgcctaagaatgttaaccacattcttgttttaaactctctaatttaataaatgtaattattttatagtcttttatagacttacattttcttcatactaaaggtaatgataatatagtcatttgccagtactttaaggtattcaggcatttgagacaagaaagctgtcttgtagaatagtccaattgctttcttaaacagtactggtttcatttagacagtttctaagccagcaaaggtgtcaattttaatgccaacttgacagtttaacagttagtgtttgtaagcagtttagcctgaattatcccatactgctgtagaggagaattgttagtaacatcaaaggtcagaatgcttcaggtgactaataagaatggaaagagactgagtaggttttttgtttcttttccctgtctttgagtaactttgaatgactaaaattagtatgaaactaggttttggacccccttctcacctcacccggatgtaatgccaccaatttcaaataactaaaatgtgaccaattactttgcttcaagttctatacaaatatctctgaaatctgtaagccatatttcagctattctggtttttataatacattctaccctaaattaaccaaaggactttttattcagtgtattccatgtttcagcataaggaaagtttgtgcctgatatggcaggagaaagaacactatggtaatttcattgttacttcaggtctctttcaatctgaagaactgggttgtctggagaattgaacatagccaagcaatattatcaattagtaatgtcatcttaaaaatgttcacttttactaagttttattcagaggatctatgtattattagaaaaatgaagtatttctgacatggaacaaagaaagtggaaactggtacttaatgggggaagcaaaattagctgggactaaaacggacatgttttgttttgtgaattctacctaaatgtctctctatccacagagaaactagtattacttgaagatgtgaaagttcctgtggtagccataccttgaagcacagtgtttgtacataagtaaatatcttgattctaaattaaatccagatttaactaatatatattattttatatctttgttgtattaaaatgtttaaaaacactaaaaataaaacatttgaaagttgga

SEQ ID NO: 174 - DNA, 6356 bp, Homo sapiens
attgaggttgtaaagaactggtgagctaagacagtggaaaaaaacatataaaagaagagaagaatcattttgaacagagtatgagaggaaactgtcctaacgaataatgctacaagaatgggagtgacatggaacccattggtggcagcggaggaggaaatggcaggtcctaatcaactctgcattcgccgctggactaccaagcatgtagctgtgtggctgaaggatgaaggcttttttgaatatgtggacattttatgcaataagcaccgacttgatggaatcacattgctaacattgactgaatatgatctccggtctcctcctctggaaatcaaagtcttaggggacattaaaaggttaatgctctcagtccgaaaattgcagaaaatacatattgatgttttagaagagatgggctacaacagtgacagtcccatgggttccatgacccctttcatcagtgctcttcagagtacagactggctctgtaatggggagctttcccatgactgtgacggacccataactgacttgaattctgatcagtaccagtacatgaatggtaaaaacaaacattctgttcgaagattggacccagaatactggaagactatactgagttgtatatatgtttttatagtatttggatttacatctttcattatggttatagtccatgagcgagtgcctgacatgcagacctatccaccactcccagatatattcttagacagcgttcctagaatcccatgggcctttgccatgacggaagtatgtggcatgattctgtgctatatttggctcctggttcttcttcttcacaagcacaggtcaatacttctgcgaaggctctgtagtctgatgggaactgtattcttgcttcgctgctttaccatgtttgtgacctccctctccgtgccaggacaacacctgcagtgtactggaaagatatatggcagtgtatgggagaaattacatcgagcctttgccatttggagtggctttggtatgaccctgactggcgttcacacatgtggagattacatgtttagtggccacacagtcgtcctaactatgctgaatttctttgtcaccgaatatacaccaagaagctggaatttcttgcacactttatcctgggttctcaacctctttggaatcttcttcatcttggctgcccatgaacattattctattgatgtgtttattgctttttatataacaacaagactctttttgtactaccatactctggccaataccagagcatatcagcagagtaggagagcaaggatttggtttcccatgttctctttttttgaatgcaatgttaatggcacagtacctaatgaatattgttggccattttcaaaaccagcaataatgaaaagactaattggatgaatactatctttctaatgaatttgtgattaaatatataatagttgttgaaaatgagtaactttgcgttctccccctaggttgttcttagatgcctggcttatgtgttgacaaagtaaagttttctgttctgagcaaagttatgattataaaaagcaagaaagaacaatcaagagtccttatgtagctatttgaacagaaagcttaagtagatgttttctgccccttctctttaggaagacttaatgttgtgattgaagtcaggctgtacccttacctgttgagtatttgcttattgaactttaaacaagtcaacttgagcagtttgctggttgaggaattttcattgatttccagtagggctctagtcaagaaataatatgttttgaagctccttattacctttagaagaagaaaccctaacaagtgacagtacttgttctttggactaatctttgtttcattttaaaaaatgcaaccctgggacatgatctgttttactgacaaagagtttttgccttctgaaccatctttaaatatactgagcataccaggatgcctgaaataagaagagaatgaaagaggccatagatgacgtgacagagtactggctaggatgccattggtctcctcattaatgcaaatgtagggctggcatatttcaccaaagatgcaacaaaagatgcagtgccagtgtgaccctcagtgagtattcatgagggaaaaatggctgcatccataaaaataaatgggcttaatgttagtggtataggtacccagaataacttctttgtgctatagttgttagatgacagttcaattttatgcttttttaatggtgttattaaatgagccaaataggagtgttttaccagatgttagataaagttcttaatgccgttaagtagggaggtatgcatgcaaagaattgttttctcctgaaaagaaacttacagcacgcaaaatataactttttggtttttgaaatttatcattcttggctgttggaagtaaacagtctcagacatacttggatatgaaaaagtttcgttgttttttacttttaaatataatggtgtatatacattctttctatttagtcttaatttggcagtcaggaagtgatataacttagctgctatttacaacactagaaatttagtactttaagtaatttcacatctatgataacatttgttactttatttttaatgatttttttacagtagttatgacagtaggatggttatggaattggaatttaaactcccaactaatgagcttaagctgcttggaatattaattatgtagtttttacattccattttaaaacaaaaacttagaaaaggtgctggcattctgaggcctgcaattaggccacatagcagaagcttgctccttccttatctgggtgaaatattttatttttgcactttgagtcatattcccacccctgtataagctacataggagcctgaatgaattgggtaggaaaggaaattatgcaaacaagtctcagctagtgctgaatgaccccaatttgggtctgctgtgaacatcatttttgtatttctcacttgagaaatgctgcaaggcaattcaacttttatgcttttaaatctcacaactcagaatctgatatcttaaatcactgattctgttacatgctaggaacaaaatgccaacatctcatgtaaagaagttgcataatcatgaaaaataaaggatgtttcctatgccagttagagtggtttgacccttcaggtaaaaagatatgttactgttatttttctacgtgacagaacagactgaatttagctagggaggcagtgatgttggcttttgggaaagggttcaaaaaactgtatggcaacattaatgctaaaatgttaagccgagtgcagtggtgcaaggctatagtcccaggttctgaggaggctgaggcaggaggattgcttgaggccaggagttagaaactagagtgtgttataacgcctatgaataaccactgcattccagcccgggcaaggtagcaagacccattctcttaaaaacatggctgggtgcaatggctcacgcctgtaatcccagcactttgggaggccaaggcaggcggatggcttgaggtcaggagttcgagattagcctggccaatatggtgaaacctcatctctactaaaactacaaaaattagctgggcatggtggcacgcacttgtaatcccagctacttgggagactgaggaacaagaaacacttgaacccaggaggtggagtttgcattgagctgagatcactccactgcactccagcctaggtgacagagtgagactccatctcaaaacgaaacaaaacaaaacaaaacaaattagagtgggtgcagtgtctaatgcctgtaatcgcagcactttgggaggctaaggcaggaggatcacttgagctcaggtaaaagagaccagcctgggcaacaaagtgagacctcatccccacaaaaagttgtttagaaaattagctgggcgtggtgatgcatgcctgtggtcccagctacatgggaggctgaggcagaaggatcacttgagcccaaggaggttgaggctacagtgagctgtaatcatgccactgcactccagccttggggacagagtgagaccctgcctcaatcaatcaatcaatcaataacaaaaacttaaatagctattaacctcagtcttctttccttcatataaattctattctaagaccaaatagaaaaataaatgtaactaactttgcagagctattgacattgagagacctaacaacagactgcaatggggattgtaaaataacttttcagccttgcacttgctcatatatgttttgagaaaaatgtaagttaggtataacttattgttttaactattataaggcagtgtttacataaattaatcatctctttcttggaaaacattgagacaaatttattttcagttttacttaaacatgaaacctgtattttagttgctttttgttttgtccagaaatttccagattttgtcttcattttttttcctggttaaaatctaaaccatagtgaagatagtatttatgtttacattttatctgtgaatgtggctaagcagagaagctacatggctttggtctacatattttttgaccttgtatttggttctgtagttgcagacttgtgaaggcttacatcatcatggagactttagtaaggaaggaaccaaaaggtttttggtttggggatgcaaactggaggttatgttacaagtcttcaatgcattttctgtgttcctggcagcagtgttgcctttttttttcttttccttttttttttttaaagaccaggtagggtagtgttattgaagggtaattgaagagtggtagagagtaagaggttttgaaggaggcaggtttgctgttatcacaaaataatttgggggaaacctttcgtggctgtgctgcaagaattctttatgtggctatcctctccatagttttctgaccagaattgcaagggcaaaaatagaacttctagctctatttatttgtatcctttgaaatcagaacttatccttagaaccagtcagttaaataatgcggactatgcctataatcccagcactttaggaggctgaggcaggcagatcacgaggtcaggagttcgaggccagcctggccaatgtggtgaaactccgtctctactaaaaatacaaaaattagccgggcgtggtggtgcacgcccatgcctgtagtcccagctactcgggaggctgaggcagaagaatcgcttgaacccaggaggcggaggttgcagtgagccgagatactgccactacacttcagtctgggtgacagagcgagactccatctcaaaaaaacaaaacaaaataaaataataatgtgggctattcagaagaaaaagtcagtgacagagagaccagaacccattggatcaagagacctgcagggattataactctttactctgtgagcagcggtgtttcgtgccctgtctctgcctgtgtgtttttactaagaattccagaaatcctgtaatttgtaaatgggaaacagaggaaccagattgttttatagctgataagaaacagtctgttttagaaacatctgtttggaaagtattactcatgtattcacaaagtcatatttataacactagtcttctttgactgtattcaacaaaaggcagtttcaccattaatttcatagtaagcttttttaaaggattctagatctaaattgcctaagaatgttaaccacattcttgttttaaactctctaatttaataaatgtaattattttatagtcttttatagacttacattttcttcatactaaaggtaatgataatatagtcatttgccagtactttaaggtattcaggcatttgagacaagaaagctgtcttgtagaatagtccaattgctttcttaaacagtactggtttcatttagacagtttctaagccagcaaaggtgtcaattttaatgccaacttgacagtttaacagttagtgtttgtaagcagtttagcctgaattatcccatactgctgtagaggagaattgttagtaacatcaaaggtcagaatgcttcaggtgactaataagaatggaaagagactgagtaggttttttgtttcttttccctgtctttgagtaactttgaatgactaaaattagtatgaaactaggttttggacccccttctcacctcacccggatgtaatgccaccaatttcaaataactaaaatgtgaccaattactttgcttcaagttctatacaaatatctctgaaatctgtaagccatatttcagctattctggtttttataatacattctaccctaaattaaccaaaggactttttattcagtgtattccatgtttcagcataaggaaagtttgtgcctgatatggcaggag

SEQ ID NO: 175 - DNA, 6491 bp, Homo sapiens
ggttcggctccgagcagctgccggcgcggcggtgacggcggccgggacgatgcctgcgcgcagtcgccaccgcccccgcctccactccggctccccgccccgggctccgcccccgccgcttgaggcgcttcactccggcgaggcggggagggccccggactccgacggcggctcggacgccgactcggaggtgggtccggggagcccgactcggaccgcggaggtgagcgggagctgaggctgaggagaggggagcttggggggcgcctgctgccaagggcagcggaggaggaaatggcaggtcctaatcaactctgcattcgccgctggactaccaagcatgtagctgtgtggctgaaggatgaaggcttttttgaatatgtggacattttatgcaataagcaccgacttgatggaatcacattgctaacattgactgaatatgatctccggtctcctcctctggaaatcaaagtcttaggggacattaaaaggttaatgctctcagtccgaaaattgcagaaaatacatattgatgttttagaagagatgggctacaacagtgacagtcccatgggttccatgacccctttcatcagtgctcttcagagtacagactggctctgtaatggggagctttcccatgactgtgacggacccataactgacttgaattctgatcagtaccagtacatgaatggtaaaaacaaacattctgttcgaagattggacccagaatactggaagactatactgagttgtatatatgtttttatagtatttggatttacatctttcattatggttatagtccatgagcgagtgcctgacatgcagacctatccaccactcccagatatattcttagacagcgttcctagaatcccatgggcctttgccatgacggaagtatgtggcatgattctgtgctatatttggctcctggttcttcttcttcacaagcacaggtcaatacttctgcgaaggctctgtagtctgatgggaactgtattcttgcttcgctgctttaccatgtttgtgacctccctctccgtgccaggacaacacctgcagtgtactggaaagatatatggcagtgtatgggagaaattacatcgagcctttgccatttggagtggctttggtatgaccctgactggcgttcacacatgtggagattacatgtttagtggccacacagtcgtcctaactatgctgaatttctttgtcaccgaatatacaccaagaagctggaatttcttgcacactttatcctgggttctcaacctctttggaatcttcttcatcttggctgcccatgaacattattctattgatgtgtttattgctttttatataacaacaagactctttttgtactaccatactctggccaataccagagcatatcagcagagtaggagagcaaggatttggtttcccatgttctctttttttgaatgcaatgttaatggcacagtacctaatgaatattgttggccattttcaaaaccagcaataatgaaaagactaattggatgaatactatctttctaatgaatttgtgattaaatatataatagttgttgaaaatgagtaactttgcgttctccccctaggttgttcttagatgcctggcttatgtgttgacaaagtaaagttttctgttctgagcaaagttatgattataaaaagcaagaaagaacaatcaagagtccttatgtagctatttgaacagaaagcttaagtagatgttttctgccccttctctttaggaagacttaatgttgtgattgaagtcaggctgtacccttacctgttgagtatttgcttattgaactttaaacaagtcaacttgagcagtttgctggttgaggaattttcattgatttccagtagggctctagtcaagaaataatatgttttgaagctccttattacctttagaagaagaaaccctaacaagtgacagtacttgttctttggactaatctttgtttcattttaaaaaatgcaaccctgggacatgatctgttttactgacaaagagtttttgccttctgaaccatctttaaatatactgagcataccaggatgcctgaaataagaagagaatgaaagaggccatagatgacgtgacagagtactggctaggatgccattggtctcctcattaatgcaaatgtagggctggcatatttcaccaaagatgcaacaaaagatgcagtgccagtgtgaccctcagtgagtattcatgagggaaaaatggctgcatccataaaaataaatgggcttaatgttagtggtataggtacccagaataacttctttgtgctatagttgttagatgacagttcaattttatgcttttttaatggtgttattaaatgagccaaataggagtgttttaccagatgttagataaagttcttaatgccgttaagtagggaggtatgcatgcaaagaattgttttctcctgaaaagaaacttacagcacgcaaaatataactttttggtttttgaaatttatcattcttggctgttggaagtaaacagtctcagacatacttggatatgaaaaagtttcgttgttttttacttttaaatataatggtgtatatacattctttctatttagtcttaatttggcagtcaggaagtgatataacttagctgctatttacaacactagaaatttagtactttaagtaatttcacatctatgataacatttgttactttatttttaatgatttttttacagtagttatgacagtaggatggttatggaattggaatttaaactcccaactaatgagcttaagctgcttggaatattaattatgtagtttttacattccattttaaaacaaaaacttagaaaaggtgctggcattctgaggcctgcaattaggccacatagcagaagcttgctccttccttatctgggtgaaatattttatttttgcactttgagtcatattcccacccctgtataagctacataggagcctgaatgaattgggtaggaaaggaaattatgcaaacaagtctcagctagtgctgaatgaccccaatttgggtctgctgtgaacatcatttttgtatttctcacttgagaaatgctgcaaggcaattcaacttttatgcttttaaatctcacaactcagaatctgatatcttaaatcactgattctgttacatgctaggaacaaaatgccaacatctcatgtaaagaagttgcataatcatgaaaaataaaggatgtttcctatgccagttagagtggtttgacccttcaggtaaaaagatatgttactgttatttttctacgtgacagaacagactgaatttagctagggaggcagtgatgttggcttttgggaaagggttcaaaaaactgtatggcaacattaatgctaaaatgttaagccgagtgcagtggtgcaaggctatagtcccaggttctgaggaggctgaggcaggaggattgcttgaggccaggagttagaaactagagtgtgttataacgcctatgaataaccactgcattccagcccgggcaaggtagcaagacccattctcttaaaaacatggctgggtgcaatggctcacgcctgtaatcccagcactttgggaggccaaggcaggcggatggcttgaggtcaggagttcgagattagcctggccaatatggtgaaacctcatctctactaaaactacaaaaattagctgggcatggtggcacgcacttgtaatcccagctacttgggagactgaggaacaagaaacacttgaacccaggaggtggagtttgcattgagctgagatcactccactgcactccagcctaggtgacagagtgagactccatctcaaaacgaaacaaaacaaaacaaaacaaattagagtgggtgcagtgtctaatgcctgtaatcgcagcactttgggaggctaaggcaggaggatcacttgagctcaggtaaaagagaccagcctgggcaacaaagtgagacctcatccccacaaaaagttgtttagaaaattagctgggcgtggtgatgcatgcctgtggtcccagctacatgggaggctgaggcagaaggatcacttgagcccaaggaggttgaggctacagtgagctgtaatcatgccactgcactccagccttggggacagagtgagaccctgcctcaatcaatcaatcaatcaataacaaaaacttaaatagctattaacctcagtcttctttccttcatataaattctattctaagaccaaatagaaaaataaatgtaactaactttgcagagctattgacattgagagacctaacaacagactgcaatggggattgtaaaataacttttcagccttgcacttgctcatatatgttttgagaaaaatgtaagttaggtataacttattgttttaactattataaggcagtgtttacataaattaatcatctctttcttggaaaacattgagacaaatttattttcagttttacttaaacatgaaacctgtattttagttgctttttgttttgtccagaaatttccagattttgtcttcattttttttcctggttaaaatctaaaccatagtgaagatagtatttatgtttacattttatctgtgaatgtggctaagcagagaagctacatggctttggtctacatattttttgaccttgtatttggttctgtagttgcagacttgtgaaggcttacatcatcatggagactttagtaaggaaggaaccaaaaggtttttggtttggggatgcaaactggaggttatgttacaagtcttcaatgcattttctgtgttcctggcagcagtgttgcctttttttttcttttccttttttttttttaaagaccaggtagggtagtgttattgaagggtaattgaagagtggtagagagtaagaggttttgaaggaggcaggtttgctgttatcacaaaataatttgggggaaacctttcgtggctgtgctgcaagaattctttatgtggctatcctctccatagttttctgaccagaattgcaagggcaaaaatagaacttctagctctatttatttgtatcctttgaaatcagaacttatccttagaaccagtcagttaaataatgcggactatgcctataatcccagcactttaggaggctgaggcaggcagatcacgaggtcaggagttcgaggccagcctggccaatgtggtgaaactccgtctctactaaaaatacaaaaattagccgggcgtggtggtgcacgcccatgcctgtagtcccagctactcgggaggctgaggcagaagaatcgcttgaacccaggaggcggaggttgcagtgagccgagatactgccactacacttcagtctgggtgacagagcgagactccatctcaaaaaaacaaaacaaaataaaataataatgtgggctattcagaagaaaaagtcagtgacagagagaccagaacccattggatcaagagacctgcagggattataactctttactctgtgagcagcggtgtttcgtgccctgtctctgcctgtgtgtttttactaagaattccagaaatcctgtaatttgtaaatgggaaacagaggaaccagattgttttatagctgataagaaacagtctgttttagaaacatctgtttggaaagtattactcatgtattcacaaagtcatatttataacactagtcttctttgactgtattcaacaaaaggcagtttcaccattaatttcatagtaagcttttttaaaggattctagatctaaattgcctaagaatgttaaccacattcttgttttaaactctctaatttaataaatgtaattattttatagtcttttatagacttacattttcttcatactaaaggtaatgataatatagtcatttgccagtactttaaggtattcaggcatttgagacaagaaagctgtcttgtagaatagtccaattgctttcttaaacagtactggtttcatttagacagtttctaagccagcaaaggtgtcaattttaatgccaacttgacagtttaacagttagtgtttgtaagcagtttagcctgaattatcccatactgctgtagaggagaattgttagtaacatcaaaggtcagaatgcttcaggtgactaataagaatggaaagagactgagtaggttttttgtttcttttccctgtctttgagtaactttgaatgactaaaattagtatgaaactaggttttggacccccttctcacctcacccggatgtaatgccaccaatttcaaataactaaaatgtgaccaattactttgcttcaagttctatacaaatatctctgaaatctgtaagccatatttcagctattctggtttttataatacattctaccctaaattaaccaaaggactttttattcagtgtattccatgtttcagcataaggaaagtttgtgcctgatatggcaggag

SEQ ID NO: 176 - DNA, 6384 bp, Homo sapiens
gtctcactgtctcccaggttggagtacagtggcatgatctcggctcactgcaacctctgcctccagggctcaagcgactctccagcctcagcctgagagtagctactcagcctcagagtagctactcagcctcagagtagctgggactacaggcacactccaccgcgcccaggcagcggaggaggaaatggcaggtcctaatcaactctgcattcgccgctggactaccaagcatgtagctgtgtggctgaaggatgaaggcttttttgaatatgtggacattttatgcaataagcaccgacttgatggaatcacattgctaacattgactgaatatgatctccggtctcctcctctggaaatcaaagtcttaggggacattaaaaggttaatgctctcagtccgaaaattgcagaaaatacatattgatgttttagaagagatgggctacaacagtgacagtcccatgggttccatgacccctttcatcagtgctcttcagagtacagactggctctgtaatggggagctttcccatgactgtgacggacccataactgacttgaattctgatcagtaccagtacatgaatggtaaaaacaaacattctgttcgaagattggacccagaatactggaagactatactgagttgtatatatgtttttatagtatttggatttacatctttcattatggttatagtccatgagcgagtgcctgacatgcagacctatccaccactcccagatatattcttagacagcgttcctagaatcccatgggcctttgccatgacggaagtatgtggcatgattctgtgctatatttggctcctggttcttcttcttcacaagcacaggtcaatacttctgcgaaggctctgtagtctgatgggaactgtattcttgcttcgctgctttaccatgtttgtgacctccctctccgtgccaggacaacacctgcagtgtactggaaagatatatggcagtgtatgggagaaattacatcgagcctttgccatttggagtggctttggtatgaccctgactggcgttcacacatgtggagattacatgtttagtggccacacagtcgtcctaactatgctgaatttctttgtcaccgaatatacaccaagaagctggaatttcttgcacactttatcctgggttctcaacctctttggaatcttcttcatcttggctgcccatgaacattattctattgatgtgtttattgctttttatataacaacaagactctttttgtactaccatactctggccaataccagagcatatcagcagagtaggagagcaaggatttggtttcccatgttctctttttttgaatgcaatgttaatggcacagtacctaatgaatattgttggccattttcaaaaccagcaataatgaaaagactaattggatgaatactatctttctaatgaatttgtgattaaatatataatagttgttgaaaatgagtaactttgcgttctccccctaggttgttcttagatgcctggcttatgtgttgacaaagtaaagttttctgttctgagcaaagttatgattataaaaagcaagaaagaacaatcaagagtccttatgtagctatttgaacagaaagcttaagtagatgttttctgccccttctctttaggaagacttaatgttgtgattgaagtcaggctgtacccttacctgttgagtatttgcttattgaactttaaacaagtcaacttgagcagtttgctggttgaggaattttcattgatttccagtagggctctagtcaagaaataatatgttttgaagctccttattacctttagaagaagaaaccctaacaagtgacagtacttgttctttggactaatctttgtttcattttaaaaaatgcaaccctgggacatgatctgttttactgacaaagagtttttgccttctgaaccatctttaaatatactgagcataccaggatgcctgaaataagaagagaatgaaagaggccatagatgacgtgacagagtactggctaggatgccattggtctcctcattaatgcaaatgtagggctggcatatttcaccaaagatgcaacaaaagatgcagtgccagtgtgaccctcagtgagtattcatgagggaaaaatggctgcatccataaaaataaatgggcttaatgttagtggtataggtacccagaataacttctttgtgctatagttgttagatgacagttcaattttatgcttttttaatggtgttattaaatgagccaaataggagtgttttaccagatgttagataaagttcttaatgccgttaagtagggaggtatgcatgcaaagaattgttttctcctgaaaagaaacttacagcacgcaaaatataactttttggtttttgaaatttatcattcttggctgttggaagtaaacagtctcagacatacttggatatgaaaaagtttcgttgttttttacttttaaatataatggtgtatatacattctttctatttagtcttaatttggcagtcaggaagtgatataacttagctgctatttacaacactagaaatttagtactttaagtaatttcacatctatgataacatttgttactttatttttaatgatttttttacagtagttatgacagtaggatggttatggaattggaatttaaactcccaactaatgagcttaagctgcttggaatattaattatgtagtttttacattccattttaaaacaaaaacttagaaaaggtgctggcattctgaggcctgcaattaggccacatagcagaagcttgctccttccttatctgggtgaaatattttatttttgcactttgagtcatattcccacccctgtataagctacataggagcctgaatgaattgggtaggaaaggaaattatgcaaacaagtctcagctagtgctgaatgaccccaatttgggtctgctgtgaacatcatttttgtatttctcacttgagaaatgctgcaaggcaattcaacttttatgcttttaaatctcacaactcagaatctgatatcttaaatcactgattctgttacatgctaggaacaaaatgccaacatctcatgtaaagaagttgcataatcatgaaaaataaaggatgtttcctatgccagttagagtggtttgacccttcaggtaaaaagatatgttactgttatttttctacgtgacagaacagactgaatttagctagggaggcagtgatgttggcttttgggaaagggttcaaaaaactgtatggcaacattaatgctaaaatgttaagccgagtgcagtggtgcaaggctatagtcccaggttctgaggaggctgaggcaggaggattgcttgaggccaggagttagaaactagagtgtgttataacgcctatgaataaccactgcattccagcccgggcaaggtagcaagacccattctcttaaaaacatggctgggtgcaatggctcacgcctgtaatcccagcactttgggaggccaaggcaggcggatggcttgaggtcaggagttcgagattagcctggccaatatggtgaaacctcatctctactaaaactacaaaaattagctgggcatggtggcacgcacttgtaatcccagctacttgggagactgaggaacaagaaacacttgaacccaggaggtggagtttgcattgagctgagatcactccactgcactccagcctaggtgacagagtgagactccatctcaaaacgaaacaaaacaaaacaaaacaaattagagtgggtgcagtgtctaatgcctgtaatcgcagcactttgggaggctaaggcaggaggatcacttgagctcaggtaaaagagaccagcctgggcaacaaagtgagacctcatccccacaaaaagttgtttagaaaattagctgggcgtggtgatgcatgcctgtggtcccagctacatgggaggctgaggcagaaggatcacttgagcccaaggaggttgaggctacagtgagctgtaatcatgccactgcactccagccttggggacagagtgagaccctgcctcaatcaatcaatcaatcaataacaaaaacttaaatagctattaacctcagtcttctttccttcatataaattctattctaagaccaaatagaaaaataaatgtaactaactttgcagagctattgacattgagagacctaacaacagactgcaatggggattgtaaaataacttttcagccttgcacttgctcatatatgttttgagaaaaatgtaagttaggtataacttattgttttaactattataaggcagtgtttacataaattaatcatctctttcttggaaaacattgagacaaatttattttcagttttacttaaacatgaaacctgtattttagttgctttttgttttgtccagaaatttccagattttgtcttcattttttttcctggttaaaatctaaaccatagtgaagatagtatttatgtttacattttatctgtgaatgtggctaagcagagaagctacatggctttggtctacatattttttgaccttgtatttggttctgtagttgcagacttgtgaaggcttacatcatcatggagactttagtaaggaaggaaccaaaaggtttttggtttggggatgcaaactggaggttatgttacaagtcttcaatgcattttctgtgttcctggcagcagtgttgcctttttttttcttttccttttttttttttaaagaccaggtagggtagtgttattgaagggtaattgaagagtggtagagagtaagaggttttgaaggaggcaggtttgctgttatcacaaaataatttgggggaaacctttcgtggctgtgctgcaagaattctttatgtggctatcctctccatagttttctgaccagaattgcaagggcaaaaatagaacttctagctctatttatttgtatcctttgaaatcagaacttatccttagaaccagtcagttaaataatgcggactatgcctataatcccagcactttaggaggctgaggcaggcagatcacgaggtcaggagttcgaggccagcctggccaatgtggtgaaactccgtctctactaaaaatacaaaaattagccgggcgtggtggtgcacgcccatgcctgtagtcccagctactcgggaggctgaggcagaagaatcgcttgaacccaggaggcggaggttgcagtgagccgagatactgccactacacttcagtctgggtgacagagcgagactccatctcaaaaaaacaaaacaaaataaaataataatgtgggctattcagaagaaaaagtcagtgacagagagaccagaacccattggatcaagagacctgcagggattataactctttactctgtgagcagcggtgtttcgtgccctgtctctgcctgtgtgtttttactaagaattccagaaatcctgtaatttgtaaatgggaaacagaggaaccagattgttttatagctgataagaaacagtctgttttagaaacatctgtttggaaagtattactcatgtattcacaaagtcatatttataacactagtcttctttgactgtattcaacaaaaggcagtttcaccattaatttcatagtaagcttttttaaaggattctagatctaaattgcctaagaatgttaaccacattcttgttttaaactctctaatttaataaatgtaattattttatagtcttttatagacttacattttcttcatactaaaggtaatgataatatagtcatttgccagtactttaaggtattcaggcatttgagacaagaaagctgtcttgtagaatagtccaattgctttcttaaacagtactggtttcatttagacagtttctaagccagcaaaggtgtcaattttaatgccaacttgacagtttaacagttagtgtttgtaagcagtttagcctgaattatcccatactgctgtagaggagaattgttagtaacatcaaaggtcagaatgcttcaggtgactaataagaatggaaagagactgagtaggttttttgtttcttttccctgtctttgagtaactttgaatgactaaaattagtatgaaactaggttttggacccccttctcacctcacccggatgtaatgccaccaatttcaaataactaaaatgtgaccaattactttgcttcaagttctatacaaatatctctgaaatctgtaagccatatttcagctattctggtttttataatacattctaccctaaattaaccaaaggactttttattcagtgtattccatgtttcagcataaggaaagtttgtgcctgatatggcaggag

SEQ ID NO: 177 - DNA, 6349 bp, Homo sapiens
cgactgaggccttgtggactgcagtgggccctccggtccctctaaacccccaggcctcctctctgcttggtatctgtttgggattgaagaccgttggttccataaacctccatgaagatgggagtctacctgaagaggcagcggaggaggaaatggcaggtcctaatcaactctgcattcgccgctggactaccaagcatgtagctgtgtggctgaaggatgaaggcttttttgaatatgtggacattttatgcaataagcaccgacttgatggaatcacattgctaacattgactgaatatgatctccggtctcctcctctggaaatcaaagtcttaggggacattaaaaggttaatgctctcagtccgaaaattgcagaaaatacatattgatgttttagaagagatgggctacaacagtgacagtcccatgggttccatgacccctttcatcagtgctcttcagagtacagactggctctgtaatggggagctttcccatgactgtgacggacccataactgacttgaattctgatcagtaccagtacatgaatggtaaaaacaaacattctgttcgaagattggacccagaatactggaagactatactgagttgtatatatgtttttatagtatttggatttacatctttcattatggttatagtccatgagcgagtgcctgacatgcagacctatccaccactcccagatatattcttagacagcgttcctagaatcccatgggcctttgccatgacggaagtatgtggcatgattctgtgctatatttggctcctggttcttcttcttcacaagcacaggtcaatacttctgcgaaggctctgtagtctgatgggaactgtattcttgcttcgctgctttaccatgtttgtgacctccctctccgtgccaggacaacacctgcagtgtactggaaagatatatggcagtgtatgggagaaattacatcgagcctttgccatttggagtggctttggtatgaccctgactggcgttcacacatgtggagattacatgtttagtggccacacagtcgtcctaactatgctgaatttctttgtcaccgaatatacaccaagaagctggaatttcttgcacactttatcctgggttctcaacctctttggaatcttcttcatcttggctgcccatgaacattattctattgatgtgtttattgctttttatataacaacaagactctttttgtactaccatactctggccaataccagagcatatcagcagagtaggagagcaaggatttggtttcccatgttctctttttttgaatgcaatgttaatggcacagtacctaatgaatattgttggccattttcaaaaccagcaataatgaaaagactaattggatgaatactatctttctaatgaatttgtgattaaatatataatagttgttgaaaatgagtaactttgcgttctccccctaggttgttcttagatgcctggcttatgtgttgacaaagtaaagttttctgttctgagcaaagttatgattataaaaagcaagaaagaacaatcaagagtccttatgtagctatttgaacagaaagcttaagtagatgttttctgccccttctctttaggaagacttaatgttgtgattgaagtcaggctgtacccttacctgttgagtatttgcttattgaactttaaacaagtcaacttgagcagtttgctggttgaggaattttcattgatttccagtagggctctagtcaagaaataatatgttttgaagctccttattacctttagaagaagaaaccctaacaagtgacagtacttgttctttggactaatctttgtttcattttaaaaaatgcaaccctgggacatgatctgttttactgacaaagagtttttgccttctgaaccatctttaaatatactgagcataccaggatgcctgaaataagaagagaatgaaagaggccatagatgacgtgacagagtactggctaggatgccattggtctcctcattaatgcaaatgtagggctggcatatttcaccaaagatgcaacaaaagatgcagtgccagtgtgaccctcagtgagtattcatgagggaaaaatggctgcatccataaaaataaatgggcttaatgttagtggtataggtacccagaataacttctttgtgctatagttgttagatgacagttcaattttatgcttttttaatggtgttattaaatgagccaaataggagtgttttaccagatgttagataaagttcttaatgccgttaagtagggaggtatgcatgcaaagaattgttttctcctgaaaagaaacttacagcacgcaaaatataactttttggtttttgaaatttatcattcttggctgttggaagtaaacagtctcagacatacttggatatgaaaaagtttcgttgttttttacttttaaatataatggtgtatatacattctttctatttagtcttaatttggcagtcaggaagtgatataacttagctgctatttacaacactagaaatttagtactttaagtaatttcacatctatgataacatttgttactttatttttaatgatttttttacagtagttatgacagtaggatggttatggaattggaatttaaactcccaactaatgagcttaagctgcttggaatattaattatgtagtttttacattccattttaaaacaaaaacttagaaaaggtgctggcattctgaggcctgcaattaggccacatagcagaagcttgctccttccttatctgggtgaaatattttatttttgcactttgagtcatattcccacccctgtataagctacataggagcctgaatgaattgggtaggaaaggaaattatgcaaacaagtctcagctagtgctgaatgaccccaatttgggtctgctgtgaacatcatttttgtatttctcacttgagaaatgctgcaaggcaattcaacttttatgcttttaaatctcacaactcagaatctgatatcttaaatcactgattctgttacatgctaggaacaaaatgccaacatctcatgtaaagaagttgcataatcatgaaaaataaaggatgtttcctatgccagttagagtggtttgacccttcaggtaaaaagatatgttactgttatttttctacgtgacagaacagactgaatttagctagggaggcagtgatgttggcttttgggaaagggttcaaaaaactgtatggcaacattaatgctaaaatgttaagccgagtgcagtggtgcaaggctatagtcccaggttctgaggaggctgaggcaggaggattgcttgaggccaggagttagaaactagagtgtgttataacgcctatgaataaccactgcattccagcccgggcaaggtagcaagacccattctcttaaaaacatggctgggtgcaatggctcacgcctgtaatcccagcactttgggaggccaaggcaggcggatggcttgaggtcaggagttcgagattagcctggccaatatggtgaaacctcatctctactaaaactacaaaaattagctgggcatggtggcacgcacttgtaatcccagctacttgggagactgaggaacaagaaacacttgaacccaggaggtggagtttgcattgagctgagatcactccactgcactccagcctaggtgacagagtgagactccatctcaaaacgaaacaaaacaaaacaaaacaaattagagtgggtgcagtgtctaatgcctgtaatcgcagcactttgggaggctaaggcaggaggatcacttgagctcaggtaaaagagaccagcctgggcaacaaagtgagacctcatccccacaaaaagttgtttagaaaattagctgggcgtggtgatgcatgcctgtggtcccagctacatgggaggctgaggcagaaggatcacttgagcccaaggaggttgaggctacagtgagctgtaatcatgccactgcactccagccttggggacagagtgagaccctgcctcaatcaatcaatcaatcaataacaaaaacttaaatagctattaacctcagtcttctttccttcatataaattctattctaagaccaaatagaaaaataaatgtaactaactttgcagagctattgacattgagagacctaacaacagactgcaatggggattgtaaaataacttttcagccttgcacttgctcatatatgttttgagaaaaatgtaagttaggtataacttattgttttaactattataaggcagtgtttacataaattaatcatctctttcttggaaaacattgagacaaatttattttcagttttacttaaacatgaaacctgtattttagttgctttttgttttgtccagaaatttccagattttgtcttcattttttttcctggttaaaatctaaaccatagtgaagatagtatttatgtttacattttatctgtgaatgtggctaagcagagaagctacatggctttggtctacatattttttgaccttgtatttggttctgtagttgcagacttgtgaaggcttacatcatcatggagactttagtaaggaaggaaccaaaaggtttttggtttggggatgcaaactggaggttatgttacaagtcttcaatgcattttctgtgttcctggcagcagtgttgcctttttttttcttttccttttttttttttaaagaccaggtagggtagtgttattgaagggtaattgaagagtggtagagagtaagaggttttgaaggaggcaggtttgctgttatcacaaaataatttgggggaaacctttcgtggctgtgctgcaagaattctttatgtggctatcctctccatagttttctgaccagaattgcaagggcaaaaatagaacttctagctctatttatttgtatcctttgaaatcagaacttatccttagaaccagtcagttaaataatgcggactatgcctataatcccagcactttaggaggctgaggcaggcagatcacgaggtcaggagttcgaggccagcctggccaatgtggtgaaactccgtctctactaaaaatacaaaaattagccgggcgtggtggtgcacgcccatgcctgtagtcccagctactcgggaggctgaggcagaagaatcgcttgaacccaggaggcggaggttgcagtgagccgagatactgccactacacttcagtctgggtgacagagcgagactccatctcaaaaaaacaaaacaaaataaaataataatgtgggctattcagaagaaaaagtcagtgacagagagaccagaacccattggatcaagagacctgcagggattataactctttactctgtgagcagcggtgtttcgtgccctgtctctgcctgtgtgtttttactaagaattccagaaatcctgtaatttgtaaatgggaaacagaggaaccagattgttttatagctgataagaaacagtctgttttagaaacatctgtttggaaagtattactcatgtattcacaaagtcatatttataacactagtcttctttgactgtattcaacaaaaggcagtttcaccattaatttcatagtaagcttttttaaaggattctagatctaaattgcctaagaatgttaaccacattcttgttttaaactctctaatttaataaatgtaattattttatagtcttttatagacttacattttcttcatactaaaggtaatgataatatagtcatttgccagtactttaaggtattcaggcatttgagacaagaaagctgtcttgtagaatagtccaattgctttcttaaacagtactggtttcatttagacagtttctaagccagcaaaggtgtcaattttaatgccaacttgacagtttaacagttagtgtttgtaagcagtttagcctgaattatcccatactgctgtagaggagaattgttagtaacatcaaaggtcagaatgcttcaggtgactaataagaatggaaagagactgagtaggttttttgtttcttttccctgtctttgagtaactttgaatgactaaaattagtatgaaactaggttttggacccccttctcacctcacccggatgtaatgccaccaatttcaaataactaaaatgtgaccaattactttgcttcaagttctatacaaatatctctgaaatctgtaagccatatttcagctattctggtttttataatacattctaccctaaattaaccaaaggactttttattcagtgtattccatgtttcagcataaggaaagtttgtgcctgatatggcaggag

SEQ ID NO: 178 - DNA, 1195 bp, Homo sapiens
gctgccggcgcggcggtgacggcggccgggacgatgcctgcgcgcagtcgccaccgcccccgcctccactccggctccccgccccgggctccgcccccgccgcttgaggcgcttcactccggcgaggcggggagggccccggactccgacggcggctcggacgccgactcggaggtgggtccggggagcccgactcggaccgcggaggcagcggaggaggaaatggcaggtcctaatcaactctgcattcgccgctggactaccaagcatgtagctgtgtggctgaaggatgaaggcttttttgaatatgtggacattttatgcaataagcaccgacttgatggaatcacattgctaacattgactgaatatgatctccggtctcctcctctggaaatcaaagtcttaggggacattaaaaggttaatgctctcagtccgaaaattgcagaaaatacatattgatgttttagaagagatgggctacaacagtgacagtcccatgggttccatgacccctttcatcagtgctcttcagagtacagactggctctgtaatggggagctttcccatgactgtgacggacccataactgacttgaattctgatcagtaccagtacatgaatggtaaaaacaaacattctgttcgaagattggacccagaatactggaagactatactgagttgtatatatgtttttatagtatttggatttacatctttcattatggttatagtccatgagcgagtgcctgacatgcagacctatccaccactcccagatatattcttagacagcgttcctagaatcccatgggcctttgccatgacggaagtatgtggcatgattctgtgctatatttggctcctggttcttcttcttcacaagcacagatatatggcagtgtatgggagaaattacatcgagcctttgccatttggagtggctttggtatgaccctgactggcgttcacacatgtggagattacatgtttagtggccacacagtcgtcctaactatgctgaatttctttgtcaccgaatatacaccaagaagctggaatttcttgcacactttatcctgggttctcaacctctttggaatcttcttcatcttggctgcccatgaacattattctattgatgtgtttattgctttttatataacaacaagactctttttgtactacca

SEQ ID NO: 179 - DNA, 17207 bp, Homo sapiens
gactgagagcagggagcagcaggcatggggcatgccgggtgccagttcaaagccctgctgtggaagaattggctctgcagactcaggaacccggtccttttccttgctgaattcttctggccttgtatcctgtttgtaattctgacagttcttcgttttcaagaacctcccagatacagagacatttgttatttgcagccccgagatctacccagctgtggtgttatcccctttgttcaaagccttctttgtaacactggatcaaggtgtaggaacttcagctatgaagggtcaatggagcatcattttcgtttgtctaggttccaaactgcagctgaccccaagaaagtcaacaacctggcctttttaaaagagatacaagacctggcagaggaaattcatggaatgatggacaaggcaaaaaacttaaaaagactttgggtagaacgatccaacactccagattcttcttatggttccagtttttttacaatggatctcaataagaccgaggaggtaatattgaaactggaaagcctccatcagcagcctcatatctgggattttctacttttactgccgagactacacacaagccatgatcatgtggaagatggcatggatgttgcagtgaaccttctccagaccattttgaattccttaatatccctagaagatttagattggcttccactcaaccaaactttttcccaggtttctgaacttgtactgaatgtgaccatttcgacactgacatttctgcagcaacatggagtagcagtcaccgagccagtttaccacctgtccatgcagaatatagtgtgggatccacagaaagtccagtatgatctcaaatcccagtttggctttgatgatcttcacacggaacagatcctgaactcttcagctgaactgaaggagattcccacagacacttccttggagaagatggtgtgttcagtcttgtctagcacatcagaggatgaagctgagaaatggggccacgttggaggctgccaccctaagtggtcagaagccaaaaactatcttgtccatgcagtcagctggctgcgagtctaccaacaggtgtttgttcagtggcaacagggtagcctgcttcagaagacactcacaggcatgggccatagtctggaggctctcaggaatcagtttgaagaagagagcaagccctggaaggtggtggaagctctgcacactgcactgctcctgctgaatgacagcttgtcagcagatggcccaaaagataatcatacatttccaaagatattacagcatctgtggaaattgcaaagcttgctgcaaaacctgccccagtggccggcactgaagagatttcttcagcttgatggagctctcagaaatgcgatagctcagaatttacattttgtccaagaagtcctcatttgcctggagacatcagctaatgattttaaatggtttgaacttaaccaattgaaactggaaaaggatgtgttcttttgggagctgaaacagatgttggcgaagaatgctgtctgcccgaatggtcgtttctctgagaaggaggtctttttgccgcctggaaactccagcatatggggtggtctccagggactgttgtgctattgtaactcctctgagacgagtgttttaaacaagctacttggttcagtagaggatgctgatcgtattttgcaagaggtcattacttggcacaaaaatatgtcagttttaatacctgaagaatatttggactggcaggaacttgagatgcagctgtcagaagcaagcctttcctgtactcggctcttcctgctgctgggagctgatccctctcctgagaatgatgtcttttctagtgactgtaagcaccagcttgtctccacagtgatatttcatacacttgaaaaaacacaatttttcctggaacaagcatattattggaaagccttcaaaaagtttatcaggaagacttgcgaagtggcccaatatgtaaatatgcaagagagtttccagaacagactattggcttttcctgaggaatctccttgttttgaagaaaacatggattggaaaatgatcagtgataattattttcaatttttgaataacttactcaagtctccaacagcttccatatccagggctttaaatttcacaaagcaccttctaatgatggaaaagaagttgcacacccttgaggatgaacaaatgaactttcttttatcatttgtggaattttttgagaaattattgttgcctaatctttttgactcctccattgttcccagtttccacagcctcccatctctcacagaggatattctgaatataagttctctgtggacaaatcatttaaaaagtttaaagagagacccatctgccactgatgctcagaaactcttggaatttggcaacgaagtgatttggaaaatgcagactctcggaagtcactggataaggaaggaaccaaaaaatcttttgagattcatagaattaatactttttgaaattaatcccaaattactagaattatgggcctatggcatttcaaaaggaaaaagagctaaattggaaaacttctttacacttttaaatttttctgttccagaaaatgagattctgagtacaagttttaacttttcccagttgttccattcagattggcctaaatcaccagctatgaacatagattttgtacgtttaagtgaggctataataactagtctccatgaatttggatttttggagcaggaacagatctcagaagctctgaacacagtctacgctatcaggaatgcatctgatcttttctcagccctttctgaaccacaaaaacaagaagttgataaaattttgactcacatacacctaaatgtcttccaggacaaggattcagctttacttctgcaaatttattcttcattttaccgatatatttatgaattattgaatattcagagtagaggctcttcgttgactttccttacacaaatctcaaaacacattttggatatcataaaacaatttaatttccaaaacatcagtaaagcatttgcatttttatttaagacagcagaggttcttgggggaatttctaatgtatcttactgtcagcaattgctttcaatttttaactttttggagcttcaggcccaatccttcatgtctacagagggccaagaactggaagtgatccacactactttgacaggcctcaaacagctgctcataattgatgaagattttcgtatttctttatttcaatatatgagccaattcttcaacagttcagtagaagacctattggataataaatgcttgatttcggacaataaacacatttcttccgtaaattattcaacaagtgaggagtcttcatttgtttttccattggcacaaattttttcaaacctctcagcaaatgtcagtgtgttcaacaagtttatgtccattcactgtaccgtttcatggcttcaaatgtggactgaaatctgggaaaccatatctcaattatttaagtttgacatgaatgttttcacatctcttcatcatggtttcactcagcttttggatgaattggaagatgatgtgaaagtctctaaaagctgccagggtatacttcccacccataatgttgctagactcatattaaatttgtttaaaaatgtaactcaagccaatgacttccataattgggaggacttcctggatctcagggattttttggtagctttaggtaatgcattagtttcagtaaaaaaacttaacttggagcaagtggagaaatcccttttcaccatggaagctgccctgcatcagttgaagacatttccattcaacgaaagtacaagcagagagtttttaaattctctgcttgaagttttcattgagtttagcagtacctcagaatatatagtcagaaatctagattcaataaatgactttctttcaaataatctcacaaattatggagaaaaatttgaaaatatcatcactgagctaagagaagcaatagtatttcttagaaatgtatcacatgatcgagatttgttttcctgtgctgatattttccaaaatgttactgagtgtattttagaagatggctttttatatgtaaatacctcacagaggatgttacgtattctagacacgttaaattccacattttcctctgagaacacaattagcagtctgaaaggatgcattgtatggttagatgtcataaaccatttgtatttgttgtctaactccagtttttcacaaggtcatcttcaaaatattttggggaatttcagagatatagaaaacaaaatgaactctatattaaaaattgtaacttgggtgttaaatataaaaaaacctctttgttcatcaaatggctcacatataaattgtgtcaatatttacttgaaagatgtaactgactttctaaatattgtacttactacagtctttgaaaaagagaagaaacctaaatttgagattttattagctcttttaaatgattccacaaagcaagtaaggatgagtatcaacaacttaacaacagactttgattttgcatctcagtccaattggagatattttactgaattaattctaagaccaatagaaatgtcagatgaaattcctaatcagtttcaaaatatttggcttcatttaataacactggggaaggaatttcagaagcttgtaaaaggtatttactttaacatcctggaaaataattcctcttctaaaactgaaaacttgttaaacatatttgccaccagtccaaaagaaaaggatgtaaacagtgtaggcaattccatttatcacttagctagttaccttgccttcagcttatctcatgacctccaaaattcaccaaaaataataatttcacctgaaataatgaaagctacaggtcttggtattcaactgataagggatgtgttcaactccttaatgcctgtagttcatcacactagtccacaaaatgcaggttatatgcaagctttgaagaaggtaacttctgtcatgcgtacccttaagaaggcagacatagaccttttagtggatcagcttgaacaagttagtgtaaacctaatggatttctttaagaatatcagtagtgtgggaactggcaatttagtggtcaatttgcttgttggcttgatggaaaaatttgcagacagctcacattcttggaatgttaatcatctgctgcagctctcacgcctgtttcctaaagatgttgtggatgctgtgatagatgtgtactatgtgcttcctcatgctgtaaggctcctgcagggagtacctggtaaaaacatcactgaaggcctcaaggatgtctacagcttcacactccttcatggcataaccatttcaaatatcaccaaggaagacttcgcaattgtgataaaaattcttttggatacaattgaattagtatcagataagccagatattatttcagaggctttagcttgttttcctgtggtttggtgctggaatcacacaaattctggatttcggcagaattcaaagatagacccctgcaatgtccatgggctcatgtcttcttccttttatggcaaagtggccagtatacttgatcatttccacctgtctccccaaggtgaagattcaccatgttcaaatgaaagctcccgaatggaaataactaggaaagtggtctgcataattcatgaattagtggactggaattctattcttctggagctctctgaagtcttccatgttaacatttctcttgtgaaaactgtgcagaaattttggcataagatattaccgtttgtcccaccttcaataaatcaaactagggatagcatctctgaactctgtcctagtggttccataaagcaagttgctttgcaaatcatagaaaaacttaaaaatgtcaactttacaaaagttacatcaggtgaaaatattcttgacaaactaagtagtttaaacaagatccttaacattaatgaagacacagagacatctgttcaaaatattatttcctcaaatttggaaaggacagtacaattgatttctgaagactggagcctagaaaaaagtacgcataatctactctctttattcatgatgctccagaatgcaaatgtcacaggtagcagtttagaagcattatcaagttttattgaaaaaagtgaaacaccttacaactttgaagaactatggcccaagtttcaacaaatcatgaaagacctaacccaagattttagaatcagacacctgctttctgaaatgaacaaaggaatcaaaagtataaattcaatggctcttcaaaagataactttgcagtttgcccatttcctggaaatcctggattcaccgtcattgaagacattagaaattattgaagattttctattggtcacaaaaaactggcttcaggaatatgcaaatgaggattactccagaatgatagaaacattattcattcctgtgaccaatgagagttcaactgaagatatagctttgttagccaaagctattgctactttttggggctctttaaaaaatatatctagagcaggcaattttgatgttgcctttcttacccatctgctaaatcaagaacagctgactaatttctcagttgttcagctgctttttgaaaacatcctaattaatttgatcaataacttagctgggaattctcaggaagcagcttggaacttaaatgatactgaccttcaaataatgaatttcattaaccttatcttgaaccatatgcagtcagaaactagtaggaaaacagttctctctctgagaagcatagtagatttcacagaacagtttttgaaaacattcttctccctttttctaaaggaagattctgagaacaaaatatctcttctgctgaaatatttccacaaagatgttattgcagagatgagttttgtcccaaaagataaaattctagaaattctgaaactggatcaatttcttaccctgatgatacaagacagattgatgaacattttttcaagtttaaaggagactatatatcacctaatgaaaagttcatttatattagacaatggagaattttattttgatactcatcaaggactgaagttcatgcaagatttatttaatgcccttctcagggaaacttcaatgaaaaataagactgaaaataatatagactttttcacagtggtgagtcagttgtttttccatgtgaataagtctgaggacctcttcaaactcaatcaagatcttgggtcagctcttcaccttgtaagagaatgttcaacagagatggcaagacttctggatacaattttacactctcctaataaggacttctatgctttgtatcctaccctccaagaagttatacttgctaatctaacggatttgcttttctttataaataattcattccctctaagaaacagagcaacattagaaattactaagagattagttggtgctatttcaagagcaagtgaagaaagtcacgtcctgaaacccctcttagaaatgtctgggactctggtcatgctgttgaatgacagtgctgacctgagagatcttgccacatcaatggactccattgtgaaacttcttaagctggtcaagaaagtttcggggaagatgtccacagtttttaaaactcattttatctccaataccaaggacagtgtgaaattctttgacactctgtattccatcatgcaacaaagtgttcaaaatcttgtgaaagaaatagctactttaaaaaaaatagatcatttcacatttgaaaagataaatgatttgttggtgccatttcttgacttggcctttgaaatgattggggtagaaccttatatatcatcaaactctgatattttcagtatgtcacctagcatactctcatatatgaaccaatctaaggacttttctgatattttggaagaaattgctgaatttttaacatctgtgaaaatgaacttggaagatatgaggagtcttgcggtagcatttaacaatgagactcaaacattttctatggattctgtcaacttacgggaagaaattctgggttgcttagttcctataaataacatcaccaaccaaatggacttcttataccctaatccaatttccactcatagtggccctcaagatataaaatgggaaataattcatgaagtgatcccttttttggataaaatattatcacaaaacagcacagaaataggatctttcttgaaaatggtgatctgtctcaccttagaagctctttggaaaaacttaaagaaagataattggaatgtttctaatgtgttgatgacatttactcagcatccaaataaccttttgaaaaccatagaaacagttttagaggcctccagtggaattaaaagtgactatgaaggtgatttgaataaaagtttatattttgacacacctttgagtcagaatataactcatcatcaacttgaaaaagcaatccataatgttttaagtagaatagctctctggaggaaaggacttctgtttaacaactctgaatggataacttccacaagaactttgtttcagccactttttgagattttcattaaagcaaccaccggaaagaatgtcacatcagaaaaagaagagagaaccaagaaagagatgattgactttccttatagtttcaaaccatttttctgtttggagaaatacctgggaggattatttgtattgactaaatactggcaacaaatcccactaacagatcaaagtgttgttgagatttgtgaagttttccagcagactgtgaagccctcagaagccatggagatgctgcagaaagtgaagatgatggtcgtacgtgtgctcaccatcgttgcagaaaacccttcctggaccaaggacattttgtgtgctactctgagttgcaagcaaaatgggataaggcatctcattttatctgctatacaaggggtcactttggcgcaggaccacttccaggaaattgaaaagatatggtcctcgccgaatcagctaaattgtgaaagtcttagcaagaatctttctagcaccttggagagcttcaagagcagcttggaaaatgccactggccaggactgcacaagccagccgaggctggagacggtgcagcagcacttgtacatgttggccaaaagcctcgaggaaacttggtcatcagggaatcccatcatgacttttctcagcaatttcacagtaactgaggatgtaaaaataaaagatttgatgaagaatatcaccaagttgactgaggagcttcgctcttccatccaaatctcgaatgagactatccatagcattctagaagcaaatatttcccactccaaggttctcttcagtgccctcaccgtagctctgtctggaaagtgtgatcaggaaatccttcatctcctgctgacatttcccaaaggggaaaaatcttggatcgcagcggaggaactctgtagcctgccagggtcaaaagtgtattctctgattgtgttgctgagtcgaaacttggatgtgcgagctttcatttacaagactctgatgccttctgaagcaaatggcttgctcaactccttgctggatatagtttccagcctcagcgccttgcttgccaaagcccagcacgtctttgagtatcttcctgagtttcttcacacatttaaaatcactgccttgctagaaaccctggactttcaacaggtttcacaaaatgtccaggccagaagttcagcttttggttctttccagtttgtgatgaagatggtttgcaaggaccaagcatcattccttagcgattctaatatgtttattaatttgcccagagttaaggaactcttggaagatgacaaagaaaaattcaacattcctgaagattcaacaccgttttgcttgaagctttatcaggaaattctacaattgccaaatggtgctttggtgtggaccttcctaaaacccatattgcatggaaaaatactatacacaccaaacactccagaaattaacaaggtcattcaaaaggctaattacaccttttatattgtggacaaactaaaaactttatcagaaacactgctggaaatgtccagccttttccagagaagtggaagtggccagatgttcaaccagctgcaggaggccctgagaaacaaatttgtaagaaactttgtagaaaaccagttgcacattgatgtagacaaacttactgaaaaactccagacatacggagggctgctggatgagatgtttaaccatgcaggcgctggacgcttccgtttcttgggcagcatcttggtcaatctctcttcctgcgtggcactgaaccgtttccaggctctgcagtctgtcgacatcctggagactaaagcacatgaactcttgcagcagaacagcttcttggccagtatcattttcagcaattccttattcgacaagaacttcagatcagagtctgtcaaactgccaccccatgtctcatacacaatccggaccaatgtgttatacagcgtgcgaacagatgtggtaaaaaacccttcttggaagttccaccctcagaatctaccagctgatgggttcaaatataactacgtctttgccccactgcaagacatgatcgaaagagccatcattttggtgcagactgggcaggaagccctggaaccagcagcacagactcaggcggccccttacccctgccataccagcgacctattcctgaacaacgttggtttcttttttccactgataatgatgctgacgtggatggtgtctgtggccagcatggtcagaaagttggtgtatgagcaggagatacagatagaagagtatatgcggatgatgggagtgcatccagtgatccatttcctggcctggttcctggagaacatggctgtgttgaccataagcagtgctactctggccatcgttctgaaaacaagtggcatctttgcacacagcaatacctttattgttttcctctttctcttggattttgggatgtcagtcgtcatgctgagctacctcttgagtgcatttttcagccaagctaatacagcggccctttgtaccagcctggtgtacatgatcagctttctgccctacatagttctattggttctacataaccaattaagttttgttaatcagacatttctgtgccttctttcgacaaccgcctttggacaaggggtattttttattacattcctggaaggacaagagacagggattcaatggaataatatgtaccaggctctggaacaagggggcatgacatttggctgggtttgctggatgattctttttgattcaagcctttattttttgtgtggatggtacttgagcaacttgattcctggaacatttggtttacggaaaccatggtatttcccctttactgcctcatattggaagagtgtgggtttcttggtggagaaaaggcaatactttctaagttctagtctgttcttcttcaatgagaactttgacaataaagggtcatcactgcaaaacagggaaggagagcttgaaggaagtgccccgggagtcaccctggtgtctgtgaccaaggaatatgagggccacaaggctgtggtccaagacctcagcctgaccttctacagagaccaaatcaccgccctgctggggacaaacggtgccgggaaaaccactatcatatccatgttgacggggctccaccctcccacttctggaaccatcatcatcaatggcaagaacctacagacagacctgtcgagggtcagaatggagcttggtgtgtgtccgcagcaggacatcctgttggacaacctcaccgtccgggaacatttgctgctctttgcttccataaaggcgcctcagtggaccaagaaggagctgcatcagcaagtcaatcaaactcttcaggatgtggacttaactcagcatcagcacaaacagacccgagctctgtctggaggcctgaagaggaagctctcccttggcattgctttcatgggcatgtcgaggaccgtggttctggatgagcccaccagtggggtggacccttgctcccggcatagcctgtgggacattctgctcaagtaccgagaaggtcgtacgatcatcttcacaacccaccacctggatgaagctgaagcgctgagtgaccgcgtggccgtcctccagcatgggaggctcaggtgctgcggtcctcccttctgcctgaaggaggcatatggccaggggctccgcctgacactcacgaggcagccttctgttctggaggcccatgatctgaaagacatggcttgtgttacatccctgataaagatctatattccacaagcatttctcaaagacagcagtggaagtgagctgacctacaccattccaaaggacacagacaaggcctgcttgaaagggctcttccaggccctggatgagaacctgcatcagctgcacctgacgggctatgggatctcagacaccaccttagaagaggtgtttttgatgcttttgcaagattccaacaagaaatctcacattgccctggggactgagtcagagctgcagaaccacaggcctacaggacatctgtctggctactgtggctccctagcacggcccgcaactgtgcagggcgtccagctgctccgcgcacaagtggccgcgatcctggcccggaggctccgccgcacgctgcgcgccgggaagagcaccctcgccgacctgctgctgccagtcctcttcgtggccttggccatgggcttgttcatggtgagacccctggccaccgagtaccctcccctcagactcacacctggacattaccagcgggccgagacctactttttcagcagtgggggcgacaacttggacctcacccgtgtgcttctgcggaagtttagagatcaagatttgccctgtgcagatttaaacccacgccagaagaattcttcatgctggcgcacagatcccttttctcacccagaattccaggattcatgtggctgcctgaagtgtccaaatagaagtgctagtgctccctacctgaccaaccacctgggccacacactgttgaatctctcaggcttcaatatggaggagtacttgctggcaccatctgaaaaaccaaggcttggaggttggtcttttggattaaaaatccccagtgaagctggaggtgcaaatggaaacatatcaaaacccccaactctggcaaaggtgtggtataatcagaagggttttcattccctaccttcctacttaaatcatctaaacaaccttattttgtggcagcacctaccccctactgtggactggagacaatacggaataacactctacagccacccatatggaggggccttgctgaacgaggacaagatcctggagagcatccgtcagtgtggagtggccctctgcatcgtgctgggattctccatcctgtctgcatccatcggcagctctgtggtgagggacagggtgattggagccaaaaggttgcagcacataagtggccttggctacaggatgtactggttcacaaacttcctatatgacatgctcttttacttggtttccgtctgcctgtgtgttgccgttattgtcgccttccagttaacagcttttactttccgcaagaacttggcagccacggccctcctgctgtcacttttcggatatgcaactcttccatggatgtacctgatgtccagaatcttttccagttcggacgtggctttcatttcctatgtctcactaaacttcatctttggcctttgtaccatgctcataaccattatgccccggttgctagccatcatctccaaagctaagaatttacagaatatctatgatgtcctcaagtgggtctttactatttttcctcaattctgtcttggtcaaggactggtagaactctgctataatcagatcaaatatgacctgacccacaacttcggcattgattcctatgtgagtccctttgagatgaactttctgggctggatcttcgtgcaactggcctcgcagggcacagtacttctcctcttgagggttctgctacactgggaccttctgcgatggccaaggggtcattctactctccaaggcacagtcaaatcttctaaggatacagatgttgaaaaagaggaaaagagagtgtttgaaggaaggaccaatggagacattcttgtgttatacaaccttagtaaacattatcgacgctttttccagaatattattgctgtgcaagatattagtttgggcataccaaaaggagagtgctttggacttctaggggtgaatggagctgggaagagcacgactttcaaaatgctgaatggtgaagtttctctaacttcaggacatgctatcatcaggactcccatgggagacgccgtggacctgtcttctgctggcacggcaggcgtgctcattggctactgtccccagcaggatgccctggacgagcttctgactggttgggaacatctctattattactgtagcttacgcgggattccaaggcagtgcatccctgaggttgctggagacctcatcaggcgcttacacctcgaagcccacgcggacaaacctgtggccacctacagtgggggaaccaagcggaaactctctacagccctggccctggtggggaaacctgacattcttttattggatgagcccagctctgggatggatccctgctctaagcggtacctgtggcaaacaataatgaaggaggttcgggaaggctgtgctgcggtgctgacctcccacagcatggaggagtgtgaggctctttgcacaagactggccataatggttaacggcagcttcaaatgtcttggttctcctcagcacatcaaaaataggtttggtgatggttatacagtcaaagtttggctctgtaaggaagcaaatcaacattgcactgtttctgaccacttgaagctttattttccaggaattcagttcaagggacagcacctgaatttattagaatatcatgtgccaaaaagatggggatgcctagctgacttgttcaaagttatagagaacaataaaaccttcttgaatattaagcattattccattaaccaaaccactttggagcaggtatttattaattttgcttctgagcagcagcaaactctacaatctactcttgatccatccactgacagtcaccacacacatcacttgcccatctgagcactaaagaagtttccataaggaataaaaccttgtcttccattacaattaacagtcaaggataaaacaagcacgcgcacaatcaaggagctggaacacactctccaggccgtcaaattattctcttgttcattttctattttgaatctccttgttagttaataaccaccaaatggaaaggtcattctttctgcagacttttggggagctcctccaaaacatttgttctctttaccatgccagatggacaccagcttctttgtgacaaaggcatgaatgatttgacagtgtccaaactgagacattctggagctggaaagcctgtcacactagagtgtgtgtgacatgtccactctaaacatgtcacttttctgttaagaaaactgagccccctccccacaggttaaaaaactttagtaacttgtttgtatagaaaatagtaacaaggactattttctattgttgtcatctatttactagatacatgtttttaatgattttaatgtaagcttttattaatactgatgacattatatggtatgatatgaaaaaatcaccaattttttacatataaaagatacctttttaaaaaaataggttttaagagctcttttagtatacactttagcaaaattaattaaattgaactagttactctgtatcaattacagtagttctaccagaatctcccaggttataatttatgagggtagagaaataaaatgtagatgcattttctttttcttcatttggatgaataattactgttttttgttattctaagtcagtgtttttcaaagcgtagtggtccccatattagctgcattgccatcttctgggagcttgcaagaaatgtacattctcaggatccactccagacctattgaatctcaaattctggggcttaaacaagcacattccaagttaagaaccaatgacctaagggaatgtctggttacctcctagttatacaagcaaaatctgcatagtatgtagtcttttttatttatttattttttttttttgaggcggagtctcgctctgtcacccaggctggagtgcagtggcgcgatgtcggctcactgcaagctccgcctcctgggttcacgccattctcctgcctcagcctccccagcagctgggactacaggcacacatcgccacacccggctaatttttagtatttttagtagagacggggtttcaccgtgttagccaggatggtctctatctcctgaccttgtgatccgcccccctccacctcccaaagtgctgggattacaggcgtgagccaccgtgtccggccgtagtttattttaaaatatatttttaaaagctttgtaaaaattatgtcattctcagaattgttgtcttcaaagcattgtcagatgtagagtgctcagatgtggctcttaaagactatatacatctgaatttttcatcctatagttagtaagatgcataaaatcaatccactactgaaatagtttccagtcagacatttctgagttcagacatttctcaacattcttttaacaacatttttctgaatcctcaatagaaaatcacattaatcttattttaaaatttggcctttttcaacactaacgttgagtaccggtagcttgtgatcaaaggcatatacttccttatgagatttctttactaaagcaagatttcattaaatctctatttcctaaatatcattctatacaaaagatattttttaaacggtaaggattaagacaatcactgatagctttgttgtgagcaattttgattcccatgtatcacatgaattacacttccttaaataaattacagtttatggctgtatgatttattctctaattctaacatagtctagttgtcaaaaggaaatatgtaatctttttatgattgttgaatcaataaataccaatttgtgaaacatgaatgtgtttaaactgcagtgaataaatgagatgtgctttaatttaacccaaaaaaaaaaaaaaaaaaaaaaa

SEQ ID NO: 180 - DNA, 17221 bp, Homo sapiens
atataagcaccatccttacaggctggcttcctgactgagagcagggagcagcaggcatggggcatgccgggtgccagttcaaagccctgctgtggaagaattggctctgcagactcaggaacccggtccttttccttgctgaattcttctggccttgtatcctgtttgtaattctgacagttcttcgttttcaagaacctcccagatacagagacatttgttatttgcagccccgagatctacccagctgtggtgttatcccctttgttcaaagccttctttgtaacactggatcaaggtgtaggaacttcagctatgaagggtcaatggagcatcattttcgtttgtctaggttccaaactgcagctgaccccaagaaagtcaacaacctggcctttttaaaagagatacaagacctggcagaggaaattcatggaatgatggacaaggcaaaaaacttaaaaagactttgggtagaacgatccaacactccagattcttcttatggttccagtttttttacaatggatctcaataagaccgaggaggtaatattgaaactggaaagcctccatcagcagcctcatatctgggattttctacttttactgccgagactacacacaagccatgatcatgtggaagatggcatggatgttgcagtgaaccttctccagaccattttgaattccttaatatccctagaagatttagattggcttccactcaaccaaactttttcccaggtttctgaacttgtactgaatgtgaccatttcgacactgacatttctgcagcaacatggagtagcagtcaccgagccagtttaccacctgtccatgcagaatatagtgtgggatccacagaaagtccagtatgatctcaaatcccagtttggctttgatgatcttcacacggaacagatcctgaactcttcagctgaactgaaggagattcccacagacacttccttggagaagatggtgtgttcagtcttgtctagcacatcagaggatgaagctgagaaatggggccacgttggaggctgccaccctaagtggtcagaagccaaaaactatcttgtccatgcagtcagctggctgcgagtctaccaacaggtgtttgttcagtggcaacagggtagcctgcttcagaagacactcacaggcatgggccatagtctggaggctctcaggaatcagtttgaagaagagagcaagccctggaaggtggtggaagctctgcacactgcactgctcctgctgaatgacagcttgtcagcagatggcccaaaagataatcatacatttccaaagatattacagcatctgtggaaattgcaaagcttgctgcaaaacctgccccagtggccggcactgaagagatttcttcagcttgatggagctctcagaaatgcgatagctcagaatttacattttgtccaagaagtcctcatttgcctggagacatcagctaatgattttaaatggtttgaacttaaccaattgaaactggaaaaggatgtgttcttttgggagctgaaacagatgttggcgaagaatgctgtctgcccgaatggtcgtttctctgagaaggaggtctttttgccgcctggaaactccagcatatggggtggtctccagggactgttgtgctattgtaactcctctgagacgagtgttttaaacaagctacttggttcagtagaggatgctgatcgtattttgcaagaggtcattacttggcacaaaaatatgtcagttttaatacctgaagaatatttggactggcaggaacttgagatgcagctgtcagaagcaagcctttcctgtactcggctcttcctgctgctgggagctgatccctctcctgagaatgatgtcttttctagtgactgtaagcaccagcttgtctccacagtgatatttcatacacttgaaaaaacacaatttttcctggaacaagcatattattggaaagccttcaaaaagtttatcaggaagacttgcgaagtggcccaatatgtaaatatgcaagagagtttccagaacagactattggcttttcctgaggaatctccttgttttgaagaaaacatggattggaaaatgatcagtgataattattttcaatttttgaataacttactcaagtctccaacagcttccatatccagggctttaaatttcacaaagcaccttctaatgatggaaaagaagttgcacacccttgaggatgaacaaatgaactttcttttatcatttgtggaattttttgagaaattattgttgcctaatctttttgactcctccattgttcccagtttccacagcctcccatctctcacagaggatattctgaatataagttctctgtggacaaatcatttaaaaagtttaaagagagacccatctgccactgatgctcagaaactcttggaatttggcaacgaagtgatttggaaaatgcagactctcggaagtcactggataaggaaggaaccaaaaaatcttttgagattcatagaattaatactttttgaaattaatcccaaattactagaattatgggcctatggcatttcaaaaggaaaaagagctaaattggaaaacttctttacacttttaaatttttctgttccagaaaatgagattctgagtacaagttttaacttttcccagttgttccattcagattggcctaaatcaccagctatgaacatagattttgtacgtttaagtgaggctataataactagtctccatgaatttggatttttggagcaggaacagatctcagaagctctgaacacagtctacgctatcaggaatgcatctgatcttttctcagccctttctgaaccacaaaaacaagaagttgataaaattttgactcacatacacctaaatgtcttccaggacaaggattcagctttacttctgcaaatttattcttcattttaccgatatatttatgaattattgaatattcagagtagaggctcttcgttgactttccttacacaaatctcaaaacacattttggatatcataaaacaatttaatttccaaaacatcagtaaagcatttgcatttttatttaagacagcagaggttcttgggggaatttctaatgtatcttactgtcagcaattgctttcaatttttaactttttggagcttcaggcccaatccttcatgtctacagagggccaagaactggaagtgatccacactactttgacaggcctcaaacagctgctcataattgatgaagattttcgtatttctttatttcaatatatgagccaattcttcaacagttcagtagaagacctattggataataaatgcttgatttcggacaataaacacatttcttccgtaaattattcaacaagtgaggagtcttcatttgtttttccattggcacaaattttttcaaacctctcagcaaatgtcagtgtgttcaacaagtttatgtccattcactgtaccgtttcatggcttcaaatgtggactgaaatctgggaaaccatatctcaattatttaagtttgacatgaatgttttcacatctcttcatcatggtttcactcagcttttggatgaattggaagatgatgtgaaagtctctaaaagctgccagggtatacttcccacccataatgttgctagactcatattaaatttgtttaaaaatgtaactcaagccaatgacttccataattgggaggacttcctggatctcagggattttttggtagctttaggtaatgcattagtttcagtaaaaaaacttaacttggagcaagtggagaaatcccttttcaccatggaagctgccctgcatcagttgaagacatttccattcaacgaaagtacaagcagagagtttttaaattctctgcttgaagttttcattgagtttagcagtacctcagaatatatagtcagaaatctagattcaataaatgactttctttcaaataatctcacaaattatggagaaaaatttgaaaatatcatcactgagctaagagaagcaatagtatttcttagaaatgtatcacatgatcgagatttgttttcctgtgctgatattttccaaaatgttactgagtgtattttagaagatggctttttatatgtaaatacctcacagaggatgttacgtattctagacacgttaaattccacattttcctctgagaacacaattagcagtctgaaaggatgcattgtatggttagatgtcataaaccatttgtatttgttgtctaactccagtttttcacaaggtcatcttcaaaatattttggggaatttcagagatatagaaaacaaaatgaactctatattaaaaattgtaacttgggtgttaaatataaaaaaacctctttgttcatcaaatggctcacatataaattgtgtcaatatttacttgaaagatgtaactgactttctaaatattgtacttactacagtctttgaaaaagagaagaaacctaaatttgagattttattagctcttttaaatgattccacaaagcaagtaaggatgagtatcaacaacttaacaacagactttgattttgcatctcagtccaattggagatattttactgaattaattctaagaccaatagaaatgtcagatgaaattcctaatcagtttcaaaatatttggcttcatttaataacactggggaaggaatttcagaagcttgtaaaaggtatttactttaacatcctggaaaataattcctcttctaaaactgaaaacttgttaaacatatttgccaccagtccaaaagaaaaggatgtaaacagtgtaggcaattccatttatcacttagctagttaccttgccttcagcttatctcatgacctccaaaattcaccaaaaataataatttcacctgaaataatgaaagctacaggtcttggtattcaactgataagggatgtgttcaactccttaatgcctgtagttcatcacactagtccacaaaatgcaggttatatgcaagctttgaagaaggtaacttctgtcatgcgtacccttaagaaggcagacatagaccttttagtggatcagcttgaacaagttagtgtaaacctaatggatttctttaagaatatcagtagtgtgggaactggcaatttagtggtcaatttgcttgttggcttgatggaaaaatttgcagacagctcacattcttggaatgttaatcatctgctgcagctctcacgcctgtttcctaaagatgttgtggatgctgtgatagatgtgtactatgtgcttcctcatgctgtaaggctcctgcagggagtacctggtaaaaacatcactgaaggcctcaaggatgtctacagcttcacactccttcatggcataaccatttcaaatatcaccaaggaagacttcgcaattgtgataaaaattcttttggatacaattgaattagtatcagataagccagatattatttcagaggctttagcttgttttcctgtggtttggtgctggaatcacacaaattctggatttcggcagaattcaaagatagacccctgcaatgtccatgggctcatgtcttcttccttttatggcaaagtggccagtatacttgatcatttccacctgtctccccaaggtgaagattcaccatgttcaaatgaaagctcccgaatggaaataactaggaaagtggtctgcataattcatgaattagtggactggaattctattcttctggagctctctgaagtcttccatgttaacatttctcttgtgaaaactgtgcagaaattttggcataagatattaccgtttgtcccaccttcaataaatcaaactagggatagcatctctgaactctgtcctagtggttccataaagcaagttgctttgcaaatcatagaaaaacttaaaaatgtcaactttacaaaagttacatcaggtgaaaatattcttgacaaactaagtagtttaaacaagatccttaacattaatgaagacacagagacatctgttcaaaatattatttcctcaaatttggaaaggacagtacaattgatttctgaagactggagcctagaaaaaagtacgcataatctactctctttattcatgatgctccagaatgcaaatgtcacaggtagcagtttagaagcattatcaagttttattgaaaaaagtgaaacaccttacaactttgaagaactatggcccaagtttcaacaaatcatgaaagacctaacccaagattttagaatcagacacctgctttctgaaatgaacaaaggaatcaaaagtataaattcaatggctcttcaaaagataactttgcagtttgcccatttcctggaaatcctggattcaccgtcattgaagacattagaaattattgaagattttctattggtcacaaaaaactggcttcaggaatatgcaaatgaggattactccagaatgatagaaacattattcattcctgtgaccaatgagagttcaactgaagatatagctttgttagccaaagctattgctactttttggggctctttaaaaaatatatctagagcaggcaattttgatgttgcctttcttacccatctgctaaatcaagaacagctgactaatttctcagttgttcagctgctttttgaaaacatcctaattaatttgatcaataacttagctgggaattctcaggaagcagcttggaacttaaatgatactgaccttcaaataatgaatttcattaaccttatcttgaaccatatgcagtcagaaactagtaggaaaacagttctctctctgagaagcatagtagatttcacagaacagtttttgaaaacattcttctccctttttctaaaggaagattctgagaacaaaatatctcttctgctgaaatatttccacaaagatgttattgcagagatgagttttgtcccaaaagataaaattctagaaattctgaaactggatcaatttcttaccctgatgatacaagacagattgatgaacattttttcaagtttaaaggagactatatatcacctaatgaaaagttcatttatattagacaatggagaattttattttgatactcatcaaggactgaagttcatgcaagatttatttaatgcccttctcagggaaacttcaatgaaaaataagactgaaaataatatagactttttcacagtggtgagtcagttgtttttccatgtgaataagtctgaggacctcttcaaactcaatcaagatcttgggtcagctcttcaccttgtaagagaatgttcaacagagatggcaagacttctggatacaattttacactctcctaataaggacttctatgctttgtatcctaccctccaagaagttatacttgctaatctaacggatttgcttttctttataaataattcattccctctaagaaacagagcaacattagaaattactaagagattagttggtgctatttcaagagcaagtgaagaaagtcacgtcctgaaacccctcttagaaatgtctgggactctggtcatgctgttgaatgacagtgctgacctgagagatcttgccacatcaatggactccattgtgaaacttcttaagctggtcaagaaagtttcggggaagatgtccacagtttttaaaactcattttatctccaataccaaggacagtgtgaaattctttgacactctgtattccatcatgcaacaaagtgttcaaaatcttgtgaaagaaatagctactttaaaaaaaatagatcatttcacatttgaaaagataaatgatttgttggtgccatttcttgacttggcctttgaaatgattggggtagaaccttatatatcatcaaactctgatattttcagtatgtcacctagcatactctcatatatgaaccaatctaaggacttttctgatattttggaagaaattgctgaatttttaacatctgtgaaaatgaacttggaagatatgaggagtcttgcggtagcatttaacaatgagactcaaacattttctatggattctgtcaacttacgggaagaaattctgggttgcttagttcctataaataacatcaccaaccaaatggacttcttataccctaatccaatttccactcatagtggccctcaagatataaaatgggaaataattcatgaagtgatcccttttttggataaaatattatcacaaaacagcacagaaataggatctttcttgaaaatggtgatctgtctcaccttagaagctctttggaaaaacttaaagaaagataattggaatgtttctaatgtgttgatgacatttactcagcatccaaataaccttttgaaaaccatagaaacagttttagaggcctccagtggaattaaaagtgactatgaaggtgatttgaataaaagtttatattttgacacacctttgagtcagaatataactcatcatcaacttgaaaaagcaatccataatgttttaagtagaatagctctctggaggaaaggacttctgtttaacaactctgaatggataacttccacaagaactttgtttcagccactttttgagattttcattaaagcaaccaccggaaagaatgtcacatcagaaaaagaagagagaaccaagaaagagatgattgactttccttatagtttcaaaccatttttctgtttggagaaatacctgggaggattatttgtattgactaaatactggcaacaaatcccactaacagatcaaagtgttgttgagatttgtgaagttttccagcagactgtgaagccctcagaagccatggagatgctgcagaaagtgaagatgatggtcgtacgtgtgctcaccatcgttgcagaaaacccttcctggaccaaggacattttgtgtgctactctgagttgcaagcaaaatgggataaggcatctcattttatctgctatacaaggggtcactttggcgcaggaccacttccaggaaattgaaaagatatggtcctcgccgaatcagctaaattgtgaaagtcttagcaagaatctttctagcaccttggagagcttcaagagcagcttggaaaatgccactggccaggactgcacaagccagccgaggctggagacggtgcagcagcacttgtacatgttggccaaaagcctcgaggaaacttggtcatcagggaatcccatcatgacttttctcagcaatttcacagtaactgaggatgtaaaaataaaagatttgatgaagaatatcaccaagttgactgaggagcttcgctcttccatccaaatctcgaatgagactatccatagcattctagaagcaaatatttcccactccaaggttctcttcagtgccctcaccgtagctctgtctggaaagtgtgatcaggaaatccttcatctcctgctgacatttcccaaaggggaaaaatcttggatcgcagcggaggaactctgtagcctgccagggtcaaaagtgtattctctgattgtgttgctgagtcgaaacttggatgtgcgagctttcatttacaagactctgatgccttctgaagcaaatggcttgctcaactccttgctggatatagtttccagcctcagcgccttgcttgccaaagcccagcacgtctttgagtatcttcctgagtttcttcacacatttaaaatcactgccttgctagaaaccctggactttcaacaggtttcacaaaatgtccaggccagaagttcagcttttggttctttccagtttgtgatgaagatggtttgcaaggaccaagcatcattccttagcgattctaatatgtttattaatttgcccagagttaaggaactcttggaagatgacaaagaaaaattcaacattcctgaagattcaacaccgttttgcttgaagctttatcaggaaattctacaattgccaaatggtgctttggtgtggaccttcctaaaacccatattgcatggaaaaatactatacacaccaaacactccagaaattaacaaggtcattcaaaaggctaattacaccttttatattgtggacaaactaaaaactttatcagaaacactgctggaaatgtccagccttttccagagaagtggaagtggccagatgttcaaccagctgcaggaggccctgagaaacaaatttgtaagaaactttgtagaaaaccagttgcacattgatgtagacaaacttactgaaaaactccagacatacggagggctgctggatgagatgtttaaccatgcaggcgctggacgcttccgtttcttgggcagcatcttggtcaatctctcttcctgcgtggcactgaaccgtttccaggctctgcagtctgtcgacatcctggagactaaagcacatgaactcttgcagcagaacagcttcttggccagtatcattttcagcaattccttattcgacaagaacttcagatcagagtctgtcaaactgccaccccatgtctcatacacaatccggaccaatgtgttatacagcgtgcgaacagatgtggtaaaaaacccttcttggaagttccaccctcagaatctaccagctgatgggttcaaatataactacgtctttgccccactgcaagacatgatcgaaagagccatcattttggtgcagactgggcaggaagccctggaaccagcagcacagactcaggcggccccttacccctgccataccagcgacctattcctgaacaacgttggtttcttttttccactgataatgatgctgacgtggatggtgtctgtggccagcatggtcagaaagttggtgtatgagcaggagatacagatagaagagtatatgcggatgatgggagtgcatccagtgatccatttcctggcctggttcctggagaacatggctgtgttgaccataagcagtgctactctggccatcgttctgaaaacaagtggcatctttgcacacagcaatacctttattgttttcctctttctcttggattttgggatgtcagtcgtcatgctgagctacctcttgagtgcatttttcagccaagctaatacagcggccctttgtaccagcctggtgtacatgatcagctttctgccctacatagttctattggttctacataaccaattaagttttgttaatcagacatttctgtgccttctttcgacaaccgcctttggacaaggggtattttttattacattcctggaaggacaagagacagggattcaatggaataatatgtaccaggctctggaacaagggggcatgacatttggctgggtttgctggatgattctttttgattcaagcctttattttttgtgtggatggtacttgagcaacttgattcctggaacatttggtttacggaaaccatggtatttcccctttactgcctcatattggaagagtgtgggtttcttggtggagaaaaggcaatactttctaagttctagtctgttcttcttcaatgagaactttgacaataaagggtcatcactgcaaaacagggaaggagagcttgaaggaagtgccccgggagtcaccctggtgtctgtgaccaaggaatatgagggccacaaggctgtggtccaagacctcagcctgaccttctacagagaccaaatcaccgccctgctggggacaaacggtgccgggaaaaccactatcatatccatgttgacggggctccaccctcccacttctggaaccatcatcatcaatggcaagaacctacagacagacctgtcgagggtcagaatggagcttggtgtgtgtccgcagcaggacatcctgttggacaacctcaccgtccgggaacatttgctgctctttgcttccataaaggcgcctcagtggaccaagaaggagctgcatcagcaagtcaatcaaactcttcaggatgtggacttaactcagcatcagcacaaacagacccgagctctgtctggaggcctgaagaggaagctctcccttggcattgctttcatgggcatgtcgaggaccgtggttctggatgagcccaccagtggggtggacccttgctcccggcatagcctgtgggacattctgctcaagtaccgagaaggtcgtacgatcatcttcacaacccaccacctggatgaagctgaagcgctgagtgaccgcgtggccgtcctccagcatgggaggctcaggtgctgcggtcctcccttctgcctgaaggaggcatatggccaggggctccgcctgacactcacgaggcagccttctgttctggaggcccatgatctgaaagacatggcttgtgttacatccctgataaagatctatattccacaagcatttctcaaagacagcagtggaagtgagctgacctacaccattccaaaggacacagacaaggcctgcttgaaagggctcttccaggccctggatgagaacctgcatcagctgcacctgacgggctatgggatctcagacaccaccttagaagaggtgtttttgatgcttttgcaagattccaacaagaaatctcacattgccctggggactgagtcagagctgcagaaccacaggcctacaggacatctgtctggctactgtggctccctagcacggcccgcaactgtgcagggcgtccagctgctccgcgcacaagtggccgcgatcctggcccggaggctccgccgcacgctgcgcgccgggaagagcaccctcgccgacctgctgctgccagtcctcttcgtggccttggccatgggcttgttcatggtgagacccctggccaccgagtaccctcccctcagactcacacctggacattaccagcgggccgagacctactttttcagcagcagtgggggcgacaacttggacctcacccgtgtgcttctgcggaagtttagagatcaagatttgccctgtgcagatttaaacccacgccagaagaattcttcatgctggcgcacagatcccttttctcacccagaattccaggattcatgtggctgcctgaagtgtccaaatagaagtgctagtgctccctacctgaccaaccacctgggccacacactgttgaatctctcaggcttcaatatggaggagtacttgctggcaccatctgaaaaaccaaggcttggaggttggtcttttggattaaaaatccccagtgaagctggaggtgcaaatggaaacatatcaaaacccccaactctggcaaaggtgtggtataatcagaagggttttcattccctaccttcctacttaaatcatctaaacaaccttattttgtggcagcacctaccccctactgtggactggagacaatacggaataacactctacagccacccatatggaggggccttgctgaacgaggacaagatcctggagagcatccgtcagtgtggagtggccctctgcatcgtgctgggattctccatcctgtctgcatccatcggcagctctgtggtgagggacagggtgattggagccaaaaggttgcagcacataagtggccttggctacaggatgtactggttcacaaacttcctatatgacatgctcttttacttggtttccgtctgcctgtgtgttgccgttattgtcgccttccagttaacagcttttactttccgcaagaacttggcagccacggccctcctgctgtcacttttcggatatgcaactcttccatggatgtacctgatgtccagaatcttttccagttcggacgtggctttcatttcctatgtctcactaaacttcatctttggcctttgtaccatgctcataaccattatgccccggttgctagccatcatctccaaagctaagaatttacagaatatctatgatgtcctcaagtgggtctttactatttttcctcaattctgtcttggtcaaggactggtagaactctgctataatcagatcaaatatgacctgacccacaacttcggcattgattcctatgtgagtccctttgagatgaactttctgggctggatcttcgtgcaactggcctcgcagggcacagtacttctcctcttgagggttctgctacactgggaccttctgcgatggccaaggggtcattctactctccaaggcacagtcaaatcttctaaggatacagatgttgaaaaagaggaaaagagagtgtttgaaggaaggaccaatggagacattcttgtgttatacaaccttagtaaacattatcgacgctttttccagaatattattgctgtgcaagatattagtttgggcataccaaaaggagagtgctttggacttctaggggtgaatggagctgggaagagcacgactttcaaaatgctgaatggtgaagtttctctaacttcaggacatgctatcatcaggactcccatgggagacgccgtggacctgtcttctgctggcacggcaggcgtgctcattggctactgtccccagcaggatgccctggacgagcttctgactggttgggaacatctctattattactgtagcttacgcgggattccaaggcagtgcatccctgaggttgctggagacctcatcaggcgcttacacctcgaagcccacgcggacaaacctgtggccacctacagtgggggaaccaagcggaaactctctacagccctggccctggtggggaaacctgacattcttttattggatgagcccagctctgggatggatccctgctctaagcggtacctgtggcaaacaataatgaaggaggttcgggaaggctgtgctgcggtgctgacctcccacagcatggaggagtgtgaggctctttgcacaagactggccataatggttaacggcagcttcaaatgtcttggttctcctcagcacatcaaaaataggtttggtgatggttatacagtcaaagtttggctctgtaaggaagcaaatcaacattgcactgtttctgaccacttgaagctttattttccaggaattcagttcaagggacagcacctgaatttattagaatatcatgtgccaaaaagatggggatgcctagctgacttgttcaaagttatagagaacaataaaaccttcttgaatattaagcattattccattaaccaaaccactttggagcaggtatttattaattttgcttctgagcagcagcaaactctacaatctactcttgatccatccactgacagtcaccacacacatcacttgcccatctgagcactaaagaagtttccataaggaataaaaccttgtcttccattacaattaacagtcaaggataaaacaagcacgcgcacaatcaaggagctggaacacactctccaggccgtcaaattattctcttgttcattttctattttgaatctccttgttagttaataaccaccaaatggaaaggtcattctttctgcagacttttggggagctcctccaaaacatttgttctctttaccatgccagatggacaccagcttctttgtgacaaaggcatgaatgatttgacagtgtccaaactgagacattctggagctggaaagcctgtcacactagagtgtgtgtgacatgtccactctaaacatgtcacttttctgttaagaaaactgagccccctccccacaggttaaaaaactttagtaacttgtttgtatagaaaatagtaacaaggactattttctattgttgtcatctatttactagatacatgtttttaatgattttaatgtaagcttttattaatactgatgacattatatggtatgatatgaaaaaatcaccaattttttacatataaaagatacctttttaaaaaaataggttttaagagctcttttagtatacactttagcaaaattaattaaattgaactagttactctgtatcaattacagtagttctaccagaatctcccaggttataatttatgagggtagagaaataaaatgtagatgcattttctttttcttcatttggatgaataattactgttttttgttattctaagtcagtgtttttcaaagcgtagtggtccccatattagctgcattgccatcttctgggagcttgcaagaaatgtacattctcaggatccactccagacctattgaatctcaaattctggggcttaaacaagcacattccaagttaagaaccaatgacctaagggaatgtctggttacctcctagttatacaagcaaaatctgcatagtatgtagtcttttttatttatttattttttttttttgaggcggagtctcgctctgtcacccaggctggagtgcagtggcgcgatgtcggctcactgcaagctccgcctcctgggttcacgccattctcctgcctcagcctccccagcagctgggactacaggcacacatcgccacacccggctaatttttagtatttttagtagagacggggtttcaccgtgttagccaggatggtctctatctcctgaccttgtgatccgcccccctccacctcccaaagtgctgggattacaggcgtgagccaccgtgtccggccgtagtttattttaaaatatatttttaaaagctttgtaaaaattatgtcattctcagaattgttgtcttcaaagcattgtcagatgtagagtgctcagatgtggctcttaaagactatatacatctgaatttttcatcctatagttagtaagatgcataaaatcaatccactactgaaatagtttccagtcagacatttctgagttcagacatttctcaacattcttttaacaacatttttctgaatcctcaatagaaaatcacattaatcttattttaaaatttggcctttttcaacactaacgttgagtaccggtagcttgtgatcaaaggcatatacttccttatgagatttctttactaaagcaagatttcattaaatctctatttcctaaatatcattctatacaaaagatattttttaaacggtaaggattaagacaatcactgatagctttgttgtgagcaattttgattcccatgtatcacatgaattacacttccttaaataaattacagtttatggctgtatgatttattctctaattctaacatagtctagttgtcaaaaggaaatatgtaatctttttatgattgttgaatcaataaataccaatttgtgaaacatgaatgtgtttaaactgcagtgaataaatgagatgtgctttaatttaacccga

SEQ ID NO: 181 - DNA, 17128 bp, Homo sapiens
atataagcaccatccttacaggctggcttcctgactgagagcagggagcagcaggcatggggcatgccgggtgccagttcaaagccctgctgtggaagaattggctctgcagactcaggaacccggtccttttccttgctgaattcttctggccttgtatcctgtttgtaattctgacagttcttcgttttcaagaacctcccagatacagagacatttgttatttgcagccccgagatctacccagctgtggtgttatcccctttgttcaaagccttctttgtaacactggatcaaggtgtaggaacttcagctatgaagggtcaatggagcatcattttcgtttgtctaggttccaaactgcagctgaccccaagaaagtcaacaacctggcctttttaaaagagatacaagacctggcagaggaaattcatggaatgatggacaaggcaaaaaacttaaaaagactttgggtagaacgatccaacactccagattcttcttatggttccagtttttttacaatggatctcaataagaccgaggaggtaatattgaaactggaaagcctccatcagcagcctcatatctgggattttctacttttactgccgagactacacacaagccatgatcatgtggaagatggcatggatgttgcagtgaaccttctccagaccattttgaattccttaatatccctagaagatttagattggcttccactcaaccaaactttttcccaggtttctgaacttgtactgaatgtgaccatttcgacactgacatttctgcagcaacatggagtagcagtcaccgagccagtttaccacctgtccatgcagaatatagtgtgggatccacagaaagtccagtatgatctcaaatcccagtttggctttgatgatcttcacacggaacagatcctgaactcttcagctgaactgaaggagattcccacagacacttccttggagaagatggtgtgttcagtcttgtctagcacatcagaggatgaagctgagaaatggggccacgttggaggctgccaccctaagtggtcagaagccaaaaactatcttgtccatgcagtcagctggctgcgagtctaccaacaggtgtttgttcagtggcaacagggtagcctgcttcagaagacactcacaggcatgggccatagtctggaggctctcaggaatcagtttgaagaagagagcaagccctggaaggtggtggaagctctgcacactgcactgctcctgctgaatgacagcttgtcagcagatggcccaaaagataatcatacatttccaaagatattacagcatctgtggaaattgcaaagcttgctgcaaaacctgccccagtggccggcactgaagagatttcttcagcttgatggagctctcagaaatgcgatagctcagaatttacattttgtccaagaagtcctcatttgcctggagacatcagctaatgattttaaatggtttgaacttaaccaattgaaactggaaaaggatgtgttcttttgggagctgaaacagatgttggcgaagaatgctgtctgcccgaatggtcgtttctctgagaaggaggtctttttgccgcctggaaactccagcatatggggtggtctccagggactgttgtgctattgtaactcctctgagacgagtgttttaaacaagctacttggttcagtagaggatgctgatcgtattttgcaagaggtcattacttggcacaaaaatatgtcagttttaatacctgaagaatatttggactggcaggaacttgagatgcagctgtcagaagcaagcctttcctgtactcggctcttcctgctgctgggagctgatccctctcctgagaatgatgtcttttctagtgactgtaagcaccagcttgtctccacagtgatatttcatacacttgaaaaaacacaatttttcctggaacaagcatattattggaaagccttcaaaaagtttatcaggaagacttgcgaagtggcccaatatgtaaatatgcaagagagtttccagaacagactattggcttttcctgaggaatctccttgttttgaagaaaacatggattggaaaatgatcagtgataattattttcaatttttgaataacttactcaagtctccaacagcttccatatccagggctttaaatttcacaaagcaccttctaatgatggaaaagaagttgcacacccttgaggatgaacaaatgaactttcttttatcatttgtggaattttttgagaaattattgttgcctaatctttttgactcctccattgttcccagtttccacagcctcccatctctcacagaggatattctgaatataagttctctgtggacaaatcatttaaaaagtttaaagagagacccatctgccactgatgctcagaaactcttggaatttggcaacgaagtgatttggaaaatgcagactctcggaagtcactggataaggaaggaaccaaaaaatcttttgagattcatagaattaatactttttgaaattaatcccaaattactagaattatgggcctatggcatttcaaaaggaaaaagagctaaattggaaaacttctttacacttttaaatttttctgttccagaaaatgagattctgagtacaagttttaacttttcccagttgttccattcagattggcctaaatcaccagctatgaacatagattttgtacgtttaagtgaggctataataactagtctccatgaatttggatttttggagcaggaacagatctcagaagctctgaacacagtctacgctatcaggaatgcatctgatcttttctcagccctttctgaaccacaaaaacaagaagttgataaaattttgactcacatacacctaaatgtcttccaggacaaggattcagctttacttctgcaaatttattcttcattttaccgatatatttatgaattattgaatattcagagtagaggctcttcgttgactttccttacacaaatctcaaaacacattttggatatcataaaacaatttaatttccaaaacatcagtaaagcatttgcatttttatttaagacagcagaggttcttgggggaatttctaatgtatcttactgtcagcaattgctttcaatttttaactttttggagcttcaggcccaatccttcatgtctacagagggccaagaactggaagtgatccacactactttgacaggcctcaaacagctgctcataattgatgaagattttcgtatttctttatttcaatatatgagccaattcttcaacagttcagtagaagacctattggataataaatgcttgatttcggacaataaacacatttcttccgtaaattattcaacaagtgaggagtcttcatttgtttttccattggcacaaattttttcaaacctctcagcaaatgtcagtgtgttcaacaagtttatgtccattcactgtaccgtttcatggcttcaaatgtggactgaaatctgggaaaccatatctcaattatttaagtttgacatgaatgttttcacatctcttcatcatggtttcactcagcttttggatgaattggaagatgatgtgaaagtctctaaaagctgccagggtatacttcccacccataatgttgctagactcatattaaatttgtttaaaaatgtaactcaagccaatgacttccataattgggaggacttcctggatctcagggattttttggtagctttaggtaatgcattagtttcagtaaaaaaacttaacttggagcaagtggagaaatcccttttcaccatggaagctgccctgcatcagttgaagacatttccattcaacgaaagtacaagcagagagtttttaaattctctgcttgaagttttcattgagtttagcagtacctcagaatatatagtcagaaatctagattcaataaatgactttctttcaaataatctcacaaattatggagaaaaatttgaaaatatcatcactgagctaagagaagcaatagtatttcttagaaatgtatcacatgatcgagatttgttttcctgtgctgatattttccaaaatgttactgagtgtattttagaagatggctttttatatgtaaatacctcacagaggatgttacgtattctagacacgttaaattccacattttcctctgagaacacaattagcagtctgaaaggatgcattgtatggttagatgtcataaaccatttgtatttgttgtctaactccagtttttcacaaggtcatcttcaaaatattttggggaatttcagagatatagaaaacaaaatgaactctatattaaaaattgtaacttgggtgttaaatataaaaaaacctctttgttcatcaaatggctcacatataaattgtgtcaatatttacttgaaagatgtaactgactttctaaatattgtacttactacagtctttgaaaaagagaagaaacctaaatttgagattttattagctcttttaaatgattccacaaagcaagtaaggatgagtatcaacaacttaacaacagactttgattttgcatctcagtccaattggagatattttactgaattaattctaagaccaatagaaatgtcagatgaaattcctaatcagtttcaaaatatttggcttcatttaataacactggggaaggaatttcagaagcttgtaaaaggtatttactttaacatcctggaaaataattcctcttctaaaactgaaaacttgttaaacatatttgccaccagtccaaaagaaaaggatgtaaacagtgtaggcaattccatttatcacttagctagttaccttgccttcagcttatctcatgacctccaaaattcaccaaaaataataatttcacctgaaataatgaaagctacaggtcttggtattcaactgataagggatgtgttcaactccttaatgcctgtagttcatcacactagtccacaaaatgcaggttatatgcaagctttgaagaaggtaacttctgtcatgcgtacccttaagaaggcagacatagaccttttagtggatcagcttgaacaagttagtgtaaacctaatggatttctttaagaatatcagtagtgtgggaactggcaatttagtggtcaatttgcttgttggcttgatggaaaaatttgcagacagctcacattcttggaatgttaatcatctgctgcagctctcacgcctgtttcctaaagatgttgtggatgctgtgatagatgtgtactatgtgcttcctcatgctgtaaggctcctgcagggagtacctggtaaaaacatcactgaaggcctcaaggatgtctacagcttcacactccttcatggcataaccatttcaaatatcaccaaggaagacttcgcaattgtgataaaaattcttttggatacaattgaattagtatcagataagccagatattatttcagaggctttagcttgttttcctgtggtttggtgctggaatcacacaaattctggatttcggcagaattcaaagatagacccctgcaatgtccatgggctcatgtcttcttccttttatggcaaagtggccagtatacttgatcatttccacctgtctccccaaggtgaagattcaccatgttcaaatgaaagctcccgaatggaaataactaggaaagtggtctgcataattcatgaattagtggactggaattctattcttctggagctctctgaagtcttccatgttaacatttctcttgtgaaaactgtgcagaaattttggcataagatattaccgtttgtcccaccttcaataaatcaaactagggatagcatctctgaactctgtcctagtggttccataaagcaagttgctttgcaaatcatagaaaaacttaaaaatgtcaactttacaaaagttacatcaggtgaaaatattcttgacaaactaagtagtttaaacaagatccttaacattaatgaagacacagagacatctgttcaaaatattatttcctcaaatttggaaaggacagtacaattgatttctgaagactggagcctagaaaaaagtacgcataatctactctctttattcatgatgctccagaatgcaaatgtcacaggtagcagtttagaagcattatcaagttttattgaaaaaagtgaaacaccttacaactttgaagaactatggcccaagtttcaacaaatcatgaaagacctaacccaagattttagaatcagacacctgctttctgaaatgaacaaaggaatcaaaagtataaattcaatggctcttcaaaagataactttgcagtttgcccatttcctggaaatcctggattcaccgtcattgaagacattagaaattattgaagattttctattggtcacaaaaaactggcttcaggaatatgcaaatgaggattactccagaatgatagaaacattattcattcctgtgaccaatgagagttcaactgaagatatagctttgttagccaaagctattgctactttttggggctctttaaaaaatatatctagagcaggcaattttgatgttgcctttcttacccatctgctaaatcaagaacagctgactaatttctcagttgttcagctgctttttgaaaacatcctaattaatttgatcaataacttagctgggaattctcaggaagcagcttggaacttaaatgatactgaccttcaaataatgaatttcattaaccttatcttgaaccatatgcagtcagaaactagtaggaaaacagttctctctctgagaagcatagtagatttcacagaacagtttttgaaaacattcttctccctttttctaaaggaagattctgagaacaaaatatctcttctgctgaaatatttccacaaagatgttattgcagagatgagttttgtcccaaaagataaaattctagaaattctgaaactggatcaatttcttaccctgatgatacaagacagattgatgaacattttttcaagtttaaaggagactatatatcacctaatgaaaagttcatttatattagacaatggagaattttattttgatactcatcaaggactgaagttcatgcaagatttatttaatgcccttctcagggaaacttcaatgaaaaataagactgaaaataatatagactttttcacagtggtgagtcagttgtttttccatgtgaataagtctgaggacctcttcaaactcaatcaagatcttgggtcagctcttcaccttgtaagagaatgttcaacagagatggcaagacttctggatacaattttacactctcctaataaggacttctatgctttgtatcctaccctccaagaagttatacttgctaatctaacggatttgcttttctttataaataattcattccctctaagaaacagagcaacattagaaattactaagagattagttggtgctatttcaagagcaagtgaagaaagtcacgtcctgaaacccctcttagaaatgtctgggactctggtcatgctgttgaatgacagtgctgacctgagagatcttgccacatcaatggactccattgtgaaacttcttaagctggtcaagaaagtttcggggaagatgtccacagtttttaaaactcattttatctccaataccaaggacagtgtgaaattctttgacactctgtattccatcatgcaacaaagtgttcaaaatcttgtgaaagaaatagctactttaaaaaaaatagatcatttcacatttgaaaagataaatgatttgttggtgccatttcttgacttggcctttgaaatgattggggtagaaccttatatatcatcaaactctgatattttcagtatgtcacctagcatactctcatatatgaaccaatctaaggacttttctgatattttggaagaaattgctgaatttttaacatctgtgaaaatgaacttggaagatatgaggagtcttgcggtagcatttaacaatgagactcaaacattttctatggattctgtcaacttacgggaagaaattctgggttgcttagttcctataaataacatcaccaaccaaatggacttcttataccctaatccaatttccactcatagtggccctcaagatataaaatgggaaataattcatgaagtgatcccttttttggataaaatattatcacaaaacagcacagaaataggatctttcttgaaaatggtgatctgtctcaccttagaagctctttggaaaaacttaaagaaagataattggaatgtttctaatgtgttgatgacatttactcagcatccaaataaccttttgaaaaccatagaaacagttttagaggcctccagtggaattaaaagtgactatgaaggtgatttgaataaaagtttatattttgacacacctttgagtcagaatataactcatcatcaacttgaaaaagcaatccataatgttttaagtagaatagctctctggaggaaaggacttctgtttaacaactctgaatggataacttccacaagaactttgtttcagccactttttgagattttcattaaagcaaccaccggaaagaatgtcacatcagaaaaagaagagagaaccaagaaagagatgattgactttccttatagtttcaaaccatttttctgtttggagaaatacctgggaggattatttgtattgactaaatactggcaacaaatcccactaacagatcaaagtgttgttgagatttgtgaagttttccagcagactgtgaagccctcagaagccatggagatgctgcagaaagtgaagatgatggtcgtacgtgtgctcaccatcgttgcagaaaacccttcctggaccaaggacattttgtgtgctactctgagttgcaagcaaaatgggataaggcatctcattttatctgctatacaaggggtcactttggcgcaggaccacttccaggaaattgaaaagatatggtcctcgccgaatcagctaaattgtgaaagtcttagcaagaatctttctagcaccttggagagcttcaagagcagcttggaaaatgccactggccaggactgcacaagccagccgaggctggagacggtgcagcagcacttgtacatgttggccaaaagcctcgaggaaacttggtcatcagggaatcccatcatgacttttctcagcaatttcacagtaactgaggatgtaaaaataaaagatttgatgaagaatatcaccaagttgactgaggagcttcgctcttccatccaaatctcgaatgagactatccatagcattctagaagcaaatatttcccactccaaggttctcttcagtgccctcaccgtagctctgtctggaaagtgtgatcaggaaatccttcatctcctgctgacatttcccaaaggggaaaaatcttggatcgcagcggaggaactctgtagcctgccagggtcaaaagtgtattctctgattgtgttgctgagtcgaaacttggatgtgcgagctttcatttacaagactctgatgccttctgaagcaaatggcttgctcaactccttgctggatatagtttccagcctcagcgccttgcttgccaaagcccagcacgtctttgagtatcttcctgagtttcttcacacatttaaaatcactgccttgctagaaaccctggactttcaacaggtttcacaaaatgtccaggccagaagttcagcttttggttctttccagtttgtgatgaagatggtttgcaaggaccaagcatcattccttagcgattctaatatgtttattaatttgcccagagttaaggaactcttggaagatgacaaagaaaaattcaacattcctgaagattcaacaccgttttgcttgaagctttatcaggaaattctacaattgccaaatggtgctttggtgtggaccttcctaaaacccatattgcatggaaaaatactatacacaccaaacactccagaaattaacaaggtcattcaaaaggctaattacaccttttatattgtggacaaactaaaaactttatcagaaacactgctggaaatgtccagccttttccagagaagtggaagtggccagatgttcaaccagctgcaggaggccctgagaaacaaatttgtaagaaactttgtagaaaaccagttgcacattgatgtagacaaacttactgaaaaactccagacatacggagggctgctggatgagatgtttaaccatgcaggcgctggacgcttccgtttcttgggcagcatcttggtcaatctctcttcctgcgtggcactgaaccgtttccaggctctgcagtctgtcgacatcctggagactaaagcacatgaactcttgcagcagaacagcttcttggccagtatcattttcagcaattccttattcgacaagaacttcagatcagagtctgtcaaactgccaccccatgtctcatacacaatccggaccaatgtgttatacagcgtgcgaacagatgtggtaaaaaacccttcttggaagttccaccctcagaatctaccagctgatgggttcaaatataactacgtctttgccccactgcaagacatgatcgaaagagccatcattttggtgcagactgggcaggaagccctggaaccagcagcacagactcaggcggccccttacccctgccataccagcgacctattcctgaacaacgttggtttcttttttccactgataatgatgctgacgtggatggtgtctgtggccagcatggtcagaaagttggtgtatgagcaggagatacagatagaagagtatatgcggatgatgggagtgcatccagtgatccatttcctggcctggttcctggagaacatggctgtgttgaccataagcagtgctactctggccatcgttctgaaaacaagtggcatctttgcacacagcaatacctttattgttttcctctttctcttggattttgggatgtcagtcgtcatgctgagctacctcttgagtgcatttttcagccaagctaatacagcggccctttgtaccagcctggtgtacatgatcagctttctgccctacatagttctattggttctacataaccaattaagttttgttaatcagacatttctgtgccttctttcgacaaccgcctttggacaaggggtattttttattacattcctggaaggacaagagacagggattcaatggaataatatgtaccaggctctggaacaagggggcatgacatttggctgggtttgctggatgattctttttgattcaagcctttattttttgtgtggatggtacttgagcaacttgattcctggaacatttggtttacggaaaccatggtatttcccctttactgcctcatattggaagagtgtgggtttcttggtggagaaaaggcaatactttctaagttctagtctgttcttcttcaatgagaactttgacaataaagggtcatcactgcaaaacagggaaggagagcttgaaggaagtgccccgggagtcaccctggtgtctgtgaccaaggaatatgagggccacaaggctgtggtccaagacctcagcctgaccttctacagagaccaaatcaccgccctgctggggacaaacggtgccgggaaaaccactatcatatccatgttgacggggctccaccctcccacttctggaaccatcatcatcaatggcaagaacctacagacagacctgtcgagggtcagaatggagcttggtgtgtgtccgcagcaggacatcctgttggacaacctcaccgtccgggaacatttgctgctctttgcttccataaaggcgcctcagtggaccaagaaggagctgcatcagcaagtcaatcaaactcttcaggatgtggacttaactcagcatcagcacaaacagacccgagctctgtctggaggcctgaagaggaagctctcccttggcattgctttcatgggcatgtcgaggaccgtggttctggatgagcccaccagtggggtggacccttgctcccggcatagcctgtgggacattctgctcaagtaccgagaaggtcgtacgatcatcttcacaacccaccacctggatgaagctgaagcgctgagtgaccgcgtggccgtcctccagcatgggaggctcaggtgctgcggtcctcccttctgcctgaaggaggcatatggccaggggctccgcctgacactcacgaggcagccttctgttctggaggcccatgatctgaaagacatggcttgtgttacatccctgataaagatctatattccacaagcatttctcaaagacagcagtggaagtgagctgacctacaccattccaaaggacacagacaaggcctgcttgaaagggctcttccaggccctggatgagaacctgcatcagctgcacctgacgggctatgggatctcagacaccaccttagaagaggtgtttttgatgcttttgcaagattccaacaagaaatctcacattgccctggggactgagtcagagctgcagaaccacaggcctacaggacatctgtctggctactgtggctccctagcacggcccgcaactgtgcagggcgtccagctgctccgcgcacaagtggccgcgatcctggcccggaggctccgccgcacgctgcgcgccgggaagagcaccctcgccgacctgctgctgccagtcctcttcgtggccttggccatgggcttgttcatggtgagacccctggccaccgagtaccctcccctcagactcacacctggacattaccagcgggccgagacctactttttcagcagcagtgggggcgacaacttggacctcacccgtgtgcttctgcggaagtttagagatcaagatttgccctgtgcagatttaaacccacgccagaagaattcttcatgctggcgcacagatcccttttctcacccagaattccaggattcatgtggctgcctgaagtgtccaaatagaagtgctagtgctccctacctgaccaaccacctgggccacacactgttgaatctctcaggcttcaatatggaggagtacttgctggcaccatctgaaaaaccaaggcttggaggttggtcttttggattaaaaatccccagtgaagctggaggtgcaaatggaaacatatcaaaacccccaactctggcaaaggtgtggtataatcagaagggttttcattccctaccttcctacttaaatcatctaaacaaccttattttgtggcagcacctaccccctactgtggactggagacaatacggaataacactctacagccacccatatggaggggccttgctgaacgaggacaagatcctggagagcatccgtcagtgtggagtggccctctgcatcgtgctgggattctccatcctgtctgcatccatcggcagctctgtgctcttttacttggtttccgtctgcctgtgtgttgccgttattgtcgccttccagttaacagcttttactttccgcaagaacttggcagccacggccctcctgctgtcacttttcggatatgcaactcttccatggatgtacctgatgtccagaatcttttccagttcggacgtggctttcatttcctatgtctcactaaacttcatctttggcctttgtaccatgctcataaccattatgccccggttgctagccatcatctccaaagctaagaatttacagaatatctatgatgtcctcaagtgggtctttactatttttcctcaattctgtcttggtcaaggactggtagaactctgctataatcagatcaaatatgacctgacccacaacttcggcattgattcctatgtgagtccctttgagatgaactttctgggctggatcttcgtgcaactggcctcgcagggcacagtacttctcctcttgagggttctgctacactgggaccttctgcgatggccaaggggtcattctactctccaaggcacagtcaaatcttctaaggatacagatgttgaaaaagaggaaaagagagtgtttgaaggaaggaccaatggagacattcttgtgttatacaaccttagtaaacattatcgacgctttttccagaatattattgctgtgcaagatattagtttgggcataccaaaaggagagtgctttggacttctaggggtgaatggagctgggaagagcacgactttcaaaatgctgaatggtgaagtttctctaacttcaggacatgctatcatcaggactcccatgggagacgccgtggacctgtcttctgctggcacggcaggcgtgctcattggctactgtccccagcaggatgccctggacgagcttctgactggttgggaacatctctattattactgtagcttacgcgggattccaaggcagtgcatccctgaggttgctggagacctcatcaggcgcttacacctcgaagcccacgcggacaaacctgtggccacctacagtgggggaaccaagcggaaactctctacagccctggccctggtggggaaacctgacattcttttattggatgagcccagctctgggatggatccctgctctaagcggtacctgtggcaaacaataatgaaggaggttcgggaaggctgtgctgcggtgctgacctcccacagcatggaggagtgtgaggctctttgcacaagactggccataatggttaacggcagcttcaaatgtcttggttctcctcagcacatcaaaaataggtttggtgatggttatacagtcaaagtttggctctgtaaggaagcaaatcaacattgcactgtttctgaccacttgaagctttattttccaggaattcagttcaagggacagcacctgaatttattagaatatcatgtgccaaaaagatggggatgcctagctgacttgttcaaagttatagagaacaataaaaccttcttgaatattaagcattattccattaaccaaaccactttggagcaggtatttattaattttgcttctgagcagcagcaaactctacaatctactcttgatccatccactgacagtcaccacacacatcacttgcccatctgagcactaaagaagtttccataaggaataaaaccttgtcttccattacaattaacagtcaaggataaaacaagcacgcgcacaatcaaggagctggaacacactctccaggccgtcaaattattctcttgttcattttctattttgaatctccttgttagttaataaccaccaaatggaaaggtcattctttctgcagacttttggggagctcctccaaaacatttgttctctttaccatgccagatggacaccagcttctttgtgacaaaggcatgaatgatttgacagtgtccaaactgagacattctggagctggaaagcctgtcacactagagtgtgtgtgacatgtccactctaaacatgtcacttttctgttaagaaaactgagccccctccccacaggttaaaaaactttagtaacttgtttgtatagaaaatagtaacaaggactattttctattgttgtcatctatttactagatacatgtttttaatgattttaatgtaagcttttattaatactgatgacattatatggtatgatatgaaaaaatcaccaattttttacatataaaagatacctttttaaaaaaataggttttaagagctcttttagtatacactttagcaaaattaattaaattgaactagttactctgtatcaattacagtagttctaccagaatctcccaggttataatttatgagggtagagaaataaaatgtagatgcattttctttttcttcatttggatgaataattactgttttttgttattctaagtcagtgtttttcaaagcgtagtggtccccatattagctgcattgccatcttctgggagcttgcaagaaatgtacattctcaggatccactccagacctattgaatctcaaattctggggcttaaacaagcacattccaagttaagaaccaatgacctaagggaatgtctggttacctcctagttatacaagcaaaatctgcatagtatgtagtcttttttatttatttattttttttttttgaggcggagtctcgctctgtcacccaggctggagtgcagtggcgcgatgtcggctcactgcaagctccgcctcctgggttcacgccattctcctgcctcagcctccccagcagctgggactacaggcacacatcgccacacccggctaatttttagtatttttagtagagacggggtttcaccgtgttagccaggatggtctctatctcctgaccttgtgatccgcccccctccacctcccaaagtgctgggattacaggcgtgagccaccgtgtccggccgtagtttattttaaaatatatttttaaaagctttgtaaaaattatgtcattctcagaattgttgtcttcaaagcattgtcagatgtagagtgctcagatgtggctcttaaagactatatacatctgaatttttcatcctatagttagtaagatgcataaaatcaatccactactgaaatagtttccagtcagacatttctgagttcagacatttctcaacattcttttaacaacatttttctgaatcctcaatagaaaatcacattaatcttattttaaaatttggcctttttcaacactaacgttgagtaccggtagcttgtgatcaaaggcatatacttccttatgagatttctttactaaagcaagatttcattaaatctctatttcctaaatatcattctatacaaaagatattttttaaacggtaaggattaagacaatcactgatagctttgttgtgagcaattttgattcccatgtatcacatgaattacacttccttaaataaattacagtttatggctgtatgatttattctctaattctaacatagtctagttgtcaaaaggaaatatgtaatctttttatgattgttgaatcaataaataccaatttgtgaaacatgaatgtgtttaaactgcagtgaataaatgagatgtgctttaatttaacccga

SEQ ID NO: 182 - DNA, 17128 bp, Homo sapiens
atataagcaccatccttacaggctggcttcctgactgagagcagggagcagcaggcatggggcatgccgggtgccagttcaaagccctgctgtggaagaattggctctgcagactcaggaacccggtccttttccttgctgaattcttctggccttgtatcctgtttgtaattctgacagttcttcgttttcaagaacctcccagatacagagacatttgttatttgcagccccgagatctacccagctgtggtgttatcccctttgttcaaagccttctttgtaacactggatcaaggtgtaggaacttcagctatgaagggtcaatggagcatcattttcgtttgtctaggttccaaactgcagctgaccccaagaaagtcaacaacctggcctttttaaaagagatacaagacctggcagaggaaattcatggaatgatggacaaggcaaaaaacttaaaaagactttgggtagaacgatccaacactccagattcttcttatggttccagtttttttacaatggatctcaataagaccgaggaggtaatattgaaactggaaagcctccatcagcagcctcatatctgggattttctacttttactgccgagactacacacaagccatgatcatgtggaagatggcatggatgttgcagtgaaccttctccagaccattttgaattccttaatatccctagaagatttagattggcttccactcaaccaaactttttcccaggtttctgaacttgtactgaatgtgaccatttcgacactgacatttctgcagcaacatggagtagcagtcaccgagccagtttaccacctgtccatgcagaatatagtgtgggatccacagaaagtccagtatgatctcaaatcccagtttggctttgatgatcttcacacggaacagatcctgaactcttcagctgaactgaaggagattcccacagacacttccttggagaagatggtgtgttcagtcttgtctagcacatcagaggatgaagctgagaaatggggccacgttggaggctgccaccctaagtggtcagaagccaaaaactatcttgtccatgcagtcagctggctgcgagtctaccaacaggtgtttgttcagtggcaacagggtagcctgcttcagaagacactcacaggcatgggccatagtctggaggctctcaggaatcagtttgaagaagagagcaagccctggaaggtggtggaagctctgcacactgcactgctcctgctgaatgacagcttgtcagcagatggcccaaaagataatcatacatttccaaagatattacagcatctgtggaaattgcaaagcttgctgcaaaacctgccccagtggccggcactgaagagatttcttcagcttgatggagctctcagaaatgcgatagctcagaatttacattttgtccaagaagtcctcatttgcctggagacatcagctaatgattttaaatggtttgaacttaaccaattgaaactggaaaaggatgtgttcttttgggagctgaaacagatgttggcgaagaatgctgtctgcccgaatggtcgtttctctgagaaggaggtctttttgccgcctggaaactccagcatatggggtggtctccagggactgttgtgctattgtaactcctctgagacgagtgttttaaacaagctacttggttcagtagaggatgctgatcgtattttgcaagaggtcattacttggcacaaaaatatgtcagttttaatacctgaagaatatttggactggcaggaacttgagatgcagctgtcagaagcaagcctttcctgtactcggctcttcctgctgctgggagctgatccctctcctgagaatgatgtcttttctagtgactgtaagcaccagcttgtctccacagtgatatttcatacacttgaaaaaacacaatttttcctggaacaagcatattattggaaagccttcaaaaagtttatcaggaagacttgcgaagtggcccaatatgtaaatatgcaagagagtttccagaacagactattggcttttcctgaggaatctccttgttttgaagaaaacatggattggaaaatgatcagtgataattattttcaatttttgaataacttactcaagtctccaacagcttccatatccagggctttaaatttcacaaagcaccttctaatgatggaaaagaagttgcacacccttgaggatgaacaaatgaactttcttttatcatttgtggaattttttgagaaattattgttgcctaatctttttgactcctccattgttcccagtttccacagcctcccatctctcacagaggatattctgaatataagttctctgtggacaaatcatttaaaaagtttaaagagagacccatctgccactgatgctcagaaactcttggaatttggcaacgaagtgatttggaaaatgcagactctcggaagtcactggataaggaaggaaccaaaaaatcttttgagattcatagaattaatactttttgaaattaatcccaaattactagaattatgggcctatggcatttcaaaaggaaaaagagctaaattggaaaacttctttacacttttaaatttttctgttccagaaaatgagattctgagtacaagttttaacttttcccagttgttccattcagattggcctaaatcaccagctatgaacatagattttgtacgtttaagtgaggctataataactagtctccatgaatttggatttttggagcaggaacagatctcagaagctctgaacacagtctacgctatcaggaatgcatctgatcttttctcagccctttctgaaccacaaaaacaagaagttgataaaattttgactcacatacacctaaatgtcttccaggacaaggattcagctttacttctgcaaatttattcttcattttaccgatatatttatgaattattgaatattcagagtagaggctcttcgttgactttccttacacaaatctcaaaacacattttggatatcataaaacaatttaatttccaaaacatcagtaaagcatttgcatttttatttaagacagcagaggttcttgggggaatttctaatgtatcttactgtcagcaattgctttcaatttttaactttttggagcttcaggcccaatccttcatgtctacagagggccaagaactggaagtgatccacactactttgacaggcctcaaacagctgctcataattgatgaagattttcgtatttctttatttcaatatatgagccaattcttcaacagttcagtagaagacctattggataataaatgcttgatttcggacaataaacacatttcttccgtaaattattcaacaagtgaggagtcttcatttgtttttccattggcacaaattttttcaaacctctcagcaaatgtcagtgtgttcaacaagtttatgtccattcactgtaccgtttcatggcttcaaatgtggactgaaatctgggaaaccatatctcaattatttaagtttgacatgaatgttttcacatctcttcatcatggtttcactcagcttttggatgaattggaagatgatgtgaaagtctctaaaagctgccagggtatacttcccacccataatgttgctagactcatattaaatttgtttaaaaatgtaactcaagccaatgacttccataattgggaggacttcctggatctcagggattttttggtagctttaggtaatgcattagtttcagtaaaaaaacttaacttggagcaagtggagaaatcccttttcaccatggaagctgccctgcatcagttgaagacatttccattcaacgaaagtacaagcagagagtttttaaattctctgcttgaagttttcattgagtttagcagtacctcagaatatatagtcagaaatctagattcaataaatgactttctttcaaataatctcacaaattatggagaaaaatttgaaaatatcatcactgagctaagagaagcaatagtatttcttagaaatgtatcacatgatcgagatttgttttcctgtgctgatattttccaaaatgttactgagtgtattttagaagatggctttttatatgtaaatacctcacagaggatgttacgtattctagacacgttaaattccacattttcctctgagaacacaattagcagtctgaaaggatgcattgtatggttagatgtcataaaccatttgtatttgttgtctaactccagtttttcacaaggtcatcttcaaaatattttggggaatttcagagatatagaaaacaaaatgaactctatattaaaaattgtaacttgggtgttaaatataaaaaaacctctttgttcatcaaatggctcacatataaattgtgtcaatatttacttgaaagatgtaactgactttctaaatattgtacttactacagtctttgaaaaagagaagaaacctaaatttgagattttattagctcttttaaatgattccacaaagcaagtaaggatgagtatcaacaacttaacaacagactttgattttgcatctcagtccaattggagatattttactgaattaattctaagaccaatagaaatgtcagatgaaattcctaatcagtttcaaaatatttggcttcatttaataacactggggaaggaatttcagaagcttgtaaaaggtatttactttaacatcctggaaaataattcctcttctaaaactgaaaacttgttaaacatatttgccaccagtccaaaagaaaaggatgtaaacagtgtaggcaattccatttatcacttagctagttaccttgccttcagcttatctcatgacctccaaaattcaccaaaaataataatttcacctgaaataatgaaagctacaggtcttggtattcaactgataagggatgtgttcaactccttaatgcctgtagttcatcacactagtccacaaaatgcaggttatatgcaagctttgaagaaggtaacttctgtcatgcgtacccttaagaaggcagacatagaccttttagtggatcagcttgaacaagttagtgtaaacctaatggatttctttaagaatatcagtagtgtgggaactggcaatttagtggtcaatttgcttgttggcttgatggaaaaatttgcagacagctcacattcttggaatgttaatcatctgctgcagctctcacgcctgtttcctaaagatgttgtggatgctgtgatagatgtgtactatgtgcttcctcatgctgtaaggctcctgcagggagtacctggtaaaaacatcactgaaggcctcaaggatgtctacagcttcacactccttcatggcataaccatttcaaatatcaccaaggaagacttcgcaattgtgataaaaattcttttggatacaattgaattagtatcagataagccagatattatttcagaggctttagcttgttttcctgtggtttggtgctggaatcacacaaattctggatttcggcagaattcaaagatagacccctgcaatgtccatgggctcatgtcttcttccttttatggcaaagtggccagtatacttgatcatttccacctgtctccccaaggtgaagattcaccatgttcaaatgaaagctcccgaatggaaataactaggaaagtggtctgcataattcatgaattagtggactggaattctattcttctggagctctctgaagtcttccatgttaacatttctcttgtgaaaactgtgcagaaattttggcataagatattaccgtttgtcccaccttcaataaatcaaactagggatagcatctctgaactctgtcctagtggttccataaagcaagttgctttgcaaatcatagaaaaacttaaaaatgtcaactttacaaaagttacatcaggtgaaaatattcttgacaaactaagtagtttaaacaagatccttaacattaatgaagacacagagacatctgttcaaaatattatttcctcaaatttggaaaggacagtacaattgatttctgaagactggagcctagaaaaaagtacgcataatctactctctttattcatgatgctccagaatgcaaatgtcacaggtagcagtttagaagcattatcaagttttattgaaaaaagtgaaacaccttacaactttgaagaactatggcccaagtttcaacaaatcatgaaagacctaacccaagattttagaatcagacacctgctttctgaaatgaacaaaggaatcaaaagtataaattcaatggctcttcaaaagataactttgcagtttgcccatttcctggaaatcctggattcaccgtcattgaagacattagaaattattgaagattttctattggtcacaaaaaactggcttcaggaatatgcaaatgaggattactccagaatgatagaaacattattcattcctgtgaccaatgagagttcaactgaagatatagctttgttagccaaagctattgctactttttggggctctttaaaaaatatatctagagcaggcaattttgatgttgcctttcttacccatctgctaaatcaagaacagctgactaatttctcagttgttcagctgctttttgaaaacatcctaattaatttgatcaataacttagctgggaattctcaggaagcagcttggaacttaaatgatactgaccttcaaataatgaatttcattaaccttatcttgaaccatatgcagtcagaaactagtaggaaaacagttctctctctgagaagcatagtagatttcacagaacagtttttgaaaacattcttctccctttttctaaaggaagattctgagaacaaaatatctcttctgctgaaatatttccacaaagatgttattgcagagatgagttttgtcccaaaagataaaattctagaaattctgaaactggatcaatttcttaccctgatgatacaagacagattgatgaacattttttcaagtttaaaggagactatatatcacctaatgaaaagttcatttatattagacaatggagaattttattttgatactcatcaaggactgaagttcatgcaagatttatttaatgcccttctcagggaaacttcaatgaaaaataagactgaaaataatatagactttttcacagtggtgagtcagttgtttttccatgtgaataagtctgaggacctcttcaaactcaatcaagatcttgggtcagctcttcaccttgtaagagaatgttcaacagagatggcaagacttctggatacaattttacactctcctaataaggacttctatgctttgtatcctaccctccaagaagttatacttgctaatctaacggatttgcttttctttataaataattcattccctctaagaaacagagcaacattagaaattactaagagattagttggtgctatttcaagagcaagtgaagaaagtcacgtcctgaaacccctcttagaaatgtctgggactctggtcatgctgttgaatgacagtgctgacctgagagatcttgccacatcaatggactccattgtgaaacttcttaagctggtcaagaaagtttcggggaagatgtccacagtttttaaaactcattttatctccaataccaaggacagtgtgaaattctttgacactctgtattccatcatgcaacaaagtgttcaaaatcttgtgaaagaaatagctactttaaaaaaaatagatcatttcacatttgaaaagataaatgatttgttggtgccatttcttgacttggcctttgaaatgattggggtagaaccttatatatcatcaaactctgatattttcagtatgtcacctagcatactctcatatatgaaccaatctaaggacttttctgatattttggaagaaattgctgaatttttaacatctgtgaaaatgaacttggaagatatgaggagtcttgcggtagcatttaacaatgagactcaaacattttctatggattctgtcaacttacgggaagaaattctgggttgcttagttcctataaataacatcaccaaccaaatggacttcttataccctaatccaatttccactcatagtggccctcaagatataaaatgggaaataattcatgaagtgatcccttttttggataaaatattatcacaaaacagcacagaaataggatctttcttgaaaatggtgatctgtctcaccttagaagctctttggaaaaacttaaagaaagataattggaatgtttctaatgtgttgatgacatttactcagcatccaaataaccttttgaaaaccatagaaacagttttagaggcctccagtggaattaaaagtgactatgaaggtgatttgaataaaagtttatattttgacacacctttgagtcagaatataactcatcatcaacttgaaaaagcaatccataatgttttaagtagaatagctctctggaggaaaggacttctgtttaacaactctgaatggataacttccacaagaactttgtttcagccactttttgagattttcattaaagcaaccaccggaaagaatgtcacatcagaaaaagaagagagaaccaagaaagagatgattgactttccttatagtttcaaaccatttttctgtttggagaaatacctgggaggattatttgtattgactaaatactggcaacaaatcccactaacagatcaaagtgttgttgagatttgtgaagttttccagcagactgtgaagccctcagaagccatggagatgctgcagaaagtgaagatgatggtcgtacgtgtgctcaccatcgttgcagaaaacccttcctggaccaaggacattttgtgtgctactctgagttgcaagcaaaatgggataaggcatctcattttatctgctatacaaggggtcactttggcgcaggaccacttccaggaaattgaaaagatatggtcctcgccgaatcagctaaattgtgaaagtcttagcaagaatctttctagcaccttggagagcttcaagagcagcttggaaaatgccactggccaggactgcacaagccagccgaggctggagacggtgcagcagcacttgtacatgttggccaaaagcctcgaggaaacttggtcatcagggaatcccatcatgacttttctcagcaatttcacagtaactgaggatgtaaaaataaaagatttgatgaagaatatcaccaagttgactgaggagcttcgctcttccatccaaatctcgaatgagactatccatagcattctagaagcaaatatttcccactccaaggttctcttcagtgccctcaccgtagctctgtctggaaagtgtgatcaggaaatccttcatctcctgctgacatttcccaaaggggaaaaatcttggatcgcagcggaggaactctgtagcctgccagggtcaaaagtgtattctctgattgtgttgctgagtcgaaacttggatgtgcgagctttcatttacaagactctgatgccttctgaagcaaatggcttgctcaactccttgctggatatagtttccagcctcagcgccttgcttgccaaagcccagcacgtctttgagtatcttcctgagtttcttcacacatttaaaatcactgccttgctagaaaccctggactttcaacaggtttcacaaaatgtccaggccagaagttcagcttttggttctttccagtttgtgatgaagatggtttgcaaggaccaagcatcattccttagcgattctaatatgtttattaatttgcccagagttaaggaactcttggaagatgacaaagaaaaattcaacattcctgaagattcaacaccgttttgcttgaagctttatcaggaaattctacaattgccaaatggtgctttggtgtggaccttcctaaaacccatattgcatggaaaaatactatacacaccaaacactccagaaattaacaaggtcattcaaaaggctaattacaccttttatattgtggacaaactaaaaactttatcagaaacactgctggaaatgtccagccttttccagagaagtggaagtggccagatgttcaaccagctgcaggaggccctgagaaacaaatttgtaagaaactttgtagaaaaccagttgcacattgatgtagacaaacttactgaaaaactccagacatacggagggctgctggatgagatgtttaaccatgcaggcgctggacgcttccgtttcttgggcagcatcttggtcaatctctcttcctgcgtggcactgaaccgtttccaggctctgcagtctgtcgacatcctggagactaaagcacatgaactcttgcagcagaacagcttcttggccagtatcattttcagcaattccttattcgacaagaacttcagatcagagtctgtcaaactgccaccccatgtctcatacacaatccggaccaatgtgttatacagcgtgcgaacagatgtggtaaaaaacccttcttggaagttccaccctcagaatctaccagctgatgggttcaaatataactacgtctttgccccactgcaagacatgatcgaaagagccatcattttggtgcagactgggcaggaagccctggaaccagcagcacagactcaggcggccccttacccctgccataccagcgacctattcctgaacaacgttggtttcttttttccactgataatgatgctgacgtggatggtgtctgtggccagcatggtcagaaagttggtgtatgagcaggagatacagatagaagagtatatgcggatgatgggagtgcatccagtgatccatttcctggcctggttcctggagaacatggctgtgttgaccataagcagtgctactctggccatcgttctgaaaacaagtggcatctttgcacacagcaatacctttattgttttcctctttctcttggattttgggatgtcagtcgtcatgctgagctacctcttgagtgcatttttcagccaagctaatacagcggccctttgtaccagcctggtgtacatgatcagctttctgccctacatagttctattggttctacataaccaattaagttttgttaatcagacatttctgtgccttctttcgacaaccgcctttggacaaggggtattttttattacattcctggaaggacaagagacagggattcaatggaataatatgtaccaggctctggaacaagggggcatgacatttggctgggtttgctggatgattctttttgattcaagcctttattttttgtgtggatggtacttgagcaacttgattcctggaacatttggtttacggaaaccatggtatttcccctttactgcctcatattggaagagtgtgggtttcttggtggagaaaaggcaatactttctaagttctagtctgttcttcttcaatgagaactttgacaataaagggtcatcactgcaaaacagggaaggagagcttgaaggaagtgccccgggagtcaccctggtgtctgtgaccaaggaatatgagggccacaaggctgtggtccaagacctcagcctgaccttctacagagaccaaatcaccgccctgctggggacaaacggtgccgggaaaaccactatcatatccatgttgacggggctccaccctcccacttctggaaccatcatcatcaatggcaagaacctacagacagacctgtcgagggtcagaatggagcttggtgtgtgtccgcagcaggacatcctgttggacaacctcaccgtccgggaacatttgctgctctttgcttccataaaggcgcctcagtggaccaagaaggagctgcatcagcaagtcaatcaaactcttcaggatgtggacttaactcagcatcagcacaaacagacccgagctctgtctggaggcctgaagaggaagctctcccttggcattgctttcatgggcatgtcgaggaccgtggttctggatgagcccaccagtggggtggacccttgctcccggcatagcctgtgggacattctgctcaagtaccgagaaggtcgtacgatcatcttcacaacccaccacctggatgaagctgaagcgctgagtgaccgcgtggccgtcctccagcatgggaggctcaggtgctgcggtcctcccttctgcctgaaggaggcatatggccaggggctccgcctgacactcacgaggcagccttctgttctggaggcccatgatctgaaagacatggcttgtgttacatccctgataaagatctatattccacaagcatttctcaaagacagcagtggaagtgagctgacctacaccattccaaaggacacagacaaggcctgcttgaaagggctcttccaggccctggatgagaacctgcatcagctgcacctgacgggctatgggatctcagacaccaccttagaagaggtgtttttgatgcttttgcaagattccaacaagaaatctcacattgccctggggactgagtcagagctgcagaaccacaggcctacaggacatctgtctggctactgtggctccctagcacggcccgcaactgtgcagggcgtccagctgctccgcgcacaagtggccgcgatcctggcccggaggctccgccgcacgctgcgcgccgggaagagcaccctcgccgacctgctgctgccagtcctcttcgtggccttggccatgggcttgttcatggtgagacccctggccaccgagtaccctcccctcagactcacacctggacattaccagcgggccgagacctactttttcaggaagaattcttcatgctggcgcacagatcccttttctcacccagaattccaggattcatgtggctgcctgaagtgtccaaatagaagtgctagtgctccctacctgaccaaccacctgggccacacactgttgaatctctcaggcttcaatatggaggagtacttgctggcaccatctgaaaaaccaaggcttggaggttggtcttttggattaaaaatccccagtgaagctggaggtgcaaatggaaacatatcaaaacccccaactctggcaaaggtgtggtataatcagaagggttttcattccctaccttcctacttaaatcatctaaacaaccttattttgtggcagcacctaccccctactgtggactggagacaatacggaataacactctacagccacccatatggaggggccttgctgaacgaggacaagatcctggagagcatccgtcagtgtggagtggccctctgcatcgtgctgggattctccatcctgtctgcatccatcggcagctctgtggtgagggacagggtgattggagccaaaaggttgcagcacataagtggccttggctacaggatgtactggttcacaaacttcctatatgacatgctcttttacttggtttccgtctgcctgtgtgttgccgttattgtcgccttccagttaacagcttttactttccgcaagaacttggcagccacggccctcctgctgtcacttttcggatatgcaactcttccatggatgtacctgatgtccagaatcttttccagttcggacgtggctttcatttcctatgtctcactaaacttcatctttggcctttgtaccatgctcataaccattatgccccggttgctagccatcatctccaaagctaagaatttacagaatatctatgatgtcctcaagtgggtctttactatttttcctcaattctgtcttggtcaaggactggtagaactctgctataatcagatcaaatatgacctgacccacaacttcggcattgattcctatgtgagtccctttgagatgaactttctgggctggatcttcgtgcaactggcctcgcagggcacagtacttctcctcttgagggttctgctacactgggaccttctgcgatggccaaggggtcattctactctccaaggcacagtcaaatcttctaaggatacagatgttgaaaaagaggaaaagagagtgtttgaaggaaggaccaatggagacattcttgtgttatacaaccttagtaaacattatcgacgctttttccagaatattattgctgtgcaagatattagtttgggcataccaaaaggagagtgctttggacttctaggggtgaatggagctgggaagagcacgactttcaaaatgctgaatggtgaagtttctctaacttcaggacatgctatcatcaggactcccatgggagacgccgtggacctgtcttctgctggcacggcaggcgtgctcattggctactgtccccagcaggatgccctggacgagcttctgactggttgggaacatctctattattactgtagcttacgcgggattccaaggcagtgcatccctgaggttgctggagacctcatcaggcgcttacacctcgaagcccacgcggacaaacctgtggccacctacagtgggggaaccaagcggaaactctctacagccctggccctggtggggaaacctgacattcttttattggatgagcccagctctgggatggatccctgctctaagcggtacctgtggcaaacaataatgaaggaggttcgggaaggctgtgctgcggtgctgacctcccacagcatggaggagtgtgaggctctttgcacaagactggccataatggttaacggcagcttcaaatgtcttggttctcctcagcacatcaaaaataggtttggtgatggttatacagtcaaagtttggctctgtaaggaagcaaatcaacattgcactgtttctgaccacttgaagctttattttccaggaattcagttcaagggacagcacctgaatttattagaatatcatgtgccaaaaagatggggatgcctagctgacttgttcaaagttatagagaacaataaaaccttcttgaatattaagcattattccattaaccaaaccactttggagcaggtatttattaattttgcttctgagcagcagcaaactctacaatctactcttgatccatccactgacagtcaccacacacatcacttgcccatctgagcactaaagaagtttccataaggaataaaaccttgtcttccattacaattaacagtcaaggataaaacaagcacgcgcacaatcaaggagctggaacacactctccaggccgtcaaattattctcttgttcattttctattttgaatctccttgttagttaataaccaccaaatggaaaggtcattctttctgcagacttttggggagctcctccaaaacatttgttctctttaccatgccagatggacaccagcttctttgtgacaaaggcatgaatgatttgacagtgtccaaactgagacattctggagctggaaagcctgtcacactagagtgtgtgtgacatgtccactctaaacatgtcacttttctgttaagaaaactgagccccctccccacaggttaaaaaactttagtaacttgtttgtatagaaaatagtaacaaggactattttctattgttgtcatctatttactagatacatgtttttaatgattttaatgtaagcttttattaatactgatgacattatatggtatgatatgaaaaaatcaccaattttttacatataaaagatacctttttaaaaaaataggttttaagagctcttttagtatacactttagcaaaattaattaaattgaactagttactctgtatcaattacagtagttctaccagaatctcccaggttataatttatgagggtagagaaataaaatgtagatgcattttctttttcttcatttggatgaataattactgttttttgttattctaagtcagtgtttttcaaagcgtagtggtccccatattagctgcattgccatcttctgggagcttgcaagaaatgtacattctcaggatccactccagacctattgaatctcaaattctggggcttaaacaagcacattccaagttaagaaccaatgacctaagggaatgtctggttacctcctagttatacaagcaaaatctgcatagtatgtagtcttttttatttatttattttttttttttgaggcggagtctcgctctgtcacccaggctggagtgcagtggcgcgatgtcggctcactgcaagctccgcctcctgggttcacgccattctcctgcctcagcctccccagcagctgggactacaggcacacatcgccacacccggctaatttttagtatttttagtagagacggggtttcaccgtgttagccaggatggtctctatctcctgaccttgtgatccgcccccctccacctcccaaagtgctgggattacaggcgtgagccaccgtgtccggccgtagtttattttaaaatatatttttaaaagctttgtaaaaattatgtcattctcagaattgttgtcttcaaagcattgtcagatgtagagtgctcagatgtggctcttaaagactatatacatctgaatttttcatcctatagttagtaagatgcataaaatcaatccactactgaaatagtttccagtcagacatttctgagttcagacatttctcaacattcttttaacaacatttttctgaatcctcaatagaaaatcacattaatcttattttaaaatttggcctttttcaacactaacgttgagtaccggtagcttgtgatcaaaggcatatacttccttatgagatttctttactaaagcaagatttcattaaatctctatttcctaaatatcattctatacaaaagatattttttaaacggtaaggattaagacaatcactgatagctttgttgtgagcaattttgattcccatgtatcacatgaattacacttccttaaataaattacagtttatggctgtatgatttattctctaattctaacatagtctagttgtcaaaaggaaatatgtaatctttttatgattgttgaatcaataaataccaatttgtgaaacatgaatgtgtttaaactgcagtgaataaatgagatgtgctttaatttaacccga

SEQ ID NO: 183 - DNA, 17083 bp, Homo sapiens
atataagcaccatccttacaggctggcttcctgactgagagcagggagcagcaggcatggggcatgccgggtgccagttcaaagccctgctgtggaagaattggctctgcagactcaggaacccggtccttttccttgctgaattcttctggccttgtatcctgtttgtaattctgacagttcttcgttttcaagaacctcccagatacagagacatttgttatttgcagccccgagatctacccagctgtggtgttatcccctttgttcaaagccttctttgtaacactggatcaaggtgtaggaacttcagctatgaagggtcaatggagcatcattttcgtttgtctaggttccaaactgcagctgaccccaagaaagtcaacaacctggcctttttaaaagagatacaagacctggcagaggaaattcatggaatgatggacaaggcaaaaaacttaaaaagactttgggtagaacgatccaacactccagattcttcttatggttccagtttttttacaatggatctcaataagaccgaggaggtaatattgaaactggaaagcctccatcagcagcctcatatctgggattttctacttttactgccgagactacacacaagccatgatcatgtggaagatggcatggatgttgcagtgaaccttctccagaccattttgaattccttaatatccctagaagatttagattggcttccactcaaccaaactttttcccaggtttctgaacttgtactgaatgtgaccatttcgacactgacatttctgcagcaacatggagtagcagtcaccgagccagtttaccacctgtccatgcagaatatagtgtgggatccacagaaagtccagtatgatctcaaatcccagtttggctttgatgatcttcacacggaacagatcctgaactcttcagctgaactgaaggagattcccacagacacttccttggagaagatggtgtgttcagtcttgtctagcacatcagaggatgaagctgagaaatggggccacgttggaggctgccaccctaagtggtcagaagccaaaaactatcttgtccatgcagtcagctggctgcgagtctaccaacaggtgtttgttcagtggcaacagggtagcctgcttcagaagacactcacaggcatgggccatagtctggaggctctcaggaatcagtttgaagaagagagcaagccctggaaggtggtggaagctctgcacactgcactgctcctgctgaatgacagcttgtcagcagatggcccaaaagataatcatacatttccaaagatattacagcatctgtggaaattgcaaagcttgctgcaaaacctgccccagtggccggcactgaagagatttcttcagcttgatggagctctcagaaatgcgatagctcagaatttacattttgtccaagaagtcctcatttgcctggagacatcagctaatgattttaaatggtttgaacttaaccaattgaaactggaaaaggatgtgttcttttgggagctgaaacagatgttggcgaagaatgctgtctgcccgaatggtcgtttctctgagaaggaggtctttttgccgcctggaaactccagcatatggggtggtctccagggactgttgtgctattgtaactcctctgagacgagtgttttaaacaagctacttggttcagtagaggatgctgatcgtattttgcaagaggtcattacttggcacaaaaatatgtcagttttaatacctgaagaatatttggactggcaggaacttgagatgcagctgtcagaagcaagcctttcctgtactcggctcttcctgctgctgggagctgatccctctcctgagaatgatgtcttttctagtgactgtaagcaccagcttgtctccacagtgatatttcatacacttgaaaaaacacaatttttcctggaacaagcatattattggaaagccttcaaaaagtttatcaggaagacttgcgaagtggcccaatatgtaaatatgcaagagagtttccagaacagactattggcttttcctgaggaatctccttgttttgaagaaaacatggattggaaaatgatcagtgataattattttcaatttttgaataacttactcaagtctccaacagcttccatatccagggctttaaatttcacaaagcaccttctaatgatggaaaagaagttgcacacccttgaggatgaacaaatgaactttcttttatcatttgtggaattttttgagaaattattgttgcctaatctttttgactcctccattgttcccagtttccacagcctcccatctctcacagaggatattctgaatataagttctctgtggacaaatcatttaaaaagtttaaagagagacccatctgccactgatgctcagaaactcttggaatttggcaacgaagtgatttggaaaatgcagactctcggaagtcactggataaggaaggaaccaaaaaatcttttgagattcatagaattaatactttttgaaattaatcccaaattactagaattatgggcctatggcatttcaaaaggaaaaagagctaaattggaaaacttctttacacttttaaatttttctgttccagaaaatgagattctgagtacaagttttaacttttcccagttgttccattcagattggcctaaatcaccagctatgaacatagattttgtacgtttaagtgaggctataataactagtctccatgaatttggatttttggagcaggaacagatctcagaagctctgaacacagtctacgctatcaggaatgcatctgatcttttctcagccctttctgaaccacaaaaacaagaagttgataaaattttgactcacatacacctaaatgtcttccaggacaaggattcagctttacttctgcaaatttattcttcattttaccgatatatttatgaattattgaatattcagagtagaggctcttcgttgactttccttacacaaatctcaaaacacattttggatatcataaaacaatttaatttccaaaacatcagtaaagcatttgcatttttatttaagacagcagaggttcttgggggaatttctaatgtatcttactgtcagcaattgctttcaatttttaactttttggagcttcaggcccaatccttcatgtctacagagggccaagaactggaagtgatccacactactttgacaggcctcaaacagctgctcataattgatgaagattttcgtatttctttatttcaatatatgagccaattcttcaacagttcagtagaagacctattggataataaatgcttgatttcggacaataaacacatttcttccgtaaattattcaacaagtgaggagtcttcatttgtttttccattggcacaaattttttcaaacctctcagcaaatgtcagtgtgttcaacaagtttatgtccattcactgtaccgtttcatggcttcaaatgtggactgaaatctgggaaaccatatctcaattatttaagtttgacatgaatgttttcacatctcttcatcatggtttcactcagcttttggatgaattggaagatgatgtgaaagtctctaaaagctgccagggtatacttcccacccataatgttgctagactcatattaaatttgtttaaaaatgtaactcaagccaatgacttccataattgggaggacttcctggatctcagggattttttggtagctttaggtaatgcattagtttcagtaaaaaaacttaacttggagcaagtggagaaatcccttttcaccatggaagctgccctgcatcagttgaagacatttccattcaacgaaagtacaagcagagagtttttaaattctctgcttgaagttttcattgagtttagcagtacctcagaatatatagtcagaaatctagattcaataaatgactttctttcaaataatctcacaaattatggagaaaaatttgaaaatatcatcactgagctaagagaagcaatagtatttcttagaaatgtatcacatgatcgagatttgttttcctgtgctgatattttccaaaatgttactgagtgtattttagaagatggctttttatatgtaaatacctcacagaggatgttacgtattctagacacgttaaattccacattttcctctgagaacacaattagcagtctgaaaggatgcattgtatggttagatgtcataaaccatttgtatttgttgtctaactccagtttttcacaaggtcatcttcaaaatattttggggaatttcagagatatagaaaacaaaatgaactctatattaaaaattgtaacttgggtgttaaatataaaaaaacctctttgttcatcaaatggctcacatataaattgtgtcaatatttacttgaaagatgtaactgactttctaaatattgtacttactacagtctttgaaaaagagaagaaacctaaatttgagattttattagctcttttaaatgattccacaaagcaagtaaggatgagtatcaacaacttaacaacagactttgattttgcatctcagtccaattggagatattttactgaattaattctaagaccaatagaaatgtcagatgaaattcctaatcagtttcaaaatatttggcttcatttaataacactggggaaggaatttcagaagcttgtaaaaggtatttactttaacatcctggaaaataattcctcttctaaaactgaaaacttgttaaacatatttgccaccagtccaaaagaaaaggatgtaaacagtgtaggcaattccatttatcacttagctagttaccttgccttcagcttatctcatgacctccaaaattcaccaaaaataataatttcacctgaaataatgaaagctacaggtcttggtattcaactgataagggatgtgttcaactccttaatgcctgtagttcatcacactagtccacaaaatgcaggttatatgcaagctttgaagaaggtaacttctgtcatgcgtacccttaagaaggcagacatagaccttttagtggatcagcttgaacaagttagtgtaaacctaatggatttctttaagaatatcagtagtgtgggaactggcaatttagtggtcaatttgcttgttggcttgatggaaaaatttgcagacagctcacattcttggaatgttaatcatctgctgcagctctcacgcctgtttcctaaagatgttgtggatgctgtgatagatgtgtactatgtgcttcctcatgctgtaaggctcctgcagggagtacctggtaaaaacatcactgaaggcctcaaggatgtctacagcttcacactccttcatggcataaccatttcaaatatcaccaaggaagacttcgcaattgtgataaaaattcttttggatacaattgaattagtatcagataagccagatattatttcagaggctttagcttgttttcctgtggtttggtgctggaatcacacaaattctggatttcggcagaattcaaagatagacccctgcaatgtccatgggctcatgtcttcttccttttatggcaaagtggccagtatacttgatcatttccacctgtctccccaaggtgaagattcaccatgttcaaatgaaagctcccgaatggaaataactaggaaagtggtctgcataattcatgaattagtggactggaattctattcttctggagctctctgaagtcttccatgttaacatttctcttgtgaaaactgtgcagaaattttggcataagatattaccgtttgtcccaccttcaataaatcaaactagggatagcatctctgaactctgtcctagtggttccataaagcaagttgctttgcaaatcatagaaaaacttaaaaatgtcaactttacaaaagttacatcaggtgaaaatattcttgacaaactaagtagtttaaacaagatccttaacattaatgaagacacagagacatctgttcaaaatattatttcctcaaatttggaaaggacagtacaattgatttctgaagactggagcctagaaaaaagtacgcataatctactctctttattcatgatgctccagaatgcaaatgtcacaggtagcagtttagaagcattatcaagttttattgaaaaaagtgaaacaccttacaactttgaagaactatggcccaagtttcaacaaatcatgaaagacctaacccaagattttagaatcagacacctgctttctgaaatgaacaaaggaatcaaaagtataaattcaatggctcttcaaaagataactttgcagtttgcccatttcctggaaatcctggattcaccgtcattgaagacattagaaattattgaagattttctattggtcacaaaaaactggcttcaggaatatgcaaatgaggattactccagaatgatagaaacattattcattcctgtgaccaatgagagttcaactgaagatatagctttgttagccaaagctattgctactttttggggctctttaaaaaatatatctagagcaggcaattttgatgttgcctttcttacccatctgctaaatcaagaacagctgactaatttctcagttgttcagctgctttttgaaaacatcctaattaatttgatcaataacttagctgggaattctcaggaagcagcttggaacttaaatgatactgaccttcaaataatgaatttcattaaccttatcttgaaccatatgcagtcagaaactagtaggaaaacagttctctctctgagaagcatagtagatttcacagaacagtttttgaaaacattcttctccctttttctaaaggaagattctgagaacaaaatatctcttctgctgaaatatttccacaaagatgttattgcagagatgagttttgtcccaaaagataaaattctagaaattctgaaactggatcaatttcttaccctgatgatacaagacagattgatgaacattttttcaagtttaaaggagactatatatcacctaatgaaaagttcatttatattagacaatggagaattttattttgatactcatcaaggactgaagttcatgcaagatttatttaatgcccttctcagggaaacttcaatgaaaaataagactgaaaataatatagactttttcacagtggtgagtcagttgtttttccatgtgaataagtctgaggacctcttcaaactcaatcaagatcttgggtcagctcttcaccttgtaagagaatgttcaacagagatggcaagacttctggatacaattttacactctcctaataaggacttctatgctttgtatcctaccctccaagaagttatacttgctaatctaacggatttgcttttctttataaataattcattccctctaagaaacagagcaacattagaaattactaagagattagttggtgctatttcaagagcaagtgaagaaagtcacgtcctgaaacccctcttagaaatgtctgggactctggtcatgctgttgaatgacagtgctgacctgagagatcttgccacatcaatggactccattgtgaaacttcttaagctggtcaagaaagtttcggggaagatgtccacagtttttaaaactcattttatctccaataccaaggacagtgtgaaattctttgacactctgtattccatcatgcaacaaagtgttcaaaatcttgtgaaagaaatagctactttaaaaaaaatagatcatttcacatttgaaaagataaatgatttgttggtgccatttcttgacttggcctttgaaatgattggggtagaaccttatatatcatcaaactctgatattttcagtatgtcacctagcatactctcatatatgaaccaatctaaggacttttctgatattttggaagaaattgctgaatttttaacatctgtgaaaatgaacttggaagatatgaggagtcttgcggtagcatttaacaatgagactcaaacattttctatggattctgtcaacttacgggaagaaattctgggttgcttagttcctataaataacatcaccaaccaaatggacttcttataccctaatccaatttccactcatagtggccctcaagatataaaatgggaaataattcatgaagtgatcccttttttggataaaatattatcacaaaacagcacagaaataggatctttcttgaaaatggtgatctgtctcaccttagaagctctttggaaaaacttaaagaaagataattggaatgtttctaatgtgttgatgacatttactcagcatccaaataaccttttgaaaaccatagaaacagttttagaggcctccagtggaattaaaagtgactatgaaggtgatttgaataaaagtttatattttgacacacctttgagtcagaatataactcatcatcaacttgaaaaagcaatccataatgttttaagtagaatagctctctggaggaaaggacttctgtttaacaactctgaatggataacttccacaagaactttgtttcagccactttttgagattttcattaaagcaaccaccggaaagaatgtcacatcagaaaaagaagagagaaccaagaaagagatgattgactttccttatagtttcaaaccatttttctgtttggagaaatacctgggaggattatttgtattgactaaatactggcaacaaatcccactaacagatcaaagtgttgttgagatttgtgaagttttccagcagactgtgaagccctcagaagccatggagatgctgcagaaagtgaagatgatggtcgtacgtgtgctcaccatcgttgcagaaaacccttcctggaccaaggacattttgtgtgctactctgagttgcaagcaaaatgggataaggcatctcattttatctgctatacaaggggtcactttggcgcaggaccacttccaggaaattgaaaagatatggtcctcgccgaatcagctaaattgtgaaagtcttagcaagaatctttctagcaccttggagagcttcaagagcagcttggaaaatgccactggccaggactgcacaagccagccgaggctggagacggtgcagcagcacttgtacatgttggccaaaagcctcgaggaaacttggtcatcagggaatcccatcatgacttttctcagcaatttcacagtaactgaggatgtaaaaataaaagatttgatgaagaatatcaccaagttgactgaggagcttcgctcttccatccaaatctcgaatgagactatccatagcattctagaagcaaatatttcccactccaaggttctcttcagtgccctcaccgtagctctgtctggaaagtgtgatcaggaaatccttcatctcctgctgacatttcccaaaggggaaaaatcttggatcgcagcggaggaactctgtagcctgccagggtcaaaagtgtattctctgattgtgttgctgagtcgaaacttggatgtgcgagctttcatttacaagactctgatgccttctgaagcaaatggcttgctcaactccttgctggatatagtttccagcctcagcgccttgcttgccaaagcccagcacgtctttgagtatcttcctgagtttcttcacacatttaaaatcactgccttgctagaaaccctggactttcaacaggtttcacaaaatgtccaggccagaagttcagcttttggttctttccagtttgtgatgaagatggtttgcaaggaccaagcatcattccttagcgattctaatatgtttattaatttgcccagagttaaggaactcttggaagatgacaaagaaaaattcaacattcctgaagattcaacaccgttttgcttgaagctttatcaggaaattctacaattgccaaatggtgctttggtgtggaccttcctaaaacccatattgcatggaaaaatactatacacaccaaacactccagaaattaacaaggtcattcaaaaggctaattacaccttttatattgtggacaaactaaaaactttatcagaaacactgctggaaatgtccagccttttccagagaagtggaagtggccagatgttcaaccagctgcaggaggccctgagaaacaaatttgtaagaaactttgtagaaaaccagttgcacattgatgtagacaaacttactgaaaaactccagacatacggagggctgctggatgagatgtttaaccatgcaggcgctggacgcttccgtttcttgggcagcatcttggtcaatctctcttcctgcgtggcactgaaccgtttccaggctctgcagtctgtcgacatcctggagactaaagcacatgaactcttgcagcagaacagcttcttggccagtatcattttcagcaattccttattcgacaagaacttcagatcagagtctgtcaaactgccaccccatgtctcatacacaatccggaccaatgtgttatacagcgtgcgaacagatgtggtaaaaaacccttcttggaagttccaccctcagaatctaccagctgatgggttcaaatataactacgtctttgccccactgcaagacatgatcgaaagagccatcattttggtgcagactgggcaggaagccctggaaccagcagcacagactcaggcggccccttacccctgccataccagcgacctattcctgaacaacgttggtttcttttttccactgataatgatgctgacgtggatggtgtctgtggccagcatggtcagaaagttggtgtatgagcaggagatacagatagaagagtatatgcggatgatgggagtgcatccagtgatccatttcctggcctggttcctggagaacatggctgtgttgaccataagcagtgctactctggccatcgttctgaaaacaagtggcatctttgcacacagcaatacctttattgttttcctctttctcttggattttgggatgtcagtcgtcatgctgagctacctcttgagtgcatttttcagccaagctaatacagcggccctttgtaccagcctggtgtacatgatcagctttctgccctacatagttctattggttctacataaccaattaagttttgttaatcagacatttctgtgccttctttcgacaaccgcctttggacaaggggtattttttattacattcctggaaggacaagagacagggattcaatggaataatatgtaccaggctctggaacaagggggcatgacatttggctgggtttgctggatgattctttttgattcaagcctttattttttgtgtggatggtacttgagcaacttgattcctgggtcatcactgcaaaacagggaaggagagcttgaaggaagtgccccgggagtcaccctggtgtctgtgaccaaggaatatgagggccacaaggctgtggtccaagacctcagcctgaccttctacagagaccaaatcaccgccctgctggggacaaacggtgccgggaaaaccactatcatatccatgttgacggggctccaccctcccacttctggaaccatcatcatcaatggcaagaacctacagacagacctgtcgagggtcagaatggagcttggtgtgtgtccgcagcaggacatcctgttggacaacctcaccgtccgggaacatttgctgctctttgcttccataaaggcgcctcagtggaccaagaaggagctgcatcagcaagtcaatcaaactcttcaggatgtggacttaactcagcatcagcacaaacagacccgagctctgtctggaggcctgaagaggaagctctcccttggcattgctttcatgggcatgtcgaggaccgtggttctggatgagcccaccagtggggtggacccttgctcccggcatagcctgtgggacattctgctcaagtaccgagaaggtcgtacgatcatcttcacaacccaccacctggatgaagctgaagcgctgagtgaccgcgtggccgtcctccagcatgggaggctcaggtgctgcggtcctcccttctgcctgaaggaggcatatggccaggggctccgcctgacactcacgaggcagccttctgttctggaggcccatgatctgaaagacatggcttgtgttacatccctgataaagatctatattccacaagcatttctcaaagacagcagtggaagtgagctgacctacaccattccaaaggacacagacaaggcctgcttgaaagggctcttccaggccctggatgagaacctgcatcagctgcacctgacgggctatgggatctcagacaccaccttagaagaggtgtttttgatgcttttgcaagattccaacaagaaatctcacattgccctggggactgagtcagagctgcagaaccacaggcctacaggacatctgtctggctactgtggctccctagcacggcccgcaactgtgcagggcgtccagctgctccgcgcacaagtggccgcgatcctggcccggaggctccgccgcacgctgcgcgccgggaagagcaccctcgccgacctgctgctgccagtcctcttcgtggccttggccatgggcttgttcatggtgagacccctggccaccgagtaccctcccctcagactcacacctggacattaccagcgggccgagacctactttttcagcagcagtgggggcgacaacttggacctcacccgtgtgcttctgcggaagtttagagatcaagatttgccctgtgcagatttaaacccacgccagaagaattcttcatgctggcgcacagatcccttttctcacccagaattccaggattcatgtggctgcctgaagtgtccaaatagaagtgctagtgctccctacctgaccaaccacctgggccacacactgttgaatctctcaggcttcaatatggaggagtacttgctggcaccatctgaaaaaccaaggcttggaggttggtcttttggattaaaaatccccagtgaagctggaggtgcaaatggaaacatatcaaaacccccaactctggcaaaggtgtggtataatcagaagggttttcattccctaccttcctacttaaatcatctaaacaaccttattttgtggcagcacctaccccctactgtggactggagacaatacggaataacactctacagccacccatatggaggggccttgctgaacgaggacaagatcctggagagcatccgtcagtgtggagtggccctctgcatcgtgctgggattctccatcctgtctgcatccatcggcagctctgtggtgagggacagggtgattggagccaaaaggttgcagcacataagtggccttggctacaggatgtactggttcacaaacttcctatatgacatgctcttttacttggtttccgtctgcctgtgtgttgccgttattgtcgccttccagttaacagcttttactttccgcaagaacttggcagccacggccctcctgctgtcacttttcggatatgcaactcttccatggatgtacctgatgtccagaatcttttccagttcggacgtggctttcatttcctatgtctcactaaacttcatctttggcctttgtaccatgctcataaccattatgccccggttgctagccatcatctccaaagctaagaatttacagaatatctatgatgtcctcaagtgggtctttactatttttcctcaattctgtcttggtcaaggactggtagaactctgctataatcagatcaaatatgacctgacccacaacttcggcattgattcctatgtgagtccctttgagatgaactttctgggctggatcttcgtgcaactggcctcgcagggcacagtacttctcctcttgagggttctgctacactgggaccttctgcgatggccaaggggtcattctactctccaaggcacagtcaaatcttctaaggatacagatgttgaaaaagaggaaaagagagtgtttgaaggaaggaccaatggagacattcttgtgttatacaaccttagtaaacattatcgacgctttttccagaatattattgctgtgcaagatattagtttgggcataccaaaaggagagtgctttggacttctaggggtgaatggagctgggaagagcacgactttcaaaatgctgaatggtgaagtttctctaacttcaggacatgctatcatcaggactcccatgggagacgccgtggacctgtcttctgctggcacggcaggcgtgctcattggctactgtccccagcaggatgccctggacgagcttctgactggttgggaacatctctattattactgtagcttacgcgggattccaaggcagtgcatccctgaggttgctggagacctcatcaggcgcttacacctcgaagcccacgcggacaaacctgtggccacctacagtgggggaaccaagcggaaactctctacagccctggccctggtggggaaacctgacattcttttattggatgagcccagctctgggatggatccctgctctaagcggtacctgtggcaaacaataatgaaggaggttcgggaaggctgtgctgcggtgctgacctcccacagcatggaggagtgtgaggctctttgcacaagactggccataatggttaacggcagcttcaaatgtcttggttctcctcagcacatcaaaaataggtttggtgatggttatacagtcaaagtttggctctgtaaggaagcaaatcaacattgcactgtttctgaccacttgaagctttattttccaggaattcagttcaagggacagcacctgaatttattagaatatcatgtgccaaaaagatggggatgcctagctgacttgttcaaagttatagagaacaataaaaccttcttgaatattaagcattattccattaaccaaaccactttggagcaggtatttattaattttgcttctgagcagcagcaaactctacaatctactcttgatccatccactgacagtcaccacacacatcacttgcccatctgagcactaaagaagtttccataaggaataaaaccttgtcttccattacaattaacagtcaaggataaaacaagcacgcgcacaatcaaggagctggaacacactctccaggccgtcaaattattctcttgttcattttctattttgaatctccttgttagttaataaccaccaaatggaaaggtcattctttctgcagacttttggggagctcctccaaaacatttgttctctttaccatgccagatggacaccagcttctttgtgacaaaggcatgaatgatttgacagtgtccaaactgagacattctggagctggaaagcctgtcacactagagtgtgtgtgacatgtccactctaaacatgtcacttttctgttaagaaaactgagccccctccccacaggttaaaaaactttagtaacttgtttgtatagaaaatagtaacaaggactattttctattgttgtcatctatttactagatacatgtttttaatgattttaatgtaagcttttattaatactgatgacattatatggtatgatatgaaaaaatcaccaattttttacatataaaagatacctttttaaaaaaataggttttaagagctcttttagtatacactttagcaaaattaattaaattgaactagttactctgtatcaattacagtagttctaccagaatctcccaggttataatttatgagggtagagaaataaaatgtagatgcattttctttttcttcatttggatgaataattactgttttttgttattctaagtcagtgtttttcaaagcgtagtggtccccatattagctgcattgccatcttctgggagcttgcaagaaatgtacattctcaggatccactccagacctattgaatctcaaattctggggcttaaacaagcacattccaagttaagaaccaatgacctaagggaatgtctggttacctcctagttatacaagcaaaatctgcatagtatgtagtcttttttatttatttattttttttttttgaggcggagtctcgctctgtcacccaggctggagtgcagtggcgcgatgtcggctcactgcaagctccgcctcctgggttcacgccattctcctgcctcagcctccccagcagctgggactacaggcacacatcgccacacccggctaatttttagtatttttagtagagacggggtttcaccgtgttagccaggatggtctctatctcctgaccttgtgatccgcccccctccacctcccaaagtgctgggattacaggcgtgagccaccgtgtccggccgtagtttattttaaaatatatttttaaaagctttgtaaaaattatgtcattctcagaattgttgtcttcaaagcattgtcagatgtagagtgctcagatgtggctcttaaagactatatacatctgaatttttcatcctatagttagtaagatgcataaaatcaatccactactgaaatagtttccagtcagacatttctgagttcagacatttctcaacattcttttaacaacatttttctgaatcctcaatagaaaatcacattaatcttattttaaaatttggcctttttcaacactaacgttgagtaccggtagcttgtgatcaaaggcatatacttccttatgagatttctttactaaagcaagatttcattaaatctctatttcctaaatatcattctatacaaaagatattttttaaacggtaaggattaagacaatcactgatagctttgttgtgagcaattttgattcccatgtatcacatgaattacacttccttaaataaattacagtttatggctgtatgatttattctctaattctaacatagtctagttgtcaaaaggaaatatgtaatctttttatgattgttgaatcaataaataccaatttgtgaaacatgaatgtgtttaaactgcagtgaataaatgagatgtgctttaatttaacccga

SEQ ID NO: 184 - DNA, 15116 bp, Homo sapiens
atataagcaccatccttacaggctggcttcctgactgagagcagggagcagcaggcatggggcatgccgggtgccagttcaaagccctgctgtggaagaattggctctgcagactcaggaacccggtccttttccttgctgaattcttctggccttgtatcctgtttgtaattctgacagttcttcgttttcaagaacctcccagatacagagacatttgttatttgcagccccgagatctacccagctgtggtgttatcccctttgttcaaagccttctttgtaacactggatcaaggtgtaggaacttcagctatgaagggtcaatggagcatcattttcgtttgtctaggttccaaactgcagctgaccccaagaaagtcaacaacctggcctttttaaaagagatacaagacctggcagaggaaattcatggaatgatggacaaggcaaaaaacttaaaaagactttgggtagaacgatccaacactccagattcttcttatggttccagtttttttacaatggatctcaataagaccgaggaggtaatattgaaactggaaagcctccatcagcagcctcatatctgggattttctacttttactgccgagactacacacaagccatgatcatgtggaagatggcatggatgttgcagtgaaccttctccagaccattttgaattccttaatatccctagaagatttagattggcttccactcaaccaaactttttcccaggtttctgaacttgtactgaatgtgaccatttcgacactgacatttctgcagcaacatggagtagcagtcaccgagccagtttaccacctgtccatgcagaatatagtgtgggatccacagaaagtccagtatgatctcaaatcccagtttggctttgatgatcttcacacggaacagatcctgaactcttcagctgaactgaaggagattcccacagacacttccttggagaagatggtgtgttcagtcttgtctagcacatcagaggatgaagctgagaaatggggccacgttggaggctgccaccctaagtggtcagaagccaaaaactatcttgtccatgcagtcagctggctgcgagtctaccaacaggtgtttgttcagtggcaacagggtagcctgcttcagaagacactcacaggcatgggccatagtctggaggctctcaggaatcagtttgaagaagagagcaagccctggaaggtggtggaagctctgcacactgcactgctcctgctgaatgacagcttgtcagcagatggcccaaaagataatcatacatttccaaagatattacagcatctgtggaaattgcaaagcttgctgcaaaacctgccccagtggccggcactgaagagatttcttcagcttgatggagctctcagaaatgcgatagctcagaatttacattttgtccaagaagtcctcatttgcctggagacatcagctaatgattttaaatggtttgaacttaaccaattgaaactggaaaaggatgtgttcttttgggagctgaaacagatgttggcgaagaatgctgtctgcccgaatggtcgtttctctgagaaggaggtctttttgccgcctggaaactccagcatatggggtggtctccagggactgttgtgctattgtaactcctctgagacgagtgttttaaacaagctacttggttcagtagaggatgctgatcgtattttgcaagaggtcattacttggcacaaaaatatgtcagttttaatacctgaagaatatttggactggcaggaacttgagatgcagctgtcagaagcaagcctttcctgtactcggctcttcctgctgctgggagctgatccctctcctgagaatgatgtcttttctagtgactgtaagcaccagcttgtctccacagtgatatttcatacacttgaaaaaacacaatttttcctggaacaagcatattattggaaagccttcaaaaagtttatcaggaagacttgcgaagtggcccaatatgtaaatatgcaagagagtttccagaacagactattggcttttcctgaggaatctccttgttttgaagaaaacatggattggaaaatgatcagtgataattattttcaatttttgaataacttactcaagtctccaacagcttccatatccagggctttaaatttcacaaagcaccttctaatgatggaaaagaagttgcacacccttgaggatgaacaaatgaactttcttttatcatttgtggaattttttgagaaattattgttgcctaatctttttgactcctccattgttcccagtttccacagcctcccatctctcacagaggatattctgaatataagttctctgtggacaaatcatttaaaaagtttaaagagagacccatctgccactgatgctcagaaactcttggaatttggcaacgaagtgatttggaaaatgcagactctcggaagtcactggataaggaaggaaccaaaaaatcttttgagattcatagaattaatactttttgaaattaatcccaaattactagaattatgggcctatggcatttcaaaaggaaaaagagctaaattggaaaacttctttacacttttaaatttttctgttccagaaaatgagattctgagtacaagttttaacttttcccagttgttccattcagattggcctaaatcaccagctatgaacatagattttgtacgtttaagtgaggctataataactagtctccatgaatttggatttttggagcaggaacagatctcagaagctctgaacacagtctacgctatcaggaatgcatctgatcttttctcagccctttctgaaccacaaaaacaagaagttgataaaattttgactcacatacacctaaatgtcttccaggacaaggattcagctttacttctgcaaatttattcttcattttaccgatatatttatgaattattgaatattcagagtagaggctcttcgttgactttccttacacaaatctcaaaacacattttggatatcataaaacaatttaatttccaaaacatcagtaaagcatttgcatttttatttaagacagcagaggttcttgggggaatttctaatgtatcttactgtcagcaattgctttcaatttttaactttttggagcttcaggcccaatccttcatgtctacagagggccaagaactggaagtgatccacactactttgacaggcctcaaacagctgctcataattgatgaagattttcgtatttctttatttcaatatatgagccaattcttcaacagttcagtagaagacctattggataataaatgcttgatttcggacaataaacacatttcttccgtaaattattcaacaagtgaggagtcttcatttgtttttccattggcacaaattttttcaaacctctcagcaaatgtcagtgtgttcaacaagtttatgtccattcactgtaccgtttcatggcttcaaatgtggactgaaatctgggaaaccatatctcaattatttaagtttgacatgaatgttttcacatctcttcatcatggtttcactcagcttttggatgaattggaagatgatgtgaaagtctctaaaagctgccagggtatacttcccacccataatgttgctagactcatattaaatttgtttaaaaatgtaactcaagccaatgacttccataattgggaggacttcctggatctcagggattttttggtagctttaggtaatgcattagtttcagtaaaaaaacttaacttggagcaagtggagaaatcccttttcaccatggaagctgccctgcatcagttgaagacatttccattcaacgaaagtacaagcagagagtttttaaattctctgcttgaagttttcattgagtttagcagtacctcagaatatatagtcagaaatctagattcaataaatgactttctttcaaataatctcacaaattatggagaaaaatttgaaaatatcatcactgagctaagagaagcaatagtatttcttagaaatgtatcacatgatcgagatttgttttcctgtgctgatattttccaaaatgttactgagtgtattttagaagatggctttttatatgtaaatacctcacagaggatgttacgtattctagacacgttaaattccacattttcctctgagaacacaattagcagtctgaaaggatgcattgtatggttagatgtcataaaccatttgtatttgttgtctaactccagtttttcacaaggtcatcttcaaaatattttggggaatttcagagatatagaaaacaaaatgaactctatattaaaaattgtaacttgggtgttaaatataaaaaaacctctttgttcatcaaatggctcacatataaattgtgtcaatatttacttgaaagatgtaactgactttctaaatattgtacttactacagtctttgaaaaagagaagaaacctaaatttgagattttattagctcttttaaatgattccacaaagcaagtaaggatgagtatcaacaacttaacaacagactttgattttgcatctcagtccaattggagatattttactgaattaattctaagaccaatagaaatgtcagatgaaattcctaatcagtttcaaaatatttggcttcatttaataacactggggaaggaatttcagaagcttgtaaaaggtatttactttaacatcctggaaaataattcctcttctaaaactgaaaacttgttaaacatatttgccaccagtccaaaagaaaaggatgtaaacagtgtaggcaattccatttatcacttagctagttaccttgccttcagcttatctcatgacctccaaaattcaccaaaaataataatttcacctgaaataatgaaagctacaggtcttggtattcaactgataagggatgtgttcaactccttaatgcctgtagttcatcacactagtccacaaaatgcaggttatatgcaagctttgaagaaggtaacttctgtcatgcgtacccttaagaaggcagacatagaccttttagtggatcagcttgaacaagttagtgtaaacctaatggatttctttaagaatatcagtagtgtgggaactggcaatttagtggtcaatttgcttgttggcttgatggaaaaatttgcagacagctcacattcttggaatgttaatcatctgctgcagctctcacgcctgtttcctaaagatgttgtggatgctgtgatagatgtgtactatgtgcttcctcatgctgtaaggctcctgcagggagtacctggtaaaaacatcactgaaggcctcaaggatgtctacagcttcacactccttcatggcataaccatttcaaatatcaccaaggaagacttcgcaattgtgataaaaattcttttggatacaattgaattagtatcagataagccagatattatttcagaggctttagcttgttttcctgtggtttggtgctggaatcacacaaattctggatttcggcagaattcaaagatagacccctgcaatgtccatgggctcatgtcttcttccttttatggcaaagtggccagtatacttgatcatttccacctgtctccccaaggtgaagattcaccatgttcaaatgaaagctcccgaatggaaataactaggaaagtggtctgcataattcatgaattagtggactggaattctattcttctggagctctctgaagtcttccatgttaacatttctcttgtgaaaactgtgcagaaattttggcataagatattaccgtttgtcccaccttcaataaatcaaactagggatagcatctctgaactctgtcctagtggttccataaagcaagttgctttgcaaatcatagaaaaacttaaaaatgtcaactttacaaaagttacatcaggtgaaaatattcttgacaaactaagtagtttaaacaagatccttaacattaatgaagacacagagacatctgttcaaaatattatttcctcaaatttggaaaggacagtacaattgatttctgaagactggagcctagaaaaaagtacgcataatctactctctttattcatgatgctccagaatgcaaatgtcacaggtagcagtttagaagcattatcaagttttattgaaaaaagtgaaacaccttacaactttgaagaactatggcccaagtttcaacaaatcatgaaagacctaacccaagattttagaatcagacacctgctttctgaaatgaacaaaggaatcaaaagtataaattcaatggctcttcaaaagataactttgcagtttgcccatttcctggaaatcctggattcaccgtcattgaagacattagaaattattgaagattttctattggtcacaaaaaactggcttcaggaatatgcaaatgaggattactccagaatgatagaaacattattcattcctgtgaccaatgagagttcaactgaagatatagctttgttagccaaagctattgctactttttggggctctttaaaaaatatatctagagcaggcaattttgatgttgcctttcttacccatctgctaaatcaagaacagctgactaatttctcagttgttcagctgctttttgaaaacatcctaattaatttgatcaataacttagctgggaattctcaggaagcagcttggaacttaaatgatactgaccttcaaataatgaatttcattaaccttatcttgaaccatatgcagtcagaaactagtaggaaaacagttctctctctgagaagcatagtagatttcacagaacagtttttgaaaacattcttctccctttttctaaaggaagattctgagaacaaaatatctcttctgctgaaatatttccacaaagatgttattgcagagatgagttttgtcccaaaagataaaattctagaaattctgaaactggatcaatttcttaccctgatgatacaagacagattgatgaacattttttcaagtttaaaggagactatatatcacctaatgaaaagttcatttatattagacaatggagaattttattttgatactcatcaaggactgaagttcatgcaagatttatttaatgcccttctcagggaaacttcaatgaaaaataagactgaaaataatatagactttttcacagtggtgagtcagttgtttttccatgtgaataagtctgaggacctcttcaaactcaatcaagatcttgggtcagctcttcaccttgtaagagaatgttcaacagagatggcaagacttctggatacaattttacactctcctaataaggacttctatgctttgtatcctaccctccaagaagttatacttgctaatctaacggatttgcttttctttataaataattcattccctctaagaaacagagcaacattagaaattactaagagattagttggtgctatttcaagagcaagtgaagaaagtcacgtcctgaaacccctcttagaaatgtctgggactctggtcatgctgttgaatgacagtgctgacctgagagatcttgccacatcaatggactccattgtgaaacttcttaagctggtcaagaaagtttcggggaagatgtccacagtttttaaaactcattttatctccaataccaaggacagtgtgaaattctttgacactctgtattccatcatgcaacaaagtgttcaaaatcttgtgaaagaaatagctactttaaaaaaaatagatcatttcacatttgaaaagataaatgatttgttggtgccatttcttgacttggcctttgaaatgattggggtagaaccttatatatcatcaaactctgatattttcagtatgtcacctagcatactctcatatatgaaccaatctaaggacttttctgatattttggaagaaattgctgaatttttaacatctgtgaaaatgaacttggaagatatgaggagtcttgcggtagcatttaacaatgagactcaaacattttctatggattctgtcaacttacgggaagaaattctgggttgcttagttcctataaataacatcaccaaccaaatggacttcttataccctaatccaatttccactcatagtggccctcaagatataaaatgggaaataattcatgaagtgatcccttttttggataaaatattatcacaaaacagcacagaaataggatctttcttgaaaatggtgatctgtctcaccttagaagctctttggaaaaacttaaagaaagataattggaatgtttctaatgtgttgatgacatttactcagcatccaaataaccttttgaaaaccatagaaacagttttagaggcctccagtggaattaaaagtgactatgaaggtgatttgaataaaagtttatattttgacacacctttgagtcagaatataactcatcatcaacttgaaaaagcaatccataatgttttaagtagaatagctctctggaggaaaggacttctgtttaacaactctgaatggataacttccacaagaactttgtttcagccactttttgagattttcattaaagcaaccaccggaaagaatgtcacatcagaaaaagaagagagaaccaagaaagagatgattgactttccttatagtttcaaaccatttttctgtttggagaaatacctgggaggattatttgtattgactaaatactggcaacaaatcccactaacagatcaaagtgttgttgagatttgtgaagttttccagcagactgtgaagccctcagaagccatggagatgctgcagaaagtgaagatgatggtcgtacgtgtgctcaccatcgttgcagaaaacccttcctggaccaaggacattttgtgtgctactctgagttgcaagcaaaatgggataaggcatctcattttatctgctatacaaggggtcactttggcgcaggaccacttccaggaaattgaaaagatatggtcctcgccgaatcagctaaattgtgaaagtcttagcaagaatctttctagcaccttggagagcttcaagagcagcttggaaaatgccactggccaggactgcacaagccagccgaggctggagacggtgcagcagcacttgtacatgttggccaaaagcctcgaggaaacttggtcatcagggaatcccatcatgacttttctcagcaatttcacagtaactgaggatgtaaaaataaaagatttgatgaagaatatcaccaagttgactgaggagcttcgctcttccatccaaatctcgaatgagactatccatagcattctagaagcaaatatttcccactccaaggttctcttcagtgccctcaccgtagctctgtctggaaagtgtgatcaggaaatccttcatctcctgctgacatttcccaaaggggaaaaatcttggatcgcagcggaggaactctgtagcctgccagggtcaaaagtgtattctctgattgtgttgctgagtcgaaacttggatgtgcgagctttcatttacaagactctgatgccttctgaagcaaatggcttgctcaactccttgctggatatagtttccagcctcagcgccttgcttgccaaagcccagcacgtctttgagtatcttcctgagtttcttcacacatttaaaatcactgccttgctagaaaccctggactttcaacaggtttcacaaaatgtccaggccagaagttcagcttttggttctttccagtttgtgatgaagatggtttgcaaggaccaagcatcattccttagcgattctaatatgtttattaatttgcccagagttaaggaactcttggaagatgacaaagaaaaattcaacattcctgaagattcaacaccgttttgcttgaagctttatcaggaaattctacaattgccaaatggtgctttggtgtggaccttcctaaaacccatattgcatggaaaaatactatacacaccaaacactccagaaattaacaaggtcattcaaaaggctaattacaccttttatattgtggacaaactaaaaactttatcagaaacactgctggaaatgtccagccttttccagagaagtggaagtggccagatgttcaaccagctgcaggaggccctgagaaacaaatttgtaagaaactttgtagaaaaccagttgcacattgatgtagacaaacttactgaaaaactccagacatacggagggctgctggatgagatgtttaaccatgcaggcgctggacgcttccgtttcttgggcagcatcttggtcaatctctcttcctgcgtggcactgaaccgtttccaggctctgcagtctgtcgacatcctggagactaaagcacatgaactcttgcagcagaacagcttcttggccagtatcattttcagcaattccttattcgacaagaacttcagatcagagtctgtcaaactgccaccccatgtctcatacacaatccggaccaatgtgttatacagcgtgcgaacagatgtggtaaaaaacccttcttggaagttccaccctcagaatctaccagctgatgggttcaaatataactacgtctttgccccactgcaagacatgatcgaaagagccatcattttggtgcagactgggcaggaagccctggaaccagcagcacagactcaggcggccccttacccctgccataccagcgacctattcctgaacaacgttggtttcttttttccactgataatgatgctgacgtggatggtgtctgtggccagcatggtcagaaagttggtgtatgagcaggagatacagatagaagagtatatgcggatgatgggagtgcatccagtgatccatttcctggcctggttcctggagaacatggctgtgttgaccataagcagtgctactctggccatcgttctgaaaacaagtggcatctttgcacacagcaatacctttattgttttcctctttctcttggattttgggatgtcagtcgtcatgctgagctacctcttgagtgcatttttcagccaagctaatacagcggccctttgtaccagcctggtgtacatgatcagctttctgccctacatagttctattggttctacataaccaattaagttttgttaatcagacatttctgtgccttctttcgacaaccgcctttggacaaggggtattttttattacattcctggaaggacaagagacagggattcaatggaataatatgtaccaggctctggaacaagggggcatgacatttggctgggtttgctggatgattctttttgattcaagcctttattttttgtgtggatggtacttgagcaacttgattcctggaacatttggtttacggaaaccatggtatttcccctttactgcctcatattggaagagtgtgggtttcttggtggagaaaaggcaatactttctaagttctagtctgttcttcttcaatgagaactttgacaataaagggtcatcactgcaaaacagggaaggagagcttgaaggaagtgccccgggagtcaccctggtgtctgtgaccaaggaatatgagggccacaaggctgtggtccaagacctcagcctgaccttctacagagaccaaatcaccgccctgctggggacaaacggtgccgggaaaaccactatcatatccatgttgacggggctccaccctcccacttctggaaccatcatcatcaatggcaagaacctacagacagacctgtcgagggtcagaatggagcttggtgtgtgtccgcagcaggacatcctgttggacaacctcaccgtccgggaacatttgctgctctttgcttccataaaggcgcctcagtggaccaagaaggagctgcatcagcaagtcaatcaaactcttcaggatgtggacttaactcagcatcagcacaaacagacccgagctctgtctggaggcctgaagaggaagctctcccttggcattgctttcatgggcatgtcgaggaccgtggttctggatgagcccaccagtggggtggacccttgctcccggcatagcctgtgggacattctgctcaagtaccgagaaggtcgtacgatcatcttcacaacccaccacctggatgaagctgaagcgctgagtgaccgcgtggccgtcctccagcatgggaggctcaggtgctgcggtcctcccttctgcctgaaggaggcatatggccaggggctccgcctgacactcacgaggcagccttctgttctggaggcccatgatctgaaagacatggcttgtgttacatccctgataaagatctatattccacaagcatttctcaaagacagcagtggaagtgagctgacctacaccattccaaaggacacagacaaggcctgcttgaaagggctcttccaggccctggatgagaacctgcatcagctgcacctgacgggctatgggatctcagacaccaccttagaagaggtgtttttgatgcttttgcaagattccaacaagaaatctcacattgccctggggactgagtcagagctgcagaaccacaggcctacaggacatctgtctggctactgtggctccctagcacggcccgcaactgtgcagggcgtccagctgctccgcgcacaagtggccgcgatcctggcccggaggctccgccgcacgctgcgcgccgggaagagcaccctcgccgacctgctgctgccagtcctcttcgtggccttggccatgggcttgttcatggtgagacccctggccaccgagtaccctcccctcagactcacacctggacattaccagcgggccgagacctactttttcagcagcagtgggggcgacaacttggacctcacccgtgtgcttctgcggaagtttagagatcaagatttgccctgtgcagatttaaacccacgccagaagaattcttcatgctggcgcacagatcccttttctcacccagaattccaggattcatgtggctgcctgaagtgtccaaatagaagtgctagtgctccctacctgaccaaccacctgggccacacactgttgaatctctcaggcttcaatatggaggagtacttgctggcaccatctgaaaaaccaaggcttggaggttggtcttttggattaaaaatccccagtgaagctggaggtgcaaatggaaacatatcaaaacccccaactctggcaaaggtgtggtataatcagaagggttttcattccctaccttcctacttaaatcatctaaacaaccttattttgtggcagcacctaccccctactgtggactggagacaatacggaataacactctacagccacccatatggaggggccttgctgaacgaggacaagatcctggagagcatccgtcagtgtggagtggccctctgcatcgtgctgggattctccatcctgtctgcatccatcggcagctctgtggtgagggacagggtgattggagccaaaaggttgcagcacataagtggccttggctacaggatgtactggttcacaaacttcctatatgacatgctcttttacttggtttccgtctgcctgtgtgttgccgttattgtcgccttccagttaacagcttttactttccgcaagaacttggcagccacggccctcctgctgtcacttttcggatatgcaactcttccatggatgtacctgatgtccagaatcttttccagttcggacgtggctttcatttcctatgtctcactaaacttcatctttggcctttgtaccatgctcataaccattatgccccggttgctagccatcatctccaaagctaagaatttacagaatatctatgatgtcctcaagtgggtctttactatttttcctcaattctgtcttggtcaaggactggtagaactctgctataatcagatcaaatatgacctgacccacaacttcggcattgattcctatgtgagtccctttgagatgaactttctgggctggatcttcgtgcaactggcctcgcagggcacagtacttctcctcttgagggttctgctacactgggaccttctgcgatggccaaggggtcattctactctccaaggcacagtcaaatcttctaaggatacagatgttgaaaaagaggaaaagagagtgtttgaaggaaggaccaatggagacattcttgtgttatacaaccttagtaaacattatcgacgctttttccagaatattattgctgtgcaagatattagtttgggcataccaaaaggagagtgctttggacttctaggggtgaatggagctgggaagagcacgactttcaaaatgctgaatggtgaagtttctctaacttcaggacatgctatcatcaggactcccatgggagacgccgtggacctgtcttctgctggcacggcaggcgtgctcattggctactgtccccagcaggatgccctggacgagcttctgactggttgggaacatctctattattactgtagcttacgcgggattccaaggcagtgcatccctgaggttgctggagacctcatcaggcgcttacacctcgaagcccacgcggacaaacctgtggccacctacagtgggggaaccaagcggaaactctctacagccctggccctggtggggaaacctgacattcttttattggatgagcccagctctgggatggatccctgctctaagcggtacctgtggcaaacaataatgaaggaggttcgggaaggctgtgctgcggtgctgacctcccacagcatggaggagtgtgaggctctttgcacaagactggccataatggttaacggcagcttcaaatgtcttggttctcctcagcacatcaaaaatagtaggaagttaaataagacaaactgaagtcaactggtgaccaagcacatggagaaggcagcatgggtgcaggagacgctgaagaacacgataatagaactttacagccggctgatctgagcttgagaaaaggaggtttggtgatggttatacagtcaaagtttggctctgtaaggaagcaaatcaacattgcactgtttctgaccacttgaagctttattt

SEQ ID NO: 185 - DNA, 16068 bp, Homo sapiens
atataagcaccatccttacaggctggcttcctgactgagagcagggagcagcaggcatggggcatgccgggtgccagttcaaagccctgctgtggaagaattggctctgcagactcaggaacccggtccttttccttgctgaattcttctggccttgtatcctgtttgtaattctgacagttcttcgttttcaagaacctcccagatacagagacatttgttatttgcagccccgagatctacccagctgtggtgttatcccctttgttcaaagccttctttgtaacactggatcaaggtgtaggaacttcagctatgaagggtcaatggagcatcattttcgtttgtctaggttccaaactgcagctgaccccaagaaagtcaacaacctggcctttttaaaagagatacaagacctggcagaggaaattcatggaatgatggacaaggcaaaaaacttaaaaagactttgggtagaacgatccaacactccagattcttcttatggttccagtttttttacaatggatctcaataagaccgaggaggtaatattgaaactggaaagcctccatcagcagcctcatatctgggattttctacttttactgccgagactacacacaagccatgatcatgtggaagatggcatggatgttgcagtgaaccttctccagaccattttgaattccttaatatccctagaagatttagattggcttccactcaaccaaactttttcccaggtttctgaacttgtactgaatgtgaccatttcgacactgacatttctgcagcaacatggagtagcagtcaccgagccagtttaccacctgtccatgcagaatatagtgtgggatccacagaaagtccagtatgatctcaaatcccagtttggctttgatgatcttcacacggaacagatcctgaactcttcagctgaactgaaggagattcccacagacacttccttggagaagatggtgtgttcagtcttgtctagcacatcagaggatgaagctgagaaatggggccacgttggaggctgccaccctaagtggtcagaagccaaaaactatcttgtccatgcagtcagctggctgcgagtctaccaacaggtgtttgttcagtggcaacagggtagcctgcttcagaagacactcacaggcatgggccatagtctggaggctctcaggaatcagtttgaagaagagagcaagccctggaaggtggtggaagctctgcacactgcactgctcctgctgaatgacagcttgtcagcagatggcccaaaagataatcatacatttccaaagatattacagcatctgtggaaattgcaaagcttgctgcaaaacctgccccagtggccggcactgaagagatttcttcagcttgatggagctctcagaaatgcgatagctcagaatttacattttgtccaagaagtcctcatttgcctggagacatcagctaatgattttaaatggtttgaacttaaccaattgaaactggaaaaggatgtgttcttttgggagctgaaacagatgttggcgaagaatgctgtctgcccgaatggtcgtttctctgagaaggaggtctttttgccgcctggaaactccagcatatggggtggtctccagggactgttgtgctattgtaactcctctgagacgagtgttttaaacaagctacttggttcagtagaggatgctgatcgtattttgcaagaggtcattacttggcacaaaaatatgtcagttttaatacctgaagaatatttggactggcaggaacttgagatgcagctgtcagaagcaagcctttcctgtactcggctcttcctgctgctgggagctgatccctctcctgagaatgatgtcttttctagtgactgtaagcaccagcttgtctccacagtgatatttcatacacttgaaaaaacacaatttttcctggaacaagcatattattggaaagccttcaaaaagtttatcaggaagacttgcgaagtggcccaatatgtaaatatgcaagagagtttccagaacagactattggcttttcctgaggaatctccttgttttgaagaaaacatggattggaaaatgatcagtgataattattttcaatttttgaataacttactcaagtctccaacagcttccatatccagggctttaaatttcacaaagcaccttctaatgatggaaaagaagttgcacacccttgaggatgaacaaatgaactttcttttatcatttgtggaattttttgagaaattattgttgcctaatctttttgactcctccattgttcccagtttccacagcctcccatctctcacagaggatattctgaatataagttctctgtggacaaatcatttaaaaagtttaaagagagacccatctgccactgatgctcagaaactcttggaatttggcaacgaagtgatttggaaaatgcagactctcggaagtcactggataaggaaggaaccaaaaaatcttttgagattcatagaattaatactttttgaaattaatcccaaattactagaattatgggcctatggcatttcaaaaggaaaaagagctaaattggaaaacttctttacacttttaaatttttctgttccagaaaatgagattctgagtacaagttttaacttttcccagttgttccattcagattggcctaaatcaccagctatgaacatagattttgtacgtttaagtgaggctataataactagtctccatgaatttggatttttggagcaggaacagatctcagaagctctgaacacagtctacgctatcaggaatgcatctgatcttttctcagccctttctgaaccacaaaaacaagaagttgataaaattttgactcacatacacctaaatgtcttccaggacaaggattcagctttacttctgcaaatttattcttcattttaccgatatatttatgaattattgaatattcagagtagaggctcttcgttgactttccttacacaaatctcaaaacacattttggatatcataaaacaatttaatttccaaaacatcagtaaagcatttgcatttttatttaagacagcagaggttcttgggggaatttctaatgtatcttactgtcagcaattgctttcaatttttaactttttggagcttcaggcccaatccttcatgtctacagagggccaagaactggaagtgatccacactactttgacaggcctcaaacagctgctcataattgatgaagattttcgtatttctttatttcaatatatgagccaattcttcaacagttcagtagaagacctattggataataaatgcttgatttcggacaataaacacatttcttccgtaaattattcaacaagtgaggagtcttcatttgtttttccattggcacaaattttttcaaacctctcagcaaatgtcagtgtgttcaacaagtttatgtccattcactgtaccgtttcatggcttcaaatgtggactgaaatctgggaaaccatatctcaattatttaagtttgacatgaatgttttcacatctcttcatcatggtttcactcagcttttggatgaattggaagatgatgtgaaagtctctaaaagctgccagggtatacttcccacccataatgttgctagactcatattaaatttgtttaaaaatgtaactcaagccaatgacttccataattgggaggacttcctggatctcagggattttttggtagctttaggtaatgcattagtttcagtaaaaaaacttaacttggagcaagtggagaaatcccttttcaccatggaagctgccctgcatcagttgaagacatttccattcaacgaaagtacaagcagagagtttttaaattctctgcttgaagttttcattgagtttagcagtacctcagaatatatagtcagaaatctagattcaataaatgactttctttcaaataatctcacaaattatggagaaaaatttgaaaatatcatcactgagctaagagaagcaatagtatttcttagaaatgtatcacatgatcgagatttgttttcctgtgctgatattttccaaaatgttactgagtgtattttagaagatggctttttatatgtaaatacctcacagaggatgttacgtattctagacacgttaaattccacattttcctctgagaacacaattagcagtctgaaaggatgcattgtatggttagatgtcataaaccatttgtatttgttgtctaactccagtttttcacaaggtcatcttcaaaatattttggggaatttcagagatatagaaaacaaaatgaactctatattaaaaattgtaacttgggtgttaaatataaaaaaacctctttgttcatcaaatggctcacatataaattgtgtcaatatttacttgaaagatgtaactgactttctaaatattgtacttactacagtctttgaaaaagagaagaaacctaaatttgagattttattagctcttttaaatgattccacaaagcaagtaaggatgagtatcaacaacttaacaacagactttgattttgcatctcagtccaattggagatattttactgaattaattctaagaccaatagaaatgtcagatgaaattcctaatcagtttcaaaatatttggcttcatttaataacactggggaaggaatttcagaagcttgtaaaaggtatttactttaacatcctggaaaataattcctcttctaaaactgaaaacttgttaaacatatttgccaccagtccaaaagaaaaggatgtaaacagtgtaggcaattccatttatcacttagctagttaccttgccttcagcttatctcatgacctccaaaattcaccaaaaataataatttcacctgaaataatgaaagctacaggtcttggtattcaactgataagggatgtgttcaactccttaatgcctgtagttcatcacactagtccacaaaatgcaggttatatgcaagctttgaagaaggtaacttctgtcatgcgtacccttaagaaggcagacatagaccttttagtggatcagcttgaacaagttagtgtaaacctaatggatttctttaagaatatcagtagtgtgggaactggcaatttagtggtcaatttgcttgttggcttgatggaaaaatttgcagacagctcacattcttggaatgttaatcatctgctgcagctctcacgcctgtttcctaaagatgttgtggatgctgtgatagatgtgtactatgtgcttcctcatgctgtaaggctcctgcagggagtacctggtaaaaacatcactgaaggcctcaaggatgtctacagcttcacactccttcatggcataaccatttcaaatatcaccaaggaagacttcgcaattgtgataaaaattcttttggatacaattgaattagtatcagataagccagatattatttcagaggctttagcttgttttcctgtggtttggtgctggaatcacacaaattctggatttcggcagaattcaaagatagacccctgcaatgtccatgggctcatgtcttcttccttttatggcaaagtggccagtatacttgatcatttccacctgtctccccaaggtgaagattcaccatgttcaaatgaaagctcccgaatggaaataactaggaaagtggtctgcataattcatgaattagtggactggaattctattcttctggagctctctgaagtcttccatgttaacatttctcttgtgaaaactgtgcagaaattttggcataagatattaccgtttgtcccaccttcaataaatcaaactagggatagcatctctgaactctgtcctagtggttccataaagcaagttgctttgcaaatcatagaaaaacttaaaaatgtcaactttacaaaagttacatcaggtgaaaatattcttgacaaactaagtagtttaaacaagatccttaacattaatgaagacacagagacatctgttcaaaatattatttcctcaaatttggaaaggacagtacaattgatttctgaagactggagcctagaaaaaagtacgcataatctactctctttattcatgatgctccagaatgcaaatgtcacaggtagcagtttagaagcattatcaagttttattgaaaaaagtgaaacaccttacaactttgaagaactatggcccaagtttcaacaaatcatgaaagacctaacccaagattttagaatcagacacctgctttctgaaatgaacaaaggaatcaaaagtataaattcaatggctcttcaaaagataactttgcagtttgcccatttcctggaaatcctggattcaccgtcattgaagacattagaaattattgaagattttctattggtcacaaaaaactggcttcaggaatatgcaaatgaggattactccagaatgatagaaacattattcattcctgtgaccaatgagagttcaactgaagatatagctttgttagccaaagctattgctactttttggggctctttaaaaaatatatctagagcaggcaattttgatgttgcctttcttacccatctgctaaatcaagaacagctgactaatttctcagttgttcagctgctttttgaaaacatcctaattaatttgatcaataacttagctgggaattctcaggaagcagcttggaacttaaatgatactgaccttcaaataatgaatttcattaaccttatcttgaaccatatgcagtcagaaactagtaggaaaacagttctctctctgagaagcatagtagatttcacagaacagtttttgaaaacattcttctccctttttctaaaggaagattctgagaacaaaatatctcttctgctgaaatatttccacaaagatgttattgcagagatgagttttgtcccaaaagataaaattctagaaattctgaaactggatcaatttcttaccctgatgatacaagacagattgatgaacattttttcaagtttaaaggagactatatatcacctaatgaaaagttcatttatattagacaatggagaattttattttgatactcatcaaggactgaagttcatgcaagatttatttaatgcccttctcagggaaacttcaatgaaaaataagactgaaaataatatagactttttcacagtggtgagtcagttgtttttccatgtgaataagtctgaggacctcttcaaactcaatcaagatcttgggtcagctcttcaccttgtaagagaatgttcaacagagatggcaagacttctggatacaattttacactctcctaataaggacttctatgctttgtatcctaccctccaagaagttatacttgctaatctaacggatttgcttttctttataaataattcattccctctaagaaacagagcaacattagaaattactaagagattagttggtgctatttcaagagcaagtgaagaaagtcacgtcctgaaacccctcttagaaatgtctgggactctggtcatgctgttgaatgacagtgctgacctgagagatcttgccacatcaatggactccattgtgaaacttcttaagctggtcaagaaagtttcggggaagatgtccacagtttttaaaactcattttatctccaataccaaggacagtgtgaaattctttgacactctgtattccatcatgcaacaaagtgttcaaaatcttgtgaaagaaatagctactttaaaaaaaatagatcatttcacatttgaaaagataaatgatttgttggtgccatttcttgacttggcctttgaaatgattggggtagaaccttatatatcatcaaactctgatattttcagtatgtcacctagcatactctcatatatgaaccaatctaaggacttttctgatattttggaagaaattgctgaatttttaacatctgtgaaaatgaacttggaagatatgaggagtcttgcggtagcatttaacaatgagactcaaacattttctatggattctgtcaacttacgggaagaaattctgggttgcttagttcctataaataacatcaccaaccaaatggacttcttataccctaatccaatttccactcatagtggccctcaagatataaaatgggaaataattcatgaagtgatcccttttttggataaaatattatcacaaaacagcacagaaataggatctttcttgaaaatggtgatctgtctcaccttagaagctctttggaaaaacttaaagaaagataattggaatgtttctaatgtgttgatgacatttactcagcatccaaataaccttttgaaaaccatagaaacagttttagaggcctccagtggaattaaaagtgactatgaaggtgatttgaataaaagtttatattttgacacacctttgagtcagaatataactcatcatcaacttgaaaaagcaatccataatgttttaagtagaatagctctctggaggaaaggacttctgtttaacaactctgaatggataacttccacaagaactttgtttcagccactttttgagattttcattaaagcaaccaccggaaagaatgtcacatcagaaaaagaagagagaaccaagaaagagatgattgactttccttatagtttcaaaccatttttctgtttggagaaatacctgggaggattatttgtattgactaaatactggcaacaaatcccactaacagatcaaagtgttgttgagatttgtgaagttttccagcagactgtgaagccctcagaagccatggagatgctgcagaaagtgaagatgatggtcgtacgtgtgctcaccatcgttgcagaaaacccttcctggaccaaggacattttgtgtgctactctgagttgcaagcaaaatgggataaggcatctcattttatctgctatacaaggggtcactttggcgcaggaccacttccaggaaattgaaaagatatggtcctcgccgaatcagctaaattgtgaaagtcttagcaagaatctttctagcaccttggagagcttcaagagcagcttggaaaatgccactggccaggactgcacaagccagccgaggctggagacggtgcagcagcacttgtacatgttggccaaaagcctcgaggaaacttggtcatcagggaatcccatcatgacttttctcagcaatttcacagtaactgaggatgtaaaaataaaagatttgatgaagaatatcaccaagttgactgaggagcttcgctcttccatccaaatctcgaatgagactatccatagcattctagaagcaaatatttcccactccaaggttctcttcagtgccctcaccgtagctctgtctggaaagtgtgatcaggaaatccttcatctcctgctgacatttcccaaaggggaaaaatcttggatcgcagcggaggaactctgtagcctgccagggtcaaaagtgtattctctgattgtgttgctgagtcgaaacttggatgtgcgagctttcatttacaagactctgatgccttctgaagcaaatggcttgctcaactccttgctggatatagtttccagcctcagcgccttgcttgccaaagcccagcacgtctttgagtatcttcctgagtttcttcacacatttaaaatcactgccttgctagaaaccctggactttcaacaggtttcacaaaatgtccaggccagaagttcagcttttggttctttccagtttgtgatgaagatggtttgcaaggaccaagcatcattccttagcgattctaatatgtttattaatttgcccagagttaaggaactcttggaagatgacaaagaaaaattcaacattcctgaagattcaacaccgttttgcttgaagctttatcaggaaattctacaattgccaaatggtgctttggtgtggaccttcctaaaacccatattgcatggaaaaatactatacacaccaaacactccagaaattaacaaggtcattcaaaaggctaattacaccttttatattgtggacaaactaaaaactttatcagaaacactgctggaaatgtccagccttttccagagaagtggaagtggccagatgttcaaccagctgcaggaggccctgagaaacaaatttgtaagaaactttgtagaaaaccagttgcacattgatgtagacaaacttactgaaaaactccagacatacggagggctgctggatgagatgtttaaccatgcaggcgctggacgcttccgtttcttgggcagcatcttggtcaatctctcttcctgcgtggcactgaaccgtttccaggctctgcagtctgtcgacatcctggagactaaagcacatgaactcttgcagcagaacagcttcttggccagtatcattttcagcaattccttattcgacaagaacttcagatcagagtctgtcaaactgccaccccatgtctcatacacaatccggaccaatgtgttatacagcgtgcgaacagatgtggtaaaaaacccttcttggaagttccaccctcagaatctaccagctgatgggttcaaatataactacgtctttgccccactgcaagacatgatcgaaagagccatcattttggtgcagactgggcaggaagccctggaaccagcagcacagactcaggcggccccttacccctgccataccagcgacctattcctgaacaacgttggtttcttttttccactgataatgatgctgacgtggatggtgtctgtggccagcatggtcagaaagttggtgtatgagcaggagatacagatagaagagtatatgcggatgatgggagtgcatccagtgatccatttcctggcctggttcctggagaacatggctgtgttgaccataagcagtgctactctggccatcgttctgaaaacaagtggcatctttgcacacagcaatacctttattgttttcctctttctcttggattttgggatgtcagtcgtcatgctgagctacctcttgagtgcatttttcagccaagctaatacagcggccctttgtaccagcctggtgtacatgatcagctttctgccctacatagttctattggttctacataaccaattaagttttgttaatcagacatttctgtgccttctttcgacaaccgcctttggacaaggggtattttttattacattcctggaaggacaagagacagggattcaatggaataatatgtaccaggctctggaacaagggggcatgacatttggctgggtttgctggatgattctttttgattcaagcctttattttttgtgtggatggtacttgagcaacttgattcctggaacatttggtttacggaaaccatggtatttcccctttactgcctcatattggaagagtgtgggtttcttggtggagaaaaggcaatactttctaagttctagtctgttcttcttcaatgagaactttgacaataaagggtcatcactgcaaaacagggaaggagagcttgaaggaagtgccccgggagtcaccctggtgtctgtgaccaaggaatatgagggccacaaggctgtggtccaagacctcagcctgaccttctacagagaccaaatcaccgccctgctggggacaaacggtgccgggaaaaccactatcatatccatgttgacggggctccaccctcccacttctggaaccatcatcatcaatggcaagaacctacagacagacctgtcgagggtcagaatggagcttggtgtgtgtccgcagcaggacatcctgttggacaacctcaccgtccgggaacatttgctgctctttgcttccataaaggcgcctcagtggaccaagaaggagctgcatcagcaagtcaatcaaactcttcaggatgtggacttaactcagcatcagcacaaacagacccgagctctgtctggaggcctgaagaggaagctctcccttggcattgctttcatgggcatgtcgaggaccgtggttctggatgagcccaccagtggggtggacccttgctcccggcatagcctgtgggacattctgctcaagtaccgagaaggtcgtacgatcatcttcacaacccaccacctggatgaagctgaagcgctgagtgaccgcgtggccgtcctccagcatgggaggctcaggtgctgcggtcctcccttctgcctgaaggaggcatatggccaggggctccgcctgacactcacgaggcagccttctgttctggaggcccatgatctgaaagacatggcttgtgttacatccctgataaagatctatattccacaagcatttctcaaagacagcagtggaagtgagctgacctacaccattccaaaggacacagacaaggcctgcttgaaagggctcttccaggccctggatgagaacctgcatcagctgcacctgacgggctatgggatctcagacaccaccttagaagaggtgtttttgatgcttttgcaagattccaacaagaaatctcacattgccctggggactgagtcagagctgcagaaccacaggcctacaggacatctgtctggctactgtggctccctagcacggcccgcaactgtgcagggcgtccagctgctccgcgcacaagtggccgcgatcctggcccggaggctccgccgcacgctgcgcgccgggaagagcaccctcgccgacctgctgctgccagtcctcttcgtggccttggccatgggcttgttcatggtgagacccctggccaccgagtaccctcccctcagactcacacctggacattaccagcgggccgagacctactttttcagcagcagtgggggcgacaacttggacctcacccgtgtgcttctgcggaagtttagagatcaagatttgccctgtgcagatttaaacccacgccagaagaattcttcatgctggcgcacagatcccttttctcacccagaattccaggattcatgtggctgcctgaagtgtccaaatagaagtgctagtgctccctacctgaccaaccacctgggccacacactgttgaatctctcaggcttcaatatggaggagtacttgctggcaccatctgaaaaaccaaggcttggaggttggtcttttggattaaaaatccccagtgaagctggaggtgcaaatggaaacatatcaaaacccccaactctggcaaaggtgtggtataatcagaagggttttcattccctaccttcctacttaaatcatctaaacaaccttattttgtggcagcacctaccccctactgtggactggagacaatacggaataacactctacagccacccatatggaggggccttgctgaacgaggacaagatcctggagagcatccgtcagtgtggagtggccctctgcatcgtgctgggattctccatcctgtctgcatccatcggcagctctgtggtgagggacagggtgattggagccaaaaggttgcagcacataagtggccttggctacaggatgtactggttcacaaacttcctatatgacatgctcttttacttggtttccgtctgcctgtgtgttgccgttattgtcgccttccagttaacagcttttactttccgcaagaacttggcagccacggccctcctgctgtcacttttcggatatgcaactcttccatggatgtacctgatgtccagaatcttttccagttcggacgtggctttcatttcctatgtctcactaaacttcatctttggcctttgtaccatgctcataaccattatgccccggttgctagccatcatctccaaagctaagaatttacagaatatctatgatgtcctcaagtgggtctttactatttttcctcaattctgtcttggtcaaggactggtagaactctgctataatcagatcaaatatgacctgacccacaacttcggcattgattcctatgtgagtccctttgagatgaactttctgggctggatcttcgtgcaactggcctcgcagggcacagtacttctcctcttgagggttctgctacactgggaccttctgcgatggccaaggggtcattctactctccaaggcacagtcaaatcttctaaggatacagatgttgaaaaagaggaaaagagagtgtttgaaggaaggaccaatggagacattcttgtgttatacaaccttagtaaacattatcgacgctttttccagaatattattgctgtgcaagatattagtttgggcataccaaaaggagagtgctttggacttctaggggtgaatggagctgggaagagcacgactttcaaaatgctgaatggtgaagtttctctaacttcaggacatgctatcatcaggactcccatgggagacgccgtggacctgtcttctgctggcacggcaggcgtgctcattggctactgtccccagcaggatgccctggacgagcttctgactggttgggaacatctctattattactgtagcttacgcgggattccaaggcagtgcatccctgaggttgctggagacctcatcaggcgcttacacctcgaagcccacgcggacaaacctgtggccacctacagtgggggaaccaagcggaaactctctacagccctggccctggtggggaaacctgacattcttttattggatgagcccagctctgggatggatccctgctctaagcggtacctgtggcaaacaataatgaaggaggttcgggaaggctgtgctgcggtgctgacctcccacagcatggaggagtgtgaggctctttgcacaagactggccataatggttaacggcagcttcaaatgtcttggttctcctcagcacatcaaaaatagtaggaagttaaataagacaaactgaagtcaactggtgaccaagcacatggagaaggcagcatgggtgcaggagacgctgaagaacacgataatagaactttacagccggctgatctgagcttgagaaaaggagagctgatggctagagatggctagagatgaagcagccatcttgagccacgaggaaatcttagcaatggagacctgtgaagcggagcaataacacagaatgagccaaatgaatgctttttctactctggctgcctgacttcagactttaaacattaacatccttactatttggggctttctgtcactgtacatgaatctgaacagactaatattccctgtgacatattaaatatagcattaatttatgtacttagaggttattgtctatctctgcccagtagcatgtaaactttctgagggtaaaaccttttcttctgtttacttctgtatccttaccatttgaaatagtgccaggtacataaatgtgctcaacgtatttgttgaacaaatgaatgaatgtattaataatgaatgtaaaattcctagtacatggcagctttttgcttaacgggaattcctttcagaatgctgcaactagactgtaaaagacgaatcagatgaggccactcaagcattcagcttctgcctagcttaatgaacaacaaccactaacaagaacaataactgacccctttgatggagacttttactctgatgccatttatctttagacagggtgaagcctgctttctctcaaaacagtctgcattattcatgactagtttgctgcttttcgaaactggactctgtctgcctttggcatctccactaacagaaactatcaggtgtacgattcagtcctaattgctgccatggccttggcaatattgtgctgtcaccttctctgctggacagccagacttagtgctggtgtacaccggcttgccaagaattaatgtgcattgcagacagcaaaaatatgccattccagaatccaactgtacactatgggattatgatttcctattgtaaatatagcctaggcacaagaaaacatagcctaaccaaggaaatggatttctttattccaggtttaaaatgtatcaggattgggatttgggagaagcttttcttactctgagttcaaactatgagcataa

SEQ ID NO: 186 - DNA, 15113 bp, Homo sapiens
atataagcaccatccttacaggctggcttcctgactgagagcagggagcagcaggcatggggcatgccgggtgccagttcaaagccctgctgtggaagaattggctctgcagactcaggaacccggtccttttccttgctgaattcttctggccttgtatcctgtttgtaattctgacagttcttcgttttcaagaacctcccagatacagagacatttgttatttgcagccccgagatctacccagctgtggtgttatcccctttgttcaaagccttctttgtaacactggatcaaggtgtaggaacttcagctatgaagggtcaatggagcatcattttcgtttgtctaggttccaaactgcagctgaccccaagaaagtcaacaacctggcctttttaaaagagatacaagacctggcagaggaaattcatggaatgatggacaaggcaaaaaacttaaaaagactttgggtagaacgatccaacactccagattcttcttatggttccagtttttttacaatggatctcaataagaccgaggaggtaatattgaaactggaaagcctccatcagcagcctcatatctgggattttctacttttactgccgagactacacacaagccatgatcatgtggaagatggcatggatgttgcagtgaaccttctccagaccattttgaattccttaatatccctagaagatttagattggcttccactcaaccaaactttttcccaggtttctgaacttgtactgaatgtgaccatttcgacactgacatttctgcagcaacatggagtagcagtcaccgagccagtttaccacctgtccatgcagaatatagtgtgggatccacagaaagtccagtatgatctcaaatcccagtttggctttgatgatcttcacacggaacagatcctgaactcttcagctgaactgaaggagattcccacagacacttccttggagaagatggtgtgttcagtcttgtctagcacatcagaggatgaagctgagaaatggggccacgttggaggctgccaccctaagtggtcagaagccaaaaactatcttgtccatgcagtcagctggctgcgagtctaccaacaggtgtttgttcagtggcaacagggtagcctgcttcagaagacactcacaggcatgggccatagtctggaggctctcaggaatcagtttgaagaagagagcaagccctggaaggtggtggaagctctgcacactgcactgctcctgctgaatgacagcttgtcagcagatggcccaaaagataatcatacatttccaaagatattacagcatctgtggaaattgcaaagcttgctgcaaaacctgccccagtggccggcactgaagagatttcttcagcttgatggagctctcagaaatgcgatagctcagaatttacattttgtccaagaagtcctcatttgcctggagacatcagctaatgattttaaatggtttgaacttaaccaattgaaactggaaaaggatgtgttcttttgggagctgaaacagatgttggcgaagaatgctgtctgcccgaatggtcgtttctctgagaaggaggtctttttgccgcctggaaactccagcatatggggtggtctccagggactgttgtgctattgtaactcctctgagacgagtgttttaaacaagctacttggttcagtagaggatgctgatcgtattttgcaagaggtcattacttggcacaaaaatatgtcagttttaatacctgaagaatatttggactggcaggaacttgagatgcagctgtcagaagcaagcctttcctgtactcggctcttcctgctgctgggagctgatccctctcctgagaatgatgtcttttctagtgactgtaagcaccagcttgtctccacagtgatatttcatacacttgaaaaaacacaatttttcctggaacaagcatattattggaaagccttcaaaaagtttatcaggaagacttgcgaagtggcccaatatgtaaatatgcaagagagtttccagaacagactattggcttttcctgaggaatctccttgttttgaagaaaacatggattggaaaatgatcagtgataattattttcaatttttgaataacttactcaagtctccaacagcttccatatccagggctttaaatttcacaaagcaccttctaatgatggaaaagaagttgcacacccttgaggatgaacaaatgaactttcttttatcatttgtggaattttttgagaaattattgttgcctaatctttttgactcctccattgttcccagtttccacagcctcccatctctcacagaggatattctgaatataagttctctgtggacaaatcatttaaaaagtttaaagagagacccatctgccactgatgctcagaaactcttggaatttggcaacgaagtgatttggaaaatgcagactctcggaagtcactggataaggaaggaaccaaaaaatcttttgagattcatagaattaatactttttgaaattaatcccaaattactagaattatgggcctatggcatttcaaaaggaaaaagagctaaattggaaaacttctttacacttttaaatttttctgttccagaaaatgagattctgagtacaagttttaacttttcccagttgttccattcagattggcctaaatcaccagctatgaacatagattttgtacgtttaagtgaggctataataactagtctccatgaatttggatttttggagcaggaacagatctcagaagctctgaacacagtctacgctatcaggaatgcatctgatcttttctcagccctttctgaaccacaaaaacaagaagttgataaaattttgactcacatacacctaaatgtcttccaggacaaggattcagctttacttctgcaaatttattcttcattttaccgatatatttatgaattattgaatattcagagtagaggctcttcgttgactttccttacacaaatctcaaaacacattttggatatcataaaacaatttaatttccaaaacatcagtaaagcatttgcatttttatttaagacagcagaggttcttgggggaatttctaatgtatcttactgtcagcaattgctttcaatttttaactttttggagcttcaggcccaatccttcatgtctacagagggccaagaactggaagtgatccacactactttgacaggcctcaaacagctgctcataattgatgaagattttcgtatttctttatttcaatatatgagccaattcttcaacagttcagtagaagacctattggataataaatgcttgatttcggacaataaacacatttcttccgtaaattattcaacaagtgaggagtcttcatttgtttttccattggcacaaattttttcaaacctctcagcaaatgtcagtgtgttcaacaagtttatgtccattcactgtaccgtttcatggcttcaaatgtggactgaaatctgggaaaccatatctcaattatttaagtttgacatgaatgttttcacatctcttcatcatggtttcactcagcttttggatgaattggaagatgatgtgaaagtctctaaaagctgccagggtatacttcccacccataatgttgctagactcatattaaatttgtttaaaaatgtaactcaagccaatgacttccataattgggaggacttcctggatctcagggattttttggtagctttaggtaatgcattagtttcagtaaaaaaacttaacttggagcaagtggagaaatcccttttcaccatggaagctgccctgcatcagttgaagacatttccattcaacgaaagtacaagcagagagtttttaaattctctgcttgaagttttcattgagtttagcagtacctcagaatatatagtcagaaatctagattcaataaatgactttctttcaaataatctcacaaattatggagaaaaatttgaaaatatcatcactgagctaagagaagcaatagtatttcttagaaatgtatcacatgatcgagatttgttttcctgtgctgatattttccaaaatgttactgagtgtattttagaagatggctttttatatgtaaatacctcacagaggatgttacgtattctagacacgttaaattccacattttcctctgagaacacaattagcagtctgaaaggatgcattgtatggttagatgtcataaaccatttgtatttgttgtctaactccagtttttcacaaggtcatcttcaaaatattttggggaatttcagagatatagaaaacaaaatgaactctatattaaaaattgtaacttgggtgttaaatataaaaaaacctctttgttcatcaaatggctcacatataaattgtgtcaatatttacttgaaagatgtaactgactttctaaatattgtacttactacagtctttgaaaaagagaagaaacctaaatttgagattttattagctcttttaaatgattccacaaagcaagtaaggatgagtatcaacaacttaacaacagactttgattttgcatctcagtccaattggagatattttactgaattaattctaagaccaatagaaatgtcagatgaaattcctaatcagtttcaaaatatttggcttcatttaataacactggggaaggaatttcagaagcttgtaaaaggtatttactttaacatcctggaaaataattcctcttctaaaactgaaaacttgttaaacatatttgccaccagtccaaaagaaaaggatgtaaacagtgtaggcaattccatttatcacttagctagttaccttgccttcagcttatctcatgacctccaaaattcaccaaaaataataatttcacctgaaataatgaaagctacaggtcttggtattcaactgataagggatgtgttcaactccttaatgcctgtagttcatcacactagtccacaaaatgcaggttatatgcaagctttgaagaaggtaacttctgtcatgcgtacccttaagaaggcagacatagaccttttagtggatcagcttgaacaagttagtgtaaacctaatggatttctttaagaatatcagtagtgtgggaactggcaatttagtggtcaatttgcttgttggcttgatggaaaaatttgcagacagctcacattcttggaatgttaatcatctgctgcagctctcacgcctgtttcctaaagatgttgtggatgctgtgatagatgtgtactatgtgcttcctcatgctgtaaggctcctgcagggagtacctggtaaaaacatcactgaaggcctcaaggatgtctacagcttcacactccttcatggcataaccatttcaaatatcaccaaggaagacttcgcaattgtgataaaaattcttttggatacaattgaattagtatcagataagccagatattatttcagaggctttagcttgttttcctgtggtttggtgctggaatcacacaaattctggatttcggcagaattcaaagatagacccctgcaatgtccatgggctcatgtcttcttccttttatggcaaagtggccagtatacttgatcatttccacctgtctccccaaggtgaagattcaccatgttcaaatgaaagctcccgaatggaaataactaggaaagtggtctgcataattcatgaattagtggactggaattctattcttctggagctctctgaagtcttccatgttaacatttctcttgtgaaaactgtgcagaaattttggcataagatattaccgtttgtcccaccttcaataaatcaaactagggatagcatctctgaactctgtcctagtggttccataaagcaagttgctttgcaaatcatagaaaaacttaaaaatgtcaactttacaaaagttacatcaggtgaaaatattcttgacaaactaagtagtttaaacaagatccttaacattaatgaagacacagagacatctgttcaaaatattatttcctcaaatttggaaaggacagtacaattgatttctgaagactggagcctagaaaaaagtacgcataatctactctctttattcatgatgctccagaatgcaaatgtcacaggtagcagtttagaagcattatcaagttttattgaaaaaagtgaaacaccttacaactttgaagaactatggcccaagtttcaacaaatcatgaaagacctaacccaagattttagaatcagacacctgctttctgaaatgaacaaaggaatcaaaagtataaattcaatggctcttcaaaagataactttgcagtttgcccatttcctggaaatcctggattcaccgtcattgaagacattagaaattattgaagattttctattggtcacaaaaaactggcttcaggaatatgcaaatgaggattactccagaatgatagaaacattattcattcctgtgaccaatgagagttcaactgaagatatagctttgttagccaaagctattgctactttttggggctctttaaaaaatatatctagagcaggcaattttgatgttgcctttcttacccatctgctaaatcaagaacagctgactaatttctcagttgttcagctgctttttgaaaacatcctaattaatttgatcaataacttagctgggaattctcaggaagcagcttggaacttaaatgatactgaccttcaaataatgaatttcattaaccttatcttgaaccatatgcagtcagaaactagtaggaaaacagttctctctctgagaagcatagtagatttcacagaacagtttttgaaaacattcttctccctttttctaaaggaagattctgagaacaaaatatctcttctgctgaaatatttccacaaagatgttattgcagagatgagttttgtcccaaaagataaaattctagaaattctgaaactggatcaatttcttaccctgatgatacaagacagattgatgaacattttttcaagtttaaaggagactatatatcacctaatgaaaagttcatttatattagacaatggagaattttattttgatactcatcaaggactgaagttcatgcaagatttatttaatgcccttctcagggaaacttcaatgaaaaataagactgaaaataatatagactttttcacagtggtgagtcagttgtttttccatgtgaataagtctgaggacctcttcaaactcaatcaagatcttgggtcagctcttcaccttgtaagagaatgttcaacagagatggcaagacttctggatacaattttacactctcctaataaggacttctatgctttgtatcctaccctccaagaagttatacttgctaatctaacggatttgcttttctttataaataattcattccctctaagaaacagagcaacattagaaattactaagagattagttggtgctatttcaagagcaagtgaagaaagtcacgtcctgaaacccctcttagaaatgtctgggactctggtcatgctgttgaatgacagtgctgacctgagagatcttgccacatcaatggactccattgtgaaacttcttaagctggtcaagaaagtttcggggaagatgtccacagtttttaaaactcattttatctccaataccaaggacagtgtgaaattctttgacactctgtattccatcatgcaacaaagtgttcaaaatcttgtgaaagaaatagctactttaaaaaaaatagatcatttcacatttgaaaagataaatgatttgttggtgccatttcttgacttggcctttgaaatgattggggtagaaccttatatatcatcaaactctgatattttcagtatgtcacctagcatactctcatatatgaaccaatctaaggacttttctgatattttggaagaaattgctgaatttttaacatctgtgaaaatgaacttggaagatatgaggagtcttgcggtagcatttaacaatgagactcaaacattttctatggattctgtcaacttacgggaagaaattctgggttgcttagttcctataaataacatcaccaaccaaatggacttcttataccctaatccaatttccactcatagtggccctcaagatataaaatgggaaataattcatgaagtgatcccttttttggataaaatattatcacaaaacagcacagaaataggatctttcttgaaaatggtgatctgtctcaccttagaagctctttggaaaaacttaaagaaagataattggaatgtttctaatgtgttgatgacatttactcagcatccaaataaccttttgaaaaccatagaaacagttttagaggcctccagtggaattaaaagtgactatgaaggtgatttgaataaaagtttatattttgacacacctttgagtcagaatataactcatcatcaacttgaaaaagcaatccataatgttttaagtagaatagctctctggaggaaaggacttctgtttaacaactctgaatggataacttccacaagaactttgtttcagccactttttgagattttcattaaagcaaccaccggaaagaatgtcacatcagaaaaagaagagagaaccaagaaagagatgattgactttccttatagtttcaaaccatttttctgtttggagaaatacctgggaggattatttgtattgactaaatactggcaacaaatcccactaacagatcaaagtgttgttgagatttgtgaagttttccagcagactgtgaagccctcagaagccatggagatgctgcagaaagtgaagatgatggtcgtacgtgtgctcaccatcgttgcagaaaacccttcctggaccaaggacattttgtgtgctactctgagttgcaagcaaaatgggataaggcatctcattttatctgctatacaaggggtcactttggcgcaggaccacttccaggaaattgaaaagatatggtcctcgccgaatcagctaaattgtgaaagtcttagcaagaatctttctagcaccttggagagcttcaagagcagcttggaaaatgccactggccaggactgcacaagccagccgaggctggagacggtgcagcagcacttgtacatgttggccaaaagcctcgaggaaacttggtcatcagggaatcccatcatgacttttctcagcaatttcacagtaactgaggatgtaaaaataaaagatttgatgaagaatatcaccaagttgactgaggagcttcgctcttccatccaaatctcgaatgagactatccatagcattctagaagcaaatatttcccactccaaggttctcttcagtgccctcaccgtagctctgtctggaaagtgtgatcaggaaatccttcatctcctgctgacatttcccaaaggggaaaaatcttggatcgcagcggaggaactctgtagcctgccagggtcaaaagtgtattctctgattgtgttgctgagtcgaaacttggatgtgcgagctttcatttacaagactctgatgccttctgaagcaaatggcttgctcaactccttgctggatatagtttccagcctcagcgccttgcttgccaaagcccagcacgtctttgagtatcttcctgagtttcttcacacatttaaaatcactgccttgctagaaaccctggactttcaacaggtttcacaaaatgtccaggccagaagttcagcttttggttctttccagtttgtgatgaagatggtttgcaaggaccaagcatcattccttagcgattctaatatgtttattaatttgcccagagttaaggaactcttggaagatgacaaagaaaaattcaacattcctgaagattcaacaccgttttgcttgaagctttatcaggaaattctacaattgccaaatggtgctttggtgtggaccttcctaaaacccatattgcatggaaaaatactatacacaccaaacactccagaaattaacaaggtcattcaaaaggctaattacaccttttatattgtggacaaactaaaaactttatcagaaacactgctggaaatgtccagccttttccagagaagtggaagtggccagatgttcaaccagctgcaggaggccctgagaaacaaatttgtaagaaactttgtagaaaaccagttgcacattgatgtagacaaacttactgaaaaactccagacatacggagggctgctggatgagatgtttaaccatgcaggcgctggacgcttccgtttcttgggcagcatcttggtcaatctctcttcctgcgtggcactgaaccgtttccaggctctgcagtctgtcgacatcctggagactaaagcacatgaactcttgcagcagaacagcttcttggccagtatcattttcagcaattccttattcgacaagaacttcagatcagagtctgtcaaactgccaccccatgtctcatacacaatccggaccaatgtgttatacagcgtgcgaacagatgtggtaaaaaacccttcttggaagttccaccctcagaatctaccagctgatgggttcaaatataactacgtctttgccccactgcaagacatgatcgaaagagccatcattttggtgcagactgggcaggaagccctggaaccagcagcacagactcaggcggccccttacccctgccataccagcgacctattcctgaacaacgttggtttcttttttccactgataatgatgctgacgtggatggtgtctgtggccagcatggtcagaaagttggtgtatgagcaggagatacagatagaagagtatatgcggatgatgggagtgcatccagtgatccatttcctggcctggttcctggagaacatggctgtgttgaccataagcagtgctactctggccatcgttctgaaaacaagtggcatctttgcacacagcaatacctttattgttttcctctttctcttggattttgggatgtcagtcgtcatgctgagctacctcttgagtgcatttttcagccaagctaatacagcggccctttgtaccagcctggtgtacatgatcagctttctgccctacatagttctattggttctacataaccaattaagttttgttaatcagacatttctgtgccttctttcgacaaccgcctttggacaaggggtattttttattacattcctggaaggacaagagacagggattcaatggaataatatgtaccaggctctggaacaagggggcatgacatttggctgggtttgctggatgattctttttgattcaagcctttattttttgtgtggatggtacttgagcaacttgattcctggaacatttggtttacggaaaccatggtatttcccctttactgcctcatattggaagagtgtgggtttcttggtggagaaaaggcaatactttctaagttctagtctgttcttcttcaatgagaactttgacaataaagggtcatcactgcaaaacagggaaggagagcttgaaggaagtgccccgggagtcaccctggtgtctgtgaccaaggaatatgagggccacaaggctgtggtccaagacctcagcctgaccttctacagagaccaaatcaccgccctgctggggacaaacggtgccgggaaaaccactatcatatccatgttgacggggctccaccctcccacttctggaaccatcatcatcaatggcaagaacctacagacagacctgtcgagggtcagaatggagcttggtgtgtgtccgcagcaggacatcctgttggacaacctcaccgtccgggaacatttgctgctctttgcttccataaaggcgcctcagtggaccaagaaggagctgcatcagcaagtcaatcaaactcttcaggatgtggacttaactcagcatcagcacaaacagacccgagctctgtctggaggcctgaagaggaagctctcccttggcattgctttcatgggcatgtcgaggaccgtggttctggatgagcccaccagtggggtggacccttgctcccggcatagcctgtgggacattctgctcaagtaccgagaaggtcgtacgatcatcttcacaacccaccacctggatgaagctgaagcgctgagtgaccgcgtggccgtcctccagcatgggaggctcaggtgctgcggtcctcccttctgcctgaaggaggcatatggccaggggctccgcctgacactcacgaggcagccttctgttctggaggcccatgatctgaaagacatggcttgtgttacatccctgataaagatctatattccacaagcatttctcaaagacagcagtggaagtgagctgacctacaccattccaaaggacacagacaaggcctgcttgaaagggctcttccaggccctggatgagaacctgcatcagctgcacctgacgggctatgggatctcagacaccaccttagaagaggtgtttttgatgcttttgcaagattccaacaagaaatctcacattgccctggggactgagtcagagctgcagaaccacaggcctacaggacatctgtctggctactgtggctccctagcacggcccgcaactgtgcagggcgtccagctgctccgcgcacaagtggccgcgatcctggcccggaggctccgccgcacgctgcgcgccgggaagagcaccctcgccgacctgctgctgccagtcctcttcgtggccttggccatgggcttgttcatggtgagacccctggccaccgagtaccctcccctcagactcacacctggacattaccagcgggccgagacctactttttcagcagcagtgggggcgacaacttggacctcacccgtgtgcttctgcggaagtttagagatcaagatttgccctgtgcagatttaaacccacgccagaagaattcttcatgctggcgcacagatcccttttctcacccagaattccaggattcatgtggctgcctgaagtgtccaaatagaagtgctagtgctccctacctgaccaaccacctgggccacacactgttgaatctctcaggcttcaatatggaggagtacttgctggcaccatctgaaaaaccaaggcttggaggttggtcttttggattaaaaatccccagtgaagctggaggtgcaaatggaaacatatcaaaacccccaactctggcaaaggtgtggtataatcagaagggttttcattccctaccttcctacttaaatcatctaaacaaccttattttgtggcagcacctaccccctactgtggactggagacaatacggaataacactctacagccacccatatggaggggccttgctgaacgaggacaagatcctggagagcatccgtcagtgtggagtggccctctgcatcgtgctgggattctccatcctgtctgcatccatcggcagctctgtggtgagggacagggtgattggagccaaaaggttgcagcacataagtggccttggctacaggatgtactggttcacaaacttcctatatgacatgctcttttacttggtttccgtctgcctgtgtgttgccgttattgtcgccttccagttaacagcttttactttccgcaagaacttggcagccacggccctcctgctgtcacttttcggatatgcaactcttccatggatgtacctgatgtccagaatcttttccagttcggacgtggctttcatttcctatgtctcactaaacttcatctttggcctttgtaccatgctcataaccattatgccccggttgctagccatcatctccaaagctaagaatttacagaatatctatgatgtcctcaagtgggtctttactatttttcctcaattctgtcttggtcaaggactggtagaactctgctataatcagatcaaatatgacctgacccacaacttcggcattgattcctatgtgagtccctttgagatgaactttctgggctggatcttcgtgcaactggcctcgcagggcacagtacttctcctcttgagggttctgctacactgggaccttctgcgatggccaaggggtcattctactctccaaggcacagtcaaatcttctaaggatacagatgttgaaaaagaggaaaagagagtgtttgaaggaaggaccaatggagacattcttgtgttatacaaccttagtaaacattatcgacgctttttccagaatattattgctgtgcaagatattagtttgggcataccaaaaggagagtgctttggacttctaggggtgaatggagctgggaagagcacgactttcaaaatgctgaatggtgaagtttctctaacttcaggacatgctatcatcaggactcccatgggagacgccgtggacctgtcttctgctggcacggcaggcgtgctcattggctactgtccccagcaggatgccctggacgagcttctgactggttgggaacatctctattattactgtagcttacgcgggattccaaggcagtgcatccctgaggttgctggagacctcatcaggcgcttacacctcgaagcccacgcggacaaacctgtggccacctacagtgggggaaccaagcggaaactctctacagccctggccctggtggggaaacctgacattcttttattggatgagcccagctctgggatggatccctgctctaagcggtacctgtggcaaacaataatgaaggaggttcgggaaggctgtgctgcggtgctgacctcccacagcatggaggagtgtgaggctctttgcacaagactggccataatggttaacggcagcttcaaatgtcttggttctcctcagcacatcaaaaataggaagttaaataagacaaactgaagtcaactggtgaccaagcacatggagaaggcagcatgggtgcaggagacgctgaagaacacgataatagaactttacagccggctgatctgagcttgagaaaaggaggtttggtgatggttatacagtcaaagtttggctctgtaaggaagcaaatcaacattgcactgtttctgaccacttgaagctttattt

SEQ ID NO: 187 - DNA, 15935 bp, Homo sapiens
atataagcaccatccttacaggctggcttcctgactgagagcagggagcagcaggcatggggcatgccgggtgccagttcaaagccctgctgtggaagaattggctctgcagactcaggaacccggtccttttccttgctgaattcttctggccttgtatcctgtttgtaattctgacagttcttcgttttcaagaacctcccagatacagagacatttgttatttgcagccccgagatctacccagctgtggtgttatcccctttgttcaaagccttctttgtaacactggatcaaggtgtaggaacttcagctatgaagggtcaatggagcatcattttcgtttgtctaggttccaaactgcagctgaccccaagaaagtcaacaacctggcctttttaaaagagatacaagacctggcagaggaaattcatggaatgatggacaaggcaaaaaacttaaaaagactttgggtagaacgatccaacactccagattcttcttatggttccagtttttttacaatggatctcaataagaccgaggaggtaatattgaaactggaaagcctccatcagcagcctcatatctgggattttctacttttactgccgagactacacacaagccatgatcatgtggaagatggcatggatgttgcagtgaaccttctccagaccattttgaattccttaatatccctagaagatttagattggcttccactcaaccaaactttttcccaggtttctgaacttgtactgaatgtgaccatttcgacactgacatttctgcagcaacatggagtagcagtcaccgagccagtttaccacctgtccatgcagaatatagtgtgggatccacagaaagtccagtatgatctcaaatcccagtttggctttgatgatcttcacacggaacagatcctgaactcttcagctgaactgaaggagattcccacagacacttccttggagaagatggtgtgttcagtcttgtctagcacatcagaggatgaagctgagaaatggggccacgttggaggctgccaccctaagtggtcagaagccaaaaactatcttgtccatgcagtcagctggctgcgagtctaccaacaggtgtttgttcagtggcaacagggtagcctgcttcagaagacactcacaggcatgggccatagtctggaggctctcaggaatcagtttgaagaagagagcaagccctggaaggtggtggaagctctgcacactgcactgctcctgctgaatgacagcttgtcagcagatggcccaaaagataatcatacatttccaaagatattacagcatctgtggaaattgcaaagcttgctgcaaaacctgccccagtggccggcactgaagagatttcttcagcttgatggagctctcagaaatgcgatagctcagaatttacattttgtccaagaagtcctcatttgcctggagacatcagctaatgattttaaatggtttgaacttaaccaattgaaactggaaaaggatgtgttcttttgggagctgaaacagatgttggcgaagaatgctgtctgcccgaatggtcgtttctctgagaaggaggtctttttgccgcctggaaactccagcatatggggtggtctccagggactgttgtgctattgtaactcctctgagacgagtgttttaaacaagctacttggttcagtagaggatgctgatcgtattttgcaagaggtcattacttggcacaaaaatatgtcagttttaatacctgaagaatatttggactggcaggaacttgagatgcagctgtcagaagcaagcctttcctgtactcggctcttcctgctgctgggagctgatccctctcctgagaatgatgtcttttctagtgactgtaagcaccagcttgtctccacagtgatatttcatacacttgaaaaaacacaatttttcctggaacaagcatattattggaaagccttcaaaaagtttatcaggaagacttgcgaagtggcccaatatgtaaatatgcaagagagtttccagaacagactattggcttttcctgaggaatctccttgttttgaagaaaacatggattggaaaatgatcagtgataattattttcaatttttgaataacttactcaagtctccaacagcttccatatccagggctttaaatttcacaaagcaccttctaatgatggaaaagaagttgcacacccttgaggatgaacaaatgaactttcttttatcatttgtggaattttttgagaaattattgttgcctaatctttttgactcctccattgttcccagtttccacagcctcccatctctcacagaggatattctgaatataagttctctgtggacaaatcatttaaaaagtttaaagagagacccatctgccactgatgctcagaaactcttggaatttggcaacgaagtgatttggaaaatgcagactctcggaagtcactggataaggaaggaaccaaaaaatcttttgagattcatagaattaatactttttgaaattaatcccaaattactagaattatgggcctatggcatttcaaaaggaaaaagagctaaattggaaaacttctttacacttttaaatttttctgttccagaaaatgagattctgagtacaagttttaacttttcccagttgttccattcagattggcctaaatcaccagctatgaacatagattttgtacgtttaagtgaggctataataactagtctccatgaatttggatttttggagcaggaacagatctcagaagctctgaacacagtctacgctatcaggaatgcatctgatcttttctcagccctttctgaaccacaaaaacaagaagttgataaaattttgactcacatacacctaaatgtcttccaggacaaggattcagctttacttctgcaaatttattcttcattttaccgatatatttatgaattattgaatattcagagtagaggctcttcgttgactttccttacacaaatctcaaaacacattttggatatcataaaacaatttaatttccaaaacatcagtaaagcatttgcatttttatttaagacagcagaggttcttgggggaatttctaatgtatcttactgtcagcaattgctttcaatttttaactttttggagcttcaggcccaatccttcatgtctacagagggccaagaactggaagtgatccacactactttgacaggcctcaaacagctgctcataattgatgaagattttcgtatttctttatttcaatatatgagccaattcttcaacagttcagtagaagacctattggataataaatgcttgatttcggacaataaacacatttcttccgtaaattattcaacaagtgaggagtcttcatttgtttttccattggcacaaattttttcaaacctctcagcaaatgtcagtgtgttcaacaagtttatgtccattcactgtaccgtttcatggcttcaaatgtggactgaaatctgggaaaccatatctcaattatttaagtttgacatgaatgttttcacatctcttcatcatggtttcactcagcttttggatgaattggaagatgatgtgaaagtctctaaaagctgccagggtatacttcccacccataatgttgctagactcatattaaatttgtttaaaaatgtaactcaagccaatgacttccataattgggaggacttcctggatctcagggattttttggtagctttaggtaatgcattagtttcagtaaaaaaacttaacttggagcaagtggagaaatcccttttcaccatggaagctgccctgcatcagttgaagacatttccattcaacgaaagtacaagcagagagtttttaaattctctgcttgaagttttcattgagtttagcagtacctcagaatatatagtcagaaatctagattcaataaatgactttctttcaaataatctcacaaattatggagaaaaatttgaaaatatcatcactgagctaagagaagcaatagtatttcttagaaatgtatcacatgatcgagatttgttttcctgtgctgatattttccaaaatgttactgagtgtattttagaagatggctttttatatgtaaatacctcacagaggatgttacgtattctagacacgttaaattccacattttcctctgagaacacaattagcagtctgaaaggatgcattgtatggttagatgtcataaaccatttgtatttgttgtctaactccagtttttcacaaggtcatcttcaaaatattttggggaatttcagagatatagaaaacaaaatgaactctatattaaaaattgtaacttgggtgttaaatataaaaaaacctctttgttcatcaaatggctcacatataaattgtgtcaatatttacttgaaagatgtaactgactttctaaatattgtacttactacagtctttgaaaaagagaagaaacctaaatttgagattttattagctcttttaaatgattccacaaagcaagtaaggatgagtatcaacaacttaacaacagactttgattttgcatctcagtccaattggagatattttactgaattaattctaagaccaatagaaatgtcagatgaaattcctaatcagtttcaaaatatttggcttcatttaataacactggggaaggaatttcagaagcttgtaaaaggtatttactttaacatcctggaaaataattcctcttctaaaactgaaaacttgttaaacatatttgccaccagtccaaaagaaaaggatgtaaacagtgtaggcaattccatttatcacttagctagttaccttgccttcagcttatctcatgacctccaaaattcaccaaaaataataatttcacctgaaataatgaaagctacaggtcttggtattcaactgataagggatgtgttcaactccttaatgcctgtagttcatcacactagtccacaaaatgcaggttatatgcaagctttgaagaaggtaacttctgtcatgcgtacccttaagaaggcagacatagaccttttagtggatcagcttgaacaagttagtgtaaacctaatggatttctttaagaatatcagtagtgtgggaactggcaatttagtggtcaatttgcttgttggcttgatggaaaaatttgcagacagctcacattcttggaatgttaatcatctgctgcagctctcacgcctgtttcctaaagatgttgtggatgctgtgatagatgtgtactatgtgcttcctcatgctgtaaggctcctgcagggagtacctggtaaaaacatcactgaaggcctcaaggatgtctacagcttcacactccttcatggcataaccatttcaaatatcaccaaggaagacttcgcaattgtgataaaaattcttttggatacaattgaattagtatcagataagccagatattatttcagaggctttagcttgttttcctgtggtttggtgctggaatcacacaaattctggatttcggcagaattcaaagatagacccctgcaatgtccatgggctcatgtcttcttccttttatggcaaagtggccagtatacttgatcatttccacctgtctccccaaggtgaagattcaccatgttcaaatgaaagctcccgaatggaaataactaggaaagtggtctgcataattcatgaattagtggactggaattctattcttctggagctctctgaagtcttccatgttaacatttctcttgtgaaaactgtgcagaaattttggcataagatattaccgtttgtcccaccttcaataaatcaaactagggatagcatctctgaactctgtcctagtggttccataaagcaagttgctttgcaaatcatagaaaaacttaaaaatgtcaactttacaaaagttacatcaggtgaaaatattcttgacaaactaagtagtttaaacaagatccttaacattaatgaagacacagagacatctgttcaaaatattatttcctcaaatttggaaaggacagtacaattgatttctgaagactggagcctagaaaaaagtacgcataatctactctctttattcatgatgctccagaatgcaaatgtcacaggtagcagtttagaagcattatcaagttttattgaaaaaagtgaaacaccttacaactttgaagaactatggcccaagtttcaacaaatcatgaaagacctaacccaagattttagaatcagacacctgctttctgaaatgaacaaaggaatcaaaagtataaattcaatggctcttcaaaagataactttgcagtttgcccatttcctggaaatcctggattcaccgtcattgaagacattagaaattattgaagattttctattggtcacaaaaaactggcttcaggaatatgcaaatgaggattactccagaatgatagaaacattattcattcctgtgaccaatgagagttcaactgaagatatagctttgttagccaaagctattgctactttttggggctctttaaaaaatatatctagagcaggcaattttgatgttgcctttcttacccatctgctaaatcaagaacagctgactaatttctcagttgttcagctgctttttgaaaacatcctaattaatttgatcaataacttagctgggaattctcaggaagcagcttggaacttaaatgatactgaccttcaaataatgaatttcattaaccttatcttgaaccatatgcagtcagaaactagtaggaaaacagttctctctctgagaagcatagtagatttcacagaacagtttttgaaaacattcttctccctttttctaaaggaagattctgagaacaaaatatctcttctgctgaaatatttccacaaagatgttattgcagagatgagttttgtcccaaaagataaaattctagaaattctgaaactggatcaatttcttaccctgatgatacaagacagattgatgaacattttttcaagtttaaaggagactatatatcacctaatgaaaagttcatttatattagacaatggagaattttattttgatactcatcaaggactgaagttcatgcaagatttatttaatgcccttctcagggaaacttcaatgaaaaataagactgaaaataatatagactttttcacagtggtgagtcagttgtttttccatgtgaataagtctgaggacctcttcaaactcaatcaagatcttgggtcagctcttcaccttgtaagagaatgttcaacagagatggcaagacttctggatacaattttacactctcctaataaggacttctatgctttgtatcctaccctccaagaagttatacttgctaatctaacggatttgcttttctttataaataattcattccctctaagaaacagagcaacattagaaattactaagagattagttggtgctatttcaagagcaagtgaagaaagtcacgtcctgaaacccctcttagaaatgtctgggactctggtcatgctgttgaatgacagtgctgacctgagagatcttgccacatcaatggactccattgtgaaacttcttaagctggtcaagaaagtttcggggaagatgtccacagtttttaaaactcattttatctccaataccaaggacagtgtgaaattctttgacactctgtattccatcatgcaacaaagtgttcaaaatcttgtgaaagaaatagctactttaaaaaaaatagatcatttcacatttgaaaagataaatgatttgttggtgccatttcttgacttggcctttgaaatgattggggtagaaccttatatatcatcaaactctgatattttcagtatgtcacctagcatactctcatatatgaaccaatctaaggacttttctgatattttggaagaaattgctgaatttttaacatctgtgaaaatgaacttggaagatatgaggagtcttgcggtagcatttaacaatgagactcaaacattttctatggattctgtcaacttacgggaagaaattctgggttgcttagttcctataaataacatcaccaaccaaatggacttcttataccctaatccaatttccactcatagtggccctcaagatataaaatgggaaataattcatgaagtgatcccttttttggataaaatattatcacaaaacagcacagaaataggatctttcttgaaaatggtgatctgtctcaccttagaagctctttggaaaaacttaaagaaagataattggaatgtttctaatgtgttgatgacatttactcagcatccaaataaccttttgaaaaccatagaaacagttttagaggcctccagtggaattaaaagtgactatgaaggtgatttgaataaaagtttatattttgacacacctttgagtcagaatataactcatcatcaacttgaaaaagcaatccataatgttttaagtagaatagctctctggaggaaaggacttctgtttaacaactctgaatggataacttccacaagaactttgtttcagccactttttgagattttcattaaagcaaccaccggaaagaatgtcacatcagaaaaagaagagagaaccaagaaagagatgattgactttccttatagtttcaaaccatttttctgtttggagaaatacctgggaggattatttgtattgactaaatactggcaacaaatcccactaacagatcaaagtgttgttgagatttgtgaagttttccagcagactgtgaagccctcagaagccatggagatgctgcagaaagtgaagatgatggtcgtacgtgtgctcaccatcgttgcagaaaacccttcctggaccaaggacattttgtgtgctactctgagttgcaagcaaaatgggataaggcatctcattttatctgctatacaaggggtcactttggcgcaggaccacttccaggaaattgaaaagatatggtcctcgccgaatcagctaaattgtgaaagtcttagcaagaatctttctagcaccttggagagcttcaagagcagcttggaaaatgccactggccaggactgcacaagccagccgaggctggagacggtgcagcagcacttgtacatgttggccaaaagcctcgaggaaacttggtcatcagggaatcccatcatgacttttctcagcaatttcacagtaactgaggatgtaaaaataaaagatttgatgaagaatatcaccaagttgactgaggagcttcgctcttccatccaaatctcgaatgagactatccatagcattctagaagcaaatatttcccactccaaggttctcttcagtgccctcaccgtagctctgtctggaaagtgtgatcaggaaatccttcatctcctgctgacatttcccaaaggggaaaaatcttggatcgcagcggaggaactctgtagcctgccagggtcaaaagtgtattctctgattgtgttgctgagtcgaaacttggatgtgcgagctttcatttacaagactctgatgccttctgaagcaaatggcttgctcaactccttgctggatatagtttccagcctcagcgccttgcttgccaaagcccagcacgtctttgagtatcttcctgagtttcttcacacatttaaaatcactgccttgctagaaaccctggactttcaacaggtttcacaaaatgtccaggccagaagttcagcttttggttctttccagtttgtgatgaagatggtttgcaaggaccaagcatcattccttagcgattctaatatgtttattaatttgcccagagttaaggaactcttggaagatgacaaagaaaaattcaacattcctgaagattcaacaccgttttgcttgaagctttatcaggaaattctacaattgccaaatggtgctttggtgtggaccttcctaaaacccatattgcatggaaaaatactatacacaccaaacactccagaaattaacaaggtcattcaaaaggctaattacaccttttatattgtggacaaactaaaaactttatcagaaacactgctggaaatgtccagccttttccagagaagtggaagtggccagatgttcaaccagctgcaggaggccctgagaaacaaatttgtaagaaactttgtagaaaaccagttgcacattgatgtagacaaacttactgaaaaactccagacatacggagggctgctggatgagatgtttaaccatgcaggcgctggacgcttccgtttcttgggcagcatcttggtcaatctctcttcctgcgtggcactgaaccgtttccaggctctgcagtctgtcgacatcctggagactaaagcacatgaactcttgcagcagaacagcttcttggccagtatcattttcagcaattccttattcgacaagaacttcagatcagagtctgtcaaactgccaccccatgtctcatacacaatccggaccaatgtgttatacagcgtgcgaacagatgtggtaaaaaacccttcttggaagttccaccctcagaatctaccagctgatgggttcaaatataactacgtctttgccccactgcaagacatgatcgaaagagccatcattttggtgcagactgggcaggaagccctggaaccagcagcacagactcaggcggccccttacccctgccataccagcgacctattcctgaacaacgttggtttcttttttccactgataatgatgctgacgtggatggtgtctgtggccagcatggtcagaaagttggtgtatgagcaggagatacagatagaagagtatatgcggatgatgggagtgcatccagtgatccatttcctggcctggttcctggagaacatggctgtgttgaccataagcagtgctactctggccatcgttctgaaaacaagtggcatctttgcacacagcaatacctttattgttttcctctttctcttggattttgggatgtcagtcgtcatgctgagctacctcttgagtgcatttttcagccaagctaatacagcggccctttgtaccagcctggtgtacatgatcagctttctgccctacatagttctattggttctacataaccaattaagttttgttaatcagacatttctgtgccttctttcgacaaccgcctttggacaaggggtattttttattacattcctggaaggacaagagacagggattcaatggaataatatgtaccaggctctggaacaagggggcatgacatttggctgggtttgctggatgattctttttgattcaagcctttattttttgtgtggatggtacttgagcaacttgattcctggaacatttggtttacggaaaccatggtatttcccctttactgcctcatattggaagagtgtgggtttcttggtggagaaaaggcaatactttctaagttctagtctgttcttcttcaatgagaactttgacaataaagggtcatcactgcaaaacagggaaggagagcttgaaggaagtgccccgggagtcaccctggtgtctgtgaccaaggaatatgagggccacaaggctgtggtccaagacctcagcctgaccttctacagagaccaaatcaccgccctgctggggacaaacggtgccgggaaaaccactatcatatccatgttgacggggctccaccctcccacttctggaaccatcatcatcaatggcaagaacctacagacagacctgtcgagggtcagaatggagcttggtgtgtgtccgcagcaggacatcctgttggacaacctcaccgtccgggaacatttgctgctctttgcttccataaaggcgcctcagtggaccaagaaggagctgcatcagcaagtcaatcaaactcttcaggatgtggacttaactcagcatcagcacaaacagacccgagctctgtctggaggcctgaagaggaagctctcccttggcattgctttcatgggcatgtcgaggaccgtggttctggatgagcccaccagtggggtggacccttgctcccggcatagcctgtgggacattctgctcaagtaccgagaaggtcgtacgatcatcttcacaacccaccacctggatgaagctgaagcgctgagtgaccgcgtggccgtcctccagcatgggaggctcaggtgctgcggtcctcccttctgcctgaaggaggcatatggccaggggctccgcctgacactcacgaggcagccttctgttctggaggcccatgatctgaaagacatggcttgtgttacatccctgataaagatctatattccacaagcatttctcaaagacagcagtggaagtgagctgacctacaccattccaaaggacacagacaaggcctgcttgaaagggctcttccaggccctggatgagaacctgcatcagctgcacctgacgggctatgggatctcagacaccaccttagaagaggtgtttttgatgcttttgcaagattccaacaagaaatctcacattgccctggggactgagtcagagctgcagaaccacaggcctacaggacatctgtctggctactgtggctccctagcacggcccgcaactgtgcagggcgtccagctgctccgcgcacaagtggccgcgatcctggcccggaggctccgccgcacgctgcgcgccgggaagagcaccctcgccgacctgctgctgccagtcctcttcgtggccttggccatgggcttgttcatggtgagacccctggccaccgagtaccctcccctcagactcacacctggacattaccagcgggccgagacctactttttcagcagcagtgggggcgacaacttggacctcacccgtgtgcttctgcggaagtttagagatcaagatttgccctgtgcagatttaaacccacgccagaagaattcttcatgctggcgcacagatcccttttctcacccagaattccaggattcatgtggctgcctgaagtgtccaaatagaagtgctagtgctccctacctgaccaaccacctgggccacacactgttgaatctctcaggcttcaatatggaggagtacttgctggcaccatctgaaaaaccaaggcttggaggttggtcttttggattaaaaatccccagtgaagctggaggtgcaaatggaaacatatcaaaacccccaactctggcaaaggtgtggtataatcagaagggttttcattccctaccttcctacttaaatcatctaaacaaccttattttgtggcagcacctaccccctactgtggactggagacaatacggaataacactctacagccacccatatggaggggccttgctgaacgaggacaagatcctggagagcatccgtcagtgtggagtggccctctgcatcgtgctgggattctccatcctgtctgcatccatcggcagctctgtggtgagggacagggtgattggagccaaaaggttgcagcacataagtggccttggctacaggatgtactggttcacaaacttcctatatgacatgctcttttacttggtttccgtctgcctgtgtgttgccgttattgtcgccttccagttaacagcttttactttccgcaagaacttggcagccacggccctcctgctgtcacttttcggatatgcaactcttccatggatgtacctgatgtccagaatcttttccagttcggacgtggctttcatttcctatgtctcactaaacttcatctttggcctttgtaccatgctcataaccattatgccccggttgctagccatcatctccaaagctaagaatttacagaatatctatgatgtcctcaagtgggtctttactatttttcctcaattctgtcttggtcaaggactggtagaactctgctataatcagatcaaatatgacctgacccacaacttcggcattgattcctatgtgagtccctttgagatgaactttctgggctggatcttcgtgcaactggcctcgcagggcacagtacttctcctcttgagggttctgctacactgggaccttctgcgatggccaaggggtcattctactctccaaggcacagtcaaatcttctaaggatacagatgttgaaaaagaggaaaagagagtgtttgaaggaaggaccaatggagacattcttgtgttatacaaccttagtaaacattatcgacgctttttccagaatattattgctgtgcaagatattagtttgggcataccaaaaggagagtgctttggacttctaggggtgaatggagctgggaagagcacgactttcaaaatgctgaatggtgaagtttctctaacttcaggacatgctatcatcaggactcccatgggagacgccgtggacctgtcttctgctggcacggcaggcgtgctcattggctactgtccccagcaggatgccctggacgagcttctgactggttgggaacatctctattattactgtagcttacgcgggattccaaggcagtgcatccctgaggttgctggagacctcatcaggcgcttacacctcgaagcccacgcggacaaacctgtggccacctacagtgggggaaccaagcggaaactctctacagccctggccctggtggggaaacctgacattcttttattggatgagcccagctctgggatggatccctgctctaagcggtacctgtggcaaacaataatgaaggaggttcgggaaggctgtgctgcggtgctgacctcccacagcatggaggagtgtgaggctctttgcacaagactggccataatggttaacggcagcttcaaatgtcttggttctcctcagcacatcaaaaatagagctgatggctagagatggctagagatgaagcagccatcttgagccacgaggaaatcttagcaatggagacctgtgaagcggagcaataacacagaatgagccaaatgaatgctttttctactctggctgcctgacttcagactttaaacattaacatccttactatttggggctttctgtcactgtacatgaatctgaacagactaatattccctgtgacatattaaatatagcattaatttatgtacttagaggttattgtctatctctgcccagtagcatgtaaactttctgagggtaaaaccttttcttctgtttacttctgtatccttaccatttgaaatagtgccaggtacataaatgtgctcaacgtatttgttgaacaaatgaatgaatgtattaataatgaatgtaaaattcctagtacatggcagctttttgcttaacgggaattcctttcagaatgctgcaactagactgtaaaagacgaatcagatgaggccactcaagcattcagcttctgcctagcttaatgaacaacaaccactaacaagaacaataactgacccctttgatggagacttttactctgatgccatttatctttagacagggtgaagcctgctttctctcaaaacagtctgcattattcatgactagtttgctgcttttcgaaactggactctgtctgcctttggcatctccactaacagaaactatcaggtgtacgattcagtcctaattgctgccatggccttggcaatattgtgctgtcaccttctctgctggacagccagacttagtgctggtgtacaccggcttgccaagaattaatgtgcattgcagacagcaaaaatatgccattccagaatccaactgtacactatgggattatgatttcctattgtaaatatagcctaggcacaagaaaacatagcctaaccaaggaaatggatttctttattccaggtttaaaatgtatcaggattgggatttgggagaagcttttcttactctgagttcaaactatgagcataa

SEQ ID NO: 188 - DNA, 16586 bp, Homo sapiens
tttccccactgcaacatggatgttgcagtgaaccttctccagaccattttgaattccttaatatccctagaagatttagattggcttccactcaaccaaactttttcccaggtttctgaacttgtactgaatgtgaccatttcgacactgacatttctgcagcaacatggagtagcagtcaccgagccagtttaccacctgtccatgcagaatatagtgtgggatccacagaaagtccagtatgatctcaaatcccagtttggctttgatgatcttcacacggaacagatcctgaactcttcagctgaactgaaggagattcccacagacacttccttggagaagatggtgtgttcagtcttgtctagcacatcagaggatgaagctgagaaatggggccacgttggaggctgccaccctaagtggtcagaagccaaaaactatcttgtccatgcagtcagctggctgcgagtctaccaacaggtgtttgttcagtggcaacagggtagcctgcttcagaagacactcacaggcatgggccatagtctggaggctctcaggaatcagtttgaagaagagagcaagccctggaaggtggtggaagctctgcacactgcactgctcctgctgaatgacagcttgtcagcagatggcccaaaagataatcatacatttccaaagatattacagcatctgtggaaattgcaaagcttgctgcaaaacctgccccagtggccggcactgaagagatttcttcagcttgatggagctctcagaaatgcgatagctcagaatttacattttgtccaagaagtcctcatttgcctggagacatcagctaatgattttaaatggtttgaacttaaccaattgaaactggaaaaggatgtgttcttttgggagctgaaacagatgttggcgaagaatgctgtctgcccgaatggtcgtttctctgagaaggaggtctttttgccgcctggaaactccagcatatggggtggtctccagggactgttgtgctattgtaactcctctgagacgagtgttttaaacaagctacttggttcagtagaggatgctgatcgtattttgcaagaggtcattacttggcacaaaaatatgtcagttttaatacctgaagaatatttggactggcaggaacttgagatgcagctgtcagaagcaagcctttcctgtactcggctcttcctgctgctgggagctgatccctctcctgagaatgatgtcttttctagtgactgtaagcaccagcttgtctccacagtgatatttcatacacttgaaaaaacacaatttttcctggaacaagcatattattggaaagccttcaaaaagtttatcaggaagacttgcgaagtggcccaatatgtaaatatgcaagagagtttccagaacagactattggcttttcctgaggaatctccttgttttgaagaaaacatggattggaaaatgatcagtgataattattttcaatttttgaataacttactcaagtctccaacagcttccatatccagggctttaaatttcacaaagcaccttctaatgatggaaaagaagttgcacacccttgaggatgaacaaatgaactttcttttatcatttgtggaattttttgagaaattattgttgcctaatctttttgactcctccattgttcccagtttccacagcctcccatctctcacagaggatattctgaatataagttctctgtggacaaatcatttaaaaagtttaaagagagacccatctgccactgatgctcagaaactcttggaatttggcaacgaagtgatttggaaaatgcagactctcggaagtcactggataaggaaggaaccaaaaaatcttttgagattcatagaattaatactttttgaaattaatcccaaattactagaattatgggcctatggcatttcaaaaggaaaaagagctaaattggaaaacttctttacacttttaaatttttctgttccagaaaatgagattctgagtacaagttttaacttttcccagttgttccattcagattggcctaaatcaccagctatgaacatagattttgtacgtttaagtgaggctataataactagtctccatgaatttggatttttggagcaggaacagatctcagaagctctgaacacagtctacgctatcaggaatgcatctgatcttttctcagccctttctgaaccacaaaaacaagaagttgataaaattttgactcacatacacctaaatgtcttccaggacaaggattcagctttacttctgcaaatttattcttcattttaccgatatatttatgaattattgaatattcagagtagaggctcttcgttgactttccttacacaaatctcaaaacacattttggatatcataaaacaatttaatttccaaaacatcagtaaagcatttgcatttttatttaagacagcagaggttcttgggggaatttctaatgtatcttactgtcagcaattgctttcaatttttaactttttggagcttcaggcccaatccttcatgtctacagagggccaagaactggaagtgatccacactactttgacaggcctcaaacagctgctcataattgatgaagattttcgtatttctttatttcaatatatgagccaattcttcaacagttcagtagaagacctattggataataaatgcttgatttcggacaataaacacatttcttccgtaaattattcaacaagtgaggagtcttcatttgtttttccattggcacaaattttttcaaacctctcagcaaatgtcagtgtgttcaacaagtttatgtccattcactgtaccgtttcatggcttcaaatgtggactgaaatctgggaaaccatatctcaattatttaagtttgacatgaatgttttcacatctcttcatcatggtttcactcagcttttggatgaattggaagatgatgtgaaagtctctaaaagctgccagggtatacttcccacccataatgttgctagactcatattaaatttgtttaaaaatgtaactcaagccaatgacttccataattgggaggacttcctggatctcagggattttttggtagctttaggtaatgcattagtttcagtaaaaaaacttaacttggagcaagtggagaaatcccttttcaccatggaagctgccctgcatcagttgaagacatttccattcaacgaaagtacaagcagagagtttttaaattctctgcttgaagttttcattgagtttagcagtacctcagaatatatagtcagaaatctagattcaataaatgactttctttcaaataatctcacaaattatggagaaaaatttgaaaatatcatcactgagctaagagaagcaatagtatttcttagaaatgtatcacatgatcgagatttgttttcctgtgctgatattttccaaaatgttactgagtgtattttagaagatggctttttatatgtaaatacctcacagaggatgttacgtattctagacacgttaaattccacattttcctctgagaacacaattagcagtctgaaaggatgcattgtatggttagatgtcataaaccatttgtatttgttgtctaactccagtttttcacaaggtcatcttcaaaatattttggggaatttcagagatatagaaaacaaaatgaactctatattaaaaattgtaacttgggtgttaaatataaaaaaacctctttgttcatcaaatggctcacatataaattgtgtcaatatttacttgaaagatgtaactgactttctaaatattgtacttactacagtctttgaaaaagagaagaaacctaaatttgagattttattagctcttttaaatgattccacaaagcaagtaaggatgagtatcaacaacttaacaacagactttgattttgcatctcagtccaattggagatattttactgaattaattctaagaccaatagaaatgtcagatgaaattcctaatcagtttcaaaatatttggcttcatttaataacactggggaaggaatttcagaagcttgtaaaaggtatttactttaacatcctggaaaataattcctcttctaaaactgaaaacttgttaaacatatttgccaccagtccaaaagaaaaggatgtaaacagtgtaggcaattccatttatcacttagctagttaccttgccttcagcttatctcatgacctccaaaattcaccaaaaataataatttcacctgaaataatgaaagctacaggtcttggtattcaactgataagggatgtgttcaactccttaatgcctgtagttcatcacactagtccacaaaatgcaggttatatgcaagctttgaagaaggtaacttctgtcatgcgtacccttaagaaggcagacatagaccttttagtggatcagcttgaacaagttagtgtaaacctaatggatttctttaagaatatcagtagtgtgggaactggcaatttagtggtcaatttgcttgttggcttgatggaaaaatttgcagacagctcacattcttggaatgttaatcatctgctgcagctctcacgcctgtttcctaaagatgttgtggatgctgtgatagatgtgtactatgtgcttcctcatgctgtaaggctcctgcagggagtacctggtaaaaacatcactgaaggcctcaaggatgtctacagcttcacactccttcatggcataaccatttcaaatatcaccaaggaagacttcgcaattgtgataaaaattcttttggatacaattgaattagtatcagataagccagatattatttcagaggctttagcttgttttcctgtggtttggtgctggaatcacacaaattctggatttcggcagaattcaaagatagacccctgcaatgtccatgggctcatgtcttcttccttttatggcaaagtggccagtatacttgatcatttccacctgtctccccaaggtgaagattcaccatgttcaaatgaaagctcccgaatggaaataactaggaaagtggtctgcataattcatgaattagtggactggaattctattcttctggagctctctgaagtcttccatgttaacatttctcttgtgaaaactgtgcagaaattttggcataagatattaccgtttgtcccaccttcaataaatcaaactagggatagcatctctgaactctgtcctagtggttccataaagcaagttgctttgcaaatcatagaaaaacttaaaaatgtcaactttacaaaagttacatcaggtgaaaatattcttgacaaactaagtagtttaaacaagatccttaacattaatgaagacacagagacatctgttcaaaatattatttcctcaaatttggaaaggacagtacaattgatttctgaagactggagcctagaaaaaagtacgcataatctactctctttattcatgatgctccagaatgcaaatgtcacaggtagcagtttagaagcattatcaagttttattgaaaaaagtgaaacaccttacaactttgaagaactatggcccaagtttcaacaaatcatgaaagacctaacccaagattttagaatcagacacctgctttctgaaatgaacaaaggaatcaaaagtataaattcaatggctcttcaaaagataactttgcagtttgcccatttcctggaaatcctggattcaccgtcattgaagacattagaaattattgaagattttctattggtcacaaaaaactggcttcaggaatatgcaaatgaggattactccagaatgatagaaacattattcattcctgtgaccaatgagagttcaactgaagatatagctttgttagccaaagctattgctactttttggggctctttaaaaaatatatctagagcaggcaattttgatgttgcctttcttacccatctgctaaatcaagaacagctgactaatttctcagttgttcagctgctttttgaaaacatcctaattaatttgatcaataacttagctgggaattctcaggaagcagcttggaacttaaatgatactgaccttcaaataatgaatttcattaaccttatcttgaaccatatgcagtcagaaactagtaggaaaacagttctctctctgagaagcatagtagatttcacagaacagtttttgaaaacattcttctccctttttctaaaggaagattctgagaacaaaatatctcttctgctgaaatatttccacaaagatgttattgcagagatgagttttgtcccaaaagataaaattctagaaattctgaaactggatcaatttcttaccctgatgatacaagacagattgatgaacattttttcaagtttaaaggagactatatatcacctaatgaaaagttcatttatattagacaatggagaattttattttgatactcatcaaggactgaagttcatgcaagatttatttaatgcccttctcagggaaacttcaatgaaaaataagactgaaaataatatagactttttcacagtggtgagtcagttgtttttccatgtgaataagtctgaggacctcttcaaactcaatcaagatcttgggtcagctcttcaccttgtaagagaatgttcaacagagatggcaagacttctggatacaattttacactctcctaataaggacttctatgctttgtatcctaccctccaagaagttatacttgctaatctaacggatttgcttttctttataaataattcattccctctaagaaacagagcaacattagaaattactaagagattagttggtgctatttcaagagcaagtgaagaaagtcacgtcctgaaacccctcttagaaatgtctgggactctggtcatgctgttgaatgacagtgctgacctgagagatcttgccacatcaatggactccattgtgaaacttcttaagctggtcaagaaagtttcggggaagatgtccacagtttttaaaactcattttatctccaataccaaggacagtgtgaaattctttgacactctgtattccatcatgcaacaaagtgttcaaaatcttgtgaaagaaatagctactttaaaaaaaatagatcatttcacatttgaaaagataaatgatttgttggtgccatttcttgacttggcctttgaaatgattggggtagaaccttatatatcatcaaactctgatattttcagtatgtcacctagcatactctcatatatgaaccaatctaaggacttttctgatattttggaagaaattgctgaatttttaacatctgtgaaaatgaacttggaagatatgaggagtcttgcggtagcatttaacaatgagactcaaacattttctatggattctgtcaacttacgggaagaaattctgggttgcttagttcctataaataacatcaccaaccaaatggacttcttataccctaatccaatttccactcatagtggccctcaagatataaaatgggaaataattcatgaagtgatcccttttttggataaaatattatcacaaaacagcacagaaataggatctttcttgaaaatggtgatctgtctcaccttagaagctctttggaaaaacttaaagaaagataattggaatgtttctaatgtgttgatgacatttactcagcatccaaataaccttttgaaaaccatagaaacagttttagaggcctccagtggaattaaaagtgactatgaaggtgatttgaataaaagtttatattttgacacacctttgagtcagaatataactcatcatcaacttgaaaaagcaatccataatgttttaagtagaatagctctctggaggaaaggacttctgtttaacaactctgaatggataacttccacaagaactttgtttcagccactttttgagattttcattaaagcaaccaccggaaagaatgtcacatcagaaaaagaagagagaaccaagaaagagatgattgactttccttatagtttcaaaccatttttctgtttggagaaatacctgggaggattatttgtattgactaaatactggcaacaaatcccactaacagatcaaagtgttgttgagatttgtgaagttttccagcagactgtgaagccctcagaagccatggagatgctgcagaaagtgaagatgatggtcgtacgtgtgctcaccatcgttgcagaaaacccttcctggaccaaggacattttgtgtgctactctgagttgcaagcaaaatgggataaggcatctcattttatctgctatacaaggggtcactttggcgcaggaccacttccaggaaattgaaaagatatggtcctcgccgaatcagctaaattgtgaaagtcttagcaagaatctttctagcaccttggagagcttcaagagcagcttggaaaatgccactggccaggactgcacaagccagccgaggctggagacggtgcagcagcacttgtacatgttggccaaaagcctcgaggaaacttggtcatcagggaatcccatcatgacttttctcagcaatttcacagtaactgaggatgtaaaaataaaagatttgatgaagaatatcaccaagttgactgaggagcttcgctcttccatccaaatctcgaatgagactatccatagcattctagaagcaaatatttcccactccaaggttctcttcagtgccctcaccgtagctctgtctggaaagtgtgatcaggaaatccttcatctcctgctgacatttcccaaaggggaaaaatcttggatcgcagcggaggaactctgtagcctgccagggtcaaaagtgtattctctgattgtgttgctgagtcgaaacttggatgtgcgagctttcatttacaagactctgatgccttctgaagcaaatggcttgctcaactccttgctggatatagtttccagcctcagcgccttgcttgccaaagcccagcacgtctttgagtatcttcctgagtttcttcacacatttaaaatcactgccttgctagaaaccctggactttcaacaggtttcacaaaatgtccaggccagaagttcagcttttggttctttccagtttgtgatgaagatggtttgcaaggaccaagcatcattccttagcgattctaatatgtttattaatttgcccagagttaaggaactcttggaagatgacaaagaaaaattcaacattcctgaagattcaacaccgttttgcttgaagctttatcaggaaattctacaattgccaaatggtgctttggtgtggaccttcctaaaacccatattgcatggaaaaatactatacacaccaaacactccagaaattaacaaggtcattcaaaaggctaattacaccttttatattgtggacaaactaaaaactttatcagaaacactgctggaaatgtccagccttttccagagaagtggaagtggccagatgttcaaccagctgcaggaggccctgagaaacaaatttgtaagaaactttgtagaaaaccagttgcacattgatgtagacaaacttactgaaaaactccagacatacggagggctgctggatgagatgtttaaccatgcaggcgctggacgcttccgtttcttgggcagcatcttggtcaatctctcttcctgcgtggcactgaaccgtttccaggctctgcagtctgtcgacatcctggagactaaagcacatgaactcttgcagcagaacagcttcttggccagtatcattttcagcaattccttattcgacaagaacttcagatcagagtctgtcaaactgccaccccatgtctcatacacaatccggaccaatgtgttatacagcgtgcgaacagatgtggtaaaaaacccttcttggaagttccaccctcagaatctaccagctgatgggttcaaatataactacgtctttgccccactgcaagacatgatcgaaagagccatcattttggtgcagactgggcaggaagccctggaaccagcagcacagactcaggcggccccttacccctgccataccagcgacctattcctgaacaacgttggtttcttttttccactgataatgatgctgacgtggatggtgtctgtggccagcatggtcagaaagttggtgtatgagcaggagatacagatagaagagtatatgcggatgatgggagtgcatccagtgatccatttcctggcctggttcctggagaacatggctgtgttgaccataagcagtgctactctggccatcgttctgaaaacaagtggcatctttgcacacagcaatacctttattgttttcctctttctcttggattttgggatgtcagtcgtcatgctgagctacctcttgagtgcatttttcagccaagctaatacagcggccctttgtaccagcctggtgtacatgatcagctttctgccctacatagttctattggttctacataaccaattaagttttgttaatcagacatttctgtgccttctttcgacaaccgcctttggacaaggggtattttttattacattcctggaaggacaagagacagggattcaatggaataatatgtaccaggctctggaacaagggggcatgacatttggctgggtttgctggatgattctttttgattcaagcctttattttttgtgtggatggtacttgagcaacttgattcctggaacatttggtttacggaaaccatggtatttcccctttactgcctcatattggaagagtgtgggtttcttggtggagaaaaggcaatactttctaagttctagtctgttcttcttcaatgagaactttgacaataaagggtcatcactgcaaaacagggaaggagagcttgaaggaagtgccccgggagtcaccctggtgtctgtgaccaaggaatatgagggccacaaggctgtggtccaagacctcagcctgaccttctacagagaccaaatcaccgccctgctggggacaaacggtgccgggaaaaccactatcatatccatgttgacggggctccaccctcccacttctggaaccatcatcatcaatggcaagaacctacagacagacctgtcgagggtcagaatggagcttggtgtgtgtccgcagcaggacatcctgttggacaacctcaccgtccgggaacatttgctgctctttgcttccataaaggcgcctcagtggaccaagaaggagctgcatcagcaagtcaatcaaactcttcaggatgtggacttaactcagcatcagcacaaacagacccgagctctgtctggaggcctgaagaggaagctctcccttggcattgctttcatgggcatgtcgaggaccgtggttctggatgagcccaccagtggggtggacccttgctcccggcatagcctgtgggacattctgctcaagtaccgagaaggtcgtacgatcatcttcacaacccaccacctggatgaagctgaagcgctgagtgaccgcgtggccgtcctccagcatgggaggctcaggtgctgcggtcctcccttctgcctgaaggaggcatatggccaggggctccgcctgacactcacgaggcagccttctgttctggaggcccatgatctgaaagacatggcttgtgttacatccctgataaagatctatattccacaagcatttctcaaagacagcagtggaagtgagctgacctacaccattccaaaggacacagacaaggcctgcttgaaagggctcttccaggccctggatgagaacctgcatcagctgcacctgacgggctatgggatctcagacaccaccttagaagaggtgtttttgatgcttttgcaagattccaacaagaaatctcacattgccctggggactgagtcagagctgcagaaccacaggcctacaggacatctgtctggctactgtggctccctagcacggcccgcaactgtgcagggcgtccagctgctccgcgcacaagtggccgcgatcctggcccggaggctccgccgcacgctgcgcgccgggaagagcaccctcgccgacctgctgctgccagtcctcttcgtggccttggccatgggcttgttcatggtgagacccctggccaccgagtaccctcccctcagactcacacctggacattaccagcgggccgagacctactttttcagcagcagtgggggcgacaacttggacctcacccgtgtgcttctgcggaagtttagagatcaagatttgccctgtgcagatttaaacccacgccagaagaattcttcatgctggcgcacagatcccttttctcacccagaattccaggattcatgtggctgcctgaagtgtccaaatagaagtgctagtgctccctacctgaccaaccacctgggccacacactgttgaatctctcaggcttcaatatggaggagtacttgctggcaccatctgaaaaaccaaggcttggaggttggtcttttggattaaaaatccccagtgaagctggaggtgcaaatggaaacatatcaaaacccccaactctggcaaaggtgtggtataatcagaagggttttcattccctaccttcctacttaaatcatctaaacaaccttattttgtggcagcacctaccccctactgtggactggagacaatacggaataacactctacagccacccatatggaggggccttgctgaacgaggacaagatcctggagagcatccgtcagtgtggagtggccctctgcatcgtgctgggattctccatcctgtctgcatccatcggcagctctgtggtgagggacagggtgattggagccaaaaggttgcagcacataagtggccttggctacaggatgtactggttcacaaacttcctatatgacatgctcttttacttggtttccgtctgcctgtgtgttgccgttattgtcgccttccagttaacagcttttactttccgcaagaacttggcagccacggccctcctgctgtcacttttcggatatgcaactcttccatggatgtacctgatgtccagaatcttttccagttcggacgtggctttcatttcctatgtctcactaaacttcatctttggcctttgtaccatgctcataaccattatgccccggttgctagccatcatctccaaagctaagaatttacagaatatctatgatgtcctcaagtgggtctttactatttttcctcaattctgtcttggtcaaggactggtagaactctgctataatcagatcaaatatgacctgacccacaacttcggcattgattcctatgtgagtccctttgagatgaactttctgggctggatcttcgtgcaactggcctcgcagggcacagtacttctcctcttgagggttctgctacactgggaccttctgcgatggccaaggggtcattctactctccaaggcacagtcaaatcttctaaggatacagatgttgaaaaagaggaaaagagagtgtttgaaggaaggaccaatggagacattcttgtgttatacaaccttagtaaacattatcgacgctttttccagaatattattgctgtgcaagatattagtttgggcataccaaaaggagagtgctttggacttctaggggtgaatggagctgggaagagcacgactttcaaaatgctgaatggtgaagtttctctaacttcaggacatgctatcatcaggactcccatgggagacgccgtggacctgtcttctgctggcacggcaggcgtgctcattggctactgtccccagcaggatgccctggacgagcttctgactggttgggaacatctctattattactgtagcttacgcgggattccaaggcagtgcatccctgaggttgctggagacctcatcaggcgcttacacctcgaagcccacgcggacaaacctgtggccacctacagtgggggaaccaagcggaaactctctacagccctggccctggtggggaaacctgacattcttttattggatgagcccagctctgggatggatccctgctctaagcggtacctgtggcaaacaataatgaaggaggttcgggaaggctgtgctgcggtgctgacctcccacagcatggaggagtgtgaggctctttgcacaagactggccataatggttaacggcagcttcaaatgtcttggttctcctcagcacatcaaaaataggtttggtgatggttatacagtcaaagtttggctctgtaaggaagcaaatcaacattgcactgtttctgaccacttgaagctttattttccaggaattcagttcaagggacagcacctgaatttattagaatatcatgtgccaaaaagatggggatgcctagctgacttgttcaaagttatagagaacaataaaaccttcttgaatattaagcattattccattaaccaaaccactttggagcaggtatttattaattttgcttctgagcagcagcaaactctacaatctactcttgatccatccactgacagtcaccacacacatcacttgcccatctgagcactaaagaagtttccataaggaataaaaccttgtcttccattacaattaacagtcaaggataaaacaagcacgcgcacaatcaaggagctggaacacactctccaggccgtcaaattattctcttgttcattttctattttgaatctccttgttagttaataaccaccaaatggaaaggtcattctttctgcagacttttggggagctcctccaaaacatttgttctctttaccatgccagatggacaccagcttctttgtgacaaaggcatgaatgatttgacagtgtccaaactgagacattctggagctggaaagcctgtcacactagagtgtgtgtgacatgtccactctaaacatgtcacttttctgttaagaaaactgagccccctccccacaggttaaaaaactttagtaacttgtttgtatagaaaatagtaacaaggactattttctattgttgtcatctatttactagatacatgtttttaatgattttaatgtaagcttttattaatactgatgacattatatggtatgatatgaaaaaatcaccaattttttacatataaaagatacctttttaaaaaaataggttttaagagctcttttagtatacactttagcaaaattaattaaattgaactagttactctgtatcaattacagtagttctaccagaatctcccaggttataatttatgagggtagagaaataaaatgtagatgcattttctttttcttcatttggatgaataattactgttttttgttattctaagtcagtgtttttcaaagcgtagtggtccccatattagctgcattgccatcttctgggagcttgcaagaaatgtacattctcaggatccactccagacctattgaatctcaaattctggggcttaaacaagcacattccaagttaagaaccaatgacctaagggaatgtctggttacctcctagttatacaagcaaaatctgcatagtatgtagtcttttttatttatttattttttttttttgaggcggagtctcgctctgtcacccaggctggagtgcagtggcgcgatgtcggctcactgcaagctccgcctcctgggttcacgccattctcctgcctcagcctccccagcagctgggactacaggcacacatcgccacacccggctaatttttagtatttttagtagagacggggtttcaccgtgttagccaggatggtctctatctcctgaccttgtgatccgcccccctccacctcccaaagtgctgggattacaggcgtgagccaccgtgtccggccgtagtttattttaaaatatatttttaaaagctttgtaaaaattatgtcattctcagaattgttgtcttcaaagcattgtcagatgtagagtgctcagatgtggctcttaaagactatatacatctgaatttttcatcctatagttagtaagatgcataaaatcaatccactactgaaatagtttccagtcagacatttctgagttcagacatttctcaacattcttttaacaacatttttctgaatcctcaatagaaaatcacattaatcttattttaaaatttggcctttttcaacactaacgttgagtaccggtagcttgtgatcaaaggcatatacttccttatgagatttctttactaaagcaagatttcattaaatctctatttcctaaatatcattctatacaaaagatattttttaaacggtaaggattaagacaatcactgatagctttgttgtgagcaattttgattcccatgtatcacatgaattacacttccttaaataaattacagtttatggctgtatgatttattctctaattctaacatagtctagttgtcaaaaggaaatatgtaatctttttatgattgttgaatcaataaataccaatttgtgaaacatgaatgtgtttaaactgcagtgaataaatgagatgtgctttaatttaacccga

SEQ ID NO: 189 - DNA, 14962 bp, Homo sapiens
atataagcaccatccttacaggctggcttcctgactgagagcagggagcagcaggcatggggcatgccgggtgccagttcaaagccctgctgtggaagaattggctctgcagactcaggaacccggtccttttccttgctgaattcttctggccttgtatcctgtttgtaattctgacagttcttcgttttcaagaacctcccagatacagagacatttgttatttgcagccccgagatctacccagctgtggtgttatcccctttgttcaaagccttctttgtaacactggatcaaggtgtaggaacttcagctatgaagggtcaatggagcatcattttcgtttgtctaggttccaaactgcagctgaccccaagaaagtcaacaacctggcctttttaaaagagatacaagacctggcagaggaaattcatggaatgatggacaaggcaaaaaacttaaaaagactttgggtagaacgatccaacactccagattcttcttatggttccagtttttttacaatggatctcaataagaccgaggaggtaatattgaaactggaaagcctccatcagcagcctcatatctgggattttctacttttactgccgagactacacacaagccatgatcatgtggaagatggcatggatgttgcagtgaaccttctccagaccattttgaattccttaatatccctagaagatttagattggcttccactcaaccaaactttttcccaggtttctgaacttgtactgaatgtgaccatttcgacactgacatttctgcagcaacatggagtagcagtcaccgagccagtttaccacctgtccatgcagaatatagtgtgggatccacagaaagtccagtatgatctcaaatcccagtttggctttgatgatcttcacacggaacagatcctgaactcttcagctgaactgaaggagattcccacagacacttccttggagaagatggtgtgttcagtcttgtctagcacatcagaggatgaagctgagaaatggggccacgttggaggctgccaccctaagtggtcagaagccaaaaactatcttgtccatgcagtcagctggctgcgagtctaccaacaggtgtttgttcagtggcaacagggtagcctgcttcagaagacactcacaggcatgggccatagtctggaggctctcaggaatcagtttgaagaagagagcaagccctggaaggtggtggaagctctgcacactgcactgctcctgctgaatgacagcttgtcagcagatggcccaaaagataatcatacatttccaaagatattacagcatctgtggaaattgcaaagcttgctgcaaaacctgccccagtggccggcactgaagagatttcttcagcttgatggagctctcagaaatgcgatagctcagaatttacattttgtccaagaagtcctcatttgcctggagacatcagctaatgattttaaatggtttgaacttaaccaattgaaactggaaaaggatgtgttcttttgggagctgaaacagatgttggcgaagaatgctgtctgcccgaatggtcgtttctctgagaaggaggtctttttgccgcctggaaactccagcatatggggtggtctccagggactgttgtgctattgtaactcctctgagacgagtgttttaaacaagctacttggttcagtagaggatgctgatcgtattttgcaagaggtcattacttggcacaaaaatatgtcagttttaatacctgaagaatatttggactggcaggaacttgagatgcagctgtcagaagcaagcctttcctgtactcggctcttcctgctgctgggagctgatccctctcctgagaatgatgtcttttctagtgactgtaagcaccagcttgtctccacagtgatatttcatacacttgaaaaaacacaatttttcctggaacaagcatattattggaaagccttcaaaaagtttatcaggaagacttgcgaagtggcccaatatgtaaatatgcaagagagtttccagaacagactattggcttttcctgaggaatctccttgttttgaagaaaacatggattggaaaatgatcagtgataattattttcaatttttgaataacttactcaagtctccaacagcttccatatccagggctttaaatttcacaaagcaccttctaatgatggaaaagaagttgcacacccttgaggatgaacaaatgaactttcttttatcatttgtggaattttttgagaaattattgttgcctaatctttttgactcctccattgttcccagtttccacagcctcccatctctcacagaggatattctgaatataagttctctgtggacaaatcatttaaaaagtttaaagagagacccatctgccactgatgctcagaaactcttggaatttggcaacgaagtgatttggaaaatgcagactctcggaagtcactggataaggaaggaaccaaaaaatcttttgagattcatagaattaatactttttgaaattaatcccaaattactagaattatgggcctatggcatttcaaaaggaaaaagagctaaattggaaaacttctttacacttttaaatttttctgttccagaaaatgagattctgagtacaagttttaacttttcccagttgttccattcagattggcctaaatcaccagctatgaacatagattttgtacgtttaagtgaggctataataactagtctccatgaatttggatttttggagcaggaacagatctcagaagctctgaacacagtctacgctatcaggaatgcatctgatcttttctcagccctttctgaaccacaaaaacaagaagttgataaaattttgactcacatacacctaaatgtcttccaggacaaggattcagctttacttctgcaaatttattcttcattttaccgatatatttatgaattattgaatattcagagtagaggctcttcgttgactttccttacacaaatctcaaaacacattttggatatcataaaacaatttaatttccaaaacatcagtaaagcatttgcatttttatttaagacagcagaggttcttgggggaatttctaatgtatcttactgtcagcaattgctttcaatttttaactttttggagcttcaggcccaatccttcatgtctacagagggccaagaactggaagtgatccacactactttgacaggcctcaaacagctgctcataattgatgaagattttcgtatttctttatttcaatatatgagccaattcttcaacagttcagtagaagacctattggataataaatgcttgatttcggacaataaacacatttcttccgtaaattattcaacaagtgaggagtcttcatttgtttttccattggcacaaattttttcaaacctctcagcaaatgtcagtgtgttcaacaagtttatgtccattcactgtaccgtttcatggcttcaaatgtggactgaaatctgggaaaccatatctcaattatttaagtttgacatgaatgttttcacatctcttcatcatggtttcactcagcttttggatgaattggaagatgatgtgaaagtctctaaaagctgccagggtatacttcccacccataatgttgctagactcatattaaatttgtttaaaaatgtaactcaagccaatgacttccataattgggaggacttcctggatctcagggattttttggtagctttaggtaatgcattagtttcagtaaaaaaacttaacttggagcaagtggagaaatcccttttcaccatggaagctgccctgcatcagttgaagacatttccattcaacgaaagtacaagcagagagtttttaaattctctgcttgaagttttcattgagtttagcagtacctcagaatatatagtcagaaatctagattcaataaatgactttctttcaaataatctcacaaattatggagaaaaatttgaaaatatcatcactgagctaagagaagcaatagtatttcttagaaatgtatcacatgatcgagatttgttttcctgtgctgatattttccaaaatgttactgagtgtattttagaagatggctttttatatgtaaatacctcacagaggatgttacgtattctagacacgttaaattccacattttcctctgagaacacaattagcagtctgaaaggatgcattgtatggttagatgtcataaaccatttgtatttgttgtctaactccagtttttcacaaggtcatcttcaaaatattttggggaatttcagagatatagaaaacaaaatgaactctatattaaaaattgtaacttgggtgttaaatataaaaaaacctctttgttcatcaaatggctcacatataaattgtgtcaatatttacttgaaagatgtaactgactttctaaatattgtacttactacagtctttgaaaaagagaagaaacctaaatttgagattttattagctcttttaaatgattccacaaagcaagtaaggatgagtatcaacaacttaacaacagactttgattttgcatctcagtccaattggagatattttactgaattaattctaagaccaatagaaatgtcagatgaaattcctaatcagtttcaaaatatttggcttcatttaataacactggggaaggaatttcagaagcttgtaaaaggtatttactttaacatcctggaaaataattcctcttctaaaactgaaaacttgttaaacatatttgccaccagtccaaaagaaaaggatgtaaacagtgtaggcaattccatttatcacttagctagttaccttgccttcagcttatctcatgacctccaaaattcaccaaaaataataatttcacctgaaataatgaaagctacaggtcttggtattcaactgataagggatgtgttcaactccttaatgcctgtagttcatcacactagtccacaaaatgcaggttatatgcaagctttgaagaaggtaacttctgtcatgcgtacccttaagaaggcagacatagaccttttagtggatcagcttgaacaagttagtgtaaacctaatggatttctttaagaatatcagtagtgtgggaactggcaatttagtggtcaatttgcttgttggcttgatggaaaaatttgcagacagctcacattcttggaatgttaatcatctgctgcagctctcacgcctgtttcctaaagatgttgtggatgctgtgatagatgtgtactatgtgcttcctcatgctgtaaggctcctgcagggagtacctggtaaaaacatcactgaaggcctcaaggatgtctacagcttcacactccttcatggcataaccatttcaaatatcaccaaggaagacttcgcaattgtgataaaaattcttttggatacaattgaattagtatcagataagccagatattatttcagaggctttagcttgttttcctgtggtttggtgctggaatcacacaaattctggatttcggcagaattcaaagatagacccctgcaatgtccatgggctcatgtcttcttccttttatggcaaagtggccagtatacttgatcatttccacctgtctccccaaggtgaagattcaccatgttcaaatgaaagctcccgaatggaaataactaggaaagtggtctgcataattcatgaattagtggactggaattctattcttctggagctctctgaagtcttccatgttaacatttctcttgtgaaaactgtgcagaaattttggcataagatattaccgtttgtcccaccttcaataaatcaaactagggatagcatctctgaactctgtcctagtggttccataaagcaagttgctttgcaaatcatagaaaaacttaaaaatgtcaactttacaaaagttacatcaggtgaaaatattcttgacaaactaagtagtttaaacaagatccttaacattaatgaagacacagagacatctgttcaaaatattatttcctcaaatttggaaaggacagtacaattgatttctgaagactggagcctagaaaaaagtacgcataatctactctctttattcatgatgctccagaatgcaaatgtcacaggtagcagtttagaagcattatcaagttttattgaaaaaagtgaaacaccttacaactttgaagaactatggcccaagtttcaacaaatcatgaaagacctaacccaagattttagaatcagacacctgctttctgaaatgaacaaaggaatcaaaagtataaattcaatggctcttcaaaagataactttgcagtttgcccatttcctggaaatcctggattcaccgtcattgaagacattagaaattattgaagattttctattggtcacaaaaaactggcttcaggaatatgcaaatgaggattactccagaatgatagaaacattattcattcctgtgaccaatgagagttcaactgaagatatagctttgttagccaaagctattgctactttttggggctctttaaaaaatatatctagagcaggcaattttgatgttgcctttcttacccatctgctaaatcaagaacagctgactaatttctcagttgttcagctgctttttgaaaacatcctaattaatttgatcaataacttagctgggaattctcaggaagcagcttggaacttaaatgatactgaccttcaaataatgaatttcattaaccttatcttgaaccatatgcagtcagaaactagtaggaaaacagttctctctctgagaagcatagtagatttcacagaacagtttttgaaaacattcttctccctttttctaaaggaagattctgagaacaaaatatctcttctgctgaaatatttccacaaagatgttattgcagagatgagttttgtcccaaaagataaaattctagaaattctgaaactggatcaatttcttaccctgatgatacaagacagattgatgaacattttttcaagtttaaaggagactatatatcacctaatgaaaagttcatttatattagacaatggagaattttattttgatactcatcaaggactgaagttcatgcaagatttatttaatgcccttctcagggaaacttcaatgaaaaataagactgaaaataatatagactttttcacagtggtgagtcagttgtttttccatgtgaataagtctgaggacctcttcaaactcaatcaagatcttgggtcagctcttcaccttgtaagagaatgttcaacagagatggcaagacttctggatacaattttacactctcctaataaggacttctatgctttgtatcctaccctccaagaagttatacttgctaatctaacggatttgcttttctttataaataattcattccctctaagaaacagagcaacattagaaattactaagagattagttggtgctatttcaagagcaagtgaagaaagtcacgtcctgaaacccctcttagaaatgtctgggactctggtcatgctgttgaatgacagtgctgacctgagagatcttgccacatcaatggactccattgtgaaacttcttaagctggtcaagaaagtttcggggaagatgtccacagtttttaaaactcattttatctccaataccaaggacagtgtgaaattctttgacactctgtattccatcatgcaacaaagtgttcaaaatcttgtgaaagaaatagctactttaaaaaaaatagatcatttcacatttgaaaagataaatgatttgttggtgccatttcttgacttggcctttgaaatgattggggtagaaccttatatatcatcaaactctgatattttcagtatgtcacctagcatactctcatatatgaaccaatctaaggacttttctgatattttggaagaaattgctgaatttttaacatctgtgaaaatgaacttggaagatatgaggagtcttgcggtagcatttaacaatgagactcaaacattttctatggattctgtcaacttacgggaagaaattctgggttgcttagttcctataaataacatcaccaaccaaatggacttcttataccctaatccaatttccactcatagtggccctcaagatataaaatgggaaataattcatgaagtgatcccttttttggataaaatattatcacaaaacagcacagaaataggatctttcttgaaaatggtgatctgtctcaccttagaagctctttggaaaaacttaaagaaagataattggaatgtttctaatgtgttgatgacatttactcagcatccaaataaccttttgaaaaccatagaaacagttttagaggcctccagtggaattaaaagtgactatgaaggtgatttgaataaaagtttatattttgacacacctttgagtcagaatataactcatcatcaacttgaaaaagcaatccataatgttttaagtagaatagctctctggaggaaaggacttctgtttaacaactctgaatggataacttccacaagaactttgtttcagccactttttgagattttcattaaagcaaccaccggaaagaatgtcacatcagaaaaagaagagagaaccaagaaagagatgattgactttccttatagtttcaaaccatttttctgtttggagaaatacctgggaggattatttgtattgactaaatactggcaacaaatcccactaacagatcaaagtgttgttgagatttgtgaagttttccagcagactgtgaagccctcagaagccatggagatgctgcagaaagtgaagatgatggtcgtacgtgtgctcaccatcgttgcagaaaacccttcctggaccaaggacattttgtgtgctactctgagttgcaagcaaaatgggataaggcatctcattttatctgctatacaaggggtcactttggcgcaggaccacttccaggaaattgaaaagatatggtcctcgccgaatcagctaaattgtgaaagtcttagcaagaatctttctagcaccttggagagcttcaagagcagcttggaaaatgccactggccaggactgcacaagccagccgaggctggagacggtgcagcagcacttgtacatgttggccaaaagcctcgaggaaacttggtcatcagggaatcccatcatgacttttctcagcaatttcacagtaactgaggatgtaaaaataaaagatttgatgaagaatatcaccaagttgactgaggagcttcgctcttccatccaaatctcgaatgagactatccatagcattctagaagcaaatatttcccactccaaggttctcttcagtgccctcaccgtagctctgtctggaaagtgtgatcaggaaatccttcatctcctgctgacatttcccaaaggggaaaaatcttggatcgcagcggaggaactctgtagcctgccagggtcaaaagtgtattctctgattgtgttgctgagtcgaaacttggatgtgcgagctttcatttacaagactctgatgccttctgaagcaaatggcttgctcaactccttgctggatatagtttccagcctcagcgccttgcttgccaaagcccagcacgtctttgagtatcttcctgagtttcttcacacatttaaaatcactgccttgctagaaaccctggactttcaacaggtttcacaaaatgtccaggccagaagttcagcttttggttctttccagtttgtgatgaagatggtttgcaaggaccaagcatcattccttagcgattctaatatgtttattaatttgcccagagttaaggaactcttggaagatgacaaagaaaaattcaacattcctgaagattcaacaccgttttgcttgaagctttatcaggaaattctacaattgccaaatggtgctttggtgtggaccttcctaaaacccatattgcatggaaaaatactatacacaccaaacactccagaaattaacaaggtcattcaaaaggctaattacaccttttatattgtggacaaactaaaaactttatcagaaacactgctggaaatgtccagccttttccagagaagtggaagtggccagatgttcaaccagctgcaggaggccctgagaaacaaatttgtaagaaactttgtagaaaaccagttgcacattgatgtagacaaacttactgaaaaactccagacatacggagggctgctggatgagatgtttaaccatgcaggcgctggacgcttccgtttcttgggcagcatcttggtcaatctctcttcctgcgtggcactgaaccgtttccaggctctgcagtctgtcgacatcctggagactaaagcacatgaactcttgcagcagaacagcttcttggccagtatcattttcagcaattccttattcgacaagaacttcagatcagagtctgtcaaactgccaccccatgtctcatacacaatccggaccaatgtgttatacagcgtgcgaacagatgtggtaaaaaacccttcttggaagttccaccctcagaatctaccagctgatgggttcaaatataactacgtctttgccccactgcaagacatgatcgaaagagccatcattttggtgcagactgggcaggaagccctggaaccagcagcacagactcaggcggccccttacccctgccataccagcgacctattcctgaacaacgttggtttcttttttccactgataatgatgctgacgtggatggtgtctgtggccagcatggtcagaaagttggtgtatgagcaggagatacagatagaagagtatatgcggatgatgggagtgcatccagtgatccatttcctggcctggttcctggagaacatggctgtgttgaccataagcagtgctactctggccatcgttctgaaaacaagtggcatctttgcacacagcaatacctttattgttttcctctttctcttggattttgggatgtcagtcgtcatgctgagctacctcttgagtgcatttttcagccaagctaatacagcggccctttgtaccagcctggtgtacatgatcagctttctgccctacatagttctattggttctacataaccaattaagttttgttaatcagacatttctgtgccttctttcgacaaccgcctttggacaaggggtattttttattacattcctggaaggacaagagacagggattcaatggaataatatgtaccaggctctggaacaagggggcatgacatttggctgggtttgctggatgattctttttgattcaagcctttattttttgtgtggatggtacttgagcaacttgattcctggaacatttggtttacggaaaccatggtatttcccctttactgcctcatattggaagagtgtgggtttcttggtggagaaaaggcaatactttctaagttctagtctgttcttcttcaatgagaactttgacaataaagggtcatcactgcaaaacagggaaggagagcttgaaggaagtgccccgggagtcaccctggtgtctgtgaccaaggaatatgagggccacaaggctgtggtccaagacctcagcctgaccttctacagagaccaaatcaccgccctgctggggacaaacggtgccgggaaaaccactatcatatccatgttgacggggctccaccctcccacttctggaaccatcatcatcaatggcaagaacctacagacagacctgtcgagggtcagaatggagcttggtgtgtgtccgcagcaggacatcctgttggacaacctcaccgtccgggaacatttgctgctctttgcttccataaaggcgcctcagtggaccaagaaggagctgcatcagcaagtcaatcaaactcttcaggatgtggacttaactcagcatcagcacaaacagacccgagctctgtctggaggcctgaagaggaagctctcccttggcattgctttcatgggcatgtcgaggaccgtggttctggatgagcccaccagtggggtggacccttgctcccggcatagcctgtgggacattctgctcaagtaccgagaaggtcgtacgatcatcttcacaacccaccacctggatgaagctgaagcgctgagtgaccgcgtggccgtcctccagcatgggaggctcaggtgctgcggtcctcccttctgcctgaaggaggcatatggccaggggctccgcctgacactcacgaggcagccttctgttctggaggcccatgatctgaaagacatggcttgtgttacatccctgataaagatctatattccacaagcatttctcaaagacagcagtggaagtgagctgacctacaccattccaaaggacacagacaaggcctgcttgaaagggctcttccaggccctggatgagaacctgcatcagctgcacctgacgggctatgggatctcagacaccaccttagaagaggtgtttttgatgcttttgcaagattccaacaagaaatctcacattgccctggggactgagtcagagctgcagaaccacaggcctacaggacatctgtctggctactgtggctccctagcacggcccgcaactgtgcagggcgtccagctgctccgcgcacaagtggccgcgatcctggcccggaggctccgccgcacgctgcgcgccgggaagagcaccctcgccgacctgctgctgccagtcctcttcgtggccttggccatgggcttgttcatggtgagacccctggccaccgagtaccctcccctcagactcacacctggacattaccagcgggccgagacctactttttcagcagcagtgggggcgacaacttggacctcacccgtgtgcttctgcggaagtttagagatcaagatttgccctgtgcagatttaaacccacgccagaagaattcttcatgctggcgcacagatcccttttctcacccagaattccaggattcatgtggctgcctgaagtgtccaaatagaagtgctagtgctccctacctgaccaaccacctgggccacacactgttgaatctctcaggcttcaatatggaggagtacttgctggcaccatctgaaaaaccaaggcttggaggttggtcttttggattaaaaatccccagtgaagctggaggtgcaaatggaaacatatcaaaacccccaactctggcaaaggtgtggtataatcagaagggttttcattccctaccttcctacttaaatcatctaaacaaccttattttgtggcagcacctaccccctactgtggactggagacaatacggaataacactctacagccacccatatggaggggccttgctgaacgaggacaagatcctggagagcatccgtcagtgtggagtggccctctgcatcgtgctgggattctccatcctgtctgcatccatcggcagctctgtggtgagggacagggtgattggagccaaaaggttgcagcacataagtggccttggctacaggatgtactggttcacaaacttcctatatgacatgctcttttacttggtttccgtctgcctgtgtgttgccgttattgtcgccttccagttaacagcttttactttccgcaagaacttggcagccacggccctcctgctgtcacttttcggatatgcaactcttccatggatgtacctgatgtccagaatcttttccagttcggacgtggctttcatttcctatgtctcactaaacttcatctttggcctttgtaccatgctcataaccattatgccccggttgctagccatcatctccaaagctaagaatttacagaatatctatgatgtcctcaagtgggtctttactatttttcctcaattctgtcttggtcaaggactggtagaactctgctataatcagatcaaatatgacctgacccacaacttcggcattgattcctatgtgagtccctttgagatgaactttctgggctggatcttcgtgcaactggcctcgcagggcacagtacttctcctcttgagggttctgctacactgggaccttctgcgatggccaaggggtcattctactctccaaggcacagtcaaatcttctaaggatacagatgttgaaaaagaggaaaagagagtgtttgaaggaaggaccaatggagacattcttgtgttatacaaccttagtaaacattatcgacgctttttccagaatattattgctgtgcaagatattagtttgggcataccaaaaggagagtgctttggacttctaggggtgaatggagctgggaagagcacgactttcaaaatgctgaatggtgaagtttctctaacttcaggacatgctatcatcaggactcccatggggttgctggagacctcatcaggcgcttacacctcgaagcccacgcggacaaacctgtggccacctacagtgggggaaccaagcggaaactctctacagccctggccctggtggggaaacctgacattcttttattggatgagcccagctctgggatggatccctgctctaagcggtacctgtggcaaacaataatgaaggaggttcgggaaggctgtgctgcggtgctgacctcccacagcatggaggagtgtgaggctctttgcacaagactggccataatggttaacggcagcttcaaatgtcttggttctcctcagcacatcaaaaataggaagttaaataagacaaactgaagtcaactggtgaccaagcacatggagaaggcagcatgggtgcaggagacgctgaagaacacgataatagaactttacagccggctgatctgagcttgagaaaaggaggtttggtgatggttatacagtcaaagtttggctctgtaaggaagcaaatcaacattgcactgtttctgaccacttgaagctttattt

SEQ ID NO: 190 - DNA, 13950 bp, Homo sapiens
atataagcaccatccttacaggctggcttcctgactgagagcagggagcagcaggcatggggcatgccgggtgccagttcaaagccctgctgtggaagaattggctctgcagactcaggaacccggtccttttccttgctgaattcttctggccttgtatcctgtttgtaattctgacagttcttcgttttcaagaacctcccagatacagagacatttgttatttgcagccccgagatctacccagctgtggtgttatcccctttgttcaaagccttctttgtaacactggatcaaggtgtaggaacttcagctatgaagggtcaatggagcatcattttcgtttgtctaggttccaaactgcagctgaccccaagaaagtcaacaacctggcctttttaaaagagatacaagacctggcagaggaaattcatggaatgatggacaaggcaaaaaacttaaaaagactttgggtagaacgatccaacactccagattcttcttatggttccagtttttttacaatggatctcaataagaccgaggaggtaatattgaaactggaaagcctccatcagcagcctcatatctgggattttctacttttactgccgagactacacacaagccatgatcatgtggaagatggcatggatgttgcagtgaaccttctccagaccattttgaattccttaatatccctagaagatttagattggcttccactcaaccaaactttttcccaggtttctgaacttgtactgaatgtgaccatttcgacactgacatttctgcagcaacatggagtagcagtcaccgagccagtttaccacctgtccatgcagaatatagtgtgggatccacagaaagtccagtatgatctcaaatcccagtttggctttgatgatcttcacacggaacagatcctgaactcttcagctgaactgaaggagattcccacagacacttccttggagaagatggtgtgttcagtcttgtctagcacatcagaggatgaagctgagaaatggggccacgttggaggctgccaccctaagtggtcagaagccaaaaactatcttgtccatgcagtcagctggctgcgagtctaccaacaggtgtttgttcagtggcaacagggtagcctgcttcagaagacactcacaggcatgggccatagtctggaggctctcaggaatcagtttgaagaagagagcaagccctggaaggtggtggaagctctgcacactgcactgctcctgctgaatgacagcttgtcagcagatggcccaaaagataatcatacatttccaaagatattacagcatctgtggaaattgcaaagcttgctgcaaaacctgccccagtggccggcactgaagagatttcttcagcttgatggagctctcagaaatgcgatagctcagaatttacattttgtccaagaagtcctcatttgcctggagacatcagctaatgattttaaatggtttgaacttaaccaattgaaactggaaaaggatgtgttcttttgggagctgaaacagatgttggcgaagaatgctgtctgcccgaatggtcgtttctctgagaaggaggtctttttgccgcctggaaactccagcatatggggtggtctccagggactgttgtgctattgtaactcctctgagacgagtgttttaaacaagctacttggttcagtagaggatgctgatcgtattttgcaagaggtcattacttggcacaaaaatatgtcagttttaatacctgaagaatatttggactggcaggaacttgagatgcagctgtcagaagcaagcctttcctgtactcggctcttcctgctgctgggagctgatccctctcctgagaatgatgtcttttctagtgactgtaagcaccagcttgtctccacagtgatatttcatacacttgaaaaaacacaatttttcctggaacaagcatattattggaaagccttcaaaaagtttatcaggaagacttgcgaagtggcccaatatgtaaatatgcaagagagtttccagaacagactattggcttttcctgaggaatctccttgttttgaagaaaacatggattggaaaatgatcagtgataattattttcaatttttgaataacttactcaagtctccaacagcttccatatccagggctttaaatttcacaaagcaccttctaatgatggaaaagaagttgcacacccttgaggatgaacaaatgaactttcttttatcatttgtggaattttttgagaaattattgttgcctaatctttttgactcctccattgttcccagtttccacagcctcccatctctcacagaggatattctgaatataagttctctgtggacaaatcatttaaaaagtttaaagagagacccatctgccactgatgctcagaaactcttggaatttggcaacgaagtgatttggaaaatgcagactctcggaagtcactggataaggaaggaaccaaaaaatcttttgagattcatagaattaatactttttgaaattaatcccaaattactagaattatgggcctatggcatttcaaaaggaaaaagagctaaattggaaaacttctttacacttttaaatttttctgttccagaaaatgagattctgagtacaagttttaacttttcccagttgttccattcagattggcctaaatcaccagctatgaacatagattttgtacgtttaagtgaggctataataactagtctccatgaatttggatttttggagcaggaacagatctcagaagctctgaacacagtctacgctatcaggaatgcatctgatcttttctcagccctttctgaaccacaaaaacaagaagttgataaaattttgactcacatacacctaaatgtcttccaggacaaggattcagctttacttctgcaaatttattcttcattttaccgatatatttatgaattattgaatattcagagtagaggctcttcgttgactttccttacacaaatctcaaaacacattttggatatcataaaacaatttaatttccaaaacatcagtaaagcatttgcatttttatttaagacagcagaggttcttgggggaatttctaatgtatcttactgtcagcaattgctttcaatttttaactttttggagcttcaggcccaatccttcatgtctacagagggccaagaactggaagtgatccacactactttgacaggcctcaaacagctgctcataattgatgaagattttcgtatttctttatttcaatatatgagccaattcttcaacagttcagtagaagacctattggataataaatgcttgatttcggacaataaacacatttcttccgtaaattattcaacaagtgaggagtcttcatttgtttttccattggcacaaattttttcaaacctctcagcaaatgtcagtgtgttcaacaagtttatgtccattcactgtaccgtttcatggcttcaaatgtggactgaaatctgggaaaccatatctcaattatttaagtttgacatgaatgttttcacatctcttcatcatggtttcactcagcttttggatgaattggaagatgatgtgaaagtctctaaaagctgccagggtatacttcccacccataatgttgctagactcatattaaatttgtttaaaaatgtaactcaagccaatgacttccataattgggaggacttcctggatctcagggattttttggtagctttaggtaatgcattagtttcagtaaaaaaacttaacttggagcaagtggagaaatcccttttcaccatggaagctgccctgcatcagttgaagacatttccattcaacgaaagtacaagcagagagtttttaaattctctgcttgaagttttcattgagtttagcagtacctcagaatatatagtcagaaatctagattcaataaatgactttctttcaaataatctcacaaattatggagaaaaatttgaaaatatcatcactgagctaagagaagcaatagtatttcttagaaatgtatcacatgatcgagatttgttttcctgtgctgatattttccaaaatgttactgagtgtattttagaagatggctttttatatgtaaatacctcacagaggatgttacgtattctagacacgttaaattccacattttcctctgagaacacaattagcagtctgaaaggatgcattgtatggttagatgtcataaaccatttgtatttgttgtctaactccagtttttcacaaggtcatcttcaaaatattttggggaatttcagagatatagaaaacaaaatgaactctatattaaaaattgtaacttgggtgttaaatataaaaaaacctctttgttcatcaaatggctcacatataaattgtgtcaatatttacttgaaagatgtaactgactttctaaatattgtacttactacagtctttgaaaaagagaagaaacctaaatttgagattttattagctcttttaaatgattccacaaagcaagtaaggatgagtatcaacaacttaacaacagactttgattttgcatctcagtccaattggagatattttactgaattaattctaagaccaatagaaatgtcagatgaaattcctaatcagtttcaaaatatttggcttcatttaataacactggggaaggaatttcagaagcttgtaaaaggtatttactttaacatcctggaaaataattcctcttctaaaactgaaaacttgttaaacatatttgccaccagtccaaaagaaaaggatgtaaacagtgtaggcaattccatttatcacttagctagttaccttgccttcagcttatctcatgacctccaaaattcaccaaaaataataatttcacctgaaataatgaaagctacaggtcttggtattcaactgataagggatgtgttcaactccttaatgcctgtagttcatcacactagtccacaaaatgcaggttatatgcaagctttgaagaaggtaacttctgtcatgcgtacccttaagaaggcagacatagaccttttagtggatcagcttgaacaagttagtgtaaacctaatggatttctttaagaatatcagtagtgtgggaactggcaatttagtggtcaatttgcttgttggcttgatggaaaaatttgcagacagctcacattcttggaatgttaatcatctgctgcagctctcacgcctgtttcctaaagatgttgtggatgctgtgatagatgtgtactatgtgcttcctcatgctgtaaggctcctgcagggagtacctggtaaaaacatcactgaaggcctcaaggatgtctacagcttcacactccttcatggcataaccatttcaaatatcaccaaggaagacttcgcaattgtgataaaaattcttttggatacaattgaattagtatcagataagccagatattatttcagaggctttagcttgttttcctgtggtttggtgctggaatcacacaaattctggatttcggcagaattcaaagatagacccctgcaatgtccatgggctcatgtcttcttccttttatggcaaagtggccagtatacttgatcatttccacctgtctccccaaggtgaagattcaccatgttcaaatgaaagctcccgaatggaaataactaggaaagtggtctgcataattcatgaattagtggactggaattctattcttctggagctctctgaagtcttccatgttaacatttctcttgtgaaaactgtgcagaaattttggcataagatattaccgtttgtcccaccttcaataaatcaaactagggatagcatctctgaactctgtcctagtggttccataaagcaagttgctttgcaaatcatagaaaaacttaaaaatgtcaactttacaaaagttacatcaggtgaaaatattcttgacaaactaagtagtttaaacaagatccttaacattaatgaagacacagagacatctgttcaaaatattatttcctcaaatttggaaaggacagtacaattgatttctgaagactggagcctagaaaaaagtacgcataatctactctctttattcatgatgctccagaatgcaaatgtcacaggtagcagtttagaagcattatcaagttttattgaaaaaagtgaaacaccttacaactttgaagaactatggcccaagtttcaacaaatcatgaaagacctaacccaagattttagaatcagacacctgctttctgaaatgaacaaaggaatcaaaagtataaattcaatggctcttcaaaagataactttgcagtttgcccatttcctggaaatcctggattcaccgtcattgaagacattagaaattattgaagattttctattggtcacaaaaaactggcttcaggaatatgcaaatgaggattactccagaatgatagaaacattattcattcctgtgaccaatgagagttcaactgaagatatagctttgttagccaaagctattgctactttttggggctctttaaaaaatatatctagagcaggcaattttgatgttgcctttcttacccatctgctaaatcaagaacagctgactaatttctcagttgttcagctgctttttgaaaacatcctaattaatttgatcaataacttagctgggaattctcaggaagcagcttggaacttaaatgatactgaccttcaaataatgaatttcattaaccttatcttgaaccatatgcagtcagaaactagtaggaaaacagttctctctctgagaagcatagtagatttcacagaacagtttttgaaaacattcttctccctttttctaaaggaagattctgagaacaaaatatctcttctgctgaaatatttccacaaagatgttattgcagagatgagttttgtcccaaaagataaaattctagaaattctgaaactggatcaatttcttaccctgatgatacaagacagattgatgaacattttttcaagtttaaaggagactatatatcacctaatgaaaagttcatttatattagacaatggagaattttattttgatactcatcaaggactgaagttcatgcaagatttatttaatgcccttctcagggaaacttcaatgaaaaataagactgaaaataatatagactttttcacagtggtgagtcagttgtttttccatgtgaataagtctgaggacctcttcaaactcaatcaagatcttgggtcagctcttcaccttgtaagagaatgttcaacagagatggcaagacttctggatacaattttacactctcctaataaggacttctatgctttgtatcctaccctccaagaagttatacttgctaatctaacggatttgcttttctttataaataattcattccctctaagaaacagagcaacattagaaattactaagagattagttggtgctatttcaagagcaagtgaagaaagtcacgtcctgaaacccctcttagaaatgtctgggactctggtcatgctgttgaatgacagtgctgacctgagagatcttgccacatcaatggactccattgtgaaacttcttaagctggtcaagaaagtttcggggaagatgtccacagtttttaaaactcattttatctccaataccaaggacagtgtgaaattctttgacactctgtattccatcatgcaacaaagtgttcaaaatcttgtgaaagaaatagctactttaaaaaaaatagatcatttcacatttgaaaagataaatgatttgttggtgccatttcttgacttggcctttgaaatgattggggtagaaccttatatatcatcaaactctgatattttcagtatgtcacctagcatactctcatatatgaaccaatctaaggacttttctgatattttggaagaaattgctgaatttttaacatctgtgaaaatgaacttggaagatatgaggagtcttgcggtagcatttaacaatgagactcaaacattttctatggattctgtcaacttacgggaagaaattctgggttgcttagttcctataaataacatcaccaaccaaatggacttcttataccctaatccaatttccactcatagtggccctcaagatataaaatgggaaataattcatgaagtgatcccttttttggataaaatattatcacaaaacagcacagaaataggatctttcttgaaaatggtgatctgtctcaccttagaagctctttggaaaaacttaaagaaagataattggaatgtttctaatgtgttgatgacatttactcagcatccaaataaccttttgaaaaccatagaaacagttttagaggcctccagtggaattaaaagtgactatgaaggtgatttgaataaaagtttatattttgacacacctttgagtcagaatataactcatcatcaacttgaaaaagcaatccataatgttttaagtagaatagctctctggaggaaaggacttctgtttaacaactctgaatggataacttccacaagaactttgtttcagccactttttgagattttcattaaagcaaccaccggaaagaatgtcacatcagaaaaagaagagagaaccaagaaagagatgattgactttccttatagtttcaaaccatttttctgtttggagaaatacctgggaggattatttgtattgactaaatactggcaacaaatcccactaacagatcaaagtgttgttgagatttgtgaagttttccagcagactgtgaagccctcagaagccatggagatgctgcagaaagtgaagatgatggtcgtacgtgtgctcaccatcgttgcagaaaacccttcctggaccaaggacattttgtgtgctactctgagttgcaagcaaaatgggataaggcatctcattttatctgctatacaaggggtcactttggcgcaggaccacttccaggaaattgaaaagatatggtcctcgccgaatcagctaaattgtgaaagtcttagcaagaatctttctagcaccttggagagcttcaagagcagcttggaaaatgccactggccaggactgcacaagccagccgaggctggagacggtgcagcagcacttgtacatgttggccaaaagcctcgaggaaacttggtcatcagggaatcccatcatgacttttctcagcaatttcacagtaactgaggatgtaaaaataaaagatttgatgaagaatatcaccaagttgactgaggagcttcgctcttccatccaaatctcgaatgagactatccatagcattctagaagcaaatatttcccactccaaggttctcttcagtgccctcaccgtagctctgtctggaaagtgtgatcaggaaatccttcatctcctgctgacatttcccaaaggggaaaaatcttggatcgcagcggaggaactctgtagcctgccagggtcaaaagtgtattctctgattgtgttgctgagtcgaaacttggatgtgcgagctttcatttacaagactctgatgccttctgaagcaaatggcttgctcaactccttgctggatatagtttccagcctcagcgccttgcttgccaaagcccagcacgtctttgagtatcttcctgagtttcttcacacatttaaaatcactgccttgctagaaaccctggactttcaacaggtttcacaaaatgtccaggccagaagttcagcttttggttctttccagtttgtgatgaagatggtttgcaaggaccaagcatcattccttagcgattctaatatgtttattaatttgcccagagttaaggaactcttggaagatgacaaagaaaaattcaacattcctgaagattcaacaccgttttgcttgaagctttatcaggaaattctacaattgccaaatggtgctttggtgtggaccttcctaaaacccatattgcatggaaaaatactatacacaccaaacactccagaaattaacaaggtcattcaaaaggctaattacaccttttatattgtggacaaactaaaaactttatcagaaacactgctggaaatgtccagccttttccagagaagtggaagtggccagatgttcaaccagctgcaggaggccctgagaaacaaatttgtaagaaactttgtagaaaaccagttgcacattgatgtagacaaacttactgaaaaactccagacatacggagggctgctggatgagatgtttaaccatgcaggcgctggacgcttccgtttcttgggcagcatcttggtcaatctctcttcctgcgtggcactgaaccgtttccaggctctgcagtctgtcgacatcctggagactaaagcacatgaactcttgcagcagaacagcttcttggccagtatcattttcagcaattccttattcgacaagaacttcagatcagagtctgtcaaactgccaccccatgtctcatacacaatccggaccaatgtgttatacagcgtgcgaacagatgtggtaaaaaacccttcttggaagttccaccctcagaatctaccagctgatgggttcaaatataactacgtctttgccccactgcaagacatgatcgaaagagccatcattttggtgcagactgggcaggaagccctggaaccagcagcacagactcaggcggccccttacccctgccataccagcgacctattcctgaacaacgttggtttcttttttccactgataatgatgctgacgtggatggtgtctgtggccagcatggtcagaaagttggtgtatgagcaggagatacagatagaagagtatatgcggatgatgggagtgcatccagtgatccatttcctggcctggttcctggagaacatggctgtgttgaccataagcagtgctactctggccatcgttctgaaaacaagtggcatctttgcacacagcaatacctttattgttttcctctttctcttggattttgggatgtcagtcgtcatgctgagctacctcttgagtgcatttttcagccaagctaatacagcggccctttgtaccagcctggtgtacatgatcagctttctgccctacatagttctattggttctacataaccaattaagttttgttaatcagacatttctgtgccttctttcgacaaccgcctttggacaaggggtattttttattacattcctggaaggacaagagacagggattcaatggaataatatgtaccaggctctggaacaagggggcatgacatttggctgggtttgctggatgattctttttgattcaagcctttattttttgtgtggatggtacttgagcaacttgattcctggaacatttggtttacggaaaccatggtatttcccctttactgcctcatattggaagagtgtgggtttcttggtggagaaaaggcaatactttctaagttctagtctgttcttcttcaatgagaactttgacaataaagggtcatcactgcaaaacagggaaggagagcttgaaggaagtgccccgggagtcaccctggtgtctgtgaccaaggaatatgagggccacaaggctgtggtccaagacctcagcctgaccttctacagagaccaaatcaccgccctgctggggacaaacggtgccgggaaaaccactatcatatccatgttgacggggctccaccctcccacttctggaaccatcatcatcaatggcaagaacctacagacagacctgtcgagggtcagaatggagcttggtgtgtgtccgcagcaggacatcctgttggacaacctcaccgtccgggaacatttgctgctctttgcttccataaaggcgcctcagtggaccaagaaggagctgcatcagcaagtcaatcaaactcttcaggatgtggacttaactcagcatcagcacaaacagacccgagctctgtctggaggcctgaagaggaagctctcccttggcattgctttcatgggcatgtcgaggaccgtggttctggatgagcccaccagtggggtggacccttgctcccggcatagcctgtgggacattctgctcaagtaccgagaaggtcgtacgatcatcttcacaacccaccacctggatgaagctgaagcgctgagtgaccgcgtggccgtcctccagcatgggaggctcaggtgctgcggtcctcccttctgcctgaaggaggcatatggccaggggctccgcctgacactcacgaggcagccttctgttctggaggcccatgatctgaaagacatggcttgtgttacatccctgataaagatctatattccacaagcatttctcaaagacagcagtggaagtgagctgacctacaccattccaaaggacacagacaaggcctgcttgaaagggctcttccaggccctggatgagaacctgcatcagctgcacctgacgggctatgggatctcagacaccaccttagaagaggtgtttttgatgcttttgcaagattccaacaagaaatctcacattgccctggggactgagtcagagctgcagaaccacaggcctacaggacatctgtctggctactgtggctccctagcacggcccgcaactgtgcagggcgtccagctgctccgcgcacaagtggccgcgatcctggcccggaggctccgccgcacgctgcgcgccgggaagagcaccctcgccgacctgctgctgccagtcctcttcgtggccttggccatgggcttgttcatggtgagacccctggccaccgagtaccctcccctcagactcacacctggacattaccagcgggccgagacctactttttcagcagcagtgggggcgacaacttggacctcacccgtgtgcttctgcggaagtttagagatcaagatttgccctgtgcagatttaaacccacgccagaagaattcttcatgctggcgcacagatcccttttctcacccagaattccaggattcatgtggctgcctgaagtgtccaaatagaagtgctagtgctccctacctgaccaaccacctgggccacacactgttgaatctctcaggcttcaatatggaggagtacttgctggcaccatctgaaaaaccaaggcttggaggttggtcttttggattaaaaatccccagtgaagctggaggtgcaaatggaaacatatcaaaacccccaactctggcaaaggtgtggtataatcagaagggttttcattccctaccttcctacttaaatcatctaaacaaccttattttgtggcagcacctaccccctactgtggactggagacaatacggaataacactctacagccacccatatggaggggccttgctgaacgaggacaagatcctggagagcatccgtcagtgtggagtggccctctgcatcgtgctgggattctccatcctgtctgcatccatcggcagctctgtggtgagggacagggtgattggagccaaaaggttgcagcacataagtggccttggctacaggatgtactggttcacaaacttcctatatgacatgctcttttacttggtttccgtctgcctgtgtgttgccgttattgtcgccttccagttaacagcttttactttccgcaagaacttggcagccacggccctcctgctgtcacttttcggatatgcaactcttccatggatgtacctgatgtccagaatcttttccagttcggacgtggctttcatttcctatgtctcactaaacttcatctttggcctttgtaccatgctcataaccattatgccccggttgctagccatcatctccaaagctaaggactggtagaactctgctataatcagatcaaatatgacctgacccacaacttcggcattgattcctatgtgagtccctttgagatgaactttct

SEQ ID NO: 191 - DNA, 13604 bp, Homo sapiens
atataagcaccatccttacaggctggcttcctgactgagagcagggagcagcaggcatggggcatgccgggtgccagttcaaagccctgctgtggaagaattggctctgcagactcaggaacccggtccttttccttgctgaattcttctggccttgtatcctgtttgtaattctgacagttcttcgttttcaagaacctcccagatacagagacatttgttatttgcagccccgagatctacccagctgtggtgttatcccctttgttcaaagccttctttgtaacactggatcaaggtgtaggaacttcagctatgaagggtcaatggagcatcattttcgtttgtctaggttccaaactgcagctgaccccaagaaagtcaacaacctggcctttttaaaagagatacaagacctggcagaggaaattcatggaatgatggacaaggcaaaaaacttaaaaagactttgggtagaacgatccaacactccagattcttcttatggttccagtttttttacaatggatctcaataagaccgaggaggtaatattgaaactggaaagcctccatcagcagcctcatatctgggattttctacttttactgccgagactacacacaagccatgatcatgtggaagatggcatggatgttgcagtgaaccttctccagaccattttgaattccttaatatccctagaagatttagattggcttccactcaaccaaactttttcccaggtttctgaacttgtactgaatgtgaccatttcgacactgacatttctgcagcaacatggagtagcagtcaccgagccagtttaccacctgtccatgcagaatatagtgtgggatccacagaaagtccagtatgatctcaaatcccagtttggctttgatgatcttcacacggaacagatcctgaactcttcagctgaactgaaggagattcccacagacacttccttggagaagatggtgtgttcagtcttgtctagcacatcagaggatgaagctgagaaatggggccacgttggaggctgccaccctaagtggtcagaagccaaaaactatcttgtccatgcagtcagctggctgcgagtctaccaacaggtgtttgttcagtggcaacagggtagcctgcttcagaagacactcacaggcatgggccatagtctggaggctctcaggaatcagtttgaagaagagagcaagccctggaaggtggtggaagctctgcacactgcactgctcctgctgaatgacagcttgtcagcagatggcccaaaagataatcatacatttccaaagatattacagcatctgtggaaattgcaaagcttgctgcaaaacctgccccagtggccggcactgaagagatttcttcagcttgatggagctctcagaaatgcgatagctcagaatttacattttgtccaagaagtcctcatttgcctggagacatcagctaatgattttaaatggtttgaacttaaccaattgaaactggaaaaggatgtgttcttttgggagctgaaacagatgttggcgaagaatgctgtctgcccgaatggtcgtttctctgagaaggaggtctttttgccgcctggaaactccagcatatggggtggtctccagggactgttgtgctattgtaactcctctgagacgagtgttttaaacaagctacttggttcagtagaggatgctgatcgtattttgcaagaggtcattacttggcacaaaaatatgtcagttttaatacctgaagaatatttggactggcaggaacttgagatgcagctgtcagaagcaagcctttcctgtactcggctcttcctgctgctgggagctgatccctctcctgagaatgatgtcttttctagtgactgtaagcaccagcttgtctccacagtgatatttcatacacttgaaaaaacacaatttttcctggaacaagcatattattggaaagccttcaaaaagtttatcaggaagacttgcgaagtggcccaatatgtaaatatgcaagagagtttccagaacagactattggcttttcctgaggaatctccttgttttgaagaaaacatggattggaaaatgatcagtgataattattttcaatttttgaataacttactcaagtctccaacagcttccatatccagggctttaaatttcacaaagcaccttctaatgatggaaaagaagttgcacacccttgaggatgaacaaatgaactttcttttatcatttgtggaattttttgagaaattattgttgcctaatctttttgactcctccattgttcccagtttccacagcctcccatctctcacagaggatattctgaatataagttctctgtggacaaatcatttaaaaagtttaaagagagacccatctgccactgatgctcagaaactcttggaatttggcaacgaagtgatttggaaaatgcagactctcggaagtcactggataaggaaggaaccaaaaaatcttttgagattcatagaattaatactttttgaaattaatcccaaattactagaattatgggcctatggcatttcaaaaggaaaaagagctaaattggaaaacttctttacacttttaaatttttctgttccagaaaatgagattctgagtacaagttttaacttttcccagttgttccattcagattggcctaaatcaccagctatgaacatagattttgtacgtttaagtgaggctataataactagtctccatgaatttggatttttggagcaggaacagatctcagaagctctgaacacagtctacgctatcaggaatgcatctgatcttttctcagccctttctgaaccacaaaaacaagaagttgataaaattttgactcacatacacctaaatgtcttccaggacaaggattcagctttacttctgcaaatttattcttcattttaccgatatatttatgaattattgaatattcagagtagaggctcttcgttgactttccttacacaaatctcaaaacacattttggatatcataaaacaatttaatttccaaaacatcagtaaagcatttgcatttttatttaagacagcagaggttcttgggggaatttctaatgtatcttactgtcagcaattgctttcaatttttaactttttggagcttcaggcccaatccttcatgtctacagagggccaagaactggaagtgatccacactactttgacaggcctcaaacagctgctcataattgatgaagattttcgtatttctttatttcaatatatgagccaattcttcaacagttcagtagaagacctattggataataaatgcttgatttcggacaataaacacatttcttccgtaaattattcaacaagtgaggagtcttcatttgtttttccattggcacaaattttttcaaacctctcagcaaatgtcagtgtgttcaacaagtttatgtccattcactgtaccgtttcatggcttcaaatgtggactgaaatctgggaaaccatatctcaattatttaagtttgacatgaatgttttcacatctcttcatcatggtttcactcagcttttggatgaattggaagatgatgtgaaagtctctaaaagctgccagggtatacttcccacccataatgttgctagactcatattaaatttgtttaaaaatgtaactcaagccaatgacttccataattgggaggacttcctggatctcagggattttttggtagctttaggtaatgcattagtttcagtaaaaaaacttaacttggagcaagtggagaaatcccttttcaccatggaagctgccctgcatcagttgaagacatttccattcaacgaaagtacaagcagagagtttttaaattctctgcttgaagttttcattgagtttagcagtacctcagaatatatagtcagaaatctagattcaataaatgactttctttcaaataatctcacaaattatggagaaaaatttgaaaatatcatcactgagctaagagaagcaatagtatttcttagaaatgtatcacatgatcgagatttgttttcctgtgctgatattttccaaaatgttactgagtgtattttagaagatggctttttatatgtaaatacctcacagaggatgttacgtattctagacacgttaaattccacattttcctctgagaacacaattagcagtctgaaaggatgcattgtatggttagatgtcataaaccatttgtatttgttgtctaactccagtttttcacaaggtcatcttcaaaatattttggggaatttcagagatatagaaaacaaaatgaactctatattaaaaattgtaacttgggtgttaaatataaaaaaacctctttgttcatcaaatggctcacatataaattgtgtcaatatttacttgaaagatgtaactgactttctaaatattgtacttactacagtctttgaaaaagagaagaaacctaaatttgagattttattagctcttttaaatgattccacaaagcaagtaaggatgagtatcaacaacttaacaacagactttgattttgcatctcagtccaattggagatattttactgaattaattctaagaccaatagaaatgtcagatgaaattcctaatcagtttcaaaatatttggcttcatttaataacactggggaaggaatttcagaagcttgtaaaaggtatttactttaacatcctggaaaataattcctcttctaaaactgaaaacttgttaaacatatttgccaccagtccaaaagaaaaggatgtaaacagtgtaggcaattccatttatcacttagctagttaccttgccttcagcttatctcatgacctccaaaattcaccaaaaataataatttcacctgaaataatgaaagctacaggtcttggtattcaactgataagggatgtgttcaactccttaatgcctgtagttcatcacactagtccacaaaatgcaggttatatgcaagctttgaagaaggtaacttctgtcatgcgtacccttaagaaggcagacatagaccttttagtggatcagcttgaacaagttagtgtaaacctaatggatttctttaagaatatcagtagtgtgggaactggcaatttagtggtcaatttgcttgttggcttgatggaaaaatttgcagacagctcacattcttggaatgttaatcatctgctgcagctctcacgcctgtttcctaaagatgttgtggatgctgtgatagatgtgtactatgtgcttcctcatgctgtaaggctcctgcagggagtacctggtaaaaacatcactgaaggcctcaaggatgtctacagcttcacactccttcatggcataaccatttcaaatatcaccaaggaagacttcgcaattgtgataaaaattcttttggatacaattgaattagtatcagataagccagatattatttcagaggctttagcttgttttcctgtggtttggtgctggaatcacacaaattctggatttcggcagaattcaaagatagacccctgcaatgtccatgggctcatgtcttcttccttttatggcaaagtggccagtatacttgatcatttccacctgtctccccaaggtgaagattcaccatgttcaaatgaaagctcccgaatggaaataactaggaaagtggtctgcataattcatgaattagtggactggaattctattcttctggagctctctgaagtcttccatgttaacatttctcttgtgaaaactgtgcagaaattttggcataagatattaccgtttgtcccaccttcaataaatcaaactagggatagcatctctgaactctgtcctagtggttccataaagcaagttgctttgcaaatcatagaaaaacttaaaaatgtcaactttacaaaagttacatcaggtgaaaatattcttgacaaactaagtagtttaaacaagatccttaacattaatgaagacacagagacatctgttcaaaatattatttcctcaaatttggaaaggacagtacaattgatttctgaagactggagcctagaaaaaagtacgcataatctactctctttattcatgatgctccagaatgcaaatgtcacaggtagcagtttagaagcattatcaagttttattgaaaaaagtgaaacaccttacaactttgaagaactatggcccaagtttcaacaaatcatgaaagacctaacccaagattttagaatcagacacctgctttctgaaatgaacaaaggaatcaaaagtataaattcaatggctcttcaaaagataactttgcagtttgcccatttcctggaaatcctggattcaccgtcattgaagacattagaaattattgaagattttctattggtcacaaaaaactggcttcaggaatatgcaaatgaggattactccagaatgatagaaacattattcattcctgtgaccaatgagagttcaactgaagatatagctttgttagccaaagctattgctactttttggggctctttaaaaaatatatctagagcaggcaattttgatgttgcctttcttacccatctgctaaatcaagaacagctgactaatttctcagttgttcagctgctttttgaaaacatcctaattaatttgatcaataacttagctgggaattctcaggaagcagcttggaacttaaatgatactgaccttcaaataatgaatttcattaaccttatcttgaaccatatgcagtcagaaactagtaggaaaacagttctctctctgagaagcatagtagatttcacagaacagtttttgaaaacattcttctccctttttctaaaggaagattctgagaacaaaatatctcttctgctgaaatatttccacaaagatgttattgcagagatgagttttgtcccaaaagataaaattctagaaattctgaaactggatcaatttcttaccctgatgatacaagacagattgatgaacattttttcaagtttaaaggagactatatatcacctaatgaaaagttcatttatattagacaatggagaattttattttgatactcatcaaggactgaagttcatgcaagatttatttaatgcccttctcagggaaacttcaatgaaaaataagactgaaaataatatagactttttcacagtggtgagtcagttgtttttccatgtgaataagtctgaggacctcttcaaactcaatcaagatcttgggtcagctcttcaccttgtaagagaatgttcaacagagatggcaagacttctggatacaattttacactctcctaataaggacttctatgctttgtatcctaccctccaagaagttatacttgctaatctaacggatttgcttttctttataaataattcattccctctaagaaacagagcaacattagaaattactaagagattagttggtgctatttcaagagcaagtgaagaaagtcacgtcctgaaacccctcttagaaatgtctgggactctggtcatgctgttgaatgacagtgctgacctgagagatcttgccacatcaatggactccattgtgaaacttcttaagctggtcaagaaagtttcggggaagatgtccacagtttttaaaactcattttatctccaataccaaggacagtgtgaaattctttgacactctgtattccatcatgcaacaaagtgttcaaaatcttgtgaaagaaatagctactttaaaaaaaatagatcatttcacatttgaaaagataaatgatttgttggtgccatttcttgacttggcctttgaaatgattggggtagaaccttatatatcatcaaactctgatattttcagtatgtcacctagcatactctcatatatgaaccaatctaaggacttttctgatattttggaagaaattgctgaatttttaacatctgtgaaaatgaacttggaagatatgaggagtcttgcggtagcatttaacaatgagactcaaacattttctatggattctgtcaacttacgggaagaaattctgggttgcttagttcctataaataacatcaccaaccaaatggacttcttataccctaatccaatttccactcatagtggccctcaagatataaaatgggaaataattcatgaagtgatcccttttttggataaaatattatcacaaaacagcacagaaataggatctttcttgaaaatggtgatctgtctcaccttagaagctctttggaaaaacttaaagaaagataattggaatgtttctaatgtgttgatgacatttactcagcatccaaataaccttttgaaaaccatagaaacagttttagaggcctccagtggaattaaaagtgactatgaaggtgatttgaataaaagtttatattttgacacacctttgagtcagaatataactcatcatcaacttgaaaaagcaatccataatgttttaagtagaatagctctctggaggaaaggacttctgtttaacaactctgaatggataacttccacaagaactttgtttcagccactttttgagattttcattaaagcaaccaccggaaagaatgtcacatcagaaaaagaagagagaaccaagaaagagatgattgactttccttatagtttcaaaccatttttctgtttggagaaatacctgggaggattatttgtattgactaaatactggcaacaaatcccactaacagatcaaagtgttgttgagatttgtgaagttttccagcagactgtgaagccctcagaagccatggagatgctgcagaaagtgaagatgatggtcgtacgtgtgctcaccatcgttgcagaaaacccttcctggaccaaggacattttgtgtgctactctgagttgcaagcaaaatgggataaggcatctcattttatctgctatacaaggggtcactttggcgcaggaccacttccaggaaattgaaaagatatggtcctcgccgaatcagctaaattgtgaaagtcttagcaagaatctttctagcaccttggagagcttcaagagcagcttggaaaatgccactggccaggactgcacaagccagccgaggctggagacggtgcagcagcacttgtacatgttggccaaaagcctcgaggaaacttggtcatcagggaatcccatcatgacttttctcagcaatttcacagtaactgaggatgtaaaaataaaagatttgatgaagaatatcaccaagttgactgaggagcttcgctcttccatccaaatctcgaatgagactatccatagcattctagaagcaaatatttcccactccaaggttctcttcagtgccctcaccgtagctctgtctggaaagtgtgatcaggaaatccttcatctcctgctgacatttcccaaaggggaaaaatcttggatcgcagcggaggaactctgtagcctgccagggtcaaaagtgtattctctgattgtgttgctgagtcgaaacttggatgtgcgagctttcatttacaagactctgatgccttctgaagcaaatggcttgctcaactccttgctggatatagtttccagcctcagcgccttgcttgccaaagcccagcacgtctttgagtatcttcctgagtttcttcacacatttaaaatcactgccttgctagaaaccctggactttcaacaggtttcacaaaatgtccaggccagaagttcagcttttggttctttccagtttgtgatgaagatggtttgcaaggaccaagcatcattccttagcgattctaatatgtttattaatttgcccagagttaaggaactcttggaagatgacaaagaaaaattcaacattcctgaagattcaacaccgttttgcttgaagctttatcaggaaattctacaattgccaaatggtgctttggtgtggaccttcctaaaacccatattgcatggaaaaatactatacacaccaaacactccagaaattaacaaggtcattcaaaaggctaattacaccttttatattgtggacaaactaaaaactttatcagaaacactgctggaaatgtccagccttttccagagaagtggaagtggccagatgttcaaccagctgcaggaggccctgagaaacaaatttgtaagaaactttgtagaaaaccagttgcacattgatgtagacaaacttactgaaaaactccagacatacggagggctgctggatgagatgtttaaccatgcaggcgctggacgcttccgtttcttgggcagcatcttggtcaatctctcttcctgcgtggcactgaaccgtttccaggctctgcagtctgtcgacatcctggagactaaagcacatgaactcttgcagcagaacagcttcttggccagtatcattttcagcaattccttattcgacaagaacttcagatcagagtctgtcaaactgccaccccatgtctcatacacaatccggaccaatgtgttatacagcgtgcgaacagatgtggtaaaaaacccttcttggaagttccaccctcagaatctaccagctgatgggttcaaatataactacgtctttgccccactgcaagacatgatcgaaagagccatcattttggtgcagactgggcaggaagccctggaaccagcagcacagactcaggcggccccttacccctgccataccagcgacctattcctgaacaacgttggtttcttttttccactgataatgatgctgacgtggatggtgtctgtggccagcatggtcagaaagttggtgtatgagcaggagatacagatagaagagtatatgcggatgatgggagtgcatccagtgatccatttcctggcctggttcctggagaacatggctgtgttgaccataagcagtgctactctggccatcgttctgaaaacaagtggcatctttgcacacagcaatacctttattgttttcctctttctcttggattttgggatgtcagtcgtcatgctgagctacctcttgagtgcatttttcagccaagctaatacagcggccctttgtaccagcctggtgtacatgatcagctttctgccctacatagttctattggttctacataaccaattaagttttgttaatcagacatttctgtgccttctttcgacaaccgcctttggacaaggggtattttttattacattcctggaaggacaagagacagggattcaatggaataatatgtaccaggctctggaacaagggggcatgacatttggctgggtttgctggatgattctttttgattcaagcctttattttttgtgtggatggtacttgagcaacttgattcctggaacatttggtttacggaaaccatggtatttcccctttactgcctcatattggaagagtgtgggtttcttggtggagaaaaggcaatactttctaagttctagtctgttcttcttcaatgagaactttgacaataaagggtcatcactgcaaaacagggaaggagagcttgaaggaagtgccccgggagtcaccctggtgtctgtgaccaaggaatatgagggccacaaggctgtggtccaagacctcagcctgaccttctacagagaccaaatcaccgccctgctggggacaaacggtgccgggaaaaccactatcatatccatgttgacggggctccaccctcccacttctggaaccatcatcatcaatggcaagaacctacagacagacctgtcgagggtcagaatggagcttggtgtgtgtccgcagcaggacatcctgttggacaacctcaccgtccgggaacatttgctgctctttgcttccataaaggcgcctcagtggaccaagaaggagctgcatcagcaagtcaatcaaactcttcaggatgtggacttaactcagcatcagcacaaacagacccgagctctgtctggaggcctgaagaggaagctctcccttggcattgctttcatgggcatgtcgaggaccgtggttctggatgagcccaccagtggggtggacccttgctcccggcatagcctgtgggacattctgctcaagtaccgagaaggtcgtacgatcatcttcacaacccaccacctggatgaagctgaagcgctgagtgaccgcgtggccgtcctccagcatgggaggctcaggtgctgcggtcctcccttctgcctgaaggaggcatatggccaggggctccgcctgacactcacgaggcagccttctgttctggaggcccatgatctgaaagacatggcttgtgttacatccctgataaagatctatattccacaagcatttctcaaagacagcagtggaagtgagctgacctacaccattccaaaggacacagacaaggcctgcttgaaagggctcttccaggccctggatgagaacctgcatcagctgcacctgacgggctatgggatctcagacaccaccttagaagaggtgtttttgatgcttttgcaagattccaacaagaaatctcacattgccctggggactgagtcagagctgcagaaccacaggcctacaggacatctgtctggctactgtggctccctagcacggcccgcaactgtgcagggcgtccagctgctccgcgcacaagtggccgcgatcctggcccggaggctccgccgcacgctgcgcgccgggaagagcaccctcgccgacctgctgctgccagtcctcttcgtggccttggccatgggcttgttcatggtgagacccctggccaccgagtaccctcccctcagactcacacctggacattaccagcgggccgagacctactttttcagcagcagtgggggcgacaacttggacctcacccgtgtgcttctgcggaagtttagagatcaagatttgccctgtgcagatttaaacccacgccagaagaattcttcatgctggcgcacagatcccttttctcacccagaattccaggattcatgtggctgcctgaagtgtccaaatagaagtgctagtgctccctacctgaccaaccacctgggccacacactgttgaatctctcaggcttcaatatggaggagtacttgctggcaccatctgaaaaaccaaggcttggaggttggtcttttggattaaaaatccccagtgaagctggaggtgcaaatggaaacatatcaaaacccccaactctggcaaaggtgtggtataatcagaagggttttcattccctaccttcctacttaaatcatctaaacaaccttattttgtggcagcacctaccccctactgtggactggagacaatacggaataacactctacagccacccatatggaggggccttgctgaacgaggacaagatctcttttacttggtttccgtctgcctgtgtgttgccgttattgtcgccttccagttaacagcttttactttccgcaagaacttggcagccacggccctcctgctgtcacttttcggatatgcaactcttccatggatgtacctgatgtccagaatcttttccagttcggacgtggctttcatttcctatgtctcactaa

SEQ ID NO: 192 - DNA, 13582 bp, Homo sapiens
atataagcaccatccttacaggctggcttcctgactgagagcagggagcagcaggcatggggcatgccgggtgccagttcaaagccctgctgtggaagaattggctctgcagactcaggaacccggtccttttccttgctgaattcttctggccttgtatcctgtttgtaattctgacagttcttcgttttcaagaacctcccagatacagagacatttgttatttgcagccccgagatctacccagctgtggtgttatcccctttgttcaaagccttctttgtaacactggatcaaggtgtaggaacttcagctatgaagggtcaatggagcatcattttcgtttgtctaggttccaaactgcagctgaccccaagaaagtcaacaacctggcctttttaaaagagatacaagacctggcagaggaaattcatggaatgatggacaaggcaaaaaacttaaaaagactttgggtagaacgatccaacactccagattcttcttatggttccagtttttttacaatggatctcaataagaccgaggaggtaatattgaaactggaaagcctccatcagcagcctcatatctgggattttctacttttactgccgagactacacacaagccatgatcatgtggaagatggcatggatgttgcagtgaaccttctccagaccattttgaattccttaatatccctagaagatttagattggcttccactcaaccaaactttttcccaggtttctgaacttgtactgaatgtgaccatttcgacactgacatttctgcagcaacatggagtagcagtcaccgagccagtttaccacctgtccatgcagaatatagtgtgggatccacagaaagtccagtatgatctcaaatcccagtttggctttgatgatcttcacacggaacagatcctgaactcttcagctgaactgaaggagattcccacagacacttccttggagaagatggtgtgttcagtcttgtctagcacatcagaggatgaagctgagaaatggggccacgttggaggctgccaccctaagtggtcagaagccaaaaactatcttgtccatgcagtcagctggctgcgagtctaccaacaggtgtttgttcagtggcaacagggtagcctgcttcagaagacactcacaggcatgggccatagtctggaggctctcaggaatcagtttgaagaagagagcaagccctggaaggtggtggaagctctgcacactgcactgctcctgctgaatgacagcttgtcagcagatggcccaaaagataatcatacatttccaaagatattacagcatctgtggaaattgcaaagcttgctgcaaaacctgccccagtggccggcactgaagagatttcttcagcttgatggagctctcagaaatgcgatagctcagaatttacattttgtccaagaagtcctcatttgcctggagacatcagctaatgattttaaatggtttgaacttaaccaattgaaactggaaaaggatgtgttcttttgggagctgaaacagatgttggcgaagaatgctgtctgcccgaatggtcgtttctctgagaaggaggtctttttgccgcctggaaactccagcatatggggtggtctccagggactgttgtgctattgtaactcctctgagacgagtgttttaaacaagctacttggttcagtagaggatgctgatcgtattttgcaagaggtcattacttggcacaaaaatatgtcagttttaatacctgaagaatatttggactggcaggaacttgagatgcagctgtcagaagcaagcctttcctgtactcggctcttcctgctgctgggagctgatccctctcctgagaatgatgtcttttctagtgactgtaagcaccagcttgtctccacagtgatatttcatacacttgaaaaaacacaatttttcctggaacaagcatattattggaaagccttcaaaaagtttatcaggaagacttgcgaagtggcccaatatgtaaatatgcaagagagtttccagaacagactattggcttttcctgaggaatctccttgttttgaagaaaacatggattggaaaatgatcagtgataattattttcaatttttgaataacttactcaagtctccaacagcttccatatccagggctttaaatttcacaaagcaccttctaatgatggaaaagaagttgcacacccttgaggatgaacaaatgaactttcttttatcatttgtggaattttttgagaaattattgttgcctaatctttttgactcctccattgttcccagtttccacagcctcccatctctcacagaggatattctgaatataagttctctgtggacaaatcatttaaaaagtttaaagagagacccatctgccactgatgctcagaaactcttggaatttggcaacgaagtgatttggaaaatgcagactctcggaagtcactggataaggaaggaaccaaaaaatcttttgagattcatagaattaatactttttgaaattaatcccaaattactagaattatgggcctatggcatttcaaaaggaaaaagagctaaattggaaaacttctttacacttttaaatttttctgttccagaaaatgagattctgagtacaagttttaacttttcccagttgttccattcagattggcctaaatcaccagctatgaacatagattttgtacgtttaagtgaggctataataactagtctccatgaatttggatttttggagcaggaacagatctcagaagctctgaacacagtctacgctatcaggaatgcatctgatcttttctcagccctttctgaaccacaaaaacaagaagttgataaaattttgactcacatacacctaaatgtcttccaggacaaggattcagctttacttctgcaaatttattcttcattttaccgatatatttatgaattattgaatattcagagtagaggctcttcgttgactttccttacacaaatctcaaaacacattttggatatcataaaacaatttaatttccaaaacatcagtaaagcatttgcatttttatttaagacagcagaggttcttgggggaatttctaatgtatcttactgtcagcaattgctttcaatttttaactttttggagcttcaggcccaatccttcatgtctacagagggccaagaactggaagtgatccacactactttgacaggcctcaaacagctgctcataattgatgaagattttcgtatttctttatttcaatatatgagccaattcttcaacagttcagtagaagacctattggataataaatgcttgatttcggacaataaacacatttcttccgtaaattattcaacaagtgaggagtcttcatttgtttttccattggcacaaattttttcaaacctctcagcaaatgtcagtgtgttcaacaagtttatgtccattcactgtaccgtttcatggcttcaaatgtggactgaaatctgggaaaccatatctcaattatttaagtttgacatgaatgttttcacatctcttcatcatggtttcactcagcttttggatgaattggaagatgatgtgaaagtctctaaaagctgccagggtatacttcccacccataatgttgctagactcatattaaatttgtttaaaaatgtaactcaagccaatgacttccataattgggaggacttcctggatctcagggattttttggtagctttaggtaatgcattagtttcagtaaaaaaacttaacttggagcaagtggagaaatcccttttcaccatggaagctgccctgcatcagttgaagacatttccattcaacgaaagtacaagcagagagtttttaaattctctgcttgaagttttcattgagtttagcagtacctcagaatatatagtcagaaatctagattcaataaatgactttctttcaaataatctcacaaattatggagaaaaatttgaaaatatcatcactgagctaagagaagcaatagtatttcttagaaatgtatcacatgatcgagatttgttttcctgtgctgatattttccaaaatgttactgagtgtattttagaagatggctttttatatgtaaatacctcacagaggatgttacgtattctagacacgttaaattccacattttcctctgagaacacaattagcagtctgaaaggatgcattgtatggttagatgtcataaaccatttgtatttgttgtctaactccagtttttcacaaggtcatcttcaaaatattttggggaatttcagagatatagaaaacaaaatgaactctatattaaaaattgtaacttgggtgttaaatataaaaaaacctctttgttcatcaaatggctcacatataaattgtgtcaatatttacttgaaagatgtaactgactttctaaatattgtacttactacagtctttgaaaaagagaagaaacctaaatttgagattttattagctcttttaaatgattccacaaagcaagtaaggatgagtatcaacaacttaacaacagactttgattttgcatctcagtccaattggagatattttactgaattaattctaagaccaatagaaatgtcagatgaaattcctaatcagtttcaaaatatttggcttcatttaataacactggggaaggaatttcagaagcttgtaaaaggtatttactttaacatcctggaaaataattcctcttctaaaactgaaaacttgttaaacatatttgccaccagtccaaaagaaaaggatgtaaacagtgtaggcaattccatttatcacttagctagttaccttgccttcagcttatctcatgacctccaaaattcaccaaaaataataatttcacctgaaataatgaaagctacaggtcttggtattcaactgataagggatgtgttcaactccttaatgcctgtagttcatcacactagtccacaaaatgcaggttatatgcaagctttgaagaaggtaacttctgtcatgcgtacccttaagaaggcagacatagaccttttagtggatcagcttgaacaagttagtgtaaacctaatggatttctttaagaatatcagtagtgtgggaactggcaatttagtggtcaatttgcttgttggcttgatggaaaaatttgcagacagctcacattcttggaatgttaatcatctgctgcagctctcacgcctgtttcctaaagatgttgtggatgctgtgatagatgtgtactatgtgcttcctcatgctgtaaggctcctgcagggagtacctggtaaaaacatcactgaaggcctcaaggatgtctacagcttcacactccttcatggcataaccatttcaaatatcaccaaggaagacttcgcaattgtgataaaaattcttttggatacaattgaattagtatcagataagccagatattatttcagaggctttagcttgttttcctgtggtttggtgctggaatcacacaaattctggatttcggcagaattcaaagatagacccctgcaatgtccatgggctcatgtcttcttccttttatggcaaagtggccagtatacttgatcatttccacctgtctccccaaggtgaagattcaccatgttcaaatgaaagctcccgaatggaaataactaggaaagtggtctgcataattcatgaattagtggactggaattctattcttctggagctctctgaagtcttccatgttaacatttctcttgtgaaaactgtgcagaaattttggcataagatattaccgtttgtcccaccttcaataaatcaaactagggatagcatctctgaactctgtcctagtggttccataaagcaagttgctttgcaaatcatagaaaaacttaaaaatgtcaactttacaaaagttacatcaggtgaaaatattcttgacaaactaagtagtttaaacaagatccttaacattaatgaagacacagagacatctgttcaaaatattatttcctcaaatttggaaaggacagtacaattgatttctgaagactggagcctagaaaaaagtacgcataatctactctctttattcatgatgctccagaatgcaaatgtcacaggtagcagtttagaagcattatcaagttttattgaaaaaagtgaaacaccttacaactttgaagaactatggcccaagtttcaacaaatcatgaaagacctaacccaagattttagaatcagacacctgctttctgaaatgaacaaaggaatcaaaagtataaattcaatggctcttcaaaagataactttgcagtttgcccatttcctggaaatcctggattcaccgtcattgaagacattagaaattattgaagattttctattggtcacaaaaaactggcttcaggaatatgcaaatgaggattactccagaatgatagaaacattattcattcctgtgaccaatgagagttcaactgaagatatagctttgttagccaaagctattgctactttttggggctctttaaaaaatatatctagagcaggcaattttgatgttgcctttcttacccatctgctaaatcaagaacagctgactaatttctcagttgttcagctgctttttgaaaacatcctaattaatttgatcaataacttagctgggaattctcaggaagcagcttggaacttaaatgatactgaccttcaaataatgaatttcattaaccttatcttgaaccatatgcagtcagaaactagtaggaaaacagttctctctctgagaagcatagtagatttcacagaacagtttttgaaaacattcttctccctttttctaaaggaagattctgagaacaaaatatctcttctgctgaaatatttccacaaagatgttattgcagagatgagttttgtcccaaaagataaaattctagaaattctgaaactggatcaatttcttaccctgatgatacaagacagattgatgaacattttttcaagtttaaaggagactatatatcacctaatgaaaagttcatttatattagacaatggagaattttattttgatactcatcaaggactgaagttcatgcaagatttatttaatgcccttctcagggaaacttcaatgaaaaataagactgaaaataatatagactttttcacagtggtgagtcagttgtttttccatgtgaataagtctgaggacctcttcaaactcaatcaagatcttgggtcagctcttcaccttgtaagagaatgttcaacagagatggcaagacttctggatacaattttacactctcctaataaggacttctatgctttgtatcctaccctccaagaagttatacttgctaatctaacggatttgcttttctttataaataattcattccctctaagaaacagagcaacattagaaattactaagagattagttggtgctatttcaagagcaagtgaagaaagtcacgtcctgaaacccctcttagaaatgtctgggactctggtcatgctgttgaatgacagtgctgacctgagagatcttgccacatcaatggactccattgtgaaacttcttaagctggtcaagaaagtttcggggaagatgtccacagtttttaaaactcattttatctccaataccaaggacagtgtgaaattctttgacactctgtattccatcatgcaacaaagtgttcaaaatcttgtgaaagaaatagctactttaaaaaaaatagatcatttcacatttgaaaagataaatgatttgttggtgccatttcttgacttggcctttgaaatgattggggtagaaccttatatatcatcaaactctgatattttcagtatgtcacctagcatactctcatatatgaaccaatctaaggacttttctgatattttggaagaaattgctgaatttttaacatctgtgaaaatgaacttggaagatatgaggagtcttgcggtagcatttaacaatgagactcaaacattttctatggattctgtcaacttacgggaagaaattctgggttgcttagttcctataaataacatcaccaaccaaatggacttcttataccctaatccaatttccactcatagtggccctcaagatataaaatgggaaataattcatgaagtgatcccttttttggataaaatattatcacaaaacagcacagaaataggatctttcttgaaaatggtgatctgtctcaccttagaagctctttggaaaaacttaaagaaagataattggaatgtttctaatgtgttgatgacatttactcagcatccaaataaccttttgaaaaccatagaaacagttttagaggcctccagtggaattaaaagtgactatgaaggtgatttgaataaaagtttatattttgacacacctttgagtcagaatataactcatcatcaacttgaaaaagcaatccataatgttttaagtagaatagctctctggaggaaaggacttctgtttaacaactctgaatggataacttccacaagaactttgtttcagccactttttgagattttcattaaagcaaccaccggaaagaatgtcacatcagaaaaagaagagagaaccaagaaagagatgattgactttccttatagtttcaaaccatttttctgtttggagaaatacctgggaggattatttgtattgactaaatactggcaacaaatcccactaacagatcaaagtgttgttgagatttgtgaagttttccagcagactgtgaagccctcagaagccatggagatgctgcagaaagtgaagatgatggtcgtacgtgtgctcaccatcgttgcagaaaacccttcctggaccaaggacattttgtgtgctactctgagttgcaagcaaaatgggataaggcatctcattttatctgctatacaaggggtcactttggcgcaggaccacttccaggaaattgaaaagatatggtcctcgccgaatcagctaaattgtgaaagtcttagcaagaatctttctagcaccttggagagcttcaagagcagcttggaaaatgccactggccaggactgcacaagccagccgaggctggagacggtgcagcagcacttgtacatgttggccaaaagcctcgaggaaacttggtcatcagggaatcccatcatgacttttctcagcaatttcacagtaactgaggatgtaaaaataaaagatttgatgaagaatatcaccaagttgactgaggagcttcgctcttccatccaaatctcgaatgagactatccatagcattctagaagcaaatatttcccactccaaggttctcttcagtgccctcaccgtagctctgtctggaaagtgtgatcaggaaatccttcatctcctgctgacatttcccaaaggggaaaaatcttggatcgcagcggaggaactctgtagcctgccagggtcaaaagtgtattctctgattgtgttgctgagtcgaaacttggatgtgcgagctttcatttacaagactctgatgccttctgaagcaaatggcttgctcaactccttgctggatatagtttccagcctcagcgccttgcttgccaaagcccagcacgtctttgagtatcttcctgagtttcttcacacatttaaaatcactgccttgctagaaaccctggactttcaacaggtttcacaaaatgtccaggccagaagttcagcttttggttctttccagtttgtgatgaagatggtttgcaaggaccaagcatcattccttagcgattctaatatgtttattaatttgcccagagttaaggaactcttggaagatgacaaagaaaaattcaacattcctgaagattcaacaccgttttgcttgaagctttatcaggaaattctacaattgccaaatggtgctttggtgtggaccttcctaaaacccatattgcatggaaaaatactatacacaccaaacactccagaaattaacaaggtcattcaaaaggctaattacaccttttatattgtggacaaactaaaaactttatcagaaacactgctggaaatgtccagccttttccagagaagtggaagtggccagatgttcaaccagctgcaggaggccctgagaaacaaatttgtaagaaactttgtagaaaaccagttgcacattgatgtagacaaacttactgaaaaactccagacatacggagggctgctggatgagatgtttaaccatgcaggcgctggacgcttccgtttcttgggcagcatcttggtcaatctctcttcctgcgtggcactgaaccgtttccaggctctgcagtctgtcgacatcctggagactaaagcacatgaactcttgcagcagaacagcttcttggccagtatcattttcagcaattccttattcgacaagaacttcagatcagagtctgtcaaactgccaccccatgtctcatacacaatccggaccaatgtgttatacagcgtgcgaacagatgtggtaaaaaacccttcttggaagttccaccctcagaatctaccagctgatgggttcaaatataactacgtctttgccccactgcaagacatgatcgaaagagccatcattttggtgcagactgggcaggaagccctggaaccagcagcacagactcaggcggccccttacccctgccataccagcgacctattcctgaacaacgttggtttcttttttccactgataatgatgctgacgtggatggtgtctgtggccagcatggtcagaaagttggtgtatgagcaggagatacagatagaagagtatatgcggatgatgggagtgcatccagtgatccatttcctggcctggttcctggagaacatggctgtgttgaccataagcagtgctactctggccatcgttctgaaaacaagtggcatctttgcacacagcaatacctttattgttttcctctttctcttggattttgggatgtcagtcgtcatgctgagctacctcttgagtgcatttttcagccaagctaatacagcggccctttgtaccagcctggtgtacatgatcagctttctgccctacatagttctattggttctacataaccaattaagttttgttaatcagacatttctgtgccttctttcgacaaccgcctttggacaaggggtattttttattacattcctggaaggacaagagacagggattcaatggaataatatgtaccaggctctggaacaagggggcatgacatttggctgggtttgctggatgattctttttgattcaagcctttattttttgtgtggatggtacttgagcaacttgattcctggaacatttggtttacggaaaccatggtatttcccctttactgcctcatattggaagagtgtgggtttcttggtggagaaaaggcaatactttctaagttctagtctgttcttcttcaatgagaactttgacaataaagggtcatcactgcaaaacagggaaggagagcttgaaggaagtgccccgggagtcaccctggtgtctgtgaccaaggaatatgagggccacaaggctgtggtccaagacctcagcctgaccttctacagagaccaaatcaccgccctgctggggacaaacggtgccgggaaaaccactatcatatccatgttgacggggctccaccctcccacttctggaaccatcatcatcaatggcaagaacctacagacagacctgtcgagggtcagaatggagcttggtgtgtgtccgcagcaggacatcctgttggacaacctcaccgtccgggaacatttgctgctctttgcttccataaaggcgcctcagtggaccaagaaggagctgcatcagcaagtcaatcaaactcttcaggatgtggacttaactcagcatcagcacaaacagacccgagctctgtctggaggcctgaagaggaagctctcccttggcattgctttcatgggcatgtcgaggaccgtggttctggatgagcccaccagtggggtggacccttgctcccggcatagcctgtgggacattctgctcaagtaccgagaaggtcgtacgatcatcttcacaacccaccacctggatgaagctgaagcgctgagtgaccgcgtggccgtcctccagcatgggaggctcaggtgctgcggtcctcccttctgcctgaaggaggcatatggccaggggctccgcctgacactcacgaggcagccttctgttctggaggcccatgatctgaaagacatggcttgtgttacatccctgataaagatctatattccacaagcatttctcaaagacagcagtggaagtgagctgacctacaccattccaaaggacacagacaaggcctgcttgaaagggctcttccaggccctggatgagaacctgcatcagctgcacctgacgggctatgggatctcagacaccaccttagaagaggtgtttttgatgcttttgcaagattccaacaagaaatctcacattgccctggggactgagtcagagctgcagaaccacaggcctacaggacatctgtctggctactgtggctccctagcacggcccgcaactgtgcagggcgtccagctgctccgcgcacaagtggccgcgatcctggcccggaggctccgccgcacgctgcgcgccgggaagagcaccctcgccgacctgctgctgccagtcctcttcgtggccttggccatgggcttgttcatggtgagacccctggccaccgagtaccctcccctcagactcacacctggacattaccagcgggccgagacctactttttcagcagcagtgggggcgacaacttggacctcacccgtgtgcttctgcggaagtttagagatcaagatttgccctgtgcagatttaaacccacgccagaagaattcttcatgctggcgcacagatcccttttctcacccagaattccaggattcatgtggctgcctgaagtgtccaaatagaagtgctagtgctccctacctgaccaaccacctgggccacacactgttgaatctctcaggcttcaatatggaggagtacttgctggcaccatctgaaaaaccaaggcttggaggttggtcttttggattaaaaatccccagtgaagctggaggtgcaaatggaaacatatcaaaacccccaactctggcaaaggtgtggtataatcagaagggttttcattccctaccttcctacttaaatcatctaaacaaccttattttgtggcagcacctaccccctactgtggactggagacaatacggaataacactctacagccacccatatggaggggccttgctgaacgaggacaagatctcttttacttggtttccgtctgcctgtgtgttgccgttattgtcgccttccagttaacagcttttactttccgcaagaacttggcagccacggccctcctgctgtcacttttcgggtatgtgatgagaaacgctgctgcagaattacggtttgttttctgaaagagaaaaccctca

SEQ ID NO: 193 - DNA, 13528 bp, Homo sapiens
atataagcaccatccttacaggctggcttcctgactgagagcagggagcagcaggcatggggcatgccgggtgccagttcaaagccctgctgtggaagaattggctctgcagactcaggaacccggtccttttccttgctgaattcttctggccttgtatcctgtttgtaattctgacagttcttcgttttcaagaacctcccagatacagagacatttgttatttgcagccccgagatctacccagctgtggtgttatcccctttgttcaaagccttctttgtaacactggatcaaggtgtaggaacttcagctatgaagggtcaatggagcatcattttcgtttgtctaggttccaaactgcagctgaccccaagaaagtcaacaacctggcctttttaaaagagatacaagacctggcagaggaaattcatggaatgatggacaaggcaaaaaacttaaaaagactttgggtagaacgatccaacactccagattcttcttatggttccagtttttttacaatggatctcaataagaccgaggaggtaatattgaaactggaaagcctccatcagcagcctcatatctgggattttctacttttactgccgagactacacacaagccatgatcatgtggaagatggcatggatgttgcagtgaaccttctccagaccattttgaattccttaatatccctagaagatttagattggcttccactcaaccaaactttttcccaggtttctgaacttgtactgaatgtgaccatttcgacactgacatttctgcagcaacatggagtagcagtcaccgagccagtttaccacctgtccatgcagaatatagtgtgggatccacagaaagtccagtatgatctcaaatcccagtttggctttgatgatcttcacacggaacagatcctgaactcttcagctgaactgaaggagattcccacagacacttccttggagaagatggtgtgttcagtcttgtctagcacatcagaggatgaagctgagaaatggggccacgttggaggctgccaccctaagtggtcagaagccaaaaactatcttgtccatgcagtcagctggctgcgagtctaccaacaggtgtttgttcagtggcaacagggtagcctgcttcagaagacactcacaggcatgggccatagtctggaggctctcaggaatcagtttgaagaagagagcaagccctggaaggtggtggaagctctgcacactgcactgctcctgctgaatgacagcttgtcagcagatggcccaaaagataatcatacatttccaaagatattacagcatctgtggaaattgcaaagcttgctgcaaaacctgccccagtggccggcactgaagagatttcttcagcttgatggagctctcagaaatgcgatagctcagaatttacattttgtccaagaagtcctcatttgcctggagacatcagctaatgattttaaatggtttgaacttaaccaattgaaactggaaaaggatgtgttcttttgggagctgaaacagatgttggcgaagaatgctgtctgcccgaatggtcgtttctctgagaaggaggtctttttgccgcctggaaactccagcatatggggtggtctccagggactgttgtgctattgtaactcctctgagacgagtgttttaaacaagctacttggttcagtagaggatgctgatcgtattttgcaagaggtcattacttggcacaaaaatatgtcagttttaatacctgaagaatatttggactggcaggaacttgagatgcagctgtcagaagcaagcctttcctgtactcggctcttcctgctgctgggagctgatccctctcctgagaatgatgtcttttctagtgactgtaagcaccagcttgtctccacagtgatatttcatacacttgaaaaaacacaatttttcctggaacaagcatattattggaaagccttcaaaaagtttatcaggaagacttgcgaagtggcccaatatgtaaatatgcaagagagtttccagaacagactattggcttttcctgaggaatctccttgttttgaagaaaacatggattggaaaatgatcagtgataattattttcaatttttgaataacttactcaagtctccaacagcttccatatccagggctttaaatttcacaaagcaccttctaatgatggaaaagaagttgcacacccttgaggatgaacaaatgaactttcttttatcatttgtggaattttttgagaaattattgttgcctaatctttttgactcctccattgttcccagtttccacagcctcccatctctcacagaggatattctgaatataagttctctgtggacaaatcatttaaaaagtttaaagagagacccatctgccactgatgctcagaaactcttggaatttggcaacgaagtgatttggaaaatgcagactctcggaagtcactggataaggaaggaaccaaaaaatcttttgagattcatagaattaatactttttgaaattaatcccaaattactagaattatgggcctatggcatttcaaaaggaaaaagagctaaattggaaaacttctttacacttttaaatttttctgttccagaaaatgagattctgagtacaagttttaacttttcccagttgttccattcagattggcctaaatcaccagctatgaacatagattttgtacgtttaagtgaggctataataactagtctccatgaatttggatttttggagcaggaacagatctcagaagctctgaacacagtctacgctatcaggaatgcatctgatcttttctcagccctttctgaaccacaaaaacaagaagttgataaaattttgactcacatacacctaaatgtcttccaggacaaggattcagctttacttctgcaaatttattcttcattttaccgatatatttatgaattattgaatattcagagtagaggctcttcgttgactttccttacacaaatctcaaaacacattttggatatcataaaacaatttaatttccaaaacatcagtaaagcatttgcatttttatttaagacagcagaggttcttgggggaatttctaatgtatcttactgtcagcaattgctttcaatttttaactttttggagcttcaggcccaatccttcatgtctacagagggccaagaactggaagtgatccacactactttgacaggcctcaaacagctgctcataattgatgaagattttcgtatttctttatttcaatatatgagccaattcttcaacagttcagtagaagacctattggataataaatgcttgatttcggacaataaacacatttcttccgtaaattattcaacaagtgaggagtcttcatttgtttttccattggcacaaattttttcaaacctctcagcaaatgtcagtgtgttcaacaagtttatgtccattcactgtaccgtttcatggcttcaaatgtggactgaaatctgggaaaccatatctcaattatttaagtttgacatgaatgttttcacatctcttcatcatggtttcactcagcttttggatgaattggaagatgatgtgaaagtctctaaaagctgccagggtatacttcccacccataatgttgctagactcatattaaatttgtttaaaaatgtaactcaagccaatgacttccataattgggaggacttcctggatctcagggattttttggtagctttaggtaatgcattagtttcagtaaaaaaacttaacttggagcaagtggagaaatcccttttcaccatggaagctgccctgcatcagttgaagacatttccattcaacgaaagtacaagcagagagtttttaaattctctgcttgaagttttcattgagtttagcagtacctcagaatatatagtcagaaatctagattcaataaatgactttctttcaaataatctcacaaattatggagaaaaatttgaaaatatcatcactgagctaagagaagcaatagtatttcttagaaatgtatcacatgatcgagatttgttttcctgtgctgatattttccaaaatgttactgagtgtattttagaagatggctttttatatgtaaatacctcacagaggatgttacgtattctagacacgttaaattccacattttcctctgagaacacaattagcagtctgaaaggatgcattgtatggttagatgtcataaaccatttgtatttgttgtctaactccagtttttcacaaggtcatcttcaaaatattttggggaatttcagagatatagaaaacaaaatgaactctatattaaaaattgtaacttgggtgttaaatataaaaaaacctctttgttcatcaaatggctcacatataaattgtgtcaatatttacttgaaagatgtaactgactttctaaatattgtacttactacagtctttgaaaaagagaagaaacctaaatttgagattttattagctcttttaaatgattccacaaagcaagtaaggatgagtatcaacaacttaacaacagactttgattttgcatctcagtccaattggagatattttactgaattaattctaagaccaatagaaatgtcagatgaaattcctaatcagtttcaaaatatttggcttcatttaataacactggggaaggaatttcagaagcttgtaaaaggtatttactttaacatcctggaaaataattcctcttctaaaactgaaaacttgttaaacatatttgccaccagtccaaaagaaaaggatgtaaacagtgtaggcaattccatttatcacttagctagttaccttgccttcagcttatctcatgacctccaaaattcaccaaaaataataatttcacctgaaataatgaaagctacaggtcttggtattcaactgataagggatgtgttcaactccttaatgcctgtagttcatcacactagtccacaaaatgcaggttatatgcaagctttgaagaaggtaacttctgtcatgcgtacccttaagaaggcagacatagaccttttagtggatcagcttgaacaagttagtgtaaacctaatggatttctttaagaatatcagtagtgtgggaactggcaatttagtggtcaatttgcttgttggcttgatggaaaaatttgcagacagctcacattcttggaatgttaatcatctgctgcagctctcacgcctgtttcctaaagatgttgtggatgctgtgatagatgtgtactatgtgcttcctcatgctgtaaggctcctgcagggagtacctggtaaaaacatcactgaaggcctcaaggatgtctacagcttcacactccttcatggcataaccatttcaaatatcaccaaggaagacttcgcaattgtgataaaaattcttttggatacaattgaattagtatcagataagccagatattatttcagaggctttagcttgttttcctgtggtttggtgctggaatcacacaaattctggatttcggcagaattcaaagatagacccctgcaatgtccatgggctcatgtcttcttccttttatggcaaagtggccagtatacttgatcatttccacctgtctccccaaggtgaagattcaccatgttcaaatgaaagctcccgaatggaaataactaggaaagtggtctgcataattcatgaattagtggactggaattctattcttctggagctctctgaagtcttccatgttaacatttctcttgtgaaaactgtgcagaaattttggcataagatattaccgtttgtcccaccttcaataaatcaaactagggatagcatctctgaactctgtcctagtggttccataaagcaagttgctttgcaaatcatagaaaaacttaaaaatgtcaactttacaaaagttacatcaggtgaaaatattcttgacaaactaagtagtttaaacaagatccttaacattaatgaagacacagagacatctgttcaaaatattatttcctcaaatttggaaaggacagtacaattgatttctgaagactggagcctagaaaaaagtacgcataatctactctctttattcatgatgctccagaatgcaaatgtcacaggtagcagtttagaagcattatcaagttttattgaaaaaagtgaaacaccttacaactttgaagaactatggcccaagtttcaacaaatcatgaaagacctaacccaagattttagaatcagacacctgctttctgaaatgaacaaaggaatcaaaagtataaattcaatggctcttcaaaagataactttgcagtttgcccatttcctggaaatcctggattcaccgtcattgaagacattagaaattattgaagattttctattggtcacaaaaaactggcttcaggaatatgcaaatgaggattactccagaatgatagaaacattattcattcctgtgaccaatgagagttcaactgaagatatagctttgttagccaaagctattgctactttttggggctctttaaaaaatatatctagagcaggcaattttgatgttgcctttcttacccatctgctaaatcaagaacagctgactaatttctcagttgttcagctgctttttgaaaacatcctaattaatttgatcaataacttagctgggaattctcaggaagcagcttggaacttaaatgatactgaccttcaaataatgaatttcattaaccttatcttgaaccatatgcagtcagaaactagtaggaaaacagttctctctctgagaagcatagtagatttcacagaacagtttttgaaaacattcttctccctttttctaaaggaagattctgagaacaaaatatctcttctgctgaaatatttccacaaagatgttattgcagagatgagttttgtcccaaaagataaaattctagaaattctgaaactggatcaatttcttaccctgatgatacaagacagattgatgaacattttttcaagtttaaaggagactatatatcacctaatgaaaagttcatttatattagacaatggagaattttattttgatactcatcaaggactgaagttcatgcaagatttatttaatgcccttctcagggaaacttcaatgaaaaataagactgaaaataatatagactttttcacagtggtgagtcagttgtttttccatgtgaataagtctgaggacctcttcaaactcaatcaagatcttgggtcagctcttcaccttgtaagagaatgttcaacagagatggcaagacttctggatacaattttacactctcctaataaggacttctatgctttgtatcctaccctccaagaagttatacttgctaatctaacggatttgcttttctttataaataattcattccctctaagaaacagagcaacattagaaattactaagagattagttggtgctatttcaagagcaagtgaagaaagtcacgtcctgaaacccctcttagaaatgtctgggactctggtcatgctgttgaatgacagtgctgacctgagagatcttgccacatcaatggactccattgtgaaacttcttaagctggtcaagaaagtttcggggaagatgtccacagtttttaaaactcattttatctccaataccaaggacagtgtgaaattctttgacactctgtattccatcatgcaacaaagtgttcaaaatcttgtgaaagaaatagctactttaaaaaaaatagatcatttcacatttgaaaagataaatgatttgttggtgccatttcttgacttggcctttgaaatgattggggtagaaccttatatatcatcaaactctgatattttcagtatgtcacctagcatactctcatatatgaaccaatctaaggacttttctgatattttggaagaaattgctgaatttttaacatctgtgaaaatgaacttggaagatatgaggagtcttgcggtagcatttaacaatgagactcaaacattttctatggattctgtcaacttacgggaagaaattctgggttgcttagttcctataaataacatcaccaaccaaatggacttcttataccctaatccaatttccactcatagtggccctcaagatataaaatgggaaataattcatgaagtgatcccttttttggataaaatattatcacaaaacagcacagaaataggatctttcttgaaaatggtgatctgtctcaccttagaagctctttggaaaaacttaaagaaagataattggaatgtttctaatgtgttgatgacatttactcagcatccaaataaccttttgaaaaccatagaaacagttttagaggcctccagtggaattaaaagtgactatgaaggtgatttgaataaaagtttatattttgacacacctttgagtcagaatataactcatcatcaacttgaaaaagcaatccataatgttttaagtagaatagctctctggaggaaaggacttctgtttaacaactctgaatggataacttccacaagaactttgtttcagccactttttgagattttcattaaagcaaccaccggaaagaatgtcacatcagaaaaagaagagagaaccaagaaagagatgattgactttccttatagtttcaaaccatttttctgtttggagaaatacctgggaggattatttgtattgactaaatactggcaacaaatcccactaacagatcaaagtgttgttgagatttgtgaagttttccagcagactgtgaagccctcagaagccatggagatgctgcagaaagtgaagatgatggtcgtacgtgtgctcaccatcgttgcagaaaacccttcctggaccaaggacattttgtgtgctactctgagttgcaagcaaaatgggataaggcatctcattttatctgctatacaaggggtcactttggcgcaggaccacttccaggaaattgaaaagatatggtcctcgccgaatcagctaaattgtgaaagtcttagcaagaatctttctagcaccttggagagcttcaagagcagcttggaaaatgccactggccaggactgcacaagccagccgaggctggagacggtgcagcagcacttgtacatgttggccaaaagcctcgaggaaacttggtcatcagggaatcccatcatgacttttctcagcaatttcacagtaactgaggatgtaaaaataaaagatttgatgaagaatatcaccaagttgactgaggagcttcgctcttccatccaaatctcgaatgagactatccatagcattctagaagcaaatatttcccactccaaggttctcttcagtgccctcaccgtagctctgtctggaaagtgtgatcaggaaatccttcatctcctgctgacatttcccaaaggggaaaaatcttggatcgcagcggaggaactctgtagcctgccagggtcaaaagtgtattctctgattgtgttgctgagtcgaaacttggatgtgcgagctttcatttacaagactctgatgccttctgaagcaaatggcttgctcaactccttgctggatatagtttccagcctcagcgccttgcttgccaaagcccagcacgtctttgagtatcttcctgagtttcttcacacatttaaaatcactgccttgctagaaaccctggactttcaacaggtttcacaaaatgtccaggccagaagttcagcttttggttctttccagtttgtgatgaagatggtttgcaaggaccaagcatcattccttagcgattctaatatgtttattaatttgcccagagttaaggaactcttggaagatgacaaagaaaaattcaacattcctgaagattcaacaccgttttgcttgaagctttatcaggaaattctacaattgccaaatggtgctttggtgtggaccttcctaaaacccatattgcatggaaaaatactatacacaccaaacactccagaaattaacaaggtcattcaaaaggctaattacaccttttatattgtggacaaactaaaaactttatcagaaacactgctggaaatgtccagccttttccagagaagtggaagtggccagatgttcaaccagctgcaggaggccctgagaaacaaatttgtaagaaactttgtagaaaaccagttgcacattgatgtagacaaacttactgaaaaactccagacatacggagggctgctggatgagatgtttaaccatgcaggcgctggacgcttccgtttcttgggcagcatcttggtcaatctctcttcctgcgtggcactgaaccgtttccaggctctgcagtctgtcgacatcctggagactaaagcacatgaactcttgcagcagaacagcttcttggccagtatcattttcagcaattccttattcgacaagaacttcagatcagagtctgtcaaactgccaccccatgtctcatacacaatccggaccaatgtgttatacagcgtgcgaacagatgtggtaaaaaacccttcttggaagttccaccctcagaatctaccagctgatgggttcaaatataactacgtctttgccccactgcaagacatgatcgaaagagccatcattttggtgcagactgggcaggaagccctggaaccagcagcacagactcaggcggccccttacccctgccataccagcgacctattcctgaacaacgttggtttcttttttccactgataatgatgctgacgtggatggtgtctgtggccagcatggtcagaaagttggtgtatgagcaggagatacagatagaagagtatatgcggatgatgggagtgcatccagtgatccatttcctggcctggttcctggagaacatggctgtgttgaccataagcagtgctactctggccatcgttctgaaaacaagtggcatctttgcacacagcaatacctttattgttttcctctttctcttggattttgggatgtcagtcgtcatgctgagctacctcttgagtgcatttttcagccaagctaatacagcggccctttgtaccagcctggtgtacatgatcagctttctgccctacatagttctattggttctacataaccaattaagttttgttaatcagacatttctgtgccttctttcgacaaccgcctttggacaaggggtattttttattacattcctggaaggacaagagacagggattcaatggaataatatgtaccaggctctggaacaagggggcatgacatttggctgggtttgctggatgattctttttgattcaagcctttattttttgtgtggatggtacttgagcaacttgattcctggaacatttggtttacggaaaccatggtatttcccctttactgcctcatattggaagagtgtgggtttcttggtggagaaaaggcaatactttctaagttctagtctgttcttcttcaatgagaactttgacaataaagggtcatcactgcaaaacagggaaggagagcttgaaggaagtgccccgggagtcaccctggtgtctgtgaccaaggaatatgagggccacaaggctgtggtccaagacctcagcctgaccttctacagagaccaaatcaccgccctgctggggacaaacggtgccgggaaaaccactatcatatccatgttgacggggctccaccctcccacttctggaaccatcatcatcaatggcaagaacctacagacagacctgtcgagggtcagaatggagcttggtgtgtgtccgcagcaggacatcctgttggacaacctcaccgtccgggaacatttgctgctctttgcttccataaaggcgcctcagtggaccaagaaggagctgcatcagcaagtcaatcaaactcttcaggatgtggacttaactcagcatcagcacaaacagacccgagctctgtctggaggcctgaagaggaagctctcccttggcattgctttcatgggcatgtcgaggaccgtggttctggatgagcccaccagtggggtggacccttgctcccggcatagcctgtgggacattctgctcaagtaccgagaaggtcgtacgatcatcttcacaacccaccacctggatgaagctgaagcgctgagtgaccgcgtggccgtcctccagcatgggaggctcaggtgctgcggtcctcccttctgcctgaaggaggcatatggccaggggctccgcctgacactcacgaggcagccttctgttctggaggcccatgatctgaaagacatggcttgtgttacatccctgataaagatctatattccacaagcatttctcaaagacagcagtggaagtgagctgacctacaccattccaaaggacacagacaaggcctgcttgaaagggctcttccaggccctggatgagaacctgcatcagctgcacctgacgggctatgggatctcagacaccaccttagaagaggtgtttttgatgcttttgcaagattccaacaagaaatctcacattgccctggggactgagtcagagctgcagaaccacaggcctacaggacatctgtctggctactgtggctccctagcacggcccgcaactgtgcagggcgtccagctgctccgcgcacaagtggccgcgatcctggcccggaggctccgccgcacgctgcgcgccgggaagagcaccctcgccgacctgctgctgccagtcctcttcgtggccttggccatgggcttgttcatggtgagacccctggccaccgagtaccctcccctcagactcacacctggacattaccagcgggccgagacctactttttcagcagcagtgggggcgacaacttggacctcacccgtgtgcttctgcggaagtttagagatcaagatttgccctgtgcagatttaaacccacgccagaagaattcttcatgctggcgcacagatcccttttctcacccagaattccaggattcatgtggctgcctgaagtgtccaaatagaagtgctagtgctccctacctgaccaaccacctgggccacacactgttgaatctctcaggcttcaatatggaggagtacttgctggcaccatctgaaaaaccaaggcttggaggttggtcttttggattaaaaatccccagtgaagctggaggtgcaaatggaaacatatcaaaacccccaactctggcaaaggtgtggtataatcagaagggttttcattccctaccttcctacttaaatcatctaaacaaccttattttgtggcagcacctaccccctactgtggactggagacaatacggaataacactctacagccacccatatggaggggccttgctgaacgaggacaagatatggagacatgggtggggataaggccagagctcttcagcctggagagcatccgtcagtgtggagtggccctctgcatcgtgctgggattctccatcctgtctgcatccatcggcagctctgtg

SEQ ID NO: 194 - DNA, 13443 bp, Homo sapiens
atataagcaccatccttacaggctggcttcctgactgagagcagggagcagcaggcatggggcatgccgggtgccagttcaaagccctgctgtggaagaattggctctgcagactcaggaacccggtccttttccttgctgaattcttctggccttgtatcctgtttgtaattctgacagttcttcgttttcaagaacctcccagatacagagacatttgttatttgcagccccgagatctacccagctgtggtgttatcccctttgttcaaagccttctttgtaacactggatcaaggtgtaggaacttcagctatgaagggtcaatggagcatcattttcgtttgtctaggttccaaactgcagctgaccccaagaaagtcaacaacctggcctttttaaaagagatacaagacctggcagaggaaattcatggaatgatggacaaggcaaaaaacttaaaaagactttgggtagaacgatccaacactccagattcttcttatggttccagtttttttacaatggatctcaataagaccgaggaggtaatattgaaactggaaagcctccatcagcagcctcatatctgggattttctacttttactgccgagactacacacaagccatgatcatgtggaagatggcatggatgttgcagtgaaccttctccagaccattttgaattccttaatatccctagaagatttagattggcttccactcaaccaaactttttcccaggtttctgaacttgtactgaatgtgaccatttcgacactgacatttctgcagcaacatggagtagcagtcaccgagccagtttaccacctgtccatgcagaatatagtgtgggatccacagaaagtccagtatgatctcaaatcccagtttggctttgatgatcttcacacggaacagatcctgaactcttcagctgaactgaaggagattcccacagacacttccttggagaagatggtgtgttcagtcttgtctagcacatcagaggatgaagctgagaaatggggccacgttggaggctgccaccctaagtggtcagaagccaaaaactatcttgtccatgcagtcagctggctgcgagtctaccaacaggtgtttgttcagtggcaacagggtagcctgcttcagaagacactcacaggcatgggccatagtctggaggctctcaggaatcagtttgaagaagagagcaagccctggaaggtggtggaagctctgcacactgcactgctcctgctgaatgacagcttgtcagcagatggcccaaaagataatcatacatttccaaagatattacagcatctgtggaaattgcaaagcttgctgcaaaacctgccccagtggccggcactgaagagatttcttcagcttgatggagctctcagaaatgcgatagctcagaatttacattttgtccaagaagtcctcatttgcctggagacatcagctaatgattttaaatggtttgaacttaaccaattgaaactggaaaaggatgtgttcttttgggagctgaaacagatgttggcgaagaatgctgtctgcccgaatggtcgtttctctgagaaggaggtctttttgccgcctggaaactccagcatatggggtggtctccagggactgttgtgctattgtaactcctctgagacgagtgttttaaacaagctacttggttcagtagaggatgctgatcgtattttgcaagaggtcattacttggcacaaaaatatgtcagttttaatacctgaagaatatttggactggcaggaacttgagatgcagctgtcagaagcaagcctttcctgtactcggctcttcctgctgctgggagctgatccctctcctgagaatgatgtcttttctagtgactgtaagcaccagcttgtctccacagtgatatttcatacacttgaaaaaacacaatttttcctggaacaagcatattattggaaagccttcaaaaagtttatcaggaagacttgcgaagtggcccaatatgtaaatatgcaagagagtttccagaacagactattggcttttcctgaggaatctccttgttttgaagaaaacatggattggaaaatgatcagtgataattattttcaatttttgaataacttactcaagtctccaacagcttccatatccagggctttaaatttcacaaagcaccttctaatgatggaaaagaagttgcacacccttgaggatgaacaaatgaactttcttttatcatttgtggaattttttgagaaattattgttgcctaatctttttgactcctccattgttcccagtttccacagcctcccatctctcacagaggatattctgaatataagttctctgtggacaaatcatttaaaaagtttaaagagagacccatctgccactgatgctcagaaactcttggaatttggcaacgaagtgatttggaaaatgcagactctcggaagtcactggataaggaaggaaccaaaaaatcttttgagattcatagaattaatactttttgaaattaatcccaaattactagaattatgggcctatggcatttcaaaaggaaaaagagctaaattggaaaacttctttacacttttaaatttttctgttccagaaaatgagattctgagtacaagttttaacttttcccagttgttccattcagattggcctaaatcaccagctatgaacatagattttgtacgtttaagtgaggctataataactagtctccatgaatttggatttttggagcaggaacagatctcagaagctctgaacacagtctacgctatcaggaatgcatctgatcttttctcagccctttctgaaccacaaaaacaagaagttgataaaattttgactcacatacacctaaatgtcttccaggacaaggattcagctttacttctgcaaatttattcttcattttaccgatatatttatgaattattgaatattcagagtagaggctcttcgttgactttccttacacaaatctcaaaacacattttggatatcataaaacaatttaatttccaaaacatcagtaaagcatttgcatttttatttaagacagcagaggttcttgggggaatttctaatgtatcttactgtcagcaattgctttcaatttttaactttttggagcttcaggcccaatccttcatgtctacagagggccaagaactggaagtgatccacactactttgacaggcctcaaacagctgctcataattgatgaagattttcgtatttctttatttcaatatatgagccaattcttcaacagttcagtagaagacctattggataataaatgcttgatttcggacaataaacacatttcttccgtaaattattcaacaagtgaggagtcttcatttgtttttccattggcacaaattttttcaaacctctcagcaaatgtcagtgtgttcaacaagtttatgtccattcactgtaccgtttcatggcttcaaatgtggactgaaatctgggaaaccatatctcaattatttaagtttgacatgaatgttttcacatctcttcatcatggtttcactcagcttttggatgaattggaagatgatgtgaaagtctctaaaagctgccagggtatacttcccacccataatgttgctagactcatattaaatttgtttaaaaatgtaactcaagccaatgacttccataattgggaggacttcctggatctcagggattttttggtagctttaggtaatgcattagtttcagtaaaaaaacttaacttggagcaagtggagaaatcccttttcaccatggaagctgccctgcatcagttgaagacatttccattcaacgaaagtacaagcagagagtttttaaattctctgcttgaagttttcattgagtttagcagtacctcagaatatatagtcagaaatctagattcaataaatgactttctttcaaataatctcacaaattatggagaaaaatttgaaaatatcatcactgagctaagagaagcaatagtatttcttagaaatgtatcacatgatcgagatttgttttcctgtgctgatattttccaaaatgttactgagtgtattttagaagatggctttttatatgtaaatacctcacagaggatgttacgtattctagacacgttaaattccacattttcctctgagaacacaattagcagtctgaaaggatgcattgtatggttagatgtcataaaccatttgtatttgttgtctaactccagtttttcacaaggtcatcttcaaaatattttggggaatttcagagatatagaaaacaaaatgaactctatattaaaaattgtaacttgggtgttaaatataaaaaaacctctttgttcatcaaatggctcacatataaattgtgtcaatatttacttgaaagatgtaactgactttctaaatattgtacttactacagtctttgaaaaagagaagaaacctaaatttgagattttattagctcttttaaatgattccacaaagcaagtaaggatgagtatcaacaacttaacaacagactttgattttgcatctcagtccaattggagatattttactgaattaattctaagaccaatagaaatgtcagatgaaattcctaatcagtttcaaaatatttggcttcatttaataacactggggaaggaatttcagaagcttgtaaaaggtatttactttaacatcctggaaaataattcctcttctaaaactgaaaacttgttaaacatatttgccaccagtccaaaagaaaaggatgtaaacagtgtaggcaattccatttatcacttagctagttaccttgccttcagcttatctcatgacctccaaaattcaccaaaaataataatttcacctgaaataatgaaagctacaggtcttggtattcaactgataagggatgtgttcaactccttaatgcctgtagttcatcacactagtccacaaaatgcaggttatatgcaagctttgaagaaggtaacttctgtcatgcgtacccttaagaaggcagacatagaccttttagtggatcagcttgaacaagttagtgtaaacctaatggatttctttaagaatatcagtagtgtgggaactggcaatttagtggtcaatttgcttgttggcttgatggaaaaatttgcagacagctcacattcttggaatgttaatcatctgctgcagctctcacgcctgtttcctaaagatgttgtggatgctgtgatagatgtgtactatgtgcttcctcatgctgtaaggctcctgcagggagtacctggtaaaaacatcactgaaggcctcaaggatgtctacagcttcacactccttcatggcataaccatttcaaatatcaccaaggaagacttcgcaattgtgataaaaattcttttggatacaattgaattagtatcagataagccagatattatttcagaggctttagcttgttttcctgtggtttggtgctggaatcacacaaattctggatttcggcagaattcaaagatagacccctgcaatgtccatgggctcatgtcttcttccttttatggcaaagtggccagtatacttgatcatttccacctgtctccccaaggtgaagattcaccatgttcaaatgaaagctcccgaatggaaataactaggaaagtggtctgcataattcatgaattagtggactggaattctattcttctggagctctctgaagtcttccatgttaacatttctcttgtgaaaactgtgcagaaattttggcataagatattaccgtttgtcccaccttcaataaatcaaactagggatagcatctctgaactctgtcctagtggttccataaagcaagttgctttgcaaatcatagaaaaacttaaaaatgtcaactttacaaaagttacatcaggtgaaaatattcttgacaaactaagtagtttaaacaagatccttaacattaatgaagacacagagacatctgttcaaaatattatttcctcaaatttggaaaggacagtacaattgatttctgaagactggagcctagaaaaaagtacgcataatctactctctttattcatgatgctccagaatgcaaatgtcacaggtagcagtttagaagcattatcaagttttattgaaaaaagtgaaacaccttacaactttgaagaactatggcccaagtttcaacaaatcatgaaagacctaacccaagattttagaatcagacacctgctttctgaaatgaacaaaggaatcaaaagtataaattcaatggctcttcaaaagataactttgcagtttgcccatttcctggaaatcctggattcaccgtcattgaagacattagaaattattgaagattttctattggtcacaaaaaactggcttcaggaatatgcaaatgaggattactccagaatgatagaaacattattcattcctgtgaccaatgagagttcaactgaagatatagctttgttagccaaagctattgctactttttggggctctttaaaaaatatatctagagcaggcaattttgatgttgcctttcttacccatctgctaaatcaagaacagctgactaatttctcagttgttcagctgctttttgaaaacatcctaattaatttgatcaataacttagctgggaattctcaggaagcagcttggaacttaaatgatactgaccttcaaataatgaatttcattaaccttatcttgaaccatatgcagtcagaaactagtaggaaaacagttctctctctgagaagcatagtagatttcacagaacagtttttgaaaacattcttctccctttttctaaaggaagattctgagaacaaaatatctcttctgctgaaatatttccacaaagatgttattgcagagatgagttttgtcccaaaagataaaattctagaaattctgaaactggatcaatttcttaccctgatgatacaagacagattgatgaacattttttcaagtttaaaggagactatatatcacctaatgaaaagttcatttatattagacaatggagaattttattttgatactcatcaaggactgaagttcatgcaagatttatttaatgcccttctcagggaaacttcaatgaaaaataagactgaaaataatatagactttttcacagtggtgagtcagttgtttttccatgtgaataagtctgaggacctcttcaaactcaatcaagatcttgggtcagctcttcaccttgtaagagaatgttcaacagagatggcaagacttctggatacaattttacactctcctaataaggacttctatgctttgtatcctaccctccaagaagttatacttgctaatctaacggatttgcttttctttataaataattcattccctctaagaaacagagcaacattagaaattactaagagattagttggtgctatttcaagagcaagtgaagaaagtcacgtcctgaaacccctcttagaaatgtctgggactctggtcatgctgttgaatgacagtgctgacctgagagatcttgccacatcaatggactccattgtgaaacttcttaagctggtcaagaaagtttcggggaagatgtccacagtttttaaaactcattttatctccaataccaaggacagtgtgaaattctttgacactctgtattccatcatgcaacaaagtgttcaaaatcttgtgaaagaaatagctactttaaaaaaaatagatcatttcacatttgaaaagataaatgatttgttggtgccatttcttgacttggcctttgaaatgattggggtagaaccttatatatcatcaaactctgatattttcagtatgtcacctagcatactctcatatatgaaccaatctaaggacttttctgatattttggaagaaattgctgaatttttaacatctgtgaaaatgaacttggaagatatgaggagtcttgcggtagcatttaacaatgagactcaaacattttctatggattctgtcaacttacgggaagaaattctgggttgcttagttcctataaataacatcaccaaccaaatggacttcttataccctaatccaatttccactcatagtggccctcaagatataaaatgggaaataattcatgaagtgatcccttttttggataaaatattatcacaaaacagcacagaaataggatctttcttgaaaatggtgatctgtctcaccttagaagctctttggaaaaacttaaagaaagataattggaatgtttctaatgtgttgatgacatttactcagcatccaaataaccttttgaaaaccatagaaacagttttagaggcctccagtggaattaaaagtgactatgaaggtgatttgaataaaagtttatattttgacacacctttgagtcagaatataactcatcatcaacttgaaaaagcaatccataatgttttaagtagaatagctctctggaggaaaggacttctgtttaacaactctgaatggataacttccacaagaactttgtttcagccactttttgagattttcattaaagcaaccaccggaaagaatgtcacatcagaaaaagaagagagaaccaagaaagagatgattgactttccttatagtttcaaaccatttttctgtttggagaaatacctgggaggattatttgtattgactaaatactggcaacaaatcccactaacagatcaaagtgttgttgagatttgtgaagttttccagcagactgtgaagccctcagaagccatggagatgctgcagaaagtgaagatgatggtcgtacgtgtgctcaccatcgttgcagaaaacccttcctggaccaaggacattttgtgtgctactctgagttgcaagcaaaatgggataaggcatctcattttatctgctatacaaggggtcactttggcgcaggaccacttccaggaaattgaaaagatatggtcctcgccgaatcagctaaattgtgaaagtcttagcaagaatctttctagcaccttggagagcttcaagagcagcttggaaaatgccactggccaggactgcacaagccagccgaggctggagacggtgcagcagcacttgtacatgttggccaaaagcctcgaggaaacttggtcatcagggaatcccatcatgacttttctcagcaatttcacagtaactgaggatgtaaaaataaaagatttgatgaagaatatcaccaagttgactgaggagcttcgctcttccatccaaatctcgaatgagactatccatagcattctagaagcaaatatttcccactccaaggttctcttcagtgccctcaccgtagctctgtctggaaagtgtgatcaggaaatccttcatctcctgctgacatttcccaaaggggaaaaatcttggatcgcagcggaggaactctgtagcctgccagggtcaaaagtgtattctctgattgtgttgctgagtcgaaacttggatgtgcgagctttcatttacaagactctgatgccttctgaagcaaatggcttgctcaactccttgctggatatagtttccagcctcagcgccttgcttgccaaagcccagcacgtctttgagtatcttcctgagtttcttcacacatttaaaatcactgccttgctagaaaccctggactttcaacaggtttcacaaaatgtccaggccagaagttcagcttttggttctttccagtttgtgatgaagatggtttgcaaggaccaagcatcattccttagcgattctaatatgtttattaatttgcccagagttaaggaactcttggaagatgacaaagaaaaattcaacattcctgaagattcaacaccgttttgcttgaagctttatcaggaaattctacaattgccaaatggtgctttggtgtggaccttcctaaaacccatattgcatggaaaaatactatacacaccaaacactccagaaattaacaaggtcattcaaaaggctaattacaccttttatattgtggacaaactaaaaactttatcagaaacactgctggaaatgtccagccttttccagagaagtggaagtggccagatgttcaaccagctgcaggaggccctgagaaacaaatttgtaagaaactttgtagaaaaccagttgcacattgatgtagacaaacttactgaaaaactccagacatacggagggctgctggatgagatgtttaaccatgcaggcgctggacgcttccgtttcttgggcagcatcttggtcaatctctcttcctgcgtggcactgaaccgtttccaggctctgcagtctgtcgacatcctggagactaaagcacatgaactcttgcagcagaacagcttcttggccagtatcattttcagcaattccttattcgacaagaacttcagatcagagtctgtcaaactgccaccccatgtctcatacacaatccggaccaatgtgttatacagcgtgcgaacagatgtggtaaaaaacccttcttggaagttccaccctcagaatctaccagctgatgggttcaaatataactacgtctttgccccactgcaagacatgatcgaaagagccatcattttggtgcagactgggcaggaagccctggaaccagcagcacagactcaggcggccccttacccctgccataccagcgacctattcctgaacaacgttggtttcttttttccactgataatgatgctgacgtggatggtgtctgtggccagcatggtcagaaagttggtgtatgagcaggagatacagatagaagagtatatgcggatgatgggagtgcatccagtgatccatttcctggcctggttcctggagaacatggctgtgttgaccataagcagtgctactctggccatcgttctgaaaacaagtggcatctttgcacacagcaatacctttattgttttcctctttctcttggattttgggatgtcagtcgtcatgctgagctacctcttgagtgcatttttcagccaagctaatacagcggccctttgtaccagcctggtgtacatgatcagctttctgccctacatagttctattggttctacataaccaattaagttttgttaatcagacatttctgtgccttctttcgacaaccgcctttggacaaggggtattttttattacattcctggaaggacaagagacagggattcaatggaataatatgtaccaggctctggaacaagggggcatgacatttggctgggtttgctggatgattctttttgattcaagcctttattttttgtgtggatggtacttgagcaacttgattcctggaacatttggtttacggaaaccatggtatttcccctttactgcctcatattggaagagtgtgggtttcttggtggagaaaaggcaatactttctaagttctagtctgttcttcttcaatgagaactttgacaataaagggtcatcactgcaaaacagggaaggagagcttgaaggaagtgccccgggagtcaccctggtgtctgtgaccaaggaatatgagggccacaaggctgtggtccaagacctcagcctgaccttctacagagaccaaatcaccgccctgctggggacaaacggtgccgggaaaaccactatcatatccatgttgacggggctccaccctcccacttctggaaccatcatcatcaatggcaagaacctacagacagacctgtcgagggtcagaatggagcttggtgtgtgtccgcagcaggacatcctgttggacaacctcaccgtccgggaacatttgctgctctttgcttccataaaggcgcctcagtggaccaagaaggagctgcatcagcaagtcaatcaaactcttcaggatgtggacttaactcagcatcagcacaaacagacccgagctctgtctggaggcctgaagaggaagctctcccttggcattgctttcatgggcatgtcgaggaccgtggttctggatgagcccaccagtggggtggacccttgctcccggcatagcctgtgggacattctgctcaagtaccgagaaggtcgtacgatcatcttcacaacccaccacctggatgaagctgaagcgctgagtgaccgcgtggccgtcctccagcatgggaggctcaggtgctgcggtcctcccttctgcctgaaggaggcatatggccaggggctccgcctgacactcacgaggcagccttctgttctggaggcccatgatctgaaagacatggcttgtgttacatccctgataaagatctatattccacaagcatttctcaaagacagcagtggaagtgagctgacctacaccattccaaaggacacagacaaggcctgcttgaaagggctcttccaggccctggatgagaacctgcatcagctgcacctgacgggctatgggatctcagacaccaccttagaagaggtgtttttgatgcttttgcaagattccaacaagaaatctcacattgccctggggactgagtcagagctgcagaaccacaggcctacaggacatctgtctggctactgtggctccctagcacggcccgcaactgtgcagggcgtccagctgctccgcgcacaagtggccgcgatcctggcccggaggctccgccgcacgctgcgcgccgggaagagcaccctcgccgacctgctgctgccagtcctcttcgtggccttggccatgggcttgttcatggtgagacccctggccaccgagtaccctcccctcagactcacacctggacattaccagcgggccgagacctactttttcagcagcagtgggggcgacaacttggacctcacccgtgtgcttctgcggaagtttagagatcaagatttgccctgtgcagatttaaacccacgccagaagaattcttcatgctggcgcacagatcccttttctcacccagaattccaggattcatgtggctgcctgaagtgtccaaatagaagtgctagtgctccctacctgaccaaccacctgggccacacactgttgaatctctcaggcttcaatatggaggagtacttgctggcaccatctgaaaaaccaaggcttggaggttggtcttttggattaaaaatccccagtgaagctggaggtgcaaatggaaacatatcaaaacccccaactctggcaaaggtgtggtataatcagaagggttttcattccctaccttcctacttaaatcatctaaacaaccttattttgtggcagcacctaccccctactgtggactggagacaatacgattactgaaccttcactgaagatcatcactgacacatttcgtttgctgagaggaataacactctacagccacccatatggaggggccttgctg

SEQ ID NO: 195 - DNA, 13296 bp, Homo sapiens
atataagcaccatccttacaggctggcttcctgactgagagcagggagcagcaggcatggggcatgccgggtgccagttcaaagccctgctgtggaagaattggctctgcagactcaggaacccggtccttttccttgctgaattcttctggccttgtatcctgtttgtaattctgacagttcttcgttttcaagaacctcccagatacagagacatttgttatttgcagccccgagatctacccagctgtggtgttatcccctttgttcaaagccttctttgtaacactggatcaaggtgtaggaacttcagctatgaagggtcaatggagcatcattttcgtttgtctaggttccaaactgcagctgaccccaagaaagtcaacaacctggcctttttaaaagagatacaagacctggcagaggaaattcatggaatgatggacaaggcaaaaaacttaaaaagactttgggtagaacgatccaacactccagattcttcttatggttccagtttttttacaatggatctcaataagaccgaggaggtaatattgaaactggaaagcctccatcagcagcctcatatctgggattttctacttttactgccgagactacacacaagccatgatcatgtggaagatggcatggatgttgcagtgaaccttctccagaccattttgaattccttaatatccctagaagatttagattggcttccactcaaccaaactttttcccaggtttctgaacttgtactgaatgtgaccatttcgacactgacatttctgcagcaacatggagtagcagtcaccgagccagtttaccacctgtccatgcagaatatagtgtgggatccacagaaagtccagtatgatctcaaatcccagtttggctttgatgatcttcacacggaacagatcctgaactcttcagctgaactgaaggagattcccacagacacttccttggagaagatggtgtgttcagtcttgtctagcacatcagaggatgaagctgagaaatggggccacgttggaggctgccaccctaagtggtcagaagccaaaaactatcttgtccatgcagtcagctggctgcgagtctaccaacaggtgtttgttcagtggcaacagggtagcctgcttcagaagacactcacaggcatgggccatagtctggaggctctcaggaatcagtttgaagaagagagcaagccctggaaggtggtggaagctctgcacactgcactgctcctgctgaatgacagcttgtcagcagatggcccaaaagataatcatacatttccaaagatattacagcatctgtggaaattgcaaagcttgctgcaaaacctgccccagtggccggcactgaagagatttcttcagcttgatggagctctcagaaatgcgatagctcagaatttacattttgtccaagaagtcctcatttgcctggagacatcagctaatgattttaaatggtttgaacttaaccaattgaaactggaaaaggatgtgttcttttgggagctgaaacagatgttggcgaagaatgctgtctgcccgaatggtcgtttctctgagaaggaggtctttttgccgcctggaaactccagcatatggggtggtctccagggactgttgtgctattgtaactcctctgagacgagtgttttaaacaagctacttggttcagtagaggatgctgatcgtattttgcaagaggtcattacttggcacaaaaatatgtcagttttaatacctgaagaatatttggactggcaggaacttgagatgcagctgtcagaagcaagcctttcctgtactcggctcttcctgctgctgggagctgatccctctcctgagaatgatgtcttttctagtgactgtaagcaccagcttgtctccacagtgatatttcatacacttgaaaaaacacaatttttcctggaacaagcatattattggaaagccttcaaaaagtttatcaggaagacttgcgaagtggcccaatatgtaaatatgcaagagagtttccagaacagactattggcttttcctgaggaatctccttgttttgaagaaaacatggattggaaaatgatcagtgataattattttcaatttttgaataacttactcaagtctccaacagcttccatatccagggctttaaatttcacaaagcaccttctaatgatggaaaagaagttgcacacccttgaggatgaacaaatgaactttcttttatcatttgtggaattttttgagaaattattgttgcctaatctttttgactcctccattgttcccagtttccacagcctcccatctctcacagaggatattctgaatataagttctctgtggacaaatcatttaaaaagtttaaagagagacccatctgccactgatgctcagaaactcttggaatttggcaacgaagtgatttggaaaatgcagactctcggaagtcactggataaggaaggaaccaaaaaatcttttgagattcatagaattaatactttttgaaattaatcccaaattactagaattatgggcctatggcatttcaaaaggaaaaagagctaaattggaaaacttctttacacttttaaatttttctgttccagaaaatgagattctgagtacaagttttaacttttcccagttgttccattcagattggcctaaatcaccagctatgaacatagattttgtacgtttaagtgaggctataataactagtctccatgaatttggatttttggagcaggaacagatctcagaagctctgaacacagtctacgctatcaggaatgcatctgatcttttctcagccctttctgaaccacaaaaacaagaagttgataaaattttgactcacatacacctaaatgtcttccaggacaaggattcagctttacttctgcaaatttattcttcattttaccgatatatttatgaattattgaatattcagagtagaggctcttcgttgactttccttacacaaatctcaaaacacattttggatatcataaaacaatttaatttccaaaacatcagtaaagcatttgcatttttatttaagacagcagaggttcttgggggaatttctaatgtatcttactgtcagcaattgctttcaatttttaactttttggagcttcaggcccaatccttcatgtctacagagggccaagaactggaagtgatccacactactttgacaggcctcaaacagctgctcataattgatgaagattttcgtatttctttatttcaatatatgagccaattcttcaacagttcagtagaagacctattggataataaatgcttgatttcggacaataaacacatttcttccgtaaattattcaacaagtgaggagtcttcatttgtttttccattggcacaaattttttcaaacctctcagcaaatgtcagtgtgttcaacaagtttatgtccattcactgtaccgtttcatggcttcaaatgtggactgaaatctgggaaaccatatctcaattatttaagtttgacatgaatgttttcacatctcttcatcatggtttcactcagcttttggatgaattggaagatgatgtgaaagtctctaaaagctgccagggtatacttcccacccataatgttgctagactcatattaaatttgtttaaaaatgtaactcaagccaatgacttccataattgggaggacttcctggatctcagggattttttggtagctttaggtaatgcattagtttcagtaaaaaaacttaacttggagcaagtggagaaatcccttttcaccatggaagctgccctgcatcagttgaagacatttccattcaacgaaagtacaagcagagagtttttaaattctctgcttgaagttttcattgagtttagcagtacctcagaatatatagtcagaaatctagattcaataaatgactttctttcaaataatctcacaaattatggagaaaaatttgaaaatatcatcactgagctaagagaagcaatagtatttcttagaaatgtatcacatgatcgagatttgttttcctgtgctgatattttccaaaatgttactgagtgtattttagaagatggctttttatatgtaaatacctcacagaggatgttacgtattctagacacgttaaattccacattttcctctgagaacacaattagcagtctgaaaggatgcattgtatggttagatgtcataaaccatttgtatttgttgtctaactccagtttttcacaaggtcatcttcaaaatattttggggaatttcagagatatagaaaacaaaatgaactctatattaaaaattgtaacttgggtgttaaatataaaaaaacctctttgttcatcaaatggctcacatataaattgtgtcaatatttacttgaaagatgtaactgactttctaaatattgtacttactacagtctttgaaaaagagaagaaacctaaatttgagattttattagctcttttaaatgattccacaaagcaagtaaggatgagtatcaacaacttaacaacagactttgattttgcatctcagtccaattggagatattttactgaattaattctaagaccaatagaaatgtcagatgaaattcctaatcagtttcaaaatatttggcttcatttaataacactggggaaggaatttcagaagcttgtaaaaggtatttactttaacatcctggaaaataattcctcttctaaaactgaaaacttgttaaacatatttgccaccagtccaaaagaaaaggatgtaaacagtgtaggcaattccatttatcacttagctagttaccttgccttcagcttatctcatgacctccaaaattcaccaaaaataataatttcacctgaaataatgaaagctacaggtcttggtattcaactgataagggatgtgttcaactccttaatgcctgtagttcatcacactagtccacaaaatgcaggttatatgcaagctttgaagaaggtaacttctgtcatgcgtacccttaagaaggcagacatagaccttttagtggatcagcttgaacaagttagtgtaaacctaatggatttctttaagaatatcagtagtgtgggaactggcaatttagtggtcaatttgcttgttggcttgatggaaaaatttgcagacagctcacattcttggaatgttaatcatctgctgcagctctcacgcctgtttcctaaagatgttgtggatgctgtgatagatgtgtactatgtgcttcctcatgctgtaaggctcctgcagggagtacctggtaaaaacatcactgaaggcctcaaggatgtctacagcttcacactccttcatggcataaccatttcaaatatcaccaaggaagacttcgcaattgtgataaaaattcttttggatacaattgaattagtatcagataagccagatattatttcagaggctttagcttgttttcctgtggtttggtgctggaatcacacaaattctggatttcggcagaattcaaagatagacccctgcaatgtccatgggctcatgtcttcttccttttatggcaaagtggccagtatacttgatcatttccacctgtctccccaaggtgaagattcaccatgttcaaatgaaagctcccgaatggaaataactaggaaagtggtctgcataattcatgaattagtggactggaattctattcttctggagctctctgaagtcttccatgttaacatttctcttgtgaaaactgtgcagaaattttggcataagatattaccgtttgtcccaccttcaataaatcaaactagggatagcatctctgaactctgtcctagtggttccataaagcaagttgctttgcaaatcatagaaaaacttaaaaatgtcaactttacaaaagttacatcaggtgaaaatattcttgacaaactaagtagtttaaacaagatccttaacattaatgaagacacagagacatctgttcaaaatattatttcctcaaatttggaaaggacagtacaattgatttctgaagactggagcctagaaaaaagtacgcataatctactctctttattcatgatgctccagaatgcaaatgtcacaggtagcagtttagaagcattatcaagttttattgaaaaaagtgaaacaccttacaactttgaagaactatggcccaagtttcaacaaatcatgaaagacctaacccaagattttagaatcagacacctgctttctgaaatgaacaaaggaatcaaaagtataaattcaatggctcttcaaaagataactttgcagtttgcccatttcctggaaatcctggattcaccgtcattgaagacattagaaattattgaagattttctattggtcacaaaaaactggcttcaggaatatgcaaatgaggattactccagaatgatagaaacattattcattcctgtgaccaatgagagttcaactgaagatatagctttgttagccaaagctattgctactttttggggctctttaaaaaatatatctagagcaggcaattttgatgttgcctttcttacccatctgctaaatcaagaacagctgactaatttctcagttgttcagctgctttttgaaaacatcctaattaatttgatcaataacttagctgggaattctcaggaagcagcttggaacttaaatgatactgaccttcaaataatgaatttcattaaccttatcttgaaccatatgcagtcagaaactagtaggaaaacagttctctctctgagaagcatagtagatttcacagaacagtttttgaaaacattcttctccctttttctaaaggaagattctgagaacaaaatatctcttctgctgaaatatttccacaaagatgttattgcagagatgagttttgtcccaaaagataaaattctagaaattctgaaactggatcaatttcttaccctgatgatacaagacagattgatgaacattttttcaagtttaaaggagactatatatcacctaatgaaaagttcatttatattagacaatggagaattttattttgatactcatcaaggactgaagttcatgcaagatttatttaatgcccttctcagggaaacttcaatgaaaaataagactgaaaataatatagactttttcacagtggtgagtcagttgtttttccatgtgaataagtctgaggacctcttcaaactcaatcaagatcttgggtcagctcttcaccttgtaagagaatgttcaacagagatggcaagacttctggatacaattttacactctcctaataaggacttctatgctttgtatcctaccctccaagaagttatacttgctaatctaacggatttgcttttctttataaataattcattccctctaagaaacagagcaacattagaaattactaagagattagttggtgctatttcaagagcaagtgaagaaagtcacgtcctgaaacccctcttagaaatgtctgggactctggtcatgctgttgaatgacagtgctgacctgagagatcttgccacatcaatggactccattgtgaaacttcttaagctggtcaagaaagtttcggggaagatgtccacagtttttaaaactcattttatctccaataccaaggacagtgtgaaattctttgacactctgtattccatcatgcaacaaagtgttcaaaatcttgtgaaagaaatagctactttaaaaaaaatagatcatttcacatttgaaaagataaatgatttgttggtgccatttcttgacttggcctttgaaatgattggggtagaaccttatatatcatcaaactctgatattttcagtatgtcacctagcatactctcatatatgaaccaatctaaggacttttctgatattttggaagaaattgctgaatttttaacatctgtgaaaatgaacttggaagatatgaggagtcttgcggtagcatttaacaatgagactcaaacattttctatggattctgtcaacttacgggaagaaattctgggttgcttagttcctataaataacatcaccaaccaaatggacttcttataccctaatccaatttccactcatagtggccctcaagatataaaatgggaaataattcatgaagtgatcccttttttggataaaatattatcacaaaacagcacagaaataggatctttcttgaaaatggtgatctgtctcaccttagaagctctttggaaaaacttaaagaaagataattggaatgtttctaatgtgttgatgacatttactcagcatccaaataaccttttgaaaaccatagaaacagttttagaggcctccagtggaattaaaagtgactatgaaggtgatttgaataaaagtttatattttgacacacctttgagtcagaatataactcatcatcaacttgaaaaagcaatccataatgttttaagtagaatagctctctggaggaaaggacttctgtttaacaactctgaatggataacttccacaagaactttgtttcagccactttttgagattttcattaaagcaaccaccggaaagaatgtcacatcagaaaaagaagagagaaccaagaaagagatgattgactttccttatagtttcaaaccatttttctgtttggagaaatacctgggaggattatttgtattgactaaatactggcaacaaatcccactaacagatcaaagtgttgttgagatttgtgaagttttccagcagactgtgaagccctcagaagccatggagatgctgcagaaagtgaagatgatggtcgtacgtgtgctcaccatcgttgcagaaaacccttcctggaccaaggacattttgtgtgctactctgagttgcaagcaaaatgggataaggcatctcattttatctgctatacaaggggtcactttggcgcaggaccacttccaggaaattgaaaagatatggtcctcgccgaatcagctaaattgtgaaagtcttagcaagaatctttctagcaccttggagagcttcaagagcagcttggaaaatgccactggccaggactgcacaagccagccgaggctggagacggtgcagcagcacttgtacatgttggccaaaagcctcgaggaaacttggtcatcagggaatcccatcatgacttttctcagcaatttcacagtaactgaggatgtaaaaataaaagatttgatgaagaatatcaccaagttgactgaggagcttcgctcttccatccaaatctcgaatgagactatccatagcattctagaagcaaatatttcccactccaaggttctcttcagtgccctcaccgtagctctgtctggaaagtgtgatcaggaaatccttcatctcctgctgacatttcccaaaggggaaaaatcttggatcgcagcggaggaactctgtagcctgccagggtcaaaagtgtattctctgattgtgttgctgagtcgaaacttggatgtgcgagctttcatttacaagactctgatgccttctgaagcaaatggcttgctcaactccttgctggatatagtttccagcctcagcgccttgcttgccaaagcccagcacgtctttgagtatcttcctgagtttcttcacacatttaaaatcactgccttgctagaaaccctggactttcaacaggtttcacaaaatgtccaggccagaagttcagcttttggttctttccagtttgtgatgaagatggtttgcaaggaccaagcatcattccttagcgattctaatatgtttattaatttgcccagagttaaggaactcttggaagatgacaaagaaaaattcaacattcctgaagattcaacaccgttttgcttgaagctttatcaggaaattctacaattgccaaatggtgctttggtgtggaccttcctaaaacccatattgcatggaaaaatactatacacaccaaacactccagaaattaacaaggtcattcaaaaggctaattacaccttttatattgtggacaaactaaaaactttatcagaaacactgctggaaatgtccagccttttccagagaagtggaagtggccagatgttcaaccagctgcaggaggccctgagaaacaaatttgtaagaaactttgtagaaaaccagttgcacattgatgtagacaaacttactgaaaaactccagacatacggagggctgctggatgagatgtttaaccatgcaggcgctggacgcttccgtttcttgggcagcatcttggtcaatctctcttcctgcgtggcactgaaccgtttccaggctctgcagtctgtcgacatcctggagactaaagcacatgaactcttgcagcagaacagcttcttggccagtatcattttcagcaattccttattcgacaagaacttcagatcagagtctgtcaaactgccaccccatgtctcatacacaatccggaccaatgtgttatacagcgtgcgaacagatgtggtaaaaaacccttcttggaagttccaccctcagaatctaccagctgatgggttcaaatataactacgtctttgccccactgcaagacatgatcgaaagagccatcattttggtgcagactgggcaggaagccctggaaccagcagcacagactcaggcggccccttacccctgccataccagcgacctattcctgaacaacgttggtttcttttttccactgataatgatgctgacgtggatggtgtctgtggccagcatggtcagaaagttggtgtatgagcaggagatacagatagaagagtatatgcggatgatgggagtgcatccagtgatccatttcctggcctggttcctggagaacatggctgtgttgaccataagcagtgctactctggccatcgttctgaaaacaagtggcatctttgcacacagcaatacctttattgttttcctctttctcttggattttgggatgtcagtcgtcatgctgagctacctcttgagtgcatttttcagccaagctaatacagcggccctttgtaccagcctggtgtacatgatcagctttctgccctacatagttctattggttctacataaccaattaagttttgttaatcagacatttctgtgccttctttcgacaaccgcctttggacaaggggtattttttattacattcctggaaggacaagagacagggattcaatggaataatatgtaccaggctctggaacaagggggcatgacatttggctgggtttgctggatgattctttttgattcaagcctttattttttgtgtggatggtacttgagcaacttgattcctggaacatttggtttacggaaaccatggtatttcccctttactgcctcatattggaagagtgtgggtttcttggtggagaaaaggcaatactttctaagttctagtctgttcttcttcaatgagaactttgacaataaagggtcatcactgcaaaacagggaaggagagcttgaaggaagtgccccgggagtcaccctggtgtctgtgaccaaggaatatgagggccacaaggctgtggtccaagacctcagcctgaccttctacagagaccaaatcaccgccctgctggggacaaacggtgccgggaaaaccactatcatatccatgttgacggggctccaccctcccacttctggaaccatcatcatcaatggcaagaacctacagacagacctgtcgagggtcagaatggagcttggtgtgtgtccgcagcaggacatcctgttggacaacctcaccgtccgggaacatttgctgctctttgcttccataaaggcgcctcagtggaccaagaaggagctgcatcagcaagtcaatcaaactcttcaggatgtggacttaactcagcatcagcacaaacagacccgagctctgtctggaggcctgaagaggaagctctcccttggcattgctttcatgggcatgtcgaggaccgtggttctggatgagcccaccagtggggtggacccttgctcccggcatagcctgtgggacattctgctcaagtaccgagaaggtcgtacgatcatcttcacaacccaccacctggatgaagctgaagcgctgagtgaccgcgtggccgtcctccagcatgggaggctcaggtgctgcggtcctcccttctgcctgaaggaggcatatggccaggggctccgcctgacactcacgaggcagccttctgttctggaggcccatgatctgaaagacatggcttgtgttacatccctgataaagatctatattccacaagcatttctcaaagacagcagtggaagtgagctgacctacaccattccaaaggacacagacaaggcctgcttgaaagggctcttccaggccctggatgagaacctgcatcagctgcacctgacgggctatgggatctcagacaccaccttagaagaggtgtttttgatgcttttgcaagattccaacaagaaatctcacattgccctggggactgagtcagagctgcagaaccacaggcctacaggacatctgtctggctactgtggctccctagcacggcccgcaactgtgcagggcgtccagctgctccgcgcacaagtggccgcgatcctggcccggaggctccgccgcacgctgcgcgccgggaagagcaccctcgccgacctgctgctgccagtcctcttcgtggccttggccatgggcttgttcatggtgagacccctggccaccgagtaccctcccctcagactcacacctggacattaccagcgggccgagacctactttttcagcagcagtgggggcgacaacttggacctcacccgtgtgcttctgcggaagtttagagatcaagatttgccctgtgcagatttaaacccacgccagaagaattcttcatgctggcgcacagatcccttttctcacccagaattccaggattcatgtggctgcctgaagtgtccaaatagaagtgctagtgctccctacctgaccaaccacctgggccacacactgttgaatctctcaggcttcaatatggaggagtacttgctggcaccatctgaaaaaccaaggcttggaggttggtcttttggattaaaaatccccagtgaagctggaggtgcaaatggaaacatatcaaaacccccaactctggcaaaggaataacactctacagccacccatatggaggggccttgctgaacgaggacaagat

SEQ ID NO: 196 - DNA, 13074 bp, Homo sapiens
gatataagcaccatccttacaggctggcttcctgactgagagcagggagcagcaggcatggggcatgccgggtgccagttcaaagccctgctgtggaagaattggctctgcagactcaggaacccggtccttttccttgctgaattcttctggccttgtatcctgtttgtaattctgacagttcttcgttttcaagaacctcccagatacagagacatttgttatttgcagccccgagatctacccagctgtggtgttatcccctttgttcaaagccttctttgtaacactggatcaaggtgtaggaacttcagctatgaagggtcaatggagcatcattttcgtttgtctaggttccaaactgcagctgaccccaagaaagtcaacaacctggcctttttaaaagagatacaagacctggcagaggaaattcatggaatgatggacaaggcaaaaaacttaaaaagactttgggtagaacgatccaacactccagattcttcttatggttccagtttttttacaatggatctcaataagaccgaggaggtaatattgaaactggaaagcctccatcagcagcctcatatctgggattttctacttttactgccgagactacacacaagccatgatcatgtggaagatggcatggatgttgcagtgaaccttctccagaccattttgaattccttaatatccctagaagatttagattggcttccactcaaccaaactttttcccaggtttctgaacttgtactgaatgtgaccatttcgacactgacatttctgcagcaacatggagtagcagtcaccgagccagtttaccacctgtccatgcagaatatagtgtgggatccacagaaagtccagtatgatctcaaatcccagtttggctttgatgatcttcacacggaacagatcctgaactcttcagctgaactgaaggagattcccacagacacttccttggagaagatggtgtgttcagtcttgtctagcacatcagaggatgaagctgagaaatggggccacgttggaggctgccaccctaagtggtcagaagccaaaaactatcttgtccatgcagtcagctggctgcgagtctaccaacaggtgtttgttcagtggcaacagggtagcctgcttcagaagacactcacaggcatgggccatagtctggaggctctcaggaatcagtttgaagaagagagcaagccctggaaggtggtggaagctctgcacactgcactgctcctgctgaatgacagcttgtcagcagatggcccaaaagataatcatacatttccaaagatattacagcatctgtggaaattgcaaagcttgctgcaaaacctgccccagtggccggcactgaagagatttcttcagcttgatggagctctcagaaatgcgatagctcagaatttacattttgtccaagaagtcctcatttgcctggagacatcagctaatgattttaaatggtttgaacttaaccaattgaaactggaaaaggatgtgttcttttgggagctgaaacagatgttggcgaagaatgctgtctgcccgaatggtcgtttctctgagaaggaggtctttttgccgcctggaaactccagcatatggggtggtctccagggactgttgtgctattgtaactcctctgagacgagtgttttaaacaagctacttggttcagtagaggatgctgatcgtattttgcaagaggtcattacttggcacaaaaatatgtcagttttaatacctgaagaatatttggactggcaggaacttgagatgcagctgtcagaagcaagcctttcctgtactcggctcttcctgctgctgggagctgatccctctcctgagaatgatgtcttttctagtgactgtaagcaccagcttgtctccacagtgatatttcatacacttgaaaaaacacaatttttcctggaacaagcatattattggaaagccttcaaaaagtttatcaggaagacttgcgaagtggcccaatatgtaaatatgcaagagagtttccagaacagactattggcttttcctgaggaatctccttgttttgaagaaaacatggattggaaaatgatcagtgataattattttcaatttttgaataacttactcaagtctccaacagcttccatatccagggctttaaatttcacaaagcaccttctaatgatggaaaagaagttgcacacccttgaggatgaacaaatgaactttcttttatcatttgtggaattttttgagaaattattgttgcctaatctttttgactcctccattgttcccagtttccacagcctcccatctctcacagaggatattctgaatataagttctctgtggacaaatcatttaaaaagtttaaagagagacccatctgccactgatgctcagaaactcttggaatttggcaacgaagtgatttggaaaatgcagactctcggaagtcactggataaggaaggaaccaaaaaatcttttgagattcatagaattaatactttttgaaattaatcccaaattactagaattatgggcctatggcatttcaaaaggaaaaagagctaaattggaaaacttctttacacttttaaatttttctgttccagaaaatgagattctgagtacaagttttaacttttcccagttgttccattcagattggcctaaatcaccagctatgaacatagattttgtacgtttaagtgaggctataataactagtctccatgaatttggatttttggagcaggaacagatctcagaagctctgaacacagtctacgctatcaggaatgcatctgatcttttctcagccctttctgaaccacaaaaacaagaagttgataaaattttgactcacatacacctaaatgtcttccaggacaaggattcagctttacttctgcaaatttattcttcattttaccgatatatttatgaattattgaatattcagagtagaggctcttcgttgactttccttacacaaatctcaaaacacattttggatatcataaaacaatttaatttccaaaacatcagtaaagcatttgcatttttatttaagacagcagaggttcttgggggaatttctaatgtatcttactgtcagcaattgctttcaatttttaactttttggagcttcaggcccaatccttcatgtctacagagggccaagaactggaagtgatccacactactttgacaggcctcaaacagctgctcataattgatgaagattttcgtatttctttatttcaatatatgagccaattcttcaacagttcagtagaagacctattggataataaatgcttgatttcggacaataaacacatttcttccgtaaattattcaacaagtgaggagtcttcatttgtttttccattggcacaaattttttcaaacctctcagcaaatgtcagtgtgttcaacaagtttatgtccattcactgtaccgtttcatggcttcaaatgtggactgaaatctgggaaaccatatctcaattatttaagtttgacatgaatgttttcacatctcttcatcatggtttcactcagcttttggatgaattggaagatgatgtgaaagtctctaaaagctgccagggtatacttcccacccataatgttgctagactcatattaaatttgtttaaaaatgtaactcaagccaatgacttccataattgggaggacttcctggatctcagggattttttggtagctttaggtaatgcattagtttcagtaaaaaaacttaacttggagcaagtggagaaatcccttttcaccatggaagctgccctgcatcagttgaagacatttccattcaacgaaagtacaagcagagagtttttaaattctctgcttgaagttttcattgagtttagcagtacctcagaatatatagtcagaaatctagattcaataaatgactttctttcaaataatctcacaaattatggagaaaaatttgaaaatatcatcactgagctaagagaagcaatagtatttcttagaaatgtatcacatgatcgagatttgttttcctgtgctgatattttccaaaatgttactgagtgtattttagaagatggctttttatatgtaaatacctcacagaggatgttacgtattctagacacgttaaattccacattttcctctgagaacacaattagcagtctgaaaggatgcattgtatggttagatgtcataaaccatttgtatttgttgtctaactccagtttttcacaaggtcatcttcaaaatattttggggaatttcagagatatagaaaacaaaatgaactctatattaaaaattgtaacttgggtgttaaatataaaaaaacctctttgttcatcaaatggctcacatataaattgtgtcaatatttacttgaaagatgtaactgactttctaaatattgtacttactacagtctttgaaaaagagaagaaacctaaatttgagattttattagctcttttaaatgattccacaaagcaagtaaggatgagtatcaacaacttaacaacagactttgattttgcatctcagtccaattggagatattttactgaattaattctaagaccaatagaaatgtcagatgaaattcctaatcagtttcaaaatatttggcttcatttaataacactggggaaggaatttcagaagcttgtaaaaggtatttactttaacatcctggaaaataattcctcttctaaaactgaaaacttgttaaacatatttgccaccagtccaaaagaaaaggatgtaaacagtgtaggcaattccatttatcacttagctagttaccttgccttcagcttatctcatgacctccaaaattcaccaaaaataataatttcacctgaaataatgaaagctacaggtcttggtattcaactgataagggatgtgttcaactccttaatgcctgtagttcatcacactagtccacaaaatgcaggttatatgcaagctttgaagaaggtaacttctgtcatgcgtacccttaagaaggcagacatagaccttttagtggatcagcttgaacaagttagtgtaaacctaatggatttctttaagaatatcagtagtgtgggaactggcaatttagtggtcaatttgcttgttggcttgatggaaaaatttgcagacagctcacattcttggaatgttaatcatctgctgcagctctcacgcctgtttcctaaagatgttgtggatgctgtgatagatgtgtactatgtgcttcctcatgctgtaaggctcctgcagggagtacctggtaaaaacatcactgaaggcctcaaggatgtctacagcttcacactccttcatggcataaccatttcaaatatcaccaaggaagacttcgcaattgtgataaaaattcttttggatacaattgaattagtatcagataagccagatattatttcagaggctttagcttgttttcctgtggtttggtgctggaatcacacaaattctggatttcggcagaattcaaagatagacccctgcaatgtccatgggctcatgtcttcttccttttatggcaaagtggccagtatacttgatcatttccacctgtctccccaaggtgaagattcaccatgttcaaatgaaagctcccgaatggaaataactaggaaagtggtctgcataattcatgaattagtggactggaattctattcttctggagctctctgaagtcttccatgttaacatttctcttgtgaaaactgtgcagaaattttggcataagatattaccgtttgtcccaccttcaataaatcaaactagggatagcatctctgaactctgtcctagtggttccataaagcaagttgctttgcaaatcatagaaaaacttaaaaatgtcaactttacaaaagttacatcaggtgaaaatattcttgacaaactaagtagtttaaacaagatccttaacattaatgaagacacagagacatctgttcaaaatattatttcctcaaatttggaaaggacagtacaattgatttctgaagactggagcctagaaaaaagtacgcataatctactctctttattcatgatgctccagaatgcaaatgtcacaggtagcagtttagaagcattatcaagttttattgaaaaaagtgaaacaccttacaactttgaagaactatggcccaagtttcaacaaatcatgaaagacctaacccaagattttagaatcagacacctgctttctgaaatgaacaaaggaatcaaaagtataaattcaatggctcttcaaaagataactttgcagtttgcccatttcctggaaatcctggattcaccgtcattgaagacattagaaattattgaagattttctattggtcacaaaaaactggcttcaggaatatgcaaatgaggattactccagaatgatagaaacattattcattcctgtgaccaatgagagttcaactgaagatatagctttgttagccaaagctattgctactttttggggctctttaaaaaatatatctagagcaggcaattttgatgttgcctttcttacccatctgctaaatcaagaacagctgactaatttctcagttgttcagctgctttttgaaaacatcctaattaatttgatcaataacttagctgggaattctcaggaagcagcttggaacttaaatgatactgaccttcaaataatgaatttcattaaccttatcttgaaccatatgcagtcagaaactagtaggaaaacagttctctctctgagaagcatagtagatttcacagaacagtttttgaaaacattcttctccctttttctaaaggaagattctgagaacaaaatatctcttctgctgaaatatttccacaaagatgttattgcagagatgagttttgtcccaaaagataaaattctagaaattctgaaactggatcaatttcttaccctgatgatacaagacagattgatgaacattttttcaagtttaaaggagactatatatcacctaatgaaaagttcatttatattagacaatggagaattttattttgatactcatcaaggactgaagttcatgcaagatttatttaatgcccttctcagggaaacttcaatgaaaaataagactgaaaataatatagactttttcacagtggtgagtcagttgtttttccatgtgaataagtctgaggacctcttcaaactcaatcaagatcttgggtcagctcttcaccttgtaagagaatgttcaacagagatggcaagacttctggatacaattttacactctcctaataaggacttctatgctttgtatcctaccctccaagaagttatacttgctaatctaacggatttgcttttctttataaataattcattccctctaagaaacagagcaacattagaaattactaagagattagttggtgctatttcaagagcaagtgaagaaagtcacgtcctgaaacccctcttagaaatgtctgggactctggtcatgctgttgaatgacagtgctgacctgagagatcttgccacatcaatggactccattgtgaaacttcttaagctggtcaagaaagtttcggggaagatgtccacagtttttaaaactcattttatctccaataccaaggacagtgtgaaattctttgacactctgtattccatcatgcaacaaagtgttcaaaatcttgtgaaagaaatagctactttaaaaaaaatagatcatttcacatttgaaaagataaatgatttgttggtgccatttcttgacttggcctttgaaatgattggggtagaaccttatatatcatcaaactctgatattttcagtatgtcacctagcatactctcatatatgaaccaatctaaggacttttctgatattttggaagaaattgctgaatttttaacatctgtgaaaatgaacttggaagatatgaggagtcttgcggtagcatttaacaatgagactcaaacattttctatggattctgtcaacttacgggaagaaattctgggttgcttagttcctataaataacatcaccaaccaaatggacttcttataccctaatccaatttccactcatagtggccctcaagatataaaatgggaaataattcatgaagtgatcccttttttggataaaatattatcacaaaacagcacagaaataggatctttcttgaaaatggtgatctgtctcaccttagaagctctttggaaaaacttaaagaaagataattggaatgtttctaatgtgttgatgacatttactcagcatccaaataaccttttgaaaaccatagaaacagttttagaggcctccagtggaattaaaagtgactatgaaggtgatttgaataaaagtttatattttgacacacctttgagtcagaatataactcatcatcaacttgaaaaagcaatccataatgttttaagtagaatagctctctggaggaaaggacttctgtttaacaactctgaatggataacttccacaagaactttgtttcagccactttttgagattttcattaaagcaaccaccggaaagaatgtcacatcagaaaaagaagagagaaccaagaaagagatgattgactttccttatagtttcaaaccatttttctgtttggagaaatacctgggaggattatttgtattgactaaatactggcaacaaatcccactaacagatcaaagtgttgttgagatttgtgaagttttccagcagactgtgaagccctcagaagccatggagatgctgcagaaagtgaagatgatggtcgtacgtgtgctcaccatcgttgcagaaaacccttcctggaccaaggacattttgtgtgctactctgagttgcaagcaaaatgggataaggcatctcattttatctgctatacaaggggtcactttggcgcaggaccacttccaggaaattgaaaagatatggtcctcgccgaatcagctaaattgtgaaagtcttagcaagaatctttctagcaccttggagagcttcaagagcagcttggaaaatgccactggccaggactgcacaagccagccgaggctggagacggtgcagcagcacttgtacatgttggccaaaagcctcgaggaaacttggtcatcagggaatcccatcatgacttttctcagcaatttcacagtaactgaggatgtaaaaataaaagatttgatgaagaatatcaccaagttgactgaggagcttcgctcttccatccaaatctcgaatgagactatccatagcattctagaagcaaatatttcccactccaaggttctcttcagtgccctcaccgtagctctgtctggaaagtgtgatcaggaaatccttcatctcctgctgacatttcccaaaggggaaaaatcttggatcgcagcggaggaactctgtagcctgccagggtcaaaagtgtattctctgattgtgttgctgagtcgaaacttggatgtgcgagctttcatttacaagactctgatgccttctgaagcaaatggcttgctcaactccttgctggatatagtttccagcctcagcgccttgcttgccaaagcccagcacgtctttgagtatcttcctgagtttcttcacacatttaaaatcactgccttgctagaaaccctggactttcaacaggtttcacaaaatgtccaggccagaagttcagcttttggttctttccagtttgtgatgaagatggtttgcaaggaccaagcatcattccttagcgattctaatatgtttattaatttgcccagagttaaggaactcttggaagatgacaaagaaaaattcaacattcctgaagattcaacaccgttttgcttgaagctttatcaggaaattctacaattgccaaatggtgctttggtgtggaccttcctaaaacccatattgcatggaaaaatactatacacaccaaacactccagaaattaacaaggtcattcaaaaggctaattacaccttttatattgtggacaaactaaaaactttatcagaaacactgctggaaatgtccagccttttccagagaagtggaagtggccagatgttcaaccagctgcaggaggccctgagaaacaaatttgtaagaaactttgtagaaaaccagttgcacattgatgtagacaaacttactgaaaaactccagacatacggagggctgctggatgagatgtttaaccatgcaggcgctggacgcttccgtttcttgggcagcatcttggtcaatctctcttcctgcgtggcactgaaccgtttccaggctctgcagtctgtcgacatcctggagactaaagcacatgaactcttgcagcagaacagcttcttggccagtatcattttcagcaattccttattcgacaagaacttcagatcagagtctgtcaaactgccaccccatgtctcatacacaatccggaccaatgtgttatacagcgtgcgaacagatgtggtaaaaaacccttcttggaagttccaccctcagaatctaccagctgatgggttcaaatataactacgtctttgccccactgcaagacatgatcgaaagagccatcattttggtgcagactgggcaggaagccctggaaccagcagcacagactcaggcggccccttacccctgccataccagcgacctattcctgaacaacgttggtttcttttttccactgataatgatgctgacgtggatggtgtctgtggccagcatggtcagaaagttggtgtatgagcaggagatacagatagaagagtatatgcggatgatgggagtgcatccagtgatccatttcctggcctggttcctggagaacatggctgtgttgaccataagcagtgctactctggccatcgttctgaaaacaagtggcatctttgcacacagcaatacctttattgttttcctctttctcttggattttgggatgtcagtcgtcatgctgagctacctcttgagtgcatttttcagccaagctaatacagcggccctttgtaccagcctggtgtacatgatcagctttctgccctacatagttctattggttctacataaccaattaagttttgttaatcagacatttctgtgccttctttcgacaaccgcctttggacaaggggtattttttattacattcctggaaggacaagagacagggattcaatggaataatatgtaccaggctctggaacaagggggcatgacatttggctgggtttgctggatgattctttttgattcaagcctttattttttgtgtggatggtacttgagcaacttgattcctggaacatttggtttacggaaaccatggtatttcccctttactgcctcatattggaagagtgtgggtttcttggtggagaaaaggcaatactttctaagttctagtctgttcttcttcaatgagaactttgacaataaagggtcatcactgcaaaacagggaaggagagcttgaaggaagtgccccgggagtcaccctggtgtctgtgaccaaggaatatgagggccacaaggctgtggtccaagacctcagcctgaccttctacagagaccaaatcaccgccctgctggggacaaacggtgccgggaaaaccactatcatatccatgttgacggggctccaccctcccacttctggaaccatcatcatcaatggcaagaacctacagacagacctgtcgagggtcagaatggagcttggtgtgtgtccgcagcaggacatcctgttggacaacctcaccgtccgggaacatttgctgctctttgcttccataaaggcgcctcagtggaccaagaaggagctgcatcagcaagtcaatcaaactcttcaggatgtggacttaactcagcatcagcacaaacagacccgagctctgtctggaggcctgaagaggaagctctcccttggcattgctttcatgggcatgtcgaggaccgtggttctggatgagcccaccagtggggtggacccttgctcccggcatagcctgtgggacattctgctcaagtaccgagaaggtcgtacgatcatcttcacaacccaccacctggatgaagctgaagcgctgagtgaccgcgtggccgtcctccagcatgggaggctcaggtgctgcggtcctcccttctgcctgaaggaggcatatggccaggggctccgcctgacactcacgaggcagccttctgttctggaggcccatgatctgaaagacatggcttgtgttacatccctgataaagatctatattccacaagcatttctcaaagacagcagtggaagtgagctgacctacaccattccaaaggacacagacaaggcctgcttgaaagggctcttccaggccctggatgagaacctgcatcagctgcacctgacgggctatgggatctcagacaccaccttagaagaggtgtttttgatgcttttgcaagattccaacaagaaatctcacattgccctggggactgagtcagagctgcagaaccacaggcctacaggacatctgtctggctactgtggctccctagcacggcccgcaactgtgcagggcgtccagctgctccgcgcacaagtggccgcgatcctggcccggaggctccgccgcacgctgcgcgccgggaagagcaccctcgccgacctgctgctgccagtcctcttcgtggccttggccatgggcttgttcatggtgagacccctggccaccgagtaccctcccctcagactcacacctggacattaccagcgggccgagacctactttttcagcagcagtgggggcgacaacttggacctcacccgtgtgcttctgcggaagtttagagatcaagatttgccctgtgcagatttaaacccacgccagaagaattcttcatgctggcgcacagatcccttttctcacccagaattccaggattcatgtggctgcctgggacatggatgaaactggaaatcatcattctcagcaaac

SEQ ID NO: 197 - DNA, 12981 bp, Homo sapiens
gatataagcaccatccttacaggctggcttcctgactgagagcagggagcagcaggcatggggcatgccgggtgccagttcaaagccctgctgtggaagaattggctctgcagactcaggaacccggtccttttccttgctgaattcttctggccttgtatcctgtttgtaattctgacagttcttcgttttcaagaacctcccagatacagagacatttgttatttgcagccccgagatctacccagctgtggtgttatcccctttgttcaaagccttctttgtaacactggatcaaggtgtaggaacttcagctatgaagggtcaatggagcatcattttcgtttgtctaggttccaaactgcagctgaccccaagaaagtcaacaacctggcctttttaaaagagatacaagacctggcagaggaaattcatggaatgatggacaaggcaaaaaacttaaaaagactttgggtagaacgatccaacactccagattcttcttatggttccagtttttttacaatggatctcaataagaccgaggaggtaatattgaaactggaaagcctccatcagcagcctcatatctgggattttctacttttactgccgagactacacacaagccatgatcatgtggaagatggcatggatgttgcagtgaaccttctccagaccattttgaattccttaatatccctagaagatttagattggcttccactcaaccaaactttttcccaggtttctgaacttgtactgaatgtgaccatttcgacactgacatttctgcagcaacatggagtagcagtcaccgagccagtttaccacctgtccatgcagaatatagtgtgggatccacagaaagtccagtatgatctcaaatcccagtttggctttgatgatcttcacacggaacagatcctgaactcttcagctgaactgaaggagattcccacagacacttccttggagaagatggtgtgttcagtcttgtctagcacatcagaggatgaagctgagaaatggggccacgttggaggctgccaccctaagtggtcagaagccaaaaactatcttgtccatgcagtcagctggctgcgagtctaccaacaggtgtttgttcagtggcaacagggtagcctgcttcagaagacactcacaggcatgggccatagtctggaggctctcaggaatcagtttgaagaagagagcaagccctggaaggtggtggaagctctgcacactgcactgctcctgctgaatgacagcttgtcagcagatggcccaaaagataatcatacatttccaaagatattacagcatctgtggaaattgcaaagcttgctgcaaaacctgccccagtggccggcactgaagagatttcttcagcttgatggagctctcagaaatgcgatagctcagaatttacattttgtccaagaagtcctcatttgcctggagacatcagctaatgattttaaatggtttgaacttaaccaattgaaactggaaaaggatgtgttcttttgggagctgaaacagatgttggcgaagaatgctgtctgcccgaatggtcgtttctctgagaaggaggtctttttgccgcctggaaactccagcatatggggtggtctccagggactgttgtgctattgtaactcctctgagacgagtgttttaaacaagctacttggttcagtagaggatgctgatcgtattttgcaagaggtcattacttggcacaaaaatatgtcagttttaatacctgaagaatatttggactggcaggaacttgagatgcagctgtcagaagcaagcctttcctgtactcggctcttcctgctgctgggagctgatccctctcctgagaatgatgtcttttctagtgactgtaagcaccagcttgtctccacagtgatatttcatacacttgaaaaaacacaatttttcctggaacaagcatattattggaaagccttcaaaaagtttatcaggaagacttgcgaagtggcccaatatgtaaatatgcaagagagtttccagaacagactattggcttttcctgaggaatctccttgttttgaagaaaacatggattggaaaatgatcagtgataattattttcaatttttgaataacttactcaagtctccaacagcttccatatccagggctttaaatttcacaaagcaccttctaatgatggaaaagaagttgcacacccttgaggatgaacaaatgaactttcttttatcatttgtggaattttttgagaaattattgttgcctaatctttttgactcctccattgttcccagtttccacagcctcccatctctcacagaggatattctgaatataagttctctgtggacaaatcatttaaaaagtttaaagagagacccatctgccactgatgctcagaaactcttggaatttggcaacgaagtgatttggaaaatgcagactctcggaagtcactggataaggaaggaaccaaaaaatcttttgagattcatagaattaatactttttgaaattaatcccaaattactagaattatgggcctatggcatttcaaaaggaaaaagagctaaattggaaaacttctttacacttttaaatttttctgttccagaaaatgagattctgagtacaagttttaacttttcccagttgttccattcagattggcctaaatcaccagctatgaacatagattttgtacgtttaagtgaggctataataactagtctccatgaatttggatttttggagcaggaacagatctcagaagctctgaacacagtctacgctatcaggaatgcatctgatcttttctcagccctttctgaaccacaaaaacaagaagttgataaaattttgactcacatacacctaaatgtcttccaggacaaggattcagctttacttctgcaaatttattcttcattttaccgatatatttatgaattattgaatattcagagtagaggctcttcgttgactttccttacacaaatctcaaaacacattttggatatcataaaacaatttaatttccaaaacatcagtaaagcatttgcatttttatttaagacagcagaggttcttgggggaatttctaatgtatcttactgtcagcaattgctttcaatttttaactttttggagcttcaggcccaatccttcatgtctacagagggccaagaactggaagtgatccacactactttgacaggcctcaaacagctgctcataattgatgaagattttcgtatttctttatttcaatatatgagccaattcttcaacagttcagtagaagacctattggataataaatgcttgatttcggacaataaacacatttcttccgtaaattattcaacaagtgaggagtcttcatttgtttttccattggcacaaattttttcaaacctctcagcaaatgtcagtgtgttcaacaagtttatgtccattcactgtaccgtttcatggcttcaaatgtggactgaaatctgggaaaccatatctcaattatttaagtttgacatgaatgttttcacatctcttcatcatggtttcactcagcttttggatgaattggaagatgatgtgaaagtctctaaaagctgccagggtatacttcccacccataatgttgctagactcatattaaatttgtttaaaaatgtaactcaagccaatgacttccataattgggaggacttcctggatctcagggattttttggtagctttaggtaatgcattagtttcagtaaaaaaacttaacttggagcaagtggagaaatcccttttcaccatggaagctgccctgcatcagttgaagacatttccattcaacgaaagtacaagcagagagtttttaaattctctgcttgaagttttcattgagtttagcagtacctcagaatatatagtcagaaatctagattcaataaatgactttctttcaaataatctcacaaattatggagaaaaatttgaaaatatcatcactgagctaagagaagcaatagtatttcttagaaatgtatcacatgatcgagatttgttttcctgtgctgatattttccaaaatgttactgagtgtattttagaagatggctttttatatgtaaatacctcacagaggatgttacgtattctagacacgttaaattccacattttcctctgagaacacaattagcagtctgaaaggatgcattgtatggttagatgtcataaaccatttgtatttgttgtctaactccagtttttcacaaggtcatcttcaaaatattttggggaatttcagagatatagaaaacaaaatgaactctatattaaaaattgtaacttgggtgttaaatataaaaaaacctctttgttcatcaaatggctcacatataaattgtgtcaatatttacttgaaagatgtaactgactttctaaatattgtacttactacagtctttgaaaaagagaagaaacctaaatttgagattttattagctcttttaaatgattccacaaagcaagtaaggatgagtatcaacaacttaacaacagactttgattttgcatctcagtccaattggagatattttactgaattaattctaagaccaatagaaatgtcagatgaaattcctaatcagtttcaaaatatttggcttcatttaataacactggggaaggaatttcagaagcttgtaaaaggtatttactttaacatcctggaaaataattcctcttctaaaactgaaaacttgttaaacatatttgccaccagtccaaaagaaaaggatgtaaacagtgtaggcaattccatttatcacttagctagttaccttgccttcagcttatctcatgacctccaaaattcaccaaaaataataatttcacctgaaataatgaaagctacaggtcttggtattcaactgataagggatgtgttcaactccttaatgcctgtagttcatcacactagtccacaaaatgcaggttatatgcaagctttgaagaaggtaacttctgtcatgcgtacccttaagaaggcagacatagaccttttagtggatcagcttgaacaagttagtgtaaacctaatggatttctttaagaatatcagtagtgtgggaactggcaatttagtggtcaatttgcttgttggcttgatggaaaaatttgcagacagctcacattcttggaatgttaatcatctgctgcagctctcacgcctgtttcctaaagatgttgtggatgctgtgatagatgtgtactatgtgcttcctcatgctgtaaggctcctgcagggagtacctggtaaaaacatcactgaaggcctcaaggatgtctacagcttcacactccttcatggcataaccatttcaaatatcaccaaggaagacttcgcaattgtgataaaaattcttttggatacaattgaattagtatcagataagccagatattatttcagaggctttagcttgttttcctgtggtttggtgctggaatcacacaaattctggatttcggcagaattcaaagatagacccctgcaatgtccatgggctcatgtcttcttccttttatggcaaagtggccagtatacttgatcatttccacctgtctccccaaggtgaagattcaccatgttcaaatgaaagctcccgaatggaaataactaggaaagtggtctgcataattcatgaattagtggactggaattctattcttctggagctctctgaagtcttccatgttaacatttctcttgtgaaaactgtgcagaaattttggcataagatattaccgtttgtcccaccttcaataaatcaaactagggatagcatctctgaactctgtcctagtggttccataaagcaagttgctttgcaaatcatagaaaaacttaaaaatgtcaactttacaaaagttacatcaggtgaaaatattcttgacaaactaagtagtttaaacaagatccttaacattaatgaagacacagagacatctgttcaaaatattatttcctcaaatttggaaaggacagtacaattgatttctgaagactggagcctagaaaaaagtacgcataatctactctctttattcatgatgctccagaatgcaaatgtcacaggtagcagtttagaagcattatcaagttttattgaaaaaagtgaaacaccttacaactttgaagaactatggcccaagtttcaacaaatcatgaaagacctaacccaagattttagaatcagacacctgctttctgaaatgaacaaaggaatcaaaagtataaattcaatggctcttcaaaagataactttgcagtttgcccatttcctggaaatcctggattcaccgtcattgaagacattagaaattattgaagattttctattggtcacaaaaaactggcttcaggaatatgcaaatgaggattactccagaatgatagaaacattattcattcctgtgaccaatgagagttcaactgaagatatagctttgttagccaaagctattgctactttttggggctctttaaaaaatatatctagagcaggcaattttgatgttgcctttcttacccatctgctaaatcaagaacagctgactaatttctcagttgttcagctgctttttgaaaacatcctaattaatttgatcaataacttagctgggaattctcaggaagcagcttggaacttaaatgatactgaccttcaaataatgaatttcattaaccttatcttgaaccatatgcagtcagaaactagtaggaaaacagttctctctctgagaagcatagtagatttcacagaacagtttttgaaaacattcttctccctttttctaaaggaagattctgagaacaaaatatctcttctgctgaaatatttccacaaagatgttattgcagagatgagttttgtcccaaaagataaaattctagaaattctgaaactggatcaatttcttaccctgatgatacaagacagattgatgaacattttttcaagtttaaaggagactatatatcacctaatgaaaagttcatttatattagacaatggagaattttattttgatactcatcaaggactgaagttcatgcaagatttatttaatgcccttctcagggaaacttcaatgaaaaataagactgaaaataatatagactttttcacagtggtgagtcagttgtttttccatgtgaataagtctgaggacctcttcaaactcaatcaagatcttgggtcagctcttcaccttgtaagagaatgttcaacagagatggcaagacttctggatacaattttacactctcctaataaggacttctatgctttgtatcctaccctccaagaagttatacttgctaatctaacggatttgcttttctttataaataattcattccctctaagaaacagagcaacattagaaattactaagagattagttggtgctatttcaagagcaagtgaagaaagtcacgtcctgaaacccctcttagaaatgtctgggactctggtcatgctgttgaatgacagtgctgacctgagagatcttgccacatcaatggactccattgtgaaacttcttaagctggtcaagaaagtttcggggaagatgtccacagtttttaaaactcattttatctccaataccaaggacagtgtgaaattctttgacactctgtattccatcatgcaacaaagtgttcaaaatcttgtgaaagaaatagctactttaaaaaaaatagatcatttcacatttgaaaagataaatgatttgttggtgccatttcttgacttggcctttgaaatgattggggtagaaccttatatatcatcaaactctgatattttcagtatgtcacctagcatactctcatatatgaaccaatctaaggacttttctgatattttggaagaaattgctgaatttttaacatctgtgaaaatgaacttggaagatatgaggagtcttgcggtagcatttaacaatgagactcaaacattttctatggattctgtcaacttacgggaagaaattctgggttgcttagttcctataaataacatcaccaaccaaatggacttcttataccctaatccaatttccactcatagtggccctcaagatataaaatgggaaataattcatgaagtgatcccttttttggataaaatattatcacaaaacagcacagaaataggatctttcttgaaaatggtgatctgtctcaccttagaagctctttggaaaaacttaaagaaagataattggaatgtttctaatgtgttgatgacatttactcagcatccaaataaccttttgaaaaccatagaaacagttttagaggcctccagtggaattaaaagtgactatgaaggtgatttgaataaaagtttatattttgacacacctttgagtcagaatataactcatcatcaacttgaaaaagcaatccataatgttttaagtagaatagctctctggaggaaaggacttctgtttaacaactctgaatggataacttccacaagaactttgtttcagccactttttgagattttcattaaagcaaccaccggaaagaatgtcacatcagaaaaagaagagagaaccaagaaagagatgattgactttccttatagtttcaaaccatttttctgtttggagaaatacctgggaggattatttgtattgactaaatactggcaacaaatcccactaacagatcaaagtgttgttgagatttgtgaagttttccagcagactgtgaagccctcagaagccatggagatgctgcagaaagtgaagatgatggtcgtacgtgtgctcaccatcgttgcagaaaacccttcctggaccaaggacattttgtgtgctactctgagttgcaagcaaaatgggataaggcatctcattttatctgctatacaaggggtcactttggcgcaggaccacttccaggaaattgaaaagatatggtcctcgccgaatcagctaaattgtgaaagtcttagcaagaatctttctagcaccttggagagcttcaagagcagcttggaaaatgccactggccaggactgcacaagccagccgaggctggagacggtgcagcagcacttgtacatgttggccaaaagcctcgaggaaacttggtcatcagggaatcccatcatgacttttctcagcaatttcacagtaactgaggatgtaaaaataaaagatttgatgaagaatatcaccaagttgactgaggagcttcgctcttccatccaaatctcgaatgagactatccatagcattctagaagcaaatatttcccactccaaggttctcttcagtgccctcaccgtagctctgtctggaaagtgtgatcaggaaatccttcatctcctgctgacatttcccaaaggggaaaaatcttggatcgcagcggaggaactctgtagcctgccagggtcaaaagtgtattctctgattgtgttgctgagtcgaaacttggatgtgcgagctttcatttacaagactctgatgccttctgaagcaaatggcttgctcaactccttgctggatatagtttccagcctcagcgccttgcttgccaaagcccagcacgtctttgagtatcttcctgagtttcttcacacatttaaaatcactgccttgctagaaaccctggactttcaacaggtttcacaaaatgtccaggccagaagttcagcttttggttctttccagtttgtgatgaagatggtttgcaaggaccaagcatcattccttagcgattctaatatgtttattaatttgcccagagttaaggaactcttggaagatgacaaagaaaaattcaacattcctgaagattcaacaccgttttgcttgaagctttatcaggaaattctacaattgccaaatggtgctttggtgtggaccttcctaaaacccatattgcatggaaaaatactatacacaccaaacactccagaaattaacaaggtcattcaaaaggctaattacaccttttatattgtggacaaactaaaaactttatcagaaacactgctggaaatgtccagccttttccagagaagtggaagtggccagatgttcaaccagctgcaggaggccctgagaaacaaatttgtaagaaactttgtagaaaaccagttgcacattgatgtagacaaacttactgaaaaactccagacatacggagggctgctggatgagatgtttaaccatgcaggcgctggacgcttccgtttcttgggcagcatcttggtcaatctctcttcctgcgtggcactgaaccgtttccaggctctgcagtctgtcgacatcctggagactaaagcacatgaactcttgcagcagaacagcttcttggccagtatcattttcagcaattccttattcgacaagaacttcagatcagagtctgtcaaactgccaccccatgtctcatacacaatccggaccaatgtgttatacagcgtgcgaacagatgtggtaaaaaacccttcttggaagttccaccctcagaatctaccagctgatgggttcaaatataactacgtctttgccccactgcaagacatgatcgaaagagccatcattttggtgcagactgggcaggaagccctggaaccagcagcacagactcaggcggccccttacccctgccataccagcgacctattcctgaacaacgttggtttcttttttccactgataatgatgctgacgtggatggtgtctgtggccagcatggtcagaaagttggtgtatgagcaggagatacagatagaagagtatatgcggatgatgggagtgcatccagtgatccatttcctggcctggttcctggagaacatggctgtgttgaccataagcagtgctactctggccatcgttctgaaaacaagtggcatctttgcacacagcaatacctttattgttttcctctttctcttggattttgggatgtcagtcgtcatgctgagctacctcttgagtgcatttttcagccaagctaatacagcggccctttgtaccagcctggtgtacatgatcagctttctgccctacatagttctattggttctacataaccaattaagttttgttaatcagacatttctgtgccttctttcgacaaccgcctttggacaaggggtattttttattacattcctggaaggacaagagacagggattcaatggaataatatgtaccaggctctggaacaagggggcatgacatttggctgggtttgctggatgattctttttgattcaagcctttattttttgtgtggatggtacttgagcaacttgattcctggaacatttggtttacggaaaccatggtatttcccctttactgcctcatattggaagagtgtgggtttcttggtggagaaaaggcaatactttctaagttctagtctgttcttcttcaatgagaactttgacaataaagggtcatcactgcaaaacagggaaggagagcttgaaggaagtgccccgggagtcaccctggtgtctgtgaccaaggaatatgagggccacaaggctgtggtccaagacctcagcctgaccttctacagagaccaaatcaccgccctgctggggacaaacggtgccgggaaaaccactatcatatccatgttgacggggctccaccctcccacttctggaaccatcatcatcaatggcaagaacctacagacagacctgtcgagggtcagaatggagcttggtgtgtgtccgcagcaggacatcctgttggacaacctcaccgtccgggaacatttgctgctctttgcttccataaaggcgcctcagtggaccaagaaggagctgcatcagcaagtcaatcaaactcttcaggatgtggacttaactcagcatcagcacaaacagacccgagctctgtctggaggcctgaagaggaagctctcccttggcattgctttcatgggcatgtcgaggaccgtggttctggatgagcccaccagtggggtggacccttgctcccggcatagcctgtgggacattctgctcaagtaccgagaaggtcgtacgatcatcttcacaacccaccacctggatgaagctgaagcgctgagtgaccgcgtggccgtcctccagcatgggaggctcaggtgctgcggtcctcccttctgcctgaaggaggcatatggccaggggctccgcctgacactcacgaggcagccttctgttctggaggcccatgatctgaaagacatggcttgtgttacatccctgataaagatctatattccacaagcatttctcaaagacagcagtggaagtgagctgacctacaccattccaaaggacacagacaaggcctgcttgaaagggctcttccaggccctggatgagaacctgcatcagctgcacctgacgggctatgggatctcagacaccaccttagaagaggtgtttttgatgcttttgcaagattccaacaagaaatctcacattgccctggggactgagtcagagctgcagaaccacaggcctacaggacatctgtctggctactgtggctccctagcacggcccgcaactgtgcagggcgtccagctgctccgcgcacaagtggccgcgatcctggcccggaggctccgccgcacgctgcgcgccgggaagagcaccctcgccgacctgctgctgccagtcctcttcgtggccttggccatgggcttgttcatggtgagacccctggccaccgagtaccctcccctcagactcacacctggacattaccagcgggccgagacctactttttcaggaagaattcttcatgctggcgcacagatcccttttctcacccagaattccaggattcatgtggctgcctgggacatggatgaaactggaaatcatcattctcagcaaac

SEQ ID NO: 198 - DNA, 14409 bp, Homo sapiens
atataagcaccatccttacaggctggcttcctgactgagagcagggagcagcaggcatggggcatgccgggtgccagttcaaagccctgctgtggaagaattggctctgcagactcaggaacccggtccttttccttgctgaattcttctggccttgtatcctgtttgtaattctgacagttcttcgttttcaagaacctcccagatacagagacatttgttatttgcagccccgagatctacccagctgtggtgttatcccctttgttcaaagccttctttgtaacactggatcaaggtgtaggaacttcagctatgaagggtcaatggagcatcattttcgtttgtctaggttccaaactgcagctgaccccaagaaagtcaacaacctggcctttttaaaagagatacaagacctggcagaggaaattcatggaatgatggacaaggcaaaaaacttaaaaagactttgggtagaacgatccaacactccagattcttcttatggttccagtttttttacaatggatctcaataagaccgaggaggtaatattgaaactggaaagcctccatcagcagcctcatatctgggattttctacttttactgccgagactacacacaagccatgatcatgtggaagatggcatggatgttgcagtgaaccttctccagaccattttgaattccttaatatccctagaagatttagattggcttccactcaaccaaactttttcccaggtttctgaacttgtactgaatgtgaccatttcgacactgacatttctgcagcaacatggagtagcagtcaccgagccagtttaccacctgtccatgcagaatatagtgtgggatccacagaaagtccagtatgatctcaaatcccagtttggctttgatgatcttcacacggaacagatcctgaactcttcagctgaactgaaggagattcccacagacacttccttggagaagatggtgtgttcagtcttgtctagcacatcagaggatgaagctgagaaatggggccacgttggaggctgccaccctaagtggtcagaagccaaaaactatcttgtccatgcagtcagctggctgcgagtctaccaacaggtgtttgttcagtggcaacagggtagcctgcttcagaagacactcacaggcatgggccatagtctggaggctctcaggaatcagtttgaagaagagagcaagccctggaaggtggtggaagctctgcacactgcactgctcctgctgaatgacagcttgtcagcagatggcccaaaagataatcatacatttccaaagatattacagcatctgtggaaattgcaaagcttgctgcaaaacctgccccagtggccggcactgaagagatttcttcagcttgatggagctctcagaaatgcgatagctcagaatttacattttgtccaagaagtcctcatttgcctggagacatcagctaatgattttaaatggtttgaacttaaccaattgaaactggaaaaggatgtgttcttttgggagctgaaacagatgttggcgaagaatgctgtctgcccgaatggtcgtttctctgagaaggaggtctttttgccgcctggaaactccagcatatggggtggtctccagggactgttgtgctattgtaactcctctgagacgagtgttttaaacaagctacttggttcagtagaggatgctgatcgtattttgcaagaggtcattacttggcacaaaaatatgtcagttttaatacctgaagaatatttggactggcaggaacttgagatgcagctgtcagaagcaagcctttcctgtactcggctcttcctgctgctgggagctgatccctctcctgagaatgatgtcttttctagtgactgtaagcaccagcttgtctccacagtgatatttcatacacttgaaaaaacacaatttttcctggaacaagcatattattggaaagccttcaaaaagtttatcaggaagacttgcgaagtggcccaatatgtaaatatgcaagagagtttccagaacagactattggcttttcctgaggaatctccttgttttgaagaaaacatggattggaaaatgatcagtgataattattttcaatttttgaataacttactcaagtctccaacagcttccatatccagggctttaaatttcacaaagcaccttctaatgatggaaaagaagttgcacacccttgaggatgaacaaatgaactttcttttatcatttgtggaattttttgagaaattattgttgcctaatctttttgactcctccattgttcccagtttccacagcctcccatctctcacagaggatattctgaatataagttctctgtggacaaatcatttaaaaagtttaaagagagacccatctgccactgatgctcagaaactcttggaatttggcaacgaagtgatttggaaaatgcagactctcggaagtcactggataaggaaggaaccaaaaaatcttttgagattcatagaattaatactttttgaaattaatcccaaattactagaattatgggcctatggcatttcaaaaggaaaaagagctaaattggaaaacttctttacacttttaaatttttctgttccagaaaatgagattctgagtacaagttttaacttttcccagttgttccattcagattggcctaaatcaccagctatgaacatagattttgtacgtttaagtgaggctataataactagtctccatgaatttggatttttggagcaggaacagatctcagaagctctgaacacagtctacgctatcaggaatgcatctgatcttttctcagccctttctgaaccacaaaaacaagaagttgataaaattttgactcacatacacctaaatgtcttccaggacaaggattcagctttacttctgcaaatttattcttcattttaccgatatatttatgaattattgaatattcagagtagaggctcttcgttgactttccttacacaaatctcaaaacacattttggatatcataaaacaatttaatttccaaaacatcagtaaagcatttgcatttttatttaagacagcagaggttcttgggggaatttctaatgtatcttactgtcagcaattgctttcaatttttaactttttggagcttcaggcccaatccttcatgtctacagagggccaagaactggaagtgatccacactactttgacaggcctcaaacagctgctcataattgatgaagattttcgtatttctttatttcaatatatgagccaattcttcaacagttcagtagaagacctattggataataaatgcttgatttcggacaataaacacatttcttccgtaaattattcaacaagtgaggagtcttcatttgtttttccattggcacaaattttttcaaacctctcagcaaatgtcagtgtgttcaacaagtttatgtccattcactgtaccgtttcatggcttcaaatgtggactgaaatctgggaaaccatatctcaattatttaagtttgacatgaatgttttcacatctcttcatcatggtttcactcagcttttggatgaattggaagatgatgtgaaagtctctaaaagctgccagggtatacttcccacccataatgttgctagactcatattaaatttgtttaaaaatgtaactcaagccaatgacttccataattgggaggacttcctggatctcagggattttttggtagctttaggtaatgcattagtttcagtaaaaaaacttaacttggagcaagtggagaaatcccttttcaccatggaagctgccctgcatcagttgaagacatttccattcaacgaaagtacaagcagagagtttttaaattctctgcttgaagttttcattgagtttagcagtacctcagaatatatagtcagaaatctagattcaataaatgactttctttcaaataatctcacaaattatggagaaaaatttgaaaatatcatcactgagctaagagaagcaatagtatttcttagaaatgtatcacatgatcgagatttgttttcctgtgctgatattttccaaaatgttactgagtgtattttagaagatggctttttatatgtaaatacctcacagaggatgttacgtattctagacacgttaaattccacattttcctctgagaacacaattagcagtctgaaaggatgcattgtatggttagatgtcataaaccatttgtatttgttgtctaactccagtttttcacaaggtcatcttcaaaatattttggggaatttcagagatatagaaaacaaaatgaactctatattaaaaattgtaacttgggtgttaaatataaaaaaacctctttgttcatcaaatggctcacatataaattgtgtcaatatttacttgaaagatgtaactgactttctaaatattgtacttactacagtctttgaaaaagagaagaaacctaaatttgagattttattagctcttttaaatgattccacaaagcaagtaaggatgagtatcaacaacttaacaacagactttgattttgcatctcagtccaattggagatattttactgaattaattctaagaccaatagaaatgtcagatgaaattcctaatcagtttcaaaatatttggcttcatttaataacactggggaaggaatttcagaagcttgtaaaaggtatttactttaacatcctggaaaataattcctcttctaaaactgaaaacttgttaaacatatttgccaccagtccaaaagaaaaggatgtaaacagtgtaggcaattccatttatcacttagctagttaccttgccttcagcttatctcatgacctccaaaattcaccaaaaataataatttcacctgaaataatgaaagctacaggtcttggtattcaactgataagggatgtgttcaactccttaatgcctgtagttcatcacactagtccacaaaatgcaggttatatgcaagctttgaagaaggtaacttctgtcatgcgtacccttaagaaggcagacatagaccttttagtggatcagcttgaacaagttagtgtaaacctaatggatttctttaagaatatcagtagtgtgggaactggcaatttagtggtcaatttgcttgttggcttgatggaaaaatttgcagacagctcacattcttggaatgttaatcatctgctgcagctctcacgcctgtttcctaaagatgttgtggatgctgtgatagatgtgtactatgtgcttcctcatgctgtaaggctcctgcagggagtacctggtaaaaacatcactgaaggcctcaaggatgtctacagcttcacactccttcatggcataaccatttcaaatatcaccaaggaagacttcgcaattgtgataaaaattcttttggatacaattgaattagtatcagataagccagatattatttcagaggctttagcttgttttcctgtggtttggtgctggaatcacacaaattctggatttcggcagaattcaaagatagacccctgcaatgtccatgggctcatgtcttcttccttttatggcaaagtggccagtatacttgatcatttccacctgtctccccaaggtgaagattcaccatgttcaaatgaaagctcccgaatggaaataactaggaaagtggtctgcataattcatgaattagtggactggaattctattcttctggagctctctgaagtcttccatgttaacatttctcttgtgaaaactgtgcagaaattttggcataagatattaccgtttgtcccaccttcaataaatcaaactagggatagcatctctgaactctgtcctagtggttccataaagcaagttgctttgcaaatcatagaaaaacttaaaaatgtcaactttacaaaagttacatcaggtgaaaatattcttgacaaactaagtagtttaaacaagatccttaacattaatgaagacacagagacatctgttcaaaatattatttcctcaaatttggaaaggacagtacaattgatttctgaagactggagcctagaaaaaagtacgcataatctactctctttattcatgatgctccagaatgcaaatgtcacaggtagcagtttagaagcattatcaagttttattgaaaaaagtgaaacaccttacaactttgaagaactatggcccaagtttcaacaaatcatgaaagacctaacccaagattttagaatcagacacctgctttctgaaatgaacaaaggaatcaaaagtataaattcaatggctcttcaaaagataactttgcagtttgcccatttcctggaaatcctggattcaccgtcattgaagacattagaaattattgaagattttctattggtcacaaaaaactggcttcaggaatatgcaaatgaggattactccagaatgatagaaacattattcattcctgtgaccaatgagagttcaactgaagatatagctttgttagccaaagctattgctactttttggggctctttaaaaaatatatctagagcaggcaattttgatgttgcctttcttacccatctgctaaatcaagaacagctgactaatttctcagttgttcagctgctttttgaaaacatcctaattaatttgatcaataacttagctgggaattctcaggaagcagcttggaacttaaatgatactgaccttcaaataatgaatttcattaaccttatcttgaaccatatgcagtcagaaactagtaggaaaacagttctctctctgagaagcatagtagatttcacagaacagtttttgaaaacattcttctccctttttctaaaggaagattctgagaacaaaatatctcttctgctgaaatatttccacaaagatgttattgcagagatgagttttgtcccaaaagataaaattctagaaattctgaaactggatcaatttcttaccctgatgatacaagacagattgatgaacattttttcaagtttaaaggagactatatatcacctaatgaaaagttcatttatattagacaatggagaattttattttgatactcatcaaggactgaagttcatgcaagatttatttaatgcccttctcagggaaacttcaatgaaaaataagactgaaaataatatagactttttcacagtggtgagtcagttgtttttccatgtgaataagtctgaggacctcttcaaactcaatcaagatcttgggtcagctcttcaccttgtaagagaatgttcaacagagatggcaagacttctggatacaattttacactctcctaataaggacttctatgctttgtatcctaccctccaagaagttatacttgctaatctaacggatttgcttttctttataaataattcattccctctaagaaacagagcaacattagaaattactaagagattagttggtgctatttcaagagcaagtgaagaaagtcacgtcctgaaacccctcttagaaatgtctgggactctggtcatgctgttgaatgacagtgctgacctgagagatcttgccacatcaatggactccattgtgaaacttcttaagctggtcaagaaagtttcggggaagatgtccacagtttttaaaactcattttatctccaataccaaggacagtgtgaaattctttgacactctgtattccatcatgcaacaaagtgttcaaaatcttgtgaaagaaatagctactttaaaaaaaatagatcatttcacatttgaaaagataaatgatttgttggtgccatttcttgacttggcctttgaaatgattggggtagaaccttatatatcatcaaactctgatattttcagtatgtcacctagcatactctcatatatgaaccaatctaaggacttttctgatattttggaagaaattgctgaatttttaacatctgtgaaaatgaacttggaagatatgaggagtcttgcggtagcatttaacaatgagactcaaacattttctatggattctgtcaacttacgggaagaaattctgggttgcttagttcctataaataacatcaccaaccaaatggacttcttataccctaatccaatttccactcatagtggccctcaagatataaaatgggaaataattcatgaagtgatcccttttttggataaaatattatcacaaaacagcacagaaataggatctttcttgaaaatggtgatctgtctcaccttagaagctctttggaaaaacttaaagaaagataattggaatgtttctaatgtgttgatgacatttactcagcatccaaataaccttttgaaaaccatagaaacagttttagaggcctccagtggaattaaaagtgactatgaaggtgatttgaataaaagtttatattttgacacacctttgagtcagaatataactcatcatcaacttgaaaaagcaatccataatgttttaagtagaatagctctctggaggaaaggacttctgtttaacaactctgaatggataacttccacaagaactttgtttcagccactttttgagattttcattaaagcaaccaccggaaagaatgtcacatcagaaaaagaagagagaaccaagaaagagatgattgactttccttatagtttcaaaccatttttctgtttggagaaatacctgggaggattatttgtattgactaaatactggcaacaaatcccactaacagatcaaagtgttgttgagatttgtgaagttttccagcagactgtgaagccctcagaagccatggagatgctgcagaaagtgaagatgatggtcgtacgtgtgctcaccatcgttgcagaaaacccttcctggaccaaggacattttgtgtgctactctgagttgcaagcaaaatgggataaggcatctcattttatctgctatacaaggggtcactttggcgcaggaccacttccaggaaattgaaaagatatggtcctcgccgaatcagctaaattgtgaaagtcttagcaagaatctttctagcaccttggagagcttcaagagcagcttggaaaatgccactggccaggactgcacaagccagccgaggctggagacggtgcagcagcacttgtacatgttggccaaaagcctcgaggaaacttggtcatcagggaatcccatcatgacttttctcagcaatttcacagtaactgaggatgtaaaaataaaagatttgatgaagaatatcaccaagttgactgaggagcttcgctcttccatccaaatctcgaatgagactatccatagcattctagaagcaaatatttcccactccaaggttctcttcagtgccctcaccgtagctctgtctggaaagtgtgatcaggaaatccttcatctcctgctgacatttcccaaaggggaaaaatcttggatcgcagcggaggaactctgtagcctgccagggtcaaaagtgtattctctgattgtgttgctgagtcgaaacttggatgtgcgagctttcatttacaagactctgatgccttctgaagcaaatggcttgctcaactccttgctggatatagtttccagcctcagcgccttgcttgccaaagcccagcacgtctttgagtatcttcctgagtttcttcacacatttaaaatcactgccttgctagaaaccctggactttcaacaggtttcacaaaatgtccaggccagaagttcagcttttggttctttccagtttgtgatgaagatggtttgcaaggaccaagcatcattccttagcgattctaatatgtttattaatttgcccagagttaaggaactcttggaagatgacaaagaaaaattcaacattcctgaagattcaacaccgttttgcttgaagctttatcaggaaattctacaattgccaaatggtgctttggtgtggaccttcctaaaacccatattgcatggaaaaatactatacacaccaaacactccagaaattaacaaggtcattcaaaaggctaattacaccttttatattgtggacaaactaaaaactttatcagaaacactgctggaaatgtccagccttttccagagaagtggaagtggccagatgttcaaccagctgcaggaggccctgagaaacaaatttgtaagaaactttgtagaaaaccagttgcacattgatgtagacaaacttactgaaaaactccagacatacggagggctgctggatgagatgtttaaccatgcaggcgctggacgcttccgtttcttgggcagcatcttggtcaatctctcttcctgcgtggcactgaaccgtttccaggctctgcagtctgtcgacatcctggagactaaagcacatgaactcttgcagcagaacagcttcttggccagtatcattttcagcaattccttattcgacaagaacttcagatcagagtctgtcaaactgccaccccatgtctcatacacaatccggaccaatgtgttatacagcgtgcgaacagatgtggtaaaaaacccttcttggaagttccaccctcagaatctaccagctgatgggttcaaatataactacgtctttgccccactgcaagacatgatcgaaagagccatcattttggtgcagactgggcaggaagccctggaaccagcagcacagactcaggcggccccttacccctgccataccagcgacctattcctgaacaacgttggtttcttttttccactgataatgatgctgacgtggatggtgtctgtggccagcatggtcagaaagttggtgtatgagcaggagatacagatagaagagtatatgcggatgatgggagtgcatccagtgatccatttcctggcctggttcctggagaacatggctgtgttgaccataagcagtgctactctggccatcgttctgaaaacaagtggcatctttgcacacagcaatacctttattgttttcctctttctcttggattttgggatgtcagtcgtcatgctgagctacctcttgagtgcatttttcagccaagctaatacagcggccctttgtaccagcctggtgtacatgatcagctttctgccctacatagttctattggttctacataaccaattaagttttgttaatcagacatttctgtgccttctttcgacaaccgcctttggacaaggggtattttttattacattcctggaaggacaagagacagggattcaatggaataatatgtaccaggctctggaacaagggggcatgacatttggctgggtttgctggatgattctttttgattcaagcctttattttttgtgtggatggtacttgagcaacttgattcctggaacatttggtttacggaaaccatggtatttcccctttactgcctcatattggaagagtgtgggtttcttggtggagaaaaggcaatactttctaagttctagtctgttcttcttcaatgagaactttgacaataaagggtcatcactgcaaaacagggaaggagagcttgaaggaagtgccccgggagtcaccctggtgtctgtgaccaaggaatatgagggccacaaggctgtggtccaagacctcagcctgaccttctacagagaccaaatcaccgccctgctggggacaaacggtgccgggaaaaccactatcatatccatgttgacggggctccaccctcccacttctggaaccatcatcatcaatggcaagaacctacagacagacctgtcgagggtcagaatggagcttggtgtgtgtccgcagcaggacatcctgttggacaacctcaccgtccgggaacatttgctgctctttgcttccataaaggcgcctcagtggaccaagaaggagctgcatcagcaagtcaatcaaactcttcaggatgtggacttaactcagcatcagcacaaacagacccgagctctgtctggaggcctgaagaggaagctctcccttggcattgctttcatgggcatgtcgaggaccgtggttctggatgagcccaccagtggggtggacccttgctcccggcatagcctgtgggacattctgctcaagtaccgagaaggacatttgatgggcagttactaatttccaacttctgattctttctgcaatcctgacagctaggaagcattgttctatgtattttctgtgagaatactcccttttggaaagaaacattgcaacagtaaaacacatcttggtgctggtaaataagtgtagaggcatcagtggcaggattaatacagattctcataaaatgttattttgctttttcttttgccttttgagtataaattttcttctgacttaacctaaagtctccatttccctggaggtgaactaggatttgcaaaggaagaaataaaggaaaaataacaagaaagagtccttctttttcttagcatatagagggctgaggccagaagtcttggaccatcaaattctatctttggagtagaaaaggtactccagtctgtcacttaaagcttaaccataggctggagtcagaaaggagaaaaataacaaaagggagcatagaagatcaatctgtttctttctgtcccacaattttgttggaattatggaaggagaagatagatagaagtgggaaaattgagcaagcagatgtgactttttgttccactctgggctttggcctggcctgggcaattgcactagaaaagtgcaggccacatctgcggtgctggctcctcaatcatggtgcagccacatcggagttcacgaggctcagcagaaatccaggtcccagtgaggcactgagggctggtattccctaccttttcatgcccatgaactttgacattgaaagacagggcttgctaggcatgctgccatggaagtaggggaccccttggagctagctggctggaagccagggcagagattcagccgtctgcagtcagcaggacctactgtgaggcctagacagcctgggagcactctgctctggcctgacccctttggagtccaagctacaaatgccaaggtggggaggcaggcagtgccatgtggttttggttgacacccagacaccagatgaccctgaccacattgcacccaaagattcgaacccttccccgttgccacaagatcaagaagactcctgactccatttacctaagtgtctcttggggaaagacatagaaagggcagacatgggatactgaccaccacttcaaaagattgattaaattttgagatgcaacgatttaaactggacgaaacaatttgcgcactaccctggctggggactgatgcggaagatcaatgggagatagacaaatagataacattgtctctgcacctgtgaattgtggtgcaaattaaataccacaagcccactactcttgtttagtttaaaaattagagctggagtctcaaaggtttagctgacagaacatttttgtaatgagcacaaaggttattttagacagaaaaatagatacaatgaaagtctcagaaacagacagttttcttcagtttctgttgttacaaaccaaatattttctcactgtccttcgttgtttagcaattttttttgtctttggaggacttttttgaaatcatccctgcactgactgaagtgcaaaatcaatagtatgtaagcgattagataggcggtattggaagaaaaatgtgttttcaagaatcaaaatgtatagccatttctgaagcagcccaaacctctaggtaatcatagagctctgtgagacagatctaaggactgtgcagaaacaaacacttccttctgagaagaaagagctcttctgtcggaataccagtgcagtgggggctcagtctacctggaattttgtgtgtgtttcttgcttagttatgtacagtgagggctcttgatcagccctggtaccagtatttctgtgtctcccatggaaaaataaataaggaagcaaaaaataccggtgaaaactggcacatctcaactaaatttctgttctggggtatgcacttgctctacaaatcccatgtgaccctgcagaaatgatcaaatgcttctgagcttcagtgttctcatttgcaaatagagacaattgtaccatctcataggatgtgagagggcacagttgtatgtgaaagtgcacagttctgtatataccatgtgtgcgctcaatcaatgacaggttatcattattattattaaaatagacaaggggcgaatgtgggaagcgcagcttttggaggaacatatcatctgaatcagagagagaaacagtcaaacagtgtcttggggaaaacagtagcattgctctttgaggccgggcatggtggctcatgcctataattccagcactttgggaggccaaga

SEQ ID NO: 199 - DNA, 12228 bp, Homo sapiens
atataagcaccatccttacaggctggcttcctgactgagagcagggagcagcaggcatggggcatgccgggtgccagttcaaagccctgctgtggaagaattggctctgcagactcaggaacccggtccttttccttgctgaattcttctggccttgtatcctgtttgtaattctgacagttcttcgttttcaagaacctcccagatacagagacatttgttatttgcagccccgagatctacccagctgtggtgttatcccctttgttcaaagccttctttgtaacactggatcaaggtgtaggaacttcagctatgaagggtcaatggagcatcattttcgtttgtctaggttccaaactgcagctgaccccaagaaagtcaacaacctggcctttttaaaagagatacaagacctggcagaggaaattcatggaatgatggacaaggcaaaaaacttaaaaagactttgggtagaacgatccaacactccagattcttcttatggttccagtttttttacaatggatctcaataagaccgaggaggtaatattgaaactggaaagcctccatcagcagcctcatatctgggattttctacttttactgccgagactacacacaagccatgatcatgtggaagatggcatggatgttgcagtgaaccttctccagaccattttgaattccttaatatccctagaagatttagattggcttccactcaaccaaactttttcccaggtttctgaacttgtactgaatgtgaccatttcgacactgacatttctgcagcaacatggagtagcagtcaccgagccagtttaccacctgtccatgcagaatatagtgtgggatccacagaaagtccagtatgatctcaaatcccagtttggctttgatgatcttcacacggaacagatcctgaactcttcagctgaactgaaggagattcccacagacacttccttggagaagatggtgtgttcagtcttgtctagcacatcagaggatgaagctgagaaatggggccacgttggaggctgccaccctaagtggtcagaagccaaaaactatcttgtccatgcagtcagctggctgcgagtctaccaacaggtgtttgttcagtggcaacagggtagcctgcttcagaagacactcacaggcatgggccatagtctggaggctctcaggaatcagtttgaagaagagagcaagccctggaaggtggtggaagctctgcacactgcactgctcctgctgaatgacagcttgtcagcagatggcccaaaagataatcatacatttccaaagatattacagcatctgtggaaattgcaaagcttgctgcaaaacctgccccagtggccggcactgaagagatttcttcagcttgatggagctctcagaaatgcgatagctcagaatttacattttgtccaagaagtcctcatttgcctggagacatcagctaatgattttaaatggtttgaacttaaccaattgaaactggaaaaggatgtgttcttttgggagctgaaacagatgttggcgaagaatgctgtctgcccgaatggtcgtttctctgagaaggaggtctttttgccgcctggaaactccagcatatggggtggtctccagggactgttgtgctattgtaactcctctgagacgagtgttttaaacaagctacttggttcagtagaggatgctgatcgtattttgcaagaggtcattacttggcacaaaaatatgtcagttttaatacctgaagaatatttggactggcaggaacttgagatgcagctgtcagaagcaagcctttcctgtactcggctcttcctgctgctgggagctgatccctctcctgagaatgatgtcttttctagtgactgtaagcaccagcttgtctccacagtgatatttcatacacttgaaaaaacacaatttttcctggaacaagcatattattggaaagccttcaaaaagtttatcaggaagacttgcgaagtggcccaatatgtaaatatgcaagagagtttccagaacagactattggcttttcctgaggaatctccttgttttgaagaaaacatggattggaaaatgatcagtgataattattttcaatttttgaataacttactcaagtctccaacagcttccatatccagggctttaaatttcacaaagcaccttctaatgatggaaaagaagttgcacacccttgaggatgaacaaatgaactttcttttatcatttgtggaattttttgagaaattattgttgcctaatctttttgactcctccattgttcccagtttccacagcctcccatctctcacagaggatattctgaatataagttctctgtggacaaatcatttaaaaagtttaaagagagacccatctgccactgatgctcagaaactcttggaatttggcaacgaagtgatttggaaaatgcagactctcggaagtcactggataaggaaggaaccaaaaaatcttttgagattcatagaattaatactttttgaaattaatcccaaattactagaattatgggcctatggcatttcaaaaggaaaaagagctaaattggaaaacttctttacacttttaaatttttctgttccagaaaatgagattctgagtacaagttttaacttttcccagttgttccattcagattggcctaaatcaccagctatgaacatagattttgtacgtttaagtgaggctataataactagtctccatgaatttggatttttggagcaggaacagatctcagaagctctgaacacagtctacgctatcaggaatgcatctgatcttttctcagccctttctgaaccacaaaaacaagaagttgataaaattttgactcacatacacctaaatgtcttccaggacaaggattcagctttacttctgcaaatttattcttcattttaccgatatatttatgaattattgaatattcagagtagaggctcttcgttgactttccttacacaaatctcaaaacacattttggatatcataaaacaatttaatttccaaaacatcagtaaagcatttgcatttttatttaagacagcagaggttcttgggggaatttctaatgtatcttactgtcagcaattgctttcaatttttaactttttggagcttcaggcccaatccttcatgtctacagagggccaagaactggaagtgatccacactactttgacaggcctcaaacagctgctcataattgatgaagattttcgtatttctttatttcaatatatgagccaattcttcaacagttcagtagaagacctattggataataaatgcttgatttcggacaataaacacatttcttccgtaaattattcaacaagtgaggagtcttcatttgtttttccattggcacaaattttttcaaacctctcagcaaatgtcagtgtgttcaacaagtttatgtccattcactgtaccgtttcatggcttcaaatgtggactgaaatctgggaaaccatatctcaattatttaagtttgacatgaatgttttcacatctcttcatcatggtttcactcagcttttggatgaattggaagatgatgtgaaagtctctaaaagctgccagggtatacttcccacccataatgttgctagactcatattaaatttgtttaaaaatgtaactcaagccaatgacttccataattgggaggacttcctggatctcagggattttttggtagctttaggtaatgcattagtttcagtaaaaaaacttaacttggagcaagtggagaaatcccttttcaccatggaagctgccctgcatcagttgaagacatttccattcaacgaaagtacaagcagagagtttttaaattctctgcttgaagttttcattgagtttagcagtacctcagaatatatagtcagaaatctagattcaataaatgactttctttcaaataatctcacaaattatggagaaaaatttgaaaatatcatcactgagctaagagaagcaatagtatttcttagaaatgtatcacatgatcgagatttgttttcctgtgctgatattttccaaaatgttactgagtgtattttagaagatggctttttatatgtaaatacctcacagaggatgttacgtattctagacacgttaaattccacattttcctctgagaacacaattagcagtctgaaaggatgcattgtatggttagatgtcataaaccatttgtatttgttgtctaactccagtttttcacaaggtcatcttcaaaatattttggggaatttcagagatatagaaaacaaaatgaactctatattaaaaattgtaacttgggtgttaaatataaaaaaacctctttgttcatcaaatggctcacatataaattgtgtcaatatttacttgaaagatgtaactgactttctaaatattgtacttactacagtctttgaaaaagagaagaaacctaaatttgagattttattagctcttttaaatgattccacaaagcaagtaaggatgagtatcaacaacttaacaacagactttgattttgcatctcagtccaattggagatattttactgaattaattctaagaccaatagaaatgtcagatgaaattcctaatcagtttcaaaatatttggcttcatttaataacactggggaaggaatttcagaagcttgtaaaaggtatttactttaacatcctggaaaataattcctcttctaaaactgaaaacttgttaaacatatttgccaccagtccaaaagaaaaggatgtaaacagtgtaggcaattccatttatcacttagctagttaccttgccttcagcttatctcatgacctccaaaattcaccaaaaataataatttcacctgaaataatgaaagctacaggtcttggtattcaactgataagggatgtgttcaactccttaatgcctgtagttcatcacactagtccacaaaatgcaggttatatgcaagctttgaagaaggtaacttctgtcatgcgtacccttaagaaggcagacatagaccttttagtggatcagcttgaacaagttagtgtaaacctaatggatttctttaagaatatcagtagtgtgggaactggcaatttagtggtcaatttgcttgttggcttgatggaaaaatttgcagacagctcacattcttggaatgttaatcatctgctgcagctctcacgcctgtttcctaaagatgttgtggatgctgtgatagatgtgtactatgtgcttcctcatgctgtaaggctcctgcagggagtacctggtaaaaacatcactgaaggcctcaaggatgtctacagcttcacactccttcatggcataaccatttcaaatatcaccaaggaagacttcgcaattgtgataaaaattcttttggatacaattgaattagtatcagataagccagatattatttcagaggctttagcttgttttcctgtggtttggtgctggaatcacacaaattctggatttcggcagaattcaaagatagacccctgcaatgtccatgggctcatgtcttcttccttttatggcaaagtggccagtatacttgatcatttccacctgtctccccaaggtgaagattcaccatgttcaaatgaaagctcccgaatggaaataactaggaaagtggtctgcataattcatgaattagtggactggaattctattcttctggagctctctgaagtcttccatgttaacatttctcttgtgaaaactgtgcagaaattttggcataagatattaccgtttgtcccaccttcaataaatcaaactagggatagcatctctgaactctgtcctagtggttccataaagcaagttgctttgcaaatcatagaaaaacttaaaaatgtcaactttacaaaagttacatcaggtgaaaatattcttgacaaactaagtagtttaaacaagatccttaacattaatgaagacacagagacatctgttcaaaatattatttcctcaaatttggaaaggacagtacaattgatttctgaagactggagcctagaaaaaagtacgcataatctactctctttattcatgatgctccagaatgcaaatgtcacaggtagcagtttagaagcattatcaagttttattgaaaaaagtgaaacaccttacaactttgaagaactatggcccaagtttcaacaaatcatgaaagacctaacccaagattttagaatcagacacctgctttctgaaatgaacaaaggaatcaaaagtataaattcaatggctcttcaaaagataactttgcagtttgcccatttcctggaaatcctggattcaccgtcattgaagacattagaaattattgaagattttctattggtcacaaaaaactggcttcaggaatatgcaaatgaggattactccagaatgatagaaacattattcattcctgtgaccaatgagagttcaactgaagatatagctttgttagccaaagctattgctactttttggggctctttaaaaaatatatctagagcaggcaattttgatgttgcctttcttacccatctgctaaatcaagaacagctgactaatttctcagttgttcagctgctttttgaaaacatcctaattaatttgatcaataacttagctgggaattctcaggaagcagcttggaacttaaatgatactgaccttcaaataatgaatttcattaaccttatcttgaaccatatgcagtcagaaactagtaggaaaacagttctctctctgagaagcatagtagatttcacagaacagtttttgaaaacattcttctccctttttctaaaggaagattctgagaacaaaatatctcttctgctgaaatatttccacaaagatgttattgcagagatgagttttgtcccaaaagataaaattctagaaattctgaaactggatcaatttcttaccctgatgatacaagacagattgatgaacattttttcaagtttaaaggagactatatatcacctaatgaaaagttcatttatattagacaatggagaattttattttgatactcatcaaggactgaagttcatgcaagatttatttaatgcccttctcagggaaacttcaatgaaaaataagactgaaaataatatagactttttcacagtggtgagtcagttgtttttccatgtgaataagtctgaggacctcttcaaactcaatcaagatcttgggtcagctcttcaccttgtaagagaatgttcaacagagatggcaagacttctggatacaattttacactctcctaataaggacttctatgctttgtatcctaccctccaagaagttatacttgctaatctaacggatttgcttttctttataaataattcattccctctaagaaacagagcaacattagaaattactaagagattagttggtgctatttcaagagcaagtgaagaaagtcacgtcctgaaacccctcttagaaatgtctgggactctggtcatgctgttgaatgacagtgctgacctgagagatcttgccacatcaatggactccattgtgaaacttcttaagctggtcaagaaagtttcggggaagatgtccacagtttttaaaactcattttatctccaataccaaggacagtgtgaaattctttgacactctgtattccatcatgcaacaaagtgttcaaaatcttgtgaaagaaatagctactttaaaaaaaatagatcatttcacatttgaaaagataaatgatttgttggtgccatttcttgacttggcctttgaaatgattggggtagaaccttatatatcatcaaactctgatattttcagtatgtcacctagcatactctcatatatgaaccaatctaaggacttttctgatattttggaagaaattgctgaatttttaacatctgtgaaaatgaacttggaagatatgaggagtcttgcggtagcatttaacaatgagactcaaacattttctatggattctgtcaacttacgggaagaaattctgggttgcttagttcctataaataacatcaccaaccaaatggacttcttataccctaatccaatttccactcatagtggccctcaagatataaaatgggaaataattcatgaagtgatcccttttttggataaaatattatcacaaaacagcacagaaataggatctttcttgaaaatggtgatctgtctcaccttagaagctctttggaaaaacttaaagaaagataattggaatgtttctaatgtgttgatgacatttactcagcatccaaataaccttttgaaaaccatagaaacagttttagaggcctccagtggaattaaaagtgactatgaaggtgatttgaataaaagtttatattttgacacacctttgagtcagaatataactcatcatcaacttgaaaaagcaatccataatgttttaagtagaatagctctctggaggaaaggacttctgtttaacaactctgaatggataacttccacaagaactttgtttcagccactttttgagattttcattaaagcaaccaccggaaagaatgtcacatcagaaaaagaagagagaaccaagaaagagatgattgactttccttatagtttcaaaccatttttctgtttggagaaatacctgggaggattatttgtattgactaaatactggcaacaaatcccactaacagatcaaagtgttgttgagatttgtgaagttttccagcagactgtgaagccctcagaagccatggagatgctgcagaaagtgaagatgatggtcgtacgtgtgctcaccatcgttgcagaaaacccttcctggaccaaggacattttgtgtgctactctgagttgcaagcaaaatgggataaggcatctcattttatctgctatacaaggggtcactttggcgcaggaccacttccaggaaattgaaaagatatggtcctcgccgaatcagctaaattgtgaaagtcttagcaagaatctttctagcaccttggagagcttcaagagcagcttggaaaatgccactggccaggactgcacaagccagccgaggctggagacggtgcagcagcacttgtacatgttggccaaaagcctcgaggaaacttggtcatcagggaatcccatcatgacttttctcagcaatttcacagtaactgaggatgtaaaaataaaagatttgatgaagaatatcaccaagttgactgaggagcttcgctcttccatccaaatctcgaatgagactatccatagcattctagaagcaaatatttcccactccaaggttctcttcagtgccctcaccgtagctctgtctggaaagtgtgatcaggaaatccttcatctcctgctgacatttcccaaaggggaaaaatcttggatcgcagcggaggaactctgtagcctgccagggtcaaaagtgtattctctgattgtgttgctgagtcgaaacttggatgtgcgagctttcatttacaagactctgatgccttctgaagcaaatggcttgctcaactccttgctggatatagtttccagcctcagcgccttgcttgccaaagcccagcacgtctttgagtatcttcctgagtttcttcacacatttaaaatcactgccttgctagaaaccctggactttcaacaggtttcacaaaatgtccaggccagaagttcagcttttggttctttccagtttgtgatgaagatggtttgcaaggaccaagcatcattccttagcgattctaatatgtttattaatttgcccagagttaaggaactcttggaagatgacaaagaaaaattcaacattcctgaagattcaacaccgttttgcttgaagctttatcaggaaattctacaattgccaaatggtgctttggtgtggaccttcctaaaacccatattgcatggaaaaatactatacacaccaaacactccagaaattaacaaggtcattcaaaaggctaattacaccttttatattgtggacaaactaaaaactttatcagaaacactgctggaaatgtccagccttttccagagaagtggaagtggccagatgttcaaccagctgcaggaggccctgagaaacaaatttgtaagaaactttgtagaaaaccagttgcacattgatgtagacaaacttactgaaaaactccagacatacggagggctgctggatgagatgtttaaccatgcaggcgctggacgcttccgtttcttgggcagcatcttggtcaatctctcttcctgcgtggcactgaaccgtttccaggctctgcagtctgtcgacatcctggagactaaagcacatgaactcttgcagcagaacagcttcttggccagtatcattttcagcaattccttattcgacaagaacttcagatcagagtctgtcaaactgccaccccatgtctcatacacaatccggaccaatgtgttatacagcgtgcgaacagatgtggtaaaaaacccttcttggaagttccaccctcagaatctaccagctgatgggttcaaatataactacgtctttgccccactgcaagacatgatcgaaagagccatcattttggtgcagactgggcaggaagccctggaaccagcagcacagactcaggcggccccttacccctgccataccagcgacctattcctgaacaacgttggtttcttttttccactgataatgatgctgacgtggatggtgtctgtggccagcatggtcagaaagttggtgtatgagcaggagatacagatagaagagtatatgcggatgatgggagtgcatccagtgatccatttcctggcctggttcctggagaacatggctgtgttgaccataagcagtgctactctggccatcgttctgaaaacaagtggcatctttgcacacagcaatacctttattgttttcctctttctcttggattttgggatgtcagtcgtcatgctgagctacctcttgagtgcatttttcagccaagctaatacagcggccctttgtaccagcctggtgtacatgatcagctttctgccctacatagttctattggttctacataaccaattaagttttgttaatcagacatttctgtgccttctttcgacaaccgcctttggacaaggggtattttttattacattcctggaaggacaagagacagggattcaatggaataatatgtaccaggctctggaacaagggggcatgacatttggctgggtttgctggatgattctttttgattcaagcctttattttttgtgtggatggtacttgagcaacttgattcctggaacatttggtttacggaaaccatggtatttcccctttactgcctcatattggaagagtgtgggtttcttggtggagaaaaggcaatactttctaagttctagtctgttcttcttcaatgagaactttgacaataaagggtcatcactgcaaaacagggaaggagagcttgaaggaagtgccccgggagtcaccctggtgtctgtgaccaaggaatatgagggccacaaggctgtggtccaagacctcagcctgaccttctacagagaccaaatcaccgccctgctggggacaaacggtgccgggaaaaccactatcatatccatgttgacggggctccaccctcccacttctggaaccatcatcatcaatggcaagaacctacagacagacctgtcgagggtcagaatggagcttggtgtgtgtccgcagcaggacatcctgttggacaacctcaccgtccgggaacatttgctgctctttgcttccataaaggcgcctcagtggaccaagaaggagctgcatcagcaagtcaatcaaactcttcaggatgtggacttaactcagcatcagcacaaacagacccgagctctgtctggaggcctgaagaggaagctctcccttggcattgctttcatgggcatgtcgaggaccgtggttctggatgagcccaccagtggggtggacccttgctcccggcatagcctgtgggacattctgctcaagtaccgagaagtttgaaaattggtgaggatctttaaattgtgccctggatctaccatcctgaggaaaggagggaaggtcctcctggggcctttgtcctcctggtgctgatgca

SEQ ID NO: 200 - DNA, 13191 bp, Homo sapiens
gatataagcaccatccttacaggctggcttcctgactgagagcagggagcagcaggcatggggcatgccgggtgccagttcaaagccctgctgtggaagaattggctctgcagactcaggaacccggtccttttccttgctgaattcttctggccttgtatcctgtttgtaattctgacagttcttcgttttcaagaacctcccagatacagagacatttgttatttgcagccccgagatctacccagctgtggtgttatcccctttgttcaaagccttctttgtaacactggatcaaggtgtaggaacttcagctatgaagggtcaatggagcatcattttcgtttgtctaggttccaaactgcagctgaccccaagaaagtcaacaacctggcctttttaaaagagatacaagacctggcagaggaaattcatggaatgatggacaaggcaaaaaacttaaaaagactttgggtagaacgatccaacactccagattcttcttatggttccagtttttttacaatggatctcaataagaccgaggaggtaatattgaaactggaaagcctccatcagcagcctcatatctgggattttctacttttactgccgagactacacacaagccatgatcatgtggaagatggcatggatgttgcagtgaaccttctccagaccattttgaattccttaatatccctagaagatttagattggcttccactcaaccaaactttttcccaggtttctgaacttgtactgaatgtgaccatttcgacactgacatttctgcagcaacatggagtagcagtcaccgagccagtttaccacctgtccatgcagaatatagtgtgggatccacagaaagtccagtatgatctcaaatcccagtttggctttgatgatcttcacacggaacagatcctgaactcttcagctgaactgaaggagattcccacagacacttccttggagaagatggtgtgttcagtcttgtctagcacatcagaggatgaagctgagaaatggggccacgttggaggctgccaccctaagtggtcagaagccaaaaactatcttgtccatgcagtcagctggctgcgagtctaccaacaggtgtttgttcagtggcaacagggtagcctgcttcagaagacactcacaggcatgggccatagtctggaggctctcaggaatcagtttgaagaagagagcaagccctggaaggtggtggaagctctgcacactgcactgctcctgctgaatgacagcttgtcagcagatggcccaaaagataatcatacatttccaaagatattacagcatctgtggaaattgcaaagcttgctgcaaaacctgccccagtggccggcactgaagagatttcttcagcttgatggagctctcagaaatgcgatagctcagaatttacattttgtccaagaagtcctcatttgcctggagacatcagctaatgattttaaatggtttgaacttaaccaattgaaactggaaaaggatgtgttcttttgggagctgaaacagatgttggcgaagaatgctgtctgcccgaatggtcgtttctctgagaaggaggtctttttgccgcctggaaactccagcatatggggtggtctccagggactgttgtgctattgtaactcctctgagacgagtgttttaaacaagctacttggttcagtagaggatgctgatcgtattttgcaagaggtcattacttggcacaaaaatatgtcagttttaatacctgaagaatatttggactggcaggaacttgagatgcagctgtcagaagcaagcctttcctgtactcggctcttcctgctgctgggagctgatccctctcctgagaatgatgtcttttctagtgactgtaagcaccagcttgtctccacagtgatatttcatacacttgaaaaaacacaatttttcctggaacaagcatattattggaaagccttcaaaaagtttatcaggaagacttgcgaagtggcccaatatgtaaatatgcaagagagtttccagaacagactattggcttttcctgaggaatctccttgttttgaagaaaacatggattggaaaatgatcagtgataattattttcaatttttgaataacttactcaagtctccaacagcttccatatccagggctttaaatttcacaaagcaccttctaatgatggaaaagaagttgcacacccttgaggatgaacaaatgaactttcttttatcatttgtggaattttttgagaaattattgttgcctaatctttttgactcctccattgttcccagtttccacagcctcccatctctcacagaggatattctgaatataagttctctgtggacaaatcatttaaaaagtttaaagagagacccatctgccactgatgctcagaaactcttggaatttggcaacgaagtgatttggaaaatgcagactctcggaagtcactggataaggaaggaaccaaaaaatcttttgagattcatagaattaatactttttgaaattaatcccaaattactagaattatgggcctatggcatttcaaaaggaaaaagagctaaattggaaaacttctttacacttttaaatttttctgttccagaaaatgagattctgagtacaagttttaacttttcccagttgttccattcagattggcctaaatcaccagctatgaacatagattttgtacgtttaagtgaggctataataactagtctccatgaatttggatttttggagcaggaacagatctcagaagctctgaacacagtctacgctatcaggaatgcatctgatcttttctcagccctttctgaaccacaaaaacaagaagttgataaaattttgactcacatacacctaaatgtcttccaggacaaggattcagctttacttctgcaaatttattcttcattttaccgatatatttatgaattattgaatattcagagtagaggctcttcgttgactttccttacacaaatctcaaaacacattttggatatcataaaacaatttaatttccaaaacatcagtaaagcatttgcatttttatttaagacagcagaggttcttgggggaatttctaatgtatcttactgtcagcaattgctttcaatttttaactttttggagcttcaggcccaatccttcatgtctacagagggccaagaactggaagtgatccacactactttgacaggcctcaaacagctgctcataattgatgaagattttcgtatttctttatttcaatatatgagccaattcttcaacagttcagtagaagacctattggataataaatgcttgatttcggacaataaacacatttcttccgtaaattattcaacaagtgaggagtcttcatttgtttttccattggcacaaattttttcaaacctctcagcaaatgtcagtgtgttcaacaagtttatgtccattcactgtaccgtttcatggcttcaaatgtggactgaaatctgggaaaccatatctcaattatttaagtttgacatgaatgttttcacatctcttcatcatggtttcactcagcttttggatgaattggaagatgatgtgaaagtctctaaaagctgccagggtatacttcccacccataatgttgctagactcatattaaatttgtttaaaaatgtaactcaagccaatgacttccataattgggaggacttcctggatctcagggattttttggtagctttaggtaatgcattagtttcagtaaaaaaacttaacttggagcaagtggagaaatcccttttcaccatggaagctgccctgcatcagttgaagacatttccattcaacgaaagtacaagcagagagtttttaaattctctgcttgaagttttcattgagtttagcagtacctcagaatatatagtcagaaatctagattcaataaatgactttctttcaaataatctcacaaattatggagaaaaatttgaaaatatcatcactgagctaagagaagcaatagtatttcttagaaatgtatcacatgatcgagatttgttttcctgtgctgatattttccaaaatgttactgagtgtattttagaagatggctttttatatgtaaatacctcacagaggatgttacgtattctagacacgttaaattccacattttcctctgagaacacaattagcagtctgaaaggatgcattgtatggttagatgtcataaaccatttgtatttgttgtctaactccagtttttcacaaggtcatcttcaaaatattttggggaatttcagagatatagaaaacaaaatgaactctatattaaaaattgtaacttgggtgttaaatataaaaaaacctctttgttcatcaaatggctcacatataaattgtgtcaatatttacttgaaagatgtaactgactttctaaatattgtacttactacagtctttgaaaaagagaagaaacctaaatttgagattttattagctcttttaaatgattccacaaagcaagtaaggatgagtatcaacaacttaacaacagactttgattttgcatctcagtccaattggagatattttactgaattaattctaagaccaatagaaatgtcagatgaaattcctaatcagtttcaaaatatttggcttcatttaataacactggggaaggaatttcagaagcttgtaaaaggtatttactttaacatcctggaaaataattcctcttctaaaactgaaaacttgttaaacatatttgccaccagtccaaaagaaaaggatgtaaacagtgtaggcaattccatttatcacttagctagttaccttgccttcagcttatctcatgacctccaaaattcaccaaaaataataatttcacctgaaataatgaaagctacaggtcttggtattcaactgataagggatgtgttcaactccttaatgcctgtagttcatcacactagtccacaaaatgcaggttatatgcaagctttgaagaaggtaacttctgtcatgcgtacccttaagaaggcagacatagaccttttagtggatcagcttgaacaagttagtgtaaacctaatggatttctttaagaatatcagtagtgtgggaactggcaatttagtggtcaatttgcttgttggcttgatggaaaaatttgcagacagctcacattcttggaatgttaatcatctgctgcagctctcacgcctgtttcctaaagatgttgtggatgctgtgatagatgtgtactatgtgcttcctcatgctgtaaggctcctgcagggagtacctggtaaaaacatcactgaaggcctcaaggatgtctacagcttcacactccttcatggcataaccatttcaaatatcaccaaggaagacttcgcaattgtgataaaaattcttttggatacaattgaattagtatcagataagccagatattatttcagaggctttagcttgttttcctgtggtttggtgctggaatcacacaaattctggatttcggcagaattcaaagatagacccctgcaatgtccatgggctcatgtcttcttccttttatggcaaagtggccagtatacttgatcatttccacctgtctccccaaggtgaagattcaccatgttcaaatgaaagctcccgaatggaaataactaggaaagtggtctgcataattcatgaattagtggactggaattctattcttctggagctctctgaagtcttccatgttaacatttctcttgtgaaaactgtgcagaaattttggcataagatattaccgtttgtcccaccttcaataaatcaaactagggatagcatctctgaactctgtcctagtggttccataaagcaagttgctttgcaaatcatagaaaaacttaaaaatgtcaactttacaaaagttacatcaggtgaaaatattcttgacaaactaagtagtttaaacaagatccttaacattaatgaagacacagagacatctgttcaaaatattatttcctcaaatttggaaaggacagtacaattgatttctgaagactggagcctagaaaaaagtacgcataatctactctctttattcatgatgctccagaatgcaaatgtcacaggtagcagtttagaagcattatcaagttttattgaaaaaagtgaaacaccttacaactttgaagaactatggcccaagtttcaacaaatcatgaaagacctaacccaagattttagaatcagacacctgctttctgaaatgaacaaaggaatcaaaagtataaattcaatggctcttcaaaagataactttgcagtttgcccatttcctggaaatcctggattcaccgtcattgaagacattagaaattattgaagattttctattggtcacaaaaaactggcttcaggaatatgcaaatgaggattactccagaatgatagaaacattattcattcctgtgaccaatgagagttcaactgaagatatagctttgttagccaaagctattgctactttttggggctctttaaaaaatatatctagagcaggcaattttgatgttgcctttcttacccatctgctaaatcaagaacagctgactaatttctcagttgttcagctgctttttgaaaacatcctaattaatttgatcaataacttagctgggaattctcaggaagcagcttggaacttaaatgatactgaccttcaaataatgaatttcattaaccttatcttgaaccatatgcagtcagaaactagtaggaaaacagttctctctctgagaagcatagtagatttcacagaacagtttttgaaaacattcttctccctttttctaaaggaagattctgagaacaaaatatctcttctgctgaaatatttccacaaagatgttattgcagagatgagttttgtcccaaaagataaaattctagaaattctgaaactggatcaatttcttaccctgatgatacaagacagattgatgaacattttttcaagtttaaaggagactatatatcacctaatgaaaagttcatttatattagacaatggagaattttattttgatactcatcaaggactgaagttcatgcaagatttatttaatgcccttctcagggaaacttcaatgaaaaataagactgaaaataatatagactttttcacagtggtgagtcagttgtttttccatgtgaataagtctgaggacctcttcaaactcaatcaagatcttgggtcagctcttcaccttgtaagagaatgttcaacagagatggcaagacttctggatacaattttacactctcctaataaggacttctatgctttgtatcctaccctccaagaagttatacttgctaatctaacggatttgcttttctttataaataattcattccctctaagaaacagagcaacattagaaattactaagagattagttggtgctatttcaagagcaagtgaagaaagtcacgtcctgaaacccctcttagaaatgtctgggactctggtcatgctgttgaatgacagtgctgacctgagagatcttgccacatcaatggactccattgtgaaacttcttaagctggtcaagaaagtttcggggaagatgtccacagtttttaaaactcattttatctccaataccaaggacagtgtgaaattctttgacactctgtattccatcatgcaacaaagtgttcaaaatcttgtgaaagaaatagctactttaaaaaaaatagatcatttcacatttgaaaagataaatgatttgttggtgccatttcttgacttggcctttgaaatgattggggtagaaccttatatatcatcaaactctgatattttcagtatgtcacctagcatactctcatatatgaaccaatctaaggacttttctgatattttggaagaaattgctgaatttttaacatctgtgaaaatgaacttggaagatatgaggagtcttgcggtagcatttaacaatgagactcaaacattttctatggattctgtcaacttacgggaagaaattctgggttgcttagttcctataaataacatcaccaaccaaatggacttcttataccctaatccaatttccactcatagtggccctcaagatataaaatgggaaataattcatgaagtgatcccttttttggataaaatattatcacaaaacagcacagaaataggatctttcttgaaaatggtgatctgtctcaccttagaagctctttggaaaaacttaaagaaagataattggaatgtttctaatgtgttgatgacatttactcagcatccaaataaccttttgaaaaccatagaaacagttttagaggcctccagtggaattaaaagtgactatgaaggtgatttgaataaaagtttatattttgacacacctttgagtcagaatataactcatcatcaacttgaaaaagcaatccataatgttttaagtagaatagctctctggaggaaaggacttctgtttaacaactctgaatggataacttccacaagaactttgtttcagccactttttgagattttcattaaagcaaccaccggaaagaatgtcacatcagaaaaagaagagagaaccaagaaagagatgattgactttccttatagtttcaaaccatttttctgtttggagaaatacctgggaggattatttgtattgactaaatactggcaacaaatcccactaacagatcaaagtgttgttgagatttgtgaagttttccagcagactgtgaagccctcagaagccatggagatgctgcagaaagtgaagatgatggtcgtacgtgtgctcaccatcgttgcagaaaacccttcctggaccaaggacattttgtgtgctactctgagttgcaagcaaaatgggataaggcatctcattttatctgctatacaaggggtcactttggcgcaggaccacttccaggaaattgaaaagatatggtcctcgccgaatcagctaaattgtgaaagtcttagcaagaatctttctagcaccttggagagcttcaagagcagcttggaaaatgccactggccaggactgcacaagccagccgaggctggagacggtgcagcagcacttgtacatgttggccaaaagcctcgaggaaacttggtcatcagggaatcccatcatgacttttctcagcaatttcacagtaactgaggatgtaaaaataaaagatttgatgaagaatatcaccaagttgactgaggagcttcgctcttccatccaaatctcgaatgagactatccatagcattctagaagcaaatatttcccactccaaggttctcttcagtgccctcaccgtagctctgtctggaaagtgtgatcaggaaatccttcatctcctgctgacatttcccaaaggggaaaaatcttggatcgcagcggaggaactctgtagcctgccagggtcaaaagtgtattctctgattgtgttgctgagtcgaaacttggatgtgcgagctttcatttacaagactctgatgccttctgaagcaaatggcttgctcaactccttgctggatatagtttccagcctcagcgccttgcttgccaaagcccagcacgtctttgagtatcttcctgagtttcttcacacatttaaaatcactgccttgctagaaaccctggactttcaacaggtttcacaaaatgtccaggccagaagttcagcttttggttctttccagtttgtgatgaagatggtttgcaaggaccaagcatcattccttagcgattctaatatgtttattaatttgcccagagttaaggaactcttggaagatgacaaagaaaaattcaacattcctgaagattcaacaccgttttgcttgaagctttatcaggaaattctacaattgccaaatggtgctttggtgtggaccttcctaaaacccatattgcatggaaaaatactatacacaccaaacactccagaaattaacaaggtcattcaaaaggctaattacaccttttatattgtggacaaactaaaaactttatcagaaacactgctggaaatgtccagccttttccagagaagtggaagtggccagatgttcaaccagctgcaggaggccctgagaaacaaatttgtaagaaactttgtagaaaaccagttgcacattgatgtagacaaacttactgaaaaactccagacatacggagggctgctggatgagatgtttaaccatgcaggcgctggacgcttccgtttcttgggcagcatcttggtcaatctctcttcctgcgtggcactgaaccgtttccaggctctgcagtctgtcgacatcctggagactaaagcacatgaactcttgcagcagaacagcttcttggccagtatcattttcagcaattccttattcgacaagaacttcagatcagagtctgtcaaactgccaccccatgtctcatacacaatccggaccaatgtgttatacagcgtgcgaacagatgtggtaaaaaacccttcttggaagttccaccctcagaatctaccagctgatgggttcaaatataactacgtctttgccccactgcaagacatgatcgaaagagccatcattttggtgcagactgggcaggaagccctggaaccagcagcacagactcaggcggccccttacccctgccataccagcgacctattcctgaacaacgttggtttcttttttccactgataatgatgctgacgtggatggtgtctgtggccagcatggtcagaaagttggtgtatgagcaggagatacagatagaagagtatatgcggatgatgggagtgcatccagtgatccatttcctggcctggttcctggagaacatggctgtgttgaccataagcagtgctactctggccatcgttctgaaaacaagtggcatctttgcacacagcaatacctttattgttttcctctttctcttggattttgggatgtcagtcgtcatgctgagctacctcttgagtgcatttttcagccaagctaatacagcggccctttgtaccagcctggtgtacatgatcagctttctgccctacatagttctattggttctacataaccaattaagttttgttaatcagacatttctgtgccttctttcgacaaccgcctttggacaaggggtattttttattacattcctggaaggacaagagacagggattcaatggaataatatgtaccaggctctggaacaagggggcatgacatttggctgggtttgctggatgattctttttgattcaagcctttattttttgtgtggatggtacttgagcaacttgattcctgtgaccctgtgagtatgaccccagcatttctcagccccggtgtctgactgggagactctgtagatccagcatcagatcatttcctggcctgcggggctcagcgtcaactgcaggtctccacgctcgagtcaagagctcacaagcaaacatctggtcctctcgaagagttttcattgcataaactctttttatatgcttccaattaaatttgattctgctcgatctgtctaatttcattgacctcttcttttatcactgtcagttttggggggcaatgctgattagtttcctggcctgcataagccagcaggcagttccccttgaggagaaaagctctgtgtaaatggagggcctttgcacatattaatgtgcccaattacatctggtaatgtgagcaggttgtatgtgcttctagagtgtgcacgtaaaacaaatttgaatttataagcaaaagccgattgcagaggcaagccaaagagctgagcggcttccacgccagcttgcatttggcagctctctgctttagttagattagtagattaattagggggttttaaaagtccagacagattatggctgagatggtttaattagcaaagcaacccttaatattcaatttattttttcataactctggaatgtctttcacgtttgtttctacttcccatccctgaagccattaccttagttcaggcctcactgtgcctgatctggacttacagcgagttacagtgcctttgtaactccttcctactcctctaggtatccccgaccccagcacctcacctctgcatcctacctgcatgttgacacaaagttatctttcttaaaaatagaccaaatagaccatgtccctcccctgcatgacagtcttccccaactccaaaatgtctagagaataaataatatcctcagtggctctcaggccacccgaacctgctctgctgcagattcacgcccctctctctattcccgttgtgctgatggggagttggggggcagtcttcaatgtgcccagcacacccacacagggtaggcagataaaatacagggcacccaggtgaattcaaatttcagataaactacaaataatttgggggacatattcatactaaaacattaattgttgtttgtctgaatttcaaaattaattgaacatcctgtgtttgtattttctgaatctagcatccctcccagcatctctgtcttttcattctcattcctttttcttgggttgaagggcctgcttttgttttgcataggtggaaacctatgatgacaatatcatcttgtattcttctctcaatgattttttttttttttggtcatctgtactagaatgaaggtcataagaaggcgcagtctctgcctgattcattggcgtgtccctcgtaccactagagggtgtgactagttgatttctgtttgatgactgacatcttcctggaacaggaaggtataatccggagaacagaagggcaagggatatgatgttccagatctaggtgacttctgccctgctcctttgtcactgtgctgaggcctcacctgtcctactcattcttgggctgacagctggaactgtgagccctgggagatgagccagcatctctcctcatacctctgtacaaaatgcttagttattcatttctcaacaaagcatctcccacagtaaatcagggctgcaggaaggtgtcatttcccaaagactcaagtgagaaaacaaggatacaactaataaagagtaatgtcttagctccattgcaagaaactggtgactcctgacattgttgcagttgt

SEQ ID NO: 201 - DNA, 11444 bp, Homo sapiens
gatataagcaccatccttacaggctggcttcctgactgagagcagggagcagcaggcatggggcatgccgggtgccagttcaaagccctgctgtggaagaattggctctgcagactcaggaacccggtccttttccttgctgaattcttctggccttgtatcctgtttgtaattctgacagttcttcgttttcaagaacctcccagatacagagacatttgttatttgcagccccgagatctacccagctgtggtgttatcccctttgttcaaagccttctttgtaacactggatcaaggtgtaggaacttcagctatgaagggtcaatggagcatcattttcgtttgtctaggttccaaactgcagctgaccccaagaaagtcaacaacctggcctttttaaaagagatacaagacctggcagaggaaattcatggaatgatggacaaggcaaaaaacttaaaaagactttgggtagaacgatccaacactccagattcttcttatggttccagtttttttacaatggatctcaataagaccgaggaggtaatattgaaactggaaagcctccatcagcagcctcatatctgggattttctacttttactgccgagactacacacaagccatgatcatgtggaagatggcatggatgttgcagtgaaccttctccagaccattttgaattccttaatatccctagaagatttagattggcttccactcaaccaaactttttcccaggtttctgaacttgtactgaatgtgaccatttcgacactgacatttctgcagcaacatggagtagcagtcaccgagccagtttaccacctgtccatgcagaatatagtgtgggatccacagaaagtccagtatgatctcaaatcccagtttggctttgatgatcttcacacggaacagatcctgaactcttcagctgaactgaaggagattcccacagacacttccttggagaagatggtgtgttcagtcttgtctagcacatcagaggatgaagctgagaaatggggccacgttggaggctgccaccctaagtggtcagaagccaaaaactatcttgtccatgcagtcagctggctgcgagtctaccaacaggtgtttgttcagtggcaacagggtagcctgcttcagaagacactcacaggcatgggccatagtctggaggctctcaggaatcagtttgaagaagagagcaagccctggaaggtggtggaagctctgcacactgcactgctcctgctgaatgacagcttgtcagcagatggcccaaaagataatcatacatttccaaagatattacagcatctgtggaaattgcaaagcttgctgcaaaacctgccccagtggccggcactgaagagatttcttcagcttgatggagctctcagaaatgcgatagctcagaatttacattttgtccaagaagtcctcatttgcctggagacatcagctaatgattttaaatggtttgaacttaaccaattgaaactggaaaaggatgtgttcttttgggagctgaaacagatgttggcgaagaatgctgtctgcccgaatggtcgtttctctgagaaggaggtctttttgccgcctggaaactccagcatatggggtggtctccagggactgttgtgctattgtaactcctctgagacgagtgttttaaacaagctacttggttcagtagaggatgctgatcgtattttgcaagaggtcattacttggcacaaaaatatgtcagttttaatacctgaagaatatttggactggcaggaacttgagatgcagctgtcagaagcaagcctttcctgtactcggctcttcctgctgctgggagctgatccctctcctgagaatgatgtcttttctagtgactgtaagcaccagcttgtctccacagtgatatttcatacacttgaaaaaacacaatttttcctggaacaagcatattattggaaagccttcaaaaagtttatcaggaagacttgcgaagtggcccaatatgtaaatatgcaagagagtttccagaacagactattggcttttcctgaggaatctccttgttttgaagaaaacatggattggaaaatgatcagtgataattattttcaatttttgaataacttactcaagtctccaacagcttccatatccagggctttaaatttcacaaagcaccttctaatgatggaaaagaagttgcacacccttgaggatgaacaaatgaactttcttttatcatttgtggaattttttgagaaattattgttgcctaatctttttgactcctccattgttcccagtttccacagcctcccatctctcacagaggatattctgaatataagttctctgtggacaaatcatttaaaaagtttaaagagagacccatctgccactgatgctcagaaactcttggaatttggcaacgaagtgatttggaaaatgcagactctcggaagtcactggataaggaaggaaccaaaaaatcttttgagattcatagaattaatactttttgaaattaatcccaaattactagaattatgggcctatggcatttcaaaaggaaaaagagctaaattggaaaacttctttacacttttaaatttttctgttccagaaaatgagattctgagtacaagttttaacttttcccagttgttccattcagattggcctaaatcaccagctatgaacatagattttgtacgtttaagtgaggctataataactagtctccatgaatttggatttttggagcaggaacagatctcagaagctctgaacacagtctacgctatcaggaatgcatctgatcttttctcagccctttctgaaccacaaaaacaagaagttgataaaattttgactcacatacacctaaatgtcttccaggacaaggattcagctttacttctgcaaatttattcttcattttaccgatatatttatgaattattgaatattcagagtagaggctcttcgttgactttccttacacaaatctcaaaacacattttggatatcataaaacaatttaatttccaaaacatcagtaaagcatttgcatttttatttaagacagcagaggttcttgggggaatttctaatgtatcttactgtcagcaattgctttcaatttttaactttttggagcttcaggcccaatccttcatgtctacagagggccaagaactggaagtgatccacactactttgacaggcctcaaacagctgctcataattgatgaagattttcgtatttctttatttcaatatatgagccaattcttcaacagttcagtagaagacctattggataataaatgcttgatttcggacaataaacacatttcttccgtaaattattcaacaagtgaggagtcttcatttgtttttccattggcacaaattttttcaaacctctcagcaaatgtcagtgtgttcaacaagtttatgtccattcactgtaccgtttcatggcttcaaatgtggactgaaatctgggaaaccatatctcaattatttaagtttgacatgaatgttttcacatctcttcatcatggtttcactcagcttttggatgaattggaagatgatgtgaaagtctctaaaagctgccagggtatacttcccacccataatgttgctagactcatattaaatttgtttaaaaatgtaactcaagccaatgacttccataattgggaggacttcctggatctcagggattttttggtagctttaggtaatgcattagtttcagtaaaaaaacttaacttggagcaagtggagaaatcccttttcaccatggaagctgccctgcatcagttgaagacatttccattcaacgaaagtacaagcagagagtttttaaattctctgcttgaagttttcattgagtttagcagtacctcagaatatatagtcagaaatctagattcaataaatgactttctttcaaataatctcacaaattatggagaaaaatttgaaaatatcatcactgagctaagagaagcaatagtatttcttagaaatgtatcacatgatcgagatttgttttcctgtgctgatattttccaaaatgttactgagtgtattttagaagatggctttttatatgtaaatacctcacagaggatgttacgtattctagacacgttaaattccacattttcctctgagaacacaattagcagtctgaaaggatgcattgtatggttagatgtcataaaccatttgtatttgttgtctaactccagtttttcacaaggtcatcttcaaaatattttggggaatttcagagatatagaaaacaaaatgaactctatattaaaaattgtaacttgggtgttaaatataaaaaaacctctttgttcatcaaatggctcacatataaattgtgtcaatatttacttgaaagatgtaactgactttctaaatattgtacttactacagtctttgaaaaagagaagaaacctaaatttgagattttattagctcttttaaatgattccacaaagcaagtaaggatgagtatcaacaacttaacaacagactttgattttgcatctcagtccaattggagatattttactgaattaattctaagaccaatagaaatgtcagatgaaattcctaatcagtttcaaaatatttggcttcatttaataacactggggaaggaatttcagaagcttgtaaaaggtatttactttaacatcctggaaaataattcctcttctaaaactgaaaacttgttaaacatatttgccaccagtccaaaagaaaaggatgtaaacagtgtaggcaattccatttatcacttagctagttaccttgccttcagcttatctcatgacctccaaaattcaccaaaaataataatttcacctgaaataatgaaagctacaggtcttggtattcaactgataagggatgtgttcaactccttaatgcctgtagttcatcacactagtccacaaaatgcaggttatatgcaagctttgaagaaggtaacttctgtcatgcgtacccttaagaaggcagacatagaccttttagtggatcagcttgaacaagttagtgtaaacctaatggatttctttaagaatatcagtagtgtgggaactggcaatttagtggtcaatttgcttgttggcttgatggaaaaatttgcagacagctcacattcttggaatgttaatcatctgctgcagctctcacgcctgtttcctaaagatgttgtggatgctgtgatagatgtgtactatgtgcttcctcatgctgtaaggctcctgcagggagtacctggtaaaaacatcactgaaggcctcaaggatgtctacagcttcacactccttcatggcataaccatttcaaatatcaccaaggaagacttcgcaattgtgataaaaattcttttggatacaattgaattagtatcagataagccagatattatttcagaggctttagcttgttttcctgtggtttggtgctggaatcacacaaattctggatttcggcagaattcaaagatagacccctgcaatgtccatgggctcatgtcttcttccttttatggcaaagtggccagtatacttgatcatttccacctgtctccccaaggtgaagattcaccatgttcaaatgaaagctcccgaatggaaataactaggaaagtggtctgcataattcatgaattagtggactggaattctattcttctggagctctctgaagtcttccatgttaacatttctcttgtgaaaactgtgcagaaattttggcataagatattaccgtttgtcccaccttcaataaatcaaactagggatagcatctctgaactctgtcctagtggttccataaagcaagttgctttgcaaatcatagaaaaacttaaaaatgtcaactttacaaaagttacatcaggtgaaaatattcttgacaaactaagtagtttaaacaagatccttaacattaatgaagacacagagacatctgttcaaaatattatttcctcaaatttggaaaggacagtacaattgatttctgaagactggagcctagaaaaaagtacgcataatctactctctttattcatgatgctccagaatgcaaatgtcacaggtagcagtttagaagcattatcaagttttattgaaaaaagtgaaacaccttacaactttgaagaactatggcccaagtttcaacaaatcatgaaagacctaacccaagattttagaatcagacacctgctttctgaaatgaacaaaggaatcaaaagtataaattcaatggctcttcaaaagataactttgcagtttgcccatttcctggaaatcctggattcaccgtcattgaagacattagaaattattgaagattttctattggtcacaaaaaactggcttcaggaatatgcaaatgaggattactccagaatgatagaaacattattcattcctgtgaccaatgagagttcaactgaagatatagctttgttagccaaagctattgctactttttggggctctttaaaaaatatatctagagcaggcaattttgatgttgcctttcttacccatctgctaaatcaagaacagctgactaatttctcagttgttcagctgctttttgaaaacatcctaattaatttgatcaataacttagctgggaattctcaggaagcagcttggaacttaaatgatactgaccttcaaataatgaatttcattaaccttatcttgaaccatatgcagtcagaaactagtaggaaaacagttctctctctgagaagcatagtagatttcacagaacagtttttgaaaacattcttctccctttttctaaaggaagattctgagaacaaaatatctcttctgctgaaatatttccacaaagatgttattgcagagatgagttttgtcccaaaagataaaattctagaaattctgaaactggatcaatttcttaccctgatgatacaagacagattgatgaacattttttcaagtttaaaggagactatatatcacctaatgaaaagttcatttatattagacaatggagaattttattttgatactcatcaaggactgaagttcatgcaagatttatttaatgcccttctcagggaaacttcaatgaaaaataagactgaaaataatatagactttttcacagtggtgagtcagttgtttttccatgtgaataagtctgaggacctcttcaaactcaatcaagatcttgggtcagctcttcaccttgtaagagaatgttcaacagagatggcaagacttctggatacaattttacactctcctaataaggacttctatgctttgtatcctaccctccaagaagttatacttgctaatctaacggatttgcttttctttataaataattcattccctctaagaaacagagcaacattagaaattactaagagattagttggtgctatttcaagagcaagtgaagaaagtcacgtcctgaaacccctcttagaaatgtctgggactctggtcatgctgttgaatgacagtgctgacctgagagatcttgccacatcaatggactccattgtgaaacttcttaagctggtcaagaaagtttcggggaagatgtccacagtttttaaaactcattttatctccaataccaaggacagtgtgaaattctttgacactctgtattccatcatgcaacaaagtgttcaaaatcttgtgaaagaaatagctactttaaaaaaaatagatcatttcacatttgaaaagataaatgatttgttggtgccatttcttgacttggcctttgaaatgattggggtagaaccttatatatcatcaaactctgatattttcagtatgtcacctagcatactctcatatatgaaccaatctaaggacttttctgatattttggaagaaattgctgaatttttaacatctgtgaaaatgaacttggaagatatgaggagtcttgcggtagcatttaacaatgagactcaaacattttctatggattctgtcaacttacgggaagaaattctgggttgcttagttcctataaataacatcaccaaccaaatggacttcttataccctaatccaatttccactcatagtggccctcaagatataaaatgggaaataattcatgaagtgatcccttttttggataaaatattatcacaaaacagcacagaaataggatctttcttgaaaatggtgatctgtctcaccttagaagctctttggaaaaacttaaagaaagataattggaatgtttctaatgtgttgatgacatttactcagcatccaaataaccttttgaaaaccatagaaacagttttagaggcctccagtggaattaaaagtgactatgaaggtgatttgaataaaagtttatattttgacacacctttgagtcagaatataactcatcatcaacttgaaaaagcaatccataatgttttaagtagaatagctctctggaggaaaggacttctgtttaacaactctgaatggataacttccacaagaactttgtttcagccactttttgagattttcattaaagcaaccaccggaaagaatgtcacatcagaaaaagaagagagaaccaagaaagagatgattgactttccttatagtttcaaaccatttttctgtttggagaaatacctgggaggattatttgtattgactaaatactggcaacaaatcccactaacagatcaaagtgttgttgagatttgtgaagttttccagcagactgtgaagccctcagaagccatggagatgctgcagaaagtgaagatgatggtcgtacgtgtgctcaccatcgttgcagaaaacccttcctggaccaaggacattttgtgtgctactctgagttgcaagcaaaatgggataaggcatctcattttatctgctatacaaggggtcactttggcgcaggaccacttccaggaaattgaaaagatatggtcctcgccgaatcagctaaattgtgaaagtcttagcaagaatctttctagcaccttggagagcttcaagagcagcttggaaaatgccactggccaggactgcacaagccagccgaggctggagacggtgcagcagcacttgtacatgttggccaaaagcctcgaggaaacttggtcatcagggaatcccatcatgacttttctcagcaatttcacagtaactgaggatgtaaaaataaaagatttgatgaagaatatcaccaagttgactgaggagcttcgctcttccatccaaatctcgaatgagactatccatagcattctagaagcaaatatttcccactccaaggttctcttcagtgccctcaccgtagctctgtctggaaagtgtgatcaggaaatccttcatctcctgctgacatttcccaaaggggaaaaatcttggatcgcagcggaggaactctgtagcctgccagggtcaaaagtgtattctctgattgtgttgctgagtcgaaacttggatgtgcgagctttcatttacaagactctgatgccttctgaagcaaatggcttgctcaactccttgctggatatagtttccagcctcagcgccttgcttgccaaagcccagcacgtctttgagtatcttcctgagtttcttcacacatttaaaatcactgccttgctagaaaccctggactttcaacaggtttcacaaaatgtccaggccagaagttcagcttttggttctttccagtttgtgatgaagatggtttgcaaggaccaagcatcattccttagcgattctaatatgtttattaatttgcccagagttaaggaactcttggaagatgacaaagaaaaattcaacattcctgaagattcaacaccgttttgcttgaagctttatcaggaaattctacaattgccaaatggtgctttggtgtggaccttcctaaaacccatattgcatggaaaaatactatacacaccaaacactccagaaattaacaaggtcattcaaaaggctaattacaccttttatattgtggacaaactaaaaactttatcagaaacactgctggaaatgtccagccttttccagagaagtggaagtggccagatgttcaaccagctgcaggaggccctgagaaacaaatttgtaagaaactttgtagaaaaccagttgcacattgatgtagacaaacttactgaaaaactccagacatacggagggctgctggatgagatgtttaaccatgcaggcgctggacgcttccgtttcttgggcagcatcttggtcaatctctcttcctgcgtggcactgaaccgtttccaggctctgcagtctgtcgacatcctggagactaaagcacatgaactcttgcagcagaacagcttcttggccagtatcattttcagcaattccttattcgacaagaacttcagatcagagtctgtcaaactgccaccccatgtctcatacacaatccggaccaatgtgttatacagcgtgcgaacagatgtggtaaaaaacccttcttggaagttccaccctcagaatctaccagctgatgggttcaaatataactacgtctttgccccactgcaagacatgatcgaaagagccatcattttggtgcagactgggcaggaagccctggaaccagcagcacagactcaggcggccccttacccctgccataccagcgacctattcctgaacaacgttggtttcttttttccactgataatgatgctgacgtggatggtgtctgtggccagcatggtcagaaagttggtgtatgagcaggagatacagatagaagagtatatgcggatgatgggagtgcatccagtgatccatttcctggcctggttcctggagaacatggctgtgttgaccataagcagtgctactctggccatcgttctgaaaacaagtggcatctttgcacacagcaatacctttattgttttcctctttctcttggattttgggatgtcagtcgtcatgctgagctacctcttgagtgcatttttcagccaagctaatacagcggccctttgtaccagcctggtgtacatgatcagctttctgccctacatagttctattggttctacataaccaattaagttttgttaatcagacatttctgagtgggctgacattccgctaagattttcagatcaaaatatttaaatgactgcctgaagcgatggttgggcgtcatcagaatgaaaagttgtcatggcttcgctccttgaattaagtgttgtggattttctgtggtcccaatcaaaacactaacgtgcagtttttctccatcaatctgtgggcagtgccttctttcgacaaccgcctttggacaaggggtattttttattacattcctggaaggacaagagacag

SEQ ID NO: 202 - DNA, 11423 bp, Homo sapiens
agatataagcaccatccttacaggctggcttcctgactgagagcagggagcagcaggcatggggcatgccgggtgccagttcaaagccctgctgtggaagaattggctctgcagactcaggaacccggtccttttccttgctgaattcttctggccttgtatcctgtttgtaattctgacagttcttcgttttcaagaacctcccagatacagagacatttgttatttgcagccccgagatctacccagctgtggtgttatcccctttgttcaaagccttctttgtaacactggatcaaggtgtaggaacttcagctatgaagggtcaatggagcatcattttcgtttgtctaggttccaaactgcagctgaccccaagaaagtcaacaacctggcctttttaaaagagatacaagacctggcagaggaaattcatggaatgatggacaaggcaaaaaacttaaaaagactttgggtagaacgatccaacactccagattcttcttatggttccagtttttttacaatggatctcaataagaccgaggaggtaatattgaaactggaaagcctccatcagcagcctcatatctgggattttctacttttactgccgagactacacacaagccatgatcatgtggaagatggcatggatgttgcagtgaaccttctccagaccattttgaattccttaatatccctagaagatttagattggcttccactcaaccaaactttttcccaggtttctgaacttgtactgaatgtgaccatttcgacactgacatttctgcagcaacatggagtagcagtcaccgagccagtttaccacctgtccatgcagaatatagtgtgggatccacagaaagtccagtatgatctcaaatcccagtttggctttgatgatcttcacacggaacagatcctgaactcttcagctgaactgaaggagattcccacagacacttccttggagaagatggtgtgttcagtcttgtctagcacatcagaggatgaagctgagaaatggggccacgttggaggctgccaccctaagtggtcagaagccaaaaactatcttgtccatgcagtcagctggctgcgagtctaccaacaggtgtttgttcagtggcaacagggtagcctgcttcagaagacactcacaggcatgggccatagtctggaggctctcaggaatcagtttgaagaagagagcaagccctggaaggtggtggaagctctgcacactgcactgctcctgctgaatgacagcttgtcagcagatggcccaaaagataatcatacatttccaaagatattacagcatctgtggaaattgcaaagcttgctgcaaaacctgccccagtggccggcactgaagagatttcttcagcttgatggagctctcagaaatgcgatagctcagaatttacattttgtccaagaagtcctcatttgcctggagacatcagctaatgattttaaatggtttgaacttaaccaattgaaactggaaaaggatgtgttcttttgggagctgaaacagatgttggcgaagaatgctgtctgcccgaatggtcgtttctctgagaaggaggtctttttgccgcctggaaactccagcatatggggtggtctccagggactgttgtgctattgtaactcctctgagacgagtgttttaaacaagctacttggttcagtagaggatgctgatcgtattttgcaagaggtcattacttggcacaaaaatatgtcagttttaatacctgaagaatatttggactggcaggaacttgagatgcagctgtcagaagcaagcctttcctgtactcggctcttcctgctgctgggagctgatccctctcctgagaatgatgtcttttctagtgactgtaagcaccagcttgtctccacagtgatatttcatacacttgaaaaaacacaatttttcctggaacaagcatattattggaaagccttcaaaaagtttatcaggaagacttgcgaagtggcccaatatgtaaatatgcaagagagtttccagaacagactattggcttttcctgaggaatctccttgttttgaagaaaacatggattggaaaatgatcagtgataattattttcaatttttgaataacttactcaagtctccaacagcttccatatccagggctttaaatttcacaaagcaccttctaatgatggaaaagaagttgcacacccttgaggatgaacaaatgaactttcttttatcatttgtggaattttttgagaaattattgttgcctaatctttttgactcctccattgttcccagtttccacagcctcccatctctcacagaggatattctgaatataagttctctgtggacaaatcatttaaaaagtttaaagagagacccatctgccactgatgctcagaaactcttggaatttggcaacgaagtgatttggaaaatgcagactctcggaagtcactggataaggaaggaaccaaaaaatcttttgagattcatagaattaatactttttgaaattaatcccaaattactagaattatgggcctatggcatttcaaaaggaaaaagagctaaattggaaaacttctttacacttttaaatttttctgttccagaaaatgagattctgagtacaagttttaacttttcccagttgttccattcagattggcctaaatcaccagctatgaacatagattttgtacgtttaagtgaggctataataactagtctccatgaatttggatttttggagcaggaacagatctcagaagctctgaacacagtctacgctatcaggaatgcatctgatcttttctcagccctttctgaaccacaaaaacaagaagttgataaaattttgactcacatacacctaaatgtcttccaggacaaggattcagctttacttctgcaaatttattcttcattttaccgatatatttatgaattattgaatattcagagtagaggctcttcgttgactttccttacacaaatctcaaaacacattttggatatcataaaacaatttaatttccaaaacatcagtaaagcatttgcatttttatttaagacagcagaggttcttgggggaatttctaatgtatcttactgtcagcaattgctttcaatttttaactttttggagcttcaggcccaatccttcatgtctacagagggccaagaactggaagtgatccacactactttgacaggcctcaaacagctgctcataattgatgaagattttcgtatttctttatttcaatatatgagccaattcttcaacagttcagtagaagacctattggataataaatgcttgatttcggacaataaacacatttcttccgtaaattattcaacaagtgaggagtcttcatttgtttttccattggcacaaattttttcaaacctctcagcaaatgtcagtgtgttcaacaagtttatgtccattcactgtaccgtttcatggcttcaaatgtggactgaaatctgggaaaccatatctcaattatttaagtttgacatgaatgttttcacatctcttcatcatggtttcactcagcttttggatgaattggaagatgatgtgaaagtctctaaaagctgccagggtatacttcccacccataatgttgctagactcatattaaatttgtttaaaaatgtaactcaagccaatgacttccataattgggaggacttcctggatctcagggattttttggtagctttaggtaatgcattagtttcagtaaaaaaacttaacttggagcaagtggagaaatcccttttcaccatggaagctgccctgcatcagttgaagacatttccattcaacgaaagtacaagcagagagtttttaaattctctgcttgaagttttcattgagtttagcagtacctcagaatatatagtcagaaatctagattcaataaatgactttctttcaaataatctcacaaattatggagaaaaatttgaaaatatcatcactgagctaagagaagcaatagtatttcttagaaatgtatcacatgatcgagatttgttttcctgtgctgatattttccaaaatgttactgagtgtattttagaagatggctttttatatgtaaatacctcacagaggatgttacgtattctagacacgttaaattccacattttcctctgagaacacaattagcagtctgaaaggatgcattgtatggttagatgtcataaaccatttgtatttgttgtctaactccagtttttcacaaggtcatcttcaaaatattttggggaatttcagagatatagaaaacaaaatgaactctatattaaaaattgtaacttgggtgttaaatataaaaaaacctctttgttcatcaaatggctcacatataaattgtgtcaatatttacttgaaagatgtaactgactttctaaatattgtacttactacagtctttgaaaaagagaagaaacctaaatttgagattttattagctcttttaaatgattccacaaagcaagtaaggatgagtatcaacaacttaacaacagactttgattttgcatctcagtccaattggagatattttactgaattaattctaagaccaatagaaatgtcagatgaaattcctaatcagtttcaaaatatttggcttcatttaataacactggggaaggaatttcagaagcttgtaaaaggtatttactttaacatcctggaaaataattcctcttctaaaactgaaaacttgttaaacatatttgccaccagtccaaaagaaaaggatgtaaacagtgtaggcaattccatttatcacttagctagttaccttgccttcagcttatctcatgacctccaaaattcaccaaaaataataatttcacctgaaataatgaaagctacaggtcttggtattcaactgataagggatgtgttcaactccttaatgcctgtagttcatcacactagtccacaaaatgcaggttatatgcaagctttgaagaaggtaacttctgtcatgcgtacccttaagaaggcagacatagaccttttagtggatcagcttgaacaagttagtgtaaacctaatggatttctttaagaatatcagtagtgtgggaactggcaatttagtggtcaatttgcttgttggcttgatggaaaaatttgcagacagctcacattcttggaatgttaatcatctgctgcagctctcacgcctgtttcctaaagatgttgtggatgctgtgatagatgtgtactatgtgcttcctcatgctgtaaggctcctgcagggagtacctggtaaaaacatcactgaaggcctcaaggatgtctacagcttcacactccttcatggcataaccatttcaaatatcaccaaggaagacttcgcaattgtgataaaaattcttttggatacaattgaattagtatcagataagccagatattatttcagaggctttagcttgttttcctgtggtttggtgctggaatcacacaaattctggatttcggcagaattcaaagatagacccctgcaatgtccatgggctcatgtcttcttccttttatggcaaagtggccagtatacttgatcatttccacctgtctccccaaggtgaagattcaccatgttcaaatgaaagctcccgaatggaaataactaggaaagtggtctgcataattcatgaattagtggactggaattctattcttctggagctctctgaagtcttccatgttaacatttctcttgtgaaaactgtgcagaaattttggcataagatattaccgtttgtcccaccttcaataaatcaaactagggatagcatctctgaactctgtcctagtggttccataaagcaagttgctttgcaaatcatagaaaaacttaaaaatgtcaactttacaaaagttacatcaggtgaaaatattcttgacaaactaagtagtttaaacaagatccttaacattaatgaagacacagagacatctgttcaaaatattatttcctcaaatttggaaaggacagtacaattgatttctgaagactggagcctagaaaaaagtacgcataatctactctctttattcatgatgctccagaatgcaaatgtcacaggtagcagtttagaagcattatcaagttttattgaaaaaagtgaaacaccttacaactttgaagaactatggcccaagtttcaacaaatcatgaaagacctaacccaagattttagaatcagacacctgctttctgaaatgaacaaaggaatcaaaagtataaattcaatggctcttcaaaagataactttgcagtttgcccatttcctggaaatcctggattcaccgtcattgaagacattagaaattattgaagattttctattggtcacaaaaaactggcttcaggaatatgcaaatgaggattactccagaatgatagaaacattattcattcctgtgaccaatgagagttcaactgaagatatagctttgttagccaaagctattgctactttttggggctctttaaaaaatatatctagagcaggcaattttgatgttgcctttcttacccatctgctaaatcaagaacagctgactaatttctcagttgttcagctgctttttgaaaacatcctaattaatttgatcaataacttagctgggaattctcaggaagcagcttggaacttaaatgatactgaccttcaaataatgaatttcattaaccttatcttgaaccatatgcagtcagaaactagtaggaaaacagttctctctctgagaagcatagtagatttcacagaacagtttttgaaaacattcttctccctttttctaaaggaagattctgagaacaaaatatctcttctgctgaaatatttccacaaagatgttattgcagagatgagttttgtcccaaaagataaaattctagaaattctgaaactggatcaatttcttaccctgatgatacaagacagattgatgaacattttttcaagtttaaaggagactatatatcacctaatgaaaagttcatttatattagacaatggagaattttattttgatactcatcaaggactgaagttcatgcaagatttatttaatgcccttctcagggaaacttcaatgaaaaataagactgaaaataatatagactttttcacagtggtgagtcagttgtttttccatgtgaataagtctgaggacctcttcaaactcaatcaagatcttgggtcagctcttcaccttgtaagagaatgttcaacagagatggcaagacttctggatacaattttacactctcctaataaggacttctatgctttgtatcctaccctccaagaagttatacttgctaatctaacggatttgcttttctttataaataattcattccctctaagaaacagagcaacattagaaattactaagagattagttggtgctatttcaagagcaagtgaagaaagtcacgtcctgaaacccctcttagaaatgtctgggactctggtcatgctgttgaatgacagtgctgacctgagagatcttgccacatcaatggactccattgtgaaacttcttaagctggtcaagaaagtttcggggaagatgtccacagtttttaaaactcattttatctccaataccaaggacagtgtgaaattctttgacactctgtattccatcatgcaacaaagtgttcaaaatcttgtgaaagaaatagctactttaaaaaaaatagatcatttcacatttgaaaagataaatgatttgttggtgccatttcttgacttggcctttgaaatgattggggtagaaccttatatatcatcaaactctgatattttcagtatgtcacctagcatactctcatatatgaaccaatctaaggacttttctgatattttggaagaaattgctgaatttttaacatctgtgaaaatgaacttggaagatatgaggagtcttgcggtagcatttaacaatgagactcaaacattttctatggattctgtcaacttacgggaagaaattctgggttgcttagttcctataaataacatcaccaaccaaatggacttcttataccctaatccaatttccactcatagtggccctcaagatataaaatgggaaataattcatgaagtgatcccttttttggataaaatattatcacaaaacagcacagaaataggatctttcttgaaaatggtgatctgtctcaccttagaagctctttggaaaaacttaaagaaagataattggaatgtttctaatgtgttgatgacatttactcagcatccaaataaccttttgaaaaccatagaaacagttttagaggcctccagtggaattaaaagtgactatgaaggtgatttgaataaaagtttatattttgacacacctttgagtcagaatataactcatcatcaacttgaaaaagcaatccataatgttttaagtagaatagctctctggaggaaaggacttctgtttaacaactctgaatggataacttccacaagaactttgtttcagccactttttgagattttcattaaagcaaccaccggaaagaatgtcacatcagaaaaagaagagagaaccaagaaagagatgattgactttccttatagtttcaaaccatttttctgtttggagaaatacctgggaggattatttgtattgactaaatactggcaacaaatcccactaacagatcaaagtgttgttgagatttgtgaagttttccagcagactgtgaagccctcagaagccatggagatgctgcagaaagtgaagatgatggtcgtacgtgtgctcaccatcgttgcagaaaacccttcctggaccaaggacattttgtgtgctactctgagttgcaagcaaaatgggataaggcatctcattttatctgctatacaaggggtcactttggcgcaggaccacttccaggaaattgaaaagatatggtcctcgccgaatcagctaaattgtgaaagtcttagcaagaatctttctagcaccttggagagcttcaagagcagcttggaaaatgccactggccaggactgcacaagccagccgaggctggagacggtgcagcagcacttgtacatgttggccaaaagcctcgaggaaacttggtcatcagggaatcccatcatgacttttctcagcaatttcacagtaactgaggatgtaaaaataaaagatttgatgaagaatatcaccaagttgactgaggagcttcgctcttccatccaaatctcgaatgagactatccatagcattctagaagcaaatatttcccactccaaggttctcttcagtgccctcaccgtagctctgtctggaaagtgtgatcaggaaatccttcatctcctgctgacatttcccaaaggggaaaaatcttggatcgcagcggaggaactctgtagcctgccagggtcaaaagtgtattctctgattgtgttgctgagtcgaaacttggatgtgcgagctttcatttacaagactctgatgccttctgaagcaaatggcttgctcaactccttgctggatatagtttccagcctcagcgccttgcttgccaaagcccagcacgtctttgagtatcttcctgagtttcttcacacatttaaaatcactgccttgctagaaaccctggactttcaacaggtttcacaaaatgtccaggccagaagttcagcttttggttctttccagtttgtgatgaagatggtttgcaaggaccaagcatcattccttagcgattctaatatgtttattaatttgcccagagttaaggaactcttggaagatgacaaagaaaaattcaacattcctgaagattcaacaccgttttgcttgaagctttatcaggaaattctacaattgccaaatggtgctttggtgtggaccttcctaaaacccatattgcatggaaaaatactatacacaccaaacactccagaaattaacaaggtcattcaaaaggctaattacaccttttatattgtggacaaactaaaaactttatcagaaacactgctggaaatgtccagccttttccagagaagtggaagtggccagatgttcaaccagctgcaggaggccctgagaaacaaatttgtaagaaactttgtagaaaaccagttgcacattgatgtagacaaacttactgaaaaactccagacatacggtgttttaacaaacatttgctggacacacgaggagagccagttccatgaaataatccatagaggggcataaaatattcctgttccaccatgcagtgcagagaagaagatgaccatgcttagaaactgcaacactgtggcaaaatcagcgatcagggccctgccagagaagctctcaggagcctaacccagttggtggggacctggagtcagagggaggatgggtgtcaggctgttccaggtccctggctccctcacactctgcttgtacatgggaaagggtttcggatctgccttacatatgaaagttagaggaaggcaagacattttattcggcataatatagtacttccctttaaaaaaatttctggtgaatgcaatacttaatattttacttcagaaaggttaatcatattttaaaatgtttcatattttaaatgcattacataattttttcaattaattaaaacacctttaaaagaagaagtagcactggaaagtttataataatagtgtccccatcttctgttgctggaaccaaggactgacatgggtctgagagatttcctgtgtggaacgcagatgtctcctgagtttgcgtctaccatggtgctagtgttaatgcagatgtcttagagtgtgaatcgtacctgagccacatttgttcaacatgttgctgcttagccaacagtacatttgaataggttttcccacatgtaaacttctattgtaaaattaagagaaagttccccagaaatttagaacttttcctacaagtgtgttgggacacagaatatgagattcacatggaattttgagatccatgaggtgtgatcctctcttctttctgcttccgcctgacgctagagattgaagaccatatcatccaggtgaatgttggttattttccatccgaccctgtacagccctctgggagcaggcacagagtggggtcaggcattcacgggtggggtggcggtgggggattgatcactgaccagatgcaaatctccttttgtaactatgctaacaaatgaactcaccttactgcatgcacccttttaaaatttatacctaggtcatactcacttttcttcatcctataaacagtacctggaaactgaggtgactatttgaagatatactgatgcaacttttgggaa

SEQ ID NO: 203 - DNA, 14051 bp, Homo sapiens
cagatataagcaccatccttacaggctggcttcctgactgagagcagggagcagcaggcatggggcatgccgggtgccagttcaaagccctgctgtggaagaattggctctgcagactcaggaacccggtccttttccttgctgaattcttctggccttgtatcctgtttgtaattctgacagttcttcgttttcaagaacctcccagatacagagacatttgttatttgcagccccgagatctacccagctgtggtgttatcccctttgttcaaagccttctttgtaacactggatcaaggtgtaggaacttcagctatgaagggtcaatggagcatcattttcgtttgtctaggttccaaactgcagctgaccccaagaaagtcaacaacctggcctttttaaaagagatacaagacctggcagaggaaattcatggaatgatggacaaggcaaaaaacttaaaaagactttgggtagaacgatccaacactccagattcttcttatggttccagtttttttacaatggatctcaataagaccgaggaggtaatattgaaactggaaagcctccatcagcagcctcatatctgggattttctacttttactgccgagactacacacaagccatgatcatgtggaagatggcatggatgttgcagtgaaccttctccagaccattttgaattccttaatatccctagaagatttagattggcttccactcaaccaaactttttcccaggtttctgaacttgtactgaatgtgaccatttcgacactgacatttctgcagcaacatggagtagcagtcaccgagccagtttaccacctgtccatgcagaatatagtgtgggatccacagaaagtccagtatgatctcaaatcccagtttggctttgatgatcttcacacggaacagatcctgaactcttcagctgaactgaaggagattcccacagacacttccttggagaagatggtgtgttcagtcttgtctagcacatcagaggatgaagctgagaaatggggccacgttggaggctgccaccctaagtggtcagaagccaaaaactatcttgtccatgcagtcagctggctgcgagtctaccaacaggtgtttgttcagtggcaacagggtagcctgcttcagaagacactcacaggcatgggccatagtctggaggctctcaggaatcagtttgaagaagagagcaagccctggaaggtggtggaagctctgcacactgcactgctcctgctgaatgacagcttgtcagcagatggcccaaaagataatcatacatttccaaagatattacagcatctgtggaaattgcaaagcttgctgcaaaacctgccccagtggccggcactgaagagatttcttcagcttgatggagctctcagaaatgcgatagctcagaatttacattttgtccaagaagtcctcatttgcctggagacatcagctaatgattttaaatggtttgaacttaaccaattgaaactggaaaaggatgtgttcttttgggagctgaaacagatgttggcgaagaatgctgtctgcccgaatggtcgtttctctgagaaggaggtctttttgccgcctggaaactccagcatatggggtggtctccagggactgttgtgctattgtaactcctctgagacgagtgttttaaacaagctacttggttcagtagaggatgctgatcgtattttgcaagaggtcattacttggcacaaaaatatgtcagttttaatacctgaagaatatttggactggcaggaacttgagatgcagctgtcagaagcaagcctttcctgtactcggctcttcctgctgctgggagctgatccctctcctgagaatgatgtcttttctagtgactgtaagcaccagcttgtctccacagtgatatttcatacacttgaaaaaacacaatttttcctggaacaagcatattattggaaagccttcaaaaagtttatcaggaagacttgcgaagtggcccaatatgtaaatatgcaagagagtttccagaacagactattggcttttcctgaggaatctccttgttttgaagaaaacatggattggaaaatgatcagtgataattattttcaatttttgaataacttactcaagtctccaacagcttccatatccagggctttaaatttcacaaagcaccttctaatgatggaaaagaagttgcacacccttgaggatgaacaaatgaactttcttttatcatttgtggaattttttgagaaattattgttgcctaatctttttgactcctccattgttcccagtttccacagcctcccatctctcacagaggatattctgaatataagttctctgtggacaaatcatttaaaaagtttaaagagagacccatctgccactgatgctcagaaactcttggaatttggcaacgaagtgatttggaaaatgcagactctcggaagtcactggataaggaaggaaccaaaaaatcttttgagattcatagaattaatactttttgaaattaatcccaaattactagaattatgggcctatggcatttcaaaaggaaaaagagctaaattggaaaacttctttacacttttaaatttttctgttccagaaaatgagattctgagtacaagttttaacttttcccagttgttccattcagattggcctaaatcaccagctatgaacatagattttgtacgtttaagtgaggctataataactagtctccatgaatttggatttttggagcaggaacagatctcagaagctctgaacacagtctacgctatcaggaatgcatctgatcttttctcagccctttctgaaccacaaaaacaagaagttgataaaattttgactcacatacacctaaatgtcttccaggacaaggattcagctttacttctgcaaatttattcttcattttaccgatatatttatgaattattgaatattcagagtagaggctcttcgttgactttccttacacaaatctcaaaacacattttggatatcataaaacaatttaatttccaaaacatcagtaaagcatttgcatttttatttaagacagcagaggttcttgggggaatttctaatgtatcttactgtcagcaattgctttcaatttttaactttttggagcttcaggcccaatccttcatgtctacagagggccaagaactggaagtgatccacactactttgacaggcctcaaacagctgctcataattgatgaagattttcgtatttctttatttcaatatatgagccaattcttcaacagttcagtagaagacctattggataataaatgcttgatttcggacaataaacacatttcttccgtaaattattcaacaagtgaggagtcttcatttgtttttccattggcacaaattttttcaaacctctcagcaaatgtcagtgtgttcaacaagtttatgtccattcactgtaccgtttcatggcttcaaatgtggactgaaatctgggaaaccatatctcaattatttaagtttgacatgaatgttttcacatctcttcatcatggtttcactcagcttttggatgaattggaagatgatgtgaaagtctctaaaagctgccagggtatacttcccacccataatgttgctagactcatattaaatttgtttaaaaatgtaactcaagccaatgacttccataattgggaggacttcctggatctcagggattttttggtagctttaggtaatgcattagtttcagtaaaaaaacttaacttggagcaagtggagaaatcccttttcaccatggaagctgccctgcatcagttgaagacatttccattcaacgaaagtacaagcagagagtttttaaattctctgcttgaagttttcattgagtttagcagtacctcagaatatatagtcagaaatctagattcaataaatgactttctttcaaataatctcacaaattatggagaaaaatttgaaaatatcatcactgagctaagagaagcaatagtatttcttagaaatgtatcacatgatcgagatttgttttcctgtgctgatattttccaaaatgttactgagtgtattttagaagatggctttttatatgtaaatacctcacagaggatgttacgtattctagacacgttaaattccacattttcctctgagaacacaattagcagtctgaaaggatgcattgtatggttagatgtcataaaccatttgtatttgttgtctaactccagtttttcacaaggtcatcttcaaaatattttggggaatttcagagatatagaaaacaaaatgaactctatattaaaaattgtaacttgggtgttaaatataaaaaaacctctttgttcatcaaatggctcacatataaattgtgtcaatatttacttgaaagatgtaactgactttctaaatattgtacttactacagtctttgaaaaagagaagaaacctaaatttgagattttattagctcttttaaatgattccacaaagcaagtaaggatgagtatcaacaacttaacaacagactttgattttgcatctcagtccaattggagatattttactgaattaattctaagaccaatagaaatgtcagatgaaattcctaatcagtttcaaaatatttggcttcatttaataacactggggaaggaatttcagaagcttgtaaaaggtatttactttaacatcctggaaaataattcctcttctaaaactgaaaacttgttaaacatatttgccaccagtccaaaagaaaaggatgtaaacagtgtaggcaattccatttatcacttagctagttaccttgccttcagcttatctcatgacctccaaaattcaccaaaaataataatttcacctgaaataatgaaagctacaggtcttggtattcaactgataagggatgtgttcaactccttaatgcctgtagttcatcacactagtccacaaaatgcaggttatatgcaagctttgaagaaggtaacttctgtcatgcgtacccttaagaaggcagacatagaccttttagtggatcagcttgaacaagttagtgtaaacctaatggatttctttaagaatatcagtagtgtgggaactggcaatttagtggtcaatttgcttgttggcttgatggaaaaatttgcagacagctcacattcttggaatgttaatcatctgctgcagctctcacgcctgtttcctaaagatgttgtggatgctgtgatagatgtgtactatgtgcttcctcatgctgtaaggctcctgcagggagtacctggtaaaaacatcactgaaggcctcaaggatgtctacagcttcacactccttcatggcataaccatttcaaatatcaccaaggaagacttcgcaattgtgataaaaattcttttggatacaattgaattagtatcagataagccagatattatttcagaggctttagcttgttttcctgtggtttggtgctggaatcacacaaattctggatttcggcagaattcaaagatagacccctgcaatgtccatgggctcatgtcttcttccttttatggcaaagtggccagtatacttgatcatttccacctgtctccccaaggtgaagattcaccatgttcaaatgaaagctcccgaatggaaataactaggaaagtggtctgcataattcatgaattagtggactggaattctattcttctggagctctctgaagtcttccatgttaacatttctcttgtgaaaactgtgcagaaattttggcataagatattaccgtttgtcccaccttcaataaatcaaactagggatagcatctctgaactctgtcctagtggttccataaagcaagttgctttgcaaatcatagaaaaacttaaaaatgtcaactttacaaaagttacatcaggtgaaaatattcttgacaaactaagtagtttaaacaagatccttaacattaatgaagacacagagacatctgttcaaaatattatttcctcaaatttggaaaggacagtacaattgatttctgaagactggagcctagaaaaaagtacgcataatctactctctttattcatgatgctccagaatgcaaatgtcacaggtagcagtttagaagcattatcaagttttattgaaaaaagtgaaacaccttacaactttgaagaactatggcccaagtttcaacaaatcatgaaagacctaacccaagattttagaatcagacacctgctttctgaaatgaacaaaggaatcaaaagtataaattcaatggctcttcaaaagataactttgcagtttgcccatttcctggaaatcctggattcaccgtcattgaagacattagaaattattgaagattttctattggtcacaaaaaactggcttcaggaatatgcaaatgaggattactccagaatgatagaaacattattcattcctgtgaccaatgagagttcaactgaagatatagctttgttagccaaagctattgctactttttggggctctttaaaaaatatatctagagcaggcaattttgatgttgcctttcttacccatctgctaaatcaagaacagctgactaatttctcagttgttcagctgctttttgaaaacatcctaattaatttgatcaataacttagctgggaattctcaggaagcagcttggaacttaaatgatactgaccttcaaataatgaatttcattaaccttatcttgaaccatatgcagtcagaaactagtaggaaaacagttctctctctgagaagcatagtagatttcacagaacagtttttgaaaacattcttctccctttttctaaaggaagattctgagaacaaaatatctcttctgctgaaatatttccacaaagatgttattgcagagatgagttttgtcccaaaagataaaattctagaaattctgaaactggatcaatttcttaccctgatgatacaagacagattgatgaacattttttcaagtttaaaggagactatatatcacctaatgaaaagttcatttatattagacaatggagaattttattttgatactcatcaaggactgaagttcatgcaagatttatttaatgcccttctcagggaaacttcaatgaaaaataagactgaaaataatatagactttttcacagtggtgagtcagttgtttttccatgtgaataagtctgaggacctcttcaaactcaatcaagatcttgggtcagctcttcaccttgtaagagaatgttcaacagagatggcaagacttctggatacaattttacactctcctaataaggacttctatgctttgtatcctaccctccaagaagttatacttgctaatctaacggatttgcttttctttataaataattcattccctctaagaaacagagcaacattagaaattactaagagattagttggtgctatttcaagagcaagtgaagaaagtcacgtcctgaaacccctcttagaaatgtctgggactctggtcatgctgttgaatgacagtgctgacctgagagatcttgccacatcaatggactccattgtgaaacttcttaagctggtcaagaaagtttcggggaagatgtccacagtttttaaaactcattttatctccaataccaaggacagtgtgaaattctttgacactctgtattccatcatgcaacaaagtgttcaaaatcttgtgaaagaaatagctactttaaaaaaaatagatcatttcacatttgaaaagataaatgatttgttggtgccatttcttgacttggcctttgaaatgattggggtagaaccttatatatcatcaaactctgatattttcagtatgtcacctagcatactctcatatatgaaccaatctaaggacttttctgatattttggaagaaattgctgaatttttaacatctgtgaaaatgaacttggaagatatgaggagtcttgcggtagcatttaacaatgagactcaaacattttctatggattctgtcaacttacgggaagaaattctgggttgcttagttcctataaataacatcaccaaccaaatggacttcttataccctaatccaatttccactcatagtggccctcaagatataaaatgggaaataattcatgaagtgatcccttttttggataaaatattatcacaaaacagcacagaaataggatctttcttgaaaatggtgatctgtctcaccttagaagctctttggaaaaacttaaagaaagataattggaatgtttctaatgtgttgatgacatttactcagcatccaaataaccttttgaaaaccatagaaacagttttagaggcctccagtggaattaaaagtgactatgaaggtgatttgaataaaagtttatattttgacacacctttgagtcagaatataactcatcatcaacttgaaaaagcaatccataatgttttaagtagaatagctctctggaggaaaggacttctgtttaacaactctgaatggataacttccacaagaactttgtttcagccactttttgagattttcattaaagcaaccaccggaaagaatgtcacatcagaaaaagaagagagaaccaagaaagagatgattgactttccttatagtttcaaaccatttttctgtttggagaaatacctgggaggattatttgtattgactaaatactggcaacaaatcccactaacagatcaaagtgttgttgagatttgtgaagttttccagcagactgtgaagccctcagaagccatggagatgctgcagaaagtgaagatgatggtcgtacgtgtgctcaccatcgttgcagaaaacccttcctggaccaaggacattttgtgtgctactctgagttgcaagcaaaatgggataaggcatctcattttatctgctatacaaggggtcactttggcgcaggaccacttccaggaaattgaaaagatatggtcctcgccgaatcagctaaattgtgaaagtcttagcaagaatctttctagcaccttggagagcttcaagagcagcttggaaaatgccactggccaggactgcacaagccagccgaggctggagacggtgcagcagcacttgtacatgttggccaaaagcctcgaggaaacttggtcatcagggaatcccatcatgacttttctcagcaatttcacagtaactgaggatgtaaaaataaaagatttgatgaagaatatcaccaagttgactgaggagcttcgctcttccatccaaatctcgaatgagactatccatagcattctagaagcaaatatttcccactccaaggttctcttcagtgccctcaccgtagctctgtctggaaagtgtgatcaggaaatccttcatctcctgctgacatttcccaaaggggaaaaatcttggatcgcagcggaggaactctgtagcctgccagggtcaaaagtgtattctctgattgtgttgctgagtcgaaacttggatgtgcgagctttcatttacaagactctgatgccttctgaagcaaatggcttgctcaactccttgctggatatagtttccagcctcagcgccttgcttgccaaagcccagcacgtctttgagtatcttcctgagtttcttcacacatttaaaatcactgccttgctagaaaccctggactttcaacaggtttcacaaaatgtccaggccagaagttcagcttttggttctttccagtttgtgatgaagatggtttgcaaggaccaagcatcattccttagcgattctaatatgtttattaatttgcccagagttaaggaactcttggaagatgacaaagaaaaattcaacattcctgaagattcaacaccgttttgcttgaagctttatcaggaaattctacaattgccaaatggtgctttggtgtggaccttcctaaaacccatattgcatggaaaaatactatacacaccaaacactccagaaattaacaaggtcattcaaaaggactcttctcctctatctgtgaaatgaaagacttgagtagatccgtgattttcagtcatctgggagacggctcttcatgggggatgcatcagaattacccacggacccttagtaaggccttccgcctctgggctctgatatccccatccctgaacacttgtacccctcacacccatccatatccttccacagagctgtgtgcacctccatctatcagccttaaagacagtggaggtcaagcattttcatgaactggaaaaaaaatgatggccaaaacttctagagagtgttaaaaggtaaacttagggacattaaaatttcaacaagtttatttgagcattcggttattcatgaattaggcaatgccagacaattcaaccctccactgactatgttgggatgtgggatgtggggtaatagaagaagcttgtatgaagtgtttgctgcagcaacagggagaaaatatattcgttaaagtcaaaagtccctagttggaggttagttggaggtttctgattggttaattttaacttttgttttactgtttgcattgatttgggttttggtttgcctacataggaactcaaggtgctatagctgtcttagcctaacagcctcctgatcaactattttaacaggagttaatttaactcatactctaagggtgtcagactcagtatttgcaaagaaattgatgctatttccatgtcattagtcaagagattccaatgtattagtatgctctttttattttataggtcagagtcgtgttcagttttggccctaggctgatgaaaaattgaagaacaatgtgtagacacaatgtgagcttgaagggaggctatgaaagaaaaacagaaaaaagaattatattgttttcccaagaataagtagcatgcctgaaatgatacttcagtgagaatcaccaggcacattctaggccactggtgcacaaagtaggtttagtctgggcttctaagggacgtataagcccatgaaaacagaccgtcttattttcatctagctctctccctttggctaaaggacagagctttgaactgtcacactcagtgtcctcctttgtgaaactgggctaaatcataactctcagtgccatttggaagtggaaaaaataccagaaataatattcagaaaatagtaaaccaatgggatctcctcccctacaagtgttattcccagaaatgcattctgccattgttgcctctggggagtggggaagacagatgtcacctcagaaagaggaaagagatggtggaggccagtggttcaaaccggggtggggttggagaaattttacccaactgggcacatgtgacagtatctgaagatatttttagtgtcacaagtaggaggcgctgctggcatctggaggctggaggccagggatgctgctatacatcctacaatgcacaggaaagcccccacccccaaacaaataatgatctggcttacaatgttagtggtgctgaggttgagaaaccccagcataaaggggtatataatgccagacgggagcgggtgggagcccctgggaagagaaggatgaaagtagaggaagctggtggtcaggtgggcatcctggcttctcctctactggtgatggtcccaaacaggggctgtgggatgatggaggagctgcaagctgagggccttggccctacccatgtgtcttgggggatagtccctgtgtaggccggccctgagctagcatgtggtcctagcagtgtggctgagcagaggaaggatacctgaattagtgtctctgagcatggagtagaagggagccagatttccctgacatccatgtcctgagccagtgtgtcaagtggaggccttggggacctgctatgagccggctgccgtgagagcgaggtggcctcagcaccaagctggcctaggccaggctggcagaggagatggctgaggctcagaaagcaggagccgaggtgagaaggaagcagcaagggagaaggcagtgccagaccccaaggttccaggtaagatgtgggctgggcaggccaggccctggcagcaccacagacaggcagacgaggcacatggctgtgggagtcctgggccctccacccctgactgtcaccaggctgcccctggagaacatcagggggtttgagcattcaccccaaagagcctgaatcactcagaggaagctgtttgaacagggagccactgtcagcaggcaattttgagactttgttctctcttcaccatccccagtgggtaaaaactggatcagctacaggaaatagagaactaccttttctttgcatccccaagcagtgaggtgtcagatatttggctttgtagcatcatctgtctgtatgcataacatcaatcaggaaacagagcaggtcccataaaatggcagccctacgttgggaacctggtgatcctctgtctggaagccgcctgcagaggagggactctgatagttatgtttgtttccaagtcttcccatgctgctcaagatggcaaagtttttcagtaaccttgtgtatcactccagacatggcagcagcccacacatacctggaatttaaatgccatacttccttgggatccagtgtgccagagacgcatgtcctcacctgaccactgtgttggagaggtccttcctcctttcaggctggcctcagcaggtggcagagatcagagagaggccaccagcggtgatccagacagccacgccatgtctctccctgttcccactctccctgtcctctcaatgcccagggcagccggtgctcctacctccagttccagctgtggggggctccagctgtctttctcttgcctttgttcctggagcttatcctccaaccttcttaagaagtatcttctctcctcaggcacccccaacaggcactgtgtgtttttgctttgtttttaaattaacatagagtaagttcggcaggctttttttcggtcgacagctctcacatttgtctggatcagtacacagaacagttccattgcccgagcccacaccaaatccctcattttgtcccttggtaatcacactgtcttcccaccctaaacccatctgttctctatcactataggtaggttttctttgtgagaatgccctataatggaatcatcatctgtaacctttgaaagtggtctcttttgctcagtacgagggctgtgattcacccaggtcattgtgtgtatcagcagttgcctcctctttattgccaagtggtattctgtggtgtggattcactgcagtttgttcgtccattcacccactaaagggcgtgtgggttttttctagtctttggcgattatcagtggagctcttaccttgcttttatcactacttgaaattatctcattgacttacaggcgtacttgtttattatttgtcgcctgctgtaatataagcttcatgaggggcaggagcttgtctgtcttcttggccaccgtccccagtgcctagaagaatgctaggaataccttcagcagtggctgttgaataagttaaagaataataattatttggctcttgtacccatttgagccaaagacattctggtgttaaatatacaagggagatagagtagactgtatgccaagccctctgcccgctgccagagccaggccttagctttgcagatatgcagtagctttgtctgagtttagcagtggtgggtgccatcaagaagattatctcccaaggtcattaatttcatttactgagcttgggccaggcaccttatgtggattatctcatgtatgcctcacaaccaccactgcaggtaggtactaatatccccattctatagctaggaaaaccaaggttgaaagaggataagttagcttgaccagggtcacacacctatcaagtggtggagctggaattcaggcccagtgtattattttgaagcctgtgatatggtttggctgtgcccccacccacatctcatcttgaattgccataatccccacgtg

SEQ ID NO: 204 - DNA, 10294 bp, Homo sapiens
cagatataagcaccatccttacaggctggcttcctgactgagagcagggagcagcaggcatggggcatgccgggtgccagttcaaagccctgctgtggaagaattggctctgcagactcaggaacccggtccttttccttgctgaattcttctggccttgtatcctgtttgtaattctgacagttcttcgttttcaagaacctcccagatacagagacatttgttatttgcagccccgagatctacccagctgtggtgttatcccctttgttcaaagccttctttgtaacactggatcaaggtgtaggaacttcagctatgaagggtcaatggagcatcattttcgtttgtctaggttccaaactgcagctgaccccaagaaagtcaacaacctggcctttttaaaagagatacaagacctggcagaggaaattcatggaatgatggacaaggcaaaaaacttaaaaagactttgggtagaacgatccaacactccagattcttcttatggttccagtttttttacaatggatctcaataagaccgaggaggtaatattgaaactggaaagcctccatcagcagcctcatatctgggattttctacttttactgccgagactacacacaagccatgatcatgtggaagatggcatggatgttgcagtgaaccttctccagaccattttgaattccttaatatccctagaagatttagattggcttccactcaaccaaactttttcccaggtttctgaacttgtactgaatgtgaccatttcgacactgacatttctgcagcaacatggagtagcagtcaccgagccagtttaccacctgtccatgcagaatatagtgtgggatccacagaaagtccagtatgatctcaaatcccagtttggctttgatgatcttcacacggaacagatcctgaactcttcagctgaactgaaggagattcccacagacacttccttggagaagatggtgtgttcagtcttgtctagcacatcagaggatgaagctgagaaatggggccacgttggaggctgccaccctaagtggtcagaagccaaaaactatcttgtccatgcagtcagctggctgcgagtctaccaacaggtgtttgttcagtggcaacagggtagcctgcttcagaagacactcacaggcatgggccatagtctggaggctctcaggaatcagtttgaagaagagagcaagccctggaaggtggtggaagctctgcacactgcactgctcctgctgaatgacagcttgtcagcagatggcccaaaagataatcatacatttccaaagatattacagcatctgtggaaattgcaaagcttgctgcaaaacctgccccagtggccggcactgaagagatttcttcagcttgatggagctctcagaaatgcgatagctcagaatttacattttgtccaagaagtcctcatttgcctggagacatcagctaatgattttaaatggtttgaacttaaccaattgaaactggaaaaggatgtgttcttttgggagctgaaacagatgttggcgaagaatgctgtctgcccgaatggtcgtttctctgagaaggaggtctttttgccgcctggaaactccagcatatggggtggtctccagggactgttgtgctattgtaactcctctgagacgagtgttttaaacaagctacttggttcagtagaggatgctgatcgtattttgcaagaggtcattacttggcacaaaaatatgtcagttttaatacctgaagaatatttggactggcaggaacttgagatgcagctgtcagaagcaagcctttcctgtactcggctcttcctgctgctgggagctgatccctctcctgagaatgatgtcttttctagtgactgtaagcaccagcttgtctccacagtgatatttcatacacttgaaaaaacacaatttttcctggaacaagcatattattggaaagccttcaaaaagtttatcaggaagacttgcgaagtggcccaatatgtaaatatgcaagagagtttccagaacagactattggcttttcctgaggaatctccttgttttgaagaaaacatggattggaaaatgatcagtgataattattttcaatttttgaataacttactcaagtctccaacagcttccatatccagggctttaaatttcacaaagcaccttctaatgatggaaaagaagttgcacacccttgaggatgaacaaatgaactttcttttatcatttgtggaattttttgagaaattattgttgcctaatctttttgactcctccattgttcccagtttccacagcctcccatctctcacagaggatattctgaatataagttctctgtggacaaatcatttaaaaagtttaaagagagacccatctgccactgatgctcagaaactcttggaatttggcaacgaagtgatttggaaaatgcagactctcggaagtcactggataaggaaggaaccaaaaaatcttttgagattcatagaattaatactttttgaaattaatcccaaattactagaattatgggcctatggcatttcaaaaggaaaaagagctaaattggaaaacttctttacacttttaaatttttctgttccagaaaatgagattctgagtacaagttttaacttttcccagttgttccattcagattggcctaaatcaccagctatgaacatagattttgtacgtttaagtgaggctataataactagtctccatgaatttggatttttggagcaggaacagatctcagaagctctgaacacagtctacgctatcaggaatgcatctgatcttttctcagccctttctgaaccacaaaaacaagaagttgataaaattttgactcacatacacctaaatgtcttccaggacaaggattcagctttacttctgcaaatttattcttcattttaccgatatatttatgaattattgaatattcagagtagaggctcttcgttgactttccttacacaaatctcaaaacacattttggatatcataaaacaatttaatttccaaaacatcagtaaagcatttgcatttttatttaagacagcagaggttcttgggggaatttctaatgtatcttactgtcagcaattgctttcaatttttaactttttggagcttcaggcccaatccttcatgtctacagagggccaagaactggaagtgatccacactactttgacaggcctcaaacagctgctcataattgatgaagattttcgtatttctttatttcaatatatgagccaattcttcaacagttcagtagaagacctattggataataaatgcttgatttcggacaataaacacatttcttccgtaaattattcaacaagtgaggagtcttcatttgtttttccattggcacaaattttttcaaacctctcagcaaatgtcagtgtgttcaacaagtttatgtccattcactgtaccgtttcatggcttcaaatgtggactgaaatctgggaaaccatatctcaattatttaagtttgacatgaatgttttcacatctcttcatcatggtttcactcagcttttggatgaattggaagatgatgtgaaagtctctaaaagctgccagggtatacttcccacccataatgttgctagactcatattaaatttgtttaaaaatgtaactcaagccaatgacttccataattgggaggacttcctggatctcagggattttttggtagctttaggtaatgcattagtttcagtaaaaaaacttaacttggagcaagtggagaaatcccttttcaccatggaagctgccctgcatcagttgaagacatttccattcaacgaaagtacaagcagagagtttttaaattctctgcttgaagttttcattgagtttagcagtacctcagaatatatagtcagaaatctagattcaataaatgactttctttcaaataatctcacaaattatggagaaaaatttgaaaatatcatcactgagctaagagaagcaatagtatttcttagaaatgtatcacatgatcgagatttgttttcctgtgctgatattttccaaaatgttactgagtgtattttagaagatggctttttatatgtaaatacctcacagaggatgttacgtattctagacacgttaaattccacattttcctctgagaacacaattagcagtctgaaaggatgcattgtatggttagatgtcataaaccatttgtatttgttgtctaactccagtttttcacaaggtcatcttcaaaatattttggggaatttcagagatatagaaaacaaaatgaactctatattaaaaattgtaacttgggtgttaaatataaaaaaacctctttgttcatcaaatggctcacatataaattgtgtcaatatttacttgaaagatgtaactgactttctaaatattgtacttactacagtctttgaaaaagagaagaaacctaaatttgagattttattagctcttttaaatgattccacaaagcaagtaaggatgagtatcaacaacttaacaacagactttgattttgcatctcagtccaattggagatattttactgaattaattctaagaccaatagaaatgtcagatgaaattcctaatcagtttcaaaatatttggcttcatttaataacactggggaaggaatttcagaagcttgtaaaaggtatttactttaacatcctggaaaataattcctcttctaaaactgaaaacttgttaaacatatttgccaccagtccaaaagaaaaggatgtaaacagtgtaggcaattccatttatcacttagctagttaccttgccttcagcttatctcatgacctccaaaattcaccaaaaataataatttcacctgaaataatgaaagctacaggtcttggtattcaactgataagggatgtgttcaactccttaatgcctgtagttcatcacactagtccacaaaatgcaggttatatgcaagctttgaagaaggtaacttctgtcatgcgtacccttaagaaggcagacatagaccttttagtggatcagcttgaacaagttagtgtaaacctaatggatttctttaagaatatcagtagtgtgggaactggcaatttagtggtcaatttgcttgttggcttgatggaaaaatttgcagacagctcacattcttggaatgttaatcatctgctgcagctctcacgcctgtttcctaaagatgttgtggatgctgtgatagatgtgtactatgtgcttcctcatgctgtaaggctcctgcagggagtacctggtaaaaacatcactgaaggcctcaaggatgtctacagcttcacactccttcatggcataaccatttcaaatatcaccaaggaagacttcgcaattgtgataaaaattcttttggatacaattgaattagtatcagataagccagatattatttcagaggctttagcttgttttcctgtggtttggtgctggaatcacacaaattctggatttcggcagaattcaaagatagacccctgcaatgtccatgggctcatgtcttcttccttttatggcaaagtggccagtatacttgatcatttccacctgtctccccaaggtgaagattcaccatgttcaaatgaaagctcccgaatggaaataactaggaaagtggtctgcataattcatgaattagtggactggaattctattcttctggagctctctgaagtcttccatgttaacatttctcttgtgaaaactgtgcagaaattttggcataagatattaccgtttgtcccaccttcaataaatcaaactagggatagcatctctgaactctgtcctagtggttccataaagcaagttgctttgcaaatcatagaaaaacttaaaaatgtcaactttacaaaagttacatcaggtgaaaatattcttgacaaactaagtagtttaaacaagatccttaacattaatgaagacacagagacatctgttcaaaatattatttcctcaaatttggaaaggacagtacaattgatttctgaagactggagcctagaaaaaagtacgcataatctactctctttattcatgatgctccagaatgcaaatgtcacaggtagcagtttagaagcattatcaagttttattgaaaaaagtgaaacaccttacaactttgaagaactatggcccaagtttcaacaaatcatgaaagacctaacccaagattttagaatcagacacctgctttctgaaatgaacaaaggaatcaaaagtataaattcaatggctcttcaaaagataactttgcagtttgcccatttcctggaaatcctggattcaccgtcattgaagacattagaaattattgaagattttctattggtcacaaaaaactggcttcaggaatatgcaaatgaggattactccagaatgatagaaacattattcattcctgtgaccaatgagagttcaactgaagatatagctttgttagccaaagctattgctactttttggggctctttaaaaaatatatctagagcaggcaattttgatgttgcctttcttacccatctgctaaatcaagaacagctgactaatttctcagttgttcagctgctttttgaaaacatcctaattaatttgatcaataacttagctgggaattctcaggaagcagcttggaacttaaatgatactgaccttcaaataatgaatttcattaaccttatcttgaaccatatgcagtcagaaactagtaggaaaacagttctctctctgagaagcatagtagatttcacagaacagtttttgaaaacattcttctccctttttctaaaggaagattctgagaacaaaatatctcttctgctgaaatatttccacaaagatgttattgcagagatgagttttgtcccaaaagataaaattctagaaattctgaaactggatcaatttcttaccctgatgatacaagacagattgatgaacattttttcaagtttaaaggagactatatatcacctaatgaaaagttcatttatattagacaatggagaattttattttgatactcatcaaggactgaagttcatgcaagatttatttaatgcccttctcagggaaacttcaatgaaaaataagactgaaaataatatagactttttcacagtggtgagtcagttgtttttccatgtgaataagtctgaggacctcttcaaactcaatcaagatcttgggtcagctcttcaccttgtaagagaatgttcaacagagatggcaagacttctggatacaattttacactctcctaataaggacttctatgctttgtatcctaccctccaagaagttatacttgctaatctaacggatttgcttttctttataaataattcattccctctaagaaacagagcaacattagaaattactaagagattagttggtgctatttcaagagcaagtgaagaaagtcacgtcctgaaacccctcttagaaatgtctgggactctggtcatgctgttgaatgacagtgctgacctgagagatcttgccacatcaatggactccattgtgaaacttcttaagctggtcaagaaagtttcggggaagatgtccacagtttttaaaactcattttatctccaataccaaggacagtgtgaaattctttgacactctgtattccatcatgcaacaaagtgttcaaaatcttgtgaaagaaatagctactttaaaaaaaatagatcatttcacatttgaaaagataaatgatttgttggtgccatttcttgacttggcctttgaaatgattggggtagaaccttatatatcatcaaactctgatattttcagtatgtcacctagcatactctcatatatgaaccaatctaaggacttttctgatattttggaagaaattgctgaatttttaacatctgtgaaaatgaacttggaagatatgaggagtcttgcggtagcatttaacaatgagactcaaacattttctatggattctgtcaacttacgggaagaaattctgggttgcttagttcctataaataacatcaccaaccaaatggacttcttataccctaatccaatttccactcatagtggccctcaagatataaaatgggaaataattcatgaagtgatcccttttttggataaaatattatcacaaaacagcacagaaataggatctttcttgaaaatggtgatctgtctcaccttagaagctctttggaaaaacttaaagaaagataattggaatgtttctaatgtgttgatgacatttactcagcatccaaataaccttttgaaaaccatagaaacagttttagaggcctccagtggaattaaaagtgactatgaaggtgatttgaataaaagtttatattttgacacacctttgagtcagaatataactcatcatcaacttgaaaaagcaatccataatgttttaagtagaatagctctctggaggaaaggacttctgtttaacaactctgaatggataacttccacaagaactttgtttcagccactttttgagattttcattaaagcaaccaccggaaagaatgtcacatcagaaaaagaagagagaaccaagaaagagatgattgactttccttatagtttcaaaccatttttctgtttggagaaatacctgggaggattatttgtattgactaaatactggcaacaaatcccactaacagatcaaagtgttgttgagatttgtgaagttttccagcagactgtgaagccctcagaagccatggagatgctgcagaaagtgaagatgatggtcgtacgtgtgctcaccatcgttgcagaaaacccttcctggaccaaggacattttgtgtgctactctgagttgcaagcaaaatgggataaggcatctcattttatctgctatacaaggggtcactttggcgcaggaccacttccaggaaattgaaaagatatggtcctcgccgaatcagctaaattgtgaaagtcttagcaagaatctttctagcaccttggagagcttcaagagcagcttggaaaatgccactggccaggactgcacaagccagccgaggctggagacggtgcagcagcacttgtacatgttggccaaaagcctcgaggaaacttggtcatcagggaatcccatcatgacttttctcagcaatttcacagtaactgaggatgtaaaaataaaagatttgatgaagaatatcaccaagttgactgaggagcttcgctcttccatccaaatctcgaatgagactatccatagcattctagaagcaaatatttcccactccaaggttctcttcagtgccctcaccgtagctctgtctggaaagtgtgatcaggaaatccttcatctcctgctgacatttcccaaaggggaaaaatcttggatcgcagcggaggaactctgtagcctgccagggtcaaaagtgtattctctgattgtgttgctgagtcgaaacttggatgtgcgagctttcatttacaagactctgatgccttctgaagcaaatggcttgctcaactccttgctggatatagtttccagcctcagcgccttgcttgccaaagcccagcacgtctttgagtatcttcctgagtttcttcacacatttaaaatcactgccttgctagaaaccctggactttcaacaggtttcacaaaatgtccaggccagaagttcagcttttggttctttccagtttgtgatgaagatggtttgcaaggaccaagcatcattccttagcgattctaatatgtttattaatttgcccagagttaaggaactcttggaagatgacaaagaaaaattcaacattcctgaagattcaacaccgttttgcttgaagctttatcaggaaattctacaattgccaaatggtgctttggtgtggaccttcctaaaacccatattgcatggaaaaatactatacacaccaaacactccagaaattaacaaggtcattcaaaagaagagaagatacctgcactattcatgataagcttccaagcctcaaatagcattaaaaatttggaaactgtgatcatatggcatgggatcatatgagcagttaagtcatttttgatcaaacttgccttcatgagtttcatgcttctgacccatggttgctgtgtgaggtcacagcactgtttcctgtaagttccctttcccactttgccacctacctcaggggctgcatttacctct

SEQ ID NO: 205 - DNA, 9159 bp, Homo sapiens
gcagatataagcaccatccttacaggctggcttcctgactgagagcagggagcagcaggcatggggcatgccgggtgccagttcaaagccctgctgtggaagaattggctctgcagactcaggaacccggtccttttccttgctgaattcttctggccttgtatcctgtttgtaattctgacagttcttcgttttcaagaacctcccagatacagagacatttgttatttgcagccccgagatctacccagctgtggtgttatcccctttgttcaaagccttctttgtaacactggatcaaggtgtaggaacttcagctatgaagggtcaatggagcatcattttcgtttgtctaggttccaaactgcagctgaccccaagaaagtcaacaacctggcctttttaaaagagatacaagacctggcagaggaaattcatggaatgatggacaaggcaaaaaacttaaaaagactttgggtagaacgatccaacactccagattcttcttatggttccagtttttttacaatggatctcaataagaccgaggaggtaatattgaaactggaaagcctccatcagcagcctcatatctgggattttctacttttactgccgagactacacacaagccatgatcatgtggaagatggcatggatgttgcagtgaaccttctccagaccattttgaattccttaatatccctagaagatttagattggcttccactcaaccaaactttttcccaggtttctgaacttgtactgaatgtgaccatttcgacactgacatttctgcagcaacatggagtagcagtcaccgagccagtttaccacctgtccatgcagaatatagtgtgggatccacagaaagtccagtatgatctcaaatcccagtttggctttgatgatcttcacacggaacagatcctgaactcttcagctgaactgaaggagattcccacagacacttccttggagaagatggtgtgttcagtcttgtctagcacatcagaggatgaagctgagaaatggggccacgttggaggctgccaccctaagtggtcagaagccaaaaactatcttgtccatgcagtcagctggctgcgagtctaccaacaggtgtttgttcagtggcaacagggtagcctgcttcagaagacactcacaggcatgggccatagtctggaggctctcaggaatcagtttgaagaagagagcaagccctggaaggtggtggaagctctgcacactgcactgctcctgctgaatgacagcttgtcagcagatggcccaaaagataatcatacatttccaaagatattacagcatctgtggaaattgcaaagcttgctgcaaaacctgccccagtggccggcactgaagagatttcttcagcttgatggagctctcagaaatgcgatagctcagaatttacattttgtccaagaagtcctcatttgcctggagacatcagctaatgattttaaatggtttgaacttaaccaattgaaactggaaaaggatgtgttcttttgggagctgaaacagatgttggcgaagaatgctgtctgcccgaatggtcgtttctctgagaaggaggtctttttgccgcctggaaactccagcatatggggtggtctccagggactgttgtgctattgtaactcctctgagacgagtgttttaaacaagctacttggttcagtagaggatgctgatcgtattttgcaagaggtcattacttggcacaaaaatatgtcagttttaatacctgaagaatatttggactggcaggaacttgagatgcagctgtcagaagcaagcctttcctgtactcggctcttcctgctgctgggagctgatccctctcctgagaatgatgtcttttctagtgactgtaagcaccagcttgtctccacagtgatatttcatacacttgaaaaaacacaatttttcctggaacaagcatattattggaaagccttcaaaaagtttatcaggaagacttgcgaagtggcccaatatgtaaatatgcaagagagtttccagaacagactattggcttttcctgaggaatctccttgttttgaagaaaacatggattggaaaatgatcagtgataattattttcaatttttgaataacttactcaagtctccaacagcttccatatccagggctttaaatttcacaaagcaccttctaatgatggaaaagaagttgcacacccttgaggatgaacaaatgaactttcttttatcatttgtggaattttttgagaaattattgttgcctaatctttttgactcctccattgttcccagtttccacagcctcccatctctcacagaggatattctgaatataagttctctgtggacaaatcatttaaaaagtttaaagagagacccatctgccactgatgctcagaaactcttggaatttggcaacgaagtgatttggaaaatgcagactctcggaagtcactggataaggaaggaaccaaaaaatcttttgagattcatagaattaatactttttgaaattaatcccaaattactagaattatgggcctatggcatttcaaaaggaaaaagagctaaattggaaaacttctttacacttttaaatttttctgttccagaaaatgagattctgagtacaagttttaacttttcccagttgttccattcagattggcctaaatcaccagctatgaacatagattttgtacgtttaagtgaggctataataactagtctccatgaatttggatttttggagcaggaacagatctcagaagctctgaacacagtctacgctatcaggaatgcatctgatcttttctcagccctttctgaaccacaaaaacaagaagttgataaaattttgactcacatacacctaaatgtcttccaggacaaggattcagctttacttctgcaaatttattcttcattttaccgatatatttatgaattattgaatattcagagtagaggctcttcgttgactttccttacacaaatctcaaaacacattttggatatcataaaacaatttaatttccaaaacatcagtaaagcatttgcatttttatttaagacagcagaggttcttgggggaatttctaatgtatcttactgtcagcaattgctttcaatttttaactttttggagcttcaggcccaatccttcatgtctacagagggccaagaactggaagtgatccacactactttgacaggcctcaaacagctgctcataattgatgaagattttcgtatttctttatttcaatatatgagccaattcttcaacagttcagtagaagacctattggataataaatgcttgatttcggacaataaacacatttcttccgtaaattattcaacaagtgaggagtcttcatttgtttttccattggcacaaattttttcaaacctctcagcaaatgtcagtgtgttcaacaagtttatgtccattcactgtaccgtttcatggcttcaaatgtggactgaaatctgggaaaccatatctcaattatttaagtttgacatgaatgttttcacatctcttcatcatggtttcactcagcttttggatgaattggaagatgatgtgaaagtctctaaaagctgccagggtatacttcccacccataatgttgctagactcatattaaatttgtttaaaaatgtaactcaagccaatgacttccataattgggaggacttcctggatctcagggattttttggtagctttaggtaatgcattagtttcagtaaaaaaacttaacttggagcaagtggagaaatcccttttcaccatggaagctgccctgcatcagttgaagacatttccattcaacgaaagtacaagcagagagtttttaaattctctgcttgaagttttcattgagtttagcagtacctcagaatatatagtcagaaatctagattcaataaatgactttctttcaaataatctcacaaattatggagaaaaatttgaaaatatcatcactgagctaagagaagcaatagtatttcttagaaatgtatcacatgatcgagatttgttttcctgtgctgatattttccaaaatgttactgagtgtattttagaagatggctttttatatgtaaatacctcacagaggatgttacgtattctagacacgttaaattccacattttcctctgagaacacaattagcagtctgaaaggatgcattgtatggttagatgtcataaaccatttgtatttgttgtctaactccagtttttcacaaggtcatcttcaaaatattttggggaatttcagagatatagaaaacaaaatgaactctatattaaaaattgtaacttgggtgttaaatataaaaaaacctctttgttcatcaaatggctcacatataaattgtgtcaatatttacttgaaagatgtaactgactttctaaatattgtacttactacagtctttgaaaaagagaagaaacctaaatttgagattttattagctcttttaaatgattccacaaagcaagtaaggatgagtatcaacaacttaacaacagactttgattttgcatctcagtccaattggagatattttactgaattaattctaagaccaatagaaatgtcagatgaaattcctaatcagtttcaaaatatttggcttcatttaataacactggggaaggaatttcagaagcttgtaaaaggtatttactttaacatcctggaaaataattcctcttctaaaactgaaaacttgttaaacatatttgccaccagtccaaaagaaaaggatgtaaacagtgtaggcaattccatttatcacttagctagttaccttgccttcagcttatctcatgacctccaaaattcaccaaaaataataatttcacctgaaataatgaaagctacaggtcttggtattcaactgataagggatgtgttcaactccttaatgcctgtagttcatcacactagtccacaaaatgcaggttatatgcaagctttgaagaaggtaacttctgtcatgcgtacccttaagaaggcagacatagaccttttagtggatcagcttgaacaagttagtgtaaacctaatggatttctttaagaatatcagtagtgtgggaactggcaatttagtggtcaatttgcttgttggcttgatggaaaaatttgcagacagctcacattcttggaatgttaatcatctgctgcagctctcacgcctgtttcctaaagatgttgtggatgctgtgatagatgtgtactatgtgcttcctcatgctgtaaggctcctgcagggagtacctggtaaaaacatcactgaaggcctcaaggatgtctacagcttcacactccttcatggcataaccatttcaaatatcaccaaggaagacttcgcaattgtgataaaaattcttttggatacaattgaattagtatcagataagccagatattatttcagaggctttagcttgttttcctgtggtttggtgctggaatcacacaaattctggatttcggcagaattcaaagatagacccctgcaatgtccatgggctcatgtcttcttccttttatggcaaagtggccagtatacttgatcatttccacctgtctccccaaggtgaagattcaccatgttcaaatgaaagctcccgaatggaaataactaggaaagtggtctgcataattcatgaattagtggactggaattctattcttctggagctctctgaagtcttccatgttaacatttctcttgtgaaaactgtgcagaaattttggcataagatattaccgtttgtcccaccttcaataaatcaaactagggatagcatctctgaactctgtcctagtggttccataaagcaagttgctttgcaaatcatagaaaaacttaaaaatgtcaactttacaaaagttacatcaggtgaaaatattcttgacaaactaagtagtttaaacaagatccttaacattaatgaagacacagagacatctgttcaaaatattatttcctcaaatttggaaaggacagtacaattgatttctgaagactggagcctagaaaaaagtacgcataatctactctctttattcatgatgctccagaatgcaaatgtcacaggtagcagtttagaagcattatcaagttttattgaaaaaagtgaaacaccttacaactttgaagaactatggcccaagtttcaacaaatcatgaaagacctaacccaagattttagaatcagacacctgctttctgaaatgaacaaaggaatcaaaagtataaattcaatggctcttcaaaagataactttgcagtttgcccatttcctggaaatcctggattcaccgtcattgaagacattagaaattattgaagattttctattggtcacaaaaaactggcttcaggaatatgcaaatgaggattactccagaatgatagaaacattattcattcctgtgaccaatgagagttcaactgaagatatagctttgttagccaaagctattgctactttttggggctctttaaaaaatatatctagagcaggcaattttgatgttgcctttcttacccatctgctaaatcaagaacagctgactaatttctcagttgttcagctgctttttgaaaacatcctaattaatttgatcaataacttagctgggaattctcaggaagcagcttggaacttaaatgatactgaccttcaaataatgaatttcattaaccttatcttgaaccatatgcagtcagaaactagtaggaaaacagttctctctctgagaagcatagtagatttcacagaacagtttttgaaaacattcttctccctttttctaaaggaagattctgagaacaaaatatctcttctgctgaaatatttccacaaagatgttattgcagagatgagttttgtcccaaaagataaaattctagaaattctgaaactggatcaatttcttaccctgatgatacaagacagattgatgaacattttttcaagtttaaaggagactatatatcacctaatgaaaagttcatttatattagacaatggagaattttattttgatactcatcaaggactgaagttcatgcaagatttatttaatgcccttctcagggaaacttcaatgaaaaataagactgaaaataatatagactttttcacagtggtgagtcagttgtttttccatgtgaataagtctgaggacctcttcaaactcaatcaagatcttgggtcagctcttcaccttgtaagagaatgttcaacagagatggcaagacttctggatacaattttacactctcctaataaggacttctatgctttgtatcctaccctccaagaagttatacttgctaatctaacggatttgcttttctttataaataattcattccctctaagaaacagagcaacattagaaattactaagagattagttggtgctatttcaagagcaagtgaagaaagtcacgtcctgaaacccctcttagaaatgtctgggactctggtcatgctgttgaatgacagtgctgacctgagagatcttgccacatcaatggactccattgtgaaacttcttaagctggtcaagaaagtttcggggaagatgtccacagtttttaaaactcattttatctccaataccaaggacagtgtgaaattctttgacactctgtattccatcatgcaacaaagtgttcaaaatcttgtgaaagaaatagctactttaaaaaaaatagatcatttcacatttgaaaagataaatgatttgttggtgccatttcttgacttggcctttgaaatgattggggtagaaccttatatatcatcaaactctgatattttcagtatgtcacctagcatactctcatatatgaaccaatctaaggacttttctgatattttggaagaaattgctgaatttttaacatctgtgaaaatgaacttggaagatatgaggagtcttgcggtagcatttaacaatgagactcaaacattttctatggattctgtcaacttacgggaagaaattctgggttgcttagttcctataaataacatcaccaaccaaatggacttcttataccctaatccaatttccactcatagtggccctcaagatataaaatgggaaataattcatgaagtgatcccttttttggataaaatattatcacaaaacagcacagaaataggatctttcttgaaaatggtgatctgtctcaccttagaagctctttggaaaaacttaaagaaagataattggaatgtttctaatgtgttgatgacatttactcagcatccaaataaccttttgaaaaccatagaaacagttttagaggcctccagtggaattaaaagtgactatgaaggtgatttgaataaaagtttatattttgacacacctttgagtcagaatataactcatcatcaacttgaaaaagcaatccataatgttttaagtagaatagctctctggaggaaaggacttctgtttaacaactctgaatggataacttccacaagaactttgtttcagccactttttgagattttcattaaagcaaccaccggaaagaatgtcacatcagaaaaagaagagagaaccaagaaagagatgattgactttccttatagtttcaaaccatttttctgtttggagaaatacctgggaggattatttgtattgactaaatactggcaacaaatcccactaacagatcaaagtgttgttgagatttgtgaagttttccagcagactgtgaagccctcagaagccatggagatgctgcagaaagtgaagatgatggtcgtacgtgtgctcaccatcgttgcagaaaacccttcctggaccaaggacattttgtgtgctactctgagttgcaagcaaaatgggataaggcatctcattttatctgctatacaaggggtcactttggcgcaggaccacttccaggtcacctgtgacatgctgaccagtttgcccctacagctgtctgctggtagtgttcctgcactgggttgtgaacctcatggaggtaggagttttgtctcctgtgttcatagctctcagtccggcacctagcctgggcctggcact

SEQ ID NO: 206 - DNA, 4610 bp, Homo sapiens
gggcggggcgaggcggggagggggccggccggaggcagaggctggagggaggcggcggggacagtttgttgtgctcggaacatggcgggcgtcggcgacgcggccgctccgggagaaggcggcggtggcggcgtggacggcccgcagcgggacggccgcggcgaggcggagcagccgggcggcagcggcggacaggggcccccgccggcgcctcagctcacagagacgctgggcttctacgagagcgaccggcggcgggagaggcgccggggccgcacagagctttcattgttgaggttcctcagtgctgaactaacaagagggtacttccttgaacataatgaggccaagtatacagaaagaagagaaagagtatacacttgtttgcgaataccaagagaattggaaaagctgatggtttttggaatctttctgtgcctggatgcgtttttgtatgtgttcaccctgcttcctttaagagttttcctggcactattcaggctcctcactttgccttgctatggcttaagggacagacgtttgcttcagcctgcccaggtgtgtgacattttgaagggtgtcattttggtaatctgctattttatgatgcactatgttgactactccatgatgtaccacctgataagggggcagtccgtcatcaagctctacatcatctacaacatgctggaggtagctgatcgtctgttttcatcttttggacaagacatattagatgctctctattggacagcaacagagcctaaagaaagaaaaagagcccacattggggtgattcctcactttttcatggctgttctctatgtctttttgcatgcaattcttataatggttcaagcaacaactctcaatgtagcttttaactcacacaacaagtctttgcttactatcatgatgtctaataattttgttgaaattaaaggaagtgttttcaagaagtttgaaaagaacaatctctttcaaatgtcaaatagcgatattaaggaacgattcacaaattatgtgcttttactgatagtgtgtctaagaaacatggaacagttttcttggaatccagatcatctctgggtgttgtttccagatgtctgtatggtaattgcatcagaaattgccgtggatattgtaaaacatgcctttattactaaattcaatgacattactgcagatgtctacagtgaatatagagccagtcttgcttttgaccttgttagcagccgacagaaaaatgcatacactgattacagtgactctgtagcacggaggatgggctttattcctctcccactagctgttttactcatcagagttgtaacaagctcaattaaagtgcaaggaatcctgtcttatgcctgtgtcatactcttctattttgggttgatatccctgaaagtacttaatagcatcgtgctgttggggaaatcgtgccagtatgtgaaggaagccaaaatggaagagaagctgtcgaatcctcccgcaacctgcactccaggcaagccgtccagtaaatcacagaacaaatgtaaaccctctcaaggcctttccacagaagaaaacctgtctgcctccatcaccaaacaacctattcatcaaaaggaaaatatcataccattacttgtgacaagcaattctgatcagtttttgacaactccagatggtgacgagaaggacataacgcaggacaattctgaattaaaacacagatcctcaaagaaagatttgttagagatagacaggttcacaatttgtggaaaccgaattgactgaatctgtggcttcatgcgctgaagaagctgggtcctggggcaacaagtgctgtgttgccaggacaaatagatgctaaacatggcacttaaatatttatttaaaaacttaaattattattggcaagcaaatcttagtatctttcttccagtaatatggcctggctgagggtcagaccacaggacaggagcgacctccggccttgactgtctgggaagcttgatggattataaaacttcctcctgcctggccaagcagcagcatcatttccaggacccaacaaaggcaacatcaaaatctgttttgctttgtcagtctgggcttccagaatgttgaatttgcctcaaggcctcttcagtataaggaaatacctggaaaactgtgaaacttttaccacgacgtaatctttccagtctcatactattttcacaaacagttttcaaacgttacttcatctgccaaagcattaaaaaaattaaacataagtcaagataaatgttcttaccaccagaataacccttaaagatgtatcttaattaatcagaataaaaggctaccttaaataagacatgatgaatagtagcattttgtagggttaaaaaaaaatgctaaactagtttatttattaaaaaaataattaatgaaggctatgcattactgggaaaaatccttcataatttttcagtttactctttaaagcaaaatgtgagctgtatgtcatttaattggtggataaaacaaatttccttacaaaagggcactttttacaccaaggaagcagagcagtgttaactttaaggtatacttaactgattttgctttaaaactaattacttcataaattattacagctaaaaggattcgatgttgaacaggctgaaaaattgtcaatgtacaaaattcaaaactgtcaactttaactgtaaagtaaatgctccaagtgtgttagacagcatcatcttgcttgggcttaccaaatgcattagtctttgtgtttgggtcgacagcgagtgtgcctgtgctggggcagggtgtgtgttctgtgggagggtgtctgtggggatgtgactatcagggtgggcctgtgctggggatggggcaggcctgggtctggagaggattttgtgtgaaagtaaatggggtgtttgaggcgtatgggtggctgttggtgtggggaggcatctgtgtatggctgttgggaacagcaaccaaaaggtgctttttggttttatttgagatgaagattgtgtttccgcttaattactagtttgtggtctatatcatagaagttatttcccaccccattttatcttgacaaccgtgtttgcatttctgtaaaacttctacaacttctggtgtcagaactgtccagaagatggtactgttaactgttatttcctttgatgttttgattttgaagtttagctctcatgcaaatgtttcaggcgtacatacataggcagaaagcaatttttaggtgatttgtctgtttcttggatgaaatataaagcaagctttaatgttctgacttgttcatttgaaatacaaaaaagtaagtgaattttaatgttttgcattaactaaagaaatctgaagattaatgttgaggaaattgtatggacatgcctttgtgaaaccaggaagtattttaagttaaaaatgaaaaaggttttaattgctttgtgtgtgttttaatggagccccattttagaattattttttccatctccctttaccaacaaaaggaacaatgccaccgtgaatggaatagtttggggaaagctttgccaaacacaaccctgatttcagagcaggaacatggtttggatagatcttcagttccgcttgaattattctgttactgcgctgtcattttcagaagatttccattcctttgcagatgctgttgggagttcgggattatgttcatttcttctgttttaatggcattcagtactaattttataagtgcatcttgtgtgaatctcaataaattcagttttgtaatcttttttaaaaaggtcactgaatttattttaatatttactattgtatttggtagagtgaatttcccactgtataataagtatttatttgtaattcacaagtgatagagctatcttaatttgaattattgctttggtcttaatggtggcaaaatgtttaattttgtctttggaaaaaataggctcggccttgattatagaccatttaatatttctcagcaaatgaaggtatttgcattttacaagtgttttgaatgtcacacaaaatatttttcacatctgggagtcaagttcaagacagtgctttggttttaaaaaaatctaatgaaggcacaggataggccagacccttattaggttttcctttagaataagtgtaaagaccaagtgtcactgatacgcttgtccagattttcttgtggactttggccagtatttagagtttatattcatgttacataaagtgaaagaaacttgctataattaggccatcaaaatatatcctgccactcctggtaactcagcagaggaggagataaatttacaaaataatgtaatatctctacattgttacatgttttcaactattttttatcaacaaagatttgttaatcacttcctatgtgtcagaaactgttctaagtggtgggatcagcaatgagcaagataagtccctgttcgtctgtggaagactgataggaacaagtcgatgaaataatgtctgctggtcacagagtgtccactgaccaaatgatctctcaggcttatttcagctctaaaatatagttctttaaaacgttaaaaaaaaaaaaaaaaaaaaaa

SEQ ID NO: 207 - DNA, 3665 bp, Homo sapiens
gcggggcgaggcggggagggggccggccggaggcagaggctggagggaggcggcggggacagtttgttgtgctcggaacatggcgggcgtcggcgacgcggccgctccgggagaaggcggcggtggcggcgtggacggcccgcagcgggacggccgcggcgaggcggagcagccgggcggcagcggcggacaggggcccccgccggcgcctcagctcacagagacgctgggcttctacgagagcgaccggcggcgggagaggcgccggggccgcacagagctttcattgttgaggttcctcagtgctgaactaacaagagggtacttccttgaacataatgaggccaagtatacagaaagaagagaaagagtatacacttgtttgcgaataccaagagaattggaaaagctgatggtttttggaatctttctgtgcctggatgcgtttttgtatgtgttcaccctgcttcctttaagagttttcctggcactattcaggctcctcactttgccttgctatggcttaagggacagacgtttgcttcagcctgcccaggtgtgtgacattttgaagggtgtcattttggtaatctgctattttatgatgcactatgttgactactccatgatgtaccacctgataagggggcagtccgtcatcaagctctacatcatctacaacatgctggaggtagctgatcgtctgttttcatcttttggacaagacatattagatgctctctattggacagcaacagagcctaaagaaagaaaaagagcccacattgggtttgttgaaattaaaggaagtgttttcaagaagtttgaaaagaacaatctctttcaaatgtcaaatagcgatattaaggaacgattcacaaattatgtgcttttactgatagtgtgtctaagaaacatggaacagttttcttggaatccagatcatctctgggtgttgtttccagatgtctgtatggtaattgcatcagaaattgccgtggatattgtaaaacatgcctttattactaaattcaatgacattactgcagatgtctacagtgaatatagagccagtcttgcttttgaccttgttagcagccgacagaaaaatgcatacactgattacagtgactctgtagcacggaggatgggctttattcctctcccactagctgttttactcatcagagttgtaacaagctcaattaaagtgcaaggaatcctgtcttatgcctgtgtcatactcttctattttgggttgatatccctgaaagtacttaatagcatcgtgctgttggggaaatcgtgccagtatgtgaaggaagccaaaatggaagagaagctgtcgaatcctcccgcaacctgcactccaggcaagccgtccagtaaatcacagaacaaatgtaaaccctctcaaggcctttccacagaagaaaacctgtctgcctccatcaccaaacaacctattcatcaaaaggaaaatatcataccattacttgtgacaagcaattctgatcagtttttgacaactccagatggtgacgagaaggacataacgcaggacaattctgaattaaaacacagatcctcaaagaaagatttgttagagatagacaggttcacaatttgtggaaaccgaattgactgaatctgtggcttcatgcgctgaagaagctgggtcctggggcaacaagtgctgtgttgccaggacaaatagatgctaaacatggcacttaaatatttatttaaaaacttaaattattattggcaagcaaatcttagtatctttcttccagtaatatggcctggctgagggtcagaccacaggacaggagcgacctccggccttgactgtctgggaagcttgatggattataaaacttcctcctgcctggccaagcagcagcatcatttccaggacccaacaaaggcaacatcaaaatctgttttgctttgtcagtctgggcttccagaatgttgaatttgcctcaaggcctcttcagtataaggaaatacctggaaaactgtgaaacttttaccacgacgtaatctttccagtctcatactattttcacaaacagttttcaaacgttacttcatctgccaaagcattaaaaaaattaaacataagtcaagataaatgttcttaccaccagaataacccttaaagatgtatcttaattaatcagaataaaaggctaccttaaataagacatgatgaatagtagcattttgtagggttaaaaaaaaatgctaaactagtttatttattaaaaaaataattaatgaaggctatgcattactgggaaaaatccttcataatttttcagtttactctttaaagcaaaatgtgagctgtatgtcatttaattggtggataaaacaaatttccttacaaaagggcactttttacaccaaggaagcagagcagtgttaactttaaggtatacttaactgattttgctttaaaactaattacttcataaattattacagctaaaaggattcgatgttgaacaggctgaaaaattgtcaatgtacaaaattcaaaactgtcaactttaactgtaaagtaaatgctccaagtgtgttagacagcatcatcttgcttgggcttaccaaatgcattagtctttgtgtttgggtcgacagcgagtgtgcctgtgctggggcagggtgtgtgttctgtgggagggtgtctgtggggatgtgactatcagggtgggcctgtgctggggatggggcaggcctgggtctggagaggattttgtgtgaaagtaaatggggtgtttgaggcgtatgggtggctgttggtgtggggaggcatctgtgtatggctgttgggaacagcaaccaaaaggtgctttttggttttatttgagatgaagattgtgtttccgcttaattactagtttgtggtctatatcatagaagttatttcccaccccattttatcttgacaaccgtgtttgcatttctgtaaaacttctacaacttctggtgtcagaactgtccagaagatggtactgttaactgttatttcctttgatgttttgattttgaagtttagctctcatgcaaatgtttcaggcgtacatacataggcagaaagcaatttttaggtgatttgtctgtttcttggatgaaatataaagcaagctttaatgttctgacttgttcatttgaaatacaaaaaagtaagtgaattttaatgttttgcattaactaaagaaatctgaagattaatgttgaggaaattgtatggacatgcctttgtgaaaccaggaagtattttaagttaaaaatgaaaaaggttttaattgctttgtgtgtgttttaatggagccccattttagaattattttttccatctccctttaccaacaaaaggaacaatgccaccgtgaatggaatagtttggggaaagctttgccaaacacaaccctgatttcagagcaggaacatggtttggatagatcttcagttccgcttgaattattctgttactgcgctgtcattttcagaagatttccattcctttgcagatgctgttgggagttcgggattatgttcatttcttctgttttaatggcattcagtactaattttataagtgcatcttgtgtgaatctcaataaattcagttttgtaatcttttttaaaaa

SEQ ID NO: 208 - DNA, 3616 bp, Homo sapiens
gttgtgctcggaacatggcgggcgtcggcgacgcggccgctccgggagaaggcggcggtggcggcgtggacggcccgcagcgggacggccgcggcgaggcggagcagccgggcggcagcggcggacaggggcccccgccggcgcctcagctcacagagacgctgggcttctacgagagcgaccggcggcgggagaggcgccggggccgcacagagctttcattgttgaggttcctcagtgctgaactaacaagagggtacttccttgaacataatgaggccaagtatacagaaagaagagaaagagtatacacttgtttgcgaataccaagagaattggaaaagggacagacgtttgcttcagcctgcccaggtgtgtgacattttgaagggtgtcattttggtaatctgctattttatgatgcactatgttgactactccatgatgtaccacctgataagggggcagtccgtcatcaagctctacatcatctacaacatgctggaggtagctgatcgtctgttttcatcttttggacaagacatattagatgctctctattggacagcaacagagcctaaagaaagaaaaagagcccacattggggtgattcctcactttttcatggctgttctctatgtctttttgcatgcaattcttataatggttcaagcaacaactctcaatgtagcttttaactcacacaacaagtctttgcttactatcatgatgtctaataattttgttgaaattaaaggaagtgttttcaagaagtttgaaaagaacaatctctttcaaatgtcaaatagcgatattaaggaacgattcacaaattatgtgcttttactgatagtgtgtctaagaaacatggaacagttttcttggaatccagatcatctctgggtgttgtttccagatgtctgtatggtaattgcatcagaaattgccgtggatattgtaaaacatgcctttattactaaattcaatgacattactgcagatgtctacagtgaatatagagccagtcttgcttttgaccttgttagcagccgacagaaaaatgcatacactgattacagtgactctgtagcacggaggatgggctttattcctctcccactagctgttttactcatcagagttgtaacaagctcaattaaagtgcaaggaatcctgtcttatgcctgtgtcatactcttctattttgggttgatatccctgaaagtacttaatagcatcgtgctgttggggaaatcgtgccagtatgtgaaggaagccaaaatggaagagaagctgtcgaatcctcccgcaacctgcactccaggcaagccgtccagtaaatcacagaacaaatgtaaaccctctcaaggcctttccacagaagaaaacctgtctgcctccatcaccaaacaacctattcatcaaaaggaaaatatcataccattacttgtgacaagcaattctgatcagtttttgacaactccagatggtgacgagaaggacataacgcaggacaattctgaattaaaacacagatcctcaaagaaagatttgttagagatagacaggttcacaatttgtggaaaccgaattgactgaatctgtggcttcatgcgctgaagaagctgggtcctggggcaacaagtgctgtgttgccaggacaaatagatgctaaacatggcacttaaatatttatttaaaaacttaaattattattggcaagcaaatcttagtatctttcttccagtaatatggcctggctgagggtcagaccacaggacaggagcgacctccggccttgactgtctgggaagcttgatggattataaaacttcctcctgcctggccaagcagcagcatcatttccaggacccaacaaaggcaacatcaaaatctgttttgctttgtcagtctgggcttccagaatgttgaatttgcctcaaggcctcttcagtataaggaaatacctggaaaactgtgaaacttttaccacgacgtaatctttccagtctcatactattttcacaaacagttttcaaacgttacttcatctgccaaagcattaaaaaaattaaacataagtcaagataaatgttcttaccaccagaataacccttaaagatgtatcttaattaatcagaataaaaggctaccttaaataagacatgatgaatagtagcattttgtagggttaaaaaaaaatgctaaactagtttatttattaaaaaaataattaatgaaggctatgcattactgggaaaaatccttcataatttttcagtttactctttaaagcaaaatgtgagctgtatgtcatttaattggtggataaaacaaatttccttacaaaagggcactttttacaccaaggaagcagagcagtgttaactttaaggtatacttaactgattttgctttaaaactaattacttcataaattattacagctaaaaggattcgatgttgaacaggctgaaaaattgtcaatgtacaaaattcaaaactgtcaactttaactgtaaagtaaatgctccaagtgtgttagacagcatcatcttgcttgggcttaccaaatgcattagtctttgtgtttgggtcgacagcgagtgtgcctgtgctggggcagggtgtgtgttctgtgggagggtgtctgtggggatgtgactatcagggtgggcctgtgctggggatggggcaggcctgggtctggagaggattttgtgtgaaagtaaatggggtgtttgaggcgtatgggtggctgttggtgtggggaggcatctgtgtatggctgttgggaacagcaaccaaaaggtgctttttggttttatttgagatgaagattgtgtttccgcttaattactagtttgtggtctatatcatagaagttatttcccaccccattttatcttgacaaccgtgtttgcatttctgtaaaacttctacaacttctggtgtcagaactgtccagaagatggtactgttaactgttatttcctttgatgttttgattttgaagtttagctctcatgcaaatgtttcaggcgtacatacataggcagaaagcaatttttaggtgatttgtctgtttcttggatgaaatataaagcaagctttaatgttctgacttgttcatttgaaatacaaaaaagtaagtgaattttaatgttttgcattaactaaagaaatctgaagattaatgttgaggaaattgtatggacatgcctttgtgaaaccaggaagtattttaagttaaaaatgaaaaaggttttaattgctttgtgtgtgttttaatggagccccattttagaattattttttccatctccctttaccaacaaaaggaacaatgccaccgtgaatggaatagtttggggaaagctttgccaaacacaaccctgatttcagagcaggaacatggtttggatagatcttcagttccgcttgaattattctgttactgcgctgtcattttcagaagatttccattcctttgcagatgctgttgggagttcgggattatgttcatttcttctgttttaatggcattcagtactaattttataagtgcatcttgtgtgaatctcaataaattcagttttgtaatcttttttaaaaa

SEQ ID NO: 209 - DNA, 3566 bp, Homo sapiens
cgcgccaggccaggtgtgccctagaaggggtctgcggccgggaaagttctgtccgggtccttgcatcgccctcggaaggtcttaggttagcgggcatctcccacgtctcggagcccaaacgtgagaagcacacggctgatttcttaattatattcatgccaagagctttcattgttgaggttcctcagtgctgaactaacaagagggtacttccttgaacataatgaggccaagtatacagaaagaagagaaagagtatacacttgtttgcgaataccaagagaattggaaaagggacagacgtttgcttcagcctgcccaggtgtgtgacattttgaagggtgtcattttggtaatctgctattttatgatgcactatgttgactactccatgatgtaccacctgataagggggcagtccgtcatcaagctctacatcatctacaacatgctggaggtagctgatcgtctgttttcatcttttggacaagacatattagatgctctctattggacagcaacagagcctaaagaaagaaaaagagcccacattggggtgattcctcactttttcatggctgttctctatgtctttttgcatgcaattcttataatggttcaagcaacaactctcaatgtagcttttaactcacacaacaagtctttgcttactatcatgatgtctaataattttgttgaaattaaaggaagtgttttcaagaagtttgaaaagaacaatctctttcaaatgtcaaatagcgatattaaggaacgattcacaaattatgtgcttttactgatagtgtgtctaagaaacatggaacagttttcttggaatccagatcatctctgggtgttgtttccagatgtctgtatggtaattgcatcagaaattgccgtggatattgtaaaacatgcctttattactaaattcaatgacattactgcagatgtctacagtgaatatagagccagtcttgcttttgaccttgttagcagccgacagaaaaatgcatacactgattacagtgactctgtagcacggaggatgggctttattcctctcccactagctgttttactcatcagagttgtaacaagctcaattaaagtgcaaggaatcctgtcttatgcctgtgtcatactcttctattttgggttgatatccctgaaagtacttaatagcatcgtgctgttggggaaatcgtgccagtatgtgaaggaagccaaaatggaagagaagctgtcgaatcctcccgcaacctgcactccaggcaagccgtccagtaaatcacagaacaaatgtaaaccctctcaaggcctttccacagaagaaaacctgtctgcctccatcaccaaacaacctattcatcaaaaggaaaatatcataccattacttgtgacaagcaattctgatcagtttttgacaactccagatggtgacgagaaggacataacgcaggacaattctgaattaaaacacagatcctcaaagaaagatttgttagagatagacaggttcacaatttgtggaaaccgaattgactgaatctgtggcttcatgcgctgaagaagctgggtcctggggcaacaagtgctgtgttgccaggacaaatagatgctaaacatggcacttaaatatttatttaaaaacttaaattattattggcaagcaaatcttagtatctttcttccagtaatatggcctggctgagggtcagaccacaggacaggagcgacctccggccttgactgtctgggaagcttgatggattataaaacttcctcctgcctggccaagcagcagcatcatttccaggacccaacaaaggcaacatcaaaatctgttttgctttgtcagtctgggcttccagaatgttgaatttgcctcaaggcctcttcagtataaggaaatacctggaaaactgtgaaacttttaccacgacgtaatctttccagtctcatactattttcacaaacagttttcaaacgttacttcatctgccaaagcattaaaaaaattaaacataagtcaagataaatgttcttaccaccagaataacccttaaagatgtatcttaattaatcagaataaaaggctaccttaaataagacatgatgaatagtagcattttgtagggttaaaaaaaaatgctaaactagtttatttattaaaaaaataattaatgaaggctatgcattactgggaaaaatccttcataatttttcagtttactctttaaagcaaaatgtgagctgtatgtcatttaattggtggataaaacaaatttccttacaaaagggcactttttacaccaaggaagcagagcagtgttaactttaaggtatacttaactgattttgctttaaaactaattacttcataaattattacagctaaaaggattcgatgttgaacaggctgaaaaattgtcaatgtacaaaattcaaaactgtcaactttaactgtaaagtaaatgctccaagtgtgttagacagcatcatcttgcttgggcttaccaaatgcattagtctttgtgtttgggtcgacagcgagtgtgcctgtgctggggcagggtgtgtgttctgtgggagggtgtctgtggggatgtgactatcagggtgggcctgtgctggggatggggcaggcctgggtctggagaggattttgtgtgaaagtaaatggggtgtttgaggcgtatgggtggctgttggtgtggggaggcatctgtgtatggctgttgggaacagcaaccaaaaggtgctttttggttttatttgagatgaagattgtgtttccgcttaattactagtttgtggtctatatcatagaagttatttcccaccccattttatcttgacaaccgtgtttgcatttctgtaaaacttctacaacttctggtgtcagaactgtccagaagatggtactgttaactgttatttcctttgatgttttgattttgaagtttagctctcatgcaaatgtttcaggcgtacatacataggcagaaagcaatttttaggtgatttgtctgtttcttggatgaaatataaagcaagctttaatgttctgacttgttcatttgaaatacaaaaaagtaagtgaattttaatgttttgcattaactaaagaaatctgaagattaatgttgaggaaattgtatggacatgcctttgtgaaaccaggaagtattttaagttaaaaatgaaaaaggttttaattgctttgtgtgtgttttaatggagccccattttagaattattttttccatctccctttaccaacaaaaggaacaatgccaccgtgaatggaatagtttggggaaagctttgccaaacacaaccctgatttcagagcaggaacatggtttggatagatcttcagttccgcttgaattattctgttactgcgctgtcattttcagaagatttccattcctttgcagatgctgttgggagttcgggattatgttcatttcttctgttttaatggcattcagtactaattttataagtgcatcttgtgtgaatctcaataaattcagttttgtaatcttttttaaaaa

SEQ ID NO: 210 - DNA, 4901 bp, Homo sapiens
caatgttacagtttctataagctgtaggtttttattctcattttaaaagaatttttaaaacttgcatttgtattcatattgcagttacagattagttttaaatgaaaaaaggttttgagatggatgtcttcttgaatatagagtgaacccaacgttttaattctcaagctgtaaacagcaactgaaccataactccattaaatttcttccaactaaaaaattacttctgttgtccaaaaggggctgtgttagccgttatttcctgaagttcatgcaaataactaagttgtgaggctgattacatcattgattgtacttgagtactgaaattttaaaactacttaaggggcataaagttgatcagatgcgattctaattgatttgctgattcccagaactggacgtaggttctatttgaagcagtctatatttttggaaaattacagacggtcttgtttggtctttttcaattaaccacttaaaaattctcaaccatactttatttggtttagttctcagttaaacatttgctttcaagagtatttactttcttcattggcaggatctcagtaagacaaaatagcaaatctctcaactgtctgtttacttacttagacttgaatattaaaagcactctgttgtaaatagagatagatgtagccaggcttcactatactttctttaaaacatttctcagttgcaggaaagccaccattttaaaagcctttttttgttgtttgcgtggagaggaaatgaagttgtttgaagcctattgatgagcacagatcttgagcttgcagtatcacttaacacttcttccctggctttttctgggactggatacctggacttccatggacttcattataccacgtatccattcttcaccaacatggttcaccatgtttaaggctggattttttttaacccatagttgcaggaagtcattatcagggagatgcctccaggtttagctgttggggtagtccttgttctttccccagttccattgattttgtgtgaggagatgtcagtggccactcctgctttaccaagtcacactagccttggcgatcaggatttaggtgagaattccaaattccaggagtatttcagctggagccactggccagtgttctctctgagcctccacataagcccctccttcttttcccctggtgtccctgctctgctagtcacatagctcctgccactgctagcacccagtctgtagctccgataaccatatttgttagaggtttccccactagaaacaattattttagtccttcttcaatgcccaggctgctaagtctagcgctgccctcttcccctgctctgtaatccttccttcccctccttttaagaatttttaaaaacgattccctaggagctggcctgggtcagagggcctttgagtggcagcacctggagtcatttggatagcatttctccctgaatcaaactagtcctccacggctagatgctcggacttaagagctttcattgttgaggttcctcagtgctgaactaacaagagggtacttccttgaacataatgaggccaagtatacagaaagaagagaaagagtatacacttgtttgcgaataccaagagaattggaaaagggacagacgtttgcttcagcctgcccaggtgtgtgacattttgaagggtgtcattttggtaatctgctattttatgatgcactatgttgactactccatgatgtaccacctgataagggggcagtccgtcatcaagctctacatcatctacaacatgctggaggtagctgatcgtctgttttcatcttttggacaagacatattagatgctctctattggacagcaacagagcctaaagaaagaaaaagagcccacattggggtgattcctcactttttcatggctgttctctatgtctttttgcatgcaattcttataatggttcaagcaacaactctcaatgtagcttttaactcacacaacaagtctttgcttactatcatgatgtctaataattttgttgaaattaaaggaagtgttttcaagaagtttgaaaagaacaatctctttcaaatgtcaaatagcgatattaaggaacgattcacaaattatgtgcttttactgatagtgtgtctaagaaacatggaacagttttcttggaatccagatcatctctgggtgttgtttccagatgtctgtatggtaattgcatcagaaattgccgtggatattgtaaaacatgcctttattactaaattcaatgacattactgcagatgtctacagtgaatatagagccagtcttgcttttgaccttgttagcagccgacagaaaaatgcatacactgattacagtgactctgtagcacggaggatgggctttattcctctcccactagctgttttactcatcagagttgtaacaagctcaattaaagtgcaaggaatcctgtcttatgcctgtgtcatactcttctattttgggttgatatccctgaaagtacttaatagcatcgtgctgttggggaaatcgtgccagtatgtgaaggaagccaaaatggaagagaagctgtcgaatcctcccgcaacctgcactccaggcaagccgtccagtaaatcacagaacaaatgtaaaccctctcaaggcctttccacagaagaaaacctgtctgcctccatcaccaaacaacctattcatcaaaaggaaaatatcataccattacttgtgacaagcaattctgatcagtttttgacaactccagatggtgacgagaaggacataacgcaggacaattctgaattaaaacacagatcctcaaagaaagatttgttagagatagacaggttcacaatttgtggaaaccgaattgactgaatctgtggcttcatgcgctgaagaagctgggtcctggggcaacaagtgctgtgttgccaggacaaatagatgctaaacatggcacttaaatatttatttaaaaacttaaattattattggcaagcaaatcttagtatctttcttccagtaatatggcctggctgagggtcagaccacaggacaggagcgacctccggccttgactgtctgggaagcttgatggattataaaacttcctcctgcctggccaagcagcagcatcatttccaggacccaacaaaggcaacatcaaaatctgttttgctttgtcagtctgggcttccagaatgttgaatttgcctcaaggcctcttcagtataaggaaatacctggaaaactgtgaaacttttaccacgacgtaatctttccagtctcatactattttcacaaacagttttcaaacgttacttcatctgccaaagcattaaaaaaattaaacataagtcaagataaatgttcttaccaccagaataacccttaaagatgtatcttaattaatcagaataaaaggctaccttaaataagacatgatgaatagtagcattttgtagggttaaaaaaaaatgctaaactagtttatttattaaaaaaataattaatgaaggctatgcattactgggaaaaatccttcataatttttcagtttactctttaaagcaaaatgtgagctgtatgtcatttaattggtggataaaacaaatttccttacaaaagggcactttttacaccaaggaagcagagcagtgttaactttaaggtatacttaactgattttgctttaaaactaattacttcataaattattacagctaaaaggattcgatgttgaacaggctgaaaaattgtcaatgtacaaaattcaaaactgtcaactttaactgtaaagtaaatgctccaagtgtgttagacagcatcatcttgcttgggcttaccaaatgcattagtctttgtgtttgggtcgacagcgagtgtgcctgtgctggggcagggtgtgtgttctgtgggagggtgtctgtggggatgtgactatcagggtgggcctgtgctggggatggggcaggcctgggtctggagaggattttgtgtgaaagtaaatggggtgtttgaggcgtatgggtggctgttggtgtggggaggcatctgtgtatggctgttgggaacagcaaccaaaaggtgctttttggttttatttgagatgaagattgtgtttccgcttaattactagtttgtggtctatatcatagaagttatttcccaccccattttatcttgacaaccgtgtttgcatttctgtaaaacttctacaacttctggtgtcagaactgtccagaagatggtactgttaactgttatttcctttgatgttttgattttgaagtttagctctcatgcaaatgtttcaggcgtacatacataggcagaaagcaatttttaggtgatttgtctgtttcttggatgaaatataaagcaagctttaatgttctgacttgttcatttgaaatacaaaaaagtaagtgaattttaatgttttgcattaactaaagaaatctgaagattaatgttgaggaaattgtatggacatgcctttgtgaaaccaggaagtattttaagttaaaaatgaaaaaggttttaattgctttgtgtgtgttttaatggagccccattttagaattattttttccatctccctttaccaacaaaaggaacaatgccaccgtgaatggaatagtttggggaaagctttgccaaacacaaccctgatttcagagcaggaacatggtttggatagatcttcagttccgcttgaattattctgttactgcgctgtcattttcagaagatttccattcctttgcagatgctgttgggagttcgggattatgttcatttcttctgttttaatggcattcagtactaattttataagtgcatcttgtgtgaatctcaataaattcagttttgtaatcttttttaaaaa

SEQ ID NO: 211 - DNA, 3692 bp, Homo sapiens
gggcggcagcggcggacaggggcccccgccggcgcctcagctcacagagacgctgggcttctacgagagcgaccggcggcgggagaggcgccggggccgcacagagctttcattgttgaggttcctcagtgctgaactaacaagagggtacttccttgaacataatgaggccaagtatacagaaagaagagaaagagtatacacttgtttgcgaataccaagagaattggaaaagctgatggtttttggaatctttctgtgcctggatgcgtttttgtatgtgttcaccctgcttcctttaagagttttcctggcactattcaggctcctcactttgccttgctatggcttaagaccgaagggaggagcactttcacttcctttatagaatggaatgtggtggcacagggactccttgtgggacagacgtttgcttcagcctgcccaggtgtgtgacattttgaagggtgtcattttggtaatctgctattttatgatgcactatgttgactactccatgatgtaccacctgataagggggcagtccgtcatcaagctctacatcatctacaacatgctggaggtagctgatcgtctgttttcatcttttggacaagacatattagatgctctctattggacagcaacagagcctaaagaaagaaaaagagcccacattggggtgattcctcactttttcatggctgttctctatgtctttttgcatgcaattcttataatggttcaagcaacaactctcaatgtagcttttaactcacacaacaagtctttgcttactatcatgatgtctaataattttgttgaaattaaaggaagtgttttcaagaagtttgaaaagaacaatctctttcaaatgtcaaatagcgatattaaggaacgattcacaaattatgtgcttttactgatagtgtgtctaagaaacatggaacagttttcttggaatccagatcatctctgggtgttgtttccagatgtctgtatggtaattgcatcagaaattgccgtggatattgtaaaacatgcctttattactaaattcaatgacattactgcagatgtctacagtgaatatagagccagtcttgcttttgaccttgttagcagccgacagaaaaatgcatacactgattacagtgactctgtagcacggaggatgggctttattcctctcccactagctgttttactcatcagagttgtaacaagctcaattaaagtgcaaggaatcctgtcttatgcctgtgtcatactcttctattttgggttgatatccctgaaagtacttaatagcatcgtgctgttggggaaatcgtgccagtatgtgaaggaagccaaaatggaagagaagctgtcgaatcctcccgcaacctgcactccaggcaagccgtccagtaaatcacagaacaaatgtaaaccctctcaaggcctttccacagaagaaaacctgtctgcctccatcaccaaacaacctattcatcaaaaggaaaatatcataccattacttgtgacaagcaattctgatcagtttttgacaactccagatggtgacgagaaggacataacgcaggacaattctgaattaaaacacagatcctcaaagaaagatttgttagagatagacaggttcacaatttgtggaaaccgaattgactgaatctgtggcttcatgcgctgaagaagctgggtcctggggcaacaagtgctgtgttgccaggacaaatagatgctaaacatggcacttaaatatttatttaaaaacttaaattattattggcaagcaaatcttagtatctttcttccagtaatatggcctggctgagggtcagaccacaggacaggagcgacctccggccttgactgtctgggaagcttgatggattataaaacttcctcctgcctggccaagcagcagcatcatttccaggacccaacaaaggcaacatcaaaatctgttttgctttgtcagtctgggcttccagaatgttgaatttgcctcaaggcctcttcagtataaggaaatacctggaaaactgtgaaacttttaccacgacgtaatctttccagtctcatactattttcacaaacagttttcaaacgttacttcatctgccaaagcattaaaaaaattaaacataagtcaagataaatgttcttaccaccagaataacccttaaagatgtatcttaattaatcagaataaaaggctaccttaaataagacatgatgaatagtagcattttgtagggttaaaaaaaaatgctaaactagtttatttattaaaaaaataattaatgaaggctatgcattactgggaaaaatccttcataatttttcagtttactctttaaagcaaaatgtgagctgtatgtcatttaattggtggataaaacaaatttccttacaaaagggcactttttacaccaaggaagcagagcagtgttaactttaaggtatacttaactgattttgctttaaaactaattacttcataaattattacagctaaaaggattcgatgttgaacaggctgaaaaattgtcaatgtacaaaattcaaaactgtcaactttaactgtaaagtaaatgctccaagtgtgttagacagcatcatcttgcttgggcttaccaaatgcattagtctttgtgtttgggtcgacagcgagtgtgcctgtgctggggcagggtgtgtgttctgtgggagggtgtctgtggggatgtgactatcagggtgggcctgtgctggggatggggcaggcctgggtctggagaggattttgtgtgaaagtaaatggggtgtttgaggcgtatgggtggctgttggtgtggggaggcatctgtgtatggctgttgggaacagcaaccaaaaggtgctttttggttttatttgagatgaagattgtgtttccgcttaattactagtttgtggtctatatcatagaagttatttcccaccccattttatcttgacaaccgtgtttgcatttctgtaaaacttctacaacttctggtgtcagaactgtccagaagatggtactgttaactgttatttcctttgatgttttgattttgaagtttagctctcatgcaaatgtttcaggcgtacatacataggcagaaagcaatttttaggtgatttgtctgtttcttggatgaaatataaagcaagctttaatgttctgacttgttcatttgaaatacaaaaaagtaagtgaattttaatgttttgcattaactaaagaaatctgaagattaatgttgaggaaattgtatggacatgcctttgtgaaaccaggaagtattttaagttaaaaatgaaaaaggttttaattgctttgtgtgtgttttaatggagccccattttagaattattttttccatctccctttaccaacaaaaggaacaatgccaccgtgaatggaatagtttggggaaagctttgccaaacacaaccctgatttcagagcaggaacatggtttggatagatcttcagttccgcttgaattattctgttactgcgctgtcattttcagaagatttccattcctttgcagatgctgttgggagttcgggattatgttcatttcttctgttttaatggcattcagtactaattttataagtgcatcttgtgtgaatctcaataaattcagttttgtaatcttttttaaaaa

SEQ ID NO: 212 - DNA, 3723 bp, Homo sapiens
gcggggcgaggcggggagggggccggccggaggcagaggctggagggaggcggcggggacagtttgttgtgctcggaacatggcgggcgtcggcgacgcggccgctccgggagaaggcggcggtggcggcgtggacggcccgcagcgggacggccgcggcgaggcggagcagccgggcggcagcggcggacaggggcccccgccggcgcctcagctcacagagacgctgggcttctacgagagcgaccggcggcgggagaggcgccggggccgcacagagctttcattgttgaggttcctcagtgctgaactaacaagagggtacttccttgaacataatgaggccaagtatacagaaagaagagaaagagtatacacttgtttgcgaataccaagagaattggaaaagctgatggtttttggaatctttctgtgcctggatgcgtttttgtatgtgttcaccctgcttcctttaagagttttcctggcactattcaggctcctcactttgccttgctatggcttaagggacagacgtttgcttcagcctgcccaggtgtgtgacattttgaagggtgtcattttggtaatctgctattttatgatgcactatgttgactactccatgatgtaccacctgataagggggcagtccgtcatcaagctctacatcatctacaacatgctggaggtagctgatcgtctgttttcatcttttggacaagacatattagatgctctctattggacagcaacagagcctaaagaaagaaaaagagcccacattggggtgattcctcactttttcatggctgttctctatgtctttttgcatgcaattcttataatggttcaagcaacaactctcaatgtagcttttaactcacacaacaagtctttgcttactatcatgatgtctaataattttgttgaaattaaaggaagtgttttcaagaagtttgaaaagaacaatctctttcaaatgtcaaatagcgatattaaggaacgattcacaaattatgtgcttttactgatagtgtgtctaagaaacatggaacagttttcttggaatccagatcatctctgggtgttgtttccagatgtctgtatggtaattgcatcagaaattgccgtggatattgtaaaacatgcctttattactaaattcaatgacattactgcagatgtctacagtgaatatagagccagtcttgcttttgaccttgttagcagccgacagaaaaatgcatacactgattacagtgactctgtagcacggaggatgggctttattcctctcccactagctgttttagttgatatccctgaaagtacttaatagcatcgtgctgttggggaaatcgtgccagtatgtgaaggaagccaaaatggaagagaagctgtcgaatcctcccgcaacctgcactccaggcaagccgtccagtaaatcacagaacaaatgtaaaccctctcaaggcctttccacagaagaaaacctgtctgcctccatcaccaaacaacctattcatcaaaaggaaaatatcataccattacttgtgacaagcaattctgatcagtttttgacaactccagatggtgacgagaaggacataacgcaggacaattctgaattaaaacacagatcctcaaagaaagatttgttagagatagacaggttcacaatttgtggaaaccgaattgactgaatctgtggcttcatgcgctgaagaagctgggtcctggggcaacaagtgctgtgttgccaggacaaatagatgctaaacatggcacttaaatatttatttaaaaacttaaattattattggcaagcaaatcttagtatctttcttccagtaatatggcctggctgagggtcagaccacaggacaggagcgacctccggccttgactgtctgggaagcttgatggattataaaacttcctcctgcctggccaagcagcagcatcatttccaggacccaacaaaggcaacatcaaaatctgttttgctttgtcagtctgggcttccagaatgttgaatttgcctcaaggcctcttcagtataaggaaatacctggaaaactgtgaaacttttaccacgacgtaatctttccagtctcatactattttcacaaacagttttcaaacgttacttcatctgccaaagcattaaaaaaattaaacataagtcaagataaatgttcttaccaccagaataacccttaaagatgtatcttaattaatcagaataaaaggctaccttaaataagacatgatgaatagtagcattttgtagggttaaaaaaaaatgctaaactagtttatttattaaaaaaataattaatgaaggctatgcattactgggaaaaatccttcataatttttcagtttactctttaaagcaaaatgtgagctgtatgtcatttaattggtggataaaacaaatttccttacaaaagggcactttttacaccaaggaagcagagcagtgttaactttaaggtatacttaactgattttgctttaaaactaattacttcataaattattacagctaaaaggattcgatgttgaacaggctgaaaaattgtcaatgtacaaaattcaaaactgtcaactttaactgtaaagtaaatgctccaagtgtgttagacagcatcatcttgcttgggcttaccaaatgcattagtctttgtgtttgggtcgacagcgagtgtgcctgtgctggggcagggtgtgtgttctgtgggagggtgtctgtggggatgtgactatcagggtgggcctgtgctggggatggggcaggcctgggtctggagaggattttgtgtgaaagtaaatggggtgtttgaggcgtatgggtggctgttggtgtggggaggcatctgtgtatggctgttgggaacagcaaccaaaaggtgctttttggttttatttgagatgaagattgtgtttccgcttaattactagtttgtggtctatatcatagaagttatttcccaccccattttatcttgacaaccgtgtttgcatttctgtaaaacttctacaacttctggtgtcagaactgtccagaagatggtactgttaactgttatttcctttgatgttttgattttgaagtttagctctcatgcaaatgtttcaggcgtacatacataggcagaaagcaatttttaggtgatttgtctgtttcttggatgaaatataaagcaagctttaatgttctgacttgttcatttgaaatacaaaaaagtaagtgaattttaatgttttgcattaactaaagaaatctgaagattaatgttgaggaaattgtatggacatgcctttgtgaaaccaggaagtattttaagttaaaaatgaaaaaggttttaattgctttgtgtgtgttttaatggagccccattttagaattattttttccatctccctttaccaacaaaaggaacaatgccaccgtgaatggaatagtttggggaaagctttgccaaacacaaccctgatttcagagcaggaacatggtttggatagatcttcagttccgcttgaattattctgttactgcgctgtcattttcagaagatttccattcctttgcagatgctgttgggagttcgggattatgttcatttcttctgttttaatggcattcagtactaattttataagtgcatcttgtgtgaatctcaataaattcagttttgtaatcttttttaaaaa

SEQ ID NO: 213 - DNA, 3588 bp, Homo sapiens
gcggggcgaggcggggagggggccggccggaggcagaggctggagggaggcggcggggacagtttgttgtgctcggaacatggcgggcgtcggcgacgcggccgctccgggagaaggcggcggtggcggcgtggacggcccgcagcgggacggccgcggcgaggcggagcagccgggcggcagcggcggacaggggcccccgccggcgcctcagctcacagagacgctgggcttctacgagagcgaccggcggcgggagaggcgccggggccgcacagagctttcattgttgaggttcctcagtgctgaactaacaagagggtacttccttgaacataatgaggccaagtatacagaaagaagagaaagagtatacacttgtttgcgaataccaagagaattggaaaagctgatggtttttggaatctttctgtgcctggatgcgtttttgtatgtgttcaccctgcttcctttaagagttttcctggcactattcaggctcctcactttgccttgctatggcttaagggacagacgtttgcttcagcctgcccaggtgtgtgacattttgaagggtgtcattttggtaatctgctattttatgatgcactatgttgactactccatgatgtaccacctgataagggggcagtccgtcatcaagctctacatcatctacaacatgctggaggtagctgatcgtctgttttcatcttttggacaagacatattagatgctctctattggacagcaacagagcctaaagaaagaaaaagagcccacattgggtttgttgaaattaaaggaagtgttttcaagaagtttgaaaagaacaatctctttcaaatgtcaaatagcgatattaaggaacgattcacaaattatgtgcttttactgatagtgtgtctaagaaacatggaacagttttcttggaatccagatcatctctgggtgttgtttccagatgtctgtatggtaattgcatcagaaattgccgtggatattgtaaaacatgcctttattactaaattcaatgacattactgcagatgtctacagtgaatatagagccagtcttgcttttgaccttgttagcagccgacagaaaaatgcatacactgattacagtgactctgtagcacggaggatgggctttattcctctcccactagctgttttagttgatatccctgaaagtacttaatagcatcgtgctgttggggaaatcgtgccagtatgtgaaggaagccaaaatggaagagaagctgtcgaatcctcccgcaacctgcactccaggcaagccgtccagtaaatcacagaacaaatgtaaaccctctcaaggcctttccacagaagaaaacctgtctgcctccatcaccaaacaacctattcatcaaaaggaaaatatcataccattacttgtgacaagcaattctgatcagtttttgacaactccagatggtgacgagaaggacataacgcaggacaattctgaattaaaacacagatcctcaaagaaagatttgttagagatagacaggttcacaatttgtggaaaccgaattgactgaatctgtggcttcatgcgctgaagaagctgggtcctggggcaacaagtgctgtgttgccaggacaaatagatgctaaacatggcacttaaatatttatttaaaaacttaaattattattggcaagcaaatcttagtatctttcttccagtaatatggcctggctgagggtcagaccacaggacaggagcgacctccggccttgactgtctgggaagcttgatggattataaaacttcctcctgcctggccaagcagcagcatcatttccaggacccaacaaaggcaacatcaaaatctgttttgctttgtcagtctgggcttccagaatgttgaatttgcctcaaggcctcttcagtataaggaaatacctggaaaactgtgaaacttttaccacgacgtaatctttccagtctcatactattttcacaaacagttttcaaacgttacttcatctgccaaagcattaaaaaaattaaacataagtcaagataaatgttcttaccaccagaataacccttaaagatgtatcttaattaatcagaataaaaggctaccttaaataagacatgatgaatagtagcattttgtagggttaaaaaaaaatgctaaactagtttatttattaaaaaaataattaatgaaggctatgcattactgggaaaaatccttcataatttttcagtttactctttaaagcaaaatgtgagctgtatgtcatttaattggtggataaaacaaatttccttacaaaagggcactttttacaccaaggaagcagagcagtgttaactttaaggtatacttaactgattttgctttaaaactaattacttcataaattattacagctaaaaggattcgatgttgaacaggctgaaaaattgtcaatgtacaaaattcaaaactgtcaactttaactgtaaagtaaatgctccaagtgtgttagacagcatcatcttgcttgggcttaccaaatgcattagtctttgtgtttgggtcgacagcgagtgtgcctgtgctggggcagggtgtgtgttctgtgggagggtgtctgtggggatgtgactatcagggtgggcctgtgctggggatggggcaggcctgggtctggagaggattttgtgtgaaagtaaatggggtgtttgaggcgtatgggtggctgttggtgtggggaggcatctgtgtatggctgttgggaacagcaaccaaaaggtgctttttggttttatttgagatgaagattgtgtttccgcttaattactagtttgtggtctatatcatagaagttatttcccaccccattttatcttgacaaccgtgtttgcatttctgtaaaacttctacaacttctggtgtcagaactgtccagaagatggtactgttaactgttatttcctttgatgttttgattttgaagtttagctctcatgcaaatgtttcaggcgtacatacataggcagaaagcaatttttaggtgatttgtctgtttcttggatgaaatataaagcaagctttaatgttctgacttgttcatttgaaatacaaaaaagtaagtgaattttaatgttttgcattaactaaagaaatctgaagattaatgttgaggaaattgtatggacatgcctttgtgaaaccaggaagtattttaagttaaaaatgaaaaaggttttaattgctttgtgtgtgttttaatggagccccattttagaattattttttccatctccctttaccaacaaaaggaacaatgccaccgtgaatggaatagtttggggaaagctttgccaaacacaaccctgatttcagagcaggaacatggtttggatagatcttcagttccgcttgaattattctgttactgcgctgtcattttcagaagatttccattcctttgcagatgctgttgggagttcgggattatgttcatttcttctgttttaatggcattcagtactaattttataagtgcatcttgtgtgaatctcaataaattcagttttgtaatcttttttaaaaa

SEQ ID NO: 214 - DNA, 3610 bp, Homo sapiens
cagtttgttgtgctcggaacatggcgggcgtcggcgacgcggccgctccgggagaaggcggcggtggcggcgtggacggcccgcagcgggacggccgcggcgaggcggagcagccgggcggcagcggcggacaggggcccccgccggcgcctcagctcacagagacgctgggcttctacgagagcgaccggcggcgggagaggcgccggggccgcacagctgatggtttttggaatctttctgtgcctggatgcgtttttgtatgtgttcaccctgcttcctttaagagttttcctggcactattcaggctcctcactttgccttgctatggcttaagggacagacgtttgcttcagcctgcccaggtgtgtgacattttgaagggtgtcattttggtaatctgctattttatgatgcactatgttgactactccatgatgtaccacctgataagggggcagtccgtcatcaagctctacatcatctacaacatgctggaggtagctgatcgtctgttttcatcttttggacaagacatattagatgctctctattggacagcaacagagcctaaagaaagaaaaagagcccacattggggtgattcctcactttttcatggctgttctctatgtctttttgcatgcaattcttataatggttcaagcaacaactctcaatgtagcttttaactcacacaacaagtctttgcttactatcatgatgtctaataattttgttgaaattaaaggaagtgttttcaagaagtttgaaaagaacaatctctttcaaatgtcaaatagcgatattaaggaacgattcacaaattatgtgcttttactgatagtgtgtctaagaaacatggaacagttttcttggaatccagatcatctctgggtgttgtttccagatgtctgtatggtaattgcatcagaaattgccgtggatattgtaaaacatgcctttattactaaattcaatgacattactgcagatgtctacagtgaatatagagccagtcttgcttttgaccttgttagcagccgacagaaaaatgcatacactgattacagtgactctgtagcacggaggatgggctttattcctctcccactagctgttttactcatcagagttgtaacaagctcaattaaagtgcaaggaatcctgtcttatgcctgtgtcatactcttctattttgggttgatatccctgaaagtacttaatagcatcgtgctgttggggaaatcgtgccagtatgtgaaggaagccaaaatggaagagaagctgtcgaatcctcccgcaacctgcactccaggcaagccgtccagtaaatcacagaacaaatgtaaaccctctcaaggcctttccacagaagaaaacctgtctgcctccatcaccaaacaacctattcatcaaaaggaaaatatcataccattacttgtgacaagcaattctgatcagtttttgacaactccagatggtgacgagaaggacataacgcaggacaattctgaattaaaacacagatcctcaaagaaagatttgttagagatagacaggttcacaatttgtggaaaccgaattgactgaatctgtggcttcatgcgctgaagaagctgggtcctggggcaacaagtgctgtgttgccaggacaaatagatgctaaacatggcacttaaatatttatttaaaaacttaaattattattggcaagcaaatcttagtatctttcttccagtaatatggcctggctgagggtcagaccacaggacaggagcgacctccggccttgactgtctgggaagcttgatggattataaaacttcctcctgcctggccaagcagcagcatcatttccaggacccaacaaaggcaacatcaaaatctgttttgctttgtcagtctgggcttccagaatgttgaatttgcctcaaggcctcttcagtataaggaaatacctggaaaactgtgaaacttttaccacgacgtaatctttccagtctcatactattttcacaaacagttttcaaacgttacttcatctgccaaagcattaaaaaaattaaacataagtcaagataaatgttcttaccaccagaataacccttaaagatgtatcttaattaatcagaataaaaggctaccttaaataagacatgatgaatagtagcattttgtagggttaaaaaaaaatgctaaactagtttatttattaaaaaaataattaatgaaggctatgcattactgggaaaaatccttcataatttttcagtttactctttaaagcaaaatgtgagctgtatgtcatttaattggtggataaaacaaatttccttacaaaagggcactttttacaccaaggaagcagagcagtgttaactttaaggtatacttaactgattttgctttaaaactaattacttcataaattattacagctaaaaggattcgatgttgaacaggctgaaaaattgtcaatgtacaaaattcaaaactgtcaactttaactgtaaagtaaatgctccaagtgtgttagacagcatcatcttgcttgggcttaccaaatgcattagtctttgtgtttgggtcgacagcgagtgtgcctgtgctggggcagggtgtgtgttctgtgggagggtgtctgtggggatgtgactatcagggtgggcctgtgctggggatggggcaggcctgggtctggagaggattttgtgtgaaagtaaatggggtgtttgaggcgtatgggtggctgttggtgtggggaggcatctgtgtatggctgttgggaacagcaaccaaaaggtgctttttggttttatttgagatgaagattgtgtttccgcttaattactagtttgtggtctatatcatagaagttatttcccaccccattttatcttgacaaccgtgtttgcatttctgtaaaacttctacaacttctggtgtcagaactgtccagaagatggtactgttaactgttatttcctttgatgttttgattttgaagtttagctctcatgcaaatgtttcaggcgtacatacataggcagaaagcaatttttaggtgatttgtctgtttcttggatgaaatataaagcaagctttaatgttctgacttgttcatttgaaatacaaaaaagtaagtgaattttaatgttttgcattaactaaagaaatctgaagattaatgttgaggaaattgtatggacatgcctttgtgaaaccaggaagtattttaagttaaaaatgaaaaaggttttaattgctttgtgtgtgttttaatggagccccattttagaattattttttccatctccctttaccaacaaaaggaacaatgccaccgtgaatggaatagtttggggaaagctttgccaaacacaaccctgatttcagagcaggaacatggtttggatagatcttcagttccgcttgaattattctgttactgcgctgtcattttcagaagatttccattcctttgcagatgctgttgggagttcgggattatgttcatttcttctgttttaatggcattcagtactaattttataagtgcatcttgtgtgaatctcaataaattcagttttgtaatcttttttaaaaa

SEQ ID NO: 215 - DNA, 3179 bp, Homo sapiens
caagatgttttaaaaccataccccagctacctgattctaggcttgctgcgcgtacactttgccccaccaagtagctgatcgtctgttttcatcttttggacaagacatattagatgctctctattggacagcaacagagcctaaagaaagaaaaagagcccacattggggtgattcctcactttttcatggctgttctctatgtctttttgcatgcaattcttataatggttcaagcaacaactctcaatgtagcttttaactcacacaacaagtctttgcttactatcatgatgtctaataattttgttgaaattaaaggaagtgttttcaagaagtttgaaaagaacaatctctttcaaatgtcaaatagcgatattaaggaacgattcacaaattatgtgcttttactgatagtgtgtctaagaaacatggaacagttttcttggaatccagatcatctctgggtgttgtttccagatgtctgtatggtaattgcatcagaaattgccgtggatattgtaaaacatgcctttattactaaattcaatgacattactgcagatgtctacagtgaatatagagccagtcttgcttttgaccttgttagcagccgacagaaaaatgcatacactgattacagtgactctgtagcacggaggatgggctttattcctctcccactagctgttttactcatcagagttgtaacaagctcaattaaagtgcaaggaatcctgtcttatgcctgtgtcatactcttctattttgggttgatatccctgaaagtacttaatagcatcgtgctgttggggaaatcgtgccagtatgtgaaggaagccaaaatggaagagaagctgtcgaatcctcccgcaacctgcactccaggcaagccgtccagtaaatcacagaacaaatgtaaaccctctcaaggcctttccacagaagaaaacctgtctgcctccatcaccaaacaacctattcatcaaaaggaaaatatcataccattacttgtgacaagcaattctgatcagtttttgacaactccagatggtgacgagaaggacataacgcaggacaattctgaattaaaacacagatcctcaaagaaagatttgttagagatagacaggttcacaatttgtggaaaccgaattgactgaatctgtggcttcatgcgctgaagaagctgggtcctggggcaacaagtgctgtgttgccaggacaaatagatgctaaacatggcacttaaatatttatttaaaaacttaaattattattggcaagcaaatcttagtatctttcttccagtaatatggcctggctgagggtcagaccacaggacaggagcgacctccggccttgactgtctgggaagcttgatggattataaaacttcctcctgcctggccaagcagcagcatcatttccaggacccaacaaaggcaacatcaaaatctgttttgctttgtcagtctgggcttccagaatgttgaatttgcctcaaggcctcttcagtataaggaaatacctggaaaactgtgaaacttttaccacgacgtaatctttccagtctcatactattttcacaaacagttttcaaacgttacttcatctgccaaagcattaaaaaaattaaacataagtcaagataaatgttcttaccaccagaataacccttaaagatgtatcttaattaatcagaataaaaggctaccttaaataagacatgatgaatagtagcattttgtagggttaaaaaaaaatgctaaactagtttatttattaaaaaaataattaatgaaggctatgcattactgggaaaaatccttcataatttttcagtttactctttaaagcaaaatgtgagctgtatgtcatttaattggtggataaaacaaatttccttacaaaagggcactttttacaccaaggaagcagagcagtgttaactttaaggtatacttaactgattttgctttaaaactaattacttcataaattattacagctaaaaggattcgatgttgaacaggctgaaaaattgtcaatgtacaaaattcaaaactgtcaactttaactgtaaagtaaatgctccaagtgtgttagacagcatcatcttgcttgggcttaccaaatgcattagtctttgtgtttgggtcgacagcgagtgtgcctgtgctggggcagggtgtgtgttctgtgggagggtgtctgtggggatgtgactatcagggtgggcctgtgctggggatggggcaggcctgggtctggagaggattttgtgtgaaagtaaatggggtgtttgaggcgtatgggtggctgttggtgtggggaggcatctgtgtatggctgttgggaacagcaaccaaaaggtgctttttggttttatttgagatgaagattgtgtttccgcttaattactagtttgtggtctatatcatagaagttatttcccaccccattttatcttgacaaccgtgtttgcatttctgtaaaacttctacaacttctggtgtcagaactgtccagaagatggtactgttaactgttatttcctttgatgttttgattttgaagtttagctctcatgcaaatgtttcaggcgtacatacataggcagaaagcaatttttaggtgatttgtctgtttcttggatgaaatataaagcaagctttaatgttctgacttgttcatttgaaatacaaaaaagtaagtgaattttaatgttttgcattaactaaagaaatctgaagattaatgttgaggaaattgtatggacatgcctttgtgaaaccaggaagtattttaagttaaaaatgaaaaaggttttaattgctttgtgtgtgttttaatggagccccattttagaattattttttccatctccctttaccaacaaaaggaacaatgccaccgtgaatggaatagtttggggaaagctttgccaaacacaaccctgatttcagagcaggaacatggtttggatagatcttcagttccgcttgaattattctgttactgcgctgtcattttcagaagatttccattcctttgcagatgctgttgggagttcgggattatgttcatttcttctgttttaatggcattcagtactaattttataagtgcatcttgtgtgaatctcaataaattcagttttgtaatcttttttaaaaa

SEQ ID NO: 216 - DNA, 2527 bp, Homo sapiens
gcacgggctggtctctgccctaatgcggcggctggcggcgagaggcgctgcaggggacgcgggggaagtggcggcgccggcagcggacagctcggacagcgcccagggccggagcccgagcccttggaggttgattgacttatgtgcaatttgggacgctggagtttaccttccctccgcagcctggaacagagcctcctctggtgttgcaaggaagaggctgaatgaggcagagaagctgagtgctgtccaggaggcccagttaaagcggctcgaggtgacaagaccccgagtgctggggagcagggagcagggccaggtgccgaggatggccaggcagccaccgccgccctgggtccatgcagccttcctcctctgcctcctcagtcttggcggagccatcgaaattcctatggatccaagcattcagaatgagctgacgcagccgccaaccatcaccaagcagtcagcgaaggatcacatcgtggacccccgtgataacatcctgattgagtgtgaagcaaaagggaaccctgcccccagcttccactggacacgaaacagcagattcttcaacatcgccaaggacccccgggtgtccatgaggaggaggtctgggaccctggtgattgacttccgcagtggcgggcggccggaggaatatgagggggaatatcagtgcttcgcccgcaacaaatttggcacggccctgtccaataggatccgcctgcaggtgtctaaatctcctctgtggcccaaggaaaacctagaccctgtcgtggtccaagagggcgctcctttgacgctccagtgcaaccccccgcctggacttccatccccggtcatcttctggatgagcagctccatggagcccatcacccaagacaaacgtgtctctcagggccataacggagacctatacttctccaacgtgatgctgcaggacatgcagaccgactacagttgtaacgcccgcttccacttcacccacaccatccagcagaagaaccctttcaccctcaaggtcctcaccacccgaggagttgcagaaagaacaccaagcttcatgtatccccagggcaccgcgagcagccagatggtgcttcgtggcatggacctcctgctggaatgcatcgcctccggggtcccaacaccagacatcgcatggtacaagaaaggtggggacctcccatctgataaggccaagtttgagaactttaataaggccctgcgtatcacaaatgtctctgaggaagactccggggagtatttctgcctggcctccaacaagatgggcagcatccggcacacgatctcggtgagagtaaaggctgctccctactggctggacgaacccaagaaccttattctggctcctggcgaggatgggagactggtgtgtcgagccaatggaaaccccaaacccactgtccagtggatggtgaatggggaacctttgcaatcggcaccacctaacccaaaccgtgaggtggccggagacaccatcatcttccgggacacccagatcagcagcagggctgtgtaccagtgcaacacctccaacgagcatggctacctgctggccaacgcctttgtcagtgtgctggatgtgccgcctcggatgctgtcgccccggaaccagctcattcgagtgattctttacaaccggacgcggctggactgccctttctttgggtctcccatccccacactgcgatggtttaagaatgggcaaggaagcaacctggatggtggcaactaccatgtttatgagaacggcagtctggaaattaagatgatccgcaaagaggaccagggcatctacacctgtgtcgccaccaacatcctgggcaaagctgaaaaccaagtccgcctggaggtcaaagaccccaccaggatctaccggatgcccgaggaccaggtggccagaaggggcaccacggtgcagctggagtgtcgggtgaagcacgacccctccctgaaactcaccgtctcctggctgaaggatgacgagccgctctatattggaaacaggatgaagaaggaagacgactccctgaccatctttggggtggcagagcgggaccagggcagttacacgtgtgtcgccagcaccgagctagaccaagacctggccaaggcctacctcaccgtgctaggtaactgcccatgctcaccctggcactgaccagccccaccccctccccagcagccagagaagcagtggcccggggcagttccgagggcagtgcctgcagtcaagtggccgggtcaggcgtggtgatctcttcttgcctcgtgatgtcagggttagggagctgccagtttcagaacaagctgtgctggacaggttacctcctgagtggagtcattaacttccccacgtctcaactgaaaggggcctgagtgatatagagaaagtggagaggggtttctcgttgtgatcattttacctttcttacagctaactccaccactaagtcaattaaaacaatccatccttaaagcaaaaaaaaaaaaaaaaaaa

SEQ ID NO: 217 - DNA, 10138 bp, Homo sapiens
gcacgggctggtctctgccctaatgcggcggctggcggcgagaggcgctgcaggggacgcgggggaagtggcggcgccggcagcggacagctcggacagcgcccagggccggagcccgagcccttggaggttgattgacttatgtgcaatttgggacgctggagtttaccttccctccgcagcctggaacagagcctcctctggtgttgcaaggaagaggctgaatgaggcagagaagctgagtgctgtccaggaggcccagttaaagcggctcgaggtgacaagaccccgagtgctggggagcagggagcagggccaggtgccgaggatggccaggcagccaccgccgccctgggtccatgcagccttcctcctctgcctcctcagtcttggcggagccatcgaaattcctatggatctgacgcagccgccaaccatcaccaagcagtcagcgaaggatcacatcgtggacccccgtgataacatcctgattgagtgtgaagcaaaagggaaccctgcccccagcttccactggacacgaaacagcagattcttcaacatcgccaaggacccccgggtgtccatgaggaggaggtctgggaccctggtgattgacttccgcagtggcgggcggccggaggaatatgagggggaatatcagtgcttcgcccgcaacaaatttggcacggccctgtccaataggatccgcctgcaggtgtctaaatctcctctgtggcccaaggaaaacctagaccctgtcgtggtccaagagggcgctcctttgacgctccagtgcaaccccccgcctggacttccatccccggtcatcttctggatgagcagctccatggagcccatcacccaagacaaacgtgtctctcagggccataacggagacctatacttctccaacgtgatgctgcaggacatgcagaccgactacagttgtaacgcccgcttccacttcacccacaccatccagcagaagaaccctttcaccctcaaggtcctcaccaaccacccttataatgactcgtccttaagaaaccaccctgacatgtacagtgcccgaggagttgcagaaagaacaccaagcttcatgtatccccagggcaccgcgagcagccagatggtgcttcgtggcatggacctcctgctggaatgcatcgcctccggggtcccaacaccagacatcgcatggtacaagaaaggtggggacctcccatctgataaggccaagtttgagaactttaataaggccctgcgtatcacaaatgtctctgaggaagactccggggagtatttctgcctggcctccaacaagatgggcagcatccggcacacgatctcggtgagagtaaaggctgctccctactggctggacgaacccaagaaccttattctggctcctggcgaggatgggagactggtgtgtcgagccaatggaaaccccaaacccactgtccagtggatggtgaatggggaacctttgcaatcggcaccacctaacccaaaccgtgaggtggccggagacaccatcatcttccgggacacccagatcagcagcagggctgtgtaccagtgcaacacctccaacgagcatggctacctgctggccaacgcctttgtcagtgtgctggatgtgccgcctcggatgctgtcgccccggaaccagctcattcgagtgattctttacaaccggacgcggctggactgccctttctttgggtctcccatccccacactgcgatggtttaagaatgggcaaggaagcaacctggatggtggcaactaccatgtttatgagaacggcagtctggaaattaagatgatccgcaaagaggaccagggcatctacacctgtgtcgccaccaacatcctgggcaaagctgaaaaccaagtccgcctggaggtcaaagaccccaccaggatctaccggatgcccgaggaccaggtggccagaaggggcaccacggtgcagctggagtgtcgggtgaagcacgacccctccctgaaactcaccgtctcctggctgaaggatgacgagccgctctatattggaaacaggatgaagaaggaagacgactccctgaccatctttggggtggcagagcgggaccagggcagttacacgtgtgtcgccagcaccgagctagaccaagacctggccaaggcctacctcaccgtgctaggacggccagaccggccccgggacctggagctgaccgacctggccgagaggagcgtgcggctgacctggatccccggggatgctaacaacagccccatcacagactacgtcgtccagtttgaagaagaccagttccaacctggggtctggcatgaccattccaagtaccccggcagcgttaactcagccgtcctccggctgtccccgtatgtcaactaccagttccgtgtcattgccatcaacgaggttgggagcagccaccccagcctcccatccgagcgctaccgaaccagtggagcaccccccgagtccaatcctggtgacgtgaagggagaggggaccagaaagaacaacatggagatcacgtggacgcccatgaatgccacctcggcctttggccccaacctgcgctacattgtcaagtggaggcggagagagactcgagaggcctggaacaacgtcacagtgtggggctctcgctacgtggtggggcagaccccagtctacgtgccctatgagatccgagtccaggctgaaaatgacttcgggaagggccctgagccagagtccgtcatcggttactccggagaagattatcccagggctgcgcccactgaagttaaagtccgagtcatgaacagcacagccatcagccttcagtggaaccgcgtctactccgacacggtccagggccagctcagagagtaccgagcctactactggagggagagcagcttgctgaagaacctgtgggtgtctcagaagagacagcaagccagcttccctggtgaccgcctccgtggcgtggtgtcccgcctcttcccctacagtaactacaagctggagatggttgtggtcaatgggagaggtgatgggcctcgcagtgagaccaaggagttcaccaccccggaaggagtacccagtgcccctaggcgtttccgagtccggcagcccaacctggagacaatcaacctggaatgggatcatcctgagcatccaaatgggatcatgattggatacactctcaaatatgtggcctttaacgggaccaaagtaggaaagcagatagtggaaaacttctctcccaatcagaccaagttcacggtgcaaagaacggaccccgtgtcacgctaccgctttaccctcagcgccaggacgcaggtgggctctggggaagccgtcacagaggagtcaccagcacccccgaatgaagcttacaccaacaaccaagcggacatcgccacccagggctggttcattgggcttatgtgcgccatcgccctcctggtgctgatcctgctcatcgtctgtttcatcaagaggagtcgcggcggcaagtacccagtacgagaaaagaaggatgttccccttggccctgaagaccccaaggaagaggatggctcatttgactatagtgatgaggacaacaagcccctgcagggcagtcagacatctctggacggcaccatcaagcagcaggagagtgacgacagcctggtggactatggcgagggtggcgagggtcagttcaatgaagacggctccttcatcggccagtacacggtcaaaaaggacaaggaggaaacagagggcaacgaaagctcagaggccacgtcacctgtcaatgctatctactctctggcctaacggagcccacccaggcacagccaccactttgcaagtgggaggaggggagaaggggagacaaaaccactgcagacctaccacgaagccaccaccaccttcagtaacaagggtacgatatgggggtctgccaagctgtgaggaccagtagccaccaagccacccacaagccccctcccaatgaccccccttcagccccgggtgccaccagtgtgggagagctggagccgtggctgagctcagctggagggagcctggccccttgcccggtctcgcagccaccccgagcgttccaccacactgtccgcccttggcctcggcacacgctcaccttttctgttggttacgggacttctcattgtcttaatttcgctttgtgcatcttcccctccagacccaatgtctctgttttcttttccttttgaaaaagagtccctggaaaagaaagaataagtggattctcccccaggagaatcctttttgcaaagataggcaaaaaggattgaatccataccagaacacgtagacaggctgtaatattcaaaccacctctgggccaatgcatttccaaaggatgcctttctcgccatatgcctcccctggcccccagcccctctgcctcggccttgtcagttgctgagctgggcttggctcctttctggaaaatgacagtatttttggcagggagaaggtgcgcaggcctccttgctgctctctggtttggttgggaggtgtgtttacctcttgctcctcattcctcccctgcccttttctctggaatatctaagatgtgagctgcattgactctgaagacgtttgaggaacaggagtgggcactgatagaaaggacttcaacgccagtgactgtgtacctccagcagaagaaaatcaggtgtctggtcttgggggcactgtgctcacttctagagagaagaaaaaggctgggtttggacttcatgcctcctcactggtgaaacccaggatgtagatagagggccacacccaccctgtccagagtagagggcacctgtccacgtggccagggcccatgctgccaccctcgaggagatggaaccctgtgatgcaaaagctttgctggtgtgtttggggcataaggcactgctccccttccatctctagcagatatcatcttctcagccaattctgtaggacactgaggctcttgtttgacatggtgtgtggatggggacttgccccaagactgagcaggtctgccctttcattggggtgtatacatatcaggggaccctgaggtggcaccgtactcagtgttgtgatgcccccacctagggaggactcaatgctctttgtatgccttatgcagcgctgatctgtccctggagttcccaggttcccagctccccccctgcaagccttgaagcctccagcaacgtctatctccaggagagcagggcagcctatgcaagtgttccggcaggaccagaagtggccactcaacacacgtcctcaccagtcaccccaaatggagacactcgcagacctgcagttctcagaccgaaggtgctgccttcatcctccccacctaatgcatttttgaaaccaaaggtacctagcctcagagacagagaaggagagggggagatcttgagtctaagaggaaccctttagctgtttctgcagctgaggtcagtttcaggagggtgaagctgatccccaggaatggatcagctgccatgggcacagcctccgatttgagcctctccggctgccagccagggggcctgggccagaccagggctctgtccttccgtgactttattaaagcaacatttgccacatgtttaagccgcaaaggtattagcaatgcttgcatcattaataatcattcagttgaaggtcaagcccatagacacacactctctgctggtaagaaaccatagcccagaactgagccaataaggttgtttgaacctgagagtgtgtaatggtcatttgggccaagcctcagctagggctgctgcctggacgcctgaggggcagcttatcacagtgcaaggggacagggtaaacagcagggggtggggtgtgagcttggagggcccctcccctggatttcctccaacacctgcttggatactaggcccactgtccctgaagggaatgtcagggaagtgtgcctgtgagctgaattaaaggactggcctttccagaaaacgctttggatctgagcagagtagtcagtttctcagacactcattccatactgcaccgtacatgccagcgtacccattgcaccgaaagcaggcccttagggcaggaagggacgatgagcaagtctgccacaccacctggtgactgggaagggctgcttctctcgtaagggtcttggggagaagtaagcccgcagcctgcctctgcacctcgttccagtgtcctgccaggctctgtactgtcctttgtgtatgaagaaaatgctgttagccctctctcaggctgctgttctgtgggtgctgagagctgccccccatcaccacgccatcacacccctctgagcagaagcaaatctgaggctgaagaattaagttttccccaagcaaggaaggcaggtggtcagagagatcaaacgctgaggcgtggggattgcaggattcaggaggcagcccctttggggaagaggagggtgcattttccatggagcccatgtcagagtccactccagctcagcaggaaagtggaattgcccagtactgcctgccagctgggtctcccaagcaactaccccaagacataccaacagtgaagccaggacagcaccatgccatcggcgctccagtctgtctggctgggaggaaagtgctgggcatcttacagtaactctagaagttcctttgactaggctgcaatcccacctatatgctcagccctaagagctgtggtttcctgtgctctcatttgtccattcattcattcattcattcattcagcaaataatctgaaatccagtctgaactaaggcctgagctgtggataccatggcgcgtgagttagatgtggtccctgccctcatggggctgacagtcctaaaatcaagtgctaggacacagtggccattgagctgggagcattcttccctctaccgcttaagccactgatggctgcgagcttgaagagagggattctgagggagagcttggtccatctggtcaccaaggctgggcgggacagagcagtcaagaaccacggtgtggcttgagaaacagtcctgcttcctgagcctctttgctctgcctcttggggcaagctccttaacctgtctgtatttttatgcctctgtctcccattcagttcctccttgaatacctctttctacagagaggcacgggctcccctgaaggattgtcgaggccagggttcgggaagtacactgccatcggtcaggggacagctgcctcccaccttgcctgggtgatggtgaatgggactcatcttttcctgccttgcttttgaggagatggttgaatttaagctaacaggaaagccaaaccagcaccctcctttgtgctctgagaggttggagacatctggtccaccccattgcccctgcccctggcaagccctgaagtcgggagaggtgaccacaggtctgaaaatcagccagtgccaacattgcttgccctgcaaggtgcaactgagcccacatagcgcattcatagtttccctgaccacagccttgggaagacggtggaaacccgaggatgtgtgggtttcccagctaacggacaagctcccctgccacacccagtgcccacgcatgctcacatacatacagcagaccacaaccctgttgccaagcagtgcttccaagggatagcgatccagattccaacattgtcttggagagggttagtccacatccaagttgcgtgagataagatgcaaagggctctgtgtggatgaggaacgcaccttagaggagtgggaaaggccaccagggttgggccctgtttaggtaattcctgttggcagcacctagagagagcatctgagctgaaggagtgggaaactttgcccaagcaatggcacgggcagcgggctctttctggcgccctgtgctggagcagggccaagtcttagggcatcacaaacagcccatttgatggagggagcagggacatagcacatttttgtctgtctttgtgaggctgctttgctaactctctgaggagaggaagcctctcgggctttccgtcggctggggctagtgccagagaatcccttctcagtggccagcaggttcctgggaggccggcacaaggcaccgctccccactcatgacaccttggtgcagagtgacctcctgcccagtcaccactccggccagccccagccaaacacacaaaagcccatggttgcggttgcatctacaccgttagttggcaaaggatcctgcttgagctctgcgtggtggccaaggagtagcatggaggagggccctgattttaaaaaggaaaaatagagaggcctcaaaacaatgaaacaaagagcttgatatgtcaagaggagaccaaggccctgggaggcataggcaagccgggcagagtcagaccagtgccctcccttgaccatctcctagcattccttaacctagacaggggctaccccatgtgagtccaagccagactttgtggctgtccccagcctgcacagcccaagcccagggaagtgtcctttctttcccttccttactaataatgggccttcctgagacacattcagagaaggatcagagagaaaggagaaccatccaggagagccacaagcgtccaccaaacagtgtctcaggcctcacctgaagctgctgttcctcctatcagcacactagtattaaatgggtgttccataatgaggagaatggaaataggtacaaggcatctagcttaggacagaatcggatttcggcatgtgaaggaatcccagagctgatctcattgaaatgatctatcgtacagacaaggatatgcaaatccacagaagtgaagggatttttgctcaagatcacatagctggtaaactaaggtaaggttagggcttgaacttgggccttctgactccttgtccagtcagtgttctttcatctcaccacagctgcctcctttgaaacagaggtattaagatctgtccttctggttcaccctctcatacctctttactgcgtctcccacatcccccacatgcctcccaaaatgaaagacaaacaggattgtttctgagaccaagatcagtctgtctgtgatcagcctgtgtgtggttcacccagtcatgcaattaagggcagatctgggccagtggaataggatagctgattggtgtttgttactgtgaaccctagaccgtaccccgtagaatggtgtctcttgctttgtaacacatcgggccttcagtgtgctgtattcctcagaagtgagggcatctcggtccattctgcccatggccacagggtgcagagaggcagcagggcccatgcaagctgccaccctgggatttgctgggctggagttcaacagatgtaaagacttcagtgaagcaataaacacaaaactctgggagaagatatccagaattttgtacattactctgtttctttttcaaaaatgaggcagatcagatgcccctgagctgcccctttttttctgattcccaactgcaatgtcctcagtcagtgttgtccctctgcccggctccccagctctttgccaacctcttcacactccccttgagctgagcatcagtcgcctgtgacgtggccaccttctgtcctgctcccactcccgacccatgctggaccccggaggacctcctgccccgcccccaccacacacccatatcccccaccattccaatttgttctttcccgtggggaattttttttcccagcgtctccatcccttcctacatatccacacacacacaaattggtctgatcttttttccattggttaaacatttaactccatgccagaccttgttttaacccctctcacatcatgttctttccttttttgcgagttattttgcattaaccaactttgtcagtgacagatgcgtatctgagggtgtcacacacgaccttcagcagggaagacttctgggccatggagggccgtctaatacatggacttataaactgactgcatgagcaatgaaaaggccaaattattctgaattttttttgaatcactgtaaaaaaactgatttcttttgtatagagaacactaaacgtataataaaagttgttcaaaatggaaaaaaaaaaaaaaaaaa

SEQ ID NO: 218 - DNA, 10351 bp, Homo sapiens
gcacgggctggtctctgccctaatgcggcggctggcggcgagaggcgctgcaggggacgcgggggaagtggcggcgccggcagcggacagctcggacagcgcccagggccggagcccgagcccttggaggttgattgacttatgtgcaatttgggacgctggagtttaccttccctccgcagcctggaacagagcctcctctggtgttgcaaggaagaggctgaatgaggcagagaagctgagtgctgtccaggaggcccagttaaagcggctcgaggtgacaagaccccgagtgctggggagcagggagcagggccaggtgccgaggatggccaggcagccaccgccgccctgggtccatgcagccttcctcctctgcctcctcagtcttggcggagccatcgaaattcctatggatccaagcattcagaatgagctgacgcagccgccaaccatcaccaagcagtcagcgaaggatcacatcgtggacccccgtgataacatcctgattgagtgtgaagcaaaagggaaccctgcccccagcttccactggacacgaaacagcagattcttcaacatcgccaaggacccccgggtgtccatgaggaggaggtctgggaccctggtgattgacttccgcagtggcgggcggccggaggaatatgagggggaatatcagtgcttcgcccgcaacaaatttggcacggccctgtccaataggatccgcctgcaggtgtctaaatctcctctgtggcccaaggaaaacctagaccctgtcgtggtccaagagggcgctcctttgacgctccagtgcaaccccccgcctggacttccatccccggtcatcttctggatgagcagctccatggagcccatcacccaagacaaacgtgtctctcagggccataacggagacctatacttctccaacgtgatgctgcaggacatgcagaccgactacagttgtaacgcccgcttccacttcacccacaccatccagcagaagaaccctttcaccctcaaggtcctcaccacccgaggagttgcagaaagaacaccaagcttcatgtatccccagggcaccgcgagcagccagatggtgcttcgtggcatggacctcctgctggaatgcatcgcctccggggtcccaacaccagacatcgcatggtacaagaaaggtggggacctcccatctgataaggccaagtttgagaactttaataaggccctgcgtatcacaaatgtctctgaggaagactccggggagtatttctgcctggcctccaacaagatgggcagcatccggcacacgatctcggtgagagtaaaggctgctccctactggctggacgaacccaagaaccttattctggctcctggcgaggatgggagactggtgtgtcgagccaatggaaaccccaaacccactgtccagtggatggtgaatggggaacctttgcaatcggcaccacctaacccaaaccgtgaggtggccggagacaccatcatcttccgggacacccagatcagcagcagggctgtgtaccagtgcaacacctccaacgagcatggctacctgctggccaacgcctttgtcagtgtgctggatgtgccgcctcggatgctgtcgccccggaaccagctcattcgagtgattctttacaaccggacgcggctggactgccctttctttgggtctcccatccccacactgcgatggtttaagaatgggcaaggaagcaacctggatggtggcaactaccatgtttatgagaacggcagtctggaaattaagatgatccgcaaagaggaccagggcatctacacctgtgtcgccaccaacatcctgggcaaagctgaaaaccaagtccgcctggaggtcaaagaccccaccaggatctaccggatgcccgaggaccaggtggccagaaggggcaccacggtgcagctggagtgtcgggtgaagcacgacccctccctgaaactcaccgtctcctggctgaaggatgacgagccgctctatattggaaacaggatgaagaaggaagacgactccctgaccatctttggggtggcagagcgggaccagggcagttacacgtgtgtcgccagcaccgagctagaccaagacctggccaaggcctacctcaccgtgctagctgatcaggccactccaactaaccgtttggctgccctgcccaaaggacggccagaccggccccgggacctggagctgaccgacctggccgagaggagcgtgcggctgacctggatccccggggatgctaacaacagccccatcacagactacgtcgtccagtttgaagaagaccagttccaacctggggtctggcatgaccattccaagtaccccggcagcgttaactcagccgtcctccggctgtccccgtatgtcaactaccagttccgtgtcattgccatcaacgaggttgggagcagccaccccagcctcccatccgagcgctaccgaaccagtggagcaccccccgagtccaatcctggtgacgtgaagggagaggggaccagaaagaacaacatggagatcacgtggacgcccatgaatgccacctcggcctttggccccaacctgcgctacattgtcaagtggaggcggagagagactcgagaggcctggaacaacgtcacagtgtggggctctcgctacgtggtggggcagaccccagtctacgtgccctatgagatccgagtccaggctgaaaatgacttcgggaagggccctgagccagagtccgtcatcggttactccggagaagatttacccagtgcccctaggcgtttccgagtccggcagcccaacctggagacaatcaacctggaatgggatcatcctgagcatccaaatgggatcatgattggatacactctcaaatatgtggcctttaacgggaccaaagtaggaaagcagatagtggaaaacttctctcccaatcagaccaagttcacggtgcaaagaacggaccccgtgtcacgctaccgctttaccctcagcgccaggacgcaggtgggctctggggaagccgtcacagaggagtcaccagcacccccgaatgaagctactccaaccgcagctcctcccacattgcccccgactaccgtgggtgcgacgggcgctgtgagcagtaccgatgctactgccattgctgccaccaccgaagccacaacagtccccatcatcccaactgtcgcacctaccaccatcgccaccaccaccaccgtcgccacaactactacaaccactgctgccgccaccaccaccacggagagtcctcccaccaccacctccgggactaagatacacgaatccgcccctgatgagcagtccatatggaacgtcacggtgctccccaacagtaaatgggccaacatcacctggaagcacaatttcgggcccggaactgactttgtggttgagtacatcgacagcaaccatacgaaaaaaactgtcccagttaaggcccaggctcagcctatacagctgacagacctctatcccgggatgacatacacgttgcgggtttattcccgggacaacgagggcatcagcagtaccgtcatcacctttatgaccagtacagcttacaccaacaaccaagcggacatcgccacccagggctggttcattgggcttatgtgcgccatcgccctcctggtgctgatcctgctcatcgtctgtttcatcaagaggagtcgcggcggcaagtacccagtacgagaaaagaaggatgttccccttggccctgaagaccccaaggaagaggatggctcatttgactatagtgatgaggacaacaagcccctgcagggcagtcagacatctctggacggcaccatcaagcagcaggagagtgacgacagcctggtggactatggcgagggtggcgagggtcagttcaatgaagacggctccttcatcggccagtacacggtcaaaaaggacaaggaggaaacagagggcaacgaaagctcagaggccacgtcacctgtcaatgctatctactctctggcctaacggagcccacccaggcacagccaccactttgcaagtgggaggaggggagaaggggagacaaaaccactgcagacctaccacgaagccaccaccaccttcagtaacaagggtacgatatgggggtctgccaagctgtgaggaccagtagccaccaagccacccacaagccccctcccaatgaccccccttcagccccgggtgccaccagtgtgggagagctggagccgtggctgagctcagctggagggagcctggccccttgcccggtctcgcagccaccccgagcgttccaccacactgtccgcccttggcctcggcacacgctcaccttttctgttggttacgggacttctcattgtcttaatttcgctttgtgcatcttcccctccagacccaatgtctctgttttcttttccttttgaaaaagagtccctggaaaagaaagaataagtggattctcccccaggagaatcctttttgcaaagataggcaaaaaggattgaatccataccagaacacgtagacaggctgtaatattcaaaccacctctgggccaatgcatttccaaaggatgcctttctcgccatatgcctcccctggcccccagcccctctgcctcggccttgtcagttgctgagctgggcttggctcctttctggaaaatgacagtatttttggcagggagaaggtgcgcaggcctccttgctgctctctggtttggttgggaggtgtgtttacctcttgctcctcattcctcccctgcccttttctctggaatatctaagatgtgagctgcattgactctgaagacgtttgaggaacaggagtgggcactgatagaaaggacttcaacgccagtgactgtgtacctccagcagaagaaaatcaggtgtctggtcttgggggcactgtgctcacttctagagagaagaaaaaggctgggtttggacttcatgcctcctcactggtgaaacccaggatgtagatagagggccacacccaccctgtccagagtagagggcacctgtccacgtggccagggcccatgctgccaccctcgaggagatggaaccctgtgatgcaaaagctttgctggtgtgtttggggcataaggcactgctccccttccatctctagcagatatcatcttctcagccaattctgtaggacactgaggctcttgtttgacatggtgtgtggatggggacttgccccaagactgagcaggtctgccctttcattggggtgtatacatatcaggggaccctgaggtggcaccgtactcagtgttgtgatgcccccacctagggaggactcaatgctctttgtatgccttatgcagcgctgatctgtccctggagttcccaggttcccagctccccccctgcaagccttgaagcctccagcaacgtctatctccaggagagcagggcagcctatgcaagtgttccggcaggaccagaagtggccactcaacacacgtcctcaccagtcaccccaaatggagacactcgcagacctgcagttctcagaccgaaggtgctgccttcatcctccccacctaatgcatttttgaaaccaaaggtacctagcctcagagacagagaaggagagggggagatcttgagtctaagaggaaccctttagctgtttctgcagctgaggtcagtttcaggagggtgaagctgatccccaggaatggatcagctgccatgggcacagcctccgatttgagcctctccggctgccagccagggggcctgggccagaccagggctctgtccttccgtgactttattaaagcaacatttgccacatgtttaagccgcaaaggtattagcaatgcttgcatcattaataatcattcagttgaaggtcaagcccatagacacacactctctgctggtaagaaaccatagcccagaactgagccaataaggttgtttgaacctgagagtgtgtaatggtcatttgggccaagcctcagctagggctgctgcctggacgcctgaggggcagcttatcacagtgcaaggggacagggtaaacagcagggggtggggtgtgagcttggagggcccctcccctggatttcctccaacacctgcttggatactaggcccactgtccctgaagggaatgtcagggaagtgtgcctgtgagctgaattaaaggactggcctttccagaaaacgctttggatctgagcagagtagtcagtttctcagacactcattccatactgcaccgtacatgccagcgtacccattgcaccgaaagcaggcccttagggcaggaagggacgatgagcaagtctgccacaccacctggtgactgggaagggctgcttctctcgtaagggtcttggggagaagtaagcccgcagcctgcctctgcacctcgttccagtgtcctgccaggctctgtactgtcctttgtgtatgaagaaaatgctgttagccctctctcaggctgctgttctgtgggtgctgagagctgccccccatcaccacgccatcacacccctctgagcagaagcaaatctgaggctgaagaattaagttttccccaagcaaggaaggcaggtggtcagagagatcaaacgctgaggcgtggggattgcaggattcaggaggcagcccctttggggaagaggagggtgcattttccatggagcccatgtcagagtccactccagctcagcaggaaagtggaattgcccagtactgcctgccagctgggtctcccaagcaactaccccaagacataccaacagtgaagccaggacagcaccatgccatcggcgctccagtctgtctggctgggaggaaagtgctgggcatcttacagtaactctagaagttcctttgactaggctgcaatcccacctatatgctcagccctaagagctgtggtttcctgtgctctcatttgtccattcattcattcattcattcattcagcaaataatctgaaatccagtctgaactaaggcctgagctgtggataccatggcgcgtgagttagatgtggtccctgccctcatggggctgacagtcctaaaatcaagtgctaggacacagtggccattgagctgggagcattcttccctctaccgcttaagccactgatggctgcgagcttgaagagagggattctgagggagagcttggtccatctggtcaccaaggctgggcgggacagagcagtcaagaaccacggtgtggcttgagaaacagtcctgcttcctgagcctctttgctctgcctcttggggcaagctccttaacctgtctgtatttttatgcctctgtctcccattcagttcctccttgaatacctctttctacagagaggcacgggctcccctgaaggattgtcgaggccagggttcgggaagtacactgccatcggtcaggggacagctgcctcccaccttgcctgggtgatggtgaatgggactcatcttttcctgccttgcttttgaggagatggttgaatttaagctaacaggaaagccaaaccagcaccctcctttgtgctctgagaggttggagacatctggtccaccccattgcccctgcccctggcaagccctgaagtcgggagaggtgaccacaggtctgaaaatcagccagtgccaacattgcttgccctgcaaggtgcaactgagcccacatagcgcattcatagtttccctgaccacagccttgggaagacggtggaaacccgaggatgtgtgggtttcccagctaacggacaagctcccctgccacacccagtgcccacgcatgctcacatacatacagcagaccacaaccctgttgccaagcagtgcttccaagggatagcgatccagattccaacattgtcttggagagggttagtccacatccaagttgcgtgagataagatgcaaagggctctgtgtggatgaggaacgcaccttagaggagtgggaaaggccaccagggttgggccctgtttaggtaattcctgttggcagcacctagagagagcatctgagctgaaggagtgggaaactttgcccaagcaatggcacgggcagcgggctctttctggcgccctgtgctggagcagggccaagtcttagggcatcacaaacagcccatttgatggagggagcagggacatagcacatttttgtctgtctttgtgaggctgctttgctaactctctgaggagaggaagcctctcgggctttccgtcggctggggctagtgccagagaatcccttctcagtggccagcaggttcctgggaggccggcacaaggcaccgctccccactcatgacaccttggtgcagagtgacctcctgcccagtcaccactccggccagccccagccaaacacacaaaagcccatggttgcggttgcatctacaccgttagttggcaaaggatcctgcttgagctctgcgtggtggccaaggagtagcatggaggagggccctgattttaaaaaggaaaaatagagaggcctcaaaacaatgaaacaaagagcttgatatgtcaagaggagaccaaggccctgggaggcataggcaagccgggcagagtcagaccagtgccctcccttgaccatctcctagcattccttaacctagacaggggctaccccatgtgagtccaagccagactttgtggctgtccccagcctgcacagcccaagcccagggaagtgtcctttctttcccttccttactaataatgggccttcctgagacacattcagagaaggatcagagagaaaggagaaccatccaggagagccacaagcgtccaccaaacagtgtctcaggcctcacctgaagctgctgttcctcctatcagcacactagtattaaatgggtgttccataatgaggagaatggaaataggtacaaggcatctagcttaggacagaatcggatttcggcatgtgaaggaatcccagagctgatctcattgaaatgatctatcgtacagacaaggatatgcaaatccacagaagtgaagggatttttgctcaagatcacatagctggtaaactaaggtaaggttagggcttgaacttgggccttctgactccttgtccagtcagtgttctttcatctcaccacagctgcctcctttgaaacagaggtattaagatctgtccttctggttcaccctctcatacctctttactgcgtctcccacatcccccacatgcctcccaaaatgaaagacaaacaggattgtttctgagaccaagatcagtctgtctgtgatcagcctgtgtgtggttcacccagtcatgcaattaagggcagatctgggccagtggaataggatagctgattggtgtttgttactgtgaaccctagaccgtaccccgtagaatggtgtctcttgctttgtaacacatcgggccttcagtgtgctgtattcctcagaagtgagggcatctcggtccattctgcccatggccacagggtgcagagaggcagcagggcccatgcaagctgccaccctgggatttgctgggctggagttcaacagatgtaaagacttcagtgaagcaataaacacaaaactctgggagaagatatccagaattttgtacattactctgtttctttttcaaaaatgaggcagatcagatgcccctgagctgcccctttttttctgattcccaactgcaatgtcctcagtcagtgttgtccctctgcccggctccccagctctttgccaacctcttcacactccccttgagctgagcatcagtcgcctgtgacgtggccaccttctgtcctgctcccactcccgacccatgctggaccccggaggacctcctgccccgcccccaccacacacccatatcccccaccattccaatttgttctttcccgtggggaattttttttcccagcgtctccatcccttcctacatatccacacacacacaaattggtctgatcttttttccattggttaaacatttaactccatgccagaccttgttttaacccctctcacatcatgttctttccttttttgcgagttattttgcattaaccaactttgtcagtgacagatgcgtatctgagggtgtcacacacgaccttcagcagggaagacttctgggccatggagggccgtctaatacatggacttataaactgactgcatgagcaatgaaaaggccaaattattctgaattttttttgaatcactgtaaaaaaactgatttcttttgtatagagaacactaaacgtataataaaagttgttcaaaatggaaaaaaaaaaaaaaaaaa

SEQ ID NO: 219 - DNA, 9960 bp, Homo sapiens
ctgagtgctgtccaggaggcccagttaaagcggctcgaggtgacaagaccccgagtgctggggagcagggagcagggccaggtgccgaggatggccaggcagccaccgccgccctgggtccatgcagccttcctcctctgcctcctcagtcttggcggagccatcgaaattcctatggatctgacgcagccgccaaccatcaccaagcagtcagcgaaggatcacatcgtggacccccgtgataacatcctgattgagtgtgaagcaaaagggaaccctgcccccagcttccactggacacgaaacagcagattcttcaacatcgccaaggacccccgggtgtccatgaggaggaggtctgggaccctggtgattgacttccgcagtggcgggcggccggaggaatatgagggggaatatcagtgcttcgcccgcaacaaatttggcacggccctgtccaataggatccgcctgcaggtgtctaaatctcctctgtggcccaaggaaaacctagaccctgtcgtggtccaagagggcgctcctttgacgctccagtgcaaccccccgcctggacttccatccccggtcatcttctggatgagcagctccatggagcccatcacccaagacaaacgtgtctctcagggccataacggagacctatacttctccaacgtgatgctgcaggacatgcagaccgactacagttgtaacgcccgcttccacttcacccacaccatccagcagaagaaccctttcaccctcaaggtcctcaccaaccacccttataatgactcgtccttaagaaaccaccctgacatgtacagtgcccgaggagttgcagaaagaacaccaagcttcatgtatccccagggcaccgcgagcagccagatggtgcttcgtggcatggacctcctgctggaatgcatcgcctccggggtcccaacaccagacatcgcatggtacaagaaaggtggggacctcccatctgataaggccaagtttgagaactttaataaggccctgcgtatcacaaatgtctctgaggaagactccggggagtatttctgcctggcctccaacaagatgggcagcatccggcacacgatctcggtgagagtaaaggctgctccctactggctggacgaacccaagaaccttattctggctcctggcgaggatgggagactggtgtgtcgagccaatggaaaccccaaacccactgtccagtggatggtgaatggggaacctttgcaatcggcaccacctaacccaaaccgtgaggtggccggagacaccatcatcttccgggacacccagatcagcagcagggctgtgtaccagtgcaacacctccaacgagcatggctacctgctggccaacgcctttgtcagtgtgctggatgtgccgcctcggatgctgtcgccccggaaccagctcattcgagtgattctttacaaccggacgcggctggactgccctttctttgggtctcccatccccacactgcgatggtttaagaatgggcaaggaagcaacctggatggtggcaactaccatgtttatgagaacggcagtctggaaattaagatgatccgcaaagaggaccagggcatctacacctgtgtcgccaccaacatcctgggcaaagctgaaaaccaagtccgcctggaggtcaaagaccccaccaggatctaccggatgcccgaggaccaggtggccagaaggggcaccacggtgcagctggagtgtcgggtgaagcacgacccctccctgaaactcaccgtctcctggctgaaggatgacgagccgctctatattggaaacaggatgaagaaggaagacgactccctgaccatctttggggtggcagagcgggaccagggcagttacacgtgtgtcgccagcaccgagctagaccaagacctggccaaggcctacctcaccgtgctagctgatcaggccactccaactaaccgtttggctgccctgcccaaaggacggccagaccggccccgggacctggagctgaccgacctggccgagaggagcgtgcggctgacctggatccccggggatgctaacaacagccccatcacagactacgtcgtccagtttgaagaagaccagttccaacctggggtctggcatgaccattccaagtaccccggcagcgttaactcagccgtcctccggctgtccccgtatgtcaactaccagttccgtgtcattgccatcaacgaggttgggagcagccaccccagcctcccatccgagcgctaccgaaccagtggagcaccccccgagtccaatcctggtgacgtgaagggagaggggaccagaaagaacaacatggagatcacgtggacgcccatgaatgccacctcggcctttggccccaacctgcgctacattgtcaagtggaggcggagagagactcgagaggcctggaacaacgtcacagtgtggggctctcgctacgtggtggggcagaccccagtctacgtgccctatgagatccgagtccaggctgaaaatgacttcgggaagggccctgagccagagtccgtcatcggttactccggagaagattatcccagggctgcgcccactgaagttaaagtccgagtcatgaacagcacagccatcagccttcagtggaaccgcgtctactccgacacggtccagggccagctcagagagtaccgagcctactactggagggagagcagcttgctgaagaacctgtgggtgtctcagaagagacagcaagccagcttccctggtgaccgcctccgtggcgtggtgtcccgcctcttcccctacagtaactacaagctggagatggttgtggtcaatgggagaggtgatgggcctcgcagtgagaccaaggagttcaccaccccggaaggagtacccagtgcccctaggcgtttccgagtccggcagcccaacctggagacaatcaacctggaatgggatcatcctgagcatccaaatgggatcatgattggatacactctcaaatatgtggcctttaacgggaccaaagtaggaaagcagatagtggaaaacttctctcccaatcagaccaagttcacggtgcaaagaacggaccccgtgtcacgctaccgctttaccctcagcgccaggacgcaggtgggctctggggaagccgtcacagaggagtcaccagcacccccgaatgaagctactccaaccgcagcttacaccaacaaccaagcggacatcgccacccagggctggttcattgggcttatgtgcgccatcgccctcctggtgctgatcctgctcatcgtctgtttcatcaagaggagtcgcggcggcaagtacccagtacgagaaaagaaggatgttccccttggccctgaagaccccaaggaagaggatggctcatttgactatagtgatgaggacaacaagcccctgcagggcagtcagacatctctggacggcaccatcaagcagcaggagagtgacgacagcctggtggactatggcgagggtggcgagggtcagttcaatgaagacggctccttcatcggccagtacacggtcaaaaaggacaaggaggaaacagagggcaacgaaagctcagaggccacgtcacctgtcaatgctatctactctctggcctaacggagcccacccaggcacagccaccactttgcaagtgggaggaggggagaaggggagacaaaaccactgcagacctaccacgaagccaccaccaccttcagtaacaagggtacgatatgggggtctgccaagctgtgaggaccagtagccaccaagccacccacaagccccctcccaatgaccccccttcagccccgggtgccaccagtgtgggagagctggagccgtggctgagctcagctggagggagcctggccccttgcccggtctcgcagccaccccgagcgttccaccacactgtccgcccttggcctcggcacacgctcaccttttctgttggttacgggacttctcattgtcttaatttcgctttgtgcatcttcccctccagacccaatgtctctgttttcttttccttttgaaaaagagtccctggaaaagaaagaataagtggattctcccccaggagaatcctttttgcaaagataggcaaaaaggattgaatccataccagaacacgtagacaggctgtaatattcaaaccacctctgggccaatgcatttccaaaggatgcctttctcgccatatgcctcccctggcccccagcccctctgcctcggccttgtcagttgctgagctgggcttggctcctttctggaaaatgacagtatttttggcagggagaaggtgcgcaggcctccttgctgctctctggtttggttgggaggtgtgtttacctcttgctcctcattcctcccctgcccttttctctggaatatctaagatgtgagctgcattgactctgaagacgtttgaggaacaggagtgggcactgatagaaaggacttcaacgccagtgactgtgtacctccagcagaagaaaatcaggtgtctggtcttgggggcactgtgctcacttctagagagaagaaaaaggctgggtttggacttcatgcctcctcactggtgaaacccaggatgtagatagagggccacacccaccctgtccagagtagagggcacctgtccacgtggccagggcccatgctgccaccctcgaggagatggaaccctgtgatgcaaaagctttgctggtgtgtttggggcataaggcactgctccccttccatctctagcagatatcatcttctcagccaattctgtaggacactgaggctcttgtttgacatggtgtgtggatggggacttgccccaagactgagcaggtctgccctttcattggggtgtatacatatcaggggaccctgaggtggcaccgtactcagtgttgtgatgcccccacctagggaggactcaatgctctttgtatgccttatgcagcgctgatctgtccctggagttcccaggttcccagctccccccctgcaagccttgaagcctccagcaacgtctatctccaggagagcagggcagcctatgcaagtgttccggcaggaccagaagtggccactcaacacacgtcctcaccagtcaccccaaatggagacactcgcagacctgcagttctcagaccgaaggtgctgccttcatcctccccacctaatgcatttttgaaaccaaaggtacctagcctcagagacagagaaggagagggggagatcttgagtctaagaggaaccctttagctgtttctgcagctgaggtcagtttcaggagggtgaagctgatccccaggaatggatcagctgccatgggcacagcctccgatttgagcctctccggctgccagccagggggcctgggccagaccagggctctgtccttccgtgactttattaaagcaacatttgccacatgtttaagccgcaaaggtattagcaatgcttgcatcattaataatcattcagttgaaggtcaagcccatagacacacactctctgctggtaagaaaccatagcccagaactgagccaataaggttgtttgaacctgagagtgtgtaatggtcatttgggccaagcctcagctagggctgctgcctggacgcctgaggggcagcttatcacagtgcaaggggacagggtaaacagcagggggtggggtgtgagcttggagggcccctcccctggatttcctccaacacctgcttggatactaggcccactgtccctgaagggaatgtcagggaagtgtgcctgtgagctgaattaaaggactggcctttccagaaaacgctttggatctgagcagagtagtcagtttctcagacactcattccatactgcaccgtacatgccagcgtacccattgcaccgaaagcaggcccttagggcaggaagggacgatgagcaagtctgccacaccacctggtgactgggaagggctgcttctctcgtaagggtcttggggagaagtaagcccgcagcctgcctctgcacctcgttccagtgtcctgccaggctctgtactgtcctttgtgtatgaagaaaatgctgttagccctctctcaggctgctgttctgtgggtgctgagagctgccccccatcaccacgccatcacacccctctgagcagaagcaaatctgaggctgaagaattaagttttccccaagcaaggaaggcaggtggtcagagagatcaaacgctgaggcgtggggattgcaggattcaggaggcagcccctttggggaagaggagggtgcattttccatggagcccatgtcagagtccactccagctcagcaggaaagtggaattgcccagtactgcctgccagctgggtctcccaagcaactaccccaagacataccaacagtgaagccaggacagcaccatgccatcggcgctccagtctgtctggctgggaggaaagtgctgggcatcttacagtaactctagaagttcctttgactaggctgcaatcccacctatatgctcagccctaagagctgtggtttcctgtgctctcatttgtccattcattcattcattcattcattcagcaaataatctgaaatccagtctgaactaaggcctgagctgtggataccatggcgcgtgagttagatgtggtccctgccctcatggggctgacagtcctaaaatcaagtgctaggacacagtggccattgagctgggagcattcttccctctaccgcttaagccactgatggctgcgagcttgaagagagggattctgagggagagcttggtccatctggtcaccaaggctgggcgggacagagcagtcaagaaccacggtgtggcttgagaaacagtcctgcttcctgagcctctttgctctgcctcttggggcaagctccttaacctgtctgtatttttatgcctctgtctcccattcagttcctccttgaatacctctttctacagagaggcacgggctcccctgaaggattgtcgaggccagggttcgggaagtacactgccatcggtcaggggacagctgcctcccaccttgcctgggtgatggtgaatgggactcatcttttcctgccttgcttttgaggagatggttgaatttaagctaacaggaaagccaaaccagcaccctcctttgtgctctgagaggttggagacatctggtccaccccattgcccctgcccctggcaagccctgaagtcgggagaggtgaccacaggtctgaaaatcagccagtgccaacattgcttgccctgcaaggtgcaactgagcccacatagcgcattcatagtttccctgaccacagccttgggaagacggtggaaacccgaggatgtgtgggtttcccagctaacggacaagctcccctgccacacccagtgcccacgcatgctcacatacatacagcagaccacaaccctgttgccaagcagtgcttccaagggatagcgatccagattccaacattgtcttggagagggttagtccacatccaagttgcgtgagataagatgcaaagggctctgtgtggatgaggaacgcaccttagaggagtgggaaaggccaccagggttgggccctgtttaggtaattcctgttggcagcacctagagagagcatctgagctgaaggagtgggaaactttgcccaagcaatggcacgggcagcgggctctttctggcgccctgtgctggagcagggccaagtcttagggcatcacaaacagcccatttgatggagggagcagggacatagcacatttttgtctgtctttgtgaggctgctttgctaactctctgaggagaggaagcctctcgggctttccgtcggctggggctagtgccagagaatcccttctcagtggccagcaggttcctgggaggccggcacaaggcaccgctccccactcatgacaccttggtgcagagtgacctcctgcccagtcaccactccggccagccccagccaaacacacaaaagcccatggttgcggttgcatctacaccgttagttggcaaaggatcctgcttgagctctgcgtggtggccaaggagtagcatggaggagggccctgattttaaaaaggaaaaatagagaggcctcaaaacaatgaaacaaagagcttgatatgtcaagaggagaccaaggccctgggaggcataggcaagccgggcagagtcagaccagtgccctcccttgaccatctcctagcattccttaacctagacaggggctaccccatgtgagtccaagccagactttgtggctgtccccagcctgcacagcccaagcccagggaagtgtcctttctttcccttccttactaataatgggccttcctgagacacattcagagaaggatcagagagaaaggagaaccatccaggagagccacaagcgtccaccaaacagtgtctcaggcctcacctgaagctgctgttcctcctatcagcacactagtattaaatgggtgttccataatgaggagaatggaaataggtacaaggcatctagcttaggacagaatcggatttcggcatgtgaaggaatcccagagctgatctcattgaaatgatctatcgtacagacaaggatatgcaaatccacagaagtgaagggatttttgctcaagatcacatagctggtaaactaaggtaaggttagggcttgaacttgggccttctgactccttgtccagtcagtgttctttcatctcaccacagctgcctcctttgaaacagaggtattaagatctgtccttctggttcaccctctcatacctctttactgcgtctcccacatcccccacatgcctcccaaaatgaaagacaaacaggattgtttctgagaccaagatcagtctgtctgtgatcagcctgtgtgtggttcacccagtcatgcaattaagggcagatctgggccagtggaataggatagctgattggtgtttgttactgtgaaccctagaccgtaccccgtagaatggtgtctcttgctttgtaacacatcgggccttcagtgtgctgtattcctcagaagtgagggcatctcggtccattctgcccatggccacagggtgcagagaggcagcagggcccatgcaagctgccaccctgggatttgctgggctggagttcaacagatgtaaagacttcagtgaagcaataaacacaaaactctgggagaagatatccagaattttgtacattactctgtttctttttcaaaaatgaggcagatcagatgcccctgagctgcccctttttttctgattcccaactgcaatgtcctcagtcagtgttgtccctctgcccggctccccagctctttgccaacctcttcacactccccttgagctgagcatcagtcgcctgtgacgtggccaccttctgtcctgctcccactcccgacccatgctggaccccggaggacctcctgccccgcccccaccacacacccatatcccccaccattccaatttgttctttcccgtggggaattttttttcccagcgtctccatcccttcctacatatccacacacacacaaattggtctgatcttttttccattggttaaacatttaactccatgccagaccttgttttaacccctctcacatcatgttctttccttttttgcgagttattttgcattaaccaactttgtcagtgacagatgcgtatctgagggtgtcacacacgaccttcagcagggaagacttctgggccatggagggccgtctaatacatggacttataaactgactgcatgagcaatgaaaaggccaaattattctgaattttttttgaatcactgtaaaaaaactgatttcttttgtatagagaacactaaacgtataataaaagttgttcaaaatggaaaaaaaaaaaaaaaaaa

SEQ ID NO: 220 - DNA, 10153 bp, Homo sapiens
gcacgggctggtctctgccctaatgcggcggctggcggcgagaggcgctgcaggggacgcgggggaagtggcggcgccggcagcggacagctcggacagcgcccagggccggagcccgagcccttggaggttgattgacttatgtgcaatttgggacgctggagtttaccttccctccgcagcctggaacagagcctcctctggtgttgcaaggaagaggctgaatgaggcagagaagctgagtgctgtccaggaggcccagttaaagcggctcgaggtgacaagaccccgagtgctggggagcagggagcagggccaggtgccgaggatggccaggcagccaccgccgccctgggtccatgcagccttcctcctctgcctcctcagtcttggcggagccatcgaaattcctatggatctgacgcagccgccaaccatcaccaagcagtcagcgaaggatcacatcgtggacccccgtgataacatcctgattgagtgtgaagcaaaagggaaccctgcccccagcttccactggacacgaaacagcagattcttcaacatcgccaaggacccccgggtgtccatgaggaggaggtctgggaccctggtgattgacttccgcagtggcgggcggccggaggaatatgagggggaatatcagtgcttcgcccgcaacaaatttggcacggccctgtccaataggatccgcctgcaggtgtctaaatctcctctgtggcccaaggaaaacctagaccctgtcgtggtccaagagggcgctcctttgacgctccagtgcaaccccccgcctggacttccatccccggtcatcttctggatgagcagctccatggagcccatcacccaagacaaacgtgtctctcagggccataacggagacctatacttctccaacgtgatgctgcaggacatgcagaccgactacagttgtaacgcccgcttccacttcacccacaccatccagcagaagaaccctttcaccctcaaggtcctcaccaaccacccttataatgactcgtccttaagaaaccaccctgacatgtacagtgcccgaggagttgcagaaagaacaccaagcttcatgtatccccagggcaccgcgagcagccagatggtgcttcgtggcatggacctcctgctggaatgcatcgcctccggggtcccaacaccagacatcgcatggtacaagaaaggtggggacctcccatctgataaggccaagtttgagaactttaataaggccctgcgtatcacaaatgtctctgaggaagactccggggagtatttctgcctggcctccaacaagatgggcagcatccggcacacgatctcggtgagagtaaaggctgctccctactggctggacgaacccaagaaccttattctggctcctggcgaggatgggagactggtgtgtcgagccaatggaaaccccaaacccactgtccagtggatggtgaatggggaacctttgcaatcggcaccacctaacccaaaccgtgaggtggccggagacaccatcatcttccgggacacccagatcagcagcagggctgtgtaccagtgcaacacctccaacgagcatggctacctgctggccaacgcctttgtcagtgtgctggatgtgccgcctcggatgctgtcgccccggaaccagctcattcgagtgattctttacaaccggacgcggctggactgccctttctttgggtctcccatccccacactgcgatggtttaagaatgggcaaggaagcaacctggatggtggcaactaccatgtttatgagaacggcagtctggaaattaagatgatccgcaaagaggaccagggcatctacacctgtgtcgccaccaacatcctgggcaaagctgaaaaccaagtccgcctggaggtcaaagaccccaccaggatctaccggatgcccgaggaccaggtggccagaaggggcaccacggtgcagctggagtgtcgggtgaagcacgacccctccctgaaactcaccgtctcctggctgaaggatgacgagccgctctatattggaaacaggatgaagaaggaagacgactccctgaccatctttggggtggcagagcgggaccagggcagttacacgtgtgtcgccagcaccgagctagaccaagacctggccaaggcctacctcaccgtgctaggacggccagaccggccccgggacctggagctgaccgacctggccgagaggagcgtgcggctgacctggatccccggggatgctaacaacagccccatcacagactacgtcgtccagtttgaagaagaccagttccaacctggggtctggcatgaccattccaagtaccccggcagcgttaactcagccgtcctccggctgtccccgtatgtcaactaccagttccgtgtcattgccatcaacgaggttgggagcagccaccccagcctcccatccgagcgctaccgaaccagtggagcaccccccgagtccaatcctggtgacgtgaagggagaggggaccagaaagaacaacatggagatcacgtggacgcccatgaatgccacctcggcctttggccccaacctgcgctacattgtcaagtggaggcggagagagactcgagaggcctggaacaacgtcacagtgtggggctctcgctacgtggtggggcagaccccagtctacgtgccctatgagatccgagtccaggctgaaaatgacttcgggaagggccctgagccagagtccgtcatcggttactccggagaagattatcccagggctgcgcccactgaagttaaagtccgagtcatgaacagcacagccatcagccttcagtggaaccgcgtctactccgacacggtccagggccagctcagagagtaccgagcctactactggagggagagcagcttgctgaagaacctgtgggtgtctcagaagagacagcaagccagcttccctggtgaccgcctccgtggcgtggtgtcccgcctcttcccctacagtaactacaagctggagatggttgtggtcaatgggagaggtgatgggcctcgcagtgagaccaaggagttcaccaccccggaaggagtacccagtgcccctaggcgtttccgagtccggcagcccaacctggagacaatcaacctggaatgggatcatcctgagcatccaaatgggatcatgattggatacactctcaaatatgtggcctttaacgggaccaaagtaggaaagcagatagtggaaaacttctctcccaatcagaccaagttcacggtgcaaagaacggaccccgtgtcacgctaccgctttaccctcagcgccaggacgcaggtgggctctggggaagccgtcacagaggagtcaccagcacccccgaatgaagctactccaaccgcagcttacaccaacaaccaagcggacatcgccacccagggctggttcattgggcttatgtgcgccatcgccctcctggtgctgatcctgctcatcgtctgtttcatcaagaggagtcgcggcggcaagtacccagtacgagaaaagaaggatgttccccttggccctgaagaccccaaggaagaggatggctcatttgactatagtgatgaggacaacaagcccctgcagggcagtcagacatctctggacggcaccatcaagcagcaggagagtgacgacagcctggtggactatggcgagggtggcgagggtcagttcaatgaagacggctccttcatcggccagtacacggtcaaaaaggacaaggaggaaacagagggcaacgaaagctcagaggccacgtcacctgtcaatgctatctactctctggcctaacggagcccacccaggcacagccaccactttgcaagtgggaggaggggagaaggggagacaaaaccactgcagacctaccacgaagccaccaccaccttcagtaacaagggtacgatatgggggtctgccaagctgtgaggaccagtagccaccaagccacccacaagccccctcccaatgaccccccttcagccccgggtgccaccagtgtgggagagctggagccgtggctgagctcagctggagggagcctggccccttgcccggtctcgcagccaccccgagcgttccaccacactgtccgcccttggcctcggcacacgctcaccttttctgttggttacgggacttctcattgtcttaatttcgctttgtgcatcttcccctccagacccaatgtctctgttttcttttccttttgaaaaagagtccctggaaaagaaagaataagtggattctcccccaggagaatcctttttgcaaagataggcaaaaaggattgaatccataccagaacacgtagacaggctgtaatattcaaaccacctctgggccaatgcatttccaaaggatgcctttctcgccatatgcctcccctggcccccagcccctctgcctcggccttgtcagttgctgagctgggcttggctcctttctggaaaatgacagtatttttggcagggagaaggtgcgcaggcctccttgctgctctctggtttggttgggaggtgtgtttacctcttgctcctcattcctcccctgcccttttctctggaatatctaagatgtgagctgcattgactctgaagacgtttgaggaacaggagtgggcactgatagaaaggacttcaacgccagtgactgtgtacctccagcagaagaaaatcaggtgtctggtcttgggggcactgtgctcacttctagagagaagaaaaaggctgggtttggacttcatgcctcctcactggtgaaacccaggatgtagatagagggccacacccaccctgtccagagtagagggcacctgtccacgtggccagggcccatgctgccaccctcgaggagatggaaccctgtgatgcaaaagctttgctggtgtgtttggggcataaggcactgctccccttccatctctagcagatatcatcttctcagccaattctgtaggacactgaggctcttgtttgacatggtgtgtggatggggacttgccccaagactgagcaggtctgccctttcattggggtgtatacatatcaggggaccctgaggtggcaccgtactcagtgttgtgatgcccccacctagggaggactcaatgctctttgtatgccttatgcagcgctgatctgtccctggagttcccaggttcccagctccccccctgcaagccttgaagcctccagcaacgtctatctccaggagagcagggcagcctatgcaagtgttccggcaggaccagaagtggccactcaacacacgtcctcaccagtcaccccaaatggagacactcgcagacctgcagttctcagaccgaaggtgctgccttcatcctccccacctaatgcatttttgaaaccaaaggtacctagcctcagagacagagaaggagagggggagatcttgagtctaagaggaaccctttagctgtttctgcagctgaggtcagtttcaggagggtgaagctgatccccaggaatggatcagctgccatgggcacagcctccgatttgagcctctccggctgccagccagggggcctgggccagaccagggctctgtccttccgtgactttattaaagcaacatttgccacatgtttaagccgcaaaggtattagcaatgcttgcatcattaataatcattcagttgaaggtcaagcccatagacacacactctctgctggtaagaaaccatagcccagaactgagccaataaggttgtttgaacctgagagtgtgtaatggtcatttgggccaagcctcagctagggctgctgcctggacgcctgaggggcagcttatcacagtgcaaggggacagggtaaacagcagggggtggggtgtgagcttggagggcccctcccctggatttcctccaacacctgcttggatactaggcccactgtccctgaagggaatgtcagggaagtgtgcctgtgagctgaattaaaggactggcctttccagaaaacgctttggatctgagcagagtagtcagtttctcagacactcattccatactgcaccgtacatgccagcgtacccattgcaccgaaagcaggcccttagggcaggaagggacgatgagcaagtctgccacaccacctggtgactgggaagggctgcttctctcgtaagggtcttggggagaagtaagcccgcagcctgcctctgcacctcgttccagtgtcctgccaggctctgtactgtcctttgtgtatgaagaaaatgctgttagccctctctcaggctgctgttctgtgggtgctgagagctgccccccatcaccacgccatcacacccctctgagcagaagcaaatctgaggctgaagaattaagttttccccaagcaaggaaggcaggtggtcagagagatcaaacgctgaggcgtggggattgcaggattcaggaggcagcccctttggggaagaggagggtgcattttccatggagcccatgtcagagtccactccagctcagcaggaaagtggaattgcccagtactgcctgccagctgggtctcccaagcaactaccccaagacataccaacagtgaagccaggacagcaccatgccatcggcgctccagtctgtctggctgggaggaaagtgctgggcatcttacagtaactctagaagttcctttgactaggctgcaatcccacctatatgctcagccctaagagctgtggtttcctgtgctctcatttgtccattcattcattcattcattcattcagcaaataatctgaaatccagtctgaactaaggcctgagctgtggataccatggcgcgtgagttagatgtggtccctgccctcatggggctgacagtcctaaaatcaagtgctaggacacagtggccattgagctgggagcattcttccctctaccgcttaagccactgatggctgcgagcttgaagagagggattctgagggagagcttggtccatctggtcaccaaggctgggcgggacagagcagtcaagaaccacggtgtggcttgagaaacagtcctgcttcctgagcctctttgctctgcctcttggggcaagctccttaacctgtctgtatttttatgcctctgtctcccattcagttcctccttgaatacctctttctacagagaggcacgggctcccctgaaggattgtcgaggccagggttcgggaagtacactgccatcggtcaggggacagctgcctcccaccttgcctgggtgatggtgaatgggactcatcttttcctgccttgcttttgaggagatggttgaatttaagctaacaggaaagccaaaccagcaccctcctttgtgctctgagaggttggagacatctggtccaccccattgcccctgcccctggcaagccctgaagtcgggagaggtgaccacaggtctgaaaatcagccagtgccaacattgcttgccctgcaaggtgcaactgagcccacatagcgcattcatagtttccctgaccacagccttgggaagacggtggaaacccgaggatgtgtgggtttcccagctaacggacaagctcccctgccacacccagtgcccacgcatgctcacatacatacagcagaccacaaccctgttgccaagcagtgcttccaagggatagcgatccagattccaacattgtcttggagagggttagtccacatccaagttgcgtgagataagatgcaaagggctctgtgtggatgaggaacgcaccttagaggagtgggaaaggccaccagggttgggccctgtttaggtaattcctgttggcagcacctagagagagcatctgagctgaaggagtgggaaactttgcccaagcaatggcacgggcagcgggctctttctggcgccctgtgctggagcagggccaagtcttagggcatcacaaacagcccatttgatggagggagcagggacatagcacatttttgtctgtctttgtgaggctgctttgctaactctctgaggagaggaagcctctcgggctttccgtcggctggggctagtgccagagaatcccttctcagtggccagcaggttcctgggaggccggcacaaggcaccgctccccactcatgacaccttggtgcagagtgacctcctgcccagtcaccactccggccagccccagccaaacacacaaaagcccatggttgcggttgcatctacaccgttagttggcaaaggatcctgcttgagctctgcgtggtggccaaggagtagcatggaggagggccctgattttaaaaaggaaaaatagagaggcctcaaaacaatgaaacaaagagcttgatatgtcaagaggagaccaaggccctgggaggcataggcaagccgggcagagtcagaccagtgccctcccttgaccatctcctagcattccttaacctagacaggggctaccccatgtgagtccaagccagactttgtggctgtccccagcctgcacagcccaagcccagggaagtgtcctttctttcccttccttactaataatgggccttcctgagacacattcagagaaggatcagagagaaaggagaaccatccaggagagccacaagcgtccaccaaacagtgtctcaggcctcacctgaagctgctgttcctcctatcagcacactagtattaaatgggtgttccataatgaggagaatggaaataggtacaaggcatctagcttaggacagaatcggatttcggcatgtgaaggaatcccagagctgatctcattgaaatgatctatcgtacagacaaggatatgcaaatccacagaagtgaagggatttttgctcaagatcacatagctggtaaactaaggtaaggttagggcttgaacttgggccttctgactccttgtccagtcagtgttctttcatctcaccacagctgcctcctttgaaacagaggtattaagatctgtccttctggttcaccctctcatacctctttactgcgtctcccacatcccccacatgcctcccaaaatgaaagacaaacaggattgtttctgagaccaagatcagtctgtctgtgatcagcctgtgtgtggttcacccagtcatgcaattaagggcagatctgggccagtggaataggatagctgattggtgtttgttactgtgaaccctagaccgtaccccgtagaatggtgtctcttgctttgtaacacatcgggccttcagtgtgctgtattcctcagaagtgagggcatctcggtccattctgcccatggccacagggtgcagagaggcagcagggcccatgcaagctgccaccctgggatttgctgggctggagttcaacagatgtaaagacttcagtgaagcaataaacacaaaactctgggagaagatatccagaattttgtacattactctgtttctttttcaaaaatgaggcagatcagatgcccctgagctgcccctttttttctgattcccaactgcaatgtcctcagtcagtgttgtccctctgcccggctccccagctctttgccaacctcttcacactccccttgagctgagcatcagtcgcctgtgacgtggccaccttctgtcctgctcccactcccgacccatgctggaccccggaggacctcctgccccgcccccaccacacacccatatcccccaccattccaatttgttctttcccgtggggaattttttttcccagcgtctccatcccttcctacatatccacacacacacaaattggtctgatcttttttccattggttaaacatttaactccatgccagaccttgttttaacccctctcacatcatgttctttccttttttgcgagttattttgcattaaccaactttgtcagtgacagatgcgtatctgagggtgtcacacacgaccttcagcagggaagacttctgggccatggagggccgtctaatacatggacttataaactgactgcatgagcaatgaaaaggccaaattattctgaattttttttgaatcactgtaaaaaaactgatttcttttgtatagagaacactaaacgtataataaaagttgttcaaaatggaaaaaaaaaaaaaaaaaa

SEQ ID NO: 221 - DNA, 2509 bp, Homo sapiens
gcacgggctggtctctgccctaatgcggcggctggcggcgagaggcgctgcaggggacgcgggggaagtggcggcgccggcagcggacagctcggacagcgcccagggccggagcccgagcccttggaggttgattgacttatgtgcaatttgggacgctggagtttaccttccctccgcagcctggaacagagcctcctctggtgttgcaaggaagaggctgaatgaggcagagaagctgagtgctgtccaggaggcccagttaaagcggctcgaggtgacaagaccccgagtgctggggagcagggagcagggccaggtgccgaggatggccaggcagccaccgccgccctgggtccatgcagccttcctcctctgcctcctcagtcttggcggagccatcgaaattcctatggatctgacgcagccgccaaccatcaccaagcagtcagcgaaggatcacatcgtggacccccgtgataacatcctgattgagtgtgaagcaaaagggaaccctgcccccagcttccactggacacgaaacagcagattcttcaacatcgccaaggacccccgggtgtccatgaggaggaggtctgggaccctggtgattgacttccgcagtggcgggcggccggaggaatatgagggggaatatcagtgcttcgcccgcaacaaatttggcacggccctgtccaataggatccgcctgcaggtgtctaaatctcctctgtggcccaaggaaaacctagaccctgtcgtggtccaagagggcgctcctttgacgctccagtgcaaccccccgcctggacttccatccccggtcatcttctggatgagcagctccatggagcccatcacccaagacaaacgtgtctctcagggccataacggagacctatacttctccaacgtgatgctgcaggacatgcagaccgactacagttgtaacgcccgcttccacttcacccacaccatccagcagaagaaccctttcaccctcaaggtcctcaccacccgaggagttgcagaaagaacaccaagcttcatgtatccccagggcaccgcgagcagccagatggtgcttcgtggcatggacctcctgctggaatgcatcgcctccggggtcccaacaccagacatcgcatggtacaagaaaggtggggacctcccatctgataaggccaagtttgagaactttaataaggccctgcgtatcacaaatgtctctgaggaagactccggggagtatttctgcctggcctccaacaagatgggcagcatccggcacacgatctcggtgagagtaaaggctgctccctactggctggacgaacccaagaaccttattctggctcctggcgaggatgggagactggtgtgtcgagccaatggaaaccccaaacccactgtccagtggatggtgaatggggaacctttgcaatcggcaccacctaacccaaaccgtgaggtggccggagacaccatcatcttccgggacacccagatcagcagcagggctgtgtaccagtgcaacacctccaacgagcatggctacctgctggccaacgcctttgtcagtgtgctggatgtgccgcctcggatgctgtcgccccggaaccagctcattcgagtgattctttacaaccggacgcggctggactgccctttctttgggtctcccatccccacactgcgatggtttaagaatgggcaaggaagcaacctggatggtggcaactaccatgtttatgagaacggcagtctggaaattaagatgatccgcaaagaggaccagggcatctacacctgtgtcgccaccaacatcctgggcaaagctgaaaaccaagtccgcctggaggtcaaagaccccaccaggatctaccggatgcccgaggaccaggtggccagaaggggcaccacggtgcagctggagtgtcgggtgaagcacgacccctccctgaaactcaccgtctcctggctgaaggatgacgagccgctctatattggaaacaggatgaagaaggaagacgactccctgaccatctttggggtggcagagcgggaccagggcagttacacgtgtgtcgccagcaccgagctagaccaagacctggccaaggcctacctcaccgtgctaggtaactgcccatgctcaccctggcactgaccagccccaccccctccccagcagccagagaagcagtggcccggggcagttccgagggcagtgcctgcagtcaagtggccgggtcaggcgtggtgatctcttcttgcctcgtgatgtcagggttagggagctgccagtttcagaacaagctgtgctggacaggttacctcctgagtggagtcattaacttccccacgtctcaactgaaaggggcctgagtgatatagagaaagtggagaggggtttctcgttgtgatcattttacctttcttacagctaactccaccactaagtcaattaaaacaatccatccttaaagcaaaaaaaaaaaaaaaaaaa

SEQ ID NO: 222 - DNA, 10453 bp, Homo sapiens
ctgagtgctgtccaggaggcccagttaaagcggctcgaggtgacaagaccccgagtgctggggagcagggagcagggccaggtgccgaggatggccaggcagccaccgccgccctgggtccatgcagccttcctcctctgcctcctcagtcttggcggagccatcgaaattcctatggatccaagcattcagaatgagctgacgcagccgccaaccatcaccaagcagtcagcgaaggatcacatcgtggacccccgtgataacatcctgattgagtgtgaagcaaaagggaaccctgcccccagcttccactggacacgaaacagcagattcttcaacatcgccaaggacccccgggtgtccatgaggaggaggtctgggaccctggtgattgacttccgcagtggcgggcggccggaggaatatgagggggaatatcagtgcttcgcccgcaacaaatttggcacggccctgtccaataggatccgcctgcaggtgtctaaatctcctctgtggcccaaggaaaacctagaccctgtcgtggtccaagagggcgctcctttgacgctccagtgcaaccccccgcctggacttccatccccggtcatcttctggatgagcagctccatggagcccatcacccaagacaaacgtgtctctcagggccataacggagacctatacttctccaacgtgatgctgcaggacatgcagaccgactacagttgtaacgcccgcttccacttcacccacaccatccagcagaagaaccctttcaccctcaaggtcctcaccaaccacccttataatgactcgtccttaagaaaccaccctgacatgtacagtgcccgaggagttgcagaaagaacaccaagcttcatgtatccccagggcaccgcgagcagccagatggtgcttcgtggcatggacctcctgctggaatgcatcgcctccggggtcccaacaccagacatcgcatggtacaagaaaggtggggacctcccatctgataaggccaagtttgagaactttaataaggccctgcgtatcacaaatgtctctgaggaagactccggggagtatttctgcctggcctccaacaagatgggcagcatccggcacacgatctcggtgagagtaaaggctgctccctactggctggacgaacccaagaaccttattctggctcctggcgaggatgggagactggtgtgtcgagccaatggaaaccccaaacccactgtccagtggatggtgaatggggaacctttgcaatcggcaccacctaacccaaaccgtgaggtggccggagacaccatcatcttccgggacacccagatcagcagcagggctgtgtaccagtgcaacacctccaacgagcatggctacctgctggccaacgcctttgtcagtgtgctggatgtgccgcctcggatgctgtcgccccggaaccagctcattcgagtgattctttacaaccggacgcggctggactgccctttctttgggtctcccatccccacactgcgatggtttaagaatgggcaaggaagcaacctggatggtggcaactaccatgtttatgagaacggcagtctggaaattaagatgatccgcaaagaggaccagggcatctacacctgtgtcgccaccaacatcctgggcaaagctgaaaaccaagtccgcctggaggtcaaagaccccaccaggatctaccggatgcccgaggaccaggtggccagaaggggcaccacggtgcagctggagtgtcgggtgaagcacgacccctccctgaaactcaccgtctcctggctgaaggatgacgagccgctctatattggaaacaggatgaagaaggaagacgactccctgaccatctttggggtggcagagcgggaccagggcagttacacgtgtgtcgccagcaccgagctagaccaagacctggccaaggcctacctcaccgtgctagctgatcaggccactccaactaaccgtttggctgccctgcccaaaggacggccagaccggccccgggacctggagctgaccgacctggccgagaggagcgtgcggctgacctggatccccggggatgctaacaacagccccatcacagactacgtcgtccagtttgaagaagaccagttccaacctggggtctggcatgaccattccaagtaccccggcagcgttaactcagccgtcctccggctgtccccgtatgtcaactaccagttccgtgtcattgccatcaacgaggttgggagcagccaccccagcctcccatccgagcgctaccgaaccagtggagcaccccccgagtccaatcctggtgacgtgaagggagaggggaccagaaagaacaacatggagatcacgtggacgcccatgaatgccacctcggcctttggccccaacctgcgctacattgtcaagtggaggcggagagagactcgagaggcctggaacaacgtcacagtgtggggctctcgctacgtggtggggcagaccccagtctacgtgccctatgagatccgagtccaggctgaaaatgacttcgggaagggccctgagccagagtccgtcatcggttactccggagaagattatcccagggctgcgcccactgaagttaaagtccgagtcatgaacagcacagccatcagccttcagtggaaccgcgtctactccgacacggtccagggccagctcagagagtaccgagcctactactggagggagagcagcttgctgaagaacctgtgggtgtctcagaagagacagcaagccagcttccctggtgaccgcctccgtggcgtggtgtcccgcctcttcccctacagtaactacaagctggagatggttgtggtcaatgggagaggtgatgggcctcgcagtgagaccaaggagttcaccaccccggaaggagtacccagtgcccctaggcgtttccgagtccggcagcccaacctggagacaatcaacctggaatgggatcatcctgagcatccaaatgggatcatgattggatacactctcaaatatgtggcctttaacgggaccaaagtaggaaagcagatagtggaaaacttctctcccaatcagaccaagttcacggtgcaaagaacggaccccgtgtcacgctaccgctttaccctcagcgccaggacgcaggtgggctctggggaagccgtcacagaggagtcaccagcacccccgaatgaagctcctcccacattgcccccgactaccgtgggtgcgacgggcgctgtgagcagtaccgatgctactgccattgctgccaccaccgaagccacaacagtccccatcatcccaactgtcgcacctaccaccatcgccaccaccaccaccgtcgccacaactactacaaccactgctgccgccaccaccaccacggagagtcctcccaccaccacctccgggactaagatacacgaatccgcccctgatgagcagtccatatggaacgtcacggtgctccccaacagtaaatgggccaacatcacctggaagcacaatttcgggcccggaactgactttgtggttgagtacatcgacagcaaccatacgaaaaaaactgtcccagttaaggcccaggctcagcctatacagctgacagacctctatcccgggatgacatacacgttgcgggtttattcccgggacaacgagggcatcagcagtaccgtcatcacctttatgaccagtacagcttacaccaacaaccaagcggacatcgccacccagggctggttcattgggcttatgtgcgccatcgccctcctggtgctgatcctgctcatcgtctgtttcatcaagaggagtcgcggcggcaagtacccagtacgagaaaagaaggatgttccccttggccctgaagaccccaaggaagaggatggctcatttgactatagtgatgaggacaacaagcccctgcagggcagtcagacatctctggacggcaccatcaagcagcaggagagtgacgacagcctggtggactatggcgagggtggcgagggtcagttcaatgaagacggctccttcatcggccagtacacggtcaaaaaggacaaggaggaaacagagggcaacgaaagctcagaggccacgtcacctgtcaatgctatctactctctggcctaacggagcccacccaggcacagccaccactttgcaagtgggaggaggggagaaggggagacaaaaccactgcagacctaccacgaagccaccaccaccttcagtaacaagggtacgatatgggggtctgccaagctgtgaggaccagtagccaccaagccacccacaagccccctcccaatgaccccccttcagccccgggtgccaccagtgtgggagagctggagccgtggctgagctcagctggagggagcctggccccttgcccggtctcgcagccaccccgagcgttccaccacactgtccgcccttggcctcggcacacgctcaccttttctgttggttacgggacttctcattgtcttaatttcgctttgtgcatcttcccctccagacccaatgtctctgttttcttttccttttgaaaaagagtccctggaaaagaaagaataagtggattctcccccaggagaatcctttttgcaaagataggcaaaaaggattgaatccataccagaacacgtagacaggctgtaatattcaaaccacctctgggccaatgcatttccaaaggatgcctttctcgccatatgcctcccctggcccccagcccctctgcctcggccttgtcagttgctgagctgggcttggctcctttctggaaaatgacagtatttttggcagggagaaggtgcgcaggcctccttgctgctctctggtttggttgggaggtgtgtttacctcttgctcctcattcctcccctgcccttttctctggaatatctaagatgtgagctgcattgactctgaagacgtttgaggaacaggagtgggcactgatagaaaggacttcaacgccagtgactgtgtacctccagcagaagaaaatcaggtgtctggtcttgggggcactgtgctcacttctagagagaagaaaaaggctgggtttggacttcatgcctcctcactggtgaaacccaggatgtagatagagggccacacccaccctgtccagagtagagggcacctgtccacgtggccagggcccatgctgccaccctcgaggagatggaaccctgtgatgcaaaagctttgctggtgtgtttggggcataaggcactgctccccttccatctctagcagatatcatcttctcagccaattctgtaggacactgaggctcttgtttgacatggtgtgtggatggggacttgccccaagactgagcaggtctgccctttcattggggtgtatacatatcaggggaccctgaggtggcaccgtactcagtgttgtgatgcccccacctagggaggactcaatgctctttgtatgccttatgcagcgctgatctgtccctggagttcccaggttcccagctccccccctgcaagccttgaagcctccagcaacgtctatctccaggagagcagggcagcctatgcaagtgttccggcaggaccagaagtggccactcaacacacgtcctcaccagtcaccccaaatggagacactcgcagacctgcagttctcagaccgaaggtgctgccttcatcctccccacctaatgcatttttgaaaccaaaggtacctagcctcagagacagagaaggagagggggagatcttgagtctaagaggaaccctttagctgtttctgcagctgaggtcagtttcaggagggtgaagctgatccccaggaatggatcagctgccatgggcacagcctccgatttgagcctctccggctgccagccagggggcctgggccagaccagggctctgtccttccgtgactttattaaagcaacatttgccacatgtttaagccgcaaaggtattagcaatgcttgcatcattaataatcattcagttgaaggtcaagcccatagacacacactctctgctggtaagaaaccatagcccagaactgagccaataaggttgtttgaacctgagagtgtgtaatggtcatttgggccaagcctcagctagggctgctgcctggacgcctgaggggcagcttatcacagtgcaaggggacagggtaaacagcagggggtggggtgtgagcttggagggcccctcccctggatttcctccaacacctgcttggatactaggcccactgtccctgaagggaatgtcagggaagtgtgcctgtgagctgaattaaaggactggcctttccagaaaacgctttggatctgagcagagtagtcagtttctcagacactcattccatactgcaccgtacatgccagcgtacccattgcaccgaaagcaggcccttagggcaggaagggacgatgagcaagtctgccacaccacctggtgactgggaagggctgcttctctcgtaagggtcttggggagaagtaagcccgcagcctgcctctgcacctcgttccagtgtcctgccaggctctgtactgtcctttgtgtatgaagaaaatgctgttagccctctctcaggctgctgttctgtgggtgctgagagctgccccccatcaccacgccatcacacccctctgagcagaagcaaatctgaggctgaagaattaagttttccccaagcaaggaaggcaggtggtcagagagatcaaacgctgaggcgtggggattgcaggattcaggaggcagcccctttggggaagaggagggtgcattttccatggagcccatgtcagagtccactccagctcagcaggaaagtggaattgcccagtactgcctgccagctgggtctcccaagcaactaccccaagacataccaacagtgaagccaggacagcaccatgccatcggcgctccagtctgtctggctgggaggaaagtgctgggcatcttacagtaactctagaagttcctttgactaggctgcaatcccacctatatgctcagccctaagagctgtggtttcctgtgctctcatttgtccattcattcattcattcattcattcagcaaataatctgaaatccagtctgaactaaggcctgagctgtggataccatggcgcgtgagttagatgtggtccctgccctcatggggctgacagtcctaaaatcaagtgctaggacacagtggccattgagctgggagcattcttccctctaccgcttaagccactgatggctgcgagcttgaagagagggattctgagggagagcttggtccatctggtcaccaaggctgggcgggacagagcagtcaagaaccacggtgtggcttgagaaacagtcctgcttcctgagcctctttgctctgcctcttggggcaagctccttaacctgtctgtatttttatgcctctgtctcccattcagttcctccttgaatacctctttctacagagaggcacgggctcccctgaaggattgtcgaggccagggttcgggaagtacactgccatcggtcaggggacagctgcctcccaccttgcctgggtgatggtgaatgggactcatcttttcctgccttgcttttgaggagatggttgaatttaagctaacaggaaagccaaaccagcaccctcctttgtgctctgagaggttggagacatctggtccaccccattgcccctgcccctggcaagccctgaagtcgggagaggtgaccacaggtctgaaaatcagccagtgccaacattgcttgccctgcaaggtgcaactgagcccacatagcgcattcatagtttccctgaccacagccttgggaagacggtggaaacccgaggatgtgtgggtttcccagctaacggacaagctcccctgccacacccagtgcccacgcatgctcacatacatacagcagaccacaaccctgttgccaagcagtgcttccaagggatagcgatccagattccaacattgtcttggagagggttagtccacatccaagttgcgtgagataagatgcaaagggctctgtgtggatgaggaacgcaccttagaggagtgggaaaggccaccagggttgggccctgtttaggtaattcctgttggcagcacctagagagagcatctgagctgaaggagtgggaaactttgcccaagcaatggcacgggcagcgggctctttctggcgccctgtgctggagcagggccaagtcttagggcatcacaaacagcccatttgatggagggagcagggacatagcacatttttgtctgtctttgtgaggctgctttgctaactctctgaggagaggaagcctctcgggctttccgtcggctggggctagtgccagagaatcccttctcagtggccagcaggttcctgggaggccggcacaaggcaccgctccccactcatgacaccttggtgcagagtgacctcctgcccagtcaccactccggccagccccagccaaacacacaaaagcccatggttgcggttgcatctacaccgttagttggcaaaggatcctgcttgagctctgcgtggtggccaaggagtagcatggaggagggccctgattttaaaaaggaaaaatagagaggcctcaaaacaatgaaacaaagagcttgatatgtcaagaggagaccaaggccctgggaggcataggcaagccgggcagagtcagaccagtgccctcccttgaccatctcctagcattccttaacctagacaggggctaccccatgtgagtccaagccagactttgtggctgtccccagcctgcacagcccaagcccagggaagtgtcctttctttcccttccttactaataatgggccttcctgagacacattcagagaaggatcagagagaaaggagaaccatccaggagagccacaagcgtccaccaaacagtgtctcaggcctcacctgaagctgctgttcctcctatcagcacactagtattaaatgggtgttccataatgaggagaatggaaataggtacaaggcatctagcttaggacagaatcggatttcggcatgtgaaggaatcccagagctgatctcattgaaatgatctatcgtacagacaaggatatgcaaatccacagaagtgaagggatttttgctcaagatcacatagctggtaaactaaggtaaggttagggcttgaacttgggccttctgactccttgtccagtcagtgttctttcatctcaccacagctgcctcctttgaaacagaggtattaagatctgtccttctggttcaccctctcatacctctttactgcgtctcccacatcccccacatgcctcccaaaatgaaagacaaacaggattgtttctgagaccaagatcagtctgtctgtgatcagcctgtgtgtggttcacccagtcatgcaattaagggcagatctgggccagtggaataggatagctgattggtgtttgttactgtgaaccctagaccgtaccccgtagaatggtgtctcttgctttgtaacacatcgggccttcagtgtgctgtattcctcagaagtgagggcatctcggtccattctgcccatggccacagggtgcagagaggcagcagggcccatgcaagctgccaccctgggatttgctgggctggagttcaacagatgtaaagacttcagtgaagcaataaacacaaaactctgggagaagatatccagaattttgtacattactctgtttctttttcaaaaatgaggcagatcagatgcccctgagctgcccctttttttctgattcccaactgcaatgtcctcagtcagtgttgtccctctgcccggctccccagctctttgccaacctcttcacactccccttgagctgagcatcagtcgcctgtgacgtggccaccttctgtcctgctcccactcccgacccatgctggaccccggaggacctcctgccccgcccccaccacacacccatatcccccaccattccaatttgttctttcccgtggggaattttttttcccagcgtctccatcccttcctacatatccacacacacacaaattggtctgatcttttttccattggttaaacatttaactccatgccagaccttgttttaacccctctcacatcatgttctttccttttttgcgagttattttgcattaaccaactttgtcagtgacagatgcgtatctgagggtgtcacacacgaccttcagcagggaagacttctgggccatggagggccgtctaatacatggacttataaactgactgcatgagcaatgaaaaggccaaattattctgaattttttttgaatcactgtaaaaaaactgatttcttttgtatagagaacactaaacgtataataaaagttgttcaaaatgga

SEQ ID NO: 223 - DNA, 10768 bp, Homo sapiens
gattccacccagggcagggctgctgtgttttctctgaggccaactttcagggaaaagaaggatcttgctgggattttgctcaggcctaagtctgccagctgggatggcctggggcctaagaaatgcctagcttccctccccacctgtccccatggagggagactgagaagacgctggatgaaccagaccatggctccttcaggagagaggttgattgacttatgtgcaatttgggacgctggagtttaccttccctccgcagcctggaacagagcctcctctggtgttgcaaggaagaggctgaatgaggcagagaagctgagtgctgtccaggaggcccagttaaagcggctcgaggtgacaagaccccgagtgctggggagcagggagcagggccaggtgccgaggatggccaggcagccaccgccgccctgggtccatgcagccttcctcctctgcctcctcagtcttggcggagccatcgaaattcctatggatctgacgcagccgccaaccatcaccaagcagtcagcgaaggatcacatcgtggacccccgtgataacatcctgattgagtgtgaagcaaaagggaaccctgcccccagcttccactggacacgaaacagcagattcttcaacatcgccaaggacccccgggtgtccatgaggaggaggtctgggaccctggtgattgacttccgcagtggcgggcggccggaggaatatgagggggaatatcagtgcttcgcccgcaacaaatttggcacggccctgtccaataggatccgcctgcaggtgtctaaatctcctctgtggcccaaggaaaacctagaccctgtcgtggtccaagagggcgctcctttgacgctccagtgcaaccccccgcctggacttccatccccggtcatcttctggatgagcagctccatggagcccatcacccaagacaaacgtgtctctcagggccataacggagacctatacttctccaacgtgatgctgcaggacatgcagaccgactacagttgtaacgcccgcttccacttcacccacaccatccagcagaagaaccctttcaccctcaaggtcctcaccaaccacccttataatgactcgtccttaagaaaccaccctgacatgtacagtgcccgaggagttgcagaaagaacaccaagcttcatgtatccccagggcaccgcgagcagccagatggtgcttcgtggcatggacctcctgctggaatgcatcgcctccggggtcccaacaccagacatcgcatggtacaagaaaggtggggacctcccatctgataaggccaagtttgagaactttaataaggccctgcgtatcacaaatgtctctgaggaagactccggggagtatttctgcctggcctccaacaagatgggcagcatccggcacacgatctcggtgagagtaaaggctgctccctactggctggacgaacccaagaaccttattctggctcctggcgaggatgggagactggtgtgtcgagccaatggaaaccccaaacccactgtccagtggatggtgaatggggaacctttgcaatcggcaccacctaacccaaaccgtgaggtggccggagacaccatcatcttccgggacacccagatcagcagcagggctgtgtaccagtgcaacacctccaacgagcatggctacctgctggccaacgcctttgtcagtgtgctggatgtgccgcctcggatgctgtcgccccggaaccagctcattcgagtgattctttacaaccggacgcggctggactgccctttctttgggtctcccatccccacactgcgatggtttaagaatgggcaaggaagcaacctggatggtggcaactaccatgtttatgagaacggcagtctggaaattaagatgatccgcaaagaggaccagggcatctacacctgtgtcgccaccaacatcctgggcaaagctgaaaaccaagtccgcctggaggtcaaagaccccaccaggatctaccggatgcccgaggaccaggtggccagaaggggcaccacggtgcagctggagtgtcgggtgaagcacgacccctccctgaaactcaccgtctcctggctgaaggatgacgagccgctctatattggaaacaggatgaagaaggaagacgactccctgaccatctttggggtggcagagcgggaccagggcagttacacgtgtgtcgccagcaccgagctagaccaagacctggccaaggcctacctcaccgtgctagctgatcaggccactccaactaaccgtttggctgccctgcccaaaggacggccagaccggccccgggacctggagctgaccgacctggccgagaggagcgtgcggctgacctggatccccggggatgctaacaacagccccatcacagactacgtcgtccagtttgaagaagaccagttccaacctggggtctggcatgaccattccaagtaccccggcagcgttaactcagccgtcctccggctgtccccgtatgtcaactaccagttccgtgtcattgccatcaacgaggttgggagcagccaccccagcctcccatccgagcgctaccgaaccagtggagcaccccccgagtccaatcctggtgacgtgaagggagaggggaccagaaagaacaacatggagatcacgtggacgcccatgaatgccacctcggcctttggccccaacctgcgctacattgtcaagtggaggcggagagagactcgagaggcctggaacaacgtcacagtgtggggctctcgctacgtggtggggcagaccccagtctacgtgccctatgagatccgagtccaggctgaaaatgacttcgggaagggccctgagccagagtccgtcatcggttactccggagaagattatcccagggctgcgcccactgaagttaaagtccgagtcatgaacagcacagccatcagccttcagtggaaccgcgtctactccgacacggtccagggccagctcagagagtaccgagcctactactggagggagagcagcttgctgaagaacctgtgggtgtctcagaagagacagcaagccagcttccctggtgaccgcctccgtggcgtggtgtcccgcctcttcccctacagtaactacaagctggagatggttgtggtcaatgggagaggtgatgggcctcgcagtgagaccaaggagttcaccaccccggaaggagtacccagtgcccctaggcgtttccgagtccggcagcccaacctggagacaatcaacctggaatgggatcatcctgagcatccaaatgggatcatgattggatacactctcaaatatgtggcctttaacgggaccaaagtaggaaagcagatagtggaaaacttctctcccaatcagaccaagttcacggtgcaaagaacggaccccgtgtcacgctaccgctttaccctcagcgccaggacgcaggtgggctctggggaagccgtcacagaggagtcaccagcacccccgaatgaagctactccaaccgcagctcctcccacattgcccccgactaccgtgggtgcgacgggcgctgtgagcagtaccgatgctactgccattgctgccaccaccgaagccacaacagtccccatcatcccaactgtcgcacctaccaccatcgccaccaccaccaccgtcgccacaactactacaaccactgctgccgccaccaccaccacggagagtcctcccaccaccacctccgggactaagatacacgaatccgcccctgatgagcagtccatatggaacgtcacggtgctccccaacagtaaatgggccaacatcacctggaagcacaatttcgggcccggaactgactttgtggttgagtacatcgacagcaaccatacgaaaaaaactgtcccagttaaggcccaggctcagcctatacagctgacagacctctatcccgggatgacatacacgttgcgggtttattcccgggacaacgagggcatcagcagtaccgtcatcacctttatgaccagtacagcttacaccaacaaccaagcggacatcgccacccagggctggttcattgggcttatgtgcgccatcgccctcctggtgctgatcctgctcatcgtctgtttcatcaagaggagtcgcggcggcaagtacccagtacgagaaaagaaggatgttccccttggccctgaagaccccaaggaagaggatggctcatttgactatagtgatgaggacaacaagcccctgcagggcagtcagacatctctggacggcaccatcaagcagcaggagagtgacgacagcctggtggactatggcgagggtggcgagggtcagttcaatgaagacggctccttcatcggccagtacacggtcaaaaaggacaaggaggaaacagagggcaacgaaagctcagaggccacgtcacctgtcaatgctatctactctctggcctaacggagcccacccaggcacagccaccactttgcaagtgggaggaggggagaaggggagacaaaaccactgcagacctaccacgaagccaccaccaccttcagtaacaagggtacgatatgggggtctgccaagctgtgaggaccagtagccaccaagccacccacaagccccctcccaatgaccccccttcagccccgggtgccaccagtgtgggagagctggagccgtggctgagctcagctggagggagcctggccccttgcccggtctcgcagccaccccgagcgttccaccacactgtccgcccttggcctcggcacacgctcaccttttctgttggttacgggacttctcattgtcttaatttcgctttgtgcatcttcccctccagacccaatgtctctgttttcttttccttttgaaaaagagtccctggaaaagaaagaataagtggattctcccccaggagaatcctttttgcaaagataggcaaaaaggattgaatccataccagaacacgtagacaggctgtaatattcaaaccacctctgggccaatgcatttccaaaggatgcctttctcgccatatgcctcccctggcccccagcccctctgcctcggccttgtcagttgctgagctgggcttggctcctttctggaaaatgacagtatttttggcagggagaaggtgcgcaggcctccttgctgctctctggtttggttgggaggtgtgtttacctcttgctcctcattcctcccctgcccttttctctggaatatctaagatgtgagctgcattgactctgaagacgtttgaggaacaggagtgggcactgatagaaaggacttcaacgccagtgactgtgtacctccagcagaagaaaatcaggtgtctggtcttgggggcactgtgctcacttctagagagaagaaaaaggctgggtttggacttcatgcctcctcactggtgaaacccaggatgtagatagagggccacacccaccctgtccagagtagagggcacctgtccacgtggccagggcccatgctgccaccctcgaggagatggaaccctgtgatgcaaaagctttgctggtgtgtttggggcataaggcactgctccccttccatctctagcagatatcatcttctcagccaattctgtaggacactgaggctcttgtttgacatggtgtgtggatggggacttgccccaagactgagcaggtctgccctttcattggggtgtatacatatcaggggaccctgaggtggcaccgtactcagtgttgtgatgcccccacctagggaggactcaatgctctttgtatgccttatgcagcgctgatctgtccctggagttcccaggttcccagctccccccctgcaagccttgaagcctccagcaacgtctatctccaggagagcagggcagcctatgcaagtgttccggcaggaccagaagtggccactcaacacacgtcctcaccagtcaccccaaatggagacactcgcagacctgcagttctcagaccgaaggtgctgccttcatcctccccacctaatgcatttttgaaaccaaaggtacctagcctcagagacagagaaggagagggggagatcttgagtctaagaggaaccctttagctgtttctgcagctgaggtcagtttcaggagggtgaagctgatccccaggaatggatcagctgccatgggcacagcctccgatttgagcctctccggctgccagccagggggcctgggccagaccagggctctgtccttccgtgactttattaaagcaacatttgccacatgtttaagccgcaaaggtattagcaatgcttgcatcattaataatcattcagttgaaggtcaagcccatagacacacactctctgctggtaagaaaccatagcccagaactgagccaataaggttgtttgaacctgagagtgtgtaatggtcatttgggccaagcctcagctagggctgctgcctggacgcctgaggggcagcttatcacagtgcaaggggacagggtaaacagcagggggtggggtgtgagcttggagggcccctcccctggatttcctccaacacctgcttggatactaggcccactgtccctgaagggaatgtcagggaagtgtgcctgtgagctgaattaaaggactggcctttccagaaaacgctttggatctgagcagagtagtcagtttctcagacactcattccatactgcaccgtacatgccagcgtacccattgcaccgaaagcaggcccttagggcaggaagggacgatgagcaagtctgccacaccacctggtgactgggaagggctgcttctctcgtaagggtcttggggagaagtaagcccgcagcctgcctctgcacctcgttccagtgtcctgccaggctctgtactgtcctttgtgtatgaagaaaatgctgttagccctctctcaggctgctgttctgtgggtgctgagagctgccccccatcaccacgccatcacacccctctgagcagaagcaaatctgaggctgaagaattaagttttccccaagcaaggaaggcaggtggtcagagagatcaaacgctgaggcgtggggattgcaggattcaggaggcagcccctttggggaagaggagggtgcattttccatggagcccatgtcagagtccactccagctcagcaggaaagtggaattgcccagtactgcctgccagctgggtctcccaagcaactaccccaagacataccaacagtgaagccaggacagcaccatgccatcggcgctccagtctgtctggctgggaggaaagtgctgggcatcttacagtaactctagaagttcctttgactaggctgcaatcccacctatatgctcagccctaagagctgtggtttcctgtgctctcatttgtccattcattcattcattcattcattcagcaaataatctgaaatccagtctgaactaaggcctgagctgtggataccatggcgcgtgagttagatgtggtccctgccctcatggggctgacagtcctaaaatcaagtgctaggacacagtggccattgagctgggagcattcttccctctaccgcttaagccactgatggctgcgagcttgaagagagggattctgagggagagcttggtccatctggtcaccaaggctgggcgggacagagcagtcaagaaccacggtgtggcttgagaaacagtcctgcttcctgagcctctttgctctgcctcttggggcaagctccttaacctgtctgtatttttatgcctctgtctcccattcagttcctccttgaatacctctttctacagagaggcacgggctcccctgaaggattgtcgaggccagggttcgggaagtacactgccatcggtcaggggacagctgcctcccaccttgcctgggtgatggtgaatgggactcatcttttcctgccttgcttttgaggagatggttgaatttaagctaacaggaaagccaaaccagcaccctcctttgtgctctgagaggttggagacatctggtccaccccattgcccctgcccctggcaagccctgaagtcgggagaggtgaccacaggtctgaaaatcagccagtgccaacattgcttgccctgcaaggtgcaactgagcccacatagcgcattcatagtttccctgaccacagccttgggaagacggtggaaacccgaggatgtgtgggtttcccagctaacggacaagctcccctgccacacccagtgcccacgcatgctcacatacatacagcagaccacaaccctgttgccaagcagtgcttccaagggatagcgatccagattccaacattgtcttggagagggttagtccacatccaagttgcgtgagataagatgcaaagggctctgtgtggatgaggaacgcaccttagaggagtgggaaaggccaccagggttgggccctgtttaggtaattcctgttggcagcacctagagagagcatctgagctgaaggagtgggaaactttgcccaagcaatggcacgggcagcgggctctttctggcgccctgtgctggagcagggccaagtcttagggcatcacaaacagcccatttgatggagggagcagggacatagcacatttttgtctgtctttgtgaggctgctttgctaactctctgaggagaggaagcctctcgggctttccgtcggctggggctagtgccagagaatcccttctcagtggccagcaggttcctgggaggccggcacaaggcaccgctccccactcatgacaccttggtgcagagtgacctcctgcccagtcaccactccggccagccccagccaaacacacaaaagcccatggttgcggttgcatctacaccgttagttggcaaaggatcctgcttgagctctgcgtggtggccaaggagtagcatggaggagggccctgattttaaaaaggaaaaatagagaggcctcaaaacaatgaaacaaagagcttgatatgtcaagaggagaccaaggccctgggaggcataggcaagccgggcagagtcagaccagtgccctcccttgaccatctcctagcattccttaacctagacaggggctaccccatgtgagtccaagccagactttgtggctgtccccagcctgcacagcccaagcccagggaagtgtcctttctttcccttccttactaataatgggccttcctgagacacattcagagaaggatcagagagaaaggagaaccatccaggagagccacaagcgtccaccaaacagtgtctcaggcctcacctgaagctgctgttcctcctatcagcacactagtattaaatgggtgttccataatgaggagaatggaaataggtacaaggcatctagcttaggacagaatcggatttcggcatgtgaaggaatcccagagctgatctcattgaaatgatctatcgtacagacaaggatatgcaaatccacagaagtgaagggatttttgctcaagatcacatagctggtaaactaaggtaaggttagggcttgaacttgggccttctgactccttgtccagtcagtgttctttcatctcaccacagctgcctcctttgaaacagaggtattaagatctgtccttctggttcaccctctcatacctctttactgcgtctcccacatcccccacatgcctcccaaaatgaaagacaaacaggattgtttctgagaccaagatcagtctgtctgtgatcagcctgtgtgtggttcacccagtcatgcaattaagggcagatctgggccagtggaataggatagctgattggtgtttgttactgtgaaccctagaccgtaccccgtagaatggtgtctcttgctttgtaacacatcgggccttcagtgtgctgtattcctcagaagtgagggcatctcggtccattctgcccatggccacagggtgcagagaggcagcagggcccatgcaagctgccaccctgggatttgctgggctggagttcaacagatgtaaagacttcagtgaagcaataaacacaaaactctgggagaagatatccagaattttgtacattactctgtttctttttcaaaaatgaggcagatcagatgcccctgagctgcccctttttttctgattcccaactgcaatgtcctcagtcagtgttgtccctctgcccggctccccagctctttgccaacctcttcacactccccttgagctgagcatcagtcgcctgtgacgtggccaccttctgtcctgctcccactcccgacccatgctggaccccggaggacctcctgccccgcccccaccacacacccatatcccccaccattccaatttgttctttcccgtggggaattttttttcccagcgtctccatcccttcctacatatccacacacacacaaattggtctgatcttttttccattggttaaacatttaactccatgccagaccttgttttaacccctctcacatcatgttctttccttttttgcgagttattttgcattaaccaactttgtcagtgacagatgcgtatctgagggtgtcacacacgaccttcagcagggaagacttctgggccatggagggccgtctaatacatggacttataaactgactgcatgagcaatgaaaaggccaaattattctgaattttttttgaatcactgtaaaaaaactgatttcttttgtatagagaacactaaacgtataataaaagttgttcaaaatgga

SEQ ID NO: 224 - DNA, 10423 bp, Homo sapiens
ctgagtgctgtccaggaggcccagttaaagcggctcgaggtgacaagaccccgagtgctggggagcagggagcagggccaggtgccgaggatggccaggcagccaccgccgccctgggtccatgcagccttcctcctctgcctcctcagtcttggcggagccatcgaaattcctatggatccaagcattcagaatgagctgacgcagccgccaaccatcaccaagcagtcagcgaaggatcacatcgtggacccccgtgataacatcctgattgagtgtgaagcaaaagggaaccctgcccccagcttccactggacacgaaacagcagattcttcaacatcgccaaggacccccgggtgtccatgaggaggaggtctgggaccctggtgattgacttccgcagtggcgggcggccggaggaatatgagggggaatatcagtgcttcgcccgcaacaaatttggcacggccctgtccaataggatccgcctgcaggtgtctaaatctcctctgtggcccaaggaaaacctagaccctgtcgtggtccaagagggcgctcctttgacgctccagtgcaaccccccgcctggacttccatccccggtcatcttctggatgagcagctccatggagcccatcacccaagacaaacgtgtctctcagggccataacggagacctatacttctccaacgtgatgctgcaggacatgcagaccgactacagttgtaacgcccgcttccacttcacccacaccatccagcagaagaaccctttcaccctcaaggtcctcaccaaccacccttataatgactcgtccttaagaaaccaccctgacatgtacagtgcccgaggagttgcagaaagaacaccaagcttcatgtatccccagggcaccgcgagcagccagatggtgcttcgtggcatggacctcctgctggaatgcatcgcctccggggtcccaacaccagacatcgcatggtacaagaaaggtggggacctcccatctgataaggccaagtttgagaactttaataaggccctgcgtatcacaaatgtctctgaggaagactccggggagtatttctgcctggcctccaacaagatgggcagcatccggcacacgatctcggtgagagtaaaggctgctccctactggctggacgaacccaagaaccttattctggctcctggcgaggatgggagactggtgtgtcgagccaatggaaaccccaaacccactgtccagtggatggtgaatggggaacctttgcaatcggcaccacctaacccaaaccgtgaggtggccggagacaccatcatcttccgggacacccagatcagcagcagggctgtgtaccagtgcaacacctccaacgagcatggctacctgctggccaacgcctttgtcagtgtgctggatgtgccgcctcggatgctgtcgccccggaaccagctcattcgagtgattctttacaaccggacgcggctggactgccctttctttgggtctcccatccccacactgcgatggtttaagaatgggcaaggaagcaacctggatggtggcaactaccatgtttatgagaacggcagtctggaaattaagatgatccgcaaagaggaccagggcatctacacctgtgtcgccaccaacatcctgggcaaagctgaaaaccaagtccgcctggaggtcaaagaccccaccaggatctaccggatgcccgaggaccaggtggccagaaggggcaccacggtgcagctggagtgtcgggtgaagcacgacccctccctgaaactcaccgtctcctggctgaaggatgacgagccgctctatattggaaacaggatgaagaaggaagacgactccctgaccatctttggggtggcagagcgggaccagggcagttacacgtgtgtcgccagcaccgagctagaccaagacctggccaaggcctacctcaccgtgctaggacggccagaccggccccgggacctggagctgaccgacctggccgagaggagcgtgcggctgacctggatccccggggatgctaacaacagccccatcacagactacgtcgtccagtttgaagaagaccagttccaacctggggtctggcatgaccattccaagtaccccggcagcgttaactcagccgtcctccggctgtccccgtatgtcaactaccagttccgtgtcattgccatcaacgaggttgggagcagccaccccagcctcccatccgagcgctaccgaaccagtggagcaccccccgagtccaatcctggtgacgtgaagggagaggggaccagaaagaacaacatggagatcacgtggacgcccatgaatgccacctcggcctttggccccaacctgcgctacattgtcaagtggaggcggagagagactcgagaggcctggaacaacgtcacagtgtggggctctcgctacgtggtggggcagaccccagtctacgtgccctatgagatccgagtccaggctgaaaatgacttcgggaagggccctgagccagagtccgtcatcggttactccggagaagattatcccagggctgcgcccactgaagttaaagtccgagtcatgaacagcacagccatcagccttcagtggaaccgcgtctactccgacacggtccagggccagctcagagagtaccgagcctactactggagggagagcagcttgctgaagaacctgtgggtgtctcagaagagacagcaagccagcttccctggtgaccgcctccgtggcgtggtgtcccgcctcttcccctacagtaactacaagctggagatggttgtggtcaatgggagaggtgatgggcctcgcagtgagaccaaggagttcaccaccccggaaggagtacccagtgcccctaggcgtttccgagtccggcagcccaacctggagacaatcaacctggaatgggatcatcctgagcatccaaatgggatcatgattggatacactctcaaatatgtggcctttaacgggaccaaagtaggaaagcagatagtggaaaacttctctcccaatcagaccaagttcacggtgcaaagaacggaccccgtgtcacgctaccgctttaccctcagcgccaggacgcaggtgggctctggggaagccgtcacagaggagtcaccagcacccccgaatgaagctactccaaccgcagctcctcccacattgcccccgactaccgtgggtgcgacgggcgctgtgagcagtaccgatgctactgccattgctgccaccaccgaagccacaacagtccccatcatcccaactgtcgcacctaccaccatcgccaccaccaccaccgtcgccacaactactacaaccactgctgccgccaccaccaccacggagagtcctcccaccaccacctccgggactaagatacacgaatccgcccctgatgagcagtccatatggaacgtcacggtgctccccaacagtaaatgggccaacatcacctggaagcacaatttcgggcccggaactgactttgtggttgagtacatcgacagcaaccatacgaaaaaaactgtcccagttaaggcccaggctcagcctatacagctgacagacctctatcccgggatgacatacacgttgcgggtttattcccgggacaacgagggcatcagcagtaccgtcatcacctttatgaccagtacagcttacaccaacaaccaagcggacatcgccacccagggctggttcattgggcttatgtgcgccatcgccctcctggtgctgatcctgctcatcgtctgtttcatcaagaggagtcgcggcggcaagtacccagtacgagaaaagaaggatgttccccttggccctgaagaccccaaggaagaggatggctcatttgactatagtgatgaggacaacaagcccctgcagggcagtcagacatctctggacggcaccatcaagcagcaggagagtgacgacagcctggtggactatggcgagggtggcgagggtcagttcaatgaagacggctccttcatcggccagtacacggtcaaaaaggacaaggaggaaacagagggcaacgaaagctcagaggccacgtcacctgtcaatgctatctactctctggcctaacggagcccacccaggcacagccaccactttgcaagtgggaggaggggagaaggggagacaaaaccactgcagacctaccacgaagccaccaccaccttcagtaacaagggtacgatatgggggtctgccaagctgtgaggaccagtagccaccaagccacccacaagccccctcccaatgaccccccttcagccccgggtgccaccagtgtgggagagctggagccgtggctgagctcagctggagggagcctggccccttgcccggtctcgcagccaccccgagcgttccaccacactgtccgcccttggcctcggcacacgctcaccttttctgttggttacgggacttctcattgtcttaatttcgctttgtgcatcttcccctccagacccaatgtctctgttttcttttccttttgaaaaagagtccctggaaaagaaagaataagtggattctcccccaggagaatcctttttgcaaagataggcaaaaaggattgaatccataccagaacacgtagacaggctgtaatattcaaaccacctctgggccaatgcatttccaaaggatgcctttctcgccatatgcctcccctggcccccagcccctctgcctcggccttgtcagttgctgagctgggcttggctcctttctggaaaatgacagtatttttggcagggagaaggtgcgcaggcctccttgctgctctctggtttggttgggaggtgtgtttacctcttgctcctcattcctcccctgcccttttctctggaatatctaagatgtgagctgcattgactctgaagacgtttgaggaacaggagtgggcactgatagaaaggacttcaacgccagtgactgtgtacctccagcagaagaaaatcaggtgtctggtcttgggggcactgtgctcacttctagagagaagaaaaaggctgggtttggacttcatgcctcctcactggtgaaacccaggatgtagatagagggccacacccaccctgtccagagtagagggcacctgtccacgtggccagggcccatgctgccaccctcgaggagatggaaccctgtgatgcaaaagctttgctggtgtgtttggggcataaggcactgctccccttccatctctagcagatatcatcttctcagccaattctgtaggacactgaggctcttgtttgacatggtgtgtggatggggacttgccccaagactgagcaggtctgccctttcattggggtgtatacatatcaggggaccctgaggtggcaccgtactcagtgttgtgatgcccccacctagggaggactcaatgctctttgtatgccttatgcagcgctgatctgtccctggagttcccaggttcccagctccccccctgcaagccttgaagcctccagcaacgtctatctccaggagagcagggcagcctatgcaagtgttccggcaggaccagaagtggccactcaacacacgtcctcaccagtcaccccaaatggagacactcgcagacctgcagttctcagaccgaaggtgctgccttcatcctccccacctaatgcatttttgaaaccaaaggtacctagcctcagagacagagaaggagagggggagatcttgagtctaagaggaaccctttagctgtttctgcagctgaggtcagtttcaggagggtgaagctgatccccaggaatggatcagctgccatgggcacagcctccgatttgagcctctccggctgccagccagggggcctgggccagaccagggctctgtccttccgtgactttattaaagcaacatttgccacatgtttaagccgcaaaggtattagcaatgcttgcatcattaataatcattcagttgaaggtcaagcccatagacacacactctctgctggtaagaaaccatagcccagaactgagccaataaggttgtttgaacctgagagtgtgtaatggtcatttgggccaagcctcagctagggctgctgcctggacgcctgaggggcagcttatcacagtgcaaggggacagggtaaacagcagggggtggggtgtgagcttggagggcccctcccctggatttcctccaacacctgcttggatactaggcccactgtccctgaagggaatgtcagggaagtgtgcctgtgagctgaattaaaggactggcctttccagaaaacgctttggatctgagcagagtagtcagtttctcagacactcattccatactgcaccgtacatgccagcgtacccattgcaccgaaagcaggcccttagggcaggaagggacgatgagcaagtctgccacaccacctggtgactgggaagggctgcttctctcgtaagggtcttggggagaagtaagcccgcagcctgcctctgcacctcgttccagtgtcctgccaggctctgtactgtcctttgtgtatgaagaaaatgctgttagccctctctcaggctgctgttctgtgggtgctgagagctgccccccatcaccacgccatcacacccctctgagcagaagcaaatctgaggctgaagaattaagttttccccaagcaaggaaggcaggtggtcagagagatcaaacgctgaggcgtggggattgcaggattcaggaggcagcccctttggggaagaggagggtgcattttccatggagcccatgtcagagtccactccagctcagcaggaaagtggaattgcccagtactgcctgccagctgggtctcccaagcaactaccccaagacataccaacagtgaagccaggacagcaccatgccatcggcgctccagtctgtctggctgggaggaaagtgctgggcatcttacagtaactctagaagttcctttgactaggctgcaatcccacctatatgctcagccctaagagctgtggtttcctgtgctctcatttgtccattcattcattcattcattcattcagcaaataatctgaaatccagtctgaactaaggcctgagctgtggataccatggcgcgtgagttagatgtggtccctgccctcatggggctgacagtcctaaaatcaagtgctaggacacagtggccattgagctgggagcattcttccctctaccgcttaagccactgatggctgcgagcttgaagagagggattctgagggagagcttggtccatctggtcaccaaggctgggcgggacagagcagtcaagaaccacggtgtggcttgagaaacagtcctgcttcctgagcctctttgctctgcctcttggggcaagctccttaacctgtctgtatttttatgcctctgtctcccattcagttcctccttgaatacctctttctacagagaggcacgggctcccctgaaggattgtcgaggccagggttcgggaagtacactgccatcggtcaggggacagctgcctcccaccttgcctgggtgatggtgaatgggactcatcttttcctgccttgcttttgaggagatggttgaatttaagctaacaggaaagccaaaccagcaccctcctttgtgctctgagaggttggagacatctggtccaccccattgcccctgcccctggcaagccctgaagtcgggagaggtgaccacaggtctgaaaatcagccagtgccaacattgcttgccctgcaaggtgcaactgagcccacatagcgcattcatagtttccctgaccacagccttgggaagacggtggaaacccgaggatgtgtgggtttcccagctaacggacaagctcccctgccacacccagtgcccacgcatgctcacatacatacagcagaccacaaccctgttgccaagcagtgcttccaagggatagcgatccagattccaacattgtcttggagagggttagtccacatccaagttgcgtgagataagatgcaaagggctctgtgtggatgaggaacgcaccttagaggagtgggaaaggccaccagggttgggccctgtttaggtaattcctgttggcagcacctagagagagcatctgagctgaaggagtgggaaactttgcccaagcaatggcacgggcagcgggctctttctggcgccctgtgctggagcagggccaagtcttagggcatcacaaacagcccatttgatggagggagcagggacatagcacatttttgtctgtctttgtgaggctgctttgctaactctctgaggagaggaagcctctcgggctttccgtcggctggggctagtgccagagaatcccttctcagtggccagcaggttcctgggaggccggcacaaggcaccgctccccactcatgacaccttggtgcagagtgacctcctgcccagtcaccactccggccagccccagccaaacacacaaaagcccatggttgcggttgcatctacaccgttagttggcaaaggatcctgcttgagctctgcgtggtggccaaggagtagcatggaggagggccctgattttaaaaaggaaaaatagagaggcctcaaaacaatgaaacaaagagcttgatatgtcaagaggagaccaaggccctgggaggcataggcaagccgggcagagtcagaccagtgccctcccttgaccatctcctagcattccttaacctagacaggggctaccccatgtgagtccaagccagactttgtggctgtccccagcctgcacagcccaagcccagggaagtgtcctttctttcccttccttactaataatgggccttcctgagacacattcagagaaggatcagagagaaaggagaaccatccaggagagccacaagcgtccaccaaacagtgtctcaggcctcacctgaagctgctgttcctcctatcagcacactagtattaaatgggtgttccataatgaggagaatggaaataggtacaaggcatctagcttaggacagaatcggatttcggcatgtgaaggaatcccagagctgatctcattgaaatgatctatcgtacagacaaggatatgcaaatccacagaagtgaagggatttttgctcaagatcacatagctggtaaactaaggtaaggttagggcttgaacttgggccttctgactccttgtccagtcagtgttctttcatctcaccacagctgcctcctttgaaacagaggtattaagatctgtccttctggttcaccctctcatacctctttactgcgtctcccacatcccccacatgcctcccaaaatgaaagacaaacaggattgtttctgagaccaagatcagtctgtctgtgatcagcctgtgtgtggttcacccagtcatgcaattaagggcagatctgggccagtggaataggatagctgattggtgtttgttactgtgaaccctagaccgtaccccgtagaatggtgtctcttgctttgtaacacatcgggccttcagtgtgctgtattcctcagaagtgagggcatctcggtccattctgcccatggccacagggtgcagagaggcagcagggcccatgcaagctgccaccctgggatttgctgggctggagttcaacagatgtaaagacttcagtgaagcaataaacacaaaactctgggagaagatatccagaattttgtacattactctgtttctttttcaaaaatgaggcagatcagatgcccctgagctgcccctttttttctgattcccaactgcaatgtcctcagtcagtgttgtccctctgcccggctccccagctctttgccaacctcttcacactccccttgagctgagcatcagtcgcctgtgacgtggccaccttctgtcctgctcccactcccgacccatgctggaccccggaggacctcctgccccgcccccaccacacacccatatcccccaccattccaatttgttctttcccgtggggaattttttttcccagcgtctccatcccttcctacatatccacacacacacaaattggtctgatcttttttccattggttaaacatttaactccatgccagaccttgttttaacccctctcacatcatgttctttccttttttgcgagttattttgcattaaccaactttgtcagtgacagatgcgtatctgagggtgtcacacacgaccttcagcagggaagacttctgggccatggagggccgtctaatacatggacttataaactgactgcatgagcaatgaaaaggccaaattattctgaattttttttgaatcactgtaaaaaaactgatttcttttgtatagagaacactaaacgtataataaaagttgttcaaaatgga

SEQ ID NO: 225 - DNA, 10717 bp, Homo sapiens
gattccacccagggcagggctgctgtgttttctctgaggccaactttcagggaaaagaaggatcttgctgggattttgctcaggcctaagtctgccagctgggatggcctggggcctaagaaatgcctagcttccctccccacctgtccccatggagggagactgagaagacgctggatgaaccagaccatggctccttcaggagagaggttgattgacttatgtgcaatttgggacgctggagtttaccttccctccgcagcctggaacagagcctcctctggtgttgcaaggaagaggctgaatgaggcagagaagctgagtgctgtccaggaggcccagttaaagcggctcgaggtgacaagaccccgagtgctggggagcagggagcagggccaggtgccgaggatggccaggcagccaccgccgccctgggtccatgcagccttcctcctctgcctcctcagtcttggcggagccatcgaaattcctatggatctgacgcagccgccaaccatcaccaagcagtcagcgaaggatcacatcgtggacccccgtgataacatcctgattgagtgtgaagcaaaagggaaccctgcccccagcttccactggacacgaaacagcagattcttcaacatcgccaaggacccccgggtgtccatgaggaggaggtctgggaccctggtgattgacttccgcagtggcgggcggccggaggaatatgagggggaatatcagtgcttcgcccgcaacaaatttggcacggccctgtccaataggatccgcctgcaggtgtctaaatctcctctgtggcccaaggaaaacctagaccctgtcgtggtccaagagggcgctcctttgacgctccagtgcaaccccccgcctggacttccatccccggtcatcttctggatgagcagctccatggagcccatcacccaagacaaacgtgtctctcagggccataacggagacctatacttctccaacgtgatgctgcaggacatgcagaccgactacagttgtaacgcccgcttccacttcacccacaccatccagcagaagaaccctttcaccctcaaggtcctcaccacccgaggagttgcagaaagaacaccaagcttcatgtatccccagggcaccgcgagcagccagatggtgcttcgtggcatggacctcctgctggaatgcatcgcctccggggtcccaacaccagacatcgcatggtacaagaaaggtggggacctcccatctgataaggccaagtttgagaactttaataaggccctgcgtatcacaaatgtctctgaggaagactccggggagtatttctgcctggcctccaacaagatgggcagcatccggcacacgatctcggtgagagtaaaggctgctccctactggctggacgaacccaagaaccttattctggctcctggcgaggatgggagactggtgtgtcgagccaatggaaaccccaaacccactgtccagtggatggtgaatggggaacctttgcaatcggcaccacctaacccaaaccgtgaggtggccggagacaccatcatcttccgggacacccagatcagcagcagggctgtgtaccagtgcaacacctccaacgagcatggctacctgctggccaacgcctttgtcagtgtgctggatgtgccgcctcggatgctgtcgccccggaaccagctcattcgagtgattctttacaaccggacgcggctggactgccctttctttgggtctcccatccccacactgcgatggtttaagaatgggcaaggaagcaacctggatggtggcaactaccatgtttatgagaacggcagtctggaaattaagatgatccgcaaagaggaccagggcatctacacctgtgtcgccaccaacatcctgggcaaagctgaaaaccaagtccgcctggaggtcaaagaccccaccaggatctaccggatgcccgaggaccaggtggccagaaggggcaccacggtgcagctggagtgtcgggtgaagcacgacccctccctgaaactcaccgtctcctggctgaaggatgacgagccgctctatattggaaacaggatgaagaaggaagacgactccctgaccatctttggggtggcagagcgggaccagggcagttacacgtgtgtcgccagcaccgagctagaccaagacctggccaaggcctacctcaccgtgctagctgatcaggccactccaactaaccgtttggctgccctgcccaaaggacggccagaccggccccgggacctggagctgaccgacctggccgagaggagcgtgcggctgacctggatccccggggatgctaacaacagccccatcacagactacgtcgtccagtttgaagaagaccagttccaacctggggtctggcatgaccattccaagtaccccggcagcgttaactcagccgtcctccggctgtccccgtatgtcaactaccagttccgtgtcattgccatcaacgaggttgggagcagccaccccagcctcccatccgagcgctaccgaaccagtggagcaccccccgagtccaatcctggtgacgtgaagggagaggggaccagaaagaacaacatggagatcacgtggacgcccatgaatgccacctcggcctttggccccaacctgcgctacattgtcaagtggaggcggagagagactcgagaggcctggaacaacgtcacagtgtggggctctcgctacgtggtggggcagaccccagtctacgtgccctatgagatccgagtccaggctgaaaatgacttcgggaagggccctgagccagagtccgtcatcggttactccggagaagattatcccagggctgcgcccactgaagttaaagtccgagtcatgaacagcacagccatcagccttcagtggaaccgcgtctactccgacacggtccagggccagctcagagagtaccgagcctactactggagggagagcagcttgctgaagaacctgtgggtgtctcagaagagacagcaagccagcttccctggtgaccgcctccgtggcgtggtgtcccgcctcttcccctacagtaactacaagctggagatggttgtggtcaatgggagaggtgatgggcctcgcagtgagaccaaggagttcaccaccccggaaggagtacccagtgcccctaggcgtttccgagtccggcagcccaacctggagacaatcaacctggaatgggatcatcctgagcatccaaatgggatcatgattggatacactctcaaatatgtggcctttaacgggaccaaagtaggaaagcagatagtggaaaacttctctcccaatcagaccaagttcacggtgcaaagaacggaccccgtgtcacgctaccgctttaccctcagcgccaggacgcaggtgggctctggggaagccgtcacagaggagtcaccagcacccccgaatgaagctactccaaccgcagctcctcccacattgcccccgactaccgtgggtgcgacgggcgctgtgagcagtaccgatgctactgccattgctgccaccaccgaagccacaacagtccccatcatcccaactgtcgcacctaccaccatcgccaccaccaccaccgtcgccacaactactacaaccactgctgccgccaccaccaccacggagagtcctcccaccaccacctccgggactaagatacacgaatccgcccctgatgagcagtccatatggaacgtcacggtgctccccaacagtaaatgggccaacatcacctggaagcacaatttcgggcccggaactgactttgtggttgagtacatcgacagcaaccatacgaaaaaaactgtcccagttaaggcccaggctcagcctatacagctgacagacctctatcccgggatgacatacacgttgcgggtttattcccgggacaacgagggcatcagcagtaccgtcatcacctttatgaccagtacagcttacaccaacaaccaagcggacatcgccacccagggctggttcattgggcttatgtgcgccatcgccctcctggtgctgatcctgctcatcgtctgtttcatcaagaggagtcgcggcggcaagtacccagtacgagaaaagaaggatgttccccttggccctgaagaccccaaggaagaggatggctcatttgactatagtgatgaggacaacaagcccctgcagggcagtcagacatctctggacggcaccatcaagcagcaggagagtgacgacagcctggtggactatggcgagggtggcgagggtcagttcaatgaagacggctccttcatcggccagtacacggtcaaaaaggacaaggaggaaacagagggcaacgaaagctcagaggccacgtcacctgtcaatgctatctactctctggcctaacggagcccacccaggcacagccaccactttgcaagtgggaggaggggagaaggggagacaaaaccactgcagacctaccacgaagccaccaccaccttcagtaacaagggtacgatatgggggtctgccaagctgtgaggaccagtagccaccaagccacccacaagccccctcccaatgaccccccttcagccccgggtgccaccagtgtgggagagctggagccgtggctgagctcagctggagggagcctggccccttgcccggtctcgcagccaccccgagcgttccaccacactgtccgcccttggcctcggcacacgctcaccttttctgttggttacgggacttctcattgtcttaatttcgctttgtgcatcttcccctccagacccaatgtctctgttttcttttccttttgaaaaagagtccctggaaaagaaagaataagtggattctcccccaggagaatcctttttgcaaagataggcaaaaaggattgaatccataccagaacacgtagacaggctgtaatattcaaaccacctctgggccaatgcatttccaaaggatgcctttctcgccatatgcctcccctggcccccagcccctctgcctcggccttgtcagttgctgagctgggcttggctcctttctggaaaatgacagtatttttggcagggagaaggtgcgcaggcctccttgctgctctctggtttggttgggaggtgtgtttacctcttgctcctcattcctcccctgcccttttctctggaatatctaagatgtgagctgcattgactctgaagacgtttgaggaacaggagtgggcactgatagaaaggacttcaacgccagtgactgtgtacctccagcagaagaaaatcaggtgtctggtcttgggggcactgtgctcacttctagagagaagaaaaaggctgggtttggacttcatgcctcctcactggtgaaacccaggatgtagatagagggccacacccaccctgtccagagtagagggcacctgtccacgtggccagggcccatgctgccaccctcgaggagatggaaccctgtgatgcaaaagctttgctggtgtgtttggggcataaggcactgctccccttccatctctagcagatatcatcttctcagccaattctgtaggacactgaggctcttgtttgacatggtgtgtggatggggacttgccccaagactgagcaggtctgccctttcattggggtgtatacatatcaggggaccctgaggtggcaccgtactcagtgttgtgatgcccccacctagggaggactcaatgctctttgtatgccttatgcagcgctgatctgtccctggagttcccaggttcccagctccccccctgcaagccttgaagcctccagcaacgtctatctccaggagagcagggcagcctatgcaagtgttccggcaggaccagaagtggccactcaacacacgtcctcaccagtcaccccaaatggagacactcgcagacctgcagttctcagaccgaaggtgctgccttcatcctccccacctaatgcatttttgaaaccaaaggtacctagcctcagagacagagaaggagagggggagatcttgagtctaagaggaaccctttagctgtttctgcagctgaggtcagtttcaggagggtgaagctgatccccaggaatggatcagctgccatgggcacagcctccgatttgagcctctccggctgccagccagggggcctgggccagaccagggctctgtccttccgtgactttattaaagcaacatttgccacatgtttaagccgcaaaggtattagcaatgcttgcatcattaataatcattcagttgaaggtcaagcccatagacacacactctctgctggtaagaaaccatagcccagaactgagccaataaggttgtttgaacctgagagtgtgtaatggtcatttgggccaagcctcagctagggctgctgcctggacgcctgaggggcagcttatcacagtgcaaggggacagggtaaacagcagggggtggggtgtgagcttggagggcccctcccctggatttcctccaacacctgcttggatactaggcccactgtccctgaagggaatgtcagggaagtgtgcctgtgagctgaattaaaggactggcctttccagaaaacgctttggatctgagcagagtagtcagtttctcagacactcattccatactgcaccgtacatgccagcgtacccattgcaccgaaagcaggcccttagggcaggaagggacgatgagcaagtctgccacaccacctggtgactgggaagggctgcttctctcgtaagggtcttggggagaagtaagcccgcagcctgcctctgcacctcgttccagtgtcctgccaggctctgtactgtcctttgtgtatgaagaaaatgctgttagccctctctcaggctgctgttctgtgggtgctgagagctgccccccatcaccacgccatcacacccctctgagcagaagcaaatctgaggctgaagaattaagttttccccaagcaaggaaggcaggtggtcagagagatcaaacgctgaggcgtggggattgcaggattcaggaggcagcccctttggggaagaggagggtgcattttccatggagcccatgtcagagtccactccagctcagcaggaaagtggaattgcccagtactgcctgccagctgggtctcccaagcaactaccccaagacataccaacagtgaagccaggacagcaccatgccatcggcgctccagtctgtctggctgggaggaaagtgctgggcatcttacagtaactctagaagttcctttgactaggctgcaatcccacctatatgctcagccctaagagctgtggtttcctgtgctctcatttgtccattcattcattcattcattcattcagcaaataatctgaaatccagtctgaactaaggcctgagctgtggataccatggcgcgtgagttagatgtggtccctgccctcatggggctgacagtcctaaaatcaagtgctaggacacagtggccattgagctgggagcattcttccctctaccgcttaagccactgatggctgcgagcttgaagagagggattctgagggagagcttggtccatctggtcaccaaggctgggcgggacagagcagtcaagaaccacggtgtggcttgagaaacagtcctgcttcctgagcctctttgctctgcctcttggggcaagctccttaacctgtctgtatttttatgcctctgtctcccattcagttcctccttgaatacctctttctacagagaggcacgggctcccctgaaggattgtcgaggccagggttcgggaagtacactgccatcggtcaggggacagctgcctcccaccttgcctgggtgatggtgaatgggactcatcttttcctgccttgcttttgaggagatggttgaatttaagctaacaggaaagccaaaccagcaccctcctttgtgctctgagaggttggagacatctggtccaccccattgcccctgcccctggcaagccctgaagtcgggagaggtgaccacaggtctgaaaatcagccagtgccaacattgcttgccctgcaaggtgcaactgagcccacatagcgcattcatagtttccctgaccacagccttgggaagacggtggaaacccgaggatgtgtgggtttcccagctaacggacaagctcccctgccacacccagtgcccacgcatgctcacatacatacagcagaccacaaccctgttgccaagcagtgcttccaagggatagcgatccagattccaacattgtcttggagagggttagtccacatccaagttgcgtgagataagatgcaaagggctctgtgtggatgaggaacgcaccttagaggagtgggaaaggccaccagggttgggccctgtttaggtaattcctgttggcagcacctagagagagcatctgagctgaaggagtgggaaactttgcccaagcaatggcacgggcagcgggctctttctggcgccctgtgctggagcagggccaagtcttagggcatcacaaacagcccatttgatggagggagcagggacatagcacatttttgtctgtctttgtgaggctgctttgctaactctctgaggagaggaagcctctcgggctttccgtcggctggggctagtgccagagaatcccttctcagtggccagcaggttcctgggaggccggcacaaggcaccgctccccactcatgacaccttggtgcagagtgacctcctgcccagtcaccactccggccagccccagccaaacacacaaaagcccatggttgcggttgcatctacaccgttagttggcaaaggatcctgcttgagctctgcgtggtggccaaggagtagcatggaggagggccctgattttaaaaaggaaaaatagagaggcctcaaaacaatgaaacaaagagcttgatatgtcaagaggagaccaaggccctgggaggcataggcaagccgggcagagtcagaccagtgccctcccttgaccatctcctagcattccttaacctagacaggggctaccccatgtgagtccaagccagactttgtggctgtccccagcctgcacagcccaagcccagggaagtgtcctttctttcccttccttactaataatgggccttcctgagacacattcagagaaggatcagagagaaaggagaaccatccaggagagccacaagcgtccaccaaacagtgtctcaggcctcacctgaagctgctgttcctcctatcagcacactagtattaaatgggtgttccataatgaggagaatggaaataggtacaaggcatctagcttaggacagaatcggatttcggcatgtgaaggaatcccagagctgatctcattgaaatgatctatcgtacagacaaggatatgcaaatccacagaagtgaagggatttttgctcaagatcacatagctggtaaactaaggtaaggttagggcttgaacttgggccttctgactccttgtccagtcagtgttctttcatctcaccacagctgcctcctttgaaacagaggtattaagatctgtccttctggttcaccctctcatacctctttactgcgtctcccacatcccccacatgcctcccaaaatgaaagacaaacaggattgtttctgagaccaagatcagtctgtctgtgatcagcctgtgtgtggttcacccagtcatgcaattaagggcagatctgggccagtggaataggatagctgattggtgtttgttactgtgaaccctagaccgtaccccgtagaatggtgtctcttgctttgtaacacatcgggccttcagtgtgctgtattcctcagaagtgagggcatctcggtccattctgcccatggccacagggtgcagagaggcagcagggcccatgcaagctgccaccctgggatttgctgggctggagttcaacagatgtaaagacttcagtgaagcaataaacacaaaactctgggagaagatatccagaattttgtacattactctgtttctttttcaaaaatgaggcagatcagatgcccctgagctgcccctttttttctgattcccaactgcaatgtcctcagtcagtgttgtccctctgcccggctccccagctctttgccaacctcttcacactccccttgagctgagcatcagtcgcctgtgacgtggccaccttctgtcctgctcccactcccgacccatgctggaccccggaggacctcctgccccgcccccaccacacacccatatcccccaccattccaatttgttctttcccgtggggaattttttttcccagcgtctccatcccttcctacatatccacacacacacaaattggtctgatcttttttccattggttaaacatttaactccatgccagaccttgttttaacccctctcacatcatgttctttccttttttgcgagttattttgcattaaccaactttgtcagtgacagatgcgtatctgagggtgtcacacacgaccttcagcagggaagacttctgggccatggagggccgtctaatacatggacttataaactgactgcatgagcaatgaaaaggccaaattattctgaattttttttgaatcactgtaaaaaaactgatttcttttgtatagagaacactaaacgtataataaaagttgttcaaaatgga

SEQ ID NO: 226 - DNA, 10372 bp, Homo sapiens
ctgagtgctgtccaggaggcccagttaaagcggctcgaggtgacaagaccccgagtgctggggagcagggagcagggccaggtgccgaggatggccaggcagccaccgccgccctgggtccatgcagccttcctcctctgcctcctcagtcttggcggagccatcgaaattcctatggatccaagcattcagaatgagctgacgcagccgccaaccatcaccaagcagtcagcgaaggatcacatcgtggacccccgtgataacatcctgattgagtgtgaagcaaaagggaaccctgcccccagcttccactggacacgaaacagcagattcttcaacatcgccaaggacccccgggtgtccatgaggaggaggtctgggaccctggtgattgacttccgcagtggcgggcggccggaggaatatgagggggaatatcagtgcttcgcccgcaacaaatttggcacggccctgtccaataggatccgcctgcaggtgtctaaatctcctctgtggcccaaggaaaacctagaccctgtcgtggtccaagagggcgctcctttgacgctccagtgcaaccccccgcctggacttccatccccggtcatcttctggatgagcagctccatggagcccatcacccaagacaaacgtgtctctcagggccataacggagacctatacttctccaacgtgatgctgcaggacatgcagaccgactacagttgtaacgcccgcttccacttcacccacaccatccagcagaagaaccctttcaccctcaaggtcctcaccacccgaggagttgcagaaagaacaccaagcttcatgtatccccagggcaccgcgagcagccagatggtgcttcgtggcatggacctcctgctggaatgcatcgcctccggggtcccaacaccagacatcgcatggtacaagaaaggtggggacctcccatctgataaggccaagtttgagaactttaataaggccctgcgtatcacaaatgtctctgaggaagactccggggagtatttctgcctggcctccaacaagatgggcagcatccggcacacgatctcggtgagagtaaaggctgctccctactggctggacgaacccaagaaccttattctggctcctggcgaggatgggagactggtgtgtcgagccaatggaaaccccaaacccactgtccagtggatggtgaatggggaacctttgcaatcggcaccacctaacccaaaccgtgaggtggccggagacaccatcatcttccgggacacccagatcagcagcagggctgtgtaccagtgcaacacctccaacgagcatggctacctgctggccaacgcctttgtcagtgtgctggatgtgccgcctcggatgctgtcgccccggaaccagctcattcgagtgattctttacaaccggacgcggctggactgccctttctttgggtctcccatccccacactgcgatggtttaagaatgggcaaggaagcaacctggatggtggcaactaccatgtttatgagaacggcagtctggaaattaagatgatccgcaaagaggaccagggcatctacacctgtgtcgccaccaacatcctgggcaaagctgaaaaccaagtccgcctggaggtcaaagaccccaccaggatctaccggatgcccgaggaccaggtggccagaaggggcaccacggtgcagctggagtgtcgggtgaagcacgacccctccctgaaactcaccgtctcctggctgaaggatgacgagccgctctatattggaaacaggatgaagaaggaagacgactccctgaccatctttggggtggcagagcgggaccagggcagttacacgtgtgtcgccagcaccgagctagaccaagacctggccaaggcctacctcaccgtgctaggacggccagaccggccccgggacctggagctgaccgacctggccgagaggagcgtgcggctgacctggatccccggggatgctaacaacagccccatcacagactacgtcgtccagtttgaagaagaccagttccaacctggggtctggcatgaccattccaagtaccccggcagcgttaactcagccgtcctccggctgtccccgtatgtcaactaccagttccgtgtcattgccatcaacgaggttgggagcagccaccccagcctcccatccgagcgctaccgaaccagtggagcaccccccgagtccaatcctggtgacgtgaagggagaggggaccagaaagaacaacatggagatcacgtggacgcccatgaatgccacctcggcctttggccccaacctgcgctacattgtcaagtggaggcggagagagactcgagaggcctggaacaacgtcacagtgtggggctctcgctacgtggtggggcagaccccagtctacgtgccctatgagatccgagtccaggctgaaaatgacttcgggaagggccctgagccagagtccgtcatcggttactccggagaagattatcccagggctgcgcccactgaagttaaagtccgagtcatgaacagcacagccatcagccttcagtggaaccgcgtctactccgacacggtccagggccagctcagagagtaccgagcctactactggagggagagcagcttgctgaagaacctgtgggtgtctcagaagagacagcaagccagcttccctggtgaccgcctccgtggcgtggtgtcccgcctcttcccctacagtaactacaagctggagatggttgtggtcaatgggagaggtgatgggcctcgcagtgagaccaaggagttcaccaccccggaaggagtacccagtgcccctaggcgtttccgagtccggcagcccaacctggagacaatcaacctggaatgggatcatcctgagcatccaaatgggatcatgattggatacactctcaaatatgtggcctttaacgggaccaaagtaggaaagcagatagtggaaaacttctctcccaatcagaccaagttcacggtgcaaagaacggaccccgtgtcacgctaccgctttaccctcagcgccaggacgcaggtgggctctggggaagccgtcacagaggagtcaccagcacccccgaatgaagctactccaaccgcagctcctcccacattgcccccgactaccgtgggtgcgacgggcgctgtgagcagtaccgatgctactgccattgctgccaccaccgaagccacaacagtccccatcatcccaactgtcgcacctaccaccatcgccaccaccaccaccgtcgccacaactactacaaccactgctgccgccaccaccaccacggagagtcctcccaccaccacctccgggactaagatacacgaatccgcccctgatgagcagtccatatggaacgtcacggtgctccccaacagtaaatgggccaacatcacctggaagcacaatttcgggcccggaactgactttgtggttgagtacatcgacagcaaccatacgaaaaaaactgtcccagttaaggcccaggctcagcctatacagctgacagacctctatcccgggatgacatacacgttgcgggtttattcccgggacaacgagggcatcagcagtaccgtcatcacctttatgaccagtacagcttacaccaacaaccaagcggacatcgccacccagggctggttcattgggcttatgtgcgccatcgccctcctggtgctgatcctgctcatcgtctgtttcatcaagaggagtcgcggcggcaagtacccagtacgagaaaagaaggatgttccccttggccctgaagaccccaaggaagaggatggctcatttgactatagtgatgaggacaacaagcccctgcagggcagtcagacatctctggacggcaccatcaagcagcaggagagtgacgacagcctggtggactatggcgagggtggcgagggtcagttcaatgaagacggctccttcatcggccagtacacggtcaaaaaggacaaggaggaaacagagggcaacgaaagctcagaggccacgtcacctgtcaatgctatctactctctggcctaacggagcccacccaggcacagccaccactttgcaagtgggaggaggggagaaggggagacaaaaccactgcagacctaccacgaagccaccaccaccttcagtaacaagggtacgatatgggggtctgccaagctgtgaggaccagtagccaccaagccacccacaagccccctcccaatgaccccccttcagccccgggtgccaccagtgtgggagagctggagccgtggctgagctcagctggagggagcctggccccttgcccggtctcgcagccaccccgagcgttccaccacactgtccgcccttggcctcggcacacgctcaccttttctgttggttacgggacttctcattgtcttaatttcgctttgtgcatcttcccctccagacccaatgtctctgttttcttttccttttgaaaaagagtccctggaaaagaaagaataagtggattctcccccaggagaatcctttttgcaaagataggcaaaaaggattgaatccataccagaacacgtagacaggctgtaatattcaaaccacctctgggccaatgcatttccaaaggatgcctttctcgccatatgcctcccctggcccccagcccctctgcctcggccttgtcagttgctgagctgggcttggctcctttctggaaaatgacagtatttttggcagggagaaggtgcgcaggcctccttgctgctctctggtttggttgggaggtgtgtttacctcttgctcctcattcctcccctgcccttttctctggaatatctaagatgtgagctgcattgactctgaagacgtttgaggaacaggagtgggcactgatagaaaggacttcaacgccagtgactgtgtacctccagcagaagaaaatcaggtgtctggtcttgggggcactgtgctcacttctagagagaagaaaaaggctgggtttggacttcatgcctcctcactggtgaaacccaggatgtagatagagggccacacccaccctgtccagagtagagggcacctgtccacgtggccagggcccatgctgccaccctcgaggagatggaaccctgtgatgcaaaagctttgctggtgtgtttggggcataaggcactgctccccttccatctctagcagatatcatcttctcagccaattctgtaggacactgaggctcttgtttgacatggtgtgtggatggggacttgccccaagactgagcaggtctgccctttcattggggtgtatacatatcaggggaccctgaggtggcaccgtactcagtgttgtgatgcccccacctagggaggactcaatgctctttgtatgccttatgcagcgctgatctgtccctggagttcccaggttcccagctccccccctgcaagccttgaagcctccagcaacgtctatctccaggagagcagggcagcctatgcaagtgttccggcaggaccagaagtggccactcaacacacgtcctcaccagtcaccccaaatggagacactcgcagacctgcagttctcagaccgaaggtgctgccttcatcctccccacctaatgcatttttgaaaccaaaggtacctagcctcagagacagagaaggagagggggagatcttgagtctaagaggaaccctttagctgtttctgcagctgaggtcagtttcaggagggtgaagctgatccccaggaatggatcagctgccatgggcacagcctccgatttgagcctctccggctgccagccagggggcctgggccagaccagggctctgtccttccgtgactttattaaagcaacatttgccacatgtttaagccgcaaaggtattagcaatgcttgcatcattaataatcattcagttgaaggtcaagcccatagacacacactctctgctggtaagaaaccatagcccagaactgagccaataaggttgtttgaacctgagagtgtgtaatggtcatttgggccaagcctcagctagggctgctgcctggacgcctgaggggcagcttatcacagtgcaaggggacagggtaaacagcagggggtggggtgtgagcttggagggcccctcccctggatttcctccaacacctgcttggatactaggcccactgtccctgaagggaatgtcagggaagtgtgcctgtgagctgaattaaaggactggcctttccagaaaacgctttggatctgagcagagtagtcagtttctcagacactcattccatactgcaccgtacatgccagcgtacccattgcaccgaaagcaggcccttagggcaggaagggacgatgagcaagtctgccacaccacctggtgactgggaagggctgcttctctcgtaagggtcttggggagaagtaagcccgcagcctgcctctgcacctcgttccagtgtcctgccaggctctgtactgtcctttgtgtatgaagaaaatgctgttagccctctctcaggctgctgttctgtgggtgctgagagctgccccccatcaccacgccatcacacccctctgagcagaagcaaatctgaggctgaagaattaagttttccccaagcaaggaaggcaggtggtcagagagatcaaacgctgaggcgtggggattgcaggattcaggaggcagcccctttggggaagaggagggtgcattttccatggagcccatgtcagagtccactccagctcagcaggaaagtggaattgcccagtactgcctgccagctgggtctcccaagcaactaccccaagacataccaacagtgaagccaggacagcaccatgccatcggcgctccagtctgtctggctgggaggaaagtgctgggcatcttacagtaactctagaagttcctttgactaggctgcaatcccacctatatgctcagccctaagagctgtggtttcctgtgctctcatttgtccattcattcattcattcattcattcagcaaataatctgaaatccagtctgaactaaggcctgagctgtggataccatggcgcgtgagttagatgtggtccctgccctcatggggctgacagtcctaaaatcaagtgctaggacacagtggccattgagctgggagcattcttccctctaccgcttaagccactgatggctgcgagcttgaagagagggattctgagggagagcttggtccatctggtcaccaaggctgggcgggacagagcagtcaagaaccacggtgtggcttgagaaacagtcctgcttcctgagcctctttgctctgcctcttggggcaagctccttaacctgtctgtatttttatgcctctgtctcccattcagttcctccttgaatacctctttctacagagaggcacgggctcccctgaaggattgtcgaggccagggttcgggaagtacactgccatcggtcaggggacagctgcctcccaccttgcctgggtgatggtgaatgggactcatcttttcctgccttgcttttgaggagatggttgaatttaagctaacaggaaagccaaaccagcaccctcctttgtgctctgagaggttggagacatctggtccaccccattgcccctgcccctggcaagccctgaagtcgggagaggtgaccacaggtctgaaaatcagccagtgccaacattgcttgccctgcaaggtgcaactgagcccacatagcgcattcatagtttccctgaccacagccttgggaagacggtggaaacccgaggatgtgtgggtttcccagctaacggacaagctcccctgccacacccagtgcccacgcatgctcacatacatacagcagaccacaaccctgttgccaagcagtgcttccaagggatagcgatccagattccaacattgtcttggagagggttagtccacatccaagttgcgtgagataagatgcaaagggctctgtgtggatgaggaacgcaccttagaggagtgggaaaggccaccagggttgggccctgtttaggtaattcctgttggcagcacctagagagagcatctgagctgaaggagtgggaaactttgcccaagcaatggcacgggcagcgggctctttctggcgccctgtgctggagcagggccaagtcttagggcatcacaaacagcccatttgatggagggagcagggacatagcacatttttgtctgtctttgtgaggctgctttgctaactctctgaggagaggaagcctctcgggctttccgtcggctggggctagtgccagagaatcccttctcagtggccagcaggttcctgggaggccggcacaaggcaccgctccccactcatgacaccttggtgcagagtgacctcctgcccagtcaccactccggccagccccagccaaacacacaaaagcccatggttgcggttgcatctacaccgttagttggcaaaggatcctgcttgagctctgcgtggtggccaaggagtagcatggaggagggccctgattttaaaaaggaaaaatagagaggcctcaaaacaatgaaacaaagagcttgatatgtcaagaggagaccaaggccctgggaggcataggcaagccgggcagagtcagaccagtgccctcccttgaccatctcctagcattccttaacctagacaggggctaccccatgtgagtccaagccagactttgtggctgtccccagcctgcacagcccaagcccagggaagtgtcctttctttcccttccttactaataatgggccttcctgagacacattcagagaaggatcagagagaaaggagaaccatccaggagagccacaagcgtccaccaaacagtgtctcaggcctcacctgaagctgctgttcctcctatcagcacactagtattaaatgggtgttccataatgaggagaatggaaataggtacaaggcatctagcttaggacagaatcggatttcggcatgtgaaggaatcccagagctgatctcattgaaatgatctatcgtacagacaaggatatgcaaatccacagaagtgaagggatttttgctcaagatcacatagctggtaaactaaggtaaggttagggcttgaacttgggccttctgactccttgtccagtcagtgttctttcatctcaccacagctgcctcctttgaaacagaggtattaagatctgtccttctggttcaccctctcatacctctttactgcgtctcccacatcccccacatgcctcccaaaatgaaagacaaacaggattgtttctgagaccaagatcagtctgtctgtgatcagcctgtgtgtggttcacccagtcatgcaattaagggcagatctgggccagtggaataggatagctgattggtgtttgttactgtgaaccctagaccgtaccccgtagaatggtgtctcttgctttgtaacacatcgggccttcagtgtgctgtattcctcagaagtgagggcatctcggtccattctgcccatggccacagggtgcagagaggcagcagggcccatgcaagctgccaccctgggatttgctgggctggagttcaacagatgtaaagacttcagtgaagcaataaacacaaaactctgggagaagatatccagaattttgtacattactctgtttctttttcaaaaatgaggcagatcagatgcccctgagctgcccctttttttctgattcccaactgcaatgtcctcagtcagtgttgtccctctgcccggctccccagctctttgccaacctcttcacactccccttgagctgagcatcagtcgcctgtgacgtggccaccttctgtcctgctcccactcccgacccatgctggaccccggaggacctcctgccccgcccccaccacacacccatatcccccaccattccaatttgttctttcccgtggggaattttttttcccagcgtctccatcccttcctacatatccacacacacacaaattggtctgatcttttttccattggttaaacatttaactccatgccagaccttgttttaacccctctcacatcatgttctttccttttttgcgagttattttgcattaaccaactttgtcagtgacagatgcgtatctgagggtgtcacacacgaccttcagcagggaagacttctgggccatggagggccgtctaatacatggacttataaactgactgcatgagcaatgaaaaggccaaattattctgaattttttttgaatcactgtaaaaaaactgatttcttttgtatagagaacactaaacgtataataaaagttgttcaaaatgga

SEQ ID NO: 227 - DNA, 10665 bp, Homo sapiens
gaggcgctgcaggggacgcgggggaagtggcggcgccggcagcggacagctcggacagcgcccagggccggagcccgagcccttggaggttgattgacttatgtgcaatttgggacgctggagtttaccttccctccgcagcctggaacagagcctcctctggtgttgcaaggaagaggctgaatgaggcagagaagctgagtgctgtccaggaggcccagttaaagcggctcgaggtgacaagaccccgagtgctggggagcagggagcagggccaggtgccgaggatggccaggcagccaccgccgccctgggtccatgcagccttcctcctctgcctcctcagtcttggcggagccatcgaaattcctatggatccaagcattcagaatgagctgacgcagccgccaaccatcaccaagcagtcagcgaaggatcacatcgtggacccccgtgataacatcctgattgagtgtgaagcaaaagggaaccctgcccccagcttccactggacacgaaacagcagattcttcaacatcgccaaggacccccgggtgtccatgaggaggaggtctgggaccctggtgattgacttccgcagtggcgggcggccggaggaatatgagggggaatatcagtgcttcgcccgcaacaaatttggcacggccctgtccaataggatccgcctgcaggtgtctaaatctcctctgtggcccaaggaaaacctagaccctgtcgtggtccaagagggcgctcctttgacgctccagtgcaaccccccgcctggacttccatccccggtcatcttctggatgagcagctccatggagcccatcacccaagacaaacgtgtctctcagggccataacggagacctatacttctccaacgtgatgctgcaggacatgcagaccgactacagttgtaacgcccgcttccacttcacccacaccatccagcagaagaaccctttcaccctcaaggtcctcaccaaccacccttataatgactcgtccttaagaaaccaccctgacatgtacagtgcccgaggagttgcagaaagaacaccaagcttcatgtatccccagggcaccgcgagcagccagatggtgcttcgtggcatggacctcctgctggaatgcatcgcctccggggtcccaacaccagacatcgcatggtacaagaaaggtggggacctcccatctgataaggccaagtttgagaactttaataaggccctgcgtatcacaaatgtctctgaggaagactccggggagtatttctgcctggcctccaacaagatgggcagcatccggcacacgatctcggtgagagtaaaggctgctccctactggctggacgaacccaagaaccttattctggctcctggcgaggatgggagactggtgtgtcgagccaatggaaaccccaaacccactgtccagtggatggtgaatggggaacctttgcaatcggcaccacctaacccaaaccgtgaggtggccggagacaccatcatcttccgggacacccagatcagcagcagggctgtgtaccagtgcaacacctccaacgagcatggctacctgctggccaacgcctttgtcagtgtgctggatgtgccgcctcggatgctgtcgccccggaaccagctcattcgagtgattctttacaaccggacgcggctggactgccctttctttgggtctcccatccccacactgcgatggtttaagaatgggcaaggaagcaacctggatggtggcaactaccatgtttatgagaacggcagtctggaaattaagatgatccgcaaagaggaccagggcatctacacctgtgtcgccaccaacatcctgggcaaagctgaaaaccaagtccgcctggaggtcaaagaccccaccaggatctaccggatgcccgaggaccaggtggccagaaggggcaccacggtgcagctggagtgtcgggtgaagcacgacccctccctgaaactcaccgtctcctggctgaaggatgacgagccgctctatattggaaacaggatgaagaaggaagacgactccctgaccatctttggggtggcagagcgggaccagggcagttacacgtgtgtcgccagcaccgagctagaccaagacctggccaaggcctacctcaccgtgctagctgatcaggccactccaactaaccgtttggctgccctgcccaaaggacggccagaccggccccgggacctggagctgaccgacctggccgagaggagcgtgcggctgacctggatccccggggatgctaacaacagccccatcacagactacgtcgtccagtttgaagaagaccagttccaacctggggtctggcatgaccattccaagtaccccggcagcgttaactcagccgtcctccggctgtccccgtatgtcaactaccagttccgtgtcattgccatcaacgaggttgggagcagccaccccagcctcccatccgagcgctaccgaaccagtggagcaccccccgagtccaatcctggtgacgtgaagggagaggggaccagaaagaacaacatggagatcacgtggacgcccatgaatgccacctcggcctttggccccaacctgcgctacattgtcaagtggaggcggagagagactcgagaggcctggaacaacgtcacagtgtggggctctcgctacgtggtggggcagaccccagtctacgtgccctatgagatccgagtccaggctgaaaatgacttcgggaagggccctgagccagagtccgtcatcggttactccggagaagattatcccagggctgcgcccactgaagttaaagtccgagtcatgaacagcacagccatcagccttcagtggaaccgcgtctactccgacacggtccagggccagctcagagagtaccgagcctactactggagggagagcagcttgctgaagaacctgtgggtgtctcagaagagacagcaagccagcttccctggtgaccgcctccgtggcgtggtgtcccgcctcttcccctacagtaactacaagctggagatggttgtggtcaatgggagaggtgatgggcctcgcagtgagaccaaggagttcaccaccccggaaggagtacccagtgcccctaggcgtttccgagtccggcagcccaacctggagacaatcaacctggaatgggatcatcctgagcatccaaatgggatcatgattggatacactctcaaatatgtggcctttaacgggaccaaagtaggaaagcagatagtggaaaacttctctcccaatcagaccaagttcacggtgcaaagaacggaccccgtgtcacgctaccgctttaccctcagcgccaggacgcaggtgggctctggggaagccgtcacagaggagtcaccagcacccccgaatgaagctactccaaccgcagctcctcccacattgcccccgactaccgtgggtgcgacgggcgctgtgagcagtaccgatgctactgccattgctgccaccaccgaagccacaacagtccccatcatcccaactgtcgcacctaccaccatcgccaccaccaccaccgtcgccacaactactacaaccactgctgccgccaccaccaccacggagagtcctcccaccaccacctccgggactaagatacacgaatccgcccctgatgagcagtccatatggaacgtcacggtgctccccaacagtaaatgggccaacatcacctggaagcacaatttcgggcccggaactgactttgtggttgagtacatcgacagcaaccatacgaaaaaaactgtcccagttaaggcccaggctcagcctatacagctgacagacctctatcccgggatgacatacacgttgcgggtttattcccgggacaacgagggcatcagcagtaccgtcatcacctttatgaccagtacagcttacaccaacaaccaagcggacatcgccacccagggctggttcattgggcttatgtgcgccatcgccctcctggtgctgatcctgctcatcgtctgtttcatcaagaggagtcgcggcggcaagtacccagtacgagaaaagaaggatgttccccttggccctgaagaccccaaggaagaggatggctcatttgactatagtgatgaggacaacaagcccctgcagggcagtcagacatctctggacggcaccatcaagcagcaggagagtgacgacagcctggtggactatggcgagggtggcgagggtcagttcaatgaagacggctccttcatcggccagtacacggtcaaaaaggacaaggaggaaacagagggcaacgaaagctcagaggccacgtcacctgtcaatgctatctactctctggcctaacggagcccacccaggcacagccaccactttgcaagtgggaggaggggagaaggggagacaaaaccactgcagacctaccacgaagccaccaccaccttcagtaacaagggtacgatatgggggtctgccaagctgtgaggaccagtagccaccaagccacccacaagccccctcccaatgaccccccttcagccccgggtgccaccagtgtgggagagctggagccgtggctgagctcagctggagggagcctggccccttgcccggtctcgcagccaccccgagcgttccaccacactgtccgcccttggcctcggcacacgctcaccttttctgttggttacgggacttctcattgtcttaatttcgctttgtgcatcttcccctccagacccaatgtctctgttttcttttccttttgaaaaagagtccctggaaaagaaagaataagtggattctcccccaggagaatcctttttgcaaagataggcaaaaaggattgaatccataccagaacacgtagacaggctgtaatattcaaaccacctctgggccaatgcatttccaaaggatgcctttctcgccatatgcctcccctggcccccagcccctctgcctcggccttgtcagttgctgagctgggcttggctcctttctggaaaatgacagtatttttggcagggagaaggtgcgcaggcctccttgctgctctctggtttggttgggaggtgtgtttacctcttgctcctcattcctcccctgcccttttctctggaatatctaagatgtgagctgcattgactctgaagacgtttgaggaacaggagtgggcactgatagaaaggacttcaacgccagtgactgtgtacctccagcagaagaaaatcaggtgtctggtcttgggggcactgtgctcacttctagagagaagaaaaaggctgggtttggacttcatgcctcctcactggtgaaacccaggatgtagatagagggccacacccaccctgtccagagtagagggcacctgtccacgtggccagggcccatgctgccaccctcgaggagatggaaccctgtgatgcaaaagctttgctggtgtgtttggggcataaggcactgctccccttccatctctagcagatatcatcttctcagccaattctgtaggacactgaggctcttgtttgacatggtgtgtggatggggacttgccccaagactgagcaggtctgccctttcattggggtgtatacatatcaggggaccctgaggtggcaccgtactcagtgttgtgatgcccccacctagggaggactcaatgctctttgtatgccttatgcagcgctgatctgtccctggagttcccaggttcccagctccccccctgcaagccttgaagcctccagcaacgtctatctccaggagagcagggcagcctatgcaagtgttccggcaggaccagaagtggccactcaacacacgtcctcaccagtcaccccaaatggagacactcgcagacctgcagttctcagaccgaaggtgctgccttcatcctccccacctaatgcatttttgaaaccaaaggtacctagcctcagagacagagaaggagagggggagatcttgagtctaagaggaaccctttagctgtttctgcagctgaggtcagtttcaggagggtgaagctgatccccaggaatggatcagctgccatgggcacagcctccgatttgagcctctccggctgccagccagggggcctgggccagaccagggctctgtccttccgtgactttattaaagcaacatttgccacatgtttaagccgcaaaggtattagcaatgcttgcatcattaataatcattcagttgaaggtcaagcccatagacacacactctctgctggtaagaaaccatagcccagaactgagccaataaggttgtttgaacctgagagtgtgtaatggtcatttgggccaagcctcagctagggctgctgcctggacgcctgaggggcagcttatcacagtgcaaggggacagggtaaacagcagggggtggggtgtgagcttggagggcccctcccctggatttcctccaacacctgcttggatactaggcccactgtccctgaagggaatgtcagggaagtgtgcctgtgagctgaattaaaggactggcctttccagaaaacgctttggatctgagcagagtagtcagtttctcagacactcattccatactgcaccgtacatgccagcgtacccattgcaccgaaagcaggcccttagggcaggaagggacgatgagcaagtctgccacaccacctggtgactgggaagggctgcttctctcgtaagggtcttggggagaagtaagcccgcagcctgcctctgcacctcgttccagtgtcctgccaggctctgtactgtcctttgtgtatgaagaaaatgctgttagccctctctcaggctgctgttctgtgggtgctgagagctgccccccatcaccacgccatcacacccctctgagcagaagcaaatctgaggctgaagaattaagttttccccaagcaaggaaggcaggtggtcagagagatcaaacgctgaggcgtggggattgcaggattcaggaggcagcccctttggggaagaggagggtgcattttccatggagcccatgtcagagtccactccagctcagcaggaaagtggaattgcccagtactgcctgccagctgggtctcccaagcaactaccccaagacataccaacagtgaagccaggacagcaccatgccatcggcgctccagtctgtctggctgggaggaaagtgctgggcatcttacagtaactctagaagttcctttgactaggctgcaatcccacctatatgctcagccctaagagctgtggtttcctgtgctctcatttgtccattcattcattcattcattcattcagcaaataatctgaaatccagtctgaactaaggcctgagctgtggataccatggcgcgtgagttagatgtggtccctgccctcatggggctgacagtcctaaaatcaagtgctaggacacagtggccattgagctgggagcattcttccctctaccgcttaagccactgatggctgcgagcttgaagagagggattctgagggagagcttggtccatctggtcaccaaggctgggcgggacagagcagtcaagaaccacggtgtggcttgagaaacagtcctgcttcctgagcctctttgctctgcctcttggggcaagctccttaacctgtctgtatttttatgcctctgtctcccattcagttcctccttgaatacctctttctacagagaggcacgggctcccctgaaggattgtcgaggccagggttcgggaagtacactgccatcggtcaggggacagctgcctcccaccttgcctgggtgatggtgaatgggactcatcttttcctgccttgcttttgaggagatggttgaatttaagctaacaggaaagccaaaccagcaccctcctttgtgctctgagaggttggagacatctggtccaccccattgcccctgcccctggcaagccctgaagtcgggagaggtgaccacaggtctgaaaatcagccagtgccaacattgcttgccctgcaaggtgcaactgagcccacatagcgcattcatagtttccctgaccacagccttgggaagacggtggaaacccgaggatgtgtgggtttcccagctaacggacaagctcccctgccacacccagtgcccacgcatgctcacatacatacagcagaccacaaccctgttgccaagcagtgcttccaagggatagcgatccagattccaacattgtcttggagagggttagtccacatccaagttgcgtgagataagatgcaaagggctctgtgtggatgaggaacgcaccttagaggagtgggaaaggccaccagggttgggccctgtttaggtaattcctgttggcagcacctagagagagcatctgagctgaaggagtgggaaactttgcccaagcaatggcacgggcagcgggctctttctggcgccctgtgctggagcagggccaagtcttagggcatcacaaacagcccatttgatggagggagcagggacatagcacatttttgtctgtctttgtgaggctgctttgctaactctctgaggagaggaagcctctcgggctttccgtcggctggggctagtgccagagaatcccttctcagtggccagcaggttcctgggaggccggcacaaggcaccgctccccactcatgacaccttggtgcagagtgacctcctgcccagtcaccactccggccagccccagccaaacacacaaaagcccatggttgcggttgcatctacaccgttagttggcaaaggatcctgcttgagctctgcgtggtggccaaggagtagcatggaggagggccctgattttaaaaaggaaaaatagagaggcctcaaaacaatgaaacaaagagcttgatatgtcaagaggagaccaaggccctgggaggcataggcaagccgggcagagtcagaccagtgccctcccttgaccatctcctagcattccttaacctagacaggggctaccccatgtgagtccaagccagactttgtggctgtccccagcctgcacagcccaagcccagggaagtgtcctttctttcccttccttactaataatgggccttcctgagacacattcagagaaggatcagagagaaaggagaaccatccaggagagccacaagcgtccaccaaacagtgtctcaggcctcacctgaagctgctgttcctcctatcagcacactagtattaaatgggtgttccataatgaggagaatggaaataggtacaaggcatctagcttaggacagaatcggatttcggcatgtgaaggaatcccagagctgatctcattgaaatgatctatcgtacagacaaggatatgcaaatccacagaagtgaagggatttttgctcaagatcacatagctggtaaactaaggtaaggttagggcttgaacttgggccttctgactccttgtccagtcagtgttctttcatctcaccacagctgcctcctttgaaacagaggtattaagatctgtccttctggttcaccctctcatacctctttactgcgtctcccacatcccccacatgcctcccaaaatgaaagacaaacaggattgtttctgagaccaagatcagtctgtctgtgatcagcctgtgtgtggttcacccagtcatgcaattaagggcagatctgggccagtggaataggatagctgattggtgtttgttactgtgaaccctagaccgtaccccgtagaatggtgtctcttgctttgtaacacatcgggccttcagtgtgctgtattcctcagaagtgagggcatctcggtccattctgcccatggccacagggtgcagagaggcagcagggcccatgcaagctgccaccctgggatttgctgggctggagttcaacagatgtaaagacttcagtgaagcaataaacacaaaactctgggagaagatatccagaattttgtacattactctgtttctttttcaaaaatgaggcagatcagatgcccctgagctgcccctttttttctgattcccaactgcaatgtcctcagtcagtgttgtccctctgcccggctccccagctctttgccaacctcttcacactccccttgagctgagcatcagtcgcctgtgacgtggccaccttctgtcctgctcccactcccgacccatgctggaccccggaggacctcctgccccgcccccaccacacacccatatcccccaccattccaatttgttctttcccgtggggaattttttttcccagcgtctccatcccttcctacatatccacacacacacaaattggtctgatcttttttccattggttaaacatttaactccatgccagaccttgttttaacccctctcacatcatgttctttccttttttgcgagttattttgcattaaccaactttgtcagtgacagatgcgtatctgagggtgtcacacacgaccttcagcagggaagacttctgggccatggagggccgtctaatacatggacttataaactgactgcatgagcaatgaaaaggccaaattattctgaattttttttgaatcactgtaaaaaaactgatttcttttgtatagagaacactaaacgtataataaaagttgttcaaaatgga

SEQ ID NO: 228 - DNA, 10315 bp, Homo sapiens
ctgagtgctgtccaggaggcccagttaaagcggctcgaggtgacaagaccccgagtgctggggagcagggagcagggccaggtgccgaggatggccaggcagccaccgccgccctgggtccatgcagccttcctcctctgcctcctcagtcttggcggagccatcgaaattcctatggatccaagcattcagaatgagctgacgcagccgccaaccatcaccaagcagtcagcgaaggatcacatcgtggacccccgtgataacatcctgattgagtgtgaagcaaaagggaaccctgcccccagcttccactggacacgaaacagcagattcttcaacatcgccaaggacccccgggtgtccatgaggaggaggtctgggaccctggtgattgacttccgcagtggcgggcggccggaggaatatgagggggaatatcagtgcttcgcccgcaacaaatttggcacggccctgtccaataggatccgcctgcaggtgtctaaatctcctctgtggcccaaggaaaacctagaccctgtcgtggtccaagagggcgctcctttgacgctccagtgcaaccccccgcctggacttccatccccggtcatcttctggatgagcagctccatggagcccatcacccaagacaaacgtgtctctcagggccataacggagacctatacttctccaacgtgatgctgcaggacatgcagaccgactacagttgtaacgcccgcttccacttcacccacaccatccagcagaagaaccctttcaccctcaaggtcctcaccaaccacccttataatgactcgtccttaagaaaccaccctgacatgtacagtgcccgaggagttgcagaaagaacaccaagcttcatgtatccccagggcaccgcgagcagccagatggtgcttcgtggcatggacctcctgctggaatgcatcgcctccggggtcccaacaccagacatcgcatggtacaagaaaggtggggacctcccatctgataaggccaagtttgagaactttaataaggccctgcgtatcacaaatgtctctgaggaagactccggggagtatttctgcctggcctccaacaagatgggcagcatccggcacacgatctcggtgagagtaaaggctgctccctactggctggacgaacccaagaaccttattctggctcctggcgaggatgggagactggtgtgtcgagccaatggaaaccccaaacccactgtccagtggatggtgaatggggaacctttgcaatcggcaccacctaacccaaaccgtgaggtggccggagacaccatcatcttccgggacacccagatcagcagcagggctgtgtaccagtgcaacacctccaacgagcatggctacctgctggccaacgcctttgtcagtgtgctggatgtgccgcctcggatgctgtcgccccggaaccagctcattcgagtgattctttacaaccggacgcggctggactgccctttctttgggtctcccatccccacactgcgatggtttaagaatgggcaaggaagcaacctggatggtggcaactaccatgtttatgagaacggcagtctggaaattaagatgatccgcaaagaggaccagggcatctacacctgtgtcgccaccaacatcctgggcaaagctgaaaaccaagtccgcctggaggtcaaagaccccaccaggatctaccggatgcccgaggaccaggtggccagaaggggcaccacggtgcagctggagtgtcgggtgaagcacgacccctccctgaaactcaccgtctcctggctgaaggatgacgagccgctctatattggaaacaggatgaagaaggaagacgactccctgaccatctttggggtggcagagcgggaccagggcagttacacgtgtgtcgccagcaccgagctagaccaagacctggccaaggcctacctcaccgtgctagctgatcaggccactccaactaaccgtttggctgccctgcccaaaggacggccagaccggccccgggacctggagctgaccgacctggccgagaggagcgtgcggctgacctggatccccggggatgctaacaacagccccatcacagactacgtcgtccagtttgaagaagaccagttccaacctggggtctggcatgaccattccaagtaccccggcagcgttaactcagccgtcctccggctgtccccgtatgtcaactaccagttccgtgtcattgccatcaacgaggttgggagcagccaccccagcctcccatccgagcgctaccgaaccagtggagcaccccccgagtccaatcctggtgacgtgaagggagaggggaccagaaagaacaacatggagatcacgtggacgcccatgaatgccacctcggcctttggccccaacctgcgctacattgtcaagtggaggcggagagagactcgagaggcctggaacaacgtcacagtgtggggctctcgctacgtggtggggcagaccccagtctacgtgccctatgagatccgagtccaggctgaaaatgacttcgggaagggccctgagccagagtccgtcatcggttactccggagaagattatcccagggctgcgcccactgaagttaaagtccgagtcatgaacagcacagccatcagccttcagtggaaccgcgtctactccgacacggtccagggccagctcagagagtaccgagcctactactggagggagagcagcttgctgaagaacctgtgggtgtctcagaagagacagcaagccagcttccctggtgaccgcctccgtggcgtggtgtcccgcctcttcccctacagtaactacaagctggagatggttgtggtcaatgggagaggtgatgggcctcgcagtgagaccaaggagttcaccaccccggaaggagtacccagtgcccctaggcgtttccgagtccggcagcccaacctggagacaatcaacctggaatgggatcatcctgagcatccaaatgggatcatgattggatacactctcaaatatgtggcctttaacgggaccaaagtaggaaagcagatagtggaaaacttctctcccaatcagaccaagttcacggtgcaaagaacggaccccgtgtcacgctaccgctttaccctcagcgccaggacgcaggtgggctctggggaagccgtcacagaggagtcaccagcacccccgaatgaagctactccaaccgcagctcctcccacattgcccccgactaccgtgggtgcgacgggcgctgtgagcagtaccgatgctactgccattgctgccaccaccgaagccacaacagtccccatcatcccaactgtcgcacctaccaccatcgccaccaccaccaccgtcgccacaactactacaaccactgctgccgccaccaccaccacggagagtcctcccaccaccacctccgggactaagatacacgaatccgcccctgatgagcagtccatatggaacgtcacggtgctccccaacagtaaatgggccaacatcacctggaagcacaatttcgggcccggaactgactttgtggttgagtacatcgacacttacaccaacaaccaagcggacatcgccacccagggctggttcattgggcttatgtgcgccatcgccctcctggtgctgatcctgctcatcgtctgtttcatcaagaggagtcgcggcggcaagtacccagtacgagaaaagaaggatgttccccttggccctgaagaccccaaggaagaggatggctcatttgactatagtgatgaggacaacaagcccctgcagggcagtcagacatctctggacggcaccatcaagcagcaggagagtgacgacagcctggtggactatggcgagggtggcgagggtcagttcaatgaagacggctccttcatcggccagtacacggtcaaaaaggacaaggaggaaacagagggcaacgaaagctcagaggccacgtcacctgtcaatgctatctactctctggcctaacggagcccacccaggcacagccaccactttgcaagtgggaggaggggagaaggggagacaaaaccactgcagacctaccacgaagccaccaccaccttcagtaacaagggtacgatatgggggtctgccaagctgtgaggaccagtagccaccaagccacccacaagccccctcccaatgaccccccttcagccccgggtgccaccagtgtgggagagctggagccgtggctgagctcagctggagggagcctggccccttgcccggtctcgcagccaccccgagcgttccaccacactgtccgcccttggcctcggcacacgctcaccttttctgttggttacgggacttctcattgtcttaatttcgctttgtgcatcttcccctccagacccaatgtctctgttttcttttccttttgaaaaagagtccctggaaaagaaagaataagtggattctcccccaggagaatcctttttgcaaagataggcaaaaaggattgaatccataccagaacacgtagacaggctgtaatattcaaaccacctctgggccaatgcatttccaaaggatgcctttctcgccatatgcctcccctggcccccagcccctctgcctcggccttgtcagttgctgagctgggcttggctcctttctggaaaatgacagtatttttggcagggagaaggtgcgcaggcctccttgctgctctctggtttggttgggaggtgtgtttacctcttgctcctcattcctcccctgcccttttctctggaatatctaagatgtgagctgcattgactctgaagacgtttgaggaacaggagtgggcactgatagaaaggacttcaacgccagtgactgtgtacctccagcagaagaaaatcaggtgtctggtcttgggggcactgtgctcacttctagagagaagaaaaaggctgggtttggacttcatgcctcctcactggtgaaacccaggatgtagatagagggccacacccaccctgtccagagtagagggcacctgtccacgtggccagggcccatgctgccaccctcgaggagatggaaccctgtgatgcaaaagctttgctggtgtgtttggggcataaggcactgctccccttccatctctagcagatatcatcttctcagccaattctgtaggacactgaggctcttgtttgacatggtgtgtggatggggacttgccccaagactgagcaggtctgccctttcattggggtgtatacatatcaggggaccctgaggtggcaccgtactcagtgttgtgatgcccccacctagggaggactcaatgctctttgtatgccttatgcagcgctgatctgtccctggagttcccaggttcccagctccccccctgcaagccttgaagcctccagcaacgtctatctccaggagagcagggcagcctatgcaagtgttccggcaggaccagaagtggccactcaacacacgtcctcaccagtcaccccaaatggagacactcgcagacctgcagttctcagaccgaaggtgctgccttcatcctccccacctaatgcatttttgaaaccaaaggtacctagcctcagagacagagaaggagagggggagatcttgagtctaagaggaaccctttagctgtttctgcagctgaggtcagtttcaggagggtgaagctgatccccaggaatggatcagctgccatgggcacagcctccgatttgagcctctccggctgccagccagggggcctgggccagaccagggctctgtccttccgtgactttattaaagcaacatttgccacatgtttaagccgcaaaggtattagcaatgcttgcatcattaataatcattcagttgaaggtcaagcccatagacacacactctctgctggtaagaaaccatagcccagaactgagccaataaggttgtttgaacctgagagtgtgtaatggtcatttgggccaagcctcagctagggctgctgcctggacgcctgaggggcagcttatcacagtgcaaggggacagggtaaacagcagggggtggggtgtgagcttggagggcccctcccctggatttcctccaacacctgcttggatactaggcccactgtccctgaagggaatgtcagggaagtgtgcctgtgagctgaattaaaggactggcctttccagaaaacgctttggatctgagcagagtagtcagtttctcagacactcattccatactgcaccgtacatgccagcgtacccattgcaccgaaagcaggcccttagggcaggaagggacgatgagcaagtctgccacaccacctggtgactgggaagggctgcttctctcgtaagggtcttggggagaagtaagcccgcagcctgcctctgcacctcgttccagtgtcctgccaggctctgtactgtcctttgtgtatgaagaaaatgctgttagccctctctcaggctgctgttctgtgggtgctgagagctgccccccatcaccacgccatcacacccctctgagcagaagcaaatctgaggctgaagaattaagttttccccaagcaaggaaggcaggtggtcagagagatcaaacgctgaggcgtggggattgcaggattcaggaggcagcccctttggggaagaggagggtgcattttccatggagcccatgtcagagtccactccagctcagcaggaaagtggaattgcccagtactgcctgccagctgggtctcccaagcaactaccccaagacataccaacagtgaagccaggacagcaccatgccatcggcgctccagtctgtctggctgggaggaaagtgctgggcatcttacagtaactctagaagttcctttgactaggctgcaatcccacctatatgctcagccctaagagctgtggtttcctgtgctctcatttgtccattcattcattcattcattcattcagcaaataatctgaaatccagtctgaactaaggcctgagctgtggataccatggcgcgtgagttagatgtggtccctgccctcatggggctgacagtcctaaaatcaagtgctaggacacagtggccattgagctgggagcattcttccctctaccgcttaagccactgatggctgcgagcttgaagagagggattctgagggagagcttggtccatctggtcaccaaggctgggcgggacagagcagtcaagaaccacggtgtggcttgagaaacagtcctgcttcctgagcctctttgctctgcctcttggggcaagctccttaacctgtctgtatttttatgcctctgtctcccattcagttcctccttgaatacctctttctacagagaggcacgggctcccctgaaggattgtcgaggccagggttcgggaagtacactgccatcggtcaggggacagctgcctcccaccttgcctgggtgatggtgaatgggactcatcttttcctgccttgcttttgaggagatggttgaatttaagctaacaggaaagccaaaccagcaccctcctttgtgctctgagaggttggagacatctggtccaccccattgcccctgcccctggcaagccctgaagtcgggagaggtgaccacaggtctgaaaatcagccagtgccaacattgcttgccctgcaaggtgcaactgagcccacatagcgcattcatagtttccctgaccacagccttgggaagacggtggaaacccgaggatgtgtgggtttcccagctaacggacaagctcccctgccacacccagtgcccacgcatgctcacatacatacagcagaccacaaccctgttgccaagcagtgcttccaagggatagcgatccagattccaacattgtcttggagagggttagtccacatccaagttgcgtgagataagatgcaaagggctctgtgtggatgaggaacgcaccttagaggagtgggaaaggccaccagggttgggccctgtttaggtaattcctgttggcagcacctagagagagcatctgagctgaaggagtgggaaactttgcccaagcaatggcacgggcagcgggctctttctggcgccctgtgctggagcagggccaagtcttagggcatcacaaacagcccatttgatggagggagcagggacatagcacatttttgtctgtctttgtgaggctgctttgctaactctctgaggagaggaagcctctcgggctttccgtcggctggggctagtgccagagaatcccttctcagtggccagcaggttcctgggaggccggcacaaggcaccgctccccactcatgacaccttggtgcagagtgacctcctgcccagtcaccactccggccagccccagccaaacacacaaaagcccatggttgcggttgcatctacaccgttagttggcaaaggatcctgcttgagctctgcgtggtggccaaggagtagcatggaggagggccctgattttaaaaaggaaaaatagagaggcctcaaaacaatgaaacaaagagcttgatatgtcaagaggagaccaaggccctgggaggcataggcaagccgggcagagtcagaccagtgccctcccttgaccatctcctagcattccttaacctagacaggggctaccccatgtgagtccaagccagactttgtggctgtccccagcctgcacagcccaagcccagggaagtgtcctttctttcccttccttactaataatgggccttcctgagacacattcagagaaggatcagagagaaaggagaaccatccaggagagccacaagcgtccaccaaacagtgtctcaggcctcacctgaagctgctgttcctcctatcagcacactagtattaaatgggtgttccataatgaggagaatggaaataggtacaaggcatctagcttaggacagaatcggatttcggcatgtgaaggaatcccagagctgatctcattgaaatgatctatcgtacagacaaggatatgcaaatccacagaagtgaagggatttttgctcaagatcacatagctggtaaactaaggtaaggttagggcttgaacttgggccttctgactccttgtccagtcagtgttctttcatctcaccacagctgcctcctttgaaacagaggtattaagatctgtccttctggttcaccctctcatacctctttactgcgtctcccacatcccccacatgcctcccaaaatgaaagacaaacaggattgtttctgagaccaagatcagtctgtctgtgatcagcctgtgtgtggttcacccagtcatgcaattaagggcagatctgggccagtggaataggatagctgattggtgtttgttactgtgaaccctagaccgtaccccgtagaatggtgtctcttgctttgtaacacatcgggccttcagtgtgctgtattcctcagaagtgagggcatctcggtccattctgcccatggccacagggtgcagagaggcagcagggcccatgcaagctgccaccctgggatttgctgggctggagttcaacagatgtaaagacttcagtgaagcaataaacacaaaactctgggagaagatatccagaattttgtacattactctgtttctttttcaaaaatgaggcagatcagatgcccctgagctgcccctttttttctgattcccaactgcaatgtcctcagtcagtgttgtccctctgcccggctccccagctctttgccaacctcttcacactccccttgagctgagcatcagtcgcctgtgacgtggccaccttctgtcctgctcccactcccgacccatgctggaccccggaggacctcctgccccgcccccaccacacacccatatcccccaccattccaatttgttctttcccgtggggaattttttttcccagcgtctccatcccttcctacatatccacacacacacaaattggtctgatcttttttccattggttaaacatttaactccatgccagaccttgttttaacccctctcacatcatgttctttccttttttgcgagttattttgcattaaccaactttgtcagtgacagatgcgtatctgagggtgtcacacacgaccttcagcagggaagacttctgggccatggagggccgtctaatacatggacttataaactgactgcatgagcaatgaaaaggccaaattattctgaattttttttgaatcactgtaaaaaaactgatttcttttgtatagagaacactaaacgtataataaaagttgttcaaaatgga

SEQ ID NO: 229 - DNA, 10614 bp, Homo sapiens
gaggcgctgcaggggacgcgggggaagtggcggcgccggcagcggacagctcggacagcgcccagggccggagcccgagcccttggaggttgattgacttatgtgcaatttgggacgctggagtttaccttccctccgcagcctggaacagagcctcctctggtgttgcaaggaagaggctgaatgaggcagagaagctgagtgctgtccaggaggcccagttaaagcggctcgaggtgacaagaccccgagtgctggggagcagggagcagggccaggtgccgaggatggccaggcagccaccgccgccctgggtccatgcagccttcctcctctgcctcctcagtcttggcggagccatcgaaattcctatggatccaagcattcagaatgagctgacgcagccgccaaccatcaccaagcagtcagcgaaggatcacatcgtggacccccgtgataacatcctgattgagtgtgaagcaaaagggaaccctgcccccagcttccactggacacgaaacagcagattcttcaacatcgccaaggacccccgggtgtccatgaggaggaggtctgggaccctggtgattgacttccgcagtggcgggcggccggaggaatatgagggggaatatcagtgcttcgcccgcaacaaatttggcacggccctgtccaataggatccgcctgcaggtgtctaaatctcctctgtggcccaaggaaaacctagaccctgtcgtggtccaagagggcgctcctttgacgctccagtgcaaccccccgcctggacttccatccccggtcatcttctggatgagcagctccatggagcccatcacccaagacaaacgtgtctctcagggccataacggagacctatacttctccaacgtgatgctgcaggacatgcagaccgactacagttgtaacgcccgcttccacttcacccacaccatccagcagaagaaccctttcaccctcaaggtcctcaccacccgaggagttgcagaaagaacaccaagcttcatgtatccccagggcaccgcgagcagccagatggtgcttcgtggcatggacctcctgctggaatgcatcgcctccggggtcccaacaccagacatcgcatggtacaagaaaggtggggacctcccatctgataaggccaagtttgagaactttaataaggccctgcgtatcacaaatgtctctgaggaagactccggggagtatttctgcctggcctccaacaagatgggcagcatccggcacacgatctcggtgagagtaaaggctgctccctactggctggacgaacccaagaaccttattctggctcctggcgaggatgggagactggtgtgtcgagccaatggaaaccccaaacccactgtccagtggatggtgaatggggaacctttgcaatcggcaccacctaacccaaaccgtgaggtggccggagacaccatcatcttccgggacacccagatcagcagcagggctgtgtaccagtgcaacacctccaacgagcatggctacctgctggccaacgcctttgtcagtgtgctggatgtgccgcctcggatgctgtcgccccggaaccagctcattcgagtgattctttacaaccggacgcggctggactgccctttctttgggtctcccatccccacactgcgatggtttaagaatgggcaaggaagcaacctggatggtggcaactaccatgtttatgagaacggcagtctggaaattaagatgatccgcaaagaggaccagggcatctacacctgtgtcgccaccaacatcctgggcaaagctgaaaaccaagtccgcctggaggtcaaagaccccaccaggatctaccggatgcccgaggaccaggtggccagaaggggcaccacggtgcagctggagtgtcgggtgaagcacgacccctccctgaaactcaccgtctcctggctgaaggatgacgagccgctctatattggaaacaggatgaagaaggaagacgactccctgaccatctttggggtggcagagcgggaccagggcagttacacgtgtgtcgccagcaccgagctagaccaagacctggccaaggcctacctcaccgtgctagctgatcaggccactccaactaaccgtttggctgccctgcccaaaggacggccagaccggccccgggacctggagctgaccgacctggccgagaggagcgtgcggctgacctggatccccggggatgctaacaacagccccatcacagactacgtcgtccagtttgaagaagaccagttccaacctggggtctggcatgaccattccaagtaccccggcagcgttaactcagccgtcctccggctgtccccgtatgtcaactaccagttccgtgtcattgccatcaacgaggttgggagcagccaccccagcctcccatccgagcgctaccgaaccagtggagcaccccccgagtccaatcctggtgacgtgaagggagaggggaccagaaagaacaacatggagatcacgtggacgcccatgaatgccacctcggcctttggccccaacctgcgctacattgtcaagtggaggcggagagagactcgagaggcctggaacaacgtcacagtgtggggctctcgctacgtggtggggcagaccccagtctacgtgccctatgagatccgagtccaggctgaaaatgacttcgggaagggccctgagccagagtccgtcatcggttactccggagaagattatcccagggctgcgcccactgaagttaaagtccgagtcatgaacagcacagccatcagccttcagtggaaccgcgtctactccgacacggtccagggccagctcagagagtaccgagcctactactggagggagagcagcttgctgaagaacctgtgggtgtctcagaagagacagcaagccagcttccctggtgaccgcctccgtggcgtggtgtcccgcctcttcccctacagtaactacaagctggagatggttgtggtcaatgggagaggtgatgggcctcgcagtgagaccaaggagttcaccaccccggaaggagtacccagtgcccctaggcgtttccgagtccggcagcccaacctggagacaatcaacctggaatgggatcatcctgagcatccaaatgggatcatgattggatacactctcaaatatgtggcctttaacgggaccaaagtaggaaagcagatagtggaaaacttctctcccaatcagaccaagttcacggtgcaaagaacggaccccgtgtcacgctaccgctttaccctcagcgccaggacgcaggtgggctctggggaagccgtcacagaggagtcaccagcacccccgaatgaagctactccaaccgcagctcctcccacattgcccccgactaccgtgggtgcgacgggcgctgtgagcagtaccgatgctactgccattgctgccaccaccgaagccacaacagtccccatcatcccaactgtcgcacctaccaccatcgccaccaccaccaccgtcgccacaactactacaaccactgctgccgccaccaccaccacggagagtcctcccaccaccacctccgggactaagatacacgaatccgcccctgatgagcagtccatatggaacgtcacggtgctccccaacagtaaatgggccaacatcacctggaagcacaatttcgggcccggaactgactttgtggttgagtacatcgacagcaaccatacgaaaaaaactgtcccagttaaggcccaggctcagcctatacagctgacagacctctatcccgggatgacatacacgttgcgggtttattcccgggacaacgagggcatcagcagtaccgtcatcacctttatgaccagtacagcttacaccaacaaccaagcggacatcgccacccagggctggttcattgggcttatgtgcgccatcgccctcctggtgctgatcctgctcatcgtctgtttcatcaagaggagtcgcggcggcaagtacccagtacgagaaaagaaggatgttccccttggccctgaagaccccaaggaagaggatggctcatttgactatagtgatgaggacaacaagcccctgcagggcagtcagacatctctggacggcaccatcaagcagcaggagagtgacgacagcctggtggactatggcgagggtggcgagggtcagttcaatgaagacggctccttcatcggccagtacacggtcaaaaaggacaaggaggaaacagagggcaacgaaagctcagaggccacgtcacctgtcaatgctatctactctctggcctaacggagcccacccaggcacagccaccactttgcaagtgggaggaggggagaaggggagacaaaaccactgcagacctaccacgaagccaccaccaccttcagtaacaagggtacgatatgggggtctgccaagctgtgaggaccagtagccaccaagccacccacaagccccctcccaatgaccccccttcagccccgggtgccaccagtgtgggagagctggagccgtggctgagctcagctggagggagcctggccccttgcccggtctcgcagccaccccgagcgttccaccacactgtccgcccttggcctcggcacacgctcaccttttctgttggttacgggacttctcattgtcttaatttcgctttgtgcatcttcccctccagacccaatgtctctgttttcttttccttttgaaaaagagtccctggaaaagaaagaataagtggattctcccccaggagaatcctttttgcaaagataggcaaaaaggattgaatccataccagaacacgtagacaggctgtaatattcaaaccacctctgggccaatgcatttccaaaggatgcctttctcgccatatgcctcccctggcccccagcccctctgcctcggccttgtcagttgctgagctgggcttggctcctttctggaaaatgacagtatttttggcagggagaaggtgcgcaggcctccttgctgctctctggtttggttgggaggtgtgtttacctcttgctcctcattcctcccctgcccttttctctggaatatctaagatgtgagctgcattgactctgaagacgtttgaggaacaggagtgggcactgatagaaaggacttcaacgccagtgactgtgtacctccagcagaagaaaatcaggtgtctggtcttgggggcactgtgctcacttctagagagaagaaaaaggctgggtttggacttcatgcctcctcactggtgaaacccaggatgtagatagagggccacacccaccctgtccagagtagagggcacctgtccacgtggccagggcccatgctgccaccctcgaggagatggaaccctgtgatgcaaaagctttgctggtgtgtttggggcataaggcactgctccccttccatctctagcagatatcatcttctcagccaattctgtaggacactgaggctcttgtttgacatggtgtgtggatggggacttgccccaagactgagcaggtctgccctttcattggggtgtatacatatcaggggaccctgaggtggcaccgtactcagtgttgtgatgcccccacctagggaggactcaatgctctttgtatgccttatgcagcgctgatctgtccctggagttcccaggttcccagctccccccctgcaagccttgaagcctccagcaacgtctatctccaggagagcagggcagcctatgcaagtgttccggcaggaccagaagtggccactcaacacacgtcctcaccagtcaccccaaatggagacactcgcagacctgcagttctcagaccgaaggtgctgccttcatcctccccacctaatgcatttttgaaaccaaaggtacctagcctcagagacagagaaggagagggggagatcttgagtctaagaggaaccctttagctgtttctgcagctgaggtcagtttcaggagggtgaagctgatccccaggaatggatcagctgccatgggcacagcctccgatttgagcctctccggctgccagccagggggcctgggccagaccagggctctgtccttccgtgactttattaaagcaacatttgccacatgtttaagccgcaaaggtattagcaatgcttgcatcattaataatcattcagttgaaggtcaagcccatagacacacactctctgctggtaagaaaccatagcccagaactgagccaataaggttgtttgaacctgagagtgtgtaatggtcatttgggccaagcctcagctagggctgctgcctggacgcctgaggggcagcttatcacagtgcaaggggacagggtaaacagcagggggtggggtgtgagcttggagggcccctcccctggatttcctccaacacctgcttggatactaggcccactgtccctgaagggaatgtcagggaagtgtgcctgtgagctgaattaaaggactggcctttccagaaaacgctttggatctgagcagagtagtcagtttctcagacactcattccatactgcaccgtacatgccagcgtacccattgcaccgaaagcaggcccttagggcaggaagggacgatgagcaagtctgccacaccacctggtgactgggaagggctgcttctctcgtaagggtcttggggagaagtaagcccgcagcctgcctctgcacctcgttccagtgtcctgccaggctctgtactgtcctttgtgtatgaagaaaatgctgttagccctctctcaggctgctgttctgtgggtgctgagagctgccccccatcaccacgccatcacacccctctgagcagaagcaaatctgaggctgaagaattaagttttccccaagcaaggaaggcaggtggtcagagagatcaaacgctgaggcgtggggattgcaggattcaggaggcagcccctttggggaagaggagggtgcattttccatggagcccatgtcagagtccactccagctcagcaggaaagtggaattgcccagtactgcctgccagctgggtctcccaagcaactaccccaagacataccaacagtgaagccaggacagcaccatgccatcggcgctccagtctgtctggctgggaggaaagtgctgggcatcttacagtaactctagaagttcctttgactaggctgcaatcccacctatatgctcagccctaagagctgtggtttcctgtgctctcatttgtccattcattcattcattcattcattcagcaaataatctgaaatccagtctgaactaaggcctgagctgtggataccatggcgcgtgagttagatgtggtccctgccctcatggggctgacagtcctaaaatcaagtgctaggacacagtggccattgagctgggagcattcttccctctaccgcttaagccactgatggctgcgagcttgaagagagggattctgagggagagcttggtccatctggtcaccaaggctgggcgggacagagcagtcaagaaccacggtgtggcttgagaaacagtcctgcttcctgagcctctttgctctgcctcttggggcaagctccttaacctgtctgtatttttatgcctctgtctcccattcagttcctccttgaatacctctttctacagagaggcacgggctcccctgaaggattgtcgaggccagggttcgggaagtacactgccatcggtcaggggacagctgcctcccaccttgcctgggtgatggtgaatgggactcatcttttcctgccttgcttttgaggagatggttgaatttaagctaacaggaaagccaaaccagcaccctcctttgtgctctgagaggttggagacatctggtccaccccattgcccctgcccctggcaagccctgaagtcgggagaggtgaccacaggtctgaaaatcagccagtgccaacattgcttgccctgcaaggtgcaactgagcccacatagcgcattcatagtttccctgaccacagccttgggaagacggtggaaacccgaggatgtgtgggtttcccagctaacggacaagctcccctgccacacccagtgcccacgcatgctcacatacatacagcagaccacaaccctgttgccaagcagtgcttccaagggatagcgatccagattccaacattgtcttggagagggttagtccacatccaagttgcgtgagataagatgcaaagggctctgtgtggatgaggaacgcaccttagaggagtgggaaaggccaccagggttgggccctgtttaggtaattcctgttggcagcacctagagagagcatctgagctgaaggagtgggaaactttgcccaagcaatggcacgggcagcgggctctttctggcgccctgtgctggagcagggccaagtcttagggcatcacaaacagcccatttgatggagggagcagggacatagcacatttttgtctgtctttgtgaggctgctttgctaactctctgaggagaggaagcctctcgggctttccgtcggctggggctagtgccagagaatcccttctcagtggccagcaggttcctgggaggccggcacaaggcaccgctccccactcatgacaccttggtgcagagtgacctcctgcccagtcaccactccggccagccccagccaaacacacaaaagcccatggttgcggttgcatctacaccgttagttggcaaaggatcctgcttgagctctgcgtggtggccaaggagtagcatggaggagggccctgattttaaaaaggaaaaatagagaggcctcaaaacaatgaaacaaagagcttgatatgtcaagaggagaccaaggccctgggaggcataggcaagccgggcagagtcagaccagtgccctcccttgaccatctcctagcattccttaacctagacaggggctaccccatgtgagtccaagccagactttgtggctgtccccagcctgcacagcccaagcccagggaagtgtcctttctttcccttccttactaataatgggccttcctgagacacattcagagaaggatcagagagaaaggagaaccatccaggagagccacaagcgtccaccaaacagtgtctcaggcctcacctgaagctgctgttcctcctatcagcacactagtattaaatgggtgttccataatgaggagaatggaaataggtacaaggcatctagcttaggacagaatcggatttcggcatgtgaaggaatcccagagctgatctcattgaaatgatctatcgtacagacaaggatatgcaaatccacagaagtgaagggatttttgctcaagatcacatagctggtaaactaaggtaaggttagggcttgaacttgggccttctgactccttgtccagtcagtgttctttcatctcaccacagctgcctcctttgaaacagaggtattaagatctgtccttctggttcaccctctcatacctctttactgcgtctcccacatcccccacatgcctcccaaaatgaaagacaaacaggattgtttctgagaccaagatcagtctgtctgtgatcagcctgtgtgtggttcacccagtcatgcaattaagggcagatctgggccagtggaataggatagctgattggtgtttgttactgtgaaccctagaccgtaccccgtagaatggtgtctcttgctttgtaacacatcgggccttcagtgtgctgtattcctcagaagtgagggcatctcggtccattctgcccatggccacagggtgcagagaggcagcagggcccatgcaagctgccaccctgggatttgctgggctggagttcaacagatgtaaagacttcagtgaagcaataaacacaaaactctgggagaagatatccagaattttgtacattactctgtttctttttcaaaaatgaggcagatcagatgcccctgagctgcccctttttttctgattcccaactgcaatgtcctcagtcagtgttgtccctctgcccggctccccagctctttgccaacctcttcacactccccttgagctgagcatcagtcgcctgtgacgtggccaccttctgtcctgctcccactcccgacccatgctggaccccggaggacctcctgccccgcccccaccacacacccatatcccccaccattccaatttgttctttcccgtggggaattttttttcccagcgtctccatcccttcctacatatccacacacacacaaattggtctgatcttttttccattggttaaacatttaactccatgccagaccttgttttaacccctctcacatcatgttctttccttttttgcgagttattttgcattaaccaactttgtcagtgacagatgcgtatctgagggtgtcacacacgaccttcagcagggaagacttctgggccatggagggccgtctaatacatggacttataaactgactgcatgagcaatgaaaaggccaaattattctgaattttttttgaatcactgtaaaaaaactgatttcttttgtatagagaacactaaacgtataataaaagttgttcaaaatgga

SEQ ID NO: 230 - DNA, 10231 bp, Homo sapiens
ctgagtgctgtccaggaggcccagttaaagcggctcgaggtgacaagaccccgagtgctggggagcagggagcagggccaggtgccgaggatggccaggcagccaccgccgccctgggtccatgcagccttcctcctctgcctcctcagtcttggcggagccatcgaaattcctatggatccaagcattcagaatgagctgacgcagccgccaaccatcaccaagcagtcagcgaaggatcacatcgtggacccccgtgataacatcctgattgagtgtgaagcaaaagggaaccctgcccccagcttccactggacacgaaacagcagattcttcaacatcgccaaggacccccgggtgtccatgaggaggaggtctgggaccctggtgattgacttccgcagtggcgggcggccggaggaatatgagggggaatatcagtgcttcgcccgcaacaaatttggcacggccctgtccaataggatccgcctgcaggtgtctaaatctcctctgtggcccaaggaaaacctagaccctgtcgtggtccaagagggcgctcctttgacgctccagtgcaaccccccgcctggacttccatccccggtcatcttctggatgagcagctccatggagcccatcacccaagacaaacgtgtctctcagggccataacggagacctatacttctccaacgtgatgctgcaggacatgcagaccgactacagttgtaacgcccgcttccacttcacccacaccatccagcagaagaaccctttcaccctcaaggtcctcaccaaccacccttataatgactcgtccttaagaaaccaccctgacatgtacagtgcccgaggagttgcagaaagaacaccaagcttcatgtatccccagggcaccgcgagcagccagatggtgcttcgtggcatggacctcctgctggaatgcatcgcctccggggtcccaacaccagacatcgcatggtacaagaaaggtggggacctcccatctgataaggccaagtttgagaactttaataaggccctgcgtatcacaaatgtctctgaggaagactccggggagtatttctgcctggcctccaacaagatgggcagcatccggcacacgatctcggtgagagtaaaggctgctccctactggctggacgaacccaagaaccttattctggctcctggcgaggatgggagactggtgtgtcgagccaatggaaaccccaaacccactgtccagtggatggtgaatggggaacctttgcaatcggcaccacctaacccaaaccgtgaggtggccggagacaccatcatcttccgggacacccagatcagcagcagggctgtgtaccagtgcaacacctccaacgagcatggctacctgctggccaacgcctttgtcagtgtgctggatgtgccgcctcggatgctgtcgccccggaaccagctcattcgagtgattctttacaaccggacgcggctggactgccctttctttgggtctcccatccccacactgcgatggtttaagaatgggcaaggaagcaacctggatggtggcaactaccatgtttatgagaacggcagtctggaaattaagatgatccgcaaagaggaccagggcatctacacctgtgtcgccaccaacatcctgggcaaagctgaaaaccaagtccgcctggaggtcaaagaccccaccaggatctaccggatgcccgaggaccaggtggccagaaggggcaccacggtgcagctggagtgtcgggtgaagcacgacccctccctgaaactcaccgtctcctggctgaaggatgacgagccgctctatattggaaacaggatgaagaaggaagacgactccctgaccatctttggggtggcagagcgggaccagggcagttacacgtgtgtcgccagcaccgagctagaccaagacctggccaaggcctacctcaccgtgctagctgatcaggccactccaactaaccgtttggctgccctgcccaaaggacggccagaccggccccgggacctggagctgaccgacctggccgagaggagcgtgcggctgacctggatccccggggatgctaacaacagccccatcacagactacgtcgtccagtttgaagaagaccagttccaacctggggtctggcatgaccattccaagtaccccggcagcgttaactcagccgtcctccggctgtccccgtatgtcaactaccagttccgtgtcattgccatcaacgaggttgggagcagccaccccagcctcccatccgagcgctaccgaaccagtggagcaccccccgagtccaatcctggtgacgtgaagggagaggggaccagaaagaacaacatggagatcacgtggacgcccatgaatgccacctcggcctttggccccaacctgcgctacattgtcaagtggaggcggagagagactcgagaggcctggaacaacgtcacagtgtggggctctcgctacgtggtggggcagaccccagtctacgtgccctatgagatccgagtccaggctgaaaatgacttcgggaagggccctgagccagagtccgtcatcggttactccggagaagattatcccagggctgcgcccactgaagttaaagtccgagtcatgaacagcacagccatcagccttcagtggaaccgcgtctactccgacacggtccagggccagctcagagagtaccgagcctactactggagggagagcagcttgctgaagaacctgtgggtgtctcagaagagacagcaagccagcttccctggtgaccgcctccgtggcgtggtgtcccgcctcttcccctacagtaactacaagctggagatggttgtggtcaatgggagaggtgatgggcctcgcagtgagaccaaggagttcaccaccccggaaggagtacccagtgcccctaggcgtttccgagtccggcagcccaacctggagacaatcaacctggaatgggatcatcctgagcatccaaatgggatcatgattggatacactctcaaatatgtggcctttaacgggaccaaagtaggaaagcagatagtggaaaacttctctcccaatcagaccaagttcacggtgcaaagaacggaccccgtgtcacgctaccgctttaccctcagcgccaggacgcaggtgggctctggggaagccgtcacagaggagtcaccagcacccccgaatgaagctactccaaccgcagcccctgatgagcagtccatatggaacgtcacggtgctccccaacagtaaatgggccaacatcacctggaagcacaatttcgggcccggaactgactttgtggttgagtacatcgacagcaaccatacgaaaaaaactgtcccagttaaggcccaggctcagcctatacagctgacagacctctatcccgggatgacatacacgttgcgggtttattcccgggacaacgagggcatcagcagtaccgtcatcacctttatgaccagtacagcttacaccaacaaccaagcggacatcgccacccagggctggttcattgggcttatgtgcgccatcgccctcctggtgctgatcctgctcatcgtctgtttcatcaagaggagtcgcggcggcaagtacccagtacgagaaaagaaggatgttccccttggccctgaagaccccaaggaagaggatggctcatttgactatagtgatgaggacaacaagcccctgcagggcagtcagacatctctggacggcaccatcaagcagcaggagagtgacgacagcctggtggactatggcgagggtggcgagggtcagttcaatgaagacggctccttcatcggccagtacacggtcaaaaaggacaaggaggaaacagagggcaacgaaagctcagaggccacgtcacctgtcaatgctatctactctctggcctaacggagcccacccaggcacagccaccactttgcaagtgggaggaggggagaaggggagacaaaaccactgcagacctaccacgaagccaccaccaccttcagtaacaagggtacgatatgggggtctgccaagctgtgaggaccagtagccaccaagccacccacaagccccctcccaatgaccccccttcagccccgggtgccaccagtgtgggagagctggagccgtggctgagctcagctggagggagcctggccccttgcccggtctcgcagccaccccgagcgttccaccacactgtccgcccttggcctcggcacacgctcaccttttctgttggttacgggacttctcattgtcttaatttcgctttgtgcatcttcccctccagacccaatgtctctgttttcttttccttttgaaaaagagtccctggaaaagaaagaataagtggattctcccccaggagaatcctttttgcaaagataggcaaaaaggattgaatccataccagaacacgtagacaggctgtaatattcaaaccacctctgggccaatgcatttccaaaggatgcctttctcgccatatgcctcccctggcccccagcccctctgcctcggccttgtcagttgctgagctgggcttggctcctttctggaaaatgacagtatttttggcagggagaaggtgcgcaggcctccttgctgctctctggtttggttgggaggtgtgtttacctcttgctcctcattcctcccctgcccttttctctggaatatctaagatgtgagctgcattgactctgaagacgtttgaggaacaggagtgggcactgatagaaaggacttcaacgccagtgactgtgtacctccagcagaagaaaatcaggtgtctggtcttgggggcactgtgctcacttctagagagaagaaaaaggctgggtttggacttcatgcctcctcactggtgaaacccaggatgtagatagagggccacacccaccctgtccagagtagagggcacctgtccacgtggccagggcccatgctgccaccctcgaggagatggaaccctgtgatgcaaaagctttgctggtgtgtttggggcataaggcactgctccccttccatctctagcagatatcatcttctcagccaattctgtaggacactgaggctcttgtttgacatggtgtgtggatggggacttgccccaagactgagcaggtctgccctttcattggggtgtatacatatcaggggaccctgaggtggcaccgtactcagtgttgtgatgcccccacctagggaggactcaatgctctttgtatgccttatgcagcgctgatctgtccctggagttcccaggttcccagctccccccctgcaagccttgaagcctccagcaacgtctatctccaggagagcagggcagcctatgcaagtgttccggcaggaccagaagtggccactcaacacacgtcctcaccagtcaccccaaatggagacactcgcagacctgcagttctcagaccgaaggtgctgccttcatcctccccacctaatgcatttttgaaaccaaaggtacctagcctcagagacagagaaggagagggggagatcttgagtctaagaggaaccctttagctgtttctgcagctgaggtcagtttcaggagggtgaagctgatccccaggaatggatcagctgccatgggcacagcctccgatttgagcctctccggctgccagccagggggcctgggccagaccagggctctgtccttccgtgactttattaaagcaacatttgccacatgtttaagccgcaaaggtattagcaatgcttgcatcattaataatcattcagttgaaggtcaagcccatagacacacactctctgctggtaagaaaccatagcccagaactgagccaataaggttgtttgaacctgagagtgtgtaatggtcatttgggccaagcctcagctagggctgctgcctggacgcctgaggggcagcttatcacagtgcaaggggacagggtaaacagcagggggtggggtgtgagcttggagggcccctcccctggatttcctccaacacctgcttggatactaggcccactgtccctgaagggaatgtcagggaagtgtgcctgtgagctgaattaaaggactggcctttccagaaaacgctttggatctgagcagagtagtcagtttctcagacactcattccatactgcaccgtacatgccagcgtacccattgcaccgaaagcaggcccttagggcaggaagggacgatgagcaagtctgccacaccacctggtgactgggaagggctgcttctctcgtaagggtcttggggagaagtaagcccgcagcctgcctctgcacctcgttccagtgtcctgccaggctctgtactgtcctttgtgtatgaagaaaatgctgttagccctctctcaggctgctgttctgtgggtgctgagagctgccccccatcaccacgccatcacacccctctgagcagaagcaaatctgaggctgaagaattaagttttccccaagcaaggaaggcaggtggtcagagagatcaaacgctgaggcgtggggattgcaggattcaggaggcagcccctttggggaagaggagggtgcattttccatggagcccatgtcagagtccactccagctcagcaggaaagtggaattgcccagtactgcctgccagctgggtctcccaagcaactaccccaagacataccaacagtgaagccaggacagcaccatgccatcggcgctccagtctgtctggctgggaggaaagtgctgggcatcttacagtaactctagaagttcctttgactaggctgcaatcccacctatatgctcagccctaagagctgtggtttcctgtgctctcatttgtccattcattcattcattcattcattcagcaaataatctgaaatccagtctgaactaaggcctgagctgtggataccatggcgcgtgagttagatgtggtccctgccctcatggggctgacagtcctaaaatcaagtgctaggacacagtggccattgagctgggagcattcttccctctaccgcttaagccactgatggctgcgagcttgaagagagggattctgagggagagcttggtccatctggtcaccaaggctgggcgggacagagcagtcaagaaccacggtgtggcttgagaaacagtcctgcttcctgagcctctttgctctgcctcttggggcaagctccttaacctgtctgtatttttatgcctctgtctcccattcagttcctccttgaatacctctttctacagagaggcacgggctcccctgaaggattgtcgaggccagggttcgggaagtacactgccatcggtcaggggacagctgcctcccaccttgcctgggtgatggtgaatgggactcatcttttcctgccttgcttttgaggagatggttgaatttaagctaacaggaaagccaaaccagcaccctcctttgtgctctgagaggttggagacatctggtccaccccattgcccctgcccctggcaagccctgaagtcgggagaggtgaccacaggtctgaaaatcagccagtgccaacattgcttgccctgcaaggtgcaactgagcccacatagcgcattcatagtttccctgaccacagccttgggaagacggtggaaacccgaggatgtgtgggtttcccagctaacggacaagctcccctgccacacccagtgcccacgcatgctcacatacatacagcagaccacaaccctgttgccaagcagtgcttccaagggatagcgatccagattccaacattgtcttggagagggttagtccacatccaagttgcgtgagataagatgcaaagggctctgtgtggatgaggaacgcaccttagaggagtgggaaaggccaccagggttgggccctgtttaggtaattcctgttggcagcacctagagagagcatctgagctgaaggagtgggaaactttgcccaagcaatggcacgggcagcgggctctttctggcgccctgtgctggagcagggccaagtcttagggcatcacaaacagcccatttgatggagggagcagggacatagcacatttttgtctgtctttgtgaggctgctttgctaactctctgaggagaggaagcctctcgggctttccgtcggctggggctagtgccagagaatcccttctcagtggccagcaggttcctgggaggccggcacaaggcaccgctccccactcatgacaccttggtgcagagtgacctcctgcccagtcaccactccggccagccccagccaaacacacaaaagcccatggttgcggttgcatctacaccgttagttggcaaaggatcctgcttgagctctgcgtggtggccaaggagtagcatggaggagggccctgattttaaaaaggaaaaatagagaggcctcaaaacaatgaaacaaagagcttgatatgtcaagaggagaccaaggccctgggaggcataggcaagccgggcagagtcagaccagtgccctcccttgaccatctcctagcattccttaacctagacaggggctaccccatgtgagtccaagccagactttgtggctgtccccagcctgcacagcccaagcccagggaagtgtcctttctttcccttccttactaataatgggccttcctgagacacattcagagaaggatcagagagaaaggagaaccatccaggagagccacaagcgtccaccaaacagtgtctcaggcctcacctgaagctgctgttcctcctatcagcacactagtattaaatgggtgttccataatgaggagaatggaaataggtacaaggcatctagcttaggacagaatcggatttcggcatgtgaaggaatcccagagctgatctcattgaaatgatctatcgtacagacaaggatatgcaaatccacagaagtgaagggatttttgctcaagatcacatagctggtaaactaaggtaaggttagggcttgaacttgggccttctgactccttgtccagtcagtgttctttcatctcaccacagctgcctcctttgaaacagaggtattaagatctgtccttctggttcaccctctcatacctctttactgcgtctcccacatcccccacatgcctcccaaaatgaaagacaaacaggattgtttctgagaccaagatcagtctgtctgtgatcagcctgtgtgtggttcacccagtcatgcaattaagggcagatctgggccagtggaataggatagctgattggtgtttgttactgtgaaccctagaccgtaccccgtagaatggtgtctcttgctttgtaacacatcgggccttcagtgtgctgtattcctcagaagtgagggcatctcggtccattctgcccatggccacagggtgcagagaggcagcagggcccatgcaagctgccaccctgggatttgctgggctggagttcaacagatgtaaagacttcagtgaagcaataaacacaaaactctgggagaagatatccagaattttgtacattactctgtttctttttcaaaaatgaggcagatcagatgcccctgagctgcccctttttttctgattcccaactgcaatgtcctcagtcagtgttgtccctctgcccggctccccagctctttgccaacctcttcacactccccttgagctgagcatcagtcgcctgtgacgtggccaccttctgtcctgctcccactcccgacccatgctggaccccggaggacctcctgccccgcccccaccacacacccatatcccccaccattccaatttgttctttcccgtggggaattttttttcccagcgtctccatcccttcctacatatccacacacacacaaattggtctgatcttttttccattggttaaacatttaactccatgccagaccttgttttaacccctctcacatcatgttctttccttttttgcgagttattttgcattaaccaactttgtcagtgacagatgcgtatctgagggtgtcacacacgaccttcagcagggaagacttctgggccatggagggccgtctaatacatggacttataaactgactgcatgagcaatgaaaaggccaaattattctgaattttttttgaatcactgtaaaaaaactgatttcttttgtatagagaacactaaacgtataataaaagttgttcaaaatgga

SEQ ID NO: 231 - DNA, 10198 bp, Homo sapiens
ctgagtgctgtccaggaggcccagttaaagcggctcgaggtgacaagaccccgagtgctggggagcagggagcagggccaggtgccgaggatggccaggcagccaccgccgccctgggtccatgcagccttcctcctctgcctcctcagtcttggcggagccatcgaaattcctatggatccaagcattcagaatgagctgacgcagccgccaaccatcaccaagcagtcagcgaaggatcacatcgtggacccccgtgataacatcctgattgagtgtgaagcaaaagggaaccctgcccccagcttccactggacacgaaacagcagattcttcaacatcgccaaggacccccgggtgtccatgaggaggaggtctgggaccctggtgattgacttccgcagtggcgggcggccggaggaatatgagggggaatatcagtgcttcgcccgcaacaaatttggcacggccctgtccaataggatccgcctgcaggtgtctaaatctcctctgtggcccaaggaaaacctagaccctgtcgtggtccaagagggcgctcctttgacgctccagtgcaaccccccgcctggacttccatccccggtcatcttctggatgagcagctccatggagcccatcacccaagacaaacgtgtctctcagggccataacggagacctatacttctccaacgtgatgctgcaggacatgcagaccgactacagttgtaacgcccgcttccacttcacccacaccatccagcagaagaaccctttcaccctcaaggtcctcaccaaccacccttataatgactcgtccttaagaaaccaccctgacatgtacagtgcccgaggagttgcagaaagaacaccaagcttcatgtatccccagggcaccgcgagcagccagatggtgcttcgtggcatggacctcctgctggaatgcatcgcctccggggtcccaacaccagacatcgcatggtacaagaaaggtggggacctcccatctgataaggccaagtttgagaactttaataaggccctgcgtatcacaaatgtctctgaggaagactccggggagtatttctgcctggcctccaacaagatgggcagcatccggcacacgatctcggtgagagtaaaggctgctccctactggctggacgaacccaagaaccttattctggctcctggcgaggatgggagactggtgtgtcgagccaatggaaaccccaaacccactgtccagtggatggtgaatggggaacctttgcaatcggcaccacctaacccaaaccgtgaggtggccggagacaccatcatcttccgggacacccagatcagcagcagggctgtgtaccagtgcaacacctccaacgagcatggctacctgctggccaacgcctttgtcagtgtgctggatgtgccgcctcggatgctgtcgccccggaaccagctcattcgagtgattctttacaaccggacgcggctggactgccctttctttgggtctcccatccccacactgcgatggtttaagaatgggcaaggaagcaacctggatggtggcaactaccatgtttatgagaacggcagtctggaaattaagatgatccgcaaagaggaccagggcatctacacctgtgtcgccaccaacatcctgggcaaagctgaaaaccaagtccgcctggaggtcaaagaccccaccaggatctaccggatgcccgaggaccaggtggccagaaggggcaccacggtgcagctggagtgtcgggtgaagcacgacccctccctgaaactcaccgtctcctggctgaaggatgacgagccgctctatattggaaacaggatgaagaaggaagacgactccctgaccatctttggggtggcagagcgggaccagggcagttacacgtgtgtcgccagcaccgagctagaccaagacctggccaaggcctacctcaccgtgctagctgatcaggccactccaactaaccgtttggctgccctgcccaaaggacggccagaccggccccgggacctggagctgaccgacctggccgagaggagcgtgcggctgacctggatccccggggatgctaacaacagccccatcacagactacgtcgtccagtttgaagaagaccagttccaacctggggtctggcatgaccattccaagtaccccggcagcgttaactcagccgtcctccggctgtccccgtatgtcaactaccagttccgtgtcattgccatcaacgaggttgggagcagccaccccagcctcccatccgagcgctaccgaaccagtggagcaccccccgagtccaatcctggtgacgtgaagggagaggggaccagaaagaacaacatggagatcacgtggacgcccatgaatgccacctcggcctttggccccaacctgcgctacattgtcaagtggaggcggagagagactcgagaggcctggaacaacgtcacagtgtggggctctcgctacgtggtggggcagaccccagtctacgtgccctatgagatccgagtccaggctgaaaatgacttcgggaagggccctgagccagagtccgtcatcggttactccggagaagattatcccagggctgcgcccactgaagttaaagtccgagtcatgaacagcacagccatcagccttcagtggaaccgcgtctactccgacacggtccagggccagctcagagagtaccgagcctactactggagggagagcagcttgctgaagaacctgtgggtgtctcagaagagacagcaagccagcttccctggtgaccgcctccgtggcgtggtgtcccgcctcttcccctacagtaactacaagctggagatggttgtggtcaatgggagaggtgatgggcctcgcagtgagaccaaggagttcaccaccccggaaggagtacccagtgcccctaggcgtttccgagtccggcagcccaacctggagacaatcaacctggaatgggatcatcctgagcatccaaatgggatcatgattggatacactctcaaatatgtggcctttaacgggaccaaagtaggaaagcagatagtggaaaacttctctcccaatcagaccaagttcacggtgcaaagaacggaccccgtgtcacgctaccgctttaccctcagcgccaggacgcaggtgggctctggggaagccgtcacagaggagtcaccagcacccccgaatgaagctactccaaccgcagctcctcccacattgcccccgactaccgtgggtgcgacgggcgctgtgagcagtaccgatgctactgccattgctgccaccaccgaagccacaacagtccccatcatcccaactgtcgcacctaccaccatcgccaccaccaccaccgtcgccacaactactacaaccactgctgccgccaccaccaccacggagagtcctcccaccaccacctccgggactaagatacacgaatccgcttacaccaacaaccaagcggacatcgccacccagggctggttcattgggcttatgtgcgccatcgccctcctggtgctgatcctgctcatcgtctgtttcatcaagaggagtcgcggcggcaagtacccagtacgagaaaagaaggatgttccccttggccctgaagaccccaaggaagaggatggctcatttgactatagtgatgaggacaacaagcccctgcagggcagtcagacatctctggacggcaccatcaagcagcaggagagtgacgacagcctggtggactatggcgagggtggcgagggtcagttcaatgaagacggctccttcatcggccagtacacggtcaaaaaggacaaggaggaaacagagggcaacgaaagctcagaggccacgtcacctgtcaatgctatctactctctggcctaacggagcccacccaggcacagccaccactttgcaagtgggaggaggggagaaggggagacaaaaccactgcagacctaccacgaagccaccaccaccttcagtaacaagggtacgatatgggggtctgccaagctgtgaggaccagtagccaccaagccacccacaagccccctcccaatgaccccccttcagccccgggtgccaccagtgtgggagagctggagccgtggctgagctcagctggagggagcctggccccttgcccggtctcgcagccaccccgagcgttccaccacactgtccgcccttggcctcggcacacgctcaccttttctgttggttacgggacttctcattgtcttaatttcgctttgtgcatcttcccctccagacccaatgtctctgttttcttttccttttgaaaaagagtccctggaaaagaaagaataagtggattctcccccaggagaatcctttttgcaaagataggcaaaaaggattgaatccataccagaacacgtagacaggctgtaatattcaaaccacctctgggccaatgcatttccaaaggatgcctttctcgccatatgcctcccctggcccccagcccctctgcctcggccttgtcagttgctgagctgggcttggctcctttctggaaaatgacagtatttttggcagggagaaggtgcgcaggcctccttgctgctctctggtttggttgggaggtgtgtttacctcttgctcctcattcctcccctgcccttttctctggaatatctaagatgtgagctgcattgactctgaagacgtttgaggaacaggagtgggcactgatagaaaggacttcaacgccagtgactgtgtacctccagcagaagaaaatcaggtgtctggtcttgggggcactgtgctcacttctagagagaagaaaaaggctgggtttggacttcatgcctcctcactggtgaaacccaggatgtagatagagggccacacccaccctgtccagagtagagggcacctgtccacgtggccagggcccatgctgccaccctcgaggagatggaaccctgtgatgcaaaagctttgctggtgtgtttggggcataaggcactgctccccttccatctctagcagatatcatcttctcagccaattctgtaggacactgaggctcttgtttgacatggtgtgtggatggggacttgccccaagactgagcaggtctgccctttcattggggtgtatacatatcaggggaccctgaggtggcaccgtactcagtgttgtgatgcccccacctagggaggactcaatgctctttgtatgccttatgcagcgctgatctgtccctggagttcccaggttcccagctccccccctgcaagccttgaagcctccagcaacgtctatctccaggagagcagggcagcctatgcaagtgttccggcaggaccagaagtggccactcaacacacgtcctcaccagtcaccccaaatggagacactcgcagacctgcagttctcagaccgaaggtgctgccttcatcctccccacctaatgcatttttgaaaccaaaggtacctagcctcagagacagagaaggagagggggagatcttgagtctaagaggaaccctttagctgtttctgcagctgaggtcagtttcaggagggtgaagctgatccccaggaatggatcagctgccatgggcacagcctccgatttgagcctctccggctgccagccagggggcctgggccagaccagggctctgtccttccgtgactttattaaagcaacatttgccacatgtttaagccgcaaaggtattagcaatgcttgcatcattaataatcattcagttgaaggtcaagcccatagacacacactctctgctggtaagaaaccatagcccagaactgagccaataaggttgtttgaacctgagagtgtgtaatggtcatttgggccaagcctcagctagggctgctgcctggacgcctgaggggcagcttatcacagtgcaaggggacagggtaaacagcagggggtggggtgtgagcttggagggcccctcccctggatttcctccaacacctgcttggatactaggcccactgtccctgaagggaatgtcagggaagtgtgcctgtgagctgaattaaaggactggcctttccagaaaacgctttggatctgagcagagtagtcagtttctcagacactcattccatactgcaccgtacatgccagcgtacccattgcaccgaaagcaggcccttagggcaggaagggacgatgagcaagtctgccacaccacctggtgactgggaagggctgcttctctcgtaagggtcttggggagaagtaagcccgcagcctgcctctgcacctcgttccagtgtcctgccaggctctgtactgtcctttgtgtatgaagaaaatgctgttagccctctctcaggctgctgttctgtgggtgctgagagctgccccccatcaccacgccatcacacccctctgagcagaagcaaatctgaggctgaagaattaagttttccccaagcaaggaaggcaggtggtcagagagatcaaacgctgaggcgtggggattgcaggattcaggaggcagcccctttggggaagaggagggtgcattttccatggagcccatgtcagagtccactccagctcagcaggaaagtggaattgcccagtactgcctgccagctgggtctcccaagcaactaccccaagacataccaacagtgaagccaggacagcaccatgccatcggcgctccagtctgtctggctgggaggaaagtgctgggcatcttacagtaactctagaagttcctttgactaggctgcaatcccacctatatgctcagccctaagagctgtggtttcctgtgctctcatttgtccattcattcattcattcattcattcagcaaataatctgaaatccagtctgaactaaggcctgagctgtggataccatggcgcgtgagttagatgtggtccctgccctcatggggctgacagtcctaaaatcaagtgctaggacacagtggccattgagctgggagcattcttccctctaccgcttaagccactgatggctgcgagcttgaagagagggattctgagggagagcttggtccatctggtcaccaaggctgggcgggacagagcagtcaagaaccacggtgtggcttgagaaacagtcctgcttcctgagcctctttgctctgcctcttggggcaagctccttaacctgtctgtatttttatgcctctgtctcccattcagttcctccttgaatacctctttctacagagaggcacgggctcccctgaaggattgtcgaggccagggttcgggaagtacactgccatcggtcaggggacagctgcctcccaccttgcctgggtgatggtgaatgggactcatcttttcctgccttgcttttgaggagatggttgaatttaagctaacaggaaagccaaaccagcaccctcctttgtgctctgagaggttggagacatctggtccaccccattgcccctgcccctggcaagccctgaagtcgggagaggtgaccacaggtctgaaaatcagccagtgccaacattgcttgccctgcaaggtgcaactgagcccacatagcgcattcatagtttccctgaccacagccttgggaagacggtggaaacccgaggatgtgtgggtttcccagctaacggacaagctcccctgccacacccagtgcccacgcatgctcacatacatacagcagaccacaaccctgttgccaagcagtgcttccaagggatagcgatccagattccaacattgtcttggagagggttagtccacatccaagttgcgtgagataagatgcaaagggctctgtgtggatgaggaacgcaccttagaggagtgggaaaggccaccagggttgggccctgtttaggtaattcctgttggcagcacctagagagagcatctgagctgaaggagtgggaaactttgcccaagcaatggcacgggcagcgggctctttctggcgccctgtgctggagcagggccaagtcttagggcatcacaaacagcccatttgatggagggagcagggacatagcacatttttgtctgtctttgtgaggctgctttgctaactctctgaggagaggaagcctctcgggctttccgtcggctggggctagtgccagagaatcccttctcagtggccagcaggttcctgggaggccggcacaaggcaccgctccccactcatgacaccttggtgcagagtgacctcctgcccagtcaccactccggccagccccagccaaacacacaaaagcccatggttgcggttgcatctacaccgttagttggcaaaggatcctgcttgagctctgcgtggtggccaaggagtagcatggaggagggccctgattttaaaaaggaaaaatagagaggcctcaaaacaatgaaacaaagagcttgatatgtcaagaggagaccaaggccctgggaggcataggcaagccgggcagagtcagaccagtgccctcccttgaccatctcctagcattccttaacctagacaggggctaccccatgtgagtccaagccagactttgtggctgtccccagcctgcacagcccaagcccagggaagtgtcctttctttcccttccttactaataatgggccttcctgagacacattcagagaaggatcagagagaaaggagaaccatccaggagagccacaagcgtccaccaaacagtgtctcaggcctcacctgaagctgctgttcctcctatcagcacactagtattaaatgggtgttccataatgaggagaatggaaataggtacaaggcatctagcttaggacagaatcggatttcggcatgtgaaggaatcccagagctgatctcattgaaatgatctatcgtacagacaaggatatgcaaatccacagaagtgaagggatttttgctcaagatcacatagctggtaaactaaggtaaggttagggcttgaacttgggccttctgactccttgtccagtcagtgttctttcatctcaccacagctgcctcctttgaaacagaggtattaagatctgtccttctggttcaccctctcatacctctttactgcgtctcccacatcccccacatgcctcccaaaatgaaagacaaacaggattgtttctgagaccaagatcagtctgtctgtgatcagcctgtgtgtggttcacccagtcatgcaattaagggcagatctgggccagtggaataggatagctgattggtgtttgttactgtgaaccctagaccgtaccccgtagaatggtgtctcttgctttgtaacacatcgggccttcagtgtgctgtattcctcagaagtgagggcatctcggtccattctgcccatggccacagggtgcagagaggcagcagggcccatgcaagctgccaccctgggatttgctgggctggagttcaacagatgtaaagacttcagtgaagcaataaacacaaaactctgggagaagatatccagaattttgtacattactctgtttctttttcaaaaatgaggcagatcagatgcccctgagctgcccctttttttctgattcccaactgcaatgtcctcagtcagtgttgtccctctgcccggctccccagctctttgccaacctcttcacactccccttgagctgagcatcagtcgcctgtgacgtggccaccttctgtcctgctcccactcccgacccatgctggaccccggaggacctcctgccccgcccccaccacacacccatatcccccaccattccaatttgttctttcccgtggggaattttttttcccagcgtctccatcccttcctacatatccacacacacacaaattggtctgatcttttttccattggttaaacatttaactccatgccagaccttgttttaacccctctcacatcatgttctttccttttttgcgagttattttgcattaaccaactttgtcagtgacagatgcgtatctgagggtgtcacacacgaccttcagcagggaagacttctgggccatggagggccgtctaatacatggacttataaactgactgcatgagcaatgaaaaggccaaattattctgaattttttttgaatcactgtaaaaaaactgatttcttttgtatagagaacactaaacgtataataaaagttgttcaaaatgga

SEQ ID NO: 232 - DNA, 10147 bp, Homo sapiens
ctgagtgctgtccaggaggcccagttaaagcggctcgaggtgacaagaccccgagtgctggggagcagggagcagggccaggtgccgaggatggccaggcagccaccgccgccctgggtccatgcagccttcctcctctgcctcctcagtcttggcggagccatcgaaattcctatggatccaagcattcagaatgagctgacgcagccgccaaccatcaccaagcagtcagcgaaggatcacatcgtggacccccgtgataacatcctgattgagtgtgaagcaaaagggaaccctgcccccagcttccactggacacgaaacagcagattcttcaacatcgccaaggacccccgggtgtccatgaggaggaggtctgggaccctggtgattgacttccgcagtggcgggcggccggaggaatatgagggggaatatcagtgcttcgcccgcaacaaatttggcacggccctgtccaataggatccgcctgcaggtgtctaaatctcctctgtggcccaaggaaaacctagaccctgtcgtggtccaagagggcgctcctttgacgctccagtgcaaccccccgcctggacttccatccccggtcatcttctggatgagcagctccatggagcccatcacccaagacaaacgtgtctctcagggccataacggagacctatacttctccaacgtgatgctgcaggacatgcagaccgactacagttgtaacgcccgcttccacttcacccacaccatccagcagaagaaccctttcaccctcaaggtcctcaccaaccacccttataatgactcgtccttaagaaaccaccctgacatgtacagtgcccgaggagttgcagaaagaacaccaagcttcatgtatccccagggcaccgcgagcagccagatggtgcttcgtggcatggacctcctgctggaatgcatcgcctccggggtcccaacaccagacatcgcatggtacaagaaaggtggggacctcccatctgataaggccaagtttgagaactttaataaggccctgcgtatcacaaatgtctctgaggaagactccggggagtatttctgcctggcctccaacaagatgggcagcatccggcacacgatctcggtgagagtaaaggctgctccctactggctggacgaacccaagaaccttattctggctcctggcgaggatgggagactggtgtgtcgagccaatggaaaccccaaacccactgtccagtggatggtgaatggggaacctttgcaatcggcaccacctaacccaaaccgtgaggtggccggagacaccatcatcttccgggacacccagatcagcagcagggctgtgtaccagtgcaacacctccaacgagcatggctacctgctggccaacgcctttgtcagtgtgctggatgtgccgcctcggatgctgtcgccccggaaccagctcattcgagtgattctttacaaccggacgcggctggactgccctttctttgggtctcccatccccacactgcgatggtttaagaatgggcaaggaagcaacctggatggtggcaactaccatgtttatgagaacggcagtctggaaattaagatgatccgcaaagaggaccagggcatctacacctgtgtcgccaccaacatcctgggcaaagctgaaaaccaagtccgcctggaggtcaaagaccccaccaggatctaccggatgcccgaggaccaggtggccagaaggggcaccacggtgcagctggagtgtcgggtgaagcacgacccctccctgaaactcaccgtctcctggctgaaggatgacgagccgctctatattggaaacaggatgaagaaggaagacgactccctgaccatctttggggtggcagagcgggaccagggcagttacacgtgtgtcgccagcaccgagctagaccaagacctggccaaggcctacctcaccgtgctagctgatcaggccactccaactaaccgtttggctgccctgcccaaaggacggccagaccggccccgggacctggagctgaccgacctggccgagaggagcgtgcggctgacctggatccccggggatgctaacaacagccccatcacagactacgtcgtccagtttgaagaagaccagttccaacctggggtctggcatgaccattccaagtaccccggcagcgttaactcagccgtcctccggctgtccccgtatgtcaactaccagttccgtgtcattgccatcaacgaggttgggagcagccaccccagcctcccatccgagcgctaccgaaccagtggagcaccccccgagtccaatcctggtgacgtgaagggagaggggaccagaaagaacaacatggagatcacgtggacgcccatgaatgccacctcggcctttggccccaacctgcgctacattgtcaagtggaggcggagagagactcgagaggcctggaacaacgtcacagtgtggggctctcgctacgtggtggggcagaccccagtctacgtgccctatgagatccgagtccaggctgaaaatgacttcgggaagggccctgagccagagtccgtcatcggttactccggagaagatttacccagtgcccctaggcgtttccgagtccggcagcccaacctggagacaatcaacctggaatgggatcatcctgagcatccaaatgggatcatgattggatacactctcaaatatgtggcctttaacgggaccaaagtaggaaagcagatagtggaaaacttctctcccaatcagaccaagttcacggtgcaaagaacggaccccgtgtcacgctaccgctttaccctcagcgccaggacgcaggtgggctctggggaagccgtcacagaggagtcaccagcacccccgaatgaagctactccaaccgcagctcctcccacattgcccccgactaccgtgggtgcgacgggcgctgtgagcagtaccgatgctactgccattgctgccaccaccgaagccacaacagtccccatcatcccaactgtcgcacctaccaccatcgccaccaccaccaccgtcgccacaactactacaaccactgctgccgccaccaccaccacggagagtcctcccaccaccacctccgggactaagatacacgaatccgcccctgatgagcagtccatatggaacgtcacggtgctccccaacagtaaatgggccaacatcacctggaagcacaatttcgggcccggaactgactttgtggttgagtacatcgacagcaaccatacgaaaaaaactgtcccagttaaggcccaggctcagcctatacagctgacagacctctatcccgggatgacatacacgttgcgggtttattcccgggacaacgagggcatcagcagtaccgtcatcacctttatgaccagtacagcttacaccaacaaccaagcggacatcgccacccagggctggttcattgggcttatgtgcgccatcgccctcctggtgctgatcctgctcatcgtctgtttcatcaagaggagtcgcggcggcaagtacccagtacgagaaaagaaggatgttccccttggccctgaagaccccaaggaagaggatggctcatttgactatagtgatgaggacaacaagcccctgcagggcagtcagacatctctggacggcaccatcaagcagcaggagagtgacgacagcctggtggactatggcgagggtggcgagggtcagttcaatgaagacggctccttcatcggccagtacacggtcaaaaaggacaaggaggaaacagagggcaacgaaagctcagaggccacgtcacctgtcaatgctatctactctctggcctaacggagcccacccaggcacagccaccactttgcaagtgggaggaggggagaaggggagacaaaaccactgcagacctaccacgaagccaccaccaccttcagtaacaagggtacgatatgggggtctgccaagctgtgaggaccagtagccaccaagccacccacaagccccctcccaatgaccccccttcagccccgggtgccaccagtgtgggagagctggagccgtggctgagctcagctggagggagcctggccccttgcccggtctcgcagccaccccgagcgttccaccacactgtccgcccttggcctcggcacacgctcaccttttctgttggttacgggacttctcattgtcttaatttcgctttgtgcatcttcccctccagacccaatgtctctgttttcttttccttttgaaaaagagtccctggaaaagaaagaataagtggattctcccccaggagaatcctttttgcaaagataggcaaaaaggattgaatccataccagaacacgtagacaggctgtaatattcaaaccacctctgggccaatgcatttccaaaggatgcctttctcgccatatgcctcccctggcccccagcccctctgcctcggccttgtcagttgctgagctgggcttggctcctttctggaaaatgacagtatttttggcagggagaaggtgcgcaggcctccttgctgctctctggtttggttgggaggtgtgtttacctcttgctcctcattcctcccctgcccttttctctggaatatctaagatgtgagctgcattgactctgaagacgtttgaggaacaggagtgggcactgatagaaaggacttcaacgccagtgactgtgtacctccagcagaagaaaatcaggtgtctggtcttgggggcactgtgctcacttctagagagaagaaaaaggctgggtttggacttcatgcctcctcactggtgaaacccaggatgtagatagagggccacacccaccctgtccagagtagagggcacctgtccacgtggccagggcccatgctgccaccctcgaggagatggaaccctgtgatgcaaaagctttgctggtgtgtttggggcataaggcactgctccccttccatctctagcagatatcatcttctcagccaattctgtaggacactgaggctcttgtttgacatggtgtgtggatggggacttgccccaagactgagcaggtctgccctttcattggggtgtatacatatcaggggaccctgaggtggcaccgtactcagtgttgtgatgcccccacctagggaggactcaatgctctttgtatgccttatgcagcgctgatctgtccctggagttcccaggttcccagctccccccctgcaagccttgaagcctccagcaacgtctatctccaggagagcagggcagcctatgcaagtgttccggcaggaccagaagtggccactcaacacacgtcctcaccagtcaccccaaatggagacactcgcagacctgcagttctcagaccgaaggtgctgccttcatcctccccacctaatgcatttttgaaaccaaaggtacctagcctcagagacagagaaggagagggggagatcttgagtctaagaggaaccctttagctgtttctgcagctgaggtcagtttcaggagggtgaagctgatccccaggaatggatcagctgccatgggcacagcctccgatttgagcctctccggctgccagccagggggcctgggccagaccagggctctgtccttccgtgactttattaaagcaacatttgccacatgtttaagccgcaaaggtattagcaatgcttgcatcattaataatcattcagttgaaggtcaagcccatagacacacactctctgctggtaagaaaccatagcccagaactgagccaataaggttgtttgaacctgagagtgtgtaatggtcatttgggccaagcctcagctagggctgctgcctggacgcctgaggggcagcttatcacagtgcaaggggacagggtaaacagcagggggtggggtgtgagcttggagggcccctcccctggatttcctccaacacctgcttggatactaggcccactgtccctgaagggaatgtcagggaagtgtgcctgtgagctgaattaaaggactggcctttccagaaaacgctttggatctgagcagagtagtcagtttctcagacactcattccatactgcaccgtacatgccagcgtacccattgcaccgaaagcaggcccttagggcaggaagggacgatgagcaagtctgccacaccacctggtgactgggaagggctgcttctctcgtaagggtcttggggagaagtaagcccgcagcctgcctctgcacctcgttccagtgtcctgccaggctctgtactgtcctttgtgtatgaagaaaatgctgttagccctctctcaggctgctgttctgtgggtgctgagagctgccccccatcaccacgccatcacacccctctgagcagaagcaaatctgaggctgaagaattaagttttccccaagcaaggaaggcaggtggtcagagagatcaaacgctgaggcgtggggattgcaggattcaggaggcagcccctttggggaagaggagggtgcattttccatggagcccatgtcagagtccactccagctcagcaggaaagtggaattgcccagtactgcctgccagctgggtctcccaagcaactaccccaagacataccaacagtgaagccaggacagcaccatgccatcggcgctccagtctgtctggctgggaggaaagtgctgggcatcttacagtaactctagaagttcctttgactaggctgcaatcccacctatatgctcagccctaagagctgtggtttcctgtgctctcatttgtccattcattcattcattcattcattcagcaaataatctgaaatccagtctgaactaaggcctgagctgtggataccatggcgcgtgagttagatgtggtccctgccctcatggggctgacagtcctaaaatcaagtgctaggacacagtggccattgagctgggagcattcttccctctaccgcttaagccactgatggctgcgagcttgaagagagggattctgagggagagcttggtccatctggtcaccaaggctgggcgggacagagcagtcaagaaccacggtgtggcttgagaaacagtcctgcttcctgagcctctttgctctgcctcttggggcaagctccttaacctgtctgtatttttatgcctctgtctcccattcagttcctccttgaatacctctttctacagagaggcacgggctcccctgaaggattgtcgaggccagggttcgggaagtacactgccatcggtcaggggacagctgcctcccaccttgcctgggtgatggtgaatgggactcatcttttcctgccttgcttttgaggagatggttgaatttaagctaacaggaaagccaaaccagcaccctcctttgtgctctgagaggttggagacatctggtccaccccattgcccctgcccctggcaagccctgaagtcgggagaggtgaccacaggtctgaaaatcagccagtgccaacattgcttgccctgcaaggtgcaactgagcccacatagcgcattcatagtttccctgaccacagccttgggaagacggtggaaacccgaggatgtgtgggtttcccagctaacggacaagctcccctgccacacccagtgcccacgcatgctcacatacatacagcagaccacaaccctgttgccaagcagtgcttccaagggatagcgatccagattccaacattgtcttggagagggttagtccacatccaagttgcgtgagataagatgcaaagggctctgtgtggatgaggaacgcaccttagaggagtgggaaaggccaccagggttgggccctgtttaggtaattcctgttggcagcacctagagagagcatctgagctgaaggagtgggaaactttgcccaagcaatggcacgggcagcgggctctttctggcgccctgtgctggagcagggccaagtcttagggcatcacaaacagcccatttgatggagggagcagggacatagcacatttttgtctgtctttgtgaggctgctttgctaactctctgaggagaggaagcctctcgggctttccgtcggctggggctagtgccagagaatcccttctcagtggccagcaggttcctgggaggccggcacaaggcaccgctccccactcatgacaccttggtgcagagtgacctcctgcccagtcaccactccggccagccccagccaaacacacaaaagcccatggttgcggttgcatctacaccgttagttggcaaaggatcctgcttgagctctgcgtggtggccaaggagtagcatggaggagggccctgattttaaaaaggaaaaatagagaggcctcaaaacaatgaaacaaagagcttgatatgtcaagaggagaccaaggccctgggaggcataggcaagccgggcagagtcagaccagtgccctcccttgaccatctcctagcattccttaacctagacaggggctaccccatgtgagtccaagccagactttgtggctgtccccagcctgcacagcccaagcccagggaagtgtcctttctttcccttccttactaataatgggccttcctgagacacattcagagaaggatcagagagaaaggagaaccatccaggagagccacaagcgtccaccaaacagtgtctcaggcctcacctgaagctgctgttcctcctatcagcacactagtattaaatgggtgttccataatgaggagaatggaaataggtacaaggcatctagcttaggacagaatcggatttcggcatgtgaaggaatcccagagctgatctcattgaaatgatctatcgtacagacaaggatatgcaaatccacagaagtgaagggatttttgctcaagatcacatagctggtaaactaaggtaaggttagggcttgaacttgggccttctgactccttgtccagtcagtgttctttcatctcaccacagctgcctcctttgaaacagaggtattaagatctgtccttctggttcaccctctcatacctctttactgcgtctcccacatcccccacatgcctcccaaaatgaaagacaaacaggattgtttctgagaccaagatcagtctgtctgtgatcagcctgtgtgtggttcacccagtcatgcaattaagggcagatctgggccagtggaataggatagctgattggtgtttgttactgtgaaccctagaccgtaccccgtagaatggtgtctcttgctttgtaacacatcgggccttcagtgtgctgtattcctcagaagtgagggcatctcggtccattctgcccatggccacagggtgcagagaggcagcagggcccatgcaagctgccaccctgggatttgctgggctggagttcaacagatgtaaagacttcagtgaagcaataaacacaaaactctgggagaagatatccagaattttgtacattactctgtttctttttcaaaaatgaggcagatcagatgcccctgagctgcccctttttttctgattcccaactgcaatgtcctcagtcagtgttgtccctctgcccggctccccagctctttgccaacctcttcacactccccttgagctgagcatcagtcgcctgtgacgtggccaccttctgtcctgctcccactcccgacccatgctggaccccggaggacctcctgccccgcccccaccacacacccatatcccccaccattccaatttgttctttcccgtggggaattttttttcccagcgtctccatcccttcctacatatccacacacacacaaattggtctgatcttttttccattggttaaacatttaactccatgccagaccttgttttaacccctctcacatcatgttctttccttttttgcgagttattttgcattaaccaactttgtcagtgacagatgcgtatctgagggtgtcacacacgaccttcagcagggaagacttctgggccatggagggccgtctaatacatggacttataaactgactgcatgagcaatgaaaaggccaaattattctgaattttttttgaatcactgtaaaaaaactgatttcttttgtatagagaacactaaacgtataataaaagttgttcaaaatgga

SEQ ID NO: 233 - DNA, 9961 bp, Homo sapiens
ctgagtgctgtccaggaggcccagttaaagcggctcgaggtgacaagaccccgagtgctggggagcagggagcagggccaggtgccgaggatggccaggcagccaccgccgccctgggtccatgcagccttcctcctctgcctcctcagtcttggcggagccatcgaaattcctatggatccaagcattcagaatgagctgacgcagccgccaaccatcaccaagcagtcagcgaaggatcacatcgtggacccccgtgataacatcctgattgagtgtgaagcaaaagggaaccctgcccccagcttccactggacacgaaacagcagattcttcaacatcgccaaggacccccgggtgtccatgaggaggaggtctgggaccctggtgattgacttccgcagtggcgggcggccggaggaatatgagggggaatatcagtgcttcgcccgcaacaaatttggcacggccctgtccaataggatccgcctgcaggtgtctaaatctcctctgtggcccaaggaaaacctagaccctgtcgtggtccaagagggcgctcctttgacgctccagtgcaaccccccgcctggacttccatccccggtcatcttctggatgagcagctccatggagcccatcacccaagacaaacgtgtctctcagggccataacggagacctatacttctccaacgtgatgctgcaggacatgcagaccgactacagttgtaacgcccgcttccacttcacccacaccatccagcagaagaaccctttcaccctcaaggtcctcaccaaccacccttataatgactcgtccttaagaaaccaccctgacatgtacagtgcccgaggagttgcagaaagaacaccaagcttcatgtatccccagggcaccgcgagcagccagatggtgcttcgtggcatggacctcctgctggaatgcatcgcctccggggtcccaacaccagacatcgcatggtacaagaaaggtggggacctcccatctgataaggccaagtttgagaactttaataaggccctgcgtatcacaaatgtctctgaggaagactccggggagtatttctgcctggcctccaacaagatgggcagcatccggcacacgatctcggtgagagtaaaggctgctccctactggctggacgaacccaagaaccttattctggctcctggcgaggatgggagactggtgtgtcgagccaatggaaaccccaaacccactgtccagtggatggtgaatggggaacctttgcaatcggcaccacctaacccaaaccgtgaggtggccggagacaccatcatcttccgggacacccagatcagcagcagggctgtgtaccagtgcaacacctccaacgagcatggctacctgctggccaacgcctttgtcagtgtgctggatgtgccgcctcggatgctgtcgccccggaaccagctcattcgagtgattctttacaaccggacgcggctggactgccctttctttgggtctcccatccccacactgcgatggtttaagaatgggcaaggaagcaacctggatggtggcaactaccatgtttatgagaacggcagtctggaaattaagatgatccgcaaagaggaccagggcatctacacctgtgtcgccaccaacatcctgggcaaagctgaaaaccaagtccgcctggaggtcaaagaccccaccaggatctaccggatgcccgaggaccaggtggccagaaggggcaccacggtgcagctggagtgtcgggtgaagcacgacccctccctgaaactcaccgtctcctggctgaaggatgacgagccgctctatattggaaacaggatgaagaaggaagacgactccctgaccatctttggggtggcagagcgggaccagggcagttacacgtgtgtcgccagcaccgagctagaccaagacctggccaaggcctacctcaccgtgctagctgatcaggccactccaactaaccgtttggctgccctgcccaaaggacggccagaccggccccgggacctggagctgaccgacctggccgagaggagcgtgcggctgacctggatccccggggatgctaacaacagccccatcacagactacgtcgtccagtttgaagaagaccagttccaacctggggtctggcatgaccattccaagtaccccggcagcgttaactcagccgtcctccggctgtccccgtatgtcaactaccagttccgtgtcattgccatcaacgaggttgggagcagccaccccagcctcccatccgagcgctaccgaaccagtggagcaccccccgagtccaatcctggtgacgtgaagggagaggggaccagaaagaacaacatggagatcacgtggacgcccatgaatgccacctcggcctttggccccaacctgcgctacattgtcaagtggaggcggagagagactcgagaggcctggaacaacgtcacagtgtggggctctcgctacgtggtggggcagaccccagtctacgtgccctatgagatccgagtccaggctgaaaatgacttcgggaagggccctgagccagagtccgtcatcggttactccggagaagattatcccagggctgcgcccactgaagttaaagtccgagtcatgaacagcacagccatcagccttcagtggaaccgcgtctactccgacacggtccagggccagctcagagagtaccgagcctactactggagggagagcagcttgctgaagaacctgtgggtgtctcagaagagacagcaagccagcttccctggtgaccgcctccgtggcgtggtgtcccgcctcttcccctacagtaactacaagctggagatggttgtggtcaatgggagaggtgatgggcctcgcagtgagaccaaggagttcaccaccccggaaggagtacccagtgcccctaggcgtttccgagtccggcagcccaacctggagacaatcaacctggaatgggatcatcctgagcatccaaatgggatcatgattggatacactctcaaatatgtggcctttaacgggaccaaagtaggaaagcagatagtggaaaacttctctcccaatcagaccaagttcacggtgcaaagaacggaccccgtgtcacgctaccgctttaccctcagcgccaggacgcaggtgggctctggggaagccgtcacagaggagtcaccagcacccccgaatgaagctactccaaccgcagcttacaccaacaaccaagcggacatcgccacccagggctggttcattgggcttatgtgcgccatcgccctcctggtgctgatcctgctcatcgtctgtttcatcaagaggagtcgcggcggcaagtacccagtacgagaaaagaaggatgttccccttggccctgaagaccccaaggaagaggatggctcatttgactatagtgatgaggacaacaagcccctgcagggcagtcagacatctctggacggcaccatcaagcagcaggagagtgacgacagcctggtggactatggcgagggtggcgagggtcagttcaatgaagacggctccttcatcggccagtacacggtcaaaaaggacaaggaggaaacagagggcaacgaaagctcagaggccacgtcacctgtcaatgctatctactctctggcctaacggagcccacccaggcacagccaccactttgcaagtgggaggaggggagaaggggagacaaaaccactgcagacctaccacgaagccaccaccaccttcagtaacaagggtacgatatgggggtctgccaagctgtgaggaccagtagccaccaagccacccacaagccccctcccaatgaccccccttcagccccgggtgccaccagtgtgggagagctggagccgtggctgagctcagctggagggagcctggccccttgcccggtctcgcagccaccccgagcgttccaccacactgtccgcccttggcctcggcacacgctcaccttttctgttggttacgggacttctcattgtcttaatttcgctttgtgcatcttcccctccagacccaatgtctctgttttcttttccttttgaaaaagagtccctggaaaagaaagaataagtggattctcccccaggagaatcctttttgcaaagataggcaaaaaggattgaatccataccagaacacgtagacaggctgtaatattcaaaccacctctgggccaatgcatttccaaaggatgcctttctcgccatatgcctcccctggcccccagcccctctgcctcggccttgtcagttgctgagctgggcttggctcctttctggaaaatgacagtatttttggcagggagaaggtgcgcaggcctccttgctgctctctggtttggttgggaggtgtgtttacctcttgctcctcattcctcccctgcccttttctctggaatatctaagatgtgagctgcattgactctgaagacgtttgaggaacaggagtgggcactgatagaaaggacttcaacgccagtgactgtgtacctccagcagaagaaaatcaggtgtctggtcttgggggcactgtgctcacttctagagagaagaaaaaggctgggtttggacttcatgcctcctcactggtgaaacccaggatgtagatagagggccacacccaccctgtccagagtagagggcacctgtccacgtggccagggcccatgctgccaccctcgaggagatggaaccctgtgatgcaaaagctttgctggtgtgtttggggcataaggcactgctccccttccatctctagcagatatcatcttctcagccaattctgtaggacactgaggctcttgtttgacatggtgtgtggatggggacttgccccaagactgagcaggtctgccctttcattggggtgtatacatatcaggggaccctgaggtggcaccgtactcagtgttgtgatgcccccacctagggaggactcaatgctctttgtatgccttatgcagcgctgatctgtccctggagttcccaggttcccagctccccccctgcaagccttgaagcctccagcaacgtctatctccaggagagcagggcagcctatgcaagtgttccggcaggaccagaagtggccactcaacacacgtcctcaccagtcaccccaaatggagacactcgcagacctgcagttctcagaccgaaggtgctgccttcatcctccccacctaatgcatttttgaaaccaaaggtacctagcctcagagacagagaaggagagggggagatcttgagtctaagaggaaccctttagctgtttctgcagctgaggtcagtttcaggagggtgaagctgatccccaggaatggatcagctgccatgggcacagcctccgatttgagcctctccggctgccagccagggggcctgggccagaccagggctctgtccttccgtgactttattaaagcaacatttgccacatgtttaagccgcaaaggtattagcaatgcttgcatcattaataatcattcagttgaaggtcaagcccatagacacacactctctgctggtaagaaaccatagcccagaactgagccaataaggttgtttgaacctgagagtgtgtaatggtcatttgggccaagcctcagctagggctgctgcctggacgcctgaggggcagcttatcacagtgcaaggggacagggtaaacagcagggggtggggtgtgagcttggagggcccctcccctggatttcctccaacacctgcttggatactaggcccactgtccctgaagggaatgtcagggaagtgtgcctgtgagctgaattaaaggactggcctttccagaaaacgctttggatctgagcagagtagtcagtttctcagacactcattccatactgcaccgtacatgccagcgtacccattgcaccgaaagcaggcccttagggcaggaagggacgatgagcaagtctgccacaccacctggtgactgggaagggctgcttctctcgtaagggtcttggggagaagtaagcccgcagcctgcctctgcacctcgttccagtgtcctgccaggctctgtactgtcctttgtgtatgaagaaaatgctgttagccctctctcaggctgctgttctgtgggtgctgagagctgccccccatcaccacgccatcacacccctctgagcagaagcaaatctgaggctgaagaattaagttttccccaagcaaggaaggcaggtggtcagagagatcaaacgctgaggcgtggggattgcaggattcaggaggcagcccctttggggaagaggagggtgcattttccatggagcccatgtcagagtccactccagctcagcaggaaagtggaattgcccagtactgcctgccagctgggtctcccaagcaactaccccaagacataccaacagtgaagccaggacagcaccatgccatcggcgctccagtctgtctggctgggaggaaagtgctgggcatcttacagtaactctagaagttcctttgactaggctgcaatcccacctatatgctcagccctaagagctgtggtttcctgtgctctcatttgtccattcattcattcattcattcattcagcaaataatctgaaatccagtctgaactaaggcctgagctgtggataccatggcgcgtgagttagatgtggtccctgccctcatggggctgacagtcctaaaatcaagtgctaggacacagtggccattgagctgggagcattcttccctctaccgcttaagccactgatggctgcgagcttgaagagagggattctgagggagagcttggtccatctggtcaccaaggctgggcgggacagagcagtcaagaaccacggtgtggcttgagaaacagtcctgcttcctgagcctctttgctctgcctcttggggcaagctccttaacctgtctgtatttttatgcctctgtctcccattcagttcctccttgaatacctctttctacagagaggcacgggctcccctgaaggattgtcgaggccagggttcgggaagtacactgccatcggtcaggggacagctgcctcccaccttgcctgggtgatggtgaatgggactcatcttttcctgccttgcttttgaggagatggttgaatttaagctaacaggaaagccaaaccagcaccctcctttgtgctctgagaggttggagacatctggtccaccccattgcccctgcccctggcaagccctgaagtcgggagaggtgaccacaggtctgaaaatcagccagtgccaacattgcttgccctgcaaggtgcaactgagcccacatagcgcattcatagtttccctgaccacagccttgggaagacggtggaaacccgaggatgtgtgggtttcccagctaacggacaagctcccctgccacacccagtgcccacgcatgctcacatacatacagcagaccacaaccctgttgccaagcagtgcttccaagggatagcgatccagattccaacattgtcttggagagggttagtccacatccaagttgcgtgagataagatgcaaagggctctgtgtggatgaggaacgcaccttagaggagtgggaaaggccaccagggttgggccctgtttaggtaattcctgttggcagcacctagagagagcatctgagctgaaggagtgggaaactttgcccaagcaatggcacgggcagcgggctctttctggcgccctgtgctggagcagggccaagtcttagggcatcacaaacagcccatttgatggagggagcagggacatagcacatttttgtctgtctttgtgaggctgctttgctaactctctgaggagaggaagcctctcgggctttccgtcggctggggctagtgccagagaatcccttctcagtggccagcaggttcctgggaggccggcacaaggcaccgctccccactcatgacaccttggtgcagagtgacctcctgcccagtcaccactccggccagccccagccaaacacacaaaagcccatggttgcggttgcatctacaccgttagttggcaaaggatcctgcttgagctctgcgtggtggccaaggagtagcatggaggagggccctgattttaaaaaggaaaaatagagaggcctcaaaacaatgaaacaaagagcttgatatgtcaagaggagaccaaggccctgggaggcataggcaagccgggcagagtcagaccagtgccctcccttgaccatctcctagcattccttaacctagacaggggctaccccatgtgagtccaagccagactttgtggctgtccccagcctgcacagcccaagcccagggaagtgtcctttctttcccttccttactaataatgggccttcctgagacacattcagagaaggatcagagagaaaggagaaccatccaggagagccacaagcgtccaccaaacagtgtctcaggcctcacctgaagctgctgttcctcctatcagcacactagtattaaatgggtgttccataatgaggagaatggaaataggtacaaggcatctagcttaggacagaatcggatttcggcatgtgaaggaatcccagagctgatctcattgaaatgatctatcgtacagacaaggatatgcaaatccacagaagtgaagggatttttgctcaagatcacatagctggtaaactaaggtaaggttagggcttgaacttgggccttctgactccttgtccagtcagtgttctttcatctcaccacagctgcctcctttgaaacagaggtattaagatctgtccttctggttcaccctctcatacctctttactgcgtctcccacatcccccacatgcctcccaaaatgaaagacaaacaggattgtttctgagaccaagatcagtctgtctgtgatcagcctgtgtgtggttcacccagtcatgcaattaagggcagatctgggccagtggaataggatagctgattggtgtttgttactgtgaaccctagaccgtaccccgtagaatggtgtctcttgctttgtaacacatcgggccttcagtgtgctgtattcctcagaagtgagggcatctcggtccattctgcccatggccacagggtgcagagaggcagcagggcccatgcaagctgccaccctgggatttgctgggctggagttcaacagatgtaaagacttcagtgaagcaataaacacaaaactctgggagaagatatccagaattttgtacattactctgtttctttttcaaaaatgaggcagatcagatgcccctgagctgcccctttttttctgattcccaactgcaatgtcctcagtcagtgttgtccctctgcccggctccccagctctttgccaacctcttcacactccccttgagctgagcatcagtcgcctgtgacgtggccaccttctgtcctgctcccactcccgacccatgctggaccccggaggacctcctgccccgcccccaccacacacccatatcccccaccattccaatttgttctttcccgtggggaattttttttcccagcgtctccatcccttcctacatatccacacacacacaaattggtctgatcttttttccattggttaaacatttaactccatgccagaccttgttttaacccctctcacatcatgttctttccttttttgcgagttattttgcattaaccaactttgtcagtgacagatgcgtatctgagggtgtcacacacgaccttcagcagggaagacttctgggccatggagggccgtctaatacatggacttataaactgactgcatgagcaatgaaaaggccaaattattctgaattttttttgaatcactgtaaaaaaactgatttcttttgtatagagaacactaaacgtataataaaagttgttcaaaatgga

SEQ ID NO: 234 - DNA, 9946 bp, Homo sapiens
ctgagtgctgtccaggaggcccagttaaagcggctcgaggtgacaagaccccgagtgctggggagcagggagcagggccaggtgccgaggatggccaggcagccaccgccgccctgggtccatgcagccttcctcctctgcctcctcagtcttggcggagccatcgaaattcctatggatccaagcattcagaatgagctgacgcagccgccaaccatcaccaagcagtcagcgaaggatcacatcgtggacccccgtgataacatcctgattgagtgtgaagcaaaagggaaccctgcccccagcttccactggacacgaaacagcagattcttcaacatcgccaaggacccccgggtgtccatgaggaggaggtctgggaccctggtgattgacttccgcagtggcgggcggccggaggaatatgagggggaatatcagtgcttcgcccgcaacaaatttggcacggccctgtccaataggatccgcctgcaggtgtctaaatctcctctgtggcccaaggaaaacctagaccctgtcgtggtccaagagggcgctcctttgacgctccagtgcaaccccccgcctggacttccatccccggtcatcttctggatgagcagctccatggagcccatcacccaagacaaacgtgtctctcagggccataacggagacctatacttctccaacgtgatgctgcaggacatgcagaccgactacagttgtaacgcccgcttccacttcacccacaccatccagcagaagaaccctttcaccctcaaggtcctcaccaaccacccttataatgactcgtccttaagaaaccaccctgacatgtacagtgcccgaggagttgcagaaagaacaccaagcttcatgtatccccagggcaccgcgagcagccagatggtgcttcgtggcatggacctcctgctggaatgcatcgcctccggggtcccaacaccagacatcgcatggtacaagaaaggtggggacctcccatctgataaggccaagtttgagaactttaataaggccctgcgtatcacaaatgtctctgaggaagactccggggagtatttctgcctggcctccaacaagatgggcagcatccggcacacgatctcggtgagagtaaaggctgctccctactggctggacgaacccaagaaccttattctggctcctggcgaggatgggagactggtgtgtcgagccaatggaaaccccaaacccactgtccagtggatggtgaatggggaacctttgcaatcggcaccacctaacccaaaccgtgaggtggccggagacaccatcatcttccgggacacccagatcagcagcagggctgtgtaccagtgcaacacctccaacgagcatggctacctgctggccaacgcctttgtcagtgtgctggatgtgccgcctcggatgctgtcgccccggaaccagctcattcgagtgattctttacaaccggacgcggctggactgccctttctttgggtctcccatccccacactgcgatggtttaagaatgggcaaggaagcaacctggatggtggcaactaccatgtttatgagaacggcagtctggaaattaagatgatccgcaaagaggaccagggcatctacacctgtgtcgccaccaacatcctgggcaaagctgaaaaccaagtccgcctggaggtcaaagaccccaccaggatctaccggatgcccgaggaccaggtggccagaaggggcaccacggtgcagctggagtgtcgggtgaagcacgacccctccctgaaactcaccgtctcctggctgaaggatgacgagccgctctatattggaaacaggatgaagaaggaagacgactccctgaccatctttggggtggcagagcgggaccagggcagttacacgtgtgtcgccagcaccgagctagaccaagacctggccaaggcctacctcaccgtgctagctgatcaggccactccaactaaccgtttggctgccctgcccaaaggacggccagaccggccccgggacctggagctgaccgacctggccgagaggagcgtgcggctgacctggatccccggggatgctaacaacagccccatcacagactacgtcgtccagtttgaagaagaccagttccaacctggggtctggcatgaccattccaagtaccccggcagcgttaactcagccgtcctccggctgtccccgtatgtcaactaccagttccgtgtcattgccatcaacgaggttgggagcagccaccccagcctcccatccgagcgctaccgaaccagtggagcaccccccgagtccaatcctggtgacgtgaagggagaggggaccagaaagaacaacatggagatcacgtggacgcccatgaatgccacctcggcctttggccccaacctgcgctacattgtcaagtggaggcggagagagactcgagaggcctggaacaacgtcacagtgtggggctctcgctacgtggtggggcagaccccagtctacgtgccctatgagatccgagtccaggctgaaaatgacttcgggaagggccctgagccagagtccgtcatcggttactccggagaagattatcccagggctgcgcccactgaagttaaagtccgagtcatgaacagcacagccatcagccttcagtggaaccgcgtctactccgacacggtccagggccagctcagagagtaccgagcctactactggagggagagcagcttgctgaagaacctgtgggtgtctcagaagagacagcaagccagcttccctggtgaccgcctccgtggcgtggtgtcccgcctcttcccctacagtaactacaagctggagatggttgtggtcaatgggagaggtgatgggcctcgcagtgagaccaaggagttcaccaccccggaaggagtacccagtgcccctaggcgtttccgagtccggcagcccaacctggagacaatcaacctggaatgggatcatcctgagcatccaaatgggatcatgattggatacactctcaaatatgtggcctttaacgggaccaaagtaggaaagcagatagtggaaaacttctctcccaatcagaccaagttcacggtgcaaagaacggaccccgtgtcacgctaccgctttaccctcagcgccaggacgcaggtgggctctggggaagccgtcacagaggagtcaccagcacccccgaatgaagcttacaccaacaaccaagcggacatcgccacccagggctggttcattgggcttatgtgcgccatcgccctcctggtgctgatcctgctcatcgtctgtttcatcaagaggagtcgcggcggcaagtacccagtacgagaaaagaaggatgttccccttggccctgaagaccccaaggaagaggatggctcatttgactatagtgatgaggacaacaagcccctgcagggcagtcagacatctctggacggcaccatcaagcagcaggagagtgacgacagcctggtggactatggcgagggtggcgagggtcagttcaatgaagacggctccttcatcggccagtacacggtcaaaaaggacaaggaggaaacagagggcaacgaaagctcagaggccacgtcacctgtcaatgctatctactctctggcctaacggagcccacccaggcacagccaccactttgcaagtgggaggaggggagaaggggagacaaaaccactgcagacctaccacgaagccaccaccaccttcagtaacaagggtacgatatgggggtctgccaagctgtgaggaccagtagccaccaagccacccacaagccccctcccaatgaccccccttcagccccgggtgccaccagtgtgggagagctggagccgtggctgagctcagctggagggagcctggccccttgcccggtctcgcagccaccccgagcgttccaccacactgtccgcccttggcctcggcacacgctcaccttttctgttggttacgggacttctcattgtcttaatttcgctttgtgcatcttcccctccagacccaatgtctctgttttcttttccttttgaaaaagagtccctggaaaagaaagaataagtggattctcccccaggagaatcctttttgcaaagataggcaaaaaggattgaatccataccagaacacgtagacaggctgtaatattcaaaccacctctgggccaatgcatttccaaaggatgcctttctcgccatatgcctcccctggcccccagcccctctgcctcggccttgtcagttgctgagctgggcttggctcctttctggaaaatgacagtatttttggcagggagaaggtgcgcaggcctccttgctgctctctggtttggttgggaggtgtgtttacctcttgctcctcattcctcccctgcccttttctctggaatatctaagatgtgagctgcattgactctgaagacgtttgaggaacaggagtgggcactgatagaaaggacttcaacgccagtgactgtgtacctccagcagaagaaaatcaggtgtctggtcttgggggcactgtgctcacttctagagagaagaaaaaggctgggtttggacttcatgcctcctcactggtgaaacccaggatgtagatagagggccacacccaccctgtccagagtagagggcacctgtccacgtggccagggcccatgctgccaccctcgaggagatggaaccctgtgatgcaaaagctttgctggtgtgtttggggcataaggcactgctccccttccatctctagcagatatcatcttctcagccaattctgtaggacactgaggctcttgtttgacatggtgtgtggatggggacttgccccaagactgagcaggtctgccctttcattggggtgtatacatatcaggggaccctgaggtggcaccgtactcagtgttgtgatgcccccacctagggaggactcaatgctctttgtatgccttatgcagcgctgatctgtccctggagttcccaggttcccagctccccccctgcaagccttgaagcctccagcaacgtctatctccaggagagcagggcagcctatgcaagtgttccggcaggaccagaagtggccactcaacacacgtcctcaccagtcaccccaaatggagacactcgcagacctgcagttctcagaccgaaggtgctgccttcatcctccccacctaatgcatttttgaaaccaaaggtacctagcctcagagacagagaaggagagggggagatcttgagtctaagaggaaccctttagctgtttctgcagctgaggtcagtttcaggagggtgaagctgatccccaggaatggatcagctgccatgggcacagcctccgatttgagcctctccggctgccagccagggggcctgggccagaccagggctctgtccttccgtgactttattaaagcaacatttgccacatgtttaagccgcaaaggtattagcaatgcttgcatcattaataatcattcagttgaaggtcaagcccatagacacacactctctgctggtaagaaaccatagcccagaactgagccaataaggttgtttgaacctgagagtgtgtaatggtcatttgggccaagcctcagctagggctgctgcctggacgcctgaggggcagcttatcacagtgcaaggggacagggtaaacagcagggggtggggtgtgagcttggagggcccctcccctggatttcctccaacacctgcttggatactaggcccactgtccctgaagggaatgtcagggaagtgtgcctgtgagctgaattaaaggactggcctttccagaaaacgctttggatctgagcagagtagtcagtttctcagacactcattccatactgcaccgtacatgccagcgtacccattgcaccgaaagcaggcccttagggcaggaagggacgatgagcaagtctgccacaccacctggtgactgggaagggctgcttctctcgtaagggtcttggggagaagtaagcccgcagcctgcctctgcacctcgttccagtgtcctgccaggctctgtactgtcctttgtgtatgaagaaaatgctgttagccctctctcaggctgctgttctgtgggtgctgagagctgccccccatcaccacgccatcacacccctctgagcagaagcaaatctgaggctgaagaattaagttttccccaagcaaggaaggcaggtggtcagagagatcaaacgctgaggcgtggggattgcaggattcaggaggcagcccctttggggaagaggagggtgcattttccatggagcccatgtcagagtccactccagctcagcaggaaagtggaattgcccagtactgcctgccagctgggtctcccaagcaactaccccaagacataccaacagtgaagccaggacagcaccatgccatcggcgctccagtctgtctggctgggaggaaagtgctgggcatcttacagtaactctagaagttcctttgactaggctgcaatcccacctatatgctcagccctaagagctgtggtttcctgtgctctcatttgtccattcattcattcattcattcattcagcaaataatctgaaatccagtctgaactaaggcctgagctgtggataccatggcgcgtgagttagatgtggtccctgccctcatggggctgacagtcctaaaatcaagtgctaggacacagtggccattgagctgggagcattcttccctctaccgcttaagccactgatggctgcgagcttgaagagagggattctgagggagagcttggtccatctggtcaccaaggctgggcgggacagagcagtcaagaaccacggtgtggcttgagaaacagtcctgcttcctgagcctctttgctctgcctcttggggcaagctccttaacctgtctgtatttttatgcctctgtctcccattcagttcctccttgaatacctctttctacagagaggcacgggctcccctgaaggattgtcgaggccagggttcgggaagtacactgccatcggtcaggggacagctgcctcccaccttgcctgggtgatggtgaatgggactcatcttttcctgccttgcttttgaggagatggttgaatttaagctaacaggaaagccaaaccagcaccctcctttgtgctctgagaggttggagacatctggtccaccccattgcccctgcccctggcaagccctgaagtcgggagaggtgaccacaggtctgaaaatcagccagtgccaacattgcttgccctgcaaggtgcaactgagcccacatagcgcattcatagtttccctgaccacagccttgggaagacggtggaaacccgaggatgtgtgggtttcccagctaacggacaagctcccctgccacacccagtgcccacgcatgctcacatacatacagcagaccacaaccctgttgccaagcagtgcttccaagggatagcgatccagattccaacattgtcttggagagggttagtccacatccaagttgcgtgagataagatgcaaagggctctgtgtggatgaggaacgcaccttagaggagtgggaaaggccaccagggttgggccctgtttaggtaattcctgttggcagcacctagagagagcatctgagctgaaggagtgggaaactttgcccaagcaatggcacgggcagcgggctctttctggcgccctgtgctggagcagggccaagtcttagggcatcacaaacagcccatttgatggagggagcagggacatagcacatttttgtctgtctttgtgaggctgctttgctaactctctgaggagaggaagcctctcgggctttccgtcggctggggctagtgccagagaatcccttctcagtggccagcaggttcctgggaggccggcacaaggcaccgctccccactcatgacaccttggtgcagagtgacctcctgcccagtcaccactccggccagccccagccaaacacacaaaagcccatggttgcggttgcatctacaccgttagttggcaaaggatcctgcttgagctctgcgtggtggccaaggagtagcatggaggagggccctgattttaaaaaggaaaaatagagaggcctcaaaacaatgaaacaaagagcttgatatgtcaagaggagaccaaggccctgggaggcataggcaagccgggcagagtcagaccagtgccctcccttgaccatctcctagcattccttaacctagacaggggctaccccatgtgagtccaagccagactttgtggctgtccccagcctgcacagcccaagcccagggaagtgtcctttctttcccttccttactaataatgggccttcctgagacacattcagagaaggatcagagagaaaggagaaccatccaggagagccacaagcgtccaccaaacagtgtctcaggcctcacctgaagctgctgttcctcctatcagcacactagtattaaatgggtgttccataatgaggagaatggaaataggtacaaggcatctagcttaggacagaatcggatttcggcatgtgaaggaatcccagagctgatctcattgaaatgatctatcgtacagacaaggatatgcaaatccacagaagtgaagggatttttgctcaagatcacatagctggtaaactaaggtaaggttagggcttgaacttgggccttctgactccttgtccagtcagtgttctttcatctcaccacagctgcctcctttgaaacagaggtattaagatctgtccttctggttcaccctctcatacctctttactgcgtctcccacatcccccacatgcctcccaaaatgaaagacaaacaggattgtttctgagaccaagatcagtctgtctgtgatcagcctgtgtgtggttcacccagtcatgcaattaagggcagatctgggccagtggaataggatagctgattggtgtttgttactgtgaaccctagaccgtaccccgtagaatggtgtctcttgctttgtaacacatcgggccttcagtgtgctgtattcctcagaagtgagggcatctcggtccattctgcccatggccacagggtgcagagaggcagcagggcccatgcaagctgccaccctgggatttgctgggctggagttcaacagatgtaaagacttcagtgaagcaataaacacaaaactctgggagaagatatccagaattttgtacattactctgtttctttttcaaaaatgaggcagatcagatgcccctgagctgcccctttttttctgattcccaactgcaatgtcctcagtcagtgttgtccctctgcccggctccccagctctttgccaacctcttcacactccccttgagctgagcatcagtcgcctgtgacgtggccaccttctgtcctgctcccactcccgacccatgctggaccccggaggacctcctgccccgcccccaccacacacccatatcccccaccattccaatttgttctttcccgtggggaattttttttcccagcgtctccatcccttcctacatatccacacacacacaaattggtctgatcttttttccattggttaaacatttaactccatgccagaccttgttttaacccctctcacatcatgttctttccttttttgcgagttattttgcattaaccaactttgtcagtgacagatgcgtatctgagggtgtcacacacgaccttcagcagggaagacttctgggccatggagggccgtctaatacatggacttataaactgactgcatgagcaatgaaaaggccaaattattctgaattttttttgaatcactgtaaaaaaactgatttcttttgtatagagaacactaaacgtataataaaagttgttcaaaatgga

SEQ ID NO: 235 - DNA, 10261 bp, Homo sapiens
gattccacccagggcagggctgctgtgttttctctgaggccaactttcagggaaaagaaggatcttgctgggattttgctcaggcctaagtctgccagctgggatggcctggggcctaagaaatgcctagcttccctccccacctgtccccatggagggagactgagaagacgctggatgaaccagaccatggctccttcaggagagaggttgattgacttatgtgcaatttgggacgctggagtttaccttccctccgcagcctggaacagagcctcctctggtgttgcaaggaagaggctgaatgaggcagagaagctgagtgctgtccaggaggcccagttaaagcggctcgaggtgacaagaccccgagtgctggggagcagggagcagggccaggtgccgaggatggccaggcagccaccgccgccctgggtccatgcagccttcctcctctgcctcctcagtcttggcggagccatcgaaattcctatggatctgacgcagccgccaaccatcaccaagcagtcagcgaaggatcacatcgtggacccccgtgataacatcctgattgagtgtgaagcaaaagggaaccctgcccccagcttccactggacacgaaacagcagattcttcaacatcgccaaggacccccgggtgtccatgaggaggaggtctgggaccctggtgattgacttccgcagtggcgggcggccggaggaatatgagggggaatatcagtgcttcgcccgcaacaaatttggcacggccctgtccaataggatccgcctgcaggtgtctaaatctcctctgtggcccaaggaaaacctagaccctgtcgtggtccaagagggcgctcctttgacgctccagtgcaaccccccgcctggacttccatccccggtcatcttctggatgagcagctccatggagcccatcacccaagacaaacgtgtctctcagggccataacggagacctatacttctccaacgtgatgctgcaggacatgcagaccgactacagttgtaacgcccgcttccacttcacccacaccatccagcagaagaaccctttcaccctcaaggtcctcaccaaccacccttataatgactcgtccttaagaaaccaccctgacatgtacagtgcccgaggagttgcagaaagaacaccaagcttcatgtatccccagggcaccgcgagcagccagatggtgcttcgtggcatggacctcctgctggaatgcatcgcctccggggtcccaacaccagacatcgcatggtacaagaaaggtggggacctcccatctgataaggccaagtttgagaactttaataaggccctgcgtatcacaaatgtctctgaggaagactccggggagtatttctgcctggcctccaacaagatgggcagcatccggcacacgatctcggtgagagtaaaggctgctccctactggctggacgaacccaagaaccttattctggctcctggcgaggatgggagactggtgtgtcgagccaatggaaaccccaaacccactgtccagtggatggtgaatggggaacctttgcaatcggcaccacctaacccaaaccgtgaggtggccggagacaccatcatcttccgggacacccagatcagcagcagggctgtgtaccagtgcaacacctccaacgagcatggctacctgctggccaacgcctttgtcagtgtgctggatgtgccgcctcggatgctgtcgccccggaaccagctcattcgagtgattctttacaaccggacgcggctggactgccctttctttgggtctcccatccccacactgcgatggtttaagaatgggcaaggaagcaacctggatggtggcaactaccatgtttatgagaacggcagtctggaaattaagatgatccgcaaagaggaccagggcatctacacctgtgtcgccaccaacatcctgggcaaagctgaaaaccaagtccgcctggaggtcaaagaccccaccaggatctaccggatgcccgaggaccaggtggccagaaggggcaccacggtgcagctggagtgtcgggtgaagcacgacccctccctgaaactcaccgtctcctggctgaaggatgacgagccgctctatattggaaacaggatgaagaaggaagacgactccctgaccatctttggggtggcagagcgggaccagggcagttacacgtgtgtcgccagcaccgagctagaccaagacctggccaaggcctacctcaccgtgctagctgatcaggccactccaactaaccgtttggctgccctgcccaaaggacggccagaccggccccgggacctggagctgaccgacctggccgagaggagcgtgcggctgacctggatccccggggatgctaacaacagccccatcacagactacgtcgtccagtttgaagaagaccagttccaacctggggtctggcatgaccattccaagtaccccggcagcgttaactcagccgtcctccggctgtccccgtatgtcaactaccagttccgtgtcattgccatcaacgaggttgggagcagccaccccagcctcccatccgagcgctaccgaaccagtggagcaccccccgagtccaatcctggtgacgtgaagggagaggggaccagaaagaacaacatggagatcacgtggacgcccatgaatgccacctcggcctttggccccaacctgcgctacattgtcaagtggaggcggagagagactcgagaggcctggaacaacgtcacagtgtggggctctcgctacgtggtggggcagaccccagtctacgtgccctatgagatccgagtccaggctgaaaatgacttcgggaagggccctgagccagagtccgtcatcggttactccggagaagattatcccagggctgcgcccactgaagttaaagtccgagtcatgaacagcacagccatcagccttcagtggaaccgcgtctactccgacacggtccagggccagctcagagagtaccgagcctactactggagggagagcagcttgctgaagaacctgtgggtgtctcagaagagacagcaagccagcttccctggtgaccgcctccgtggcgtggtgtcccgcctcttcccctacagtaactacaagctggagatggttgtggtcaatgggagaggtgatgggcctcgcagtgagaccaaggagttcaccaccccggaaggagtacccagtgcccctaggcgtttccgagtccggcagcccaacctggagacaatcaacctggaatgggatcatcctgagcatccaaatgggatcatgattggatacactctcaaatatgtggcctttaacgggaccaaagtaggaaagcagatagtggaaaacttctctcccaatcagaccaagttcacggtgcaaagaacggaccccgtgtcacgctaccgctttaccctcagcgccaggacgcaggtgggctctggggaagccgtcacagaggagtcaccagcacccccgaatgaagctactccaaccgcagcttacaccaacaaccaagcggacatcgccacccagggctggttcattgggcttatgtgcgccatcgccctcctggtgctgatcctgctcatcgtctgtttcatcaagaggagtcgcggcggcaagtacccagtacgagaaaagaaggatgttccccttggccctgaagaccccaaggaagaggatggctcatttgactatagtgatgaggacaacaagcccctgcagggcagtcagacatctctggacggcaccatcaagcagcaggagagtgacgacagcctggtggactatggcgagggtggcgagggtcagttcaatgaagacggctccttcatcggccagtacacggtcaaaaaggacaaggaggaaacagagggcaacgaaagctcagaggccacgtcacctgtcaatgctatctactctctggcctaacggagcccacccaggcacagccaccactttgcaagtgggaggaggggagaaggggagacaaaaccactgcagacctaccacgaagccaccaccaccttcagtaacaagggtacgatatgggggtctgccaagctgtgaggaccagtagccaccaagccacccacaagccccctcccaatgaccccccttcagccccgggtgccaccagtgtgggagagctggagccgtggctgagctcagctggagggagcctggccccttgcccggtctcgcagccaccccgagcgttccaccacactgtccgcccttggcctcggcacacgctcaccttttctgttggttacgggacttctcattgtcttaatttcgctttgtgcatcttcccctccagacccaatgtctctgttttcttttccttttgaaaaagagtccctggaaaagaaagaataagtggattctcccccaggagaatcctttttgcaaagataggcaaaaaggattgaatccataccagaacacgtagacaggctgtaatattcaaaccacctctgggccaatgcatttccaaaggatgcctttctcgccatatgcctcccctggcccccagcccctctgcctcggccttgtcagttgctgagctgggcttggctcctttctggaaaatgacagtatttttggcagggagaaggtgcgcaggcctccttgctgctctctggtttggttgggaggtgtgtttacctcttgctcctcattcctcccctgcccttttctctggaatatctaagatgtgagctgcattgactctgaagacgtttgaggaacaggagtgggcactgatagaaaggacttcaacgccagtgactgtgtacctccagcagaagaaaatcaggtgtctggtcttgggggcactgtgctcacttctagagagaagaaaaaggctgggtttggacttcatgcctcctcactggtgaaacccaggatgtagatagagggccacacccaccctgtccagagtagagggcacctgtccacgtggccagggcccatgctgccaccctcgaggagatggaaccctgtgatgcaaaagctttgctggtgtgtttggggcataaggcactgctccccttccatctctagcagatatcatcttctcagccaattctgtaggacactgaggctcttgtttgacatggtgtgtggatggggacttgccccaagactgagcaggtctgccctttcattggggtgtatacatatcaggggaccctgaggtggcaccgtactcagtgttgtgatgcccccacctagggaggactcaatgctctttgtatgccttatgcagcgctgatctgtccctggagttcccaggttcccagctccccccctgcaagccttgaagcctccagcaacgtctatctccaggagagcagggcagcctatgcaagtgttccggcaggaccagaagtggccactcaacacacgtcctcaccagtcaccccaaatggagacactcgcagacctgcagttctcagaccgaaggtgctgccttcatcctccccacctaatgcatttttgaaaccaaaggtacctagcctcagagacagagaaggagagggggagatcttgagtctaagaggaaccctttagctgtttctgcagctgaggtcagtttcaggagggtgaagctgatccccaggaatggatcagctgccatgggcacagcctccgatttgagcctctccggctgccagccagggggcctgggccagaccagggctctgtccttccgtgactttattaaagcaacatttgccacatgtttaagccgcaaaggtattagcaatgcttgcatcattaataatcattcagttgaaggtcaagcccatagacacacactctctgctggtaagaaaccatagcccagaactgagccaataaggttgtttgaacctgagagtgtgtaatggtcatttgggccaagcctcagctagggctgctgcctggacgcctgaggggcagcttatcacagtgcaaggggacagggtaaacagcagggggtggggtgtgagcttggagggcccctcccctggatttcctccaacacctgcttggatactaggcccactgtccctgaagggaatgtcagggaagtgtgcctgtgagctgaattaaaggactggcctttccagaaaacgctttggatctgagcagagtagtcagtttctcagacactcattccatactgcaccgtacatgccagcgtacccattgcaccgaaagcaggcccttagggcaggaagggacgatgagcaagtctgccacaccacctggtgactgggaagggctgcttctctcgtaagggtcttggggagaagtaagcccgcagcctgcctctgcacctcgttccagtgtcctgccaggctctgtactgtcctttgtgtatgaagaaaatgctgttagccctctctcaggctgctgttctgtgggtgctgagagctgccccccatcaccacgccatcacacccctctgagcagaagcaaatctgaggctgaagaattaagttttccccaagcaaggaaggcaggtggtcagagagatcaaacgctgaggcgtggggattgcaggattcaggaggcagcccctttggggaagaggagggtgcattttccatggagcccatgtcagagtccactccagctcagcaggaaagtggaattgcccagtactgcctgccagctgggtctcccaagcaactaccccaagacataccaacagtgaagccaggacagcaccatgccatcggcgctccagtctgtctggctgggaggaaagtgctgggcatcttacagtaactctagaagttcctttgactaggctgcaatcccacctatatgctcagccctaagagctgtggtttcctgtgctctcatttgtccattcattcattcattcattcattcagcaaataatctgaaatccagtctgaactaaggcctgagctgtggataccatggcgcgtgagttagatgtggtccctgccctcatggggctgacagtcctaaaatcaagtgctaggacacagtggccattgagctgggagcattcttccctctaccgcttaagccactgatggctgcgagcttgaagagagggattctgagggagagcttggtccatctggtcaccaaggctgggcgggacagagcagtcaagaaccacggtgtggcttgagaaacagtcctgcttcctgagcctctttgctctgcctcttggggcaagctccttaacctgtctgtatttttatgcctctgtctcccattcagttcctccttgaatacctctttctacagagaggcacgggctcccctgaaggattgtcgaggccagggttcgggaagtacactgccatcggtcaggggacagctgcctcccaccttgcctgggtgatggtgaatgggactcatcttttcctgccttgcttttgaggagatggttgaatttaagctaacaggaaagccaaaccagcaccctcctttgtgctctgagaggttggagacatctggtccaccccattgcccctgcccctggcaagccctgaagtcgggagaggtgaccacaggtctgaaaatcagccagtgccaacattgcttgccctgcaaggtgcaactgagcccacatagcgcattcatagtttccctgaccacagccttgggaagacggtggaaacccgaggatgtgtgggtttcccagctaacggacaagctcccctgccacacccagtgcccacgcatgctcacatacatacagcagaccacaaccctgttgccaagcagtgcttccaagggatagcgatccagattccaacattgtcttggagagggttagtccacatccaagttgcgtgagataagatgcaaagggctctgtgtggatgaggaacgcaccttagaggagtgggaaaggccaccagggttgggccctgtttaggtaattcctgttggcagcacctagagagagcatctgagctgaaggagtgggaaactttgcccaagcaatggcacgggcagcgggctctttctggcgccctgtgctggagcagggccaagtcttagggcatcacaaacagcccatttgatggagggagcagggacatagcacatttttgtctgtctttgtgaggctgctttgctaactctctgaggagaggaagcctctcgggctttccgtcggctggggctagtgccagagaatcccttctcagtggccagcaggttcctgggaggccggcacaaggcaccgctccccactcatgacaccttggtgcagagtgacctcctgcccagtcaccactccggccagccccagccaaacacacaaaagcccatggttgcggttgcatctacaccgttagttggcaaaggatcctgcttgagctctgcgtggtggccaaggagtagcatggaggagggccctgattttaaaaaggaaaaatagagaggcctcaaaacaatgaaacaaagagcttgatatgtcaagaggagaccaaggccctgggaggcataggcaagccgggcagagtcagaccagtgccctcccttgaccatctcctagcattccttaacctagacaggggctaccccatgtgagtccaagccagactttgtggctgtccccagcctgcacagcccaagcccagggaagtgtcctttctttcccttccttactaataatgggccttcctgagacacattcagagaaggatcagagagaaaggagaaccatccaggagagccacaagcgtccaccaaacagtgtctcaggcctcacctgaagctgctgttcctcctatcagcacactagtattaaatgggtgttccataatgaggagaatggaaataggtacaaggcatctagcttaggacagaatcggatttcggcatgtgaaggaatcccagagctgatctcattgaaatgatctatcgtacagacaaggatatgcaaatccacagaagtgaagggatttttgctcaagatcacatagctggtaaactaaggtaaggttagggcttgaacttgggccttctgactccttgtccagtcagtgttctttcatctcaccacagctgcctcctttgaaacagaggtattaagatctgtccttctggttcaccctctcatacctctttactgcgtctcccacatcccccacatgcctcccaaaatgaaagacaaacaggattgtttctgagaccaagatcagtctgtctgtgatcagcctgtgtgtggttcacccagtcatgcaattaagggcagatctgggccagtggaataggatagctgattggtgtttgttactgtgaaccctagaccgtaccccgtagaatggtgtctcttgctttgtaacacatcgggccttcagtgtgctgtattcctcagaagtgagggcatctcggtccattctgcccatggccacagggtgcagagaggcagcagggcccatgcaagctgccaccctgggatttgctgggctggagttcaacagatgtaaagacttcagtgaagcaataaacacaaaactctgggagaagatatccagaattttgtacattactctgtttctttttcaaaaatgaggcagatcagatgcccctgagctgcccctttttttctgattcccaactgcaatgtcctcagtcagtgttgtccctctgcccggctccccagctctttgccaacctcttcacactccccttgagctgagcatcagtcgcctgtgacgtggccaccttctgtcctgctcccactcccgacccatgctggaccccggaggacctcctgccccgcccccaccacacacccatatcccccaccattccaatttgttctttcccgtggggaattttttttcccagcgtctccatcccttcctacatatccacacacacacaaattggtctgatcttttttccattggttaaacatttaactccatgccagaccttgttttaacccctctcacatcatgttctttccttttttgcgagttattttgcattaaccaactttgtcagtgacagatgcgtatctgagggtgtcacacacgaccttcagcagggaagacttctgggccatggagggccgtctaatacatggacttataaactgactgcatgagcaatgaaaaggccaaattattctgaattttttttgaatcactgtaaaaaaactgatttcttttgtatagagaacactaaacgtataataaaagttgttcaaaatgga

SEQ ID NO: 236 - DNA, 10216 bp, Homo sapiens
gattccacccagggcagggctgctgtgttttctctgaggccaactttcagggaaaagaaggatcttgctgggattttgctcaggcctaagtctgccagctgggatggcctggggcctaagaaatgcctagcttccctccccacctgtccccatggagggagactgagaagacgctggatgaaccagaccatggctccttcaggagagaggttgattgacttatgtgcaatttgggacgctggagtttaccttccctccgcagcctggaacagagcctcctctggtgttgcaaggaagaggctgaatgaggcagagaagctgagtgctgtccaggaggcccagttaaagcggctcgaggtgacaagaccccgagtgctggggagcagggagcagggccaggtgccgaggatggccaggcagccaccgccgccctgggtccatgcagccttcctcctctgcctcctcagtcttggcggagccatcgaaattcctatggatctgacgcagccgccaaccatcaccaagcagtcagcgaaggatcacatcgtggacccccgtgataacatcctgattgagtgtgaagcaaaagggaaccctgcccccagcttccactggacacgaaacagcagattcttcaacatcgccaaggacccccgggtgtccatgaggaggaggtctgggaccctggtgattgacttccgcagtggcgggcggccggaggaatatgagggggaatatcagtgcttcgcccgcaacaaatttggcacggccctgtccaataggatccgcctgcaggtgtctaaatctcctctgtggcccaaggaaaacctagaccctgtcgtggtccaagagggcgctcctttgacgctccagtgcaaccccccgcctggacttccatccccggtcatcttctggatgagcagctccatggagcccatcacccaagacaaacgtgtctctcagggccataacggagacctatacttctccaacgtgatgctgcaggacatgcagaccgactacagttgtaacgcccgcttccacttcacccacaccatccagcagaagaaccctttcaccctcaaggtcctcaccaaccacccttataatgactcgtccttaagaaaccaccctgacatgtacagtgcccgaggagttgcagaaagaacaccaagcttcatgtatccccagggcaccgcgagcagccagatggtgcttcgtggcatggacctcctgctggaatgcatcgcctccggggtcccaacaccagacatcgcatggtacaagaaaggtggggacctcccatctgataaggccaagtttgagaactttaataaggccctgcgtatcacaaatgtctctgaggaagactccggggagtatttctgcctggcctccaacaagatgggcagcatccggcacacgatctcggtgagagtaaaggctgctccctactggctggacgaacccaagaaccttattctggctcctggcgaggatgggagactggtgtgtcgagccaatggaaaccccaaacccactgtccagtggatggtgaatggggaacctttgcaatcggcaccacctaacccaaaccgtgaggtggccggagacaccatcatcttccgggacacccagatcagcagcagggctgtgtaccagtgcaacacctccaacgagcatggctacctgctggccaacgcctttgtcagtgtgctggatgtgccgcctcggatgctgtcgccccggaaccagctcattcgagtgattctttacaaccggacgcggctggactgccctttctttgggtctcccatccccacactgcgatggtttaagaatgggcaaggaagcaacctggatggtggcaactaccatgtttatgagaacggcagtctggaaattaagatgatccgcaaagaggaccagggcatctacacctgtgtcgccaccaacatcctgggcaaagctgaaaaccaagtccgcctggaggtcaaagaccccaccaggatctaccggatgcccgaggaccaggtggccagaaggggcaccacggtgcagctggagtgtcgggtgaagcacgacccctccctgaaactcaccgtctcctggctgaaggatgacgagccgctctatattggaaacaggatgaagaaggaagacgactccctgaccatctttggggtggcagagcgggaccagggcagttacacgtgtgtcgccagcaccgagctagaccaagacctggccaaggcctacctcaccgtgctaggacggccagaccggccccgggacctggagctgaccgacctggccgagaggagcgtgcggctgacctggatccccggggatgctaacaacagccccatcacagactacgtcgtccagtttgaagaagaccagttccaacctggggtctggcatgaccattccaagtaccccggcagcgttaactcagccgtcctccggctgtccccgtatgtcaactaccagttccgtgtcattgccatcaacgaggttgggagcagccaccccagcctcccatccgagcgctaccgaaccagtggagcaccccccgagtccaatcctggtgacgtgaagggagaggggaccagaaagaacaacatggagatcacgtggacgcccatgaatgccacctcggcctttggccccaacctgcgctacattgtcaagtggaggcggagagagactcgagaggcctggaacaacgtcacagtgtggggctctcgctacgtggtggggcagaccccagtctacgtgccctatgagatccgagtccaggctgaaaatgacttcgggaagggccctgagccagagtccgtcatcggttactccggagaagattatcccagggctgcgcccactgaagttaaagtccgagtcatgaacagcacagccatcagccttcagtggaaccgcgtctactccgacacggtccagggccagctcagagagtaccgagcctactactggagggagagcagcttgctgaagaacctgtgggtgtctcagaagagacagcaagccagcttccctggtgaccgcctccgtggcgtggtgtcccgcctcttcccctacagtaactacaagctggagatggttgtggtcaatgggagaggtgatgggcctcgcagtgagaccaaggagttcaccaccccggaaggagtacccagtgcccctaggcgtttccgagtccggcagcccaacctggagacaatcaacctggaatgggatcatcctgagcatccaaatgggatcatgattggatacactctcaaatatgtggcctttaacgggaccaaagtaggaaagcagatagtggaaaacttctctcccaatcagaccaagttcacggtgcaaagaacggaccccgtgtcacgctaccgctttaccctcagcgccaggacgcaggtgggctctggggaagccgtcacagaggagtcaccagcacccccgaatgaagctactccaaccgcagcttacaccaacaaccaagcggacatcgccacccagggctggttcattgggcttatgtgcgccatcgccctcctggtgctgatcctgctcatcgtctgtttcatcaagaggagtcgcggcggcaagtacccagtacgagaaaagaaggatgttccccttggccctgaagaccccaaggaagaggatggctcatttgactatagtgatgaggacaacaagcccctgcagggcagtcagacatctctggacggcaccatcaagcagcaggagagtgacgacagcctggtggactatggcgagggtggcgagggtcagttcaatgaagacggctccttcatcggccagtacacggtcaaaaaggacaaggaggaaacagagggcaacgaaagctcagaggccacgtcacctgtcaatgctatctactctctggcctaacggagcccacccaggcacagccaccactttgcaagtgggaggaggggagaaggggagacaaaaccactgcagacctaccacgaagccaccaccaccttcagtaacaagggtacgatatgggggtctgccaagctgtgaggaccagtagccaccaagccacccacaagccccctcccaatgaccccccttcagccccgggtgccaccagtgtgggagagctggagccgtggctgagctcagctggagggagcctggccccttgcccggtctcgcagccaccccgagcgttccaccacactgtccgcccttggcctcggcacacgctcaccttttctgttggttacgggacttctcattgtcttaatttcgctttgtgcatcttcccctccagacccaatgtctctgttttcttttccttttgaaaaagagtccctggaaaagaaagaataagtggattctcccccaggagaatcctttttgcaaagataggcaaaaaggattgaatccataccagaacacgtagacaggctgtaatattcaaaccacctctgggccaatgcatttccaaaggatgcctttctcgccatatgcctcccctggcccccagcccctctgcctcggccttgtcagttgctgagctgggcttggctcctttctggaaaatgacagtatttttggcagggagaaggtgcgcaggcctccttgctgctctctggtttggttgggaggtgtgtttacctcttgctcctcattcctcccctgcccttttctctggaatatctaagatgtgagctgcattgactctgaagacgtttgaggaacaggagtgggcactgatagaaaggacttcaacgccagtgactgtgtacctccagcagaagaaaatcaggtgtctggtcttgggggcactgtgctcacttctagagagaagaaaaaggctgggtttggacttcatgcctcctcactggtgaaacccaggatgtagatagagggccacacccaccctgtccagagtagagggcacctgtccacgtggccagggcccatgctgccaccctcgaggagatggaaccctgtgatgcaaaagctttgctggtgtgtttggggcataaggcactgctccccttccatctctagcagatatcatcttctcagccaattctgtaggacactgaggctcttgtttgacatggtgtgtggatggggacttgccccaagactgagcaggtctgccctttcattggggtgtatacatatcaggggaccctgaggtggcaccgtactcagtgttgtgatgcccccacctagggaggactcaatgctctttgtatgccttatgcagcgctgatctgtccctggagttcccaggttcccagctccccccctgcaagccttgaagcctccagcaacgtctatctccaggagagcagggcagcctatgcaagtgttccggcaggaccagaagtggccactcaacacacgtcctcaccagtcaccccaaatggagacactcgcagacctgcagttctcagaccgaaggtgctgccttcatcctccccacctaatgcatttttgaaaccaaaggtacctagcctcagagacagagaaggagagggggagatcttgagtctaagaggaaccctttagctgtttctgcagctgaggtcagtttcaggagggtgaagctgatccccaggaatggatcagctgccatgggcacagcctccgatttgagcctctccggctgccagccagggggcctgggccagaccagggctctgtccttccgtgactttattaaagcaacatttgccacatgtttaagccgcaaaggtattagcaatgcttgcatcattaataatcattcagttgaaggtcaagcccatagacacacactctctgctggtaagaaaccatagcccagaactgagccaataaggttgtttgaacctgagagtgtgtaatggtcatttgggccaagcctcagctagggctgctgcctggacgcctgaggggcagcttatcacagtgcaaggggacagggtaaacagcagggggtggggtgtgagcttggagggcccctcccctggatttcctccaacacctgcttggatactaggcccactgtccctgaagggaatgtcagggaagtgtgcctgtgagctgaattaaaggactggcctttccagaaaacgctttggatctgagcagagtagtcagtttctcagacactcattccatactgcaccgtacatgccagcgtacccattgcaccgaaagcaggcccttagggcaggaagggacgatgagcaagtctgccacaccacctggtgactgggaagggctgcttctctcgtaagggtcttggggagaagtaagcccgcagcctgcctctgcacctcgttccagtgtcctgccaggctctgtactgtcctttgtgtatgaagaaaatgctgttagccctctctcaggctgctgttctgtgggtgctgagagctgccccccatcaccacgccatcacacccctctgagcagaagcaaatctgaggctgaagaattaagttttccccaagcaaggaaggcaggtggtcagagagatcaaacgctgaggcgtggggattgcaggattcaggaggcagcccctttggggaagaggagggtgcattttccatggagcccatgtcagagtccactccagctcagcaggaaagtggaattgcccagtactgcctgccagctgggtctcccaagcaactaccccaagacataccaacagtgaagccaggacagcaccatgccatcggcgctccagtctgtctggctgggaggaaagtgctgggcatcttacagtaactctagaagttcctttgactaggctgcaatcccacctatatgctcagccctaagagctgtggtttcctgtgctctcatttgtccattcattcattcattcattcattcagcaaataatctgaaatccagtctgaactaaggcctgagctgtggataccatggcgcgtgagttagatgtggtccctgccctcatggggctgacagtcctaaaatcaagtgctaggacacagtggccattgagctgggagcattcttccctctaccgcttaagccactgatggctgcgagcttgaagagagggattctgagggagagcttggtccatctggtcaccaaggctgggcgggacagagcagtcaagaaccacggtgtggcttgagaaacagtcctgcttcctgagcctctttgctctgcctcttggggcaagctccttaacctgtctgtatttttatgcctctgtctcccattcagttcctccttgaatacctctttctacagagaggcacgggctcccctgaaggattgtcgaggccagggttcgggaagtacactgccatcggtcaggggacagctgcctcccaccttgcctgggtgatggtgaatgggactcatcttttcctgccttgcttttgaggagatggttgaatttaagctaacaggaaagccaaaccagcaccctcctttgtgctctgagaggttggagacatctggtccaccccattgcccctgcccctggcaagccctgaagtcgggagaggtgaccacaggtctgaaaatcagccagtgccaacattgcttgccctgcaaggtgcaactgagcccacatagcgcattcatagtttccctgaccacagccttgggaagacggtggaaacccgaggatgtgtgggtttcccagctaacggacaagctcccctgccacacccagtgcccacgcatgctcacatacatacagcagaccacaaccctgttgccaagcagtgcttccaagggatagcgatccagattccaacattgtcttggagagggttagtccacatccaagttgcgtgagataagatgcaaagggctctgtgtggatgaggaacgcaccttagaggagtgggaaaggccaccagggttgggccctgtttaggtaattcctgttggcagcacctagagagagcatctgagctgaaggagtgggaaactttgcccaagcaatggcacgggcagcgggctctttctggcgccctgtgctggagcagggccaagtcttagggcatcacaaacagcccatttgatggagggagcagggacatagcacatttttgtctgtctttgtgaggctgctttgctaactctctgaggagaggaagcctctcgggctttccgtcggctggggctagtgccagagaatcccttctcagtggccagcaggttcctgggaggccggcacaaggcaccgctccccactcatgacaccttggtgcagagtgacctcctgcccagtcaccactccggccagccccagccaaacacacaaaagcccatggttgcggttgcatctacaccgttagttggcaaaggatcctgcttgagctctgcgtggtggccaaggagtagcatggaggagggccctgattttaaaaaggaaaaatagagaggcctcaaaacaatgaaacaaagagcttgatatgtcaagaggagaccaaggccctgggaggcataggcaagccgggcagagtcagaccagtgccctcccttgaccatctcctagcattccttaacctagacaggggctaccccatgtgagtccaagccagactttgtggctgtccccagcctgcacagcccaagcccagggaagtgtcctttctttcccttccttactaataatgggccttcctgagacacattcagagaaggatcagagagaaaggagaaccatccaggagagccacaagcgtccaccaaacagtgtctcaggcctcacctgaagctgctgttcctcctatcagcacactagtattaaatgggtgttccataatgaggagaatggaaataggtacaaggcatctagcttaggacagaatcggatttcggcatgtgaaggaatcccagagctgatctcattgaaatgatctatcgtacagacaaggatatgcaaatccacagaagtgaagggatttttgctcaagatcacatagctggtaaactaaggtaaggttagggcttgaacttgggccttctgactccttgtccagtcagtgttctttcatctcaccacagctgcctcctttgaaacagaggtattaagatctgtccttctggttcaccctctcatacctctttactgcgtctcccacatcccccacatgcctcccaaaatgaaagacaaacaggattgtttctgagaccaagatcagtctgtctgtgatcagcctgtgtgtggttcacccagtcatgcaattaagggcagatctgggccagtggaataggatagctgattggtgtttgttactgtgaaccctagaccgtaccccgtagaatggtgtctcttgctttgtaacacatcgggccttcagtgtgctgtattcctcagaagtgagggcatctcggtccattctgcccatggccacagggtgcagagaggcagcagggcccatgcaagctgccaccctgggatttgctgggctggagttcaacagatgtaaagacttcagtgaagcaataaacacaaaactctgggagaagatatccagaattttgtacattactctgtttctttttcaaaaatgaggcagatcagatgcccctgagctgcccctttttttctgattcccaactgcaatgtcctcagtcagtgttgtccctctgcccggctccccagctctttgccaacctcttcacactccccttgagctgagcatcagtcgcctgtgacgtggccaccttctgtcctgctcccactcccgacccatgctggaccccggaggacctcctgccccgcccccaccacacacccatatcccccaccattccaatttgttctttcccgtggggaattttttttcccagcgtctccatcccttcctacatatccacacacacacaaattggtctgatcttttttccattggttaaacatttaactccatgccagaccttgttttaacccctctcacatcatgttctttccttttttgcgagttattttgcattaaccaactttgtcagtgacagatgcgtatctgagggtgtcacacacgaccttcagcagggaagacttctgggccatggagggccgtctaatacatggacttataaactgactgcatgagcaatgaaaaggccaaattattctgaattttttttgaatcactgtaaaaaaactgatttcttttgtatagagaacactaaacgtataataaaagttgttcaaaatgga

SEQ ID NO: 237 - DNA, 10165 bp, Homo sapiens
gattccacccagggcagggctgctgtgttttctctgaggccaactttcagggaaaagaaggatcttgctgggattttgctcaggcctaagtctgccagctgggatggcctggggcctaagaaatgcctagcttccctccccacctgtccccatggagggagactgagaagacgctggatgaaccagaccatggctccttcaggagagaggttgattgacttatgtgcaatttgggacgctggagtttaccttccctccgcagcctggaacagagcctcctctggtgttgcaaggaagaggctgaatgaggcagagaagctgagtgctgtccaggaggcccagttaaagcggctcgaggtgacaagaccccgagtgctggggagcagggagcagggccaggtgccgaggatggccaggcagccaccgccgccctgggtccatgcagccttcctcctctgcctcctcagtcttggcggagccatcgaaattcctatggatctgacgcagccgccaaccatcaccaagcagtcagcgaaggatcacatcgtggacccccgtgataacatcctgattgagtgtgaagcaaaagggaaccctgcccccagcttccactggacacgaaacagcagattcttcaacatcgccaaggacccccgggtgtccatgaggaggaggtctgggaccctggtgattgacttccgcagtggcgggcggccggaggaatatgagggggaatatcagtgcttcgcccgcaacaaatttggcacggccctgtccaataggatccgcctgcaggtgtctaaatctcctctgtggcccaaggaaaacctagaccctgtcgtggtccaagagggcgctcctttgacgctccagtgcaaccccccgcctggacttccatccccggtcatcttctggatgagcagctccatggagcccatcacccaagacaaacgtgtctctcagggccataacggagacctatacttctccaacgtgatgctgcaggacatgcagaccgactacagttgtaacgcccgcttccacttcacccacaccatccagcagaagaaccctttcaccctcaaggtcctcaccacccgaggagttgcagaaagaacaccaagcttcatgtatccccagggcaccgcgagcagccagatggtgcttcgtggcatggacctcctgctggaatgcatcgcctccggggtcccaacaccagacatcgcatggtacaagaaaggtggggacctcccatctgataaggccaagtttgagaactttaataaggccctgcgtatcacaaatgtctctgaggaagactccggggagtatttctgcctggcctccaacaagatgggcagcatccggcacacgatctcggtgagagtaaaggctgctccctactggctggacgaacccaagaaccttattctggctcctggcgaggatgggagactggtgtgtcgagccaatggaaaccccaaacccactgtccagtggatggtgaatggggaacctttgcaatcggcaccacctaacccaaaccgtgaggtggccggagacaccatcatcttccgggacacccagatcagcagcagggctgtgtaccagtgcaacacctccaacgagcatggctacctgctggccaacgcctttgtcagtgtgctggatgtgccgcctcggatgctgtcgccccggaaccagctcattcgagtgattctttacaaccggacgcggctggactgccctttctttgggtctcccatccccacactgcgatggtttaagaatgggcaaggaagcaacctggatggtggcaactaccatgtttatgagaacggcagtctggaaattaagatgatccgcaaagaggaccagggcatctacacctgtgtcgccaccaacatcctgggcaaagctgaaaaccaagtccgcctggaggtcaaagaccccaccaggatctaccggatgcccgaggaccaggtggccagaaggggcaccacggtgcagctggagtgtcgggtgaagcacgacccctccctgaaactcaccgtctcctggctgaaggatgacgagccgctctatattggaaacaggatgaagaaggaagacgactccctgaccatctttggggtggcagagcgggaccagggcagttacacgtgtgtcgccagcaccgagctagaccaagacctggccaaggcctacctcaccgtgctaggacggccagaccggccccgggacctggagctgaccgacctggccgagaggagcgtgcggctgacctggatccccggggatgctaacaacagccccatcacagactacgtcgtccagtttgaagaagaccagttccaacctggggtctggcatgaccattccaagtaccccggcagcgttaactcagccgtcctccggctgtccccgtatgtcaactaccagttccgtgtcattgccatcaacgaggttgggagcagccaccccagcctcccatccgagcgctaccgaaccagtggagcaccccccgagtccaatcctggtgacgtgaagggagaggggaccagaaagaacaacatggagatcacgtggacgcccatgaatgccacctcggcctttggccccaacctgcgctacattgtcaagtggaggcggagagagactcgagaggcctggaacaacgtcacagtgtggggctctcgctacgtggtggggcagaccccagtctacgtgccctatgagatccgagtccaggctgaaaatgacttcgggaagggccctgagccagagtccgtcatcggttactccggagaagattatcccagggctgcgcccactgaagttaaagtccgagtcatgaacagcacagccatcagccttcagtggaaccgcgtctactccgacacggtccagggccagctcagagagtaccgagcctactactggagggagagcagcttgctgaagaacctgtgggtgtctcagaagagacagcaagccagcttccctggtgaccgcctccgtggcgtggtgtcccgcctcttcccctacagtaactacaagctggagatggttgtggtcaatgggagaggtgatgggcctcgcagtgagaccaaggagttcaccaccccggaaggagtacccagtgcccctaggcgtttccgagtccggcagcccaacctggagacaatcaacctggaatgggatcatcctgagcatccaaatgggatcatgattggatacactctcaaatatgtggcctttaacgggaccaaagtaggaaagcagatagtggaaaacttctctcccaatcagaccaagttcacggtgcaaagaacggaccccgtgtcacgctaccgctttaccctcagcgccaggacgcaggtgggctctggggaagccgtcacagaggagtcaccagcacccccgaatgaagctactccaaccgcagcttacaccaacaaccaagcggacatcgccacccagggctggttcattgggcttatgtgcgccatcgccctcctggtgctgatcctgctcatcgtctgtttcatcaagaggagtcgcggcggcaagtacccagtacgagaaaagaaggatgttccccttggccctgaagaccccaaggaagaggatggctcatttgactatagtgatgaggacaacaagcccctgcagggcagtcagacatctctggacggcaccatcaagcagcaggagagtgacgacagcctggtggactatggcgagggtggcgagggtcagttcaatgaagacggctccttcatcggccagtacacggtcaaaaaggacaaggaggaaacagagggcaacgaaagctcagaggccacgtcacctgtcaatgctatctactctctggcctaacggagcccacccaggcacagccaccactttgcaagtgggaggaggggagaaggggagacaaaaccactgcagacctaccacgaagccaccaccaccttcagtaacaagggtacgatatgggggtctgccaagctgtgaggaccagtagccaccaagccacccacaagccccctcccaatgaccccccttcagccccgggtgccaccagtgtgggagagctggagccgtggctgagctcagctggagggagcctggccccttgcccggtctcgcagccaccccgagcgttccaccacactgtccgcccttggcctcggcacacgctcaccttttctgttggttacgggacttctcattgtcttaatttcgctttgtgcatcttcccctccagacccaatgtctctgttttcttttccttttgaaaaagagtccctggaaaagaaagaataagtggattctcccccaggagaatcctttttgcaaagataggcaaaaaggattgaatccataccagaacacgtagacaggctgtaatattcaaaccacctctgggccaatgcatttccaaaggatgcctttctcgccatatgcctcccctggcccccagcccctctgcctcggccttgtcagttgctgagctgggcttggctcctttctggaaaatgacagtatttttggcagggagaaggtgcgcaggcctccttgctgctctctggtttggttgggaggtgtgtttacctcttgctcctcattcctcccctgcccttttctctggaatatctaagatgtgagctgcattgactctgaagacgtttgaggaacaggagtgggcactgatagaaaggacttcaacgccagtgactgtgtacctccagcagaagaaaatcaggtgtctggtcttgggggcactgtgctcacttctagagagaagaaaaaggctgggtttggacttcatgcctcctcactggtgaaacccaggatgtagatagagggccacacccaccctgtccagagtagagggcacctgtccacgtggccagggcccatgctgccaccctcgaggagatggaaccctgtgatgcaaaagctttgctggtgtgtttggggcataaggcactgctccccttccatctctagcagatatcatcttctcagccaattctgtaggacactgaggctcttgtttgacatggtgtgtggatggggacttgccccaagactgagcaggtctgccctttcattggggtgtatacatatcaggggaccctgaggtggcaccgtactcagtgttgtgatgcccccacctagggaggactcaatgctctttgtatgccttatgcagcgctgatctgtccctggagttcccaggttcccagctccccccctgcaagccttgaagcctccagcaacgtctatctccaggagagcagggcagcctatgcaagtgttccggcaggaccagaagtggccactcaacacacgtcctcaccagtcaccccaaatggagacactcgcagacctgcagttctcagaccgaaggtgctgccttcatcctccccacctaatgcatttttgaaaccaaaggtacctagcctcagagacagagaaggagagggggagatcttgagtctaagaggaaccctttagctgtttctgcagctgaggtcagtttcaggagggtgaagctgatccccaggaatggatcagctgccatgggcacagcctccgatttgagcctctccggctgccagccagggggcctgggccagaccagggctctgtccttccgtgactttattaaagcaacatttgccacatgtttaagccgcaaaggtattagcaatgcttgcatcattaataatcattcagttgaaggtcaagcccatagacacacactctctgctggtaagaaaccatagcccagaactgagccaataaggttgtttgaacctgagagtgtgtaatggtcatttgggccaagcctcagctagggctgctgcctggacgcctgaggggcagcttatcacagtgcaaggggacagggtaaacagcagggggtggggtgtgagcttggagggcccctcccctggatttcctccaacacctgcttggatactaggcccactgtccctgaagggaatgtcagggaagtgtgcctgtgagctgaattaaaggactggcctttccagaaaacgctttggatctgagcagagtagtcagtttctcagacactcattccatactgcaccgtacatgccagcgtacccattgcaccgaaagcaggcccttagggcaggaagggacgatgagcaagtctgccacaccacctggtgactgggaagggctgcttctctcgtaagggtcttggggagaagtaagcccgcagcctgcctctgcacctcgttccagtgtcctgccaggctctgtactgtcctttgtgtatgaagaaaatgctgttagccctctctcaggctgctgttctgtgggtgctgagagctgccccccatcaccacgccatcacacccctctgagcagaagcaaatctgaggctgaagaattaagttttccccaagcaaggaaggcaggtggtcagagagatcaaacgctgaggcgtggggattgcaggattcaggaggcagcccctttggggaagaggagggtgcattttccatggagcccatgtcagagtccactccagctcagcaggaaagtggaattgcccagtactgcctgccagctgggtctcccaagcaactaccccaagacataccaacagtgaagccaggacagcaccatgccatcggcgctccagtctgtctggctgggaggaaagtgctgggcatcttacagtaactctagaagttcctttgactaggctgcaatcccacctatatgctcagccctaagagctgtggtttcctgtgctctcatttgtccattcattcattcattcattcattcagcaaataatctgaaatccagtctgaactaaggcctgagctgtggataccatggcgcgtgagttagatgtggtccctgccctcatggggctgacagtcctaaaatcaagtgctaggacacagtggccattgagctgggagcattcttccctctaccgcttaagccactgatggctgcgagcttgaagagagggattctgagggagagcttggtccatctggtcaccaaggctgggcgggacagagcagtcaagaaccacggtgtggcttgagaaacagtcctgcttcctgagcctctttgctctgcctcttggggcaagctccttaacctgtctgtatttttatgcctctgtctcccattcagttcctccttgaatacctctttctacagagaggcacgggctcccctgaaggattgtcgaggccagggttcgggaagtacactgccatcggtcaggggacagctgcctcccaccttgcctgggtgatggtgaatgggactcatcttttcctgccttgcttttgaggagatggttgaatttaagctaacaggaaagccaaaccagcaccctcctttgtgctctgagaggttggagacatctggtccaccccattgcccctgcccctggcaagccctgaagtcgggagaggtgaccacaggtctgaaaatcagccagtgccaacattgcttgccctgcaaggtgcaactgagcccacatagcgcattcatagtttccctgaccacagccttgggaagacggtggaaacccgaggatgtgtgggtttcccagctaacggacaagctcccctgccacacccagtgcccacgcatgctcacatacatacagcagaccacaaccctgttgccaagcagtgcttccaagggatagcgatccagattccaacattgtcttggagagggttagtccacatccaagttgcgtgagataagatgcaaagggctctgtgtggatgaggaacgcaccttagaggagtgggaaaggccaccagggttgggccctgtttaggtaattcctgttggcagcacctagagagagcatctgagctgaaggagtgggaaactttgcccaagcaatggcacgggcagcgggctctttctggcgccctgtgctggagcagggccaagtcttagggcatcacaaacagcccatttgatggagggagcagggacatagcacatttttgtctgtctttgtgaggctgctttgctaactctctgaggagaggaagcctctcgggctttccgtcggctggggctagtgccagagaatcccttctcagtggccagcaggttcctgggaggccggcacaaggcaccgctccccactcatgacaccttggtgcagagtgacctcctgcccagtcaccactccggccagccccagccaaacacacaaaagcccatggttgcggttgcatctacaccgttagttggcaaaggatcctgcttgagctctgcgtggtggccaaggagtagcatggaggagggccctgattttaaaaaggaaaaatagagaggcctcaaaacaatgaaacaaagagcttgatatgtcaagaggagaccaaggccctgggaggcataggcaagccgggcagagtcagaccagtgccctcccttgaccatctcctagcattccttaacctagacaggggctaccccatgtgagtccaagccagactttgtggctgtccccagcctgcacagcccaagcccagggaagtgtcctttctttcccttccttactaataatgggccttcctgagacacattcagagaaggatcagagagaaaggagaaccatccaggagagccacaagcgtccaccaaacagtgtctcaggcctcacctgaagctgctgttcctcctatcagcacactagtattaaatgggtgttccataatgaggagaatggaaataggtacaaggcatctagcttaggacagaatcggatttcggcatgtgaaggaatcccagagctgatctcattgaaatgatctatcgtacagacaaggatatgcaaatccacagaagtgaagggatttttgctcaagatcacatagctggtaaactaaggtaaggttagggcttgaacttgggccttctgactccttgtccagtcagtgttctttcatctcaccacagctgcctcctttgaaacagaggtattaagatctgtccttctggttcaccctctcatacctctttactgcgtctcccacatcccccacatgcctcccaaaatgaaagacaaacaggattgtttctgagaccaagatcagtctgtctgtgatcagcctgtgtgtggttcacccagtcatgcaattaagggcagatctgggccagtggaataggatagctgattggtgtttgttactgtgaaccctagaccgtaccccgtagaatggtgtctcttgctttgtaacacatcgggccttcagtgtgctgtattcctcagaagtgagggcatctcggtccattctgcccatggccacagggtgcagagaggcagcagggcccatgcaagctgccaccctgggatttgctgggctggagttcaacagatgtaaagacttcagtgaagcaataaacacaaaactctgggagaagatatccagaattttgtacattactctgtttctttttcaaaaatgaggcagatcagatgcccctgagctgcccctttttttctgattcccaactgcaatgtcctcagtcagtgttgtccctctgcccggctccccagctctttgccaacctcttcacactccccttgagctgagcatcagtcgcctgtgacgtggccaccttctgtcctgctcccactcccgacccatgctggaccccggaggacctcctgccccgcccccaccacacacccatatcccccaccattccaatttgttctttcccgtggggaattttttttcccagcgtctccatcccttcctacatatccacacacacacaaattggtctgatcttttttccattggttaaacatttaactccatgccagaccttgttttaacccctctcacatcatgttctttccttttttgcgagttattttgcattaaccaactttgtcagtgacagatgcgtatctgagggtgtcacacacgaccttcagcagggaagacttctgggccatggagggccgtctaatacatggacttataaactgactgcatgagcaatgaaaaggccaaattattctgaattttttttgaatcactgtaaaaaaactgatttcttttgtatagagaacactaaacgtataataaaagttgttcaaaatgga

SEQ ID NO: 238 - DNA, 9640 bp, Homo sapiens
ctgagtgctgtccaggaggcccagttaaagcggctcgaggtgacaagaccccgagtgctggggagcagggagcagggccaggtgccgaggatggccaggcagccaccgccgccctgggtccatgcagccttcctcctctgcctcctcagtcttggcggagccatcgaaattcctatggatccaagcattcagaatgagctgacgcagccgccaaccatcaccaagcagtcagcgaaggatcacatcgtggacccccgtgataacatcctgattgagtgtgaagcaaaagggaaccctgcccccagcttccactggacacgaaacagcagattcttcaacatcgccaaggacccccgggtgtccatgaggaggaggtctgggaccctggtgattgacttccgcagtggcgggcggccggaggaatatgagggggaatatcagtgcttcgcccgcaacaaatttggcacggccctgtccaataggatccgcctgcaggtgtctaaatctcctctgtggcccaaggaaaacctagaccctgtcgtggtccaagagggcgctcctttgacgctccagtgcaaccccccgcctggacttccatccccggtcatcttctggatgagcagctccatggagcccatcacccaagacaaacgtgtctctcagggccataacggagacctatacttctccaacgtgatgctgcaggacatgcagaccgactacagttgtaacgcccgcttccacttcacccacaccatccagcagaagaaccctttcaccctcaaggtcctcaccaaccacccttataatgactcgtccttaagaaaccaccctgacatgtacagtgcccgaggagttgcagaaagaacaccaagcttcatgtatccccagggcaccgcgagcagccagatggtgcttcgtggcatggacctcctgctggaatgcatcgcctccggggtcccaacaccagacatcgcatggtacaagaaaggtggggacctcccatctgataaggccaagtttgagaactttaataaggccctgcgtatcacaaatgtctctgaggaagactccggggagtatttctgcctggcctccaacaagatgggcagcatccggcacacgatctcggtgagagtaaaggctgctccctactggctggacgaacccaagaaccttattctggctcctggcgaggatgggagactggtgtgtcgagccaatggaaaccccaaacccactgtccagtggatggtgaatggggaacctttgcaatcggcaccacctaacccaaaccgtgaggtggccggagacaccatcatcttccgggacacccagatcagcagcagggctgtgtaccagtgcaacacctccaacgagcatggctacctgctggccaacgcctttgtcagtgtgctggatgtgccgcctcggatgctgtcgccccggaaccagctcattcgagtgattctttacaaccggacgcggctggactgccctttctttgggtctcccatccccacactgcgatggtttaagaatgggcaaggaagcaacctggatggtggcaactaccatgtttatgagaacggcagtctggaaattaagatgatccgcaaagaggaccagggcatctacacctgtgtcgccaccaacatcctgggcaaagctgaaaaccaagtccgcctggaggtcaaagaccccaccaggatctaccggatgcccgaggaccaggtggccagaaggggcaccacggtgcagctggagtgtcgggtgaagcacgacccctccctgaaactcaccgtctcctggctgaaggatgacgagccgctctatattggaaacaggatgaagaaggaagacgactccctgaccatctttggggtggcagagcgggaccagggcagttacacgtgtgtcgccagcaccgagctagaccaagacctggccaaggcctacctcaccgtgctagctgatcaggccactccaactaaccgtttggctgccctgcccaaaggacggccagaccggccccgggacctggagctgaccgacctggccgagaggagcgtgcggctgacctggatccccggggatgctaacaacagccccatcacagactacgtcgtccagtttgaagaagaccagttccaacctggggtctggcatgaccattccaagtaccccggcagcgttaactcagccgtcctccggctgtccccgtatgtcaactaccagttccgtgtcattgccatcaacgaggttgggagcagccaccccagcctcccatccgagcgctaccgaaccagtggagcaccccccgagtccaatcctggtgacgtgaagggagaggggaccagaaagaacaacatggagatcacgtggacgcccatgaatgccacctcggcctttggccccaacctgcgctacattgtcaagtggaggcggagagagactcgagaggcctggaacaacgtcacagtgtggggctctcgctacgtggtggggcagaccccagtctacgtgccctatgagatccgagtccaggctgaaaatgacttcgggaagggccctgagccagagtccgtcatcggttactccggagaagatttacccagtgcccctaggcgtttccgagtccggcagcccaacctggagacaatcaacctggaatgggatcatcctgagcatccaaatgggatcatgattggatacactctcaaatatgtggcctttaacgggaccaaagtaggaaagcagatagtggaaaacttctctcccaatcagaccaagttcacggtgcaaagaacggaccccgtgtcacgctaccgctttaccctcagcgccaggacgcaggtgggctctggggaagccgtcacagaggagtcaccagcacccccgaatgaagctactccaaccgcagcttacaccaacaaccaagcggacatcgccacccagggctggttcattgggcttatgtgcgccatcgccctcctggtgctgatcctgctcatcgtctgtttcatcaagaggagtcgcggcggcaagtacccagtacgagaaaagaaggatgttccccttggccctgaagaccccaaggaagaggatggctcatttgactatagtgatgaggacaacaagcccctgcagggcagtcagacatctctggacggcaccatcaagcagcaggagagtgacgacagcctggtggactatggcgagggtggcgagggtcagttcaatgaagacggctccttcatcggccagtacacggtcaaaaaggacaaggaggaaacagagggcaacgaaagctcagaggccacgtcacctgtcaatgctatctactctctggcctaacggagcccacccaggcacagccaccactttgcaagtgggaggaggggagaaggggagacaaaaccactgcagacctaccacgaagccaccaccaccttcagtaacaagggtacgatatgggggtctgccaagctgtgaggaccagtagccaccaagccacccacaagccccctcccaatgaccccccttcagccccgggtgccaccagtgtgggagagctggagccgtggctgagctcagctggagggagcctggccccttgcccggtctcgcagccaccccgagcgttccaccacactgtccgcccttggcctcggcacacgctcaccttttctgttggttacgggacttctcattgtcttaatttcgctttgtgcatcttcccctccagacccaatgtctctgttttcttttccttttgaaaaagagtccctggaaaagaaagaataagtggattctcccccaggagaatcctttttgcaaagataggcaaaaaggattgaatccataccagaacacgtagacaggctgtaatattcaaaccacctctgggccaatgcatttccaaaggatgcctttctcgccatatgcctcccctggcccccagcccctctgcctcggccttgtcagttgctgagctgggcttggctcctttctggaaaatgacagtatttttggcagggagaaggtgcgcaggcctccttgctgctctctggtttggttgggaggtgtgtttacctcttgctcctcattcctcccctgcccttttctctggaatatctaagatgtgagctgcattgactctgaagacgtttgaggaacaggagtgggcactgatagaaaggacttcaacgccagtgactgtgtacctccagcagaagaaaatcaggtgtctggtcttgggggcactgtgctcacttctagagagaagaaaaaggctgggtttggacttcatgcctcctcactggtgaaacccaggatgtagatagagggccacacccaccctgtccagagtagagggcacctgtccacgtggccagggcccatgctgccaccctcgaggagatggaaccctgtgatgcaaaagctttgctggtgtgtttggggcataaggcactgctccccttccatctctagcagatatcatcttctcagccaattctgtaggacactgaggctcttgtttgacatggtgtgtggatggggacttgccccaagactgagcaggtctgccctttcattggggtgtatacatatcaggggaccctgaggtggcaccgtactcagtgttgtgatgcccccacctagggaggactcaatgctctttgtatgccttatgcagcgctgatctgtccctggagttcccaggttcccagctccccccctgcaagccttgaagcctccagcaacgtctatctccaggagagcagggcagcctatgcaagtgttccggcaggaccagaagtggccactcaacacacgtcctcaccagtcaccccaaatggagacactcgcagacctgcagttctcagaccgaaggtgctgccttcatcctccccacctaatgcatttttgaaaccaaaggtacctagcctcagagacagagaaggagagggggagatcttgagtctaagaggaaccctttagctgtttctgcagctgaggtcagtttcaggagggtgaagctgatccccaggaatggatcagctgccatgggcacagcctccgatttgagcctctccggctgccagccagggggcctgggccagaccagggctctgtccttccgtgactttattaaagcaacatttgccacatgtttaagccgcaaaggtattagcaatgcttgcatcattaataatcattcagttgaaggtcaagcccatagacacacactctctgctggtaagaaaccatagcccagaactgagccaataaggttgtttgaacctgagagtgtgtaatggtcatttgggccaagcctcagctagggctgctgcctggacgcctgaggggcagcttatcacagtgcaaggggacagggtaaacagcagggggtggggtgtgagcttggagggcccctcccctggatttcctccaacacctgcttggatactaggcccactgtccctgaagggaatgtcagggaagtgtgcctgtgagctgaattaaaggactggcctttccagaaaacgctttggatctgagcagagtagtcagtttctcagacactcattccatactgcaccgtacatgccagcgtacccattgcaccgaaagcaggcccttagggcaggaagggacgatgagcaagtctgccacaccacctggtgactgggaagggctgcttctctcgtaagggtcttggggagaagtaagcccgcagcctgcctctgcacctcgttccagtgtcctgccaggctctgtactgtcctttgtgtatgaagaaaatgctgttagccctctctcaggctgctgttctgtgggtgctgagagctgccccccatcaccacgccatcacacccctctgagcagaagcaaatctgaggctgaagaattaagttttccccaagcaaggaaggcaggtggtcagagagatcaaacgctgaggcgtggggattgcaggattcaggaggcagcccctttggggaagaggagggtgcattttccatggagcccatgtcagagtccactccagctcagcaggaaagtggaattgcccagtactgcctgccagctgggtctcccaagcaactaccccaagacataccaacagtgaagccaggacagcaccatgccatcggcgctccagtctgtctggctgggaggaaagtgctgggcatcttacagtaactctagaagttcctttgactaggctgcaatcccacctatatgctcagccctaagagctgtggtttcctgtgctctcatttgtccattcattcattcattcattcattcagcaaataatctgaaatccagtctgaactaaggcctgagctgtggataccatggcgcgtgagttagatgtggtccctgccctcatggggctgacagtcctaaaatcaagtgctaggacacagtggccattgagctgggagcattcttccctctaccgcttaagccactgatggctgcgagcttgaagagagggattctgagggagagcttggtccatctggtcaccaaggctgggcgggacagagcagtcaagaaccacggtgtggcttgagaaacagtcctgcttcctgagcctctttgctctgcctcttggggcaagctccttaacctgtctgtatttttatgcctctgtctcccattcagttcctccttgaatacctctttctacagagaggcacgggctcccctgaaggattgtcgaggccagggttcgggaagtacactgccatcggtcaggggacagctgcctcccaccttgcctgggtgatggtgaatgggactcatcttttcctgccttgcttttgaggagatggttgaatttaagctaacaggaaagccaaaccagcaccctcctttgtgctctgagaggttggagacatctggtccaccccattgcccctgcccctggcaagccctgaagtcgggagaggtgaccacaggtctgaaaatcagccagtgccaacattgcttgccctgcaaggtgcaactgagcccacatagcgcattcatagtttccctgaccacagccttgggaagacggtggaaacccgaggatgtgtgggtttcccagctaacggacaagctcccctgccacacccagtgcccacgcatgctcacatacatacagcagaccacaaccctgttgccaagcagtgcttccaagggatagcgatccagattccaacattgtcttggagagggttagtccacatccaagttgcgtgagataagatgcaaagggctctgtgtggatgaggaacgcaccttagaggagtgggaaaggccaccagggttgggccctgtttaggtaattcctgttggcagcacctagagagagcatctgagctgaaggagtgggaaactttgcccaagcaatggcacgggcagcgggctctttctggcgccctgtgctggagcagggccaagtcttagggcatcacaaacagcccatttgatggagggagcagggacatagcacatttttgtctgtctttgtgaggctgctttgctaactctctgaggagaggaagcctctcgggctttccgtcggctggggctagtgccagagaatcccttctcagtggccagcaggttcctgggaggccggcacaaggcaccgctccccactcatgacaccttggtgcagagtgacctcctgcccagtcaccactccggccagccccagccaaacacacaaaagcccatggttgcggttgcatctacaccgttagttggcaaaggatcctgcttgagctctgcgtggtggccaaggagtagcatggaggagggccctgattttaaaaaggaaaaatagagaggcctcaaaacaatgaaacaaagagcttgatatgtcaagaggagaccaaggccctgggaggcataggcaagccgggcagagtcagaccagtgccctcccttgaccatctcctagcattccttaacctagacaggggctaccccatgtgagtccaagccagactttgtggctgtccccagcctgcacagcccaagcccagggaagtgtcctttctttcccttccttactaataatgggccttcctgagacacattcagagaaggatcagagagaaaggagaaccatccaggagagccacaagcgtccaccaaacagtgtctcaggcctcacctgaagctgctgttcctcctatcagcacactagtattaaatgggtgttccataatgaggagaatggaaataggtacaaggcatctagcttaggacagaatcggatttcggcatgtgaaggaatcccagagctgatctcattgaaatgatctatcgtacagacaaggatatgcaaatccacagaagtgaagggatttttgctcaagatcacatagctggtaaactaaggtaaggttagggcttgaacttgggccttctgactccttgtccagtcagtgttctttcatctcaccacagctgcctcctttgaaacagaggtattaagatctgtccttctggttcaccctctcatacctctttactgcgtctcccacatcccccacatgcctcccaaaatgaaagacaaacaggattgtttctgagaccaagatcagtctgtctgtgatcagcctgtgtgtggttcacccagtcatgcaattaagggcagatctgggccagtggaataggatagctgattggtgtttgttactgtgaaccctagaccgtaccccgtagaatggtgtctcttgctttgtaacacatcgggccttcagtgtgctgtattcctcagaagtgagggcatctcggtccattctgcccatggccacagggtgcagagaggcagcagggcccatgcaagctgccaccctgggatttgctgggctggagttcaacagatgtaaagacttcagtgaagcaataaacacaaaactctgggagaagatatccagaattttgtacattactctgtttctttttcaaaaatgaggcagatcagatgcccctgagctgcccctttttttctgattcccaactgcaatgtcctcagtcagtgttgtccctctgcccggctccccagctctttgccaacctcttcacactccccttgagctgagcatcagtcgcctgtgacgtggccaccttctgtcctgctcccactcccgacccatgctggaccccggaggacctcctgccccgcccccaccacacacccatatcccccaccattccaatttgttctttcccgtggggaattttttttcccagcgtctccatcccttcctacatatccacacacacacaaattggtctgatcttttttccattggttaaacatttaactccatgccagaccttgttttaacccctctcacatcatgttctttccttttttgcgagttattttgcattaaccaactttgtcagtgacagatgcgtatctgagggtgtcacacacgaccttcagcagggaagacttctgggccatggagggccgtctaatacatggacttataaactgactgcatgagcaatgaaaaggccaaattattctgaattttttttgaatcactgtaaaaaaactgatttcttttgtatagagaacactaaacgtataataaaagttgttcaaaatgga

SEQ ID NO: 239 - DNA, 9625 bp, Homo sapiens
ctgagtgctgtccaggaggcccagttaaagcggctcgaggtgacaagaccccgagtgctggggagcagggagcagggccaggtgccgaggatggccaggcagccaccgccgccctgggtccatgcagccttcctcctctgcctcctcagtcttggcggagccatcgaaattcctatggatccaagcattcagaatgagctgacgcagccgccaaccatcaccaagcagtcagcgaaggatcacatcgtggacccccgtgataacatcctgattgagtgtgaagcaaaagggaaccctgcccccagcttccactggacacgaaacagcagattcttcaacatcgccaaggacccccgggtgtccatgaggaggaggtctgggaccctggtgattgacttccgcagtggcgggcggccggaggaatatgagggggaatatcagtgcttcgcccgcaacaaatttggcacggccctgtccaataggatccgcctgcaggtgtctaaatctcctctgtggcccaaggaaaacctagaccctgtcgtggtccaagagggcgctcctttgacgctccagtgcaaccccccgcctggacttccatccccggtcatcttctggatgagcagctccatggagcccatcacccaagacaaacgtgtctctcagggccataacggagacctatacttctccaacgtgatgctgcaggacatgcagaccgactacagttgtaacgcccgcttccacttcacccacaccatccagcagaagaaccctttcaccctcaaggtcctcaccaaccacccttataatgactcgtccttaagaaaccaccctgacatgtacagtgcccgaggagttgcagaaagaacaccaagcttcatgtatccccagggcaccgcgagcagccagatggtgcttcgtggcatggacctcctgctggaatgcatcgcctccggggtcccaacaccagacatcgcatggtacaagaaaggtggggacctcccatctgataaggccaagtttgagaactttaataaggccctgcgtatcacaaatgtctctgaggaagactccggggagtatttctgcctggcctccaacaagatgggcagcatccggcacacgatctcggtgagagtaaaggctgctccctactggctggacgaacccaagaaccttattctggctcctggcgaggatgggagactggtgtgtcgagccaatggaaaccccaaacccactgtccagtggatggtgaatggggaacctttgcaatcggcaccacctaacccaaaccgtgaggtggccggagacaccatcatcttccgggacacccagatcagcagcagggctgtgtaccagtgcaacacctccaacgagcatggctacctgctggccaacgcctttgtcagtgtgctggatgtgccgcctcggatgctgtcgccccggaaccagctcattcgagtgattctttacaaccggacgcggctggactgccctttctttgggtctcccatccccacactgcgatggtttaagaatgggcaaggaagcaacctggatggtggcaactaccatgtttatgagaacggcagtctggaaattaagatgatccgcaaagaggaccagggcatctacacctgtgtcgccaccaacatcctgggcaaagctgaaaaccaagtccgcctggaggtcaaagaccccaccaggatctaccggatgcccgaggaccaggtggccagaaggggcaccacggtgcagctggagtgtcgggtgaagcacgacccctccctgaaactcaccgtctcctggctgaaggatgacgagccgctctatattggaaacaggatgaagaaggaagacgactccctgaccatctttggggtggcagagcgggaccagggcagttacacgtgtgtcgccagcaccgagctagaccaagacctggccaaggcctacctcaccgtgctagctgatcaggccactccaactaaccgtttggctgccctgcccaaaggacggccagaccggccccgggacctggagctgaccgacctggccgagaggagcgtgcggctgacctggatccccggggatgctaacaacagccccatcacagactacgtcgtccagtttgaagaagaccagttccaacctggggtctggcatgaccattccaagtaccccggcagcgttaactcagccgtcctccggctgtccccgtatgtcaactaccagttccgtgtcattgccatcaacgaggttgggagcagccaccccagcctcccatccgagcgctaccgaaccagtggagcaccccccgagtccaatcctggtgacgtgaagggagaggggaccagaaagaacaacatggagatcacgtggacgcccatgaatgccacctcggcctttggccccaacctgcgctacattgtcaagtggaggcggagagagactcgagaggcctggaacaacgtcacagtgtggggctctcgctacgtggtggggcagaccccagtctacgtgccctatgagatccgagtccaggctgaaaatgacttcgggaagggccctgagccagagtccgtcatcggttactccggagaagatttacccagtgcccctaggcgtttccgagtccggcagcccaacctggagacaatcaacctggaatgggatcatcctgagcatccaaatgggatcatgattggatacactctcaaatatgtggcctttaacgggaccaaagtaggaaagcagatagtggaaaacttctctcccaatcagaccaagttcacggtgcaaagaacggaccccgtgtcacgctaccgctttaccctcagcgccaggacgcaggtgggctctggggaagccgtcacagaggagtcaccagcacccccgaatgaagcttacaccaacaaccaagcggacatcgccacccagggctggttcattgggcttatgtgcgccatcgccctcctggtgctgatcctgctcatcgtctgtttcatcaagaggagtcgcggcggcaagtacccagtacgagaaaagaaggatgttccccttggccctgaagaccccaaggaagaggatggctcatttgactatagtgatgaggacaacaagcccctgcagggcagtcagacatctctggacggcaccatcaagcagcaggagagtgacgacagcctggtggactatggcgagggtggcgagggtcagttcaatgaagacggctccttcatcggccagtacacggtcaaaaaggacaaggaggaaacagagggcaacgaaagctcagaggccacgtcacctgtcaatgctatctactctctggcctaacggagcccacccaggcacagccaccactttgcaagtgggaggaggggagaaggggagacaaaaccactgcagacctaccacgaagccaccaccaccttcagtaacaagggtacgatatgggggtctgccaagctgtgaggaccagtagccaccaagccacccacaagccccctcccaatgaccccccttcagccccgggtgccaccagtgtgggagagctggagccgtggctgagctcagctggagggagcctggccccttgcccggtctcgcagccaccccgagcgttccaccacactgtccgcccttggcctcggcacacgctcaccttttctgttggttacgggacttctcattgtcttaatttcgctttgtgcatcttcccctccagacccaatgtctctgttttcttttccttttgaaaaagagtccctggaaaagaaagaataagtggattctcccccaggagaatcctttttgcaaagataggcaaaaaggattgaatccataccagaacacgtagacaggctgtaatattcaaaccacctctgggccaatgcatttccaaaggatgcctttctcgccatatgcctcccctggcccccagcccctctgcctcggccttgtcagttgctgagctgggcttggctcctttctggaaaatgacagtatttttggcagggagaaggtgcgcaggcctccttgctgctctctggtttggttgggaggtgtgtttacctcttgctcctcattcctcccctgcccttttctctggaatatctaagatgtgagctgcattgactctgaagacgtttgaggaacaggagtgggcactgatagaaaggacttcaacgccagtgactgtgtacctccagcagaagaaaatcaggtgtctggtcttgggggcactgtgctcacttctagagagaagaaaaaggctgggtttggacttcatgcctcctcactggtgaaacccaggatgtagatagagggccacacccaccctgtccagagtagagggcacctgtccacgtggccagggcccatgctgccaccctcgaggagatggaaccctgtgatgcaaaagctttgctggtgtgtttggggcataaggcactgctccccttccatctctagcagatatcatcttctcagccaattctgtaggacactgaggctcttgtttgacatggtgtgtggatggggacttgccccaagactgagcaggtctgccctttcattggggtgtatacatatcaggggaccctgaggtggcaccgtactcagtgttgtgatgcccccacctagggaggactcaatgctctttgtatgccttatgcagcgctgatctgtccctggagttcccaggttcccagctccccccctgcaagccttgaagcctccagcaacgtctatctccaggagagcagggcagcctatgcaagtgttccggcaggaccagaagtggccactcaacacacgtcctcaccagtcaccccaaatggagacactcgcagacctgcagttctcagaccgaaggtgctgccttcatcctccccacctaatgcatttttgaaaccaaaggtacctagcctcagagacagagaaggagagggggagatcttgagtctaagaggaaccctttagctgtttctgcagctgaggtcagtttcaggagggtgaagctgatccccaggaatggatcagctgccatgggcacagcctccgatttgagcctctccggctgccagccagggggcctgggccagaccagggctctgtccttccgtgactttattaaagcaacatttgccacatgtttaagccgcaaaggtattagcaatgcttgcatcattaataatcattcagttgaaggtcaagcccatagacacacactctctgctggtaagaaaccatagcccagaactgagccaataaggttgtttgaacctgagagtgtgtaatggtcatttgggccaagcctcagctagggctgctgcctggacgcctgaggggcagcttatcacagtgcaaggggacagggtaaacagcagggggtggggtgtgagcttggagggcccctcccctggatttcctccaacacctgcttggatactaggcccactgtccctgaagggaatgtcagggaagtgtgcctgtgagctgaattaaaggactggcctttccagaaaacgctttggatctgagcagagtagtcagtttctcagacactcattccatactgcaccgtacatgccagcgtacccattgcaccgaaagcaggcccttagggcaggaagggacgatgagcaagtctgccacaccacctggtgactgggaagggctgcttctctcgtaagggtcttggggagaagtaagcccgcagcctgcctctgcacctcgttccagtgtcctgccaggctctgtactgtcctttgtgtatgaagaaaatgctgttagccctctctcaggctgctgttctgtgggtgctgagagctgccccccatcaccacgccatcacacccctctgagcagaagcaaatctgaggctgaagaattaagttttccccaagcaaggaaggcaggtggtcagagagatcaaacgctgaggcgtggggattgcaggattcaggaggcagcccctttggggaagaggagggtgcattttccatggagcccatgtcagagtccactccagctcagcaggaaagtggaattgcccagtactgcctgccagctgggtctcccaagcaactaccccaagacataccaacagtgaagccaggacagcaccatgccatcggcgctccagtctgtctggctgggaggaaagtgctgggcatcttacagtaactctagaagttcctttgactaggctgcaatcccacctatatgctcagccctaagagctgtggtttcctgtgctctcatttgtccattcattcattcattcattcattcagcaaataatctgaaatccagtctgaactaaggcctgagctgtggataccatggcgcgtgagttagatgtggtccctgccctcatggggctgacagtcctaaaatcaagtgctaggacacagtggccattgagctgggagcattcttccctctaccgcttaagccactgatggctgcgagcttgaagagagggattctgagggagagcttggtccatctggtcaccaaggctgggcgggacagagcagtcaagaaccacggtgtggcttgagaaacagtcctgcttcctgagcctctttgctctgcctcttggggcaagctccttaacctgtctgtatttttatgcctctgtctcccattcagttcctccttgaatacctctttctacagagaggcacgggctcccctgaaggattgtcgaggccagggttcgggaagtacactgccatcggtcaggggacagctgcctcccaccttgcctgggtgatggtgaatgggactcatcttttcctgccttgcttttgaggagatggttgaatttaagctaacaggaaagccaaaccagcaccctcctttgtgctctgagaggttggagacatctggtccaccccattgcccctgcccctggcaagccctgaagtcgggagaggtgaccacaggtctgaaaatcagccagtgccaacattgcttgccctgcaaggtgcaactgagcccacatagcgcattcatagtttccctgaccacagccttgggaagacggtggaaacccgaggatgtgtgggtttcccagctaacggacaagctcccctgccacacccagtgcccacgcatgctcacatacatacagcagaccacaaccctgttgccaagcagtgcttccaagggatagcgatccagattccaacattgtcttggagagggttagtccacatccaagttgcgtgagataagatgcaaagggctctgtgtggatgaggaacgcaccttagaggagtgggaaaggccaccagggttgggccctgtttaggtaattcctgttggcagcacctagagagagcatctgagctgaaggagtgggaaactttgcccaagcaatggcacgggcagcgggctctttctggcgccctgtgctggagcagggccaagtcttagggcatcacaaacagcccatttgatggagggagcagggacatagcacatttttgtctgtctttgtgaggctgctttgctaactctctgaggagaggaagcctctcgggctttccgtcggctggggctagtgccagagaatcccttctcagtggccagcaggttcctgggaggccggcacaaggcaccgctccccactcatgacaccttggtgcagagtgacctcctgcccagtcaccactccggccagccccagccaaacacacaaaagcccatggttgcggttgcatctacaccgttagttggcaaaggatcctgcttgagctctgcgtggtggccaaggagtagcatggaggagggccctgattttaaaaaggaaaaatagagaggcctcaaaacaatgaaacaaagagcttgatatgtcaagaggagaccaaggccctgggaggcataggcaagccgggcagagtcagaccagtgccctcccttgaccatctcctagcattccttaacctagacaggggctaccccatgtgagtccaagccagactttgtggctgtccccagcctgcacagcccaagcccagggaagtgtcctttctttcccttccttactaataatgggccttcctgagacacattcagagaaggatcagagagaaaggagaaccatccaggagagccacaagcgtccaccaaacagtgtctcaggcctcacctgaagctgctgttcctcctatcagcacactagtattaaatgggtgttccataatgaggagaatggaaataggtacaaggcatctagcttaggacagaatcggatttcggcatgtgaaggaatcccagagctgatctcattgaaatgatctatcgtacagacaaggatatgcaaatccacagaagtgaagggatttttgctcaagatcacatagctggtaaactaaggtaaggttagggcttgaacttgggccttctgactccttgtccagtcagtgttctttcatctcaccacagctgcctcctttgaaacagaggtattaagatctgtccttctggttcaccctctcatacctctttactgcgtctcccacatcccccacatgcctcccaaaatgaaagacaaacaggattgtttctgagaccaagatcagtctgtctgtgatcagcctgtgtgtggttcacccagtcatgcaattaagggcagatctgggccagtggaataggatagctgattggtgtttgttactgtgaaccctagaccgtaccccgtagaatggtgtctcttgctttgtaacacatcgggccttcagtgtgctgtattcctcagaagtgagggcatctcggtccattctgcccatggccacagggtgcagagaggcagcagggcccatgcaagctgccaccctgggatttgctgggctggagttcaacagatgtaaagacttcagtgaagcaataaacacaaaactctgggagaagatatccagaattttgtacattactctgtttctttttcaaaaatgaggcagatcagatgcccctgagctgcccctttttttctgattcccaactgcaatgtcctcagtcagtgttgtccctctgcccggctccccagctctttgccaacctcttcacactccccttgagctgagcatcagtcgcctgtgacgtggccaccttctgtcctgctcccactcccgacccatgctggaccccggaggacctcctgccccgcccccaccacacacccatatcccccaccattccaatttgttctttcccgtggggaattttttttcccagcgtctccatcccttcctacatatccacacacacacaaattggtctgatcttttttccattggttaaacatttaactccatgccagaccttgttttaacccctctcacatcatgttctttccttttttgcgagttattttgcattaaccaactttgtcagtgacagatgcgtatctgagggtgtcacacacgaccttcagcagggaagacttctgggccatggagggccgtctaatacatggacttataaactgactgcatgagcaatgaaaaggccaaattattctgaattttttttgaatcactgtaaaaaaactgatttcttttgtatagagaacactaaacgtataataaaagttgttcaaaatgga

SEQ ID NO: 240 - DNA, 2572 bp, Homo sapiens
gattccacccagggcagggctgctgtgttttctctgaggccaactttcagggaaaagaaggatcttgctgggattttgctcaggcctaagtctgccagctgggatggcctggggcctaagaaatgcctagcttccctccccacctgtccccatggagggagactgagaagacgctggatgaaccagaccatggctccttcaggagagaggttgattgacttatgtgcaatttgggacgctggagtttaccttccctccgcagcctggaacagagcctcctctggtgttgcaaggaagaggctgaatgaggcagagaagctgagtgctgtccaggaggcccagttaaagcggctcgaggtgacaagaccccgagtgctggggagcagggagcagggccaggtgccgaggatggccaggcagccaccgccgccctgggtccatgcagccttcctcctctgcctcctcagtcttggcggagccatcgaaattcctatggatctgacgcagccgccaaccatcaccaagcagtcagcgaaggatcacatcgtggacccccgtgataacatcctgattgagtgtgaagcaaaagggaaccctgcccccagcttccactggacacgaaacagcagattcttcaacatcgccaaggacccccgggtgtccatgaggaggaggtctgggaccctggtgattgacttccgcagtggcgggcggccggaggaatatgagggggaatatcagtgcttcgcccgcaacaaatttggcacggccctgtccaataggatccgcctgcaggtgtctaaatctcctctgtggcccaaggaaaacctagaccctgtcgtggtccaagagggcgctcctttgacgctccagtgcaaccccccgcctggacttccatccccggtcatcttctggatgagcagctccatggagcccatcacccaagacaaacgtgtctctcagggccataacggagacctatacttctccaacgtgatgctgcaggacatgcagaccgactacagttgtaacgcccgcttccacttcacccacaccatccagcagaagaaccctttcaccctcaaggtcctcaccacccgaggagttgcagaaagaacaccaagcttcatgtatccccagggcaccgcgagcagccagatggtgcttcgtggcatggacctcctgctggaatgcatcgcctccggggtcccaacaccagacatcgcatggtacaagaaaggtggggacctcccatctgataaggccaagtttgagaactttaataaggccctgcgtatcacaaatgtctctgaggaagactccggggagtatttctgcctggcctccaacaagatgggcagcatccggcacacgatctcggtgagagtaaaggctgctccctactggctggacgaacccaagaaccttattctggctcctggcgaggatgggagactggtgtgtcgagccaatggaaaccccaaacccactgtccagtggatggtgaatggggaacctttgcaatcggcaccacctaacccaaaccgtgaggtggccggagacaccatcatcttccgggacacccagatcagcagcagggctgtgtaccagtgcaacacctccaacgagcatggctacctgctggccaacgcctttgtcagtgtgctggatgtgccgcctcggatgctgtcgccccggaaccagctcattcgagtgattctttacaaccggacgcggctggactgccctttctttgggtctcccatccccacactgcgatggtttaagaatgggcaaggaagcaacctggatggtggcaactaccatgtttatgagaacggcagtctggaaattaagatgatccgcaaagaggaccagggcatctacacctgtgtcgccaccaacatcctgggcaaagctgaaaaccaagtccgcctggaggtcaaagaccccaccaggatctaccggatgcccgaggaccaggtggccagaaggggcaccacggtgcagctggagtgtcgggtgaagcacgacccctccctgaaactcaccgtctcctggctgaaggatgacgagccgctctatattggaaacaggatgaagaaggaagacgactccctgaccatctttggggtggcagagcgggaccagggcagttacacgtgtgtcgccagcaccgagctagaccaagacctggccaaggcctacctcaccgtgctaggtaactgcccatgctcaccctggcactgaccagccccaccccctccccagcagccagagaagcagtggcccggggcagttccgagggcagtgcctgcagtcaagtggccgggtcaggcgtggtgatctcttcttgcctcgtgatgtcagggttagggagctgccagtttcagaacaagctgtgctggacaggttacctcctgagtggagtcattaacttccccacgtctcaactgaaaggggcctgagtgatatagagaaagtggagaggggtttctcgttgtgatcattttacctttcttacagctaactccaccactaagtcaattaaaacaatccatccttaaagcaa

SEQ ID NO: 241 - DNA, 9589 bp, Homo sapiens
ctgagtgctgtccaggaggcccagttaaagcggctcgaggtgacaagaccccgagtgctggggagcagggagcagggccaggtgccgaggatggccaggcagccaccgccgccctgggtccatgcagccttcctcctctgcctcctcagtcttggcggagccatcgaaattcctatggatccaagcattcagaatgagctgacgcagccgccaaccatcaccaagcagtcagcgaaggatcacatcgtggacccccgtgataacatcctgattgagtgtgaagcaaaagggaaccctgcccccagcttccactggacacgaaacagcagattcttcaacatcgccaaggacccccgggtgtccatgaggaggaggtctgggaccctggtgattgacttccgcagtggcgggcggccggaggaatatgagggggaatatcagtgcttcgcccgcaacaaatttggcacggccctgtccaataggatccgcctgcaggtgtctaaatctcctctgtggcccaaggaaaacctagaccctgtcgtggtccaagagggcgctcctttgacgctccagtgcaaccccccgcctggacttccatccccggtcatcttctggatgagcagctccatggagcccatcacccaagacaaacgtgtctctcagggccataacggagacctatacttctccaacgtgatgctgcaggacatgcagaccgactacagttgtaacgcccgcttccacttcacccacaccatccagcagaagaaccctttcaccctcaaggtcctcaccacccgaggagttgcagaaagaacaccaagcttcatgtatccccagggcaccgcgagcagccagatggtgcttcgtggcatggacctcctgctggaatgcatcgcctccggggtcccaacaccagacatcgcatggtacaagaaaggtggggacctcccatctgataaggccaagtttgagaactttaataaggccctgcgtatcacaaatgtctctgaggaagactccggggagtatttctgcctggcctccaacaagatgggcagcatccggcacacgatctcggtgagagtaaaggctgctccctactggctggacgaacccaagaaccttattctggctcctggcgaggatgggagactggtgtgtcgagccaatggaaaccccaaacccactgtccagtggatggtgaatggggaacctttgcaatcggcaccacctaacccaaaccgtgaggtggccggagacaccatcatcttccgggacacccagatcagcagcagggctgtgtaccagtgcaacacctccaacgagcatggctacctgctggccaacgcctttgtcagtgtgctggatgtgccgcctcggatgctgtcgccccggaaccagctcattcgagtgattctttacaaccggacgcggctggactgccctttctttgggtctcccatccccacactgcgatggtttaagaatgggcaaggaagcaacctggatggtggcaactaccatgtttatgagaacggcagtctggaaattaagatgatccgcaaagaggaccagggcatctacacctgtgtcgccaccaacatcctgggcaaagctgaaaaccaagtccgcctggaggtcaaagaccccaccaggatctaccggatgcccgaggaccaggtggccagaaggggcaccacggtgcagctggagtgtcgggtgaagcacgacccctccctgaaactcaccgtctcctggctgaaggatgacgagccgctctatattggaaacaggatgaagaaggaagacgactccctgaccatctttggggtggcagagcgggaccagggcagttacacgtgtgtcgccagcaccgagctagaccaagacctggccaaggcctacctcaccgtgctagctgatcaggccactccaactaaccgtttggctgccctgcccaaaggacggccagaccggccccgggacctggagctgaccgacctggccgagaggagcgtgcggctgacctggatccccggggatgctaacaacagccccatcacagactacgtcgtccagtttgaagaagaccagttccaacctggggtctggcatgaccattccaagtaccccggcagcgttaactcagccgtcctccggctgtccccgtatgtcaactaccagttccgtgtcattgccatcaacgaggttgggagcagccaccccagcctcccatccgagcgctaccgaaccagtggagcaccccccgagtccaatcctggtgacgtgaagggagaggggaccagaaagaacaacatggagatcacgtggacgcccatgaatgccacctcggcctttggccccaacctgcgctacattgtcaagtggaggcggagagagactcgagaggcctggaacaacgtcacagtgtggggctctcgctacgtggtggggcagaccccagtctacgtgccctatgagatccgagtccaggctgaaaatgacttcgggaagggccctgagccagagtccgtcatcggttactccggagaagatttacccagtgcccctaggcgtttccgagtccggcagcccaacctggagacaatcaacctggaatgggatcatcctgagcatccaaatgggatcatgattggatacactctcaaatatgtggcctttaacgggaccaaagtaggaaagcagatagtggaaaacttctctcccaatcagaccaagttcacggtgcaaagaacggaccccgtgtcacgctaccgctttaccctcagcgccaggacgcaggtgggctctggggaagccgtcacagaggagtcaccagcacccccgaatgaagctactccaaccgcagcttacaccaacaaccaagcggacatcgccacccagggctggttcattgggcttatgtgcgccatcgccctcctggtgctgatcctgctcatcgtctgtttcatcaagaggagtcgcggcggcaagtacccagtacgagaaaagaaggatgttccccttggccctgaagaccccaaggaagaggatggctcatttgactatagtgatgaggacaacaagcccctgcagggcagtcagacatctctggacggcaccatcaagcagcaggagagtgacgacagcctggtggactatggcgagggtggcgagggtcagttcaatgaagacggctccttcatcggccagtacacggtcaaaaaggacaaggaggaaacagagggcaacgaaagctcagaggccacgtcacctgtcaatgctatctactctctggcctaacggagcccacccaggcacagccaccactttgcaagtgggaggaggggagaaggggagacaaaaccactgcagacctaccacgaagccaccaccaccttcagtaacaagggtacgatatgggggtctgccaagctgtgaggaccagtagccaccaagccacccacaagccccctcccaatgaccccccttcagccccgggtgccaccagtgtgggagagctggagccgtggctgagctcagctggagggagcctggccccttgcccggtctcgcagccaccccgagcgttccaccacactgtccgcccttggcctcggcacacgctcaccttttctgttggttacgggacttctcattgtcttaatttcgctttgtgcatcttcccctccagacccaatgtctctgttttcttttccttttgaaaaagagtccctggaaaagaaagaataagtggattctcccccaggagaatcctttttgcaaagataggcaaaaaggattgaatccataccagaacacgtagacaggctgtaatattcaaaccacctctgggccaatgcatttccaaaggatgcctttctcgccatatgcctcccctggcccccagcccctctgcctcggccttgtcagttgctgagctgggcttggctcctttctggaaaatgacagtatttttggcagggagaaggtgcgcaggcctccttgctgctctctggtttggttgggaggtgtgtttacctcttgctcctcattcctcccctgcccttttctctggaatatctaagatgtgagctgcattgactctgaagacgtttgaggaacaggagtgggcactgatagaaaggacttcaacgccagtgactgtgtacctccagcagaagaaaatcaggtgtctggtcttgggggcactgtgctcacttctagagagaagaaaaaggctgggtttggacttcatgcctcctcactggtgaaacccaggatgtagatagagggccacacccaccctgtccagagtagagggcacctgtccacgtggccagggcccatgctgccaccctcgaggagatggaaccctgtgatgcaaaagctttgctggtgtgtttggggcataaggcactgctccccttccatctctagcagatatcatcttctcagccaattctgtaggacactgaggctcttgtttgacatggtgtgtggatggggacttgccccaagactgagcaggtctgccctttcattggggtgtatacatatcaggggaccctgaggtggcaccgtactcagtgttgtgatgcccccacctagggaggactcaatgctctttgtatgccttatgcagcgctgatctgtccctggagttcccaggttcccagctccccccctgcaagccttgaagcctccagcaacgtctatctccaggagagcagggcagcctatgcaagtgttccggcaggaccagaagtggccactcaacacacgtcctcaccagtcaccccaaatggagacactcgcagacctgcagttctcagaccgaaggtgctgccttcatcctccccacctaatgcatttttgaaaccaaaggtacctagcctcagagacagagaaggagagggggagatcttgagtctaagaggaaccctttagctgtttctgcagctgaggtcagtttcaggagggtgaagctgatccccaggaatggatcagctgccatgggcacagcctccgatttgagcctctccggctgccagccagggggcctgggccagaccagggctctgtccttccgtgactttattaaagcaacatttgccacatgtttaagccgcaaaggtattagcaatgcttgcatcattaataatcattcagttgaaggtcaagcccatagacacacactctctgctggtaagaaaccatagcccagaactgagccaataaggttgtttgaacctgagagtgtgtaatggtcatttgggccaagcctcagctagggctgctgcctggacgcctgaggggcagcttatcacagtgcaaggggacagggtaaacagcagggggtggggtgtgagcttggagggcccctcccctggatttcctccaacacctgcttggatactaggcccactgtccctgaagggaatgtcagggaagtgtgcctgtgagctgaattaaaggactggcctttccagaaaacgctttggatctgagcagagtagtcagtttctcagacactcattccatactgcaccgtacatgccagcgtacccattgcaccgaaagcaggcccttagggcaggaagggacgatgagcaagtctgccacaccacctggtgactgggaagggctgcttctctcgtaagggtcttggggagaagtaagcccgcagcctgcctctgcacctcgttccagtgtcctgccaggctctgtactgtcctttgtgtatgaagaaaatgctgttagccctctctcaggctgctgttctgtgggtgctgagagctgccccccatcaccacgccatcacacccctctgagcagaagcaaatctgaggctgaagaattaagttttccccaagcaaggaaggcaggtggtcagagagatcaaacgctgaggcgtggggattgcaggattcaggaggcagcccctttggggaagaggagggtgcattttccatggagcccatgtcagagtccactccagctcagcaggaaagtggaattgcccagtactgcctgccagctgggtctcccaagcaactaccccaagacataccaacagtgaagccaggacagcaccatgccatcggcgctccagtctgtctggctgggaggaaagtgctgggcatcttacagtaactctagaagttcctttgactaggctgcaatcccacctatatgctcagccctaagagctgtggtttcctgtgctctcatttgtccattcattcattcattcattcattcagcaaataatctgaaatccagtctgaactaaggcctgagctgtggataccatggcgcgtgagttagatgtggtccctgccctcatggggctgacagtcctaaaatcaagtgctaggacacagtggccattgagctgggagcattcttccctctaccgcttaagccactgatggctgcgagcttgaagagagggattctgagggagagcttggtccatctggtcaccaaggctgggcgggacagagcagtcaagaaccacggtgtggcttgagaaacagtcctgcttcctgagcctctttgctctgcctcttggggcaagctccttaacctgtctgtatttttatgcctctgtctcccattcagttcctccttgaatacctctttctacagagaggcacgggctcccctgaaggattgtcgaggccagggttcgggaagtacactgccatcggtcaggggacagctgcctcccaccttgcctgggtgatggtgaatgggactcatcttttcctgccttgcttttgaggagatggttgaatttaagctaacaggaaagccaaaccagcaccctcctttgtgctctgagaggttggagacatctggtccaccccattgcccctgcccctggcaagccctgaagtcgggagaggtgaccacaggtctgaaaatcagccagtgccaacattgcttgccctgcaaggtgcaactgagcccacatagcgcattcatagtttccctgaccacagccttgggaagacggtggaaacccgaggatgtgtgggtttcccagctaacggacaagctcccctgccacacccagtgcccacgcatgctcacatacatacagcagaccacaaccctgttgccaagcagtgcttccaagggatagcgatccagattccaacattgtcttggagagggttagtccacatccaagttgcgtgagataagatgcaaagggctctgtgtggatgaggaacgcaccttagaggagtgggaaaggccaccagggttgggccctgtttaggtaattcctgttggcagcacctagagagagcatctgagctgaaggagtgggaaactttgcccaagcaatggcacgggcagcgggctctttctggcgccctgtgctggagcagggccaagtcttagggcatcacaaacagcccatttgatggagggagcagggacatagcacatttttgtctgtctttgtgaggctgctttgctaactctctgaggagaggaagcctctcgggctttccgtcggctggggctagtgccagagaatcccttctcagtggccagcaggttcctgggaggccggcacaaggcaccgctccccactcatgacaccttggtgcagagtgacctcctgcccagtcaccactccggccagccccagccaaacacacaaaagcccatggttgcggttgcatctacaccgttagttggcaaaggatcctgcttgagctctgcgtggtggccaaggagtagcatggaggagggccctgattttaaaaaggaaaaatagagaggcctcaaaacaatgaaacaaagagcttgatatgtcaagaggagaccaaggccctgggaggcataggcaagccgggcagagtcagaccagtgccctcccttgaccatctcctagcattccttaacctagacaggggctaccccatgtgagtccaagccagactttgtggctgtccccagcctgcacagcccaagcccagggaagtgtcctttctttcccttccttactaataatgggccttcctgagacacattcagagaaggatcagagagaaaggagaaccatccaggagagccacaagcgtccaccaaacagtgtctcaggcctcacctgaagctgctgttcctcctatcagcacactagtattaaatgggtgttccataatgaggagaatggaaataggtacaaggcatctagcttaggacagaatcggatttcggcatgtgaaggaatcccagagctgatctcattgaaatgatctatcgtacagacaaggatatgcaaatccacagaagtgaagggatttttgctcaagatcacatagctggtaaactaaggtaaggttagggcttgaacttgggccttctgactccttgtccagtcagtgttctttcatctcaccacagctgcctcctttgaaacagaggtattaagatctgtccttctggttcaccctctcatacctctttactgcgtctcccacatcccccacatgcctcccaaaatgaaagacaaacaggattgtttctgagaccaagatcagtctgtctgtgatcagcctgtgtgtggttcacccagtcatgcaattaagggcagatctgggccagtggaataggatagctgattggtgtttgttactgtgaaccctagaccgtaccccgtagaatggtgtctcttgctttgtaacacatcgggccttcagtgtgctgtattcctcagaagtgagggcatctcggtccattctgcccatggccacagggtgcagagaggcagcagggcccatgcaagctgccaccctgggatttgctgggctggagttcaacagatgtaaagacttcagtgaagcaataaacacaaaactctgggagaagatatccagaattttgtacattactctgtttctttttcaaaaatgaggcagatcagatgcccctgagctgcccctttttttctgattcccaactgcaatgtcctcagtcagtgttgtccctctgcccggctccccagctctttgccaacctcttcacactccccttgagctgagcatcagtcgcctgtgacgtggccaccttctgtcctgctcccactcccgacccatgctggaccccggaggacctcctgccccgcccccaccacacacccatatcccccaccattccaatttgttctttcccgtggggaattttttttcccagcgtctccatcccttcctacatatccacacacacacaaattggtctgatcttttttccattggttaaacatttaactccatgccagaccttgttttaacccctctcacatcatgttctttccttttttgcgagttattttgcattaaccaactttgtcagtgacagatgcgtatctgagggtgtcacacacgaccttcagcagggaagacttctgggccatggagggccgtctaatacatggacttataaactgactgcatgagcaatgaaaaggccaaattattctgaattttttttgaatcactgtaaaaaaactgatttcttttgtatagagaacactaaacgtataataaaagttgttcaaaatgga

SEQ ID NO: 242 - DNA, 10723 bp, Homo sapiens
gattccacccagggcagggctgctgtgttttctctgaggccaactttcagggaaaagaaggatcttgctgggattttgctcaggcctaagtctgccagctgggatggcctggggcctaagaaatgcctagcttccctccccacctgtccccatggagggagactgagaagacgctggatgaaccagaccatggctccttcaggagagaggttgattgacttatgtgcaatttgggacgctggagtttaccttccctccgcagcctggaacagagcctcctctggtgttgcaaggaagaggctgaatgaggcagagaagctgagtgctgtccaggaggcccagttaaagcggctcgaggtgacaagaccccgagtgctggggagcagggagcagggccaggtgccgaggatggccaggcagccaccgccgccctgggtccatgcagccttcctcctctgcctcctcagtcttggcggagccatcgaaattcctatggatctgacgcagccgccaaccatcaccaagcagtcagcgaaggatcacatcgtggacccccgtgataacatcctgattgagtgtgaagcaaaagggaaccctgcccccagcttccactggacacgaaacagcagattcttcaacatcgccaaggacccccgggtgtccatgaggaggaggtctgggaccctggtgattgacttccgcagtggcgggcggccggaggaatatgagggggaatatcagtgcttcgcccgcaacaaatttggcacggccctgtccaataggatccgcctgcaggtgtctaaatctcctctgtggcccaaggaaaacctagaccctgtcgtggtccaagagggcgctcctttgacgctccagtgcaaccccccgcctggacttccatccccggtcatcttctggatgagcagctccatggagcccatcacccaagacaaacgtgtctctcagggccataacggagacctatacttctccaacgtgatgctgcaggacatgcagaccgactacagttgtaacgcccgcttccacttcacccacaccatccagcagaagaaccctttcaccctcaaggtcctcaccaaccacccttataatgactcgtccttaagaaaccaccctgacatgtacagtgcccgaggagttgcagaaagaacaccaagcttcatgtatccccagggcaccgcgagcagccagatggtgcttcgtggcatggacctcctgctggaatgcatcgcctccggggtcccaacaccagacatcgcatggtacaagaaaggtggggacctcccatctgataaggccaagtttgagaactttaataaggccctgcgtatcacaaatgtctctgaggaagactccggggagtatttctgcctggcctccaacaagatgggcagcatccggcacacgatctcggtgagagtaaaggctgctccctactggctggacgaacccaagaaccttattctggctcctggcgaggatgggagactggtgtgtcgagccaatggaaaccccaaacccactgtccagtggatggtgaatggggaacctttgcaatcggcaccacctaacccaaaccgtgaggtggccggagacaccatcatcttccgggacacccagatcagcagcagggctgtgtaccagtgcaacacctccaacgagcatggctacctgctggccaacgcctttgtcagtgtgctggatgtgccgcctcggatgctgtcgccccggaaccagctcattcgagtgattctttacaaccggacgcggctggactgccctttctttgggtctcccatccccacactgcgatggtttaagaatgggcaaggaagcaacctggatggtggcaactaccatgtttatgagaacggcagtctggaaattaagatgatccgcaaagaggaccagggcatctacacctgtgtcgccaccaacatcctgggcaaagctgaaaaccaagtccgcctggaggtcaaagaccccaccaggatctaccggatgcccgaggaccaggtggccagaaggggcaccacggtgcagctggagtgtcgggtgaagcacgacccctccctgaaactcaccgtctcctggctgaaggatgacgagccgctctatattggaaacaggatgaagaaggaagacgactccctgaccatctttggggtggcagagcgggaccagggcagttacacgtgtgtcgccagcaccgagctagaccaagacctggccaaggcctacctcaccgtgctaggacggccagaccggccccgggacctggagctgaccgacctggccgagaggagcgtgcggctgacctggatccccggggatgctaacaacagccccatcacagactacgtcgtccagtttgaagaagaccagttccaacctggggtctggcatgaccattccaagtaccccggcagcgttaactcagccgtcctccggctgtccccgtatgtcaactaccagttccgtgtcattgccatcaacgaggttgggagcagccaccccagcctcccatccgagcgctaccgaaccagtggagcaccccccgagtccaatcctggtgacgtgaagggagaggggaccagaaagaacaacatggagatcacgtggacgcccatgaatgccacctcggcctttggccccaacctgcgctacattgtcaagtggaggcggagagagactcgagaggcctggaacaacgtcacagtgtggggctctcgctacgtggtggggcagaccccagtctacgtgccctatgagatccgagtccaggctgaaaatgacttcgggaagggccctgagccagagtccgtcatcggttactccggagaagattatcccagggctgcgcccactgaagttaaagtccgagtcatgaacagcacagccatcagccttcagtggaaccgcgtctactccgacacggtccagggccagctcagagagtaccgagcctactactggagggagagcagcttgctgaagaacctgtgggtgtctcagaagagacagcaagccagcttccctggtgaccgcctccgtggcgtggtgtcccgcctcttcccctacagtaactacaagctggagatggttgtggtcaatgggagaggtgatgggcctcgcagtgagaccaaggagttcaccaccccggaaggagtacccagtgcccctaggcgtttccgagtccggcagcccaacctggagacaatcaacctggaatgggatcatcctgagcatccaaatgggatcatgattggatacactctcaaatatgtggcctttaacgggaccaaagtaggaaagcagatagtggaaaacttctctcccaatcagaccaagttcacggtgcaaagaacggaccccgtgtcacgctaccgctttaccctcagcgccaggacgcaggtgggctctggggaagccgtcacagaggagtcaccagcacccccgaatgaagctactccaaccgcagctcctcccacattgcccccgactaccgtgggtgcgacgggcgctgtgagcagtaccgatgctactgccattgctgccaccaccgaagccacaacagtccccatcatcccaactgtcgcacctaccaccatcgccaccaccaccaccgtcgccacaactactacaaccactgctgccgccaccaccaccacggagagtcctcccaccaccacctccgggactaagatacacgaatccgcccctgatgagcagtccatatggaacgtcacggtgctccccaacagtaaatgggccaacatcacctggaagcacaatttcgggcccggaactgactttgtggttgagtacatcgacagcaaccatacgaaaaaaactgtcccagttaaggcccaggctcagcctatacagctgacagacctctatcccgggatgacatacacgttgcgggtttattcccgggacaacgagggcatcagcagtaccgtcatcacctttatgaccagtacagcttacaccaacaaccaagcggacatcgccacccagggctggttcattgggcttatgtgcgccatcgccctcctggtgctgatcctgctcatcgtctgtttcatcaagaggagtcgcggcggcaagtacccagtacgagaaaagaaggatgttccccttggccctgaagaccccaaggaagaggatggctcatttgactatagtgatgaggacaacaagcccctgcagggcagtcagacatctctggacggcaccatcaagcagcaggagagtgacgacagcctggtggactatggcgagggtggcgagggtcagttcaatgaagacggctccttcatcggccagtacacggtcaaaaaggacaaggaggaaacagagggcaacgaaagctcagaggccacgtcacctgtcaatgctatctactctctggcctaacggagcccacccaggcacagccaccactttgcaagtgggaggaggggagaaggggagacaaaaccactgcagacctaccacgaagccaccaccaccttcagtaacaagggtacgatatgggggtctgccaagctgtgaggaccagtagccaccaagccacccacaagccccctcccaatgaccccccttcagccccgggtgccaccagtgtgggagagctggagccgtggctgagctcagctggagggagcctggccccttgcccggtctcgcagccaccccgagcgttccaccacactgtccgcccttggcctcggcacacgctcaccttttctgttggttacgggacttctcattgtcttaatttcgctttgtgcatcttcccctccagacccaatgtctctgttttcttttccttttgaaaaagagtccctggaaaagaaagaataagtggattctcccccaggagaatcctttttgcaaagataggcaaaaaggattgaatccataccagaacacgtagacaggctgtaatattcaaaccacctctgggccaatgcatttccaaaggatgcctttctcgccatatgcctcccctggcccccagcccctctgcctcggccttgtcagttgctgagctgggcttggctcctttctggaaaatgacagtatttttggcagggagaaggtgcgcaggcctccttgctgctctctggtttggttgggaggtgtgtttacctcttgctcctcattcctcccctgcccttttctctggaatatctaagatgtgagctgcattgactctgaagacgtttgaggaacaggagtgggcactgatagaaaggacttcaacgccagtgactgtgtacctccagcagaagaaaatcaggtgtctggtcttgggggcactgtgctcacttctagagagaagaaaaaggctgggtttggacttcatgcctcctcactggtgaaacccaggatgtagatagagggccacacccaccctgtccagagtagagggcacctgtccacgtggccagggcccatgctgccaccctcgaggagatggaaccctgtgatgcaaaagctttgctggtgtgtttggggcataaggcactgctccccttccatctctagcagatatcatcttctcagccaattctgtaggacactgaggctcttgtttgacatggtgtgtggatggggacttgccccaagactgagcaggtctgccctttcattggggtgtatacatatcaggggaccctgaggtggcaccgtactcagtgttgtgatgcccccacctagggaggactcaatgctctttgtatgccttatgcagcgctgatctgtccctggagttcccaggttcccagctccccccctgcaagccttgaagcctccagcaacgtctatctccaggagagcagggcagcctatgcaagtgttccggcaggaccagaagtggccactcaacacacgtcctcaccagtcaccccaaatggagacactcgcagacctgcagttctcagaccgaaggtgctgccttcatcctccccacctaatgcatttttgaaaccaaaggtacctagcctcagagacagagaaggagagggggagatcttgagtctaagaggaaccctttagctgtttctgcagctgaggtcagtttcaggagggtgaagctgatccccaggaatggatcagctgccatgggcacagcctccgatttgagcctctccggctgccagccagggggcctgggccagaccagggctctgtccttccgtgactttattaaagcaacatttgccacatgtttaagccgcaaaggtattagcaatgcttgcatcattaataatcattcagttgaaggtcaagcccatagacacacactctctgctggtaagaaaccatagcccagaactgagccaataaggttgtttgaacctgagagtgtgtaatggtcatttgggccaagcctcagctagggctgctgcctggacgcctgaggggcagcttatcacagtgcaaggggacagggtaaacagcagggggtggggtgtgagcttggagggcccctcccctggatttcctccaacacctgcttggatactaggcccactgtccctgaagggaatgtcagggaagtgtgcctgtgagctgaattaaaggactggcctttccagaaaacgctttggatctgagcagagtagtcagtttctcagacactcattccatactgcaccgtacatgccagcgtacccattgcaccgaaagcaggcccttagggcaggaagggacgatgagcaagtctgccacaccacctggtgactgggaagggctgcttctctcgtaagggtcttggggagaagtaagcccgcagcctgcctctgcacctcgttccagtgtcctgccaggctctgtactgtcctttgtgtatgaagaaaatgctgttagccctctctcaggctgctgttctgtgggtgctgagagctgccccccatcaccacgccatcacacccctctgagcagaagcaaatctgaggctgaagaattaagttttccccaagcaaggaaggcaggtggtcagagagatcaaacgctgaggcgtggggattgcaggattcaggaggcagcccctttggggaagaggagggtgcattttccatggagcccatgtcagagtccactccagctcagcaggaaagtggaattgcccagtactgcctgccagctgggtctcccaagcaactaccccaagacataccaacagtgaagccaggacagcaccatgccatcggcgctccagtctgtctggctgggaggaaagtgctgggcatcttacagtaactctagaagttcctttgactaggctgcaatcccacctatatgctcagccctaagagctgtggtttcctgtgctctcatttgtccattcattcattcattcattcattcagcaaataatctgaaatccagtctgaactaaggcctgagctgtggataccatggcgcgtgagttagatgtggtccctgccctcatggggctgacagtcctaaaatcaagtgctaggacacagtggccattgagctgggagcattcttccctctaccgcttaagccactgatggctgcgagcttgaagagagggattctgagggagagcttggtccatctggtcaccaaggctgggcgggacagagcagtcaagaaccacggtgtggcttgagaaacagtcctgcttcctgagcctctttgctctgcctcttggggcaagctccttaacctgtctgtatttttatgcctctgtctcccattcagttcctccttgaatacctctttctacagagaggcacgggctcccctgaaggattgtcgaggccagggttcgggaagtacactgccatcggtcaggggacagctgcctcccaccttgcctgggtgatggtgaatgggactcatcttttcctgccttgcttttgaggagatggttgaatttaagctaacaggaaagccaaaccagcaccctcctttgtgctctgagaggttggagacatctggtccaccccattgcccctgcccctggcaagccctgaagtcgggagaggtgaccacaggtctgaaaatcagccagtgccaacattgcttgccctgcaaggtgcaactgagcccacatagcgcattcatagtttccctgaccacagccttgggaagacggtggaaacccgaggatgtgtgggtttcccagctaacggacaagctcccctgccacacccagtgcccacgcatgctcacatacatacagcagaccacaaccctgttgccaagcagtgcttccaagggatagcgatccagattccaacattgtcttggagagggttagtccacatccaagttgcgtgagataagatgcaaagggctctgtgtggatgaggaacgcaccttagaggagtgggaaaggccaccagggttgggccctgtttaggtaattcctgttggcagcacctagagagagcatctgagctgaaggagtgggaaactttgcccaagcaatggcacgggcagcgggctctttctggcgccctgtgctggagcagggccaagtcttagggcatcacaaacagcccatttgatggagggagcagggacatagcacatttttgtctgtctttgtgaggctgctttgctaactctctgaggagaggaagcctctcgggctttccgtcggctggggctagtgccagagaatcccttctcagtggccagcaggttcctgggaggccggcacaaggcaccgctccccactcatgacaccttggtgcagagtgacctcctgcccagtcaccactccggccagccccagccaaacacacaaaagcccatggttgcggttgcatctacaccgttagttggcaaaggatcctgcttgagctctgcgtggtggccaaggagtagcatggaggagggccctgattttaaaaaggaaaaatagagaggcctcaaaacaatgaaacaaagagcttgatatgtcaagaggagaccaaggccctgggaggcataggcaagccgggcagagtcagaccagtgccctcccttgaccatctcctagcattccttaacctagacaggggctaccccatgtgagtccaagccagactttgtggctgtccccagcctgcacagcccaagcccagggaagtgtcctttctttcccttccttactaataatgggccttcctgagacacattcagagaaggatcagagagaaaggagaaccatccaggagagccacaagcgtccaccaaacagtgtctcaggcctcacctgaagctgctgttcctcctatcagcacactagtattaaatgggtgttccataatgaggagaatggaaataggtacaaggcatctagcttaggacagaatcggatttcggcatgtgaaggaatcccagagctgatctcattgaaatgatctatcgtacagacaaggatatgcaaatccacagaagtgaagggatttttgctcaagatcacatagctggtaaactaaggtaaggttagggcttgaacttgggccttctgactccttgtccagtcagtgttctttcatctcaccacagctgcctcctttgaaacagaggtattaagatctgtccttctggttcaccctctcatacctctttactgcgtctcccacatcccccacatgcctcccaaaatgaaagacaaacaggattgtttctgagaccaagatcagtctgtctgtgatcagcctgtgtgtggttcacccagtcatgcaattaagggcagatctgggccagtggaataggatagctgattggtgtttgttactgtgaaccctagaccgtaccccgtagaatggtgtctcttgctttgtaacacatcgggccttcagtgtgctgtattcctcagaagtgagggcatctcggtccattctgcccatggccacagggtgcagagaggcagcagggcccatgcaagctgccaccctgggatttgctgggctggagttcaacagatgtaaagacttcagtgaagcaataaacacaaaactctgggagaagatatccagaattttgtacattactctgtttctttttcaaaaatgaggcagatcagatgcccctgagctgcccctttttttctgattcccaactgcaatgtcctcagtcagtgttgtccctctgcccggctccccagctctttgccaacctcttcacactccccttgagctgagcatcagtcgcctgtgacgtggccaccttctgtcctgctcccactcccgacccatgctggaccccggaggacctcctgccccgcccccaccacacacccatatcccccaccattccaatttgttctttcccgtggggaattttttttcccagcgtctccatcccttcctacatatccacacacacacaaattggtctgatcttttttccattggttaaacatttaactccatgccagaccttgttttaacccctctcacatcatgttctttccttttttgcgagttattttgcattaaccaactttgtcagtgacagatgcgtatctgagggtgtcacacacgaccttcagcagggaagacttctgggccatggagggccgtctaatacatggacttataaactgactgcatgagcaatgaaaaggccaaattattctgaattttttttgaatcactgtaaaaaaactgatttcttttgtatagagaacactaaacgtataataaaagttgttcaaaatgga

SEQ ID NO: 243 - DNA, 10672 bp, Homo sapiens
gattccacccagggcagggctgctgtgttttctctgaggccaactttcagggaaaagaaggatcttgctgggattttgctcaggcctaagtctgccagctgggatggcctggggcctaagaaatgcctagcttccctccccacctgtccccatggagggagactgagaagacgctggatgaaccagaccatggctccttcaggagagaggttgattgacttatgtgcaatttgggacgctggagtttaccttccctccgcagcctggaacagagcctcctctggtgttgcaaggaagaggctgaatgaggcagagaagctgagtgctgtccaggaggcccagttaaagcggctcgaggtgacaagaccccgagtgctggggagcagggagcagggccaggtgccgaggatggccaggcagccaccgccgccctgggtccatgcagccttcctcctctgcctcctcagtcttggcggagccatcgaaattcctatggatctgacgcagccgccaaccatcaccaagcagtcagcgaaggatcacatcgtggacccccgtgataacatcctgattgagtgtgaagcaaaagggaaccctgcccccagcttccactggacacgaaacagcagattcttcaacatcgccaaggacccccgggtgtccatgaggaggaggtctgggaccctggtgattgacttccgcagtggcgggcggccggaggaatatgagggggaatatcagtgcttcgcccgcaacaaatttggcacggccctgtccaataggatccgcctgcaggtgtctaaatctcctctgtggcccaaggaaaacctagaccctgtcgtggtccaagagggcgctcctttgacgctccagtgcaaccccccgcctggacttccatccccggtcatcttctggatgagcagctccatggagcccatcacccaagacaaacgtgtctctcagggccataacggagacctatacttctccaacgtgatgctgcaggacatgcagaccgactacagttgtaacgcccgcttccacttcacccacaccatccagcagaagaaccctttcaccctcaaggtcctcaccacccgaggagttgcagaaagaacaccaagcttcatgtatccccagggcaccgcgagcagccagatggtgcttcgtggcatggacctcctgctggaatgcatcgcctccggggtcccaacaccagacatcgcatggtacaagaaaggtggggacctcccatctgataaggccaagtttgagaactttaataaggccctgcgtatcacaaatgtctctgaggaagactccggggagtatttctgcctggcctccaacaagatgggcagcatccggcacacgatctcggtgagagtaaaggctgctccctactggctggacgaacccaagaaccttattctggctcctggcgaggatgggagactggtgtgtcgagccaatggaaaccccaaacccactgtccagtggatggtgaatggggaacctttgcaatcggcaccacctaacccaaaccgtgaggtggccggagacaccatcatcttccgggacacccagatcagcagcagggctgtgtaccagtgcaacacctccaacgagcatggctacctgctggccaacgcctttgtcagtgtgctggatgtgccgcctcggatgctgtcgccccggaaccagctcattcgagtgattctttacaaccggacgcggctggactgccctttctttgggtctcccatccccacactgcgatggtttaagaatgggcaaggaagcaacctggatggtggcaactaccatgtttatgagaacggcagtctggaaattaagatgatccgcaaagaggaccagggcatctacacctgtgtcgccaccaacatcctgggcaaagctgaaaaccaagtccgcctggaggtcaaagaccccaccaggatctaccggatgcccgaggaccaggtggccagaaggggcaccacggtgcagctggagtgtcgggtgaagcacgacccctccctgaaactcaccgtctcctggctgaaggatgacgagccgctctatattggaaacaggatgaagaaggaagacgactccctgaccatctttggggtggcagagcgggaccagggcagttacacgtgtgtcgccagcaccgagctagaccaagacctggccaaggcctacctcaccgtgctaggacggccagaccggccccgggacctggagctgaccgacctggccgagaggagcgtgcggctgacctggatccccggggatgctaacaacagccccatcacagactacgtcgtccagtttgaagaagaccagttccaacctggggtctggcatgaccattccaagtaccccggcagcgttaactcagccgtcctccggctgtccccgtatgtcaactaccagttccgtgtcattgccatcaacgaggttgggagcagccaccccagcctcccatccgagcgctaccgaaccagtggagcaccccccgagtccaatcctggtgacgtgaagggagaggggaccagaaagaacaacatggagatcacgtggacgcccatgaatgccacctcggcctttggccccaacctgcgctacattgtcaagtggaggcggagagagactcgagaggcctggaacaacgtcacagtgtggggctctcgctacgtggtggggcagaccccagtctacgtgccctatgagatccgagtccaggctgaaaatgacttcgggaagggccctgagccagagtccgtcatcggttactccggagaagattatcccagggctgcgcccactgaagttaaagtccgagtcatgaacagcacagccatcagccttcagtggaaccgcgtctactccgacacggtccagggccagctcagagagtaccgagcctactactggagggagagcagcttgctgaagaacctgtgggtgtctcagaagagacagcaagccagcttccctggtgaccgcctccgtggcgtggtgtcccgcctcttcccctacagtaactacaagctggagatggttgtggtcaatgggagaggtgatgggcctcgcagtgagaccaaggagttcaccaccccggaaggagtacccagtgcccctaggcgtttccgagtccggcagcccaacctggagacaatcaacctggaatgggatcatcctgagcatccaaatgggatcatgattggatacactctcaaatatgtggcctttaacgggaccaaagtaggaaagcagatagtggaaaacttctctcccaatcagaccaagttcacggtgcaaagaacggaccccgtgtcacgctaccgctttaccctcagcgccaggacgcaggtgggctctggggaagccgtcacagaggagtcaccagcacccccgaatgaagctactccaaccgcagctcctcccacattgcccccgactaccgtgggtgcgacgggcgctgtgagcagtaccgatgctactgccattgctgccaccaccgaagccacaacagtccccatcatcccaactgtcgcacctaccaccatcgccaccaccaccaccgtcgccacaactactacaaccactgctgccgccaccaccaccacggagagtcctcccaccaccacctccgggactaagatacacgaatccgcccctgatgagcagtccatatggaacgtcacggtgctccccaacagtaaatgggccaacatcacctggaagcacaatttcgggcccggaactgactttgtggttgagtacatcgacagcaaccatacgaaaaaaactgtcccagttaaggcccaggctcagcctatacagctgacagacctctatcccgggatgacatacacgttgcgggtttattcccgggacaacgagggcatcagcagtaccgtcatcacctttatgaccagtacagcttacaccaacaaccaagcggacatcgccacccagggctggttcattgggcttatgtgcgccatcgccctcctggtgctgatcctgctcatcgtctgtttcatcaagaggagtcgcggcggcaagtacccagtacgagaaaagaaggatgttccccttggccctgaagaccccaaggaagaggatggctcatttgactatagtgatgaggacaacaagcccctgcagggcagtcagacatctctggacggcaccatcaagcagcaggagagtgacgacagcctggtggactatggcgagggtggcgagggtcagttcaatgaagacggctccttcatcggccagtacacggtcaaaaaggacaaggaggaaacagagggcaacgaaagctcagaggccacgtcacctgtcaatgctatctactctctggcctaacggagcccacccaggcacagccaccactttgcaagtgggaggaggggagaaggggagacaaaaccactgcagacctaccacgaagccaccaccaccttcagtaacaagggtacgatatgggggtctgccaagctgtgaggaccagtagccaccaagccacccacaagccccctcccaatgaccccccttcagccccgggtgccaccagtgtgggagagctggagccgtggctgagctcagctggagggagcctggccccttgcccggtctcgcagccaccccgagcgttccaccacactgtccgcccttggcctcggcacacgctcaccttttctgttggttacgggacttctcattgtcttaatttcgctttgtgcatcttcccctccagacccaatgtctctgttttcttttccttttgaaaaagagtccctggaaaagaaagaataagtggattctcccccaggagaatcctttttgcaaagataggcaaaaaggattgaatccataccagaacacgtagacaggctgtaatattcaaaccacctctgggccaatgcatttccaaaggatgcctttctcgccatatgcctcccctggcccccagcccctctgcctcggccttgtcagttgctgagctgggcttggctcctttctggaaaatgacagtatttttggcagggagaaggtgcgcaggcctccttgctgctctctggtttggttgggaggtgtgtttacctcttgctcctcattcctcccctgcccttttctctggaatatctaagatgtgagctgcattgactctgaagacgtttgaggaacaggagtgggcactgatagaaaggacttcaacgccagtgactgtgtacctccagcagaagaaaatcaggtgtctggtcttgggggcactgtgctcacttctagagagaagaaaaaggctgggtttggacttcatgcctcctcactggtgaaacccaggatgtagatagagggccacacccaccctgtccagagtagagggcacctgtccacgtggccagggcccatgctgccaccctcgaggagatggaaccctgtgatgcaaaagctttgctggtgtgtttggggcataaggcactgctccccttccatctctagcagatatcatcttctcagccaattctgtaggacactgaggctcttgtttgacatggtgtgtggatggggacttgccccaagactgagcaggtctgccctttcattggggtgtatacatatcaggggaccctgaggtggcaccgtactcagtgttgtgatgcccccacctagggaggactcaatgctctttgtatgccttatgcagcgctgatctgtccctggagttcccaggttcccagctccccccctgcaagccttgaagcctccagcaacgtctatctccaggagagcagggcagcctatgcaagtgttccggcaggaccagaagtggccactcaacacacgtcctcaccagtcaccccaaatggagacactcgcagacctgcagttctcagaccgaaggtgctgccttcatcctccccacctaatgcatttttgaaaccaaaggtacctagcctcagagacagagaaggagagggggagatcttgagtctaagaggaaccctttagctgtttctgcagctgaggtcagtttcaggagggtgaagctgatccccaggaatggatcagctgccatgggcacagcctccgatttgagcctctccggctgccagccagggggcctgggccagaccagggctctgtccttccgtgactttattaaagcaacatttgccacatgtttaagccgcaaaggtattagcaatgcttgcatcattaataatcattcagttgaaggtcaagcccatagacacacactctctgctggtaagaaaccatagcccagaactgagccaataaggttgtttgaacctgagagtgtgtaatggtcatttgggccaagcctcagctagggctgctgcctggacgcctgaggggcagcttatcacagtgcaaggggacagggtaaacagcagggggtggggtgtgagcttggagggcccctcccctggatttcctccaacacctgcttggatactaggcccactgtccctgaagggaatgtcagggaagtgtgcctgtgagctgaattaaaggactggcctttccagaaaacgctttggatctgagcagagtagtcagtttctcagacactcattccatactgcaccgtacatgccagcgtacccattgcaccgaaagcaggcccttagggcaggaagggacgatgagcaagtctgccacaccacctggtgactgggaagggctgcttctctcgtaagggtcttggggagaagtaagcccgcagcctgcctctgcacctcgttccagtgtcctgccaggctctgtactgtcctttgtgtatgaagaaaatgctgttagccctctctcaggctgctgttctgtgggtgctgagagctgccccccatcaccacgccatcacacccctctgagcagaagcaaatctgaggctgaagaattaagttttccccaagcaaggaaggcaggtggtcagagagatcaaacgctgaggcgtggggattgcaggattcaggaggcagcccctttggggaagaggagggtgcattttccatggagcccatgtcagagtccactccagctcagcaggaaagtggaattgcccagtactgcctgccagctgggtctcccaagcaactaccccaagacataccaacagtgaagccaggacagcaccatgccatcggcgctccagtctgtctggctgggaggaaagtgctgggcatcttacagtaactctagaagttcctttgactaggctgcaatcccacctatatgctcagccctaagagctgtggtttcctgtgctctcatttgtccattcattcattcattcattcattcagcaaataatctgaaatccagtctgaactaaggcctgagctgtggataccatggcgcgtgagttagatgtggtccctgccctcatggggctgacagtcctaaaatcaagtgctaggacacagtggccattgagctgggagcattcttccctctaccgcttaagccactgatggctgcgagcttgaagagagggattctgagggagagcttggtccatctggtcaccaaggctgggcgggacagagcagtcaagaaccacggtgtggcttgagaaacagtcctgcttcctgagcctctttgctctgcctcttggggcaagctccttaacctgtctgtatttttatgcctctgtctcccattcagttcctccttgaatacctctttctacagagaggcacgggctcccctgaaggattgtcgaggccagggttcgggaagtacactgccatcggtcaggggacagctgcctcccaccttgcctgggtgatggtgaatgggactcatcttttcctgccttgcttttgaggagatggttgaatttaagctaacaggaaagccaaaccagcaccctcctttgtgctctgagaggttggagacatctggtccaccccattgcccctgcccctggcaagccctgaagtcgggagaggtgaccacaggtctgaaaatcagccagtgccaacattgcttgccctgcaaggtgcaactgagcccacatagcgcattcatagtttccctgaccacagccttgggaagacggtggaaacccgaggatgtgtgggtttcccagctaacggacaagctcccctgccacacccagtgcccacgcatgctcacatacatacagcagaccacaaccctgttgccaagcagtgcttccaagggatagcgatccagattccaacattgtcttggagagggttagtccacatccaagttgcgtgagataagatgcaaagggctctgtgtggatgaggaacgcaccttagaggagtgggaaaggccaccagggttgggccctgtttaggtaattcctgttggcagcacctagagagagcatctgagctgaaggagtgggaaactttgcccaagcaatggcacgggcagcgggctctttctggcgccctgtgctggagcagggccaagtcttagggcatcacaaacagcccatttgatggagggagcagggacatagcacatttttgtctgtctttgtgaggctgctttgctaactctctgaggagaggaagcctctcgggctttccgtcggctggggctagtgccagagaatcccttctcagtggccagcaggttcctgggaggccggcacaaggcaccgctccccactcatgacaccttggtgcagagtgacctcctgcccagtcaccactccggccagccccagccaaacacacaaaagcccatggttgcggttgcatctacaccgttagttggcaaaggatcctgcttgagctctgcgtggtggccaaggagtagcatggaggagggccctgattttaaaaaggaaaaatagagaggcctcaaaacaatgaaacaaagagcttgatatgtcaagaggagaccaaggccctgggaggcataggcaagccgggcagagtcagaccagtgccctcccttgaccatctcctagcattccttaacctagacaggggctaccccatgtgagtccaagccagactttgtggctgtccccagcctgcacagcccaagcccagggaagtgtcctttctttcccttccttactaataatgggccttcctgagacacattcagagaaggatcagagagaaaggagaaccatccaggagagccacaagcgtccaccaaacagtgtctcaggcctcacctgaagctgctgttcctcctatcagcacactagtattaaatgggtgttccataatgaggagaatggaaataggtacaaggcatctagcttaggacagaatcggatttcggcatgtgaaggaatcccagagctgatctcattgaaatgatctatcgtacagacaaggatatgcaaatccacagaagtgaagggatttttgctcaagatcacatagctggtaaactaaggtaaggttagggcttgaacttgggccttctgactccttgtccagtcagtgttctttcatctcaccacagctgcctcctttgaaacagaggtattaagatctgtccttctggttcaccctctcatacctctttactgcgtctcccacatcccccacatgcctcccaaaatgaaagacaaacaggattgtttctgagaccaagatcagtctgtctgtgatcagcctgtgtgtggttcacccagtcatgcaattaagggcagatctgggccagtggaataggatagctgattggtgtttgttactgtgaaccctagaccgtaccccgtagaatggtgtctcttgctttgtaacacatcgggccttcagtgtgctgtattcctcagaagtgagggcatctcggtccattctgcccatggccacagggtgcagagaggcagcagggcccatgcaagctgccaccctgggatttgctgggctggagttcaacagatgtaaagacttcagtgaagcaataaacacaaaactctgggagaagatatccagaattttgtacattactctgtttctttttcaaaaatgaggcagatcagatgcccctgagctgcccctttttttctgattcccaactgcaatgtcctcagtcagtgttgtccctctgcccggctccccagctctttgccaacctcttcacactccccttgagctgagcatcagtcgcctgtgacgtggccaccttctgtcctgctcccactcccgacccatgctggaccccggaggacctcctgccccgcccccaccacacacccatatcccccaccattccaatttgttctttcccgtggggaattttttttcccagcgtctccatcccttcctacatatccacacacacacaaattggtctgatcttttttccattggttaaacatttaactccatgccagaccttgttttaacccctctcacatcatgttctttccttttttgcgagttattttgcattaaccaactttgtcagtgacagatgcgtatctgagggtgtcacacacgaccttcagcagggaagacttctgggccatggagggccgtctaatacatggacttataaactgactgcatgagcaatgaaaaggccaaattattctgaattttttttgaatcactgtaaaaaaactgatttcttttgtatagagaacactaaacgtataataaaagttgttcaaaatgga

SEQ ID NO: 244 - DNA, 10690 bp, Homo sapiens
gcgcacgggctggtctctgccctaatgcggcggctggcggcgagaggcgctgcaggggacgcgggggaagtggcggcgccggcagcggacagctcggacagcgcccagggccggagcccgagcccttggaggttgattgacttatgtgcaatttgggacgctggagtttaccttccctccgcagcctggaacagagcctcctctggtgttgcaaggaagaggctgaatgaggcagagaagctgagtgctgtccaggaggcccagttaaagcggctcgaggtgacaagaccccgagtgctggggagcagggagcagggccaggtgccgaggatggccaggcagccaccgccgccctgggtccatgcagccttcctcctctgcctcctcagtcttggcggagccatcgaaattcctatggatctgacgcagccgccaaccatcaccaagcagtcagcgaaggatcacatcgtggacccccgtgataacatcctgattgagtgtgaagcaaaagggaaccctgcccccagcttccactggacacgaaacagcagattcttcaacatcgccaaggacccccgggtgtccatgaggaggaggtctgggaccctggtgattgacttccgcagtggcgggcggccggaggaatatgagggggaatatcagtgcttcgcccgcaacaaatttggcacggccctgtccaataggatccgcctgcaggtgtctaaatctcctctgtggcccaaggaaaacctagaccctgtcgtggtccaagagggcgctcctttgacgctccagtgcaaccccccgcctggacttccatccccggtcatcttctggatgagcagctccatggagcccatcacccaagacaaacgtgtctctcagggccataacggagacctatacttctccaacgtgatgctgcaggacatgcagaccgactacagttgtaacgcccgcttccacttcacccacaccatccagcagaagaaccctttcaccctcaaggtcctcaccaaccacccttataatgactcgtccttaagaaaccaccctgacatgtacagtgcccgaggagttgcagaaagaacaccaagcttcatgtatccccagggcaccgcgagcagccagatggtgcttcgtggcatggacctcctgctggaatgcatcgcctccggggtcccaacaccagacatcgcatggtacaagaaaggtggggacctcccatctgataaggccaagtttgagaactttaataaggccctgcgtatcacaaatgtctctgaggaagactccggggagtatttctgcctggcctccaacaagatgggcagcatccggcacacgatctcggtgagagtaaaggctgctccctactggctggacgaacccaagaaccttattctggctcctggcgaggatgggagactggtgtgtcgagccaatggaaaccccaaacccactgtccagtggatggtgaatggggaacctttgcaatcggcaccacctaacccaaaccgtgaggtggccggagacaccatcatcttccgggacacccagatcagcagcagggctgtgtaccagtgcaacacctccaacgagcatggctacctgctggccaacgcctttgtcagtgtgctggatgtgccgcctcggatgctgtcgccccggaaccagctcattcgagtgattctttacaaccggacgcggctggactgccctttctttgggtctcccatccccacactgcgatggtttaagaatgggcaaggaagcaacctggatggtggcaactaccatgtttatgagaacggcagtctggaaattaagatgatccgcaaagaggaccagggcatctacacctgtgtcgccaccaacatcctgggcaaagctgaaaaccaagtccgcctggaggtcaaagaccccaccaggatctaccggatgcccgaggaccaggtggccagaaggggcaccacggtgcagctggagtgtcgggtgaagcacgacccctccctgaaactcaccgtctcctggctgaaggatgacgagccgctctatattggaaacaggatgaagaaggaagacgactccctgaccatctttggggtggcagagcgggaccagggcagttacacgtgtgtcgccagcaccgagctagaccaagacctggccaaggcctacctcaccgtgctagctgatcaggccactccaactaaccgtttggctgccctgcccaaaggacggccagaccggccccgggacctggagctgaccgacctggccgagaggagcgtgcggctgacctggatccccggggatgctaacaacagccccatcacagactacgtcgtccagtttgaagaagaccagttccaacctggggtctggcatgaccattccaagtaccccggcagcgttaactcagccgtcctccggctgtccccgtatgtcaactaccagttccgtgtcattgccatcaacgaggttgggagcagccaccccagcctcccatccgagcgctaccgaaccagtggagcaccccccgagtccaatcctggtgacgtgaagggagaggggaccagaaagaacaacatggagatcacgtggacgcccatgaatgccacctcggcctttggccccaacctgcgctacattgtcaagtggaggcggagagagactcgagaggcctggaacaacgtcacagtgtggggctctcgctacgtggtggggcagaccccagtctacgtgccctatgagatccgagtccaggctgaaaatgacttcgggaagggccctgagccagagtccgtcatcggttactccggagaagattatcccagggctgcgcccactgaagttaaagtccgagtcatgaacagcacagccatcagccttcagtggaaccgcgtctactccgacacggtccagggccagctcagagagtaccgagcctactactggagggagagcagcttgctgaagaacctgtgggtgtctcagaagagacagcaagccagcttccctggtgaccgcctccgtggcgtggtgtcccgcctcttcccctacagtaactacaagctggagatggttgtggtcaatgggagaggtgatgggcctcgcagtgagaccaaggagttcaccaccccggaaggagtacccagtgcccctaggcgtttccgagtccggcagcccaacctggagacaatcaacctggaatgggatcatcctgagcatccaaatgggatcatgattggatacactctcaaatatgtggcctttaacgggaccaaagtaggaaagcagatagtggaaaacttctctcccaatcagaccaagttcacggtgcaaagaacggaccccgtgtcacgctaccgctttaccctcagcgccaggacgcaggtgggctctggggaagccgtcacagaggagtcaccagcacccccgaatgaagctactccaaccgcagctcctcccacattgcccccgactaccgtgggtgcgacgggcgctgtgagcagtaccgatgctactgccattgctgccaccaccgaagccacaacagtccccatcatcccaactgtcgcacctaccaccatcgccaccaccaccaccgtcgccacaactactacaaccactgctgccgccaccaccaccacggagagtcctcccaccaccacctccgggactaagatacacgaatccgcccctgatgagcagtccatatggaacgtcacggtgctccccaacagtaaatgggccaacatcacctggaagcacaatttcgggcccggaactgactttgtggttgagtacatcgacagcaaccatacgaaaaaaactgtcccagttaaggcccaggctcagcctatacagctgacagacctctatcccgggatgacatacacgttgcgggtttattcccgggacaacgagggcatcagcagtaccgtcatcacctttatgaccagtacagcttacaccaacaaccaagcggacatcgccacccagggctggttcattgggcttatgtgcgccatcgccctcctggtgctgatcctgctcatcgtctgtttcatcaagaggagtcgcggcggcaagtacccagtacgagaaaagaaggatgttccccttggccctgaagaccccaaggaagaggatggctcatttgactatagtgatgaggacaacaagcccctgcagggcagtcagacatctctggacggcaccatcaagcagcaggagagtgacgacagcctggtggactatggcgagggtggcgagggtcagttcaatgaagacggctccttcatcggccagtacacggtcaaaaaggacaaggaggaaacagagggcaacgaaagctcagaggccacgtcacctgtcaatgctatctactctctggcctaacggagcccacccaggcacagccaccactttgcaagtgggaggaggggagaaggggagacaaaaccactgcagacctaccacgaagccaccaccaccttcagtaacaagggtacgatatgggggtctgccaagctgtgaggaccagtagccaccaagccacccacaagccccctcccaatgaccccccttcagccccgggtgccaccagtgtgggagagctggagccgtggctgagctcagctggagggagcctggccccttgcccggtctcgcagccaccccgagcgttccaccacactgtccgcccttggcctcggcacacgctcaccttttctgttggttacgggacttctcattgtcttaatttcgctttgtgcatcttcccctccagacccaatgtctctgttttcttttccttttgaaaaagagtccctggaaaagaaagaataagtggattctcccccaggagaatcctttttgcaaagataggcaaaaaggattgaatccataccagaacacgtagacaggctgtaatattcaaaccacctctgggccaatgcatttccaaaggatgcctttctcgccatatgcctcccctggcccccagcccctctgcctcggccttgtcagttgctgagctgggcttggctcctttctggaaaatgacagtatttttggcagggagaaggtgcgcaggcctccttgctgctctctggtttggttgggaggtgtgtttacctcttgctcctcattcctcccctgcccttttctctggaatatctaagatgtgagctgcattgactctgaagacgtttgaggaacaggagtgggcactgatagaaaggacttcaacgccagtgactgtgtacctccagcagaagaaaatcaggtgtctggtcttgggggcactgtgctcacttctagagagaagaaaaaggctgggtttggacttcatgcctcctcactggtgaaacccaggatgtagatagagggccacacccaccctgtccagagtagagggcacctgtccacgtggccagggcccatgctgccaccctcgaggagatggaaccctgtgatgcaaaagctttgctggtgtgtttggggcataaggcactgctccccttccatctctagcagatatcatcttctcagccaattctgtaggacactgaggctcttgtttgacatggtgtgtggatggggacttgccccaagactgagcaggtctgccctttcattggggtgtatacatatcaggggaccctgaggtggcaccgtactcagtgttgtgatgcccccacctagggaggactcaatgctctttgtatgccttatgcagcgctgatctgtccctggagttcccaggttcccagctccccccctgcaagccttgaagcctccagcaacgtctatctccaggagagcagggcagcctatgcaagtgttccggcaggaccagaagtggccactcaacacacgtcctcaccagtcaccccaaatggagacactcgcagacctgcagttctcagaccgaaggtgctgccttcatcctccccacctaatgcatttttgaaaccaaaggtacctagcctcagagacagagaaggagagggggagatcttgagtctaagaggaaccctttagctgtttctgcagctgaggtcagtttcaggagggtgaagctgatccccaggaatggatcagctgccatgggcacagcctccgatttgagcctctccggctgccagccagggggcctgggccagaccagggctctgtccttccgtgactttattaaagcaacatttgccacatgtttaagccgcaaaggtattagcaatgcttgcatcattaataatcattcagttgaaggtcaagcccatagacacacactctctgctggtaagaaaccatagcccagaactgagccaataaggttgtttgaacctgagagtgtgtaatggtcatttgggccaagcctcagctagggctgctgcctggacgcctgaggggcagcttatcacagtgcaaggggacagggtaaacagcagggggtggggtgtgagcttggagggcccctcccctggatttcctccaacacctgcttggatactaggcccactgtccctgaagggaatgtcagggaagtgtgcctgtgagctgaattaaaggactggcctttccagaaaacgctttggatctgagcagagtagtcagtttctcagacactcattccatactgcaccgtacatgccagcgtacccattgcaccgaaagcaggcccttagggcaggaagggacgatgagcaagtctgccacaccacctggtgactgggaagggctgcttctctcgtaagggtcttggggagaagtaagcccgcagcctgcctctgcacctcgttccagtgtcctgccaggctctgtactgtcctttgtgtatgaagaaaatgctgttagccctctctcaggctgctgttctgtgggtgctgagagctgccccccatcaccacgccatcacacccctctgagcagaagcaaatctgaggctgaagaattaagttttccccaagcaaggaaggcaggtggtcagagagatcaaacgctgaggcgtggggattgcaggattcaggaggcagcccctttggggaagaggagggtgcattttccatggagcccatgtcagagtccactccagctcagcaggaaagtggaattgcccagtactgcctgccagctgggtctcccaagcaactaccccaagacataccaacagtgaagccaggacagcaccatgccatcggcgctccagtctgtctggctgggaggaaagtgctgggcatcttacagtaactctagaagttcctttgactaggctgcaatcccacctatatgctcagccctaagagctgtggtttcctgtgctctcatttgtccattcattcattcattcattcattcagcaaataatctgaaatccagtctgaactaaggcctgagctgtggataccatggcgcgtgagttagatgtggtccctgccctcatggggctgacagtcctaaaatcaagtgctaggacacagtggccattgagctgggagcattcttccctctaccgcttaagccactgatggctgcgagcttgaagagagggattctgagggagagcttggtccatctggtcaccaaggctgggcgggacagagcagtcaagaaccacggtgtggcttgagaaacagtcctgcttcctgagcctctttgctctgcctcttggggcaagctccttaacctgtctgtatttttatgcctctgtctcccattcagttcctccttgaatacctctttctacagagaggcacgggctcccctgaaggattgtcgaggccagggttcgggaagtacactgccatcggtcaggggacagctgcctcccaccttgcctgggtgatggtgaatgggactcatcttttcctgccttgcttttgaggagatggttgaatttaagctaacaggaaagccaaaccagcaccctcctttgtgctctgagaggttggagacatctggtccaccccattgcccctgcccctggcaagccctgaagtcgggagaggtgaccacaggtctgaaaatcagccagtgccaacattgcttgccctgcaaggtgcaactgagcccacatagcgcattcatagtttccctgaccacagccttgggaagacggtggaaacccgaggatgtgtgggtttcccagctaacggacaagctcccctgccacacccagtgcccacgcatgctcacatacatacagcagaccacaaccctgttgccaagcagtgcttccaagggatagcgatccagattccaacattgtcttggagagggttagtccacatccaagttgcgtgagataagatgcaaagggctctgtgtggatgaggaacgcaccttagaggagtgggaaaggccaccagggttgggccctgtttaggtaattcctgttggcagcacctagagagagcatctgagctgaaggagtgggaaactttgcccaagcaatggcacgggcagcgggctctttctggcgccctgtgctggagcagggccaagtcttagggcatcacaaacagcccatttgatggagggagcagggacatagcacatttttgtctgtctttgtgaggctgctttgctaactctctgaggagaggaagcctctcgggctttccgtcggctggggctagtgccagagaatcccttctcagtggccagcaggttcctgggaggccggcacaaggcaccgctccccactcatgacaccttggtgcagagtgacctcctgcccagtcaccactccggccagccccagccaaacacacaaaagcccatggttgcggttgcatctacaccgttagttggcaaaggatcctgcttgagctctgcgtggtggccaaggagtagcatggaggagggccctgattttaaaaaggaaaaatagagaggcctcaaaacaatgaaacaaagagcttgatatgtcaagaggagaccaaggccctgggaggcataggcaagccgggcagagtcagaccagtgccctcccttgaccatctcctagcattccttaacctagacaggggctaccccatgtgagtccaagccagactttgtggctgtccccagcctgcacagcccaagcccagggaagtgtcctttctttcccttccttactaataatgggccttcctgagacacattcagagaaggatcagagagaaaggagaaccatccaggagagccacaagcgtccaccaaacagtgtctcaggcctcacctgaagctgctgttcctcctatcagcacactagtattaaatgggtgttccataatgaggagaatggaaataggtacaaggcatctagcttaggacagaatcggatttcggcatgtgaaggaatcccagagctgatctcattgaaatgatctatcgtacagacaaggatatgcaaatccacagaagtgaagggatttttgctcaagatcacatagctggtaaactaaggtaaggttagggcttgaacttgggccttctgactccttgtccagtcagtgttctttcatctcaccacagctgcctcctttgaaacagaggtattaagatctgtccttctggttcaccctctcatacctctttactgcgtctcccacatcccccacatgcctcccaaaatgaaagacaaacaggattgtttctgagaccaagatcagtctgtctgtgatcagcctgtgtgtggttcacccagtcatgcaattaagggcagatctgggccagtggaataggatagctgattggtgtttgttactgtgaaccctagaccgtaccccgtagaatggtgtctcttgctttgtaacacatcgggccttcagtgtgctgtattcctcagaagtgagggcatctcggtccattctgcccatggccacagggtgcagagaggcagcagggcccatgcaagctgccaccctgggatttgctgggctggagttcaacagatgtaaagacttcagtgaagcaataaacacaaaactctgggagaagatatccagaattttgtacattactctgtttctttttcaaaaatgaggcagatcagatgcccctgagctgcccctttttttctgattcccaactgcaatgtcctcagtcagtgttgtccctctgcccggctccccagctctttgccaacctcttcacactccccttgagctgagcatcagtcgcctgtgacgtggccaccttctgtcctgctcccactcccgacccatgctggaccccggaggacctcctgccccgcccccaccacacacccatatcccccaccattccaatttgttctttcccgtggggaattttttttcccagcgtctccatcccttcctacatatccacacacacacaaattggtctgatcttttttccattggttaaacatttaactccatgccagaccttgttttaacccctctcacatcatgttctttccttttttgcgagttattttgcattaaccaactttgtcagtgacagatgcgtatctgagggtgtcacacacgaccttcagcagggaagacttctgggccatggagggccgtctaatacatggacttataaactgactgcatgagcaatgaaaaggccaaattattctgaattttttttgaatcactgtaaaaaaactgatttcttttgtatagagaacactaaacgtataataaaagttgttcaaaatgga

SEQ ID NO: 245 - DNA, 10639 bp, Homo sapiens
gcgcacgggctggtctctgccctaatgcggcggctggcggcgagaggcgctgcaggggacgcgggggaagtggcggcgccggcagcggacagctcggacagcgcccagggccggagcccgagcccttggaggttgattgacttatgtgcaatttgggacgctggagtttaccttccctccgcagcctggaacagagcctcctctggtgttgcaaggaagaggctgaatgaggcagagaagctgagtgctgtccaggaggcccagttaaagcggctcgaggtgacaagaccccgagtgctggggagcagggagcagggccaggtgccgaggatggccaggcagccaccgccgccctgggtccatgcagccttcctcctctgcctcctcagtcttggcggagccatcgaaattcctatggatctgacgcagccgccaaccatcaccaagcagtcagcgaaggatcacatcgtggacccccgtgataacatcctgattgagtgtgaagcaaaagggaaccctgcccccagcttccactggacacgaaacagcagattcttcaacatcgccaaggacccccgggtgtccatgaggaggaggtctgggaccctggtgattgacttccgcagtggcgggcggccggaggaatatgagggggaatatcagtgcttcgcccgcaacaaatttggcacggccctgtccaataggatccgcctgcaggtgtctaaatctcctctgtggcccaaggaaaacctagaccctgtcgtggtccaagagggcgctcctttgacgctccagtgcaaccccccgcctggacttccatccccggtcatcttctggatgagcagctccatggagcccatcacccaagacaaacgtgtctctcagggccataacggagacctatacttctccaacgtgatgctgcaggacatgcagaccgactacagttgtaacgcccgcttccacttcacccacaccatccagcagaagaaccctttcaccctcaaggtcctcaccacccgaggagttgcagaaagaacaccaagcttcatgtatccccagggcaccgcgagcagccagatggtgcttcgtggcatggacctcctgctggaatgcatcgcctccggggtcccaacaccagacatcgcatggtacaagaaaggtggggacctcccatctgataaggccaagtttgagaactttaataaggccctgcgtatcacaaatgtctctgaggaagactccggggagtatttctgcctggcctccaacaagatgggcagcatccggcacacgatctcggtgagagtaaaggctgctccctactggctggacgaacccaagaaccttattctggctcctggcgaggatgggagactggtgtgtcgagccaatggaaaccccaaacccactgtccagtggatggtgaatggggaacctttgcaatcggcaccacctaacccaaaccgtgaggtggccggagacaccatcatcttccgggacacccagatcagcagcagggctgtgtaccagtgcaacacctccaacgagcatggctacctgctggccaacgcctttgtcagtgtgctggatgtgccgcctcggatgctgtcgccccggaaccagctcattcgagtgattctttacaaccggacgcggctggactgccctttctttgggtctcccatccccacactgcgatggtttaagaatgggcaaggaagcaacctggatggtggcaactaccatgtttatgagaacggcagtctggaaattaagatgatccgcaaagaggaccagggcatctacacctgtgtcgccaccaacatcctgggcaaagctgaaaaccaagtccgcctggaggtcaaagaccccaccaggatctaccggatgcccgaggaccaggtggccagaaggggcaccacggtgcagctggagtgtcgggtgaagcacgacccctccctgaaactcaccgtctcctggctgaaggatgacgagccgctctatattggaaacaggatgaagaaggaagacgactccctgaccatctttggggtggcagagcgggaccagggcagttacacgtgtgtcgccagcaccgagctagaccaagacctggccaaggcctacctcaccgtgctagctgatcaggccactccaactaaccgtttggctgccctgcccaaaggacggccagaccggccccgggacctggagctgaccgacctggccgagaggagcgtgcggctgacctggatccccggggatgctaacaacagccccatcacagactacgtcgtccagtttgaagaagaccagttccaacctggggtctggcatgaccattccaagtaccccggcagcgttaactcagccgtcctccggctgtccccgtatgtcaactaccagttccgtgtcattgccatcaacgaggttgggagcagccaccccagcctcccatccgagcgctaccgaaccagtggagcaccccccgagtccaatcctggtgacgtgaagggagaggggaccagaaagaacaacatggagatcacgtggacgcccatgaatgccacctcggcctttggccccaacctgcgctacattgtcaagtggaggcggagagagactcgagaggcctggaacaacgtcacagtgtggggctctcgctacgtggtggggcagaccccagtctacgtgccctatgagatccgagtccaggctgaaaatgacttcgggaagggccctgagccagagtccgtcatcggttactccggagaagattatcccagggctgcgcccactgaagttaaagtccgagtcatgaacagcacagccatcagccttcagtggaaccgcgtctactccgacacggtccagggccagctcagagagtaccgagcctactactggagggagagcagcttgctgaagaacctgtgggtgtctcagaagagacagcaagccagcttccctggtgaccgcctccgtggcgtggtgtcccgcctcttcccctacagtaactacaagctggagatggttgtggtcaatgggagaggtgatgggcctcgcagtgagaccaaggagttcaccaccccggaaggagtacccagtgcccctaggcgtttccgagtccggcagcccaacctggagacaatcaacctggaatgggatcatcctgagcatccaaatgggatcatgattggatacactctcaaatatgtggcctttaacgggaccaaagtaggaaagcagatagtggaaaacttctctcccaatcagaccaagttcacggtgcaaagaacggaccccgtgtcacgctaccgctttaccctcagcgccaggacgcaggtgggctctggggaagccgtcacagaggagtcaccagcacccccgaatgaagctactccaaccgcagctcctcccacattgcccccgactaccgtgggtgcgacgggcgctgtgagcagtaccgatgctactgccattgctgccaccaccgaagccacaacagtccccatcatcccaactgtcgcacctaccaccatcgccaccaccaccaccgtcgccacaactactacaaccactgctgccgccaccaccaccacggagagtcctcccaccaccacctccgggactaagatacacgaatccgcccctgatgagcagtccatatggaacgtcacggtgctccccaacagtaaatgggccaacatcacctggaagcacaatttcgggcccggaactgactttgtggttgagtacatcgacagcaaccatacgaaaaaaactgtcccagttaaggcccaggctcagcctatacagctgacagacctctatcccgggatgacatacacgttgcgggtttattcccgggacaacgagggcatcagcagtaccgtcatcacctttatgaccagtacagcttacaccaacaaccaagcggacatcgccacccagggctggttcattgggcttatgtgcgccatcgccctcctggtgctgatcctgctcatcgtctgtttcatcaagaggagtcgcggcggcaagtacccagtacgagaaaagaaggatgttccccttggccctgaagaccccaaggaagaggatggctcatttgactatagtgatgaggacaacaagcccctgcagggcagtcagacatctctggacggcaccatcaagcagcaggagagtgacgacagcctggtggactatggcgagggtggcgagggtcagttcaatgaagacggctccttcatcggccagtacacggtcaaaaaggacaaggaggaaacagagggcaacgaaagctcagaggccacgtcacctgtcaatgctatctactctctggcctaacggagcccacccaggcacagccaccactttgcaagtgggaggaggggagaaggggagacaaaaccactgcagacctaccacgaagccaccaccaccttcagtaacaagggtacgatatgggggtctgccaagctgtgaggaccagtagccaccaagccacccacaagccccctcccaatgaccccccttcagccccgggtgccaccagtgtgggagagctggagccgtggctgagctcagctggagggagcctggccccttgcccggtctcgcagccaccccgagcgttccaccacactgtccgcccttggcctcggcacacgctcaccttttctgttggttacgggacttctcattgtcttaatttcgctttgtgcatcttcccctccagacccaatgtctctgttttcttttccttttgaaaaagagtccctggaaaagaaagaataagtggattctcccccaggagaatcctttttgcaaagataggcaaaaaggattgaatccataccagaacacgtagacaggctgtaatattcaaaccacctctgggccaatgcatttccaaaggatgcctttctcgccatatgcctcccctggcccccagcccctctgcctcggccttgtcagttgctgagctgggcttggctcctttctggaaaatgacagtatttttggcagggagaaggtgcgcaggcctccttgctgctctctggtttggttgggaggtgtgtttacctcttgctcctcattcctcccctgcccttttctctggaatatctaagatgtgagctgcattgactctgaagacgtttgaggaacaggagtgggcactgatagaaaggacttcaacgccagtgactgtgtacctccagcagaagaaaatcaggtgtctggtcttgggggcactgtgctcacttctagagagaagaaaaaggctgggtttggacttcatgcctcctcactggtgaaacccaggatgtagatagagggccacacccaccctgtccagagtagagggcacctgtccacgtggccagggcccatgctgccaccctcgaggagatggaaccctgtgatgcaaaagctttgctggtgtgtttggggcataaggcactgctccccttccatctctagcagatatcatcttctcagccaattctgtaggacactgaggctcttgtttgacatggtgtgtggatggggacttgccccaagactgagcaggtctgccctttcattggggtgtatacatatcaggggaccctgaggtggcaccgtactcagtgttgtgatgcccccacctagggaggactcaatgctctttgtatgccttatgcagcgctgatctgtccctggagttcccaggttcccagctccccccctgcaagccttgaagcctccagcaacgtctatctccaggagagcagggcagcctatgcaagtgttccggcaggaccagaagtggccactcaacacacgtcctcaccagtcaccccaaatggagacactcgcagacctgcagttctcagaccgaaggtgctgccttcatcctccccacctaatgcatttttgaaaccaaaggtacctagcctcagagacagagaaggagagggggagatcttgagtctaagaggaaccctttagctgtttctgcagctgaggtcagtttcaggagggtgaagctgatccccaggaatggatcagctgccatgggcacagcctccgatttgagcctctccggctgccagccagggggcctgggccagaccagggctctgtccttccgtgactttattaaagcaacatttgccacatgtttaagccgcaaaggtattagcaatgcttgcatcattaataatcattcagttgaaggtcaagcccatagacacacactctctgctggtaagaaaccatagcccagaactgagccaataaggttgtttgaacctgagagtgtgtaatggtcatttgggccaagcctcagctagggctgctgcctggacgcctgaggggcagcttatcacagtgcaaggggacagggtaaacagcagggggtggggtgtgagcttggagggcccctcccctggatttcctccaacacctgcttggatactaggcccactgtccctgaagggaatgtcagggaagtgtgcctgtgagctgaattaaaggactggcctttccagaaaacgctttggatctgagcagagtagtcagtttctcagacactcattccatactgcaccgtacatgccagcgtacccattgcaccgaaagcaggcccttagggcaggaagggacgatgagcaagtctgccacaccacctggtgactgggaagggctgcttctctcgtaagggtcttggggagaagtaagcccgcagcctgcctctgcacctcgttccagtgtcctgccaggctctgtactgtcctttgtgtatgaagaaaatgctgttagccctctctcaggctgctgttctgtgggtgctgagagctgccccccatcaccacgccatcacacccctctgagcagaagcaaatctgaggctgaagaattaagttttccccaagcaaggaaggcaggtggtcagagagatcaaacgctgaggcgtggggattgcaggattcaggaggcagcccctttggggaagaggagggtgcattttccatggagcccatgtcagagtccactccagctcagcaggaaagtggaattgcccagtactgcctgccagctgggtctcccaagcaactaccccaagacataccaacagtgaagccaggacagcaccatgccatcggcgctccagtctgtctggctgggaggaaagtgctgggcatcttacagtaactctagaagttcctttgactaggctgcaatcccacctatatgctcagccctaagagctgtggtttcctgtgctctcatttgtccattcattcattcattcattcattcagcaaataatctgaaatccagtctgaactaaggcctgagctgtggataccatggcgcgtgagttagatgtggtccctgccctcatggggctgacagtcctaaaatcaagtgctaggacacagtggccattgagctgggagcattcttccctctaccgcttaagccactgatggctgcgagcttgaagagagggattctgagggagagcttggtccatctggtcaccaaggctgggcgggacagagcagtcaagaaccacggtgtggcttgagaaacagtcctgcttcctgagcctctttgctctgcctcttggggcaagctccttaacctgtctgtatttttatgcctctgtctcccattcagttcctccttgaatacctctttctacagagaggcacgggctcccctgaaggattgtcgaggccagggttcgggaagtacactgccatcggtcaggggacagctgcctcccaccttgcctgggtgatggtgaatgggactcatcttttcctgccttgcttttgaggagatggttgaatttaagctaacaggaaagccaaaccagcaccctcctttgtgctctgagaggttggagacatctggtccaccccattgcccctgcccctggcaagccctgaagtcgggagaggtgaccacaggtctgaaaatcagccagtgccaacattgcttgccctgcaaggtgcaactgagcccacatagcgcattcatagtttccctgaccacagccttgggaagacggtggaaacccgaggatgtgtgggtttcccagctaacggacaagctcccctgccacacccagtgcccacgcatgctcacatacatacagcagaccacaaccctgttgccaagcagtgcttccaagggatagcgatccagattccaacattgtcttggagagggttagtccacatccaagttgcgtgagataagatgcaaagggctctgtgtggatgaggaacgcaccttagaggagtgggaaaggccaccagggttgggccctgtttaggtaattcctgttggcagcacctagagagagcatctgagctgaaggagtgggaaactttgcccaagcaatggcacgggcagcgggctctttctggcgccctgtgctggagcagggccaagtcttagggcatcacaaacagcccatttgatggagggagcagggacatagcacatttttgtctgtctttgtgaggctgctttgctaactctctgaggagaggaagcctctcgggctttccgtcggctggggctagtgccagagaatcccttctcagtggccagcaggttcctgggaggccggcacaaggcaccgctccccactcatgacaccttggtgcagagtgacctcctgcccagtcaccactccggccagccccagccaaacacacaaaagcccatggttgcggttgcatctacaccgttagttggcaaaggatcctgcttgagctctgcgtggtggccaaggagtagcatggaggagggccctgattttaaaaaggaaaaatagagaggcctcaaaacaatgaaacaaagagcttgatatgtcaagaggagaccaaggccctgggaggcataggcaagccgggcagagtcagaccagtgccctcccttgaccatctcctagcattccttaacctagacaggggctaccccatgtgagtccaagccagactttgtggctgtccccagcctgcacagcccaagcccagggaagtgtcctttctttcccttccttactaataatgggccttcctgagacacattcagagaaggatcagagagaaaggagaaccatccaggagagccacaagcgtccaccaaacagtgtctcaggcctcacctgaagctgctgttcctcctatcagcacactagtattaaatgggtgttccataatgaggagaatggaaataggtacaaggcatctagcttaggacagaatcggatttcggcatgtgaaggaatcccagagctgatctcattgaaatgatctatcgtacagacaaggatatgcaaatccacagaagtgaagggatttttgctcaagatcacatagctggtaaactaaggtaaggttagggcttgaacttgggccttctgactccttgtccagtcagtgttctttcatctcaccacagctgcctcctttgaaacagaggtattaagatctgtccttctggttcaccctctcatacctctttactgcgtctcccacatcccccacatgcctcccaaaatgaaagacaaacaggattgtttctgagaccaagatcagtctgtctgtgatcagcctgtgtgtggttcacccagtcatgcaattaagggcagatctgggccagtggaataggatagctgattggtgtttgttactgtgaaccctagaccgtaccccgtagaatggtgtctcttgctttgtaacacatcgggccttcagtgtgctgtattcctcagaagtgagggcatctcggtccattctgcccatggccacagggtgcagagaggcagcagggcccatgcaagctgccaccctgggatttgctgggctggagttcaacagatgtaaagacttcagtgaagcaataaacacaaaactctgggagaagatatccagaattttgtacattactctgtttctttttcaaaaatgaggcagatcagatgcccctgagctgcccctttttttctgattcccaactgcaatgtcctcagtcagtgttgtccctctgcccggctccccagctctttgccaacctcttcacactccccttgagctgagcatcagtcgcctgtgacgtggccaccttctgtcctgctcccactcccgacccatgctggaccccggaggacctcctgccccgcccccaccacacacccatatcccccaccattccaatttgttctttcccgtggggaattttttttcccagcgtctccatcccttcctacatatccacacacacacaaattggtctgatcttttttccattggttaaacatttaactccatgccagaccttgttttaacccctctcacatcatgttctttccttttttgcgagttattttgcattaaccaactttgtcagtgacagatgcgtatctgagggtgtcacacacgaccttcagcagggaagacttctgggccatggagggccgtctaatacatggacttataaactgactgcatgagcaatgaaaaggccaaattattctgaattttttttgaatcactgtaaaaaaactgatttcttttgtatagagaacactaaacgtataataaaagttgttcaaaatgga

SEQ ID NO: 246 - DNA, 10216 bp, Homo sapiens
ctgagtgctgtccaggaggcccagttaaagcggctcgaggtgacaagaccccgagtgctggggagcagggagcagggccaggtgccgaggatggccaggcagccaccgccgccctgggtccatgcagccttcctcctctgcctcctcagtcttggcggagccatcgaaattcctatggatccaagcattcagaatgagctgacgcagccgccaaccatcaccaagcagtcagcgaaggatcacatcgtggacccccgtgataacatcctgattgagtgtgaagcaaaagggaaccctgcccccagcttccactggacacgaaacagcagattcttcaacatcgccaaggacccccgggtgtccatgaggaggaggtctgggaccctggtgattgacttccgcagtggcgggcggccggaggaatatgagggggaatatcagtgcttcgcccgcaacaaatttggcacggccctgtccaataggatccgcctgcaggtgtctaaatctcctctgtggcccaaggaaaacctagaccctgtcgtggtccaagagggcgctcctttgacgctccagtgcaaccccccgcctggacttccatccccggtcatcttctggatgagcagctccatggagcccatcacccaagacaaacgtgtctctcagggccataacggagacctatacttctccaacgtgatgctgcaggacatgcagaccgactacagttgtaacgcccgcttccacttcacccacaccatccagcagaagaaccctttcaccctcaaggtcctcaccaaccacccttataatgactcgtccttaagaaaccaccctgacatgtacagtgcccgaggagttgcagaaagaacaccaagcttcatgtatccccagggcaccgcgagcagccagatggtgcttcgtggcatggacctcctgctggaatgcatcgcctccggggtcccaacaccagacatcgcatggtacaagaaaggtggggacctcccatctgataaggccaagtttgagaactttaataaggccctgcgtatcacaaatgtctctgaggaagactccggggagtatttctgcctggcctccaacaagatgggcagcatccggcacacgatctcggtgagagtaaaggctgctccctactggctggacgaacccaagaaccttattctggctcctggcgaggatgggagactggtgtgtcgagccaatggaaaccccaaacccactgtccagtggatggtgaatggggaacctttgcaatcggcaccacctaacccaaaccgtgaggtggccggagacaccatcatcttccgggacacccagatcagcagcagggctgtgtaccagtgcaacacctccaacgagcatggctacctgctggccaacgcctttgtcagtgtgctggatgtgccgcctcggatgctgtcgccccggaaccagctcattcgagtgattctttacaaccggacgcggctggactgccctttctttgggtctcccatccccacactgcgatggtttaagaatgggcaaggaagcaacctggatggtggcaactaccatgtttatgagaacggcagtctggaaattaagatgatccgcaaagaggaccagggcatctacacctgtgtcgccaccaacatcctgggcaaagctgaaaaccaagtccgcctggaggtcaaagaccccaccaggatctaccggatgcccgaggaccaggtggccagaaggggcaccacggtgcagctggagtgtcgggtgaagcacgacccctccctgaaactcaccgtctcctggctgaaggatgacgagccgctctatattggaaacaggatgaagaaggaagacgactccctgaccatctttggggtggcagagcgggaccagggcagttacacgtgtgtcgccagcaccgagctagaccaagacctggccaaggcctacctcaccgtgctagctgatcaggccactccaactaaccgtttggctgccctgcccaaaggacggccagaccggccccgggacctggagctgaccgacctggccgagaggagcgtgcggctgacctggatccccggggatgctaacaacagccccatcacagactacgtcgtccagtttgaagaagaccagttccaacctggggtctggcatgaccattccaagtaccccggcagcgttaactcagccgtcctccggctgtccccgtatgtcaactaccagttccgtgtcattgccatcaacgaggttgggagcagccaccccagcctcccatccgagcgctaccgaaccagtggagcaccccccgagtccaatcctggtgacgtgaagggagaggggaccagaaagaacaacatggagatcacgtggacgcccatgaatgccacctcggcctttggccccaacctgcgctacattgtcaagtggaggcggagagagactcgagaggcctggaacaacgtcacagtgtggggctctcgctacgtggtggggcagaccccagtctacgtgccctatgagatccgagtccaggctgaaaatgacttcgggaagggccctgagccagagtccgtcatcggttactccggagaagattatcccagggctgcgcccactgaagttaaagtccgagtcatgaacagcacagccatcagccttcagtggaaccgcgtctactccgacacggtccagggccagctcagagagtaccgagcctactactggagggagagcagcttgctgaagaacctgtgggtgtctcagaagagacagcaagccagcttccctggtgaccgcctccgtggcgtggtgtcccgcctcttcccctacagtaactacaagctggagatggttgtggtcaatgggagaggtgatgggcctcgcagtgagaccaaggagttcaccaccccggaaggagtacccagtgcccctaggcgtttccgagtccggcagcccaacctggagacaatcaacctggaatgggatcatcctgagcatccaaatgggatcatgattggatacactctcaaatatgtggcctttaacgggaccaaagtaggaaagcagatagtggaaaacttctctcccaatcagaccaagttcacggtgcaaagaacggaccccgtgtcacgctaccgctttaccctcagcgccaggacgcaggtgggctctggggaagccgtcacagaggagtcaccagcacccccgaatgaagcccctgatgagcagtccatatggaacgtcacggtgctccccaacagtaaatgggccaacatcacctggaagcacaatttcgggcccggaactgactttgtggttgagtacatcgacagcaaccatacgaaaaaaactgtcccagttaaggcccaggctcagcctatacagctgacagacctctatcccgggatgacatacacgttgcgggtttattcccgggacaacgagggcatcagcagtaccgtcatcacctttatgaccagtacagcttacaccaacaaccaagcggacatcgccacccagggctggttcattgggcttatgtgcgccatcgccctcctggtgctgatcctgctcatcgtctgtttcatcaagaggagtcgcggcggcaagtacccagtacgagaaaagaaggatgttccccttggccctgaagaccccaaggaagaggatggctcatttgactatagtgatgaggacaacaagcccctgcagggcagtcagacatctctggacggcaccatcaagcagcaggagagtgacgacagcctggtggactatggcgagggtggcgagggtcagttcaatgaagacggctccttcatcggccagtacacggtcaaaaaggacaaggaggaaacagagggcaacgaaagctcagaggccacgtcacctgtcaatgctatctactctctggcctaacggagcccacccaggcacagccaccactttgcaagtgggaggaggggagaaggggagacaaaaccactgcagacctaccacgaagccaccaccaccttcagtaacaagggtacgatatgggggtctgccaagctgtgaggaccagtagccaccaagccacccacaagccccctcccaatgaccccccttcagccccgggtgccaccagtgtgggagagctggagccgtggctgagctcagctggagggagcctggccccttgcccggtctcgcagccaccccgagcgttccaccacactgtccgcccttggcctcggcacacgctcaccttttctgttggttacgggacttctcattgtcttaatttcgctttgtgcatcttcccctccagacccaatgtctctgttttcttttccttttgaaaaagagtccctggaaaagaaagaataagtggattctcccccaggagaatcctttttgcaaagataggcaaaaaggattgaatccataccagaacacgtagacaggctgtaatattcaaaccacctctgggccaatgcatttccaaaggatgcctttctcgccatatgcctcccctggcccccagcccctctgcctcggccttgtcagttgctgagctgggcttggctcctttctggaaaatgacagtatttttggcagggagaaggtgcgcaggcctccttgctgctctctggtttggttgggaggtgtgtttacctcttgctcctcattcctcccctgcccttttctctggaatatctaagatgtgagctgcattgactctgaagacgtttgaggaacaggagtgggcactgatagaaaggacttcaacgccagtgactgtgtacctccagcagaagaaaatcaggtgtctggtcttgggggcactgtgctcacttctagagagaagaaaaaggctgggtttggacttcatgcctcctcactggtgaaacccaggatgtagatagagggccacacccaccctgtccagagtagagggcacctgtccacgtggccagggcccatgctgccaccctcgaggagatggaaccctgtgatgcaaaagctttgctggtgtgtttggggcataaggcactgctccccttccatctctagcagatatcatcttctcagccaattctgtaggacactgaggctcttgtttgacatggtgtgtggatggggacttgccccaagactgagcaggtctgccctttcattggggtgtatacatatcaggggaccctgaggtggcaccgtactcagtgttgtgatgcccccacctagggaggactcaatgctctttgtatgccttatgcagcgctgatctgtccctggagttcccaggttcccagctccccccctgcaagccttgaagcctccagcaacgtctatctccaggagagcagggcagcctatgcaagtgttccggcaggaccagaagtggccactcaacacacgtcctcaccagtcaccccaaatggagacactcgcagacctgcagttctcagaccgaaggtgctgccttcatcctccccacctaatgcatttttgaaaccaaaggtacctagcctcagagacagagaaggagagggggagatcttgagtctaagaggaaccctttagctgtttctgcagctgaggtcagtttcaggagggtgaagctgatccccaggaatggatcagctgccatgggcacagcctccgatttgagcctctccggctgccagccagggggcctgggccagaccagggctctgtccttccgtgactttattaaagcaacatttgccacatgtttaagccgcaaaggtattagcaatgcttgcatcattaataatcattcagttgaaggtcaagcccatagacacacactctctgctggtaagaaaccatagcccagaactgagccaataaggttgtttgaacctgagagtgtgtaatggtcatttgggccaagcctcagctagggctgctgcctggacgcctgaggggcagcttatcacagtgcaaggggacagggtaaacagcagggggtggggtgtgagcttggagggcccctcccctggatttcctccaacacctgcttggatactaggcccactgtccctgaagggaatgtcagggaagtgtgcctgtgagctgaattaaaggactggcctttccagaaaacgctttggatctgagcagagtagtcagtttctcagacactcattccatactgcaccgtacatgccagcgtacccattgcaccgaaagcaggcccttagggcaggaagggacgatgagcaagtctgccacaccacctggtgactgggaagggctgcttctctcgtaagggtcttggggagaagtaagcccgcagcctgcctctgcacctcgttccagtgtcctgccaggctctgtactgtcctttgtgtatgaagaaaatgctgttagccctctctcaggctgctgttctgtgggtgctgagagctgccccccatcaccacgccatcacacccctctgagcagaagcaaatctgaggctgaagaattaagttttccccaagcaaggaaggcaggtggtcagagagatcaaacgctgaggcgtggggattgcaggattcaggaggcagcccctttggggaagaggagggtgcattttccatggagcccatgtcagagtccactccagctcagcaggaaagtggaattgcccagtactgcctgccagctgggtctcccaagcaactaccccaagacataccaacagtgaagccaggacagcaccatgccatcggcgctccagtctgtctggctgggaggaaagtgctgggcatcttacagtaactctagaagttcctttgactaggctgcaatcccacctatatgctcagccctaagagctgtggtttcctgtgctctcatttgtccattcattcattcattcattcattcagcaaataatctgaaatccagtctgaactaaggcctgagctgtggataccatggcgcgtgagttagatgtggtccctgccctcatggggctgacagtcctaaaatcaagtgctaggacacagtggccattgagctgggagcattcttccctctaccgcttaagccactgatggctgcgagcttgaagagagggattctgagggagagcttggtccatctggtcaccaaggctgggcgggacagagcagtcaagaaccacggtgtggcttgagaaacagtcctgcttcctgagcctctttgctctgcctcttggggcaagctccttaacctgtctgtatttttatgcctctgtctcccattcagttcctccttgaatacctctttctacagagaggcacgggctcccctgaaggattgtcgaggccagggttcgggaagtacactgccatcggtcaggggacagctgcctcccaccttgcctgggtgatggtgaatgggactcatcttttcctgccttgcttttgaggagatggttgaatttaagctaacaggaaagccaaaccagcaccctcctttgtgctctgagaggttggagacatctggtccaccccattgcccctgcccctggcaagccctgaagtcgggagaggtgaccacaggtctgaaaatcagccagtgccaacattgcttgccctgcaaggtgcaactgagcccacatagcgcattcatagtttccctgaccacagccttgggaagacggtggaaacccgaggatgtgtgggtttcccagctaacggacaagctcccctgccacacccagtgcccacgcatgctcacatacatacagcagaccacaaccctgttgccaagcagtgcttccaagggatagcgatccagattccaacattgtcttggagagggttagtccacatccaagttgcgtgagataagatgcaaagggctctgtgtggatgaggaacgcaccttagaggagtgggaaaggccaccagggttgggccctgtttaggtaattcctgttggcagcacctagagagagcatctgagctgaaggagtgggaaactttgcccaagcaatggcacgggcagcgggctctttctggcgccctgtgctggagcagggccaagtcttagggcatcacaaacagcccatttgatggagggagcagggacatagcacatttttgtctgtctttgtgaggctgctttgctaactctctgaggagaggaagcctctcgggctttccgtcggctggggctagtgccagagaatcccttctcagtggccagcaggttcctgggaggccggcacaaggcaccgctccccactcatgacaccttggtgcagagtgacctcctgcccagtcaccactccggccagccccagccaaacacacaaaagcccatggttgcggttgcatctacaccgttagttggcaaaggatcctgcttgagctctgcgtggtggccaaggagtagcatggaggagggccctgattttaaaaaggaaaaatagagaggcctcaaaacaatgaaacaaagagcttgatatgtcaagaggagaccaaggccctgggaggcataggcaagccgggcagagtcagaccagtgccctcccttgaccatctcctagcattccttaacctagacaggggctaccccatgtgagtccaagccagactttgtggctgtccccagcctgcacagcccaagcccagggaagtgtcctttctttcccttccttactaataatgggccttcctgagacacattcagagaaggatcagagagaaaggagaaccatccaggagagccacaagcgtccaccaaacagtgtctcaggcctcacctgaagctgctgttcctcctatcagcacactagtattaaatgggtgttccataatgaggagaatggaaataggtacaaggcatctagcttaggacagaatcggatttcggcatgtgaaggaatcccagagctgatctcattgaaatgatctatcgtacagacaaggatatgcaaatccacagaagtgaagggatttttgctcaagatcacatagctggtaaactaaggtaaggttagggcttgaacttgggccttctgactccttgtccagtcagtgttctttcatctcaccacagctgcctcctttgaaacagaggtattaagatctgtccttctggttcaccctctcatacctctttactgcgtctcccacatcccccacatgcctcccaaaatgaaagacaaacaggattgtttctgagaccaagatcagtctgtctgtgatcagcctgtgtgtggttcacccagtcatgcaattaagggcagatctgggccagtggaataggatagctgattggtgtttgttactgtgaaccctagaccgtaccccgtagaatggtgtctcttgctttgtaacacatcgggccttcagtgtgctgtattcctcagaagtgagggcatctcggtccattctgcccatggccacagggtgcagagaggcagcagggcccatgcaagctgccaccctgggatttgctgggctggagttcaacagatgtaaagacttcagtgaagcaataaacacaaaactctgggagaagatatccagaattttgtacattactctgtttctttttcaaaaatgaggcagatcagatgcccctgagctgcccctttttttctgattcccaactgcaatgtcctcagtcagtgttgtccctctgcccggctccccagctctttgccaacctcttcacactccccttgagctgagcatcagtcgcctgtgacgtggccaccttctgtcctgctcccactcccgacccatgctggaccccggaggacctcctgccccgcccccaccacacacccatatcccccaccattccaatttgttctttcccgtggggaattttttttcccagcgtctccatcccttcctacatatccacacacacacaaattggtctgatcttttttccattggttaaacatttaactccatgccagaccttgttttaacccctctcacatcatgttctttccttttttgcgagttattttgcattaaccaactttgtcagtgacagatgcgtatctgagggtgtcacacacgaccttcagcagggaagacttctgggccatggagggccgtctaatacatggacttataaactgactgcatgagcaatgaaaaggccaaattattctgaattttttttgaatcactgtaaaaaaactgatttcttttgtatagagaacactaaacgtataataaaagttgttcaaaatgga

SEQ ID NO: 247 - DNA, 9916 bp, Homo sapiens
ctgagtgctgtccaggaggcccagttaaagcggctcgaggtgacaagaccccgagtgctggggagcagggagcagggccaggtgccgaggatggccaggcagccaccgccgccctgggtccatgcagccttcctcctctgcctcctcagtcttggcggagccatcgaaattcctatggatccaagcattcagaatgagctgacgcagccgccaaccatcaccaagcagtcagcgaaggatcacatcgtggacccccgtgataacatcctgattgagtgtgaagcaaaagggaaccctgcccccagcttccactggacacgaaacagcagattcttcaacatcgccaaggacccccgggtgtccatgaggaggaggtctgggaccctggtgattgacttccgcagtggcgggcggccggaggaatatgagggggaatatcagtgcttcgcccgcaacaaatttggcacggccctgtccaataggatccgcctgcaggtgtctaaatctcctctgtggcccaaggaaaacctagaccctgtcgtggtccaagagggcgctcctttgacgctccagtgcaaccccccgcctggacttccatccccggtcatcttctggatgagcagctccatggagcccatcacccaagacaaacgtgtctctcagggccataacggagacctatacttctccaacgtgatgctgcaggacatgcagaccgactacagttgtaacgcccgcttccacttcacccacaccatccagcagaagaaccctttcaccctcaaggtcctcaccaaccacccttataatgactcgtccttaagaaaccaccctgacatgtacagtgcccgaggagttgcagaaagaacaccaagcttcatgtatccccagggcaccgcgagcagccagatggtgcttcgtggcatggacctcctgctggaatgcatcgcctccggggtcccaacaccagacatcgcatggtacaagaaaggtggggacctcccatctgataaggccaagtttgagaactttaataaggccctgcgtatcacaaatgtctctgaggaagactccggggagtatttctgcctggcctccaacaagatgggcagcatccggcacacgatctcggtgagagtaaaggctgctccctactggctggacgaacccaagaaccttattctggctcctggcgaggatgggagactggtgtgtcgagccaatggaaaccccaaacccactgtccagtggatggtgaatggggaacctttgcaatcggcaccacctaacccaaaccgtgaggtggccggagacaccatcatcttccgggacacccagatcagcagcagggctgtgtaccagtgcaacacctccaacgagcatggctacctgctggccaacgcctttgtcagtgtgctggatgtgccgcctcggatgctgtcgccccggaaccagctcattcgagtgattctttacaaccggacgcggctggactgccctttctttgggtctcccatccccacactgcgatggtttaagaatgggcaaggaagcaacctggatggtggcaactaccatgtttatgagaacggcagtctggaaattaagatgatccgcaaagaggaccagggcatctacacctgtgtcgccaccaacatcctgggcaaagctgaaaaccaagtccgcctggaggtcaaagaccccaccaggatctaccggatgcccgaggaccaggtggccagaaggggcaccacggtgcagctggagtgtcgggtgaagcacgacccctccctgaaactcaccgtctcctggctgaaggatgacgagccgctctatattggaaacaggatgaagaaggaagacgactccctgaccatctttggggtggcagagcgggaccagggcagttacacgtgtgtcgccagcaccgagctagaccaagacctggccaaggcctacctcaccgtgctaggacggccagaccggccccgggacctggagctgaccgacctggccgagaggagcgtgcggctgacctggatccccggggatgctaacaacagccccatcacagactacgtcgtccagtttgaagaagaccagttccaacctggggtctggcatgaccattccaagtaccccggcagcgttaactcagccgtcctccggctgtccccgtatgtcaactaccagttccgtgtcattgccatcaacgaggttgggagcagccaccccagcctcccatccgagcgctaccgaaccagtggagcaccccccgagtccaatcctggtgacgtgaagggagaggggaccagaaagaacaacatggagatcacgtggacgcccatgaatgccacctcggcctttggccccaacctgcgctacattgtcaagtggaggcggagagagactcgagaggcctggaacaacgtcacagtgtggggctctcgctacgtggtggggcagaccccagtctacgtgccctatgagatccgagtccaggctgaaaatgacttcgggaagggccctgagccagagtccgtcatcggttactccggagaagattatcccagggctgcgcccactgaagttaaagtccgagtcatgaacagcacagccatcagccttcagtggaaccgcgtctactccgacacggtccagggccagctcagagagtaccgagcctactactggagggagagcagcttgctgaagaacctgtgggtgtctcagaagagacagcaagccagcttccctggtgaccgcctccgtggcgtggtgtcccgcctcttcccctacagtaactacaagctggagatggttgtggtcaatgggagaggtgatgggcctcgcagtgagaccaaggagttcaccaccccggaaggagtacccagtgcccctaggcgtttccgagtccggcagcccaacctggagacaatcaacctggaatgggatcatcctgagcatccaaatgggatcatgattggatacactctcaaatatgtggcctttaacgggaccaaagtaggaaagcagatagtggaaaacttctctcccaatcagaccaagttcacggtgcaaagaacggaccccgtgtcacgctaccgctttaccctcagcgccaggacgcaggtgggctctggggaagccgtcacagaggagtcaccagcacccccgaatgaagctactccaaccgcagcttacaccaacaaccaagcggacatcgccacccagggctggttcattgggcttatgtgcgccatcgccctcctggtgctgatcctgctcatcgtctgtttcatcaagaggagtcgcggcggcaagtacccagtacgagaaaagaaggatgttccccttggccctgaagaccccaaggaagaggatggctcatttgactatagtgatgaggacaacaagcccctgcagggcagtcagacatctctggacggcaccatcaagcagcaggagagtgacgacagcctggtggactatggcgagggtggcgagggtcagttcaatgaagacggctccttcatcggccagtacacggtcaaaaaggacaaggaggaaacagagggcaacgaaagctcagaggccacgtcacctgtcaatgctatctactctctggcctaacggagcccacccaggcacagccaccactttgcaagtgggaggaggggagaaggggagacaaaaccactgcagacctaccacgaagccaccaccaccttcagtaacaagggtacgatatgggggtctgccaagctgtgaggaccagtagccaccaagccacccacaagccccctcccaatgaccccccttcagccccgggtgccaccagtgtgggagagctggagccgtggctgagctcagctggagggagcctggccccttgcccggtctcgcagccaccccgagcgttccaccacactgtccgcccttggcctcggcacacgctcaccttttctgttggttacgggacttctcattgtcttaatttcgctttgtgcatcttcccctccagacccaatgtctctgttttcttttccttttgaaaaagagtccctggaaaagaaagaataagtggattctcccccaggagaatcctttttgcaaagataggcaaaaaggattgaatccataccagaacacgtagacaggctgtaatattcaaaccacctctgggccaatgcatttccaaaggatgcctttctcgccatatgcctcccctggcccccagcccctctgcctcggccttgtcagttgctgagctgggcttggctcctttctggaaaatgacagtatttttggcagggagaaggtgcgcaggcctccttgctgctctctggtttggttgggaggtgtgtttacctcttgctcctcattcctcccctgcccttttctctggaatatctaagatgtgagctgcattgactctgaagacgtttgaggaacaggagtgggcactgatagaaaggacttcaacgccagtgactgtgtacctccagcagaagaaaatcaggtgtctggtcttgggggcactgtgctcacttctagagagaagaaaaaggctgggtttggacttcatgcctcctcactggtgaaacccaggatgtagatagagggccacacccaccctgtccagagtagagggcacctgtccacgtggccagggcccatgctgccaccctcgaggagatggaaccctgtgatgcaaaagctttgctggtgtgtttggggcataaggcactgctccccttccatctctagcagatatcatcttctcagccaattctgtaggacactgaggctcttgtttgacatggtgtgtggatggggacttgccccaagactgagcaggtctgccctttcattggggtgtatacatatcaggggaccctgaggtggcaccgtactcagtgttgtgatgcccccacctagggaggactcaatgctctttgtatgccttatgcagcgctgatctgtccctggagttcccaggttcccagctccccccctgcaagccttgaagcctccagcaacgtctatctccaggagagcagggcagcctatgcaagtgttccggcaggaccagaagtggccactcaacacacgtcctcaccagtcaccccaaatggagacactcgcagacctgcagttctcagaccgaaggtgctgccttcatcctccccacctaatgcatttttgaaaccaaaggtacctagcctcagagacagagaaggagagggggagatcttgagtctaagaggaaccctttagctgtttctgcagctgaggtcagtttcaggagggtgaagctgatccccaggaatggatcagctgccatgggcacagcctccgatttgagcctctccggctgccagccagggggcctgggccagaccagggctctgtccttccgtgactttattaaagcaacatttgccacatgtttaagccgcaaaggtattagcaatgcttgcatcattaataatcattcagttgaaggtcaagcccatagacacacactctctgctggtaagaaaccatagcccagaactgagccaataaggttgtttgaacctgagagtgtgtaatggtcatttgggccaagcctcagctagggctgctgcctggacgcctgaggggcagcttatcacagtgcaaggggacagggtaaacagcagggggtggggtgtgagcttggagggcccctcccctggatttcctccaacacctgcttggatactaggcccactgtccctgaagggaatgtcagggaagtgtgcctgtgagctgaattaaaggactggcctttccagaaaacgctttggatctgagcagagtagtcagtttctcagacactcattccatactgcaccgtacatgccagcgtacccattgcaccgaaagcaggcccttagggcaggaagggacgatgagcaagtctgccacaccacctggtgactgggaagggctgcttctctcgtaagggtcttggggagaagtaagcccgcagcctgcctctgcacctcgttccagtgtcctgccaggctctgtactgtcctttgtgtatgaagaaaatgctgttagccctctctcaggctgctgttctgtgggtgctgagagctgccccccatcaccacgccatcacacccctctgagcagaagcaaatctgaggctgaagaattaagttttccccaagcaaggaaggcaggtggtcagagagatcaaacgctgaggcgtggggattgcaggattcaggaggcagcccctttggggaagaggagggtgcattttccatggagcccatgtcagagtccactccagctcagcaggaaagtggaattgcccagtactgcctgccagctgggtctcccaagcaactaccccaagacataccaacagtgaagccaggacagcaccatgccatcggcgctccagtctgtctggctgggaggaaagtgctgggcatcttacagtaactctagaagttcctttgactaggctgcaatcccacctatatgctcagccctaagagctgtggtttcctgtgctctcatttgtccattcattcattcattcattcattcagcaaataatctgaaatccagtctgaactaaggcctgagctgtggataccatggcgcgtgagttagatgtggtccctgccctcatggggctgacagtcctaaaatcaagtgctaggacacagtggccattgagctgggagcattcttccctctaccgcttaagccactgatggctgcgagcttgaagagagggattctgagggagagcttggtccatctggtcaccaaggctgggcgggacagagcagtcaagaaccacggtgtggcttgagaaacagtcctgcttcctgagcctctttgctctgcctcttggggcaagctccttaacctgtctgtatttttatgcctctgtctcccattcagttcctccttgaatacctctttctacagagaggcacgggctcccctgaaggattgtcgaggccagggttcgggaagtacactgccatcggtcaggggacagctgcctcccaccttgcctgggtgatggtgaatgggactcatcttttcctgccttgcttttgaggagatggttgaatttaagctaacaggaaagccaaaccagcaccctcctttgtgctctgagaggttggagacatctggtccaccccattgcccctgcccctggcaagccctgaagtcgggagaggtgaccacaggtctgaaaatcagccagtgccaacattgcttgccctgcaaggtgcaactgagcccacatagcgcattcatagtttccctgaccacagccttgggaagacggtggaaacccgaggatgtgtgggtttcccagctaacggacaagctcccctgccacacccagtgcccacgcatgctcacatacatacagcagaccacaaccctgttgccaagcagtgcttccaagggatagcgatccagattccaacattgtcttggagagggttagtccacatccaagttgcgtgagataagatgcaaagggctctgtgtggatgaggaacgcaccttagaggagtgggaaaggccaccagggttgggccctgtttaggtaattcctgttggcagcacctagagagagcatctgagctgaaggagtgggaaactttgcccaagcaatggcacgggcagcgggctctttctggcgccctgtgctggagcagggccaagtcttagggcatcacaaacagcccatttgatggagggagcagggacatagcacatttttgtctgtctttgtgaggctgctttgctaactctctgaggagaggaagcctctcgggctttccgtcggctggggctagtgccagagaatcccttctcagtggccagcaggttcctgggaggccggcacaaggcaccgctccccactcatgacaccttggtgcagagtgacctcctgcccagtcaccactccggccagccccagccaaacacacaaaagcccatggttgcggttgcatctacaccgttagttggcaaaggatcctgcttgagctctgcgtggtggccaaggagtagcatggaggagggccctgattttaaaaaggaaaaatagagaggcctcaaaacaatgaaacaaagagcttgatatgtcaagaggagaccaaggccctgggaggcataggcaagccgggcagagtcagaccagtgccctcccttgaccatctcctagcattccttaacctagacaggggctaccccatgtgagtccaagccagactttgtggctgtccccagcctgcacagcccaagcccagggaagtgtcctttctttcccttccttactaataatgggccttcctgagacacattcagagaaggatcagagagaaaggagaaccatccaggagagccacaagcgtccaccaaacagtgtctcaggcctcacctgaagctgctgttcctcctatcagcacactagtattaaatgggtgttccataatgaggagaatggaaataggtacaaggcatctagcttaggacagaatcggatttcggcatgtgaaggaatcccagagctgatctcattgaaatgatctatcgtacagacaaggatatgcaaatccacagaagtgaagggatttttgctcaagatcacatagctggtaaactaaggtaaggttagggcttgaacttgggccttctgactccttgtccagtcagtgttctttcatctcaccacagctgcctcctttgaaacagaggtattaagatctgtccttctggttcaccctctcatacctctttactgcgtctcccacatcccccacatgcctcccaaaatgaaagacaaacaggattgtttctgagaccaagatcagtctgtctgtgatcagcctgtgtgtggttcacccagtcatgcaattaagggcagatctgggccagtggaataggatagctgattggtgtttgttactgtgaaccctagaccgtaccccgtagaatggtgtctcttgctttgtaacacatcgggccttcagtgtgctgtattcctcagaagtgagggcatctcggtccattctgcccatggccacagggtgcagagaggcagcagggcccatgcaagctgccaccctgggatttgctgggctggagttcaacagatgtaaagacttcagtgaagcaataaacacaaaactctgggagaagatatccagaattttgtacattactctgtttctttttcaaaaatgaggcagatcagatgcccctgagctgcccctttttttctgattcccaactgcaatgtcctcagtcagtgttgtccctctgcccggctccccagctctttgccaacctcttcacactccccttgagctgagcatcagtcgcctgtgacgtggccaccttctgtcctgctcccactcccgacccatgctggaccccggaggacctcctgccccgcccccaccacacacccatatcccccaccattccaatttgttctttcccgtggggaattttttttcccagcgtctccatcccttcctacatatccacacacacacaaattggtctgatcttttttccattggttaaacatttaactccatgccagaccttgttttaacccctctcacatcatgttctttccttttttgcgagttattttgcattaaccaactttgtcagtgacagatgcgtatctgagggtgtcacacacgaccttcagcagggaagacttctgggccatggagggccgtctaatacatggacttataaactgactgcatgagcaatgaaaaggccaaattattctgaattttttttgaatcactgtaaaaaaactgatttcttttgtatagagaacactaaacgtataataaaagttgttcaaaatgga

SEQ ID NO: 248 - DNA, 9510 bp, Homo sapiens
gattccacccagggcagggctgctgtgttttctctgaggccaactttcagggaaaagaaggatcttgctgggattttgctcaggcctaagtctgccagctgggatggcctggggcctaagaaatgcctagcttccctccccacctgtccccatggagggagactgagaagacgctggatgaaccagaccatggctccttcaggagagaggttgattgacttatgtgcaatttgggacgctggagtttaccttccctccgcagcctggaacagagcctcctctggtgttgcaaggaagaggctgaatgaggcagagaagctgagtgctgtccaggaggcccagttaaagcggctcgaggtgacaagaccccgagtgctggggagcagggagcagggccaggtgccgaggatggccaggcagccaccgccgccctgggtccatgcagccttcctcctctgcctcctcagtcttggcggagccatcgaaattcctatggatctgacgcagccgccaaccatcaccaagcagtcagcgaaggatcacatcgtggacccccgtgataacatcctgattgagtgtgaagcaaaagggaaccctgcccccagcttccactggacacgaaacagcagattcttcaacatcgccaaggacccccgggtgtccatgaggaggaggtctgggaccctggtgattgacttccgcagtggcgggcggccggaggaatatgagggggaatatcagtgcttcgcccgcaacaaatttggcacggccctgtccaataggatccgcctgcaggtgtctaaatctcctctgtggcccaaggaaaacctagaccctgtcgtggtccaagagggcgctcctttgacgctccagtgcaaccccccgcctggacttccatccccggtcatcttctggatgagcagctccatggagcccatcacccaagacaaacgtgtctctcagggccataacggagacctatacttctccaacgtgatgctgcaggacatgcagaccgactacagttgtaacgcccgcttccacttcacccacaccatccagcagaagaaccctttcaccctcaaggtcctcaccaaccacccttataatgactcgtccttaagaaaccaccctgacatgtacagtgcccgaggagttgcagaaagaacaccaagcttcatgtatccccagggcaccgcgagcagccagatggtgcttcgtggcatggacctcctgctggaatgcatcgcctccggggtcccaacaccagacatcgcatggtacaagaaaggtggggacctcccatctgataaggccaagtttgagaactttaataaggccctgcgtatcacaaatgtctctgaggaagactccggggagtatttctgcctggcctccaacaagatgggcagcatccggcacacgatctcggtgagagtaaaggctgctccctactggctggacgaacccaagaaccttattctggctcctggcgaggatgggagactggtgtgtcgagccaatggaaaccccaaacccactgtccagtggatggtgaatggggaacctttgcaatcggcaccacctaacccaaaccgtgaggtggccggagacaccatcatcttccgggacacccagatcagcagcagggctgtgtaccagtgcaacacctccaacgagcatggctacctgctggccaacgcctttgtcagtgtgctggatgtgccgcctcggatgctgtcgccccggaaccagctcattcgagtgattctttacaaccggacgcggctggactgccctttctttgggtctcccatccccacactgcgatggtttaagaatgggcaaggaagcaacctggatggtggcaactaccatgtttatgagaacggcagtctggaaattaagatgatccgcaaagaggaccagggcatctacacctgtgtcgccaccaacatcctgggcaaagctgaaaaccaagtccgcctggaggtcaaagaccccaccaggatctaccggatgcccgaggaccaggtggccagaaggggcaccacggtgcagctggagtgtcgggtgaagcacgacccctccctgaaactcaccgtctcctggctgaaggatgacgagccgctctatattggaaacaggatgaagaaggaagacgactccctgaccatctttggggtggcagagcgggaccagggcagttacacgtgtgtcgccagcaccgagctagaccaagacctggccaaggcctacctcaccgtgctaggacggccagaccggccccgggacctggagctgaccgacctggccgagaggagcgtgcggctgacctggatccccggggatgctaacaacagccccatcacagactacgtcgtccagtttgaagaagaccagttccaacctggggtctggcatgaccattccaagtaccccggcagcgttaactcagccgtcctccggctgtccccgtatgtcaactaccagttccgtgtcattgccatcaacgaggttgggagcagccaccccagcctcccatccgagcgctaccgaaccagtggagcaccccccgagtccaatcctggtgacgtgaagggagaggggaccagaaagaacaacatggagatcacgtggacgcccatgaatgccacctcggcctttggccccaacctgcgctacattgtcaagtggaggcggagagagactcgagaggcctggaacaacgtcacagtgtggggctctcgctacgtggtggggcagaccccagtctacgtgccctatgagatccgagtccaggctgaaaatgacttcgggaagggccctgagccagagtccgtcatcggttactccggagaagattatcccagggctgcgcccactgaagttaaagtccgagtcatgaacagcacagccatcagccttcagtggaaccgcgtctactccgacacggtccagggccagctcagagagtaccgagcctactactggagggagagcagcttgctgaagaacctgtgggtgtctcagaagagacagcaagccagcttccctggtgaccgcctccgtggcgtggtgtcccgcctcttcccctacagtaactacaagctggagatggttgtggtcaatgggagaggtgatgggcctcgcagtgagaccaaggagttcaccaccccggaaggagtacccagtgcccctaggcgtttccgagtccggcagcccaacctggagacaatcaacctggaatgggatcatcctgagcatccaaatgggatcatgattggatacactctcaaatatgtggcctttaacgggaccaaagtaggaaagcagatagtggaaaacttctctcccaatcagaccaagttcacggtgcaaagaacggaccccgtgtcacgctaccgctttaccctcagcgccaggacgcaggtgggctctggggaagccgtcacagaggagtcaccagcacccccgaatgaagcttacaccaacaaccaagcggacatcgccacccagggctggttcattgggcttatgtgcgccatcgccctcctggtgctgatcctgctcatcgtctgtttcatcaagaggagtcgcggcggcaagtacccagtacgagaaaagaaggatgttccccttggccctgaagaccccaaggaagaggatggctcatttgactatagtgatgaggacaacaagcccctgcagggcagtcagacatctctggacggcaccatcaagcagcaggagagtgacgacagcctggtggactatggcgagggtggcgagggtcagttcaatgaagacggctccttcatcggccagtacacggtcaaaaaggacaaggaggaaacagagggcaacgaaagctcagaggccacgtcacctgtcaatgctatctactctctggcctaacggagcccacccaggcacagccaccactttgcaagtgggaggaggggagaaggggagacaaaaccactgcagacctaccacgaagccaccaccaccttcagtaacaagggtacgatatgggggtctgccaagctgtgaggaccagtagccaccaagccacccacaagccccctcccaatgaccccccttcagccccgggtgccaccagtgtgggagagctggagccgtggctgagctcagctggagggagcctggccccttgcccggtctcgcagccaccccgagcgttccaccacactgtccgcccttggcctcggcacacgctcaccttttctgttggttacgggacttctcattgtcttaatttcgctttgtgcatcttcccctccagacccaatgtctctgttttcttttccttttgaaaaagagtccctggaaaagaaagaataagtggattctcccccaggagaatcctttttgcaaagataggcaaaaaggattgaatccataccagaacacgtagacaggctgtaatattcaaaccacctctgggccaatgcatttccaaaggatgcctttctcgccatatgcctcccctggcccccagcccctctgcctcggccttgtcagttgctgagctgggcttggctcctttctggaaaatgacagtatttttggcagggagaaggtgcgcaggcctccttgctgctctctggtttggttgggaggtgtgtttacctcttgctcctcattcctcccctgcccttttctctggaatatctaagatgtgagctgcattgactctgaagacgtttgaggaacaggagtgggcactgatagaaaggacttcaacgccagtgactgtgtacctccagcagaagaaaatcaggtgtctggtcttgggggcactgtgctcacttctagagagaagaaaaaggctgggtttggacttcatgcctcctcactggtgaaacccaggatgtagatagagggccacacccaccctgtccagagtagagggcacctgtccacgtggccagggcccatgctgccaccctcgaggagatggaaccctgtgatgcaaaagctttgctggtgtgtttggggcataaggcactgctccccttccatctctagcagatatcatcttctcagccaattctgtaggacactgaggctcttgtttgacatggtgtgtggatggggacttgccccaagactgagcaggtctgccctttcattggggtgtatacatatcaggggaccctgaggtggcaccgtactcagtgttgtgatgcccccacctagggaggactcaatgctctttgtatgccttatgcagcgctgatctgtccctggagttcccaggttcccagctccccccctgcaagccttgaagcctccagcaacgtctatctccaggagagcagggcagcctatgcaagtgttccggcaggaccagaagtggccactcaacacacgtcctcaccagtcaccccaaatggagacactcgcagacctgcagttctcagaccgaaggtgctgccttcatcctccccacctaatgcatttttgaaaccaaaggtacctagcctcagagacagagaaggagagggggagatcttgagtctaagaggaaccctttagctgtttctgcagctgaggtcagtttcaggagggtgaagctgatccccaggaatggatcagctgccatgggcacagcctccgatttgagcctctccggctgccagccagggggcctgggccagaccagggctctgtccttccgtgactttattaaagcaacatttgccacatgtttaagccgcaaaggtattagcaatgcttgcatcattaataatcattcagttgaaggtcaagcccatagacacacactctctgctggtaagaaaccatagcccagaactgagccaataaggttgtttgaacctgagagtgtgtaatggtcatttgggccaagcctcagctagggctgctgcctggacgcctgaggggcagcttatcacagtgcaaggggacagggtaaacagcagggggtggggtgtgagcttggagggcccctcccctggatttcctccaacacctgcttggatactaggcccactgtccctgaagggaatgtcagggaagtgtgcctgtgagctgaattaaaggactggcctttccagaaaacgctttggatctgagcagagtagtcagtttctcagacactcattccatactgcaccgtacatgccagcgtacccattgcaccgaaagcaggcccttagggcaggaagggacgatgagcaagtctgccacaccacctggtgactgggaagggctgcttctctcgtaagggtcttggggagaagtaagcccgcagcctgcctctgcacctcgttccagtgtcctgccaggctctgtactgtcctttgtgtatgaagaaaatgctgttagccctctctcaggctgctgttctgtgggtgctgagagctgccccccatcaccacgccatcacacccctctgagcagaagcaaatctgaggctgaagaattaagttttccccaagcaaggaaggcaggtggtcagagagatcaaacgctgaggcgtggggattgcaggattcaggaggcagcccctttggggaagaggagggtgcattttccatggagcccatgtcagagtccactccagctcagcaggaaagtggaattgcccagtactgcctgccagctgggtctcccaagcaactaccccaagacataccaacagtgaagccaggacagcaccatgccatcggcgctccagtctgtctggctgggaggaaagtgctgggcatcttacagtaactctagaagttcctttgactaggctgcaatcccacctatatgctcagccctaagagctgtggtttcctgtgctctcatttgtccattcattcattcattcattcattcagcaaataatctgaaatccagtctgaactaaggcctgagctgtggataccatggcgcgtgagttagatgtggtccctgccctcatggggctgacagtcctaaaatcaagtgctaggacacagtggccattgagctgggagcattcttccctctaccgcttaagccactgatggctgcgagcttgaagagagggattctgagggagagcttggtccatctggtcaccaaggctgggcgggacagagcagtcaagaaccacggtgtggcttgagaaacagtcctgcttcctgagcctctttgctctgcctcttggggcaagctccttaacctgtctgtatttttatgcctctgtctcccattcagttcctccttgaatacctctttctacagagaggcacgggctcccctgaaggattgtcgaggccagggttcgggaagtacactgccatcggtcaggggacagctgcctcccaccttgcctgggtgatggtgaatgggactcatcttttcctgccttgcttttgaggagatggttgaatttaagctaacaggaaagccaaaccagcaccctcctttgtgctctgagaggttggagacatctggtccaccccattgcccctgcccctggcaagccctgaagtcgggagaggtgaccacaggtctgaaaatcagccagtgccaacattgcttgccctgcaaggtgcaactgagcccacatagcgcattcatagtttccctgaccacagccttgggaagacggtggaaacccgaggatgtgtgggtttcccagctaacggacaagctcccctgccacacccagtgcccacgcatgctcacatacatacagcagaccacaaccctgttgccaagcagtgcttccaagggatagcgatccagattccaacattgtcttggagagggttagtccacatccaagttgcgtgagataagatgcaaagggctctgtgtggatgaggaacgcaccttagaggagtgggaaaggccaccagggttgggccctgtttaggtaattcctgttggcagcacctagagagagcatctgagctgaaggagtgggaaactttgcccaagcaatggcacgggcagcgggctctttctggcgccctgtgctggagcagggccaagtcttagggcatcacaaacagcccatttgatggagggagcagggacatagcacatttttgtctgtctttgtgaggctgctttgctaactctctgaggagaggaagcctctcgggctttccgtcggctggggctagtgccagagaatcccttctcagtggccagcaggttcctgggaggccggcacaaggcaccgctccccactcatgacaccttggtgcagagtgacctcctgcccagtcaccactccggccagccccagccaaacacacaaaagcccatggttgcggttgcatctacaccgttagttggcaaaggatcctgcttgagctctgcgtggtggccaaggagtagcatggaggagggccctgattttaaaaaggaaaaatagagaggcctcaaaacaatgaaacaaagagcttgatatgtcaagaggagaccaaggccctgggaggcataggcaagccgggcagagtcagaccagtgccctcccttgaccatctcctagcattccttaacctagacaggggctaccccatgtgagtccaagccagactttgtggctgtccccagcctgcacagcccaagcccagggaagtgtcctttctttcccttccttactaataatgggccttcctgagacacattcagagaaggatcagagagaaaggagaaccatccaggagagccacaagcgtccaccaaacagtgtctcaggcctcacctgaagctgctgttcctcctatcagcacactagtattaaatgggtgttccataatgaggagaatggaaataggtacaaggcatctagcttaggacagaatcggatttcggcatgtgaaggaatcccagagctgatctcattgaaatgatctatcgtacagacaaggatatgcaaatccacagaagtgaagggatttttgctcaagatcacatagctggtaaactaaggtaaggttagggcttgaacttgggccttctgactccttgtccagtcagtgttctttcatctcaccacagctgcctcctttgaaacagaggtattaagatctgtccttctggttcaccctctcatacctctttactgcgtctcccacatcccccacatgcctcccaaaatgaaagacaaacaggattgtttctgagaccaagatcagtctgtctgtgatcagcctgtgtgtggttcacccagtcatgcaattaagggcagatctgggccagtggaataggatagctgattggtgtttgttactgtgaaccctagaccgtaccccgtagaatggtgtctcttgctttgtaacacatcgggccttcagtgtgctgtattcctcagaagtgagggcatctcggtccattctgcccatggccacagggtgcagagaggcagcagggcccatgcaagctgccaccctgggatttgctgggctggagttcaacagatgtaaagacttcagtgaagcaataaacacaaaactctgggagaagata

SEQ ID NO: 249 - DNA, 6147 bp, Homo sapiens
ctgagtgctgtccaggaggcccagttaaagcggctcgaggtgacaagaccccgagtgctggggagcagggagcagggccaggtgccgaggatggccaggcagccaccgccgccctgggtccatgcagccttcctcctctgcctcctcagtcttggcggagccatcgaaattcctatggatccaagcattcagaatgagctgacgcagccgccaaccatcaccaagcagtcagcgaaggatcacatcgtggacccccgtgataacatcctgattgagtgtgaagcaaaagggaaccctgcccccagcttccactggacacgaaacagcagattcttcaacatcgccaaggacccccgggtgtccatgaggaggaggtctgggaccctggtgattgacttccgcagtggcgggcggccggaggaatatgagggggaatatcagtgcttcgcccgcaacaaatttggcacggccctgtccaataggatccgcctgcaggtgtctaaatctcctctgtggcccaaggaaaacctagaccctgtcgtggtccaagagggcgctcctttgacgctccagtgcaaccccccgcctggacttccatccccggtcatcttctggatgagcagctccatggagcccatcacccaagacaaacgtgtctctcagggccataacggagacctatacttctccaacgtgatgctgcaggacatgcagaccgactacagttgtaacgcccgcttccacttcacccacaccatccagcagaagaaccctttcaccctcaaggtcctcaccaaccacccttataatgactcgtccttaagaaaccaccctgacatgtacagtgcccgaggagttgcagaaagaacaccaagcttcatgtatccccagggcaccgcgagcagccagatggtgcttcgtggcatggacctcctgctggaatgcatcgcctccggggtcccaacaccagacatcgcatggtacaagaaaggtggggacctcccatctgataaggccaagtttgagaactttaataaggccctgcgtatcacaaatgtctctgaggaagactccggggagtatttctgcctggcctccaacaagatgggcagcatccggcacacgatctcggtgagagtaaaggctgctccctactggctggacgaacccaagaaccttattctggctcctggcgaggatgggagactggtgtgtcgagccaatggaaaccccaaacccactgtccagtggatggtgaatggggaacctttgcaatcggcaccacctaacccaaaccgtgaggtggccggagacaccatcatcttccgggacacccagatcagcagcagggctgtgtaccagtgcaacacctccaacgagcatggctacctgctggccaacgcctttgtcagtgtgctggatgtgccgcctcggatgctgtcgccccggaaccagctcattcgagtgattctttacaaccggacgcggctggactgccctttctttgggtctcccatccccacactgcgatggtttaagaatgggcaaggaagcaacctggatggtggcaactaccatgtttatgagaacggcagtctggaaattaagatgatccgcaaagaggaccagggcatctacacctgtgtcgccaccaacatcctgggcaaagctgaaaaccaagtccgcctggaggtcaaagaccccaccaggatctaccggatgcccgaggaccaggtggccagaaggggcaccacggtgcagctggagtgtcgggtgaagcacgacccctccctgaaactcaccgtctcctggctgaaggatgacgagccgctctatattggaaacaggatgaagaaggaagacgactccctgaccatctttggggtggcagagcgggaccagggcagttacacgtgtgtcgccagcaccgagctagaccaagacctggccaaggcctacctcaccgtgctagctgatcaggccactccaactaaccgtttggctgccctgcccaaaggacggccagaccggccccgggacctggagctgaccgacctggccgagaggagcgtgcggctgacctggatccccggggatgctaacaacagccccatcacagactacgtcgtccagtttgaagaagaccagttccaacctggggtctggcatgaccattccaagtaccccggcagcgttaactcagccgtcctccggctgtccccgtatgtcaactaccagttccgtgtcattgccatcaacgaggttgggagcagccaccccagcctcccatccgagcgctaccgaaccagtggagcaccccccgagtccaatcctggtgacgtgaagggagaggggaccagaaagaacaacatggagatcacgtggacgcccatgaatgccacctcggcctttggccccaacctgcgctacattgtcaagtggaggcggagagagactcgagaggcctggaacaacgtcacagtgtggggctctcgctacgtggtggggcagaccccagtctacgtgccctatgagatccgagtccaggctgaaaatgacttcgggaagggccctgagccagagtccgtcatcggttactccggagaagattatcccagggctgcgcccactgaagttaaagtccgagtcatgaacagcacagccatcagccttcagtggaaccgcgtctactccgacacggtccagggccagctcagagagtaccgagcctactactggagggagagcagcttgctgaagaacctgtgggtgtctcagaagagacagcaagccagcttccctggtgaccgcctccgtggcgtggtgtcccgcctcttcccctacagtaactacaagctggagatggttgtggtcaatgggagaggtgatgggcctcgcagtgagaccaaggagttcaccaccccggaaggagtacccagtgcccctaggcgtttccgagtccggcagcccaacctggagacaatcaacctggaatgggatcatcctgagcatccaaatgggatcatgattggatacactctcaaatatgtggcctttaacgggaccaaagtaggaaagcagatagtggaaaacttctctcccaatcagaccaagttcacggtgcaaagaacggaccccgtgtcacgctaccgctttaccctcagcgccaggacgcaggtgggctctggggaagccgtcacagaggagtcaccagcacccccgaatgaagctactccaaccgcagctcctcccacattgcccccgactaccgtgggtgcgacgggcgctgtgagcagtaccgatgctactgccattgctgccaccaccgaagccacaacagtccccatcatcccaactgtcgcacctaccaccatcgccaccaccaccaccgtcgccacaactactacaaccactgctgccgccaccaccaccacggagagtcctcccaccaccacctccgggactaagatacacgaatccggtgccatctagaacttaacaggcactttcggaaaaagttggctgaggaggaacctgctggggtattagaagctgccaccagcgggttggtgattgatgttctttggggccacggtgaggcatctttttcattaaaaagtggggctttgtgtcctacaagtgctttgagttcagagaaaagatgaaccaaaaatgaagaaaggaagtggctcttgcttccccagcaaagagttacttgccttctgaaacacaggccttgttgccacataggaccagcccctccagagtctcactcctcaagttctgtgagacgctgcagaggacctggccatggccttgatcttatctagaccttgggaacacccctcaaccatcctcacctcacttcagcagaatggctgtctaggactttaaaaatgaatgttcacctttatcgtgccttacatcttggaaaaagatgtttcataagtttactcttctcagggtgaaataggcctttttatttgtccttcgcctgtctttttcagatttccagggagattccttaattcttacattccaggagtcagtgagacaatctatgcttcccctccctgaccctttttgtgtttctcggtgttgatatttcacatgcttggtccttctctttgaactttttagtgcttccgggtcatcatcctgatctctctgtggcaatgccttcctccagctcccacctctaaatcatcttggcttcccactgcctggccttttctaaaagaaccccaatcttcattgcctttaaaacagccagatttgagtcaatttcatattggtggccagactgtttaaacacaaattctctagctatttacagggctcagagctgaggaggaagaaactcaagtccccaaataatgactaatcacaattcattctcaccagcaagagccatgaaattctaaggagctggaatttgggatggcttcaagtggccagtacaattgaagcgtctggcagacaggcaaagaagcctaccttctcccctccccacggtgccatcaatggaatcactttcttggtccctcacttaatatgaatcatattcacctggggcaaccaacgcctgacagagttgtagtgcagaaggcacctctttgaagtgaaaaccaggagatcttttatcacttccccagccctgcaggctcagtcacatgtcaaatagataatgaataaatgcatcgccaatgcactctattcatttatttttgacaagtgagttggtgacagtgcccccttgcatgctaataaaatatacagcagccacacttgtaaagtctttgaaatacgaggcttcatgcaagtactccactattaaatctttgctggaaaatggggtaaccagactgctgggactcttgcaaaatgattacgtttgaagattagtgccattctcctctacacaggctatggtttcagacagcaccatggctttgataaagtggctcccagctcataggaacttgataattaatgtcctctgtgttgcatagagatcaggcatcaaaaactcggtggtgctgagacgccaacagaacaggattcttctggtgtctggaccactgagggctggttgtcaaggagttatcttctcttggtcgcacctagtccacgtgagggagaggaaggcttcacattgtctttacttgggcccctgagattctaggctttagacaatctgaagctgttagacctatcagccaggcttctctctgaccaaggacaacccaaggggctccttagaccagcctcacctgtctggatcaccattctcctccagcttcaaaagtccatccttcctgcaaatctcatcaagactcgcggctcttaaagataaccctctccttcctgcagcacttctatgcttgaaggggaaggggctggcacacatcttctctgtgtggcctcctcctcctggccacacggcctttttcctggcccctttccttacactgttgacatgacaagggatctgaaaagggaataagtccaggttaaagcctcaaatggcacagatcaaaacccactctttctacaaaaatttgccgggcatggtggcgggggcctgtaatctcagctacttgggaggctgaggcaggagaatcgcttgaacctgggaagtggaggttacagtgagtcgagatcgcaccactgtactccagcttgggcaacagaacaatactccatctcaaaaaaaaaaaaacagaaaacaaaaaaactctttcattcctaacgctacctatgtggacacagtcagtttccagctctccctccgaagtcctcccgactgtacctgcttgtccctggacagcgacctctggcctggccaccaaggctgcagcttggagctctgtcaggccctgtgcacagccatttctgactctcccctttcctagatgactgtgtgtacatgtgtgcgtgcgcgagtgtgggcatgtgcgtgcatgcacacgcttgtgtgtatgtgtgtgtctccatatctctggtgccactccctcctcatcactaaccccttttctaacccgtccaccagcccctgatgagcagtccatatggaacgtcacggtgctccccaacagtaaatgggccaacatcacctggaagcacaatttcgggcccggaactgac

SEQ ID NO: 250 - DNA, 3663 bp, Homo sapiens
ctgagtgctgtccaggaggcccagttaaagcggctcgaggtgacaagaccccgagtgctggggagcagggagcagggccaggtgccgaggatggccaggcagccaccgccgccctgggtccatgcagccttcctcctctgcctcctcagtcttggcggagccatcgaaattcctatggatccaagcattcagaatgagctgacgcagccgccaaccatcaccaagcagtcagcgaaggatcacatcgtggacccccgtgataacatcctgattgagtgtgaagcaaaagggaaccctgcccccagcttccactggacacgaaacagcagattcttcaacatcgccaaggacccccgggtgtccatgaggaggaggtctgggaccctggtgattgacttccgcagtggcgggcggccggaggaatatgagggggaatatcagtgcttcgcccgcaacaaatttggcacggccctgtccaataggatccgcctgcaggtgtctaaatctcctctgtggcccaaggaaaacctagaccctgtcgtggtccaagagggcgctcctttgacgctccagtgcaaccccccgcctggacttccatccccggtcatcttctggatgagcagctccatggagcccatcacccaagacaaacgtgtctctcagggccataacggagacctatacttctccaacgtgatgctgcaggacatgcagaccgactacagttgtaacgcccgcttccacttcacccacaccatccagcagaagaaccctttcaccctcaaggtcctcaccaaccacccttataatgactcgtccttaagaaaccaccctgacatgtacagtgcccgaggagttgcagaaagaacaccaagcttcatgtatccccagggcaccgcgagcagccagatggtgcttcgtggcatggacctcctgctggaatgcatcgcctccggggtcccaacaccagacatcgcatggtacaagaaaggtggggacctcccatctgataaggccaagtttgagaactttaataaggccctgcgtatcacaaatgtctctgaggaagactccggggagtatttctgcctggcctccaacaagatgggcagcatccggcacacgatctcggtgagagtaaaggctgctccctactggctggacgaacccaagaaccttattctggctcctggcgaggatgggagactggtgtgtcgagccaatggaaaccccaaacccactgtccagtggatggtgaatggggaacctttgcaatcggcaccacctaacccaaaccgtgaggtggccggagacaccatcatcttccgggacacccagatcagcagcagggctgtgtaccagtgcaacacctccaacgagcatggctacctgctggccaacgcctttgtcagtgtgctggatgtgccgcctcggatgctgtcgccccggaaccagctcattcgagtgattctttacaaccggacgcggctggactgccctttctttgggtctcccatccccacactgcgatggtttaagaatgggcaaggaagcaacctggatggtggcaactaccatgtttatgagaacggcagtctggaaattaagatgatccgcaaagaggaccagggcatctacacctgtgtcgccaccaacatcctgggcaaagctgaaaaccaagtccgcctggaggtcaaagaccccaccaggatctaccggatgcccgaggaccaggtggccagaaggggcaccacggtgcagctggagtgtcgggtgaagcacgacccctccctgaaactcaccgtctcctggctgaaggatgacgagccgctctatattggaaacaggatgaagaaggaagacgactccctgaccatctttggggtggcagagcgggaccagggcagttacacgtgtgtcgccagcaccgagctagaccaagacctggccaaggcctacctcaccgtgctagctgatcaggccactccaactaaccgtttggctgccctgcccaaaggacggccagaccggccccgggacctggagctgaccgacctggccgagaggagcgtgcggctgacctggatccccggggatgctaacaacagccccatcacagactacgtcgtccagtttgaagaagaccagttccaacctggggtctggcatgaccattccaagtaccccggcagcgttaactcagccgtcctccggctgtccccgtatgtcaactaccagttccgtgtcattgccatcaacgaggttgggagcagccaccccagcctcccatccgagcgctaccgaaccagtggagcaccccccgagtccaatcctggtgacgtgaagggagaggggaccagaaagaacaacatggagatcacgtggacgcccatgaatgccacctcggcctttggccccaacctgcgctacattgtcaagtggaggcggagagagactcgagaggcctggaacaacgtcacagtgtggggctctcgctacgtggtggggcagaccccagtctacgtgccctatgagatccgagtccaggctgaaaatgacttcgggaagggccctgagccagagtccgtcatcggttactccggagaagattatcccagggctgcgcccactgaagttaaagtccgagtcatgaacagcacagccatcagccttcagtggaaccgcgtctactccgacacggtccagggccagctcagagagtaccgagcctactactggagggagagcagcttgctgaagaacctgtgggtgtctcagaagagacagcaagccagcttccctggtgaccgcctccgtggcgtggtgtcccgcctcttcccctacagtaactacaagctggagatggttgtggtcaatgggagaggtgatgggcctcgcagtgagaccaaggagttcaccaccccggaaggagtacccagtgcccctaggcgtttccgagtccggcagcccaacctggagacaatcaacctggaatgggatcatcctgagcatccaaatgggatcatgattggatacactctcaaatatgtggcctttaacgggaccaaagtaggaaagcagatagtggaaaacttctctcccaatcagaccaagttcacggtgcaaagaacggaccccgtgtcacgctaccgctttaccctcagcgccaggacgcaggtgggctctggggaagccgtcacagaggagtcaccagcacccccgaatgaagctactccaaccgcagctcctcccacattgcccccgactaccgtgggtgcgacgggcgctgtgagcagtaccgatgctactgccattgctgccaccaccgaagccacaacagtccccatcatcccaactgtcgcacctaccaccatcgccaccaccaccaccgtcgccacaactactacaaccactgctgccgccaccaccaccacggagagtcctcccaccaccacctccgggactaagatacacgaatccggtgccatctagaacttaacaggcactttcggaaaaagttggctgaggaggaacctgctggggtattagaagctgccaccagcgggttggtgattgatgttctttggggccacgcccctgatgagcagtccatatggaacgtcacggtgctccccaacagtaaatgggccaacatcacctgga

SEQ ID NO: 251 - DNA, 10138 bp, Homo sapiens
gcgcacgggctggtctctgccctaatgcggcggctggcggcgagaggcgctgcaggggacgcgggggaagtggcggcgccggcagcggacagctcggacagcgcccagggccggagcccgagcccttggaggttgattgacttatgtgcaatttgggacgctggagtttaccttccctccgcagcctggaacagagcctcctctggtgttgcaaggaagaggctgaatgaggcagagaagctgagtgctgtccaggaggcccagttaaagcggctcgaggtgacaagaccccgagtgctggggagcagggagcagggccaggtgccgaggatggccaggcagccaccgccgccctgggtccatgcagccttcctcctctgcctcctcagtcttggcggagccatcgaaattcctatggatctgacgcagccgccaaccatcaccaagcagtcagcgaaggatcacatcgtggacccccgtgataacatcctgattgagtgtgaagcaaaagggaaccctgcccccagcttccactggacacgaaacagcagattcttcaacatcgccaaggacccccgggtgtccatgaggaggaggtctgggaccctggtgattgacttccgcagtggcgggcggccggaggaatatgagggggaatatcagtgcttcgcccgcaacaaatttggcacggccctgtccaataggatccgcctgcaggtgtctaaatctcctctgtggcccaaggaaaacctagaccctgtcgtggtccaagagggcgctcctttgacgctccagtgcaaccccccgcctggacttccatccccggtcatcttctggatgagcagctccatggagcccatcacccaagacaaacgtgtctctcagggccataacggagacctatacttctccaacgtgatgctgcaggacatgcagaccgactacagttgtaacgcccgcttccacttcacccacaccatccagcagaagaaccctttcaccctcaaggtcctcaccaaccacccttataatgactcgtccttaagaaaccaccctgacatgtacagtgcccgaggagttgcagaaagaacaccaagcttcatgtatccccagggcaccgcgagcagccagatggtgcttcgtggcatggacctcctgctggaatgcatcgcctccggggtcccaacaccagacatcgcatggtacaagaaaggtggggacctcccatctgataaggccaagtttgagaactttaataaggccctgcgtatcacaaatgtctctgaggaagactccggggagtatttctgcctggcctccaacaagatgggcagcatccggcacacgatctcggtgagagtaaaggctgctccctactggctggacgaacccaagaaccttattctggctcctggcgaggatgggagactggtgtgtcgagccaatggaaaccccaaacccactgtccagtggatggtgaatggggaacctttgcaatcggcaccacctaacccaaaccgtgaggtggccggagacaccatcatcttccgggacacccagatcagcagcagggctgtgtaccagtgcaacacctccaacgagcatggctacctgctggccaacgcctttgtcagtgtgctggatgtgccgcctcggatgctgtcgccccggaaccagctcattcgagtgattctttacaaccggacgcggctggactgccctttctttgggtctcccatccccacactgcgatggtttaagaatgggcaaggaagcaacctggatggtggcaactaccatgtttatgagaacggcagtctggaaattaagatgatccgcaaagaggaccagggcatctacacctgtgtcgccaccaacatcctgggcaaagctgaaaaccaagtccgcctggaggtcaaagaccccaccaggatctaccggatgcccgaggaccaggtggccagaaggggcaccacggtgcagctggagtgtcgggtgaagcacgacccctccctgaaactcaccgtctcctggctgaaggatgacgagccgctctatattggaaacaggatgaagaaggaagacgactccctgaccatctttggggtggcagagcgggaccagggcagttacacgtgtgtcgccagcaccgagctagaccaagacctggccaaggcctacctcaccgtgctaggacggccagaccggccccgggacctggagctgaccgacctggccgagaggagcgtgcggctgacctggatccccggggatgctaacaacagccccatcacagactacgtcgtccagtttgaagaagaccagttccaacctggggtctggcatgaccattccaagtaccccggcagcgttaactcagccgtcctccggctgtccccgtatgtcaactaccagttccgtgtcattgccatcaacgaggttgggagcagccaccccagcctcccatccgagcgctaccgaaccagtggagcaccccccgagtccaatcctggtgacgtgaagggagaggggaccagaaagaacaacatggagatcacgtggacgcccatgaatgccacctcggcctttggccccaacctgcgctacattgtcaagtggaggcggagagagactcgagaggcctggaacaacgtcacagtgtggggctctcgctacgtggtggggcagaccccagtctacgtgccctatgagatccgagtccaggctgaaaatgacttcgggaagggccctgagccagagtccgtcatcggttactccggagaagattatcccagggctgcgcccactgaagttaaagtccgagtcatgaacagcacagccatcagccttcagtggaaccgcgtctactccgacacggtccagggccagctcagagagtaccgagcctactactggagggagagcagcttgctgaagaacctgtgggtgtctcagaagagacagcaagccagcttccctggtgaccgcctccgtggcgtggtgtcccgcctcttcccctacagtaactacaagctggagatggttgtggtcaatgggagaggtgatgggcctcgcagtgagaccaaggagttcaccaccccggaaggagtacccagtgcccctaggcgtttccgagtccggcagcccaacctggagacaatcaacctggaatgggatcatcctgagcatccaaatgggatcatgattggatacactctcaaatatgtggcctttaacgggaccaaagtaggaaagcagatagtggaaaacttctctcccaatcagaccaagttcacggtgcaaagaacggaccccgtgtcacgctaccgctttaccctcagcgccaggacgcaggtgggctctggggaagccgtcacagaggagtcaccagcacccccgaatgaagctactccaaccgcagcttacaccaacaaccaagcggacatcgccacccagggctggttcattgggcttatgtgcgccatcgccctcctggtgctgatcctgctcatcgtctgtttcatcaagaggagtcgcggcggcaagtacccagtacgagaaaagaaggatgttccccttggccctgaagaccccaaggaagaggatggctcatttgactatagtgatgaggacaacaagcccctgcagggcagtcagacatctctggacggcaccatcaagcagcaggagagtgacgacagcctggtggactatggcgagggtggcgagggtcagttcaatgaagacggctccttcatcggccagtacacggtcaaaaaggacaaggaggaaacagagggcaacgaaagctcagaggccacgtcacctgtcaatgctatctactctctggcctaacggagcccacccaggcacagccaccactttgcaagtgggaggaggggagaaggggagacaaaaccactgcagacctaccacgaagccaccaccaccttcagtaacaagggtacgatatgggggtctgccaagctgtgaggaccagtagccaccaagccacccacaagccccctcccaatgaccccccttcagccccgggtgccaccagtgtgggagagctggagccgtggctgagctcagctggagggagcctggccccttgcccggtctcgcagccaccccgagcgttccaccacactgtccgcccttggcctcggcacacgctcaccttttctgttggttacgggacttctcattgtcttaatttcgctttgtgcatcttcccctccagacccaatgtctctgttttcttttccttttgaaaaagagtccctggaaaagaaagaataagtggattctcccccaggagaatcctttttgcaaagataggcaaaaaggattgaatccataccagaacacgtagacaggctgtaatattcaaaccacctctgggccaatgcatttccaaaggatgcctttctcgccatatgcctcccctggcccccagcccctctgcctcggccttgtcagttgctgagctgggcttggctcctttctggaaaatgacagtatttttggcagggagaaggtgcgcaggcctccttgctgctctctggtttggttgggaggtgtgtttacctcttgctcctcattcctcccctgcccttttctctggaatatctaagatgtgagctgcattgactctgaagacgtttgaggaacaggagtgggcactgatagaaaggacttcaacgccagtgactgtgtacctccagcagaagaaaatcaggtgtctggtcttgggggcactgtgctcacttctagagagaagaaaaaggctgggtttggacttcatgcctcctcactggtgaaacccaggatgtagatagagggccacacccaccctgtccagagtagagggcacctgtccacgtggccagggcccatgctgccaccctcgaggagatggaaccctgtgatgcaaaagctttgctggtgtgtttggggcataaggcactgctccccttccatctctagcagatatcatcttctcagccaattctgtaggacactgaggctcttgtttgacatggtgtgtggatggggacttgccccaagactgagcaggtctgccctttcattggggtgtatacatatcaggggaccctgaggtggcaccgtactcagtgttgtgatgcccccacctagggaggactcaatgctctttgtatgccttatgcagcgctgatctgtccctggagttcccaggttcccagctccccccctgcaagccttgaagcctccagcaacgtctatctccaggagagcagggcagcctatgcaagtgttccggcaggaccagaagtggccactcaacacacgtcctcaccagtcaccccaaatggagacactcgcagacctgcagttctcagaccgaaggtgctgccttcatcctccccacctaatgcatttttgaaaccaaaggtacctagcctcagagacagagaaggagagggggagatcttgagtctaagaggaaccctttagctgtttctgcagctgaggtcagtttcaggagggtgaagctgatccccaggaatggatcagctgccatgggcacagcctccgatttgagcctctccggctgccagccagggggcctgggccagaccagggctctgtccttccgtgactttattaaagcaacatttgccacatgtttaagccgcaaaggtattagcaatgcttgcatcattaataatcattcagttgaaggtcaagcccatagacacacactctctgctggtaagaaaccatagcccagaactgagccaataaggttgtttgaacctgagagtgtgtaatggtcatttgggccaagcctcagctagggctgctgcctggacgcctgaggggcagcttatcacagtgcaaggggacagggtaaacagcagggggtggggtgtgagcttggagggcccctcccctggatttcctccaacacctgcttggatactaggcccactgtccctgaagggaatgtcagggaagtgtgcctgtgagctgaattaaaggactggcctttccagaaaacgctttggatctgagcagagtagtcagtttctcagacactcattccatactgcaccgtacatgccagcgtacccattgcaccgaaagcaggcccttagggcaggaagggacgatgagcaagtctgccacaccacctggtgactgggaagggctgcttctctcgtaagggtcttggggagaagtaagcccgcagcctgcctctgcacctcgttccagtgtcctgccaggctctgtactgtcctttgtgtatgaagaaaatgctgttagccctctctcaggctgctgttctgtgggtgctgagagctgccccccatcaccacgccatcacacccctctgagcagaagcaaatctgaggctgaagaattaagttttccccaagcaaggaaggcaggtggtcagagagatcaaacgctgaggcgtggggattgcaggattcaggaggcagcccctttggggaagaggagggtgcattttccatggagcccatgtcagagtccactccagctcagcaggaaagtggaattgcccagtactgcctgccagctgggtctcccaagcaactaccccaagacataccaacagtgaagccaggacagcaccatgccatcggcgctccagtctgtctggctgggaggaaagtgctgggcatcttacagtaactctagaagttcctttgactaggctgcaatcccacctatatgctcagccctaagagctgtggtttcctgtgctctcatttgtccattcattcattcattcattcattcagcaaataatctgaaatccagtctgaactaaggcctgagctgtggataccatggcgcgtgagttagatgtggtccctgccctcatggggctgacagtcctaaaatcaagtgctaggacacagtggccattgagctgggagcattcttccctctaccgcttaagccactgatggctgcgagcttgaagagagggattctgagggagagcttggtccatctggtcaccaaggctgggcgggacagagcagtcaagaaccacggtgtggcttgagaaacagtcctgcttcctgagcctctttgctctgcctcttggggcaagctccttaacctgtctgtatttttatgcctctgtctcccattcagttcctccttgaatacctctttctacagagaggcacgggctcccctgaaggattgtcgaggccagggttcgggaagtacactgccatcggtcaggggacagctgcctcccaccttgcctgggtgatggtgaatgggactcatcttttcctgccttgcttttgaggagatggttgaatttaagctaacaggaaagccaaaccagcaccctcctttgtgctctgagaggttggagacatctggtccaccccattgcccctgcccctggcaagccctgaagtcgggagaggtgaccacaggtctgaaaatcagccagtgccaacattgcttgccctgcaaggtgcaactgagcccacatagcgcattcatagtttccctgaccacagccttgggaagacggtggaaacccgaggatgtgtgggtttcccagctaacggacaagctcccctgccacacccagtgcccacgcatgctcacatacatacagcagaccacaaccctgttgccaagcagtgcttccaagggatagcgatccagattccaacattgtcttggagagggttagtccacatccaagttgcgtgagataagatgcaaagggctctgtgtggatgaggaacgcaccttagaggagtgggaaaggccaccagggttgggccctgtttaggtaattcctgttggcagcacctagagagagcatctgagctgaaggagtgggaaactttgcccaagcaatggcacgggcagcgggctctttctggcgccctgtgctggagcagggccaagtcttagggcatcacaaacagcccatttgatggagggagcagggacatagcacatttttgtctgtctttgtgaggctgctttgctaactctctgaggagaggaagcctctcgggctttccgtcggctggggctagtgccagagaatcccttctcagtggccagcaggttcctgggaggccggcacaaggcaccgctccccactcatgacaccttggtgcagagtgacctcctgcccagtcaccactccggccagccccagccaaacacacaaaagcccatggttgcggttgcatctacaccgttagttggcaaaggatcctgcttgagctctgcgtggtggccaaggagtagcatggaggagggccctgattttaaaaaggaaaaatagagaggcctcaaaacaatgaaacaaagagcttgatatgtcaagaggagaccaaggccctgggaggcataggcaagccgggcagagtcagaccagtgccctcccttgaccatctcctagcattccttaacctagacaggggctaccccatgtgagtccaagccagactttgtggctgtccccagcctgcacagcccaagcccagggaagtgtcctttctttcccttccttactaataatgggccttcctgagacacattcagagaaggatcagagagaaaggagaaccatccaggagagccacaagcgtccaccaaacagtgtctcaggcctcacctgaagctgctgttcctcctatcagcacactagtattaaatgggtgttccataatgaggagaatggaaataggtacaaggcatctagcttaggacagaatcggatttcggcatgtgaaggaatcccagagctgatctcattgaaatgatctatcgtacagacaaggatatgcaaatccacagaagtgaagggatttttgctcaagatcacatagctggtaaactaaggtaaggttagggcttgaacttgggccttctgactccttgtccagtcagtgttctttcatctcaccacagctgcctcctttgaaacagaggtattaagatctgtccttctggttcaccctctcatacctctttactgcgtctcccacatcccccacatgcctcccaaaatgaaagacaaacaggattgtttctgagaccaagatcagtctgtctgtgatcagcctgtgtgtggttcacccagtcatgcaattaagggcagatctgggccagtggaataggatagctgattggtgtttgttactgtgaaccctagaccgtaccccgtagaatggtgtctcttgctttgtaacacatcgggccttcagtgtgctgtattcctcagaagtgagggcatctcggtccattctgcccatggccacagggtgcagagaggcagcagggcccatgcaagctgccaccctgggatttgctgggctggagttcaacagatgtaaagacttcagtgaagcaataaacacaaaactctgggagaagatatccagaattttgtacattactctgtttctttttcaaaaatgaggcagatcagatgcccctgagctgcccctttttttctgattcccaactgcaatgtcctcagtcagtgttgtccctctgcccggctccccagctctttgccaacctcttcacactccccttgagctgagcatcagtcgcctgtgacgtggccaccttctgtcctgctcccactcccgacccatgctggaccccggaggacctcctgccccgcccccaccacacacccatatcccccaccattccaatttgttctttcccgtggggaattttttttcccagcgtctccatcccttcctacatatccacacacacacaaattggtctgatcttttttccattggttaaacatttaactccatgccagaccttgttttaacccctctcacatcatgttctttccttttttgcgagttattttgcattaaccaactttgtcagtgacagatgcgtatctgagggtgtcacacacgaccttcagcagggaagacttctgggccatggagggccgtctaatacatggacttataaactgactgcatgagcaatgaaaaggccaaattattctgaattttttttgaatcactgtaaaaaaactgatttcttttgtatagagaacactaaacgtataataaaagttgttcaaaatgga

SEQ ID NO: 252 - DNA, 10123 bp, Homo sapiens
gcgcacgggctggtctctgccctaatgcggcggctggcggcgagaggcgctgcaggggacgcgggggaagtggcggcgccggcagcggacagctcggacagcgcccagggccggagcccgagcccttggaggttgattgacttatgtgcaatttgggacgctggagtttaccttccctccgcagcctggaacagagcctcctctggtgttgcaaggaagaggctgaatgaggcagagaagctgagtgctgtccaggaggcccagttaaagcggctcgaggtgacaagaccccgagtgctggggagcagggagcagggccaggtgccgaggatggccaggcagccaccgccgccctgggtccatgcagccttcctcctctgcctcctcagtcttggcggagccatcgaaattcctatggatctgacgcagccgccaaccatcaccaagcagtcagcgaaggatcacatcgtggacccccgtgataacatcctgattgagtgtgaagcaaaagggaaccctgcccccagcttccactggacacgaaacagcagattcttcaacatcgccaaggacccccgggtgtccatgaggaggaggtctgggaccctggtgattgacttccgcagtggcgggcggccggaggaatatgagggggaatatcagtgcttcgcccgcaacaaatttggcacggccctgtccaataggatccgcctgcaggtgtctaaatctcctctgtggcccaaggaaaacctagaccctgtcgtggtccaagagggcgctcctttgacgctccagtgcaaccccccgcctggacttccatccccggtcatcttctggatgagcagctccatggagcccatcacccaagacaaacgtgtctctcagggccataacggagacctatacttctccaacgtgatgctgcaggacatgcagaccgactacagttgtaacgcccgcttccacttcacccacaccatccagcagaagaaccctttcaccctcaaggtcctcaccaaccacccttataatgactcgtccttaagaaaccaccctgacatgtacagtgcccgaggagttgcagaaagaacaccaagcttcatgtatccccagggcaccgcgagcagccagatggtgcttcgtggcatggacctcctgctggaatgcatcgcctccggggtcccaacaccagacatcgcatggtacaagaaaggtggggacctcccatctgataaggccaagtttgagaactttaataaggccctgcgtatcacaaatgtctctgaggaagactccggggagtatttctgcctggcctccaacaagatgggcagcatccggcacacgatctcggtgagagtaaaggctgctccctactggctggacgaacccaagaaccttattctggctcctggcgaggatgggagactggtgtgtcgagccaatggaaaccccaaacccactgtccagtggatggtgaatggggaacctttgcaatcggcaccacctaacccaaaccgtgaggtggccggagacaccatcatcttccgggacacccagatcagcagcagggctgtgtaccagtgcaacacctccaacgagcatggctacctgctggccaacgcctttgtcagtgtgctggatgtgccgcctcggatgctgtcgccccggaaccagctcattcgagtgattctttacaaccggacgcggctggactgccctttctttgggtctcccatccccacactgcgatggtttaagaatgggcaaggaagcaacctggatggtggcaactaccatgtttatgagaacggcagtctggaaattaagatgatccgcaaagaggaccagggcatctacacctgtgtcgccaccaacatcctgggcaaagctgaaaaccaagtccgcctggaggtcaaagaccccaccaggatctaccggatgcccgaggaccaggtggccagaaggggcaccacggtgcagctggagtgtcgggtgaagcacgacccctccctgaaactcaccgtctcctggctgaaggatgacgagccgctctatattggaaacaggatgaagaaggaagacgactccctgaccatctttggggtggcagagcgggaccagggcagttacacgtgtgtcgccagcaccgagctagaccaagacctggccaaggcctacctcaccgtgctaggacggccagaccggccccgggacctggagctgaccgacctggccgagaggagcgtgcggctgacctggatccccggggatgctaacaacagccccatcacagactacgtcgtccagtttgaagaagaccagttccaacctggggtctggcatgaccattccaagtaccccggcagcgttaactcagccgtcctccggctgtccccgtatgtcaactaccagttccgtgtcattgccatcaacgaggttgggagcagccaccccagcctcccatccgagcgctaccgaaccagtggagcaccccccgagtccaatcctggtgacgtgaagggagaggggaccagaaagaacaacatggagatcacgtggacgcccatgaatgccacctcggcctttggccccaacctgcgctacattgtcaagtggaggcggagagagactcgagaggcctggaacaacgtcacagtgtggggctctcgctacgtggtggggcagaccccagtctacgtgccctatgagatccgagtccaggctgaaaatgacttcgggaagggccctgagccagagtccgtcatcggttactccggagaagattatcccagggctgcgcccactgaagttaaagtccgagtcatgaacagcacagccatcagccttcagtggaaccgcgtctactccgacacggtccagggccagctcagagagtaccgagcctactactggagggagagcagcttgctgaagaacctgtgggtgtctcagaagagacagcaagccagcttccctggtgaccgcctccgtggcgtggtgtcccgcctcttcccctacagtaactacaagctggagatggttgtggtcaatgggagaggtgatgggcctcgcagtgagaccaaggagttcaccaccccggaaggagtacccagtgcccctaggcgtttccgagtccggcagcccaacctggagacaatcaacctggaatgggatcatcctgagcatccaaatgggatcatgattggatacactctcaaatatgtggcctttaacgggaccaaagtaggaaagcagatagtggaaaacttctctcccaatcagaccaagttcacggtgcaaagaacggaccccgtgtcacgctaccgctttaccctcagcgccaggacgcaggtgggctctggggaagccgtcacagaggagtcaccagcacccccgaatgaagcttacaccaacaaccaagcggacatcgccacccagggctggttcattgggcttatgtgcgccatcgccctcctggtgctgatcctgctcatcgtctgtttcatcaagaggagtcgcggcggcaagtacccagtacgagaaaagaaggatgttccccttggccctgaagaccccaaggaagaggatggctcatttgactatagtgatgaggacaacaagcccctgcagggcagtcagacatctctggacggcaccatcaagcagcaggagagtgacgacagcctggtggactatggcgagggtggcgagggtcagttcaatgaagacggctccttcatcggccagtacacggtcaaaaaggacaaggaggaaacagagggcaacgaaagctcagaggccacgtcacctgtcaatgctatctactctctggcctaacggagcccacccaggcacagccaccactttgcaagtgggaggaggggagaaggggagacaaaaccactgcagacctaccacgaagccaccaccaccttcagtaacaagggtacgatatgggggtctgccaagctgtgaggaccagtagccaccaagccacccacaagccccctcccaatgaccccccttcagccccgggtgccaccagtgtgggagagctggagccgtggctgagctcagctggagggagcctggccccttgcccggtctcgcagccaccccgagcgttccaccacactgtccgcccttggcctcggcacacgctcaccttttctgttggttacgggacttctcattgtcttaatttcgctttgtgcatcttcccctccagacccaatgtctctgttttcttttccttttgaaaaagagtccctggaaaagaaagaataagtggattctcccccaggagaatcctttttgcaaagataggcaaaaaggattgaatccataccagaacacgtagacaggctgtaatattcaaaccacctctgggccaatgcatttccaaaggatgcctttctcgccatatgcctcccctggcccccagcccctctgcctcggccttgtcagttgctgagctgggcttggctcctttctggaaaatgacagtatttttggcagggagaaggtgcgcaggcctccttgctgctctctggtttggttgggaggtgtgtttacctcttgctcctcattcctcccctgcccttttctctggaatatctaagatgtgagctgcattgactctgaagacgtttgaggaacaggagtgggcactgatagaaaggacttcaacgccagtgactgtgtacctccagcagaagaaaatcaggtgtctggtcttgggggcactgtgctcacttctagagagaagaaaaaggctgggtttggacttcatgcctcctcactggtgaaacccaggatgtagatagagggccacacccaccctgtccagagtagagggcacctgtccacgtggccagggcccatgctgccaccctcgaggagatggaaccctgtgatgcaaaagctttgctggtgtgtttggggcataaggcactgctccccttccatctctagcagatatcatcttctcagccaattctgtaggacactgaggctcttgtttgacatggtgtgtggatggggacttgccccaagactgagcaggtctgccctttcattggggtgtatacatatcaggggaccctgaggtggcaccgtactcagtgttgtgatgcccccacctagggaggactcaatgctctttgtatgccttatgcagcgctgatctgtccctggagttcccaggttcccagctccccccctgcaagccttgaagcctccagcaacgtctatctccaggagagcagggcagcctatgcaagtgttccggcaggaccagaagtggccactcaacacacgtcctcaccagtcaccccaaatggagacactcgcagacctgcagttctcagaccgaaggtgctgccttcatcctccccacctaatgcatttttgaaaccaaaggtacctagcctcagagacagagaaggagagggggagatcttgagtctaagaggaaccctttagctgtttctgcagctgaggtcagtttcaggagggtgaagctgatccccaggaatggatcagctgccatgggcacagcctccgatttgagcctctccggctgccagccagggggcctgggccagaccagggctctgtccttccgtgactttattaaagcaacatttgccacatgtttaagccgcaaaggtattagcaatgcttgcatcattaataatcattcagttgaaggtcaagcccatagacacacactctctgctggtaagaaaccatagcccagaactgagccaataaggttgtttgaacctgagagtgtgtaatggtcatttgggccaagcctcagctagggctgctgcctggacgcctgaggggcagcttatcacagtgcaaggggacagggtaaacagcagggggtggggtgtgagcttggagggcccctcccctggatttcctccaacacctgcttggatactaggcccactgtccctgaagggaatgtcagggaagtgtgcctgtgagctgaattaaaggactggcctttccagaaaacgctttggatctgagcagagtagtcagtttctcagacactcattccatactgcaccgtacatgccagcgtacccattgcaccgaaagcaggcccttagggcaggaagggacgatgagcaagtctgccacaccacctggtgactgggaagggctgcttctctcgtaagggtcttggggagaagtaagcccgcagcctgcctctgcacctcgttccagtgtcctgccaggctctgtactgtcctttgtgtatgaagaaaatgctgttagccctctctcaggctgctgttctgtgggtgctgagagctgccccccatcaccacgccatcacacccctctgagcagaagcaaatctgaggctgaagaattaagttttccccaagcaaggaaggcaggtggtcagagagatcaaacgctgaggcgtggggattgcaggattcaggaggcagcccctttggggaagaggagggtgcattttccatggagcccatgtcagagtccactccagctcagcaggaaagtggaattgcccagtactgcctgccagctgggtctcccaagcaactaccccaagacataccaacagtgaagccaggacagcaccatgccatcggcgctccagtctgtctggctgggaggaaagtgctgggcatcttacagtaactctagaagttcctttgactaggctgcaatcccacctatatgctcagccctaagagctgtggtttcctgtgctctcatttgtccattcattcattcattcattcattcagcaaataatctgaaatccagtctgaactaaggcctgagctgtggataccatggcgcgtgagttagatgtggtccctgccctcatggggctgacagtcctaaaatcaagtgctaggacacagtggccattgagctgggagcattcttccctctaccgcttaagccactgatggctgcgagcttgaagagagggattctgagggagagcttggtccatctggtcaccaaggctgggcgggacagagcagtcaagaaccacggtgtggcttgagaaacagtcctgcttcctgagcctctttgctctgcctcttggggcaagctccttaacctgtctgtatttttatgcctctgtctcccattcagttcctccttgaatacctctttctacagagaggcacgggctcccctgaaggattgtcgaggccagggttcgggaagtacactgccatcggtcaggggacagctgcctcccaccttgcctgggtgatggtgaatgggactcatcttttcctgccttgcttttgaggagatggttgaatttaagctaacaggaaagccaaaccagcaccctcctttgtgctctgagaggttggagacatctggtccaccccattgcccctgcccctggcaagccctgaagtcgggagaggtgaccacaggtctgaaaatcagccagtgccaacattgcttgccctgcaaggtgcaactgagcccacatagcgcattcatagtttccctgaccacagccttgggaagacggtggaaacccgaggatgtgtgggtttcccagctaacggacaagctcccctgccacacccagtgcccacgcatgctcacatacatacagcagaccacaaccctgttgccaagcagtgcttccaagggatagcgatccagattccaacattgtcttggagagggttagtccacatccaagttgcgtgagataagatgcaaagggctctgtgtggatgaggaacgcaccttagaggagtgggaaaggccaccagggttgggccctgtttaggtaattcctgttggcagcacctagagagagcatctgagctgaaggagtgggaaactttgcccaagcaatggcacgggcagcgggctctttctggcgccctgtgctggagcagggccaagtcttagggcatcacaaacagcccatttgatggagggagcagggacatagcacatttttgtctgtctttgtgaggctgctttgctaactctctgaggagaggaagcctctcgggctttccgtcggctggggctagtgccagagaatcccttctcagtggccagcaggttcctgggaggccggcacaaggcaccgctccccactcatgacaccttggtgcagagtgacctcctgcccagtcaccactccggccagccccagccaaacacacaaaagcccatggttgcggttgcatctacaccgttagttggcaaaggatcctgcttgagctctgcgtggtggccaaggagtagcatggaggagggccctgattttaaaaaggaaaaatagagaggcctcaaaacaatgaaacaaagagcttgatatgtcaagaggagaccaaggccctgggaggcataggcaagccgggcagagtcagaccagtgccctcccttgaccatctcctagcattccttaacctagacaggggctaccccatgtgagtccaagccagactttgtggctgtccccagcctgcacagcccaagcccagggaagtgtcctttctttcccttccttactaataatgggccttcctgagacacattcagagaaggatcagagagaaaggagaaccatccaggagagccacaagcgtccaccaaacagtgtctcaggcctcacctgaagctgctgttcctcctatcagcacactagtattaaatgggtgttccataatgaggagaatggaaataggtacaaggcatctagcttaggacagaatcggatttcggcatgtgaaggaatcccagagctgatctcattgaaatgatctatcgtacagacaaggatatgcaaatccacagaagtgaagggatttttgctcaagatcacatagctggtaaactaaggtaaggttagggcttgaacttgggccttctgactccttgtccagtcagtgttctttcatctcaccacagctgcctcctttgaaacagaggtattaagatctgtccttctggttcaccctctcatacctctttactgcgtctcccacatcccccacatgcctcccaaaatgaaagacaaacaggattgtttctgagaccaagatcagtctgtctgtgatcagcctgtgtgtggttcacccagtcatgcaattaagggcagatctgggccagtggaataggatagctgattggtgtttgttactgtgaaccctagaccgtaccccgtagaatggtgtctcttgctttgtaacacatcgggccttcagtgtgctgtattcctcagaagtgagggcatctcggtccattctgcccatggccacagggtgcagagaggcagcagggcccatgcaagctgccaccctgggatttgctgggctggagttcaacagatgtaaagacttcagtgaagcaataaacacaaaactctgggagaagatatccagaattttgtacattactctgtttctttttcaaaaatgaggcagatcagatgcccctgagctgcccctttttttctgattcccaactgcaatgtcctcagtcagtgttgtccctctgcccggctccccagctctttgccaacctcttcacactccccttgagctgagcatcagtcgcctgtgacgtggccaccttctgtcctgctcccactcccgacccatgctggaccccggaggacctcctgccccgcccccaccacacacccatatcccccaccattccaatttgttctttcccgtggggaattttttttcccagcgtctccatcccttcctacatatccacacacacacaaattggtctgatcttttttccattggttaaacatttaactccatgccagaccttgttttaacccctctcacatcatgttctttccttttttgcgagttattttgcattaaccaactttgtcagtgacagatgcgtatctgagggtgtcacacacgaccttcagcagggaagacttctgggccatggagggccgtctaatacatggacttataaactgactgcatgagcaatgaaaaggccaaattattctgaattttttttgaatcactgtaaaaaaactgatttcttttgtatagagaacactaaacgtataataaaagttgttcaaaatgga

SEQ ID NO: 253 - DNA, 9802 bp, Homo sapiens
gcgcacgggctggtctctgccctaatgcggcggctggcggcgagaggcgctgcaggggacgcgggggaagtggcggcgccggcagcggacagctcggacagcgcccagggccggagcccgagcccttggaggttgattgacttatgtgcaatttgggacgctggagtttaccttccctccgcagcctggaacagagcctcctctggtgttgcaaggaagaggctgaatgaggcagagaagctgagtgctgtccaggaggcccagttaaagcggctcgaggtgacaagaccccgagtgctggggagcagggagcagggccaggtgccgaggatggccaggcagccaccgccgccctgggtccatgcagccttcctcctctgcctcctcagtcttggcggagccatcgaaattcctatggatctgacgcagccgccaaccatcaccaagcagtcagcgaaggatcacatcgtggacccccgtgataacatcctgattgagtgtgaagcaaaagggaaccctgcccccagcttccactggacacgaaacagcagattcttcaacatcgccaaggacccccgggtgtccatgaggaggaggtctgggaccctggtgattgacttccgcagtggcgggcggccggaggaatatgagggggaatatcagtgcttcgcccgcaacaaatttggcacggccctgtccaataggatccgcctgcaggtgtctaaatctcctctgtggcccaaggaaaacctagaccctgtcgtggtccaagagggcgctcctttgacgctccagtgcaaccccccgcctggacttccatccccggtcatcttctggatgagcagctccatggagcccatcacccaagacaaacgtgtctctcagggccataacggagacctatacttctccaacgtgatgctgcaggacatgcagaccgactacagttgtaacgcccgcttccacttcacccacaccatccagcagaagaaccctttcaccctcaaggtcctcaccaaccacccttataatgactcgtccttaagaaaccaccctgacatgtacagtgcccgaggagttgcagaaagaacaccaagcttcatgtatccccagggcaccgcgagcagccagatggtgcttcgtggcatggacctcctgctggaatgcatcgcctccggggtcccaacaccagacatcgcatggtacaagaaaggtggggacctcccatctgataaggccaagtttgagaactttaataaggccctgcgtatcacaaatgtctctgaggaagactccggggagtatttctgcctggcctccaacaagatgggcagcatccggcacacgatctcggtgagagtaaaggctgctccctactggctggacgaacccaagaaccttattctggctcctggcgaggatgggagactggtgtgtcgagccaatggaaaccccaaacccactgtccagtggatggtgaatggggaacctttgcaatcggcaccacctaacccaaaccgtgaggtggccggagacaccatcatcttccgggacacccagatcagcagcagggctgtgtaccagtgcaacacctccaacgagcatggctacctgctggccaacgcctttgtcagtgtgctggatgtgccgcctcggatgctgtcgccccggaaccagctcattcgagtgattctttacaaccggacgcggctggactgccctttctttgggtctcccatccccacactgcgatggtttaagaatgggcaaggaagcaacctggatggtggcaactaccatgtttatgagaacggcagtctggaaattaagatgatccgcaaagaggaccagggcatctacacctgtgtcgccaccaacatcctgggcaaagctgaaaaccaagtccgcctggaggtcaaagaccccaccaggatctaccggatgcccgaggaccaggtggccagaaggggcaccacggtgcagctggagtgtcgggtgaagcacgacccctccctgaaactcaccgtctcctggctgaaggatgacgagccgctctatattggaaacaggatgaagaaggaagacgactccctgaccatctttggggtggcagagcgggaccagggcagttacacgtgtgtcgccagcaccgagctagaccaagacctggccaaggcctacctcaccgtgctaggacggccagaccggccccgggacctggagctgaccgacctggccgagaggagcgtgcggctgacctggatccccggggatgctaacaacagccccatcacagactacgtcgtccagtttgaagaagaccagttccaacctggggtctggcatgaccattccaagtaccccggcagcgttaactcagccgtcctccggctgtccccgtatgtcaactaccagttccgtgtcattgccatcaacgaggttgggagcagccaccccagcctcccatccgagcgctaccgaaccagtggagcaccccccgagtccaatcctggtgacgtgaagggagaggggaccagaaagaacaacatggagatcacgtggacgcccatgaatgccacctcggcctttggccccaacctgcgctacattgtcaagtggaggcggagagagactcgagaggcctggaacaacgtcacagtgtggggctctcgctacgtggtggggcagaccccagtctacgtgccctatgagatccgagtccaggctgaaaatgacttcgggaagggccctgagccagagtccgtcatcggttactccggagaagatttacccagtgcccctaggcgtttccgagtccggcagcccaacctggagacaatcaacctggaatgggatcatcctgagcatccaaatgggatcatgattggatacactctcaaatatgtggcctttaacgggaccaaagtaggaaagcagatagtggaaaacttctctcccaatcagaccaagttcacggtgcaaagaacggaccccgtgtcacgctaccgctttaccctcagcgccaggacgcaggtgggctctggggaagccgtcacagaggagtcaccagcacccccgaatgaagcttacaccaacaaccaagcggacatcgccacccagggctggttcattgggcttatgtgcgccatcgccctcctggtgctgatcctgctcatcgtctgtttcatcaagaggagtcgcggcggcaagtacccagtacgagaaaagaaggatgttccccttggccctgaagaccccaaggaagaggatggctcatttgactatagtgatgaggacaacaagcccctgcagggcagtcagacatctctggacggcaccatcaagcagcaggagagtgacgacagcctggtggactatggcgagggtggcgagggtcagttcaatgaagacggctccttcatcggccagtacacggtcaaaaaggacaaggaggaaacagagggcaacgaaagctcagaggccacgtcacctgtcaatgctatctactctctggcctaacggagcccacccaggcacagccaccactttgcaagtgggaggaggggagaaggggagacaaaaccactgcagacctaccacgaagccaccaccaccttcagtaacaagggtacgatatgggggtctgccaagctgtgaggaccagtagccaccaagccacccacaagccccctcccaatgaccccccttcagccccgggtgccaccagtgtgggagagctggagccgtggctgagctcagctggagggagcctggccccttgcccggtctcgcagccaccccgagcgttccaccacactgtccgcccttggcctcggcacacgctcaccttttctgttggttacgggacttctcattgtcttaatttcgctttgtgcatcttcccctccagacccaatgtctctgttttcttttccttttgaaaaagagtccctggaaaagaaagaataagtggattctcccccaggagaatcctttttgcaaagataggcaaaaaggattgaatccataccagaacacgtagacaggctgtaatattcaaaccacctctgggccaatgcatttccaaaggatgcctttctcgccatatgcctcccctggcccccagcccctctgcctcggccttgtcagttgctgagctgggcttggctcctttctggaaaatgacagtatttttggcagggagaaggtgcgcaggcctccttgctgctctctggtttggttgggaggtgtgtttacctcttgctcctcattcctcccctgcccttttctctggaatatctaagatgtgagctgcattgactctgaagacgtttgaggaacaggagtgggcactgatagaaaggacttcaacgccagtgactgtgtacctccagcagaagaaaatcaggtgtctggtcttgggggcactgtgctcacttctagagagaagaaaaaggctgggtttggacttcatgcctcctcactggtgaaacccaggatgtagatagagggccacacccaccctgtccagagtagagggcacctgtccacgtggccagggcccatgctgccaccctcgaggagatggaaccctgtgatgcaaaagctttgctggtgtgtttggggcataaggcactgctccccttccatctctagcagatatcatcttctcagccaattctgtaggacactgaggctcttgtttgacatggtgtgtggatggggacttgccccaagactgagcaggtctgccctttcattggggtgtatacatatcaggggaccctgaggtggcaccgtactcagtgttgtgatgcccccacctagggaggactcaatgctctttgtatgccttatgcagcgctgatctgtccctggagttcccaggttcccagctccccccctgcaagccttgaagcctccagcaacgtctatctccaggagagcagggcagcctatgcaagtgttccggcaggaccagaagtggccactcaacacacgtcctcaccagtcaccccaaatggagacactcgcagacctgcagttctcagaccgaaggtgctgccttcatcctccccacctaatgcatttttgaaaccaaaggtacctagcctcagagacagagaaggagagggggagatcttgagtctaagaggaaccctttagctgtttctgcagctgaggtcagtttcaggagggtgaagctgatccccaggaatggatcagctgccatgggcacagcctccgatttgagcctctccggctgccagccagggggcctgggccagaccagggctctgtccttccgtgactttattaaagcaacatttgccacatgtttaagccgcaaaggtattagcaatgcttgcatcattaataatcattcagttgaaggtcaagcccatagacacacactctctgctggtaagaaaccatagcccagaactgagccaataaggttgtttgaacctgagagtgtgtaatggtcatttgggccaagcctcagctagggctgctgcctggacgcctgaggggcagcttatcacagtgcaaggggacagggtaaacagcagggggtggggtgtgagcttggagggcccctcccctggatttcctccaacacctgcttggatactaggcccactgtccctgaagggaatgtcagggaagtgtgcctgtgagctgaattaaaggactggcctttccagaaaacgctttggatctgagcagagtagtcagtttctcagacactcattccatactgcaccgtacatgccagcgtacccattgcaccgaaagcaggcccttagggcaggaagggacgatgagcaagtctgccacaccacctggtgactgggaagggctgcttctctcgtaagggtcttggggagaagtaagcccgcagcctgcctctgcacctcgttccagtgtcctgccaggctctgtactgtcctttgtgtatgaagaaaatgctgttagccctctctcaggctgctgttctgtgggtgctgagagctgccccccatcaccacgccatcacacccctctgagcagaagcaaatctgaggctgaagaattaagttttccccaagcaaggaaggcaggtggtcagagagatcaaacgctgaggcgtggggattgcaggattcaggaggcagcccctttggggaagaggagggtgcattttccatggagcccatgtcagagtccactccagctcagcaggaaagtggaattgcccagtactgcctgccagctgggtctcccaagcaactaccccaagacataccaacagtgaagccaggacagcaccatgccatcggcgctccagtctgtctggctgggaggaaagtgctgggcatcttacagtaactctagaagttcctttgactaggctgcaatcccacctatatgctcagccctaagagctgtggtttcctgtgctctcatttgtccattcattcattcattcattcattcagcaaataatctgaaatccagtctgaactaaggcctgagctgtggataccatggcgcgtgagttagatgtggtccctgccctcatggggctgacagtcctaaaatcaagtgctaggacacagtggccattgagctgggagcattcttccctctaccgcttaagccactgatggctgcgagcttgaagagagggattctgagggagagcttggtccatctggtcaccaaggctgggcgggacagagcagtcaagaaccacggtgtggcttgagaaacagtcctgcttcctgagcctctttgctctgcctcttggggcaagctccttaacctgtctgtatttttatgcctctgtctcccattcagttcctccttgaatacctctttctacagagaggcacgggctcccctgaaggattgtcgaggccagggttcgggaagtacactgccatcggtcaggggacagctgcctcccaccttgcctgggtgatggtgaatgggactcatcttttcctgccttgcttttgaggagatggttgaatttaagctaacaggaaagccaaaccagcaccctcctttgtgctctgagaggttggagacatctggtccaccccattgcccctgcccctggcaagccctgaagtcgggagaggtgaccacaggtctgaaaatcagccagtgccaacattgcttgccctgcaaggtgcaactgagcccacatagcgcattcatagtttccctgaccacagccttgggaagacggtggaaacccgaggatgtgtgggtttcccagctaacggacaagctcccctgccacacccagtgcccacgcatgctcacatacatacagcagaccacaaccctgttgccaagcagtgcttccaagggatagcgatccagattccaacattgtcttggagagggttagtccacatccaagttgcgtgagataagatgcaaagggctctgtgtggatgaggaacgcaccttagaggagtgggaaaggccaccagggttgggccctgtttaggtaattcctgttggcagcacctagagagagcatctgagctgaaggagtgggaaactttgcccaagcaatggcacgggcagcgggctctttctggcgccctgtgctggagcagggccaagtcttagggcatcacaaacagcccatttgatggagggagcagggacatagcacatttttgtctgtctttgtgaggctgctttgctaactctctgaggagaggaagcctctcgggctttccgtcggctggggctagtgccagagaatcccttctcagtggccagcaggttcctgggaggccggcacaaggcaccgctccccactcatgacaccttggtgcagagtgacctcctgcccagtcaccactccggccagccccagccaaacacacaaaagcccatggttgcggttgcatctacaccgttagttggcaaaggatcctgcttgagctctgcgtggtggccaaggagtagcatggaggagggccctgattttaaaaaggaaaaatagagaggcctcaaaacaatgaaacaaagagcttgatatgtcaagaggagaccaaggccctgggaggcataggcaagccgggcagagtcagaccagtgccctcccttgaccatctcctagcattccttaacctagacaggggctaccccatgtgagtccaagccagactttgtggctgtccccagcctgcacagcccaagcccagggaagtgtcctttctttcccttccttactaataatgggccttcctgagacacattcagagaaggatcagagagaaaggagaaccatccaggagagccacaagcgtccaccaaacagtgtctcaggcctcacctgaagctgctgttcctcctatcagcacactagtattaaatgggtgttccataatgaggagaatggaaataggtacaaggcatctagcttaggacagaatcggatttcggcatgtgaaggaatcccagagctgatctcattgaaatgatctatcgtacagacaaggatatgcaaatccacagaagtgaagggatttttgctcaagatcacatagctggtaaactaaggtaaggttagggcttgaacttgggccttctgactccttgtccagtcagtgttctttcatctcaccacagctgcctcctttgaaacagaggtattaagatctgtccttctggttcaccctctcatacctctttactgcgtctcccacatcccccacatgcctcccaaaatgaaagacaaacaggattgtttctgagaccaagatcagtctgtctgtgatcagcctgtgtgtggttcacccagtcatgcaattaagggcagatctgggccagtggaataggatagctgattggtgtttgttactgtgaaccctagaccgtaccccgtagaatggtgtctcttgctttgtaacacatcgggccttcagtgtgctgtattcctcagaagtgagggcatctcggtccattctgcccatggccacagggtgcagagaggcagcagggcccatgcaagctgccaccctgggatttgctgggctggagttcaacagatgtaaagacttcagtgaagcaataaacacaaaactctgggagaagatatccagaattttgtacattactctgtttctttttcaaaaatgaggcagatcagatgcccctgagctgcccctttttttctgattcccaactgcaatgtcctcagtcagtgttgtccctctgcccggctccccagctctttgccaacctcttcacactccccttgagctgagcatcagtcgcctgtgacgtggccaccttctgtcctgctcccactcccgacccatgctggaccccggaggacctcctgccccgcccccaccacacacccatatcccccaccattccaatttgttctttcccgtggggaattttttttcccagcgtctccatcccttcctacatatccacacacacacaaattggtctgatcttttttccattggttaaacatttaactccatgccagaccttgttttaacccctctcacatcatgttctttccttttttgcgagttattttgcattaaccaactttgtcagtgacagatgcgtatctgagggtgtcacacacgaccttcagcagggaagacttctgggccatggagggccgtctaatacatggacttataaactgactgcatgagcaatgaaaaggccaaattattctgaattttttttgaatcactgtaaaaaaactgatttcttttgtatagagaacactaaacgtataataaaagttgttcaaaatgga

SEQ ID NO: 254 - DNA, 10258 bp, Homo sapiens
cttcctcctctgcctcctcagtcttggcggagccatcgaaattcctatggatctgacgcagccgccaaccatcaccaagcagtcagcgaaggatcacatcgtggacccccgtgataacatcctgattgagtgtgaagcaaaagggaaccctgcccccagcttccactggacacgaaacagcagattcttcaacatcgccaaggacccccgggtgtccatgaggaggaggtctgggaccctggtgattgacttccgcagtggcgggcggccggaggaatatgagggggaatatcagtgcttcgcccgcaacaaatttggcacggccctgtccaataggatccgcctgcaggtgtctaaatctcctctgtggcccaaggaaaacctagaccctgtcgtggtccaagagggcgctcctttgacgctccagtgcaaccccccgcctggacttccatccccggtcatcttctggatgagcagctccatggagcccatcacccaagacaaacgtgtctctcagggccataacggagacctatacttctccaacgtgatgctgcaggacatgcagaccgactacagttgtaacgcccgcttccacttcacccacaccatccagcagaagaaccctttcaccctcaaggtcctcaccacccgaggagttgcagaaagaacaccaagcttcatgtatccccagggcaccgcgagcagccagatggtgcttcgtggcatggacctcctgctggaatgcatcgcctccggggtcccaacaccagacatcgcatggtacaagaaaggtggggacctcccatctgataaggccaagtttgagaactttaataaggccctgcgtatcacaaatgtctctgaggaagactccggggagtatttctgcctggcctccaacaagatgggcagcatccggcacacgatctcgctgctccctactggctggacgaacccaagaaccttattctggctcctggcgaggatgggagactggtgtgtcgagccaatggaaaccccaaacccactgtccagtggatggtgaatggggaacctttgcaatcggcaccacctaacccaaaccgtgaggtggccggagacaccatcatcttccgggacacccagatcagcagcagggctgtgtaccagtgcaacacctccaacgagcatggctacctgctggccaacgcctttgtcagtgtgctggatgtgccgcctcggatgctgtcgccccggaaccagctcattcgagtgattctttacaaccggacgcggctggactgccctttctttgggtctcccatccccacactgcgatggtttaagaatgggcaaggaagcaacctggatggtggcaactaccatgtttatgagaacggcagtctggaaattaagatgatccgcaaagaggaccagggcatctacacctgtgtcgccaccaacatcctgggcaaagctgaaaaccaagtccgcctggaggtcaaagaccccaccaggatctaccggatgcccgaggaccaggtggccagaaggggcaccacggtgcagctggagtgtcgggtgaagcacgacccctccctgaaactcaccgtctcctggctgaaggatgacgagccgctctatattggaaacaggatgaagaaggaagacgactccctgaccatctttggggtggcagagcgggaccagggcagttacacgtgtgtcgccagcaccgagctagaccaagacctggccaaggcctacctcaccgtgctagctgatcaggccactccaactaaccgtttggctgccctgcccaaaggacggccagaccggccccgggacctggagctgaccgacctggccgagaggagcgtgcggctgacctggatccccggggatgctaacaacagccccatcacagactacgtcgtccagtttgaagaagaccagttccaacctggggtctggcatgaccattccaagtaccccggcagcgttaactcagccgtcctccggctgtccccgtatgtcaactaccagttccgtgtcattgccatcaacgaggttgggagcagccaccccagcctcccatccgagcgctaccgaaccagtggagcaccccccgagtccaatcctggtgacgtgaagggagaggggaccagaaagaacaacatggagatcacgtggacgcccatgaatgccacctcggcctttggccccaacctgcgctacattgtcaagtggaggcggagagagactcgagaggcctggaacaacgtcacagtgtggggctctcgctacgtggtggggcagaccccagtctacgtgccctatgagatccgagtccaggctgaaaatgacttcgggaagggccctgagccagagtccgtcatcggttactccggagaagattatcccagggctgcgcccactgaagttaaagtccgagtcatgaacagcacagccatcagccttcagtggaaccgcgtctactccgacacggtccagggccagctcagagagtaccgagcctactactggagggagagcagcttgctgaagaacctgtgggtgtctcagaagagacagcaagccagcttccctggtgaccgcctccgtggcgtggtgtcccgcctcttcccctacagtaactacaagctggagatggttgtggtcaatgggagaggtgatgggcctcgcagtgagaccaaggagttcaccaccccggaaggagtacccagtgcccctaggcgtttccgagtccggcagcccaacctggagacaatcaacctggaatgggatcatcctgagcatccaaatgggatcatgattggatacactctcaaatatgtggcctttaacgggaccaaagtaggaaagcagatagtggaaaacttctctcccaatcagaccaagttcacggtgcaaagaacggaccccgtgtcacgctaccgctttaccctcagcgccaggacgcaggtgggctctggggaagccgtcacagaggagtcaccagcacccccgaatgaagctactccaaccgcagctcctcccacattgcccccgactaccgtgggtgcgacgggcgctgtgagcagtaccgatgctactgccattgctgccaccaccgaagccacaacagtccccatcatcccaactgtcgcacctaccaccatcgccaccaccaccaccgtcgccacaactactacaaccactgctgccgccaccaccaccacggagagtcctcccaccaccacctccgggactaagatacacgaatccgcccctgatgagcagtccatatggaacgtcacggtgctccccaacagtaaatgggccaacatcacctggaagcacaatttcgggcccggaactgactttgtggttgagtacatcgacagcaaccatacgaaaaaaactgtcccagttaaggcccaggctcagcctatacagctgacagacctctatcccgggatgacatacacgttgcgggtttattcccgggacaacgagggcatcagcagtaccgtcatcacctttatgaccagtacagcttacaccaacaaccaagcggacatcgccacccagggctggttcattgggcttatgtgcgccatcgccctcctggtgctgatcctgctcatcgtctgtttcatcaagaggagtcgcggcggcaagtacccagtacgagaaaagaaggatgttccccttggccctgaagaccccaaggaagaggatggctcatttgactatagtgatgaggacaacaagcccctgcagggcagtcagacatctctggacggcaccatcaagcagcaggagagtgacgacagcctggtggactatggcgagggtggcgagggtcagttcaatgaagacggctccttcatcggccagtacacggtcaaaaaggacaaggaggaaacagagggcaacgaaagctcagaggccacgtcacctgtcaatgctatctactctctggcctaacggagcccacccaggcacagccaccactttgcaagtgggaggaggggagaaggggagacaaaaccactgcagacctaccacgaagccaccaccaccttcagtaacaagggtacgatatgggggtctgccaagctgtgaggaccagtagccaccaagccacccacaagccccctcccaatgaccccccttcagccccgggtgccaccagtgtgggagagctggagccgtggctgagctcagctggagggagcctggccccttgcccggtctcgcagccaccccgagcgttccaccacactgtccgcccttggcctcggcacacgctcaccttttctgttggttacgggacttctcattgtcttaatttcgctttgtgcatcttcccctccagacccaatgtctctgttttcttttccttttgaaaaagagtccctggaaaagaaagaataagtggattctcccccaggagaatcctttttgcaaagataggcaaaaaggattgaatccataccagaacacgtagacaggctgtaatattcaaaccacctctgggccaatgcatttccaaaggatgcctttctcgccatatgcctcccctggcccccagcccctctgcctcggccttgtcagttgctgagctgggcttggctcctttctggaaaatgacagtatttttggcagggagaaggtgcgcaggcctccttgctgctctctggtttggttgggaggtgtgtttacctcttgctcctcattcctcccctgcccttttctctggaatatctaagatgtgagctgcattgactctgaagacgtttgaggaacaggagtgggcactgatagaaaggacttcaacgccagtgactgtgtacctccagcagaagaaaatcaggtgtctggtcttgggggcactgtgctcacttctagagagaagaaaaaggctgggtttggacttcatgcctcctcactggtgaaacccaggatgtagatagagggccacacccaccctgtccagagtagagggcacctgtccacgtggccagggcccatgctgccaccctcgaggagatggaaccctgtgatgcaaaagctttgctggtgtgtttggggcataaggcactgctccccttccatctctagcagatatcatcttctcagccaattctgtaggacactgaggctcttgtttgacatggtgtgtggatggggacttgccccaagactgagcaggtctgccctttcattggggtgtatacatatcaggggaccctgaggtggcaccgtactcagtgttgtgatgcccccacctagggaggactcaatgctctttgtatgccttatgcagcgctgatctgtccctggagttcccaggttcccagctccccccctgcaagccttgaagcctccagcaacgtctatctccaggagagcagggcagcctatgcaagtgttccggcaggaccagaagtggccactcaacacacgtcctcaccagtcaccccaaatggagacactcgcagacctgcagttctcagaccgaaggtgctgccttcatcctccccacctaatgcatttttgaaaccaaaggtacctagcctcagagacagagaaggagagggggagatcttgagtctaagaggaaccctttagctgtttctgcagctgaggtcagtttcaggagggtgaagctgatccccaggaatggatcagctgccatgggcacagcctccgatttgagcctctccggctgccagccagggggcctgggccagaccagggctctgtccttccgtgactttattaaagcaacatttgccacatgtttaagccgcaaaggtattagcaatgcttgcatcattaataatcattcagttgaaggtcaagcccatagacacacactctctgctggtaagaaaccatagcccagaactgagccaataaggttgtttgaacctgagagtgtgtaatggtcatttgggccaagcctcagctagggctgctgcctggacgcctgaggggcagcttatcacagtgcaaggggacagggtaaacagcagggggtggggtgtgagcttggagggcccctcccctggatttcctccaacacctgcttggatactaggcccactgtccctgaagggaatgtcagggaagtgtgcctgtgagctgaattaaaggactggcctttccagaaaacgctttggatctgagcagagtagtcagtttctcagacactcattccatactgcaccgtacatgccagcgtacccattgcaccgaaagcaggcccttagggcaggaagggacgatgagcaagtctgccacaccacctggtgactgggaagggctgcttctctcgtaagggtcttggggagaagtaagcccgcagcctgcctctgcacctcgttccagtgtcctgccaggctctgtactgtcctttgtgtatgaagaaaatgctgttagccctctctcaggctgctgttctgtgggtgctgagagctgccccccatcaccacgccatcacacccctctgagcagaagcaaatctgaggctgaagaattaagttttccccaagcaaggaaggcaggtggtcagagagatcaaacgctgaggcgtggggattgcaggattcaggaggcagcccctttggggaagaggagggtgcattttccatggagcccatgtcagagtccactccagctcagcaggaaagtggaattgcccagtactgcctgccagctgggtctcccaagcaactaccccaagacataccaacagtgaagccaggacagcaccatgccatcggcgctccagtctgtctggctgggaggaaagtgctgggcatcttacagtaactctagaagttcctttgactaggctgcaatcccacctatatgctcagccctaagagctgtggtttcctgtgctctcatttgtccattcattcattcattcattcattcagcaaataatctgaaatccagtctgaactaaggcctgagctgtggataccatggcgcgtgagttagatgtggtccctgccctcatggggctgacagtcctaaaatcaagtgctaggacacagtggccattgagctgggagcattcttccctctaccgcttaagccactgatggctgcgagcttgaagagagggattctgagggagagcttggtccatctggtcaccaaggctgggcgggacagagcagtcaagaaccacggtgtggcttgagaaacagtcctgcttcctgagcctctttgctctgcctcttggggcaagctccttaacctgtctgtatttttatgcctctgtctcccattcagttcctccttgaatacctctttctacagagaggcacgggctcccctgaaggattgtcgaggccagggttcgggaagtacactgccatcggtcaggggacagctgcctcccaccttgcctgggtgatggtgaatgggactcatcttttcctgccttgcttttgaggagatggttgaatttaagctaacaggaaagccaaaccagcaccctcctttgtgctctgagaggttggagacatctggtccaccccattgcccctgcccctggcaagccctgaagtcgggagaggtgaccacaggtctgaaaatcagccagtgccaacattgcttgccctgcaaggtgcaactgagcccacatagcgcattcatagtttccctgaccacagccttgggaagacggtggaaacccgaggatgtgtgggtttcccagctaacggacaagctcccctgccacacccagtgcccacgcatgctcacatacatacagcagaccacaaccctgttgccaagcagtgcttccaagggatagcgatccagattccaacattgtcttggagagggttagtccacatccaagttgcgtgagataagatgcaaagggctctgtgtggatgaggaacgcaccttagaggagtgggaaaggccaccagggttgggccctgtttaggtaattcctgttggcagcacctagagagagcatctgagctgaaggagtgggaaactttgcccaagcaatggcacgggcagcgggctctttctggcgccctgtgctggagcagggccaagtcttagggcatcacaaacagcccatttgatggagggagcagggacatagcacatttttgtctgtctttgtgaggctgctttgctaactctctgaggagaggaagcctctcgggctttccgtcggctggggctagtgccagagaatcccttctcagtggccagcaggttcctgggaggccggcacaaggcaccgctccccactcatgacaccttggtgcagagtgacctcctgcccagtcaccactccggccagccccagccaaacacacaaaagcccatggttgcggttgcatctacaccgttagttggcaaaggatcctgcttgagctctgcgtggtggccaaggagtagcatggaggagggccctgattttaaaaaggaaaaatagagaggcctcaaaacaatgaaacaaagagcttgatatgtcaagaggagaccaaggccctgggaggcataggcaagccgggcagagtcagaccagtgccctcccttgaccatctcctagcattccttaacctagacaggggctaccccatgtgagtccaagccagactttgtggctgtccccagcctgcacagcccaagcccagggaagtgtcctttctttcccttccttactaataatgggccttcctgagacacattcagagaaggatcagagagaaaggagaaccatccaggagagccacaagcgtccaccaaacagtgtctcaggcctcacctgaagctgctgttcctcctatcagcacactagtattaaatgggtgttccataatgaggagaatggaaataggtacaaggcatctagcttaggacagaatcggatttcggcatgtgaaggaatcccagagctgatctcattgaaatgatctatcgtacagacaaggatatgcaaatccacagaagtgaagggatttttgctcaagatcacatagctggtaaactaaggtaaggttagggcttgaacttgggccttctgactccttgtccagtcagtgttctttcatctcaccacagctgcctcctttgaaacagaggtattaagatctgtccttctggttcaccctctcatacctctttactgcgtctcccacatcccccacatgcctcccaaaatgaaagacaaacaggattgtttctgagaccaagatcagtctgtctgtgatcagcctgtgtgtggttcacccagtcatgcaattaagggcagatctgggccagtggaataggatagctgattggtgtttgttactgtgaaccctagaccgtaccccgtagaatggtgtctcttgctttgtaacacatcgggccttcagtgtgctgtattcctcagaagtgagggcatctcggtccattctgcccatggccacagggtgcagagaggcagcagggcccatgcaagctgccaccctgggatttgctgggctggagttcaacagatgtaaagacttcagtgaagcaataaacacaaaactctgggagaagatatccagaattttgtacattactctgtttctttttcaaaaatgaggcagatcagatgcccctgagctgcccctttttttctgattcccaactgcaatgtcctcagtcagtgttgtccctctgcccggctccccagctctttgccaacctcttcacactccccttgagctgagcatcagtcgcctgtgacgtggccaccttctgtcctgctcccactcccgacccatgctggaccccggaggacctcctgccccgcccccaccacacacccatatcccccaccattccaatttgttctttcccgtggggaattttttttcccagcgtctccatcccttcctacatatccacacacacacaaattggtctgatcttttttccattggttaaacatttaactccatgccagaccttgttttaacccctctcacatcatgttctttccttttttgcgagttattttgcattaaccaactttgtcagtgacagatgcgtatctgagggtgtcacacacgaccttcagcagggaagacttctgggccatggagggccgtctaatacatggacttataaactgactgcatgagcaatgaaaaggccaaattattctgaattttttttgaatcactgtaaaaaaactgatttcttttgtatagagaacactaaacgtataataaaagttgttcaaaatgga

SEQ ID NO: 255 - DNA, 10083 bp, Homo sapiens
ctgagtgctgtccaggaggcccagttaaagcggctcgaggtgacaagaccccgagtgctggggagcagggagcagggccaggtgccgaggatggccaggcagccaccgccgccctgggtccatgcagccttcctcctctgcctcctcagtcttggcggagccatcgaaattcctatggatccaagcattcagaatgagctgacgcagccgccaaccatcaccaagcagtcagcgaaggatcacatcgtggacccccgtgataacatcctgattgagtgtgaagcaaaagggaaccctgcccccagcttccactggacacgaaacagcagattcttcaacatcgccaaggacccccgggtgtccatgaggaggaggtctgggaccctggtgattgacttccgcagtggcgggcggccggaggaatatgagggggaatatcagtgcttcgcccgcaacaaatttggcacggccctgtccaataggatccgcctgcaggtgtctaaatctcctctgtggcccaaggaaaacctagaccctgtcgtggtccaagagggcgctcctttgacgctccagtgcaaccccccgcctggacttccatccccggtcatcttctggatgagcagctccatggagcccatcacccaagacaaacgtgtctctcagggccataacggagacctatacttctccaacgtgatgctgcaggacatgcagaccgactacagttgtaacgcccgcttccacttcacccacaccatccagcagaagaaccctttcaccctcaaggtcctcaccacccgaggagttgcagaaagaacaccaagcttcatgtatccccagggcaccgcgagcagccagatggtgcttcgtggcatggacctcctgctggaatgcatcgcctccggggtcccaacaccagacatcgcatggtacaagaaaggtggggacctcccatctgataaggccaagtttgagaactttaataaggccctgcgtatcacaaatgtctctgaggaagactccggggagtatttctgcctggcctccaacaagatgggcagcatccggcacacgatctcgctgctccctactggctggacgaacccaagaaccttattctggctcctggcgaggatgggagactggtgtgtcgagccaatggaaaccccaaacccactgtccagtggatggtgaatggggaacctttgcaatcggcaccacctaacccaaaccgtgaggtggccggagacaccatcatcttccgggacacccagatcagcagcagggctgtgtaccagtgcaacacctccaacgagcatggctacctgctggccaacgcctttgtcagtgtgctggatgtgccgcctcggatgctgtcgccccggaaccagctcattcgagtgattctttacaaccggacgcggctggactgccctttctttgggtctcccatccccacactgcgatggtttaagaatgggcaaggaagcaacctggatggtggcaactaccatgtttatgagaacggcagtctggaaattaagatgatccgcaaagaggaccagggcatctacacctgtgtcgccaccaacatcctgggcaaagctgaaaaccaagtccgcctggaggtcaaagaccccaccaggatctaccggatgcccgaggaccaggtggccagaaggggcaccacggtgcagctggagtgtcgggtgaagcacgacccctccctgaaactcaccgtctcctggctgaaggatgacgagccgctctatattggaaacaggatgaagaaggaagacgactccctgaccatctttggggtggcagagcgggaccagggcagttacacgtgtgtcgccagcaccgagctagaccaagacctggccaaggcctacctcaccgtgctagctgatcaggccactccaactaaccgtttggctgccctgcccaaaggacggccagaccggccccgggacctggagctgaccgacctggccgagaggagcgtgcggctgacctggatccccggggatgctaacaacagccccatcacagactacgtcgtccagtttgaagaagaccagttccaacctggggtctggcatgaccattccaagtaccccggcagcgttaactcagccgtcctccggctgtccccgtatgtcaactaccagttccgtgtcattgccatcaacgaggttgggagcagccaccccagcctcccatccgagcgctaccgaaccagtggagcaccccccgagtccaatcctggtgacgtgaagggagaggggaccagaaagaacaacatggagatcacgtggacgcccatgaatgccacctcggcctttggccccaacctgcgctacattgtcaagtggaggcggagagagactcgagaggcctggaacaacgtcacagtgtggggctctcgctacgtggtggggcagaccccagtctacgtgccctatgagatccgagtccaggctgaaaatgacttcgggaagggccctgagccagagtccgtcatcggttactccggagaagatttacccagtgcccctaggcgtttccgagtccggcagcccaacctggagacaatcaacctggaatgggatcatcctgagcatccaaatgggatcatgattggatacactctcaaatatgtggcctttaacgggaccaaagtaggaaagcagatagtggaaaacttctctcccaatcagaccaagttcacggtgcaaagaacggaccccgtgtcacgctaccgctttaccctcagcgccaggacgcaggtgggctctggggaagccgtcacagaggagtcaccagcacccccgaatgaagctactccaaccgcagctcctcccacattgcccccgactaccgtgggtgcgacgggcgctgtgagcagtaccgatgctactgccattgctgccaccaccgaagccacaacagtccccatcatcccaactgtcgcacctaccaccatcgccaccaccaccaccgtcgccacaactactacaaccactgctgccgccaccaccaccacggagagtcctcccaccaccacctccgggactaagatacacgaatccgcccctgatgagcagtccatatggaacgtcacggtgctccccaacagtaaatgggccaacatcacctggaagcacaatttcgggcccggaactgactttgtggttgagtacatcgacagcaaccatacgaaaaaaactgtcccagttaaggcccaggctcagcctatacagctgacagacctctatcccgggatgacatacacgttgcgggtttattcccgggacaacgagggcatcagcagtaccgtcatcacctttatgaccagtacagcttacaccaacaaccaagcggacatcgccacccagggctggttcattgggcttatgtgcgccatcgccctcctggtgctgatcctgctcatcgtctgtttcatcaagaggagtcgcggcggcaagtacccagtacgagaaaagaaggatgttccccttggccctgaagaccccaaggaagaggatggctcatttgactatagtgatgaggacaacaagcccctgcagggcagtcagacatctctggacggcaccatcaagcagcaggagagtgacgacagcctggtggactatggcgagggtggcgagggtcagttcaatgaagacggctccttcatcggccagtacacggtcaaaaaggacaaggaggaaacagagggcaacgaaagctcagaggccacgtcacctgtcaatgctatctactctctggcctaacggagcccacccaggcacagccaccactttgcaagtgggaggaggggagaaggggagacaaaaccactgcagacctaccacgaagccaccaccaccttcagtaacaagggtacgatatgggggtctgccaagctgtgaggaccagtagccaccaagccacccacaagccccctcccaatgaccccccttcagccccgggtgccaccagtgtgggagagctggagccgtggctgagctcagctggagggagcctggccccttgcccggtctcgcagccaccccgagcgttccaccacactgtccgcccttggcctcggcacacgctcaccttttctgttggttacgggacttctcattgtcttaatttcgctttgtgcatcttcccctccagacccaatgtctctgttttcttttccttttgaaaaagagtccctggaaaagaaagaataagtggattctcccccaggagaatcctttttgcaaagataggcaaaaaggattgaatccataccagaacacgtagacaggctgtaatattcaaaccacctctgggccaatgcatttccaaaggatgcctttctcgccatatgcctcccctggcccccagcccctctgcctcggccttgtcagttgctgagctgggcttggctcctttctggaaaatgacagtatttttggcagggagaaggtgcgcaggcctccttgctgctctctggtttggttgggaggtgtgtttacctcttgctcctcattcctcccctgcccttttctctggaatatctaagatgtgagctgcattgactctgaagacgtttgaggaacaggagtgggcactgatagaaaggacttcaacgccagtgactgtgtacctccagcagaagaaaatcaggtgtctggtcttgggggcactgtgctcacttctagagagaagaaaaaggctgggtttggacttcatgcctcctcactggtgaaacccaggatgtagatagagggccacacccaccctgtccagagtagagggcacctgtccacgtggccagggcccatgctgccaccctcgaggagatggaaccctgtgatgcaaaagctttgctggtgtgtttggggcataaggcactgctccccttccatctctagcagatatcatcttctcagccaattctgtaggacactgaggctcttgtttgacatggtgtgtggatggggacttgccccaagactgagcaggtctgccctttcattggggtgtatacatatcaggggaccctgaggtggcaccgtactcagtgttgtgatgcccccacctagggaggactcaatgctctttgtatgccttatgcagcgctgatctgtccctggagttcccaggttcccagctccccccctgcaagccttgaagcctccagcaacgtctatctccaggagagcagggcagcctatgcaagtgttccggcaggaccagaagtggccactcaacacacgtcctcaccagtcaccccaaatggagacactcgcagacctgcagttctcagaccgaaggtgctgccttcatcctccccacctaatgcatttttgaaaccaaaggtacctagcctcagagacagagaaggagagggggagatcttgagtctaagaggaaccctttagctgtttctgcagctgaggtcagtttcaggagggtgaagctgatccccaggaatggatcagctgccatgggcacagcctccgatttgagcctctccggctgccagccagggggcctgggccagaccagggctctgtccttccgtgactttattaaagcaacatttgccacatgtttaagccgcaaaggtattagcaatgcttgcatcattaataatcattcagttgaaggtcaagcccatagacacacactctctgctggtaagaaaccatagcccagaactgagccaataaggttgtttgaacctgagagtgtgtaatggtcatttgggccaagcctcagctagggctgctgcctggacgcctgaggggcagcttatcacagtgcaaggggacagggtaaacagcagggggtggggtgtgagcttggagggcccctcccctggatttcctccaacacctgcttggatactaggcccactgtccctgaagggaatgtcagggaagtgtgcctgtgagctgaattaaaggactggcctttccagaaaacgctttggatctgagcagagtagtcagtttctcagacactcattccatactgcaccgtacatgccagcgtacccattgcaccgaaagcaggcccttagggcaggaagggacgatgagcaagtctgccacaccacctggtgactgggaagggctgcttctctcgtaagggtcttggggagaagtaagcccgcagcctgcctctgcacctcgttccagtgtcctgccaggctctgtactgtcctttgtgtatgaagaaaatgctgttagccctctctcaggctgctgttctgtgggtgctgagagctgccccccatcaccacgccatcacacccctctgagcagaagcaaatctgaggctgaagaattaagttttccccaagcaaggaaggcaggtggtcagagagatcaaacgctgaggcgtggggattgcaggattcaggaggcagcccctttggggaagaggagggtgcattttccatggagcccatgtcagagtccactccagctcagcaggaaagtggaattgcccagtactgcctgccagctgggtctcccaagcaactaccccaagacataccaacagtgaagccaggacagcaccatgccatcggcgctccagtctgtctggctgggaggaaagtgctgggcatcttacagtaactctagaagttcctttgactaggctgcaatcccacctatatgctcagccctaagagctgtggtttcctgtgctctcatttgtccattcattcattcattcattcattcagcaaataatctgaaatccagtctgaactaaggcctgagctgtggataccatggcgcgtgagttagatgtggtccctgccctcatggggctgacagtcctaaaatcaagtgctaggacacagtggccattgagctgggagcattcttccctctaccgcttaagccactgatggctgcgagcttgaagagagggattctgagggagagcttggtccatctggtcaccaaggctgggcgggacagagcagtcaagaaccacggtgtggcttgagaaacagtcctgcttcctgagcctctttgctctgcctcttggggcaagctccttaacctgtctgtatttttatgcctctgtctcccattcagttcctccttgaatacctctttctacagagaggcacgggctcccctgaaggattgtcgaggccagggttcgggaagtacactgccatcggtcaggggacagctgcctcccaccttgcctgggtgatggtgaatgggactcatcttttcctgccttgcttttgaggagatggttgaatttaagctaacaggaaagccaaaccagcaccctcctttgtgctctgagaggttggagacatctggtccaccccattgcccctgcccctggcaagccctgaagtcgggagaggtgaccacaggtctgaaaatcagccagtgccaacattgcttgccctgcaaggtgcaactgagcccacatagcgcattcatagtttccctgaccacagccttgggaagacggtggaaacccgaggatgtgtgggtttcccagctaacggacaagctcccctgccacacccagtgcccacgcatgctcacatacatacagcagaccacaaccctgttgccaagcagtgcttccaagggatagcgatccagattccaacattgtcttggagagggttagtccacatccaagttgcgtgagataagatgcaaagggctctgtgtggatgaggaacgcaccttagaggagtgggaaaggccaccagggttgggccctgtttaggtaattcctgttggcagcacctagagagagcatctgagctgaaggagtgggaaactttgcccaagcaatggcacgggcagcgggctctttctggcgccctgtgctggagcagggccaagtcttagggcatcacaaacagcccatttgatggagggagcagggacatagcacatttttgtctgtctttgtgaggctgctttgctaactctctgaggagaggaagcctctcgggctttccgtcggctggggctagtgccagagaatcccttctcagtggccagcaggttcctgggaggccggcacaaggcaccgctccccactcatgacaccttggtgcagagtgacctcctgcccagtcaccactccggccagccccagccaaacacacaaaagcccatggttgcggttgcatctacaccgttagttggcaaaggatcctgcttgagctctgcgtggtggccaaggagtagcatggaggagggccctgattttaaaaaggaaaaatagagaggcctcaaaacaatgaaacaaagagcttgatatgtcaagaggagaccaaggccctgggaggcataggcaagccgggcagagtcagaccagtgccctcccttgaccatctcctagcattccttaacctagacaggggctaccccatgtgagtccaagccagactttgtggctgtccccagcctgcacagcccaagcccagggaagtgtcctttctttcccttccttactaataatgggccttcctgagacacattcagagaaggatcagagagaaaggagaaccatccaggagagccacaagcgtccaccaaacagtgtctcaggcctcacctgaagctgctgttcctcctatcagcacactagtattaaatgggtgttccataatgaggagaatggaaataggtacaaggcatctagcttaggacagaatcggatttcggcatgtgaaggaatcccagagctgatctcattgaaatgatctatcgtacagacaaggatatgcaaatccacagaagtgaagggatttttgctcaagatcacatagctggtaaactaaggtaaggttagggcttgaacttgggccttctgactccttgtccagtcagtgttctttcatctcaccacagctgcctcctttgaaacagaggtattaagatctgtccttctggttcaccctctcatacctctttactgcgtctcccacatcccccacatgcctcccaaaatgaaagacaaacaggattgtttctgagaccaagatcagtctgtctgtgatcagcctgtgtgtggttcacccagtcatgcaattaagggcagatctgggccagtggaataggatagctgattggtgtttgttactgtgaaccctagaccgtaccccgtagaatggtgtctcttgctttgtaacacatcgggccttcagtgtgctgtattcctcagaagtgagggcatctcggtccattctgcccatggccacagggtgcagagaggcagcagggcccatgcaagctgccaccctgggatttgctgggctggagttcaacagatgtaaagacttcagtgaagcaataaacacaaaactctgggagaagatatccagaattttgtacattactctgtttctttttcaaaaatgaggcagatcagatgcccctgagctgcccctttttttctgattcccaactgcaatgtcctcagtcagtgttgtccctctgcccggctccccagctctttgccaacctcttcacactccccttgagctgagcatcagtcgcctgtgacgtggccaccttctgtcctgctcccactcccgacccatgctggaccccggaggacctcctgccccgcccccaccacacacccatatcccccaccattccaatttgttctttcccgtggggaattttttttcccagcgtctccatcccttcctacatatccacacacacacaaattggtctgatcttttttccattggttaaacatttaactccatgccagaccttgttttaacccctctcacatcatgttctttccttttttgcgagttattttgcattaaccaactttgtcagtgacagatgcgtatctgagggtgtcacacacgaccttcagcagggaagacttctgggccatggagggccgtctaatacatggacttataaactgactgcatgagcaatgaaaaggccaaattattctgaattttttttgaatcactgtaaaaaaactgatttcttttgtatagagaacactaaacgtataataaaagttgttcaaaatgga

SEQ ID NO: 256 - DNA, 2494 bp, Homo sapiens
gcgcacgggctggtctctgccctaatgcggcggctggcggcgagaggcgctgcaggggacgcgggggaagtggcggcgccggcagcggacagctcggacagcgcccagggccggagcccgagcccttggaggttgattgacttatgtgcaatttgggacgctggagtttaccttccctccgcagcctggaacagagcctcctctggtgttgcaaggaagaggctgaatgaggcagagaagctgagtgctgtccaggaggcccagttaaagcggctcgaggtgacaagaccccgagtgctggggagcagggagcagggccaggtgccgaggatggccaggcagccaccgccgccctgggtccatgcagccttcctcctctgcctcctcagtcttggcggagccatcgaaattcctatggatctgacgcagccgccaaccatcaccaagcagtcagcgaaggatcacatcgtggacccccgtgataacatcctgattgagtgtgaagcaaaagggaaccctgcccccagcttccactggacacgaaacagcagattcttcaacatcgccaaggacccccgggtgtccatgaggaggaggtctgggaccctggtgattgacttccgcagtggcgggcggccggaggaatatgagggggaatatcagtgcttcgcccgcaacaaatttggcacggccctgtccaataggatccgcctgcaggtgtctaaatctcctctgtggcccaaggaaaacctagaccctgtcgtggtccaagagggcgctcctttgacgctccagtgcaaccccccgcctggacttccatccccggtcatcttctggatgagcagctccatggagcccatcacccaagacaaacgtgtctctcagggccataacggagacctatacttctccaacgtgatgctgcaggacatgcagaccgactacagttgtaacgcccgcttccacttcacccacaccatccagcagaagaaccctttcaccctcaaggtcctcaccacccgaggagttgcagaaagaacaccaagcttcatgtatccccagggcaccgcgagcagccagatggtgcttcgtggcatggacctcctgctggaatgcatcgcctccggggtcccaacaccagacatcgcatggtacaagaaaggtggggacctcccatctgataaggccaagtttgagaactttaataaggccctgcgtatcacaaatgtctctgaggaagactccggggagtatttctgcctggcctccaacaagatgggcagcatccggcacacgatctcggtgagagtaaaggctgctccctactggctggacgaacccaagaaccttattctggctcctggcgaggatgggagactggtgtgtcgagccaatggaaaccccaaacccactgtccagtggatggtgaatggggaacctttgcaatcggcaccacctaacccaaaccgtgaggtggccggagacaccatcatcttccgggacacccagatcagcagcagggctgtgtaccagtgcaacacctccaacgagcatggctacctgctggccaacgcctttgtcagtgtgctggatgtgccgcctcggatgctgtcgccccggaaccagctcattcgagtgattctttacaaccggacgcggctggactgccctttctttgggtctcccatccccacactgcgatggtttaagaatgggcaaggaagcaacctggatggtggcaactaccatgtttatgagaacggcagtctggaaattaagatgatccgcaaagaggaccagggcatctacacctgtgtcgccaccaacatcctgggcaaagctgaaaaccaagtccgcctggaggtcaaagaccccaccaggatctaccggatgcccgaggaccaggtggccagaaggggcaccacggtgcagctggagtgtcgggtgaagcacgacccctccctgaaactcaccgtctcctggctgaaggatgacgagccgctctatattggaaacaggatgaagaaggaagacgactccctgaccatctttggggtggcagagcgggaccagggcagttacacgtgtgtcgccagcaccgagctagaccaagacctggccaaggcctacctcaccgtgctaggtaactgcccatgctcaccctggcactgaccagccccaccccctccccagcagccagagaagcagtggcccggggcagttccgagggcagtgcctgcagtcaagtggccgggtcaggcgtggtgatctcttcttgcctcgtgatgtcagggttagggagctgccagtttcagaacaagctgtgctggacaggttacctcctgagtggagtcattaacttccccacgtctcaactgaaaggggcctgagtgatatagagaaagtggagaggggtttctcgttgtgatcattttacctttcttacagctaactccaccactaagtcaattaaaacaatccatccttaaagcaa

SEQ ID NO: 257 - DNA, 4625 bp, Homo sapiens
tcgggagacatggcgggcgttaaagagaagaaaccagtgtgtgtgtagtatgtgttttttgcatggggcagttggtaaaaacaccgcgtcccttatctgtatggcttcagagcaatgcgagacggaaaaggttttttgcaaggcttcctgtattttgctctcgtggcattatccttcagtggggctattggactgacttttcttatgctgggatgtgccttagaggattatggcgtttactggcccttattcgtcctgattttccacgccatctcccccatcccccatttcattgccaaaagagtcacctatgactcagatgcaaccagtagtgcctgtcgggaactggcatatttcttcactactggaattgttgtttctgcctttggatttcctgttattcttgctcgtgtggctgtgatcaaatggggagcctgcggccttgtgttggcaggcaatgcagtcattttccttacaattcaagggtttttccttatatttggaagaggagatgattttagctgggagcagtggtagcactttattctgattacagtgcattgaatttcttagaactcatactatctgtatacatgtgcacatgcggcattttactatgaaatttaatatgctgggttttttaatacctttatatatcatgttcactttaagaaagacttcataagtaggagatgagttttattctcagcaaatagacctgtcaaatttagattatgttactcaaattatgttacttgtttggctgttcatgtagtcacggtgctctcagaaaatatattaacgcagtcttgtaggcagctgccaccttatgcagtgcatcgaaaccttttgcttggggatgtgcttggagaggcagataacgctgaagcaggcctctcatgacccaggaaggccggggtggatccctctttgtgttgtagtccatgctattaaaagtgtggcccacagaccaagagcctcaacatttcctagagccttattagaaatgcagaatctgaagccccactctggacccaggacattttgatgagatccaaaggagttgtatgcacatgaaagtttgagaagcatcatcatagagaagtaaacatcacacccaacttccttatctttccagtggctaaaccacttaacctctctgggtgttacctgctcatttgtttaaaaaaaaaaaaaaagtctcacctgctttcatgctgaggacaagttcagatgttcaagcctataatatttaggcagttcctcaaatttatgaaaagtgttctcagaattgggagacagtcaaagggtacaaagcctcagttaggaggaataagtgtgatttttttttaaagatcacttgcacagcatgctaaatataggaataattgaatgtatatttcaatattgctaagagagtaaatttctaatgttctcataaaaaagttaaatatttgagatcatatgttaattagtgtaatcattccaccttatattcaaaaatcataaaaccgtattgtaccctataaaaatatacaataatttgtcaatatataatcaaaataaaaaacaaaacatactctctcccccaaaaaaacatctcagtggggaacagatgtatcttttcatctgaaagacaatgctgggggaagagctccactgagatgcgggcagggaggctgggctcgagccagcccctgcgttagcaggagggggagaacagataggtaactcttttacatttcctttatgatctggcacttctccccagctccttccctctgccccccacccctactcctcaacagttctggtttgccctgacttctctacggctctggcttcttcccgaagagatataggagccatgtaagcacgcagtgggtgaactgcttaatttcactacgtgttgatgtacttgtcttccgtcctgtaggtcttttctatataactttatgccacccttaaatgaatcattgggtatacctgtcatgttggatcctgtaatcacagttttccctgctcacctttttgtctaagatctattgagaaagggaaatatgggaaggagaaccatttgatcagaatacaaccaatagtctttaagcattgttaaagtatgaaactgaaatacattcaaaacacttaatccttgaggcttgtgatctgagtaattagcaggtatgatgctgggactggaaaatagaaagtaataactaaagggttaatgtgcaacgttattttttggccttgttcatgattttatgttttcagtgtcctgtgtacatatagaattgttaaagttgtcatttccaatatttatattagaaaaattatttagatactttataattttaaccggcatttttaataatgacacttgcatttattgtattgtaataaatttcacttttaactttaaaagtttaactttaaaatttttttgtgatgttgccttgcctgaaaagataacaaaaatgagagaatttcttgatgttttaaaatgggcagttttgagcaataatctgtcctaacagaacagtagcaataagttttaggataccatcttgaatgtctagttggtgtgcaatagcttttctttctaagatggcaataatgattcatttctactacattttgcaaaagtgtttttgttgcttatacacattttcaataaccaaggtagccttcatatgtagccttaaagcattacctcttgattgtatctttagattgatataaagtacttgcatatagagtatttgaagtgatagattattagatttgctctatgtctgaaaagagagctattctgcagtgcctaaatatcatttaaacagtaaatattaataggaaatattgctatatctgaatatataatacaaaagtttgatcatggtgacacaaatgttggacatttttttccttataaaaggctctttttttatatattgtacaatatatttggagattcagagcatagtgactatagtcgaaaactgagattgcacttccaaaattggccacaagtaaataatcttatgaagggattctttatcatgtttcaaacaagtgggttacaagcagactttgagacacttttccacagaaacaatactatgaattggtgattgagttcccaggccaagcctccctcaacaggttcaactctaatatacctaacctgtgatactgaaggtgcctgcctgagttttgggtctctgagacagggtagtgtgagtagtttggaggaaggacagtgcaactttccaccccttttcctaagaacaaggtctttctccttttaatttttccactcattttcacctcctaatgcccttgagatccaggtacactcctgggagttttgttcacctctcccaactgagaaccttcccactgggctccatcctccctcctgaggttcttcatattccagagtcacccacccttctcctcccattagtcagttctctaagtacagctgatgtcatgtggtgctgagaagaaagcagatcacacttcatcacagaaagaatgccttgtgattatcttctccacatctgaaattccttttgacacctgcattgggccgactgccattcccatgactgctgcacctgcgtttttagagaatgcctcataacccactgattctcattcacagagaatgggagaacggaatgaagaaagattccagcagcttatagaaggatagcaatattttgggacagggaaaatcctgtcatacctcatctcttcctcaggaggagttctgagctggtcctgcttttcatagttgtttcttttcttccacttaagaactcatagatttttcttactgtcctaaggaagtccttacctctgaggtatctcctcaatgaatactgttttcaaggctgaaatagttcattatgttaataaccttctttatgttctcagggaaatgcttaggtggtgtcacaaaatgtgccttttcttttctttttttttttttttttttgaggcagagtctcgctctgttgcccaggctggagtgcagtggtgcgatcttggctcactgcaagctccgcctcccgggttcacgccattctcctgcctcagcctcccaaggagctgggactacaggctcccgccaccacgcctggctaatttttttgtatttttagtaaagacgggtttcatcgtgttagccaggatggtctcgatctcctgacctcatgatccgcccgcctctgcctcccaaagtgctgggattacaggcctgagccactgtgcccagccaaaatgtgcctttgcaaagtttgcgaaatcagattttgtatcccaatagaaccaaaatatttatgaggatgctagcattttccaagcatagtaattagttcacaactgagaaatattatgtctgtagtagataaatattagttgtgcattttaatttaattctcctttttccattttgtctcatgaagtaccttattgcaaaaatcccactgagtaatagctcataaattataatctttcaaatagccatgctaccagcgtacaacagtgatacatgtaaccccaaatgtgatgtgagaggacgattactttgtaaataaaacttgttattgacattttaa

SEQ ID NO: 258 - DNA, 4777 bp, Homo sapiens
agtagcgaggccgggtctgaactatcaggcgcggcctctgcgagctgggggcggggttctgcaccggcgggggcggggttgtgagtggtgggggcggggtctggagcagcaggcgccgcgtttgcgagctaaggtcggagttctgcaccggcgggggcggggctctgcgtggccggggcgggctcgggatccgcggggcgactcccggtctggcttgggcaggctgcccgggccgtggcaggaagccggaagcagccgcggccccagttcgggagacatggcgggcgttaaagctctcgtggcattatccttcagtggggctattggactgacttttcttatgctgggatgtgccttagaggattatggcgtttactggcccttattcgtcctgattttccacgccatctcccccatcccccatttcattgccaaaagagtcacctatgactcagatgcaaccagtagtgcctgtcgggaactggcatatttcttcactactggaattgttgtttctgcctttggatttcctgttattcttgctcgtgtggctgtgatcaaatggggagcctgcggccttgtgttggcaggcaatgcagtcattttccttacaattcaagggtttttccttatatttggaagaggagatgattttagctgggagcagtggtagcactttattctgattacagtgcattgaatttcttagaactcatactatctgtatacatgtgcacatgcggcattttactatgaaatttaatatgctgggttttttaatacctttatatatcatgttcactttaagaaagacttcataagtaggagatgagttttattctcagcaaatagacctgtcaaatttagattatgttactcaaattatgttacttgtttggctgttcatgtagtcacggtgctctcagaaaatatattaacgcagtcttgtaggcagctgccaccttatgcagtgcatcgaaaccttttgcttggggatgtgcttggagaggcagataacgctgaagcaggcctctcatgacccaggaaggccggggtggatccctctttgtgttgtagtccatgctattaaaagtgtggcccacagaccaagagcctcaacatttcctagagccttattagaaatgcagaatctgaagccccactctggacccaggacattttgatgagatccaaaggagttgtatgcacatgaaagtttgagaagcatcatcatagagaagtaaacatcacacccaacttccttatctttccagtggctaaaccacttaacctctctgggtgttacctgctcatttgtttaaaaaaaaaaaaaaagtctcacctgctttcatgctgaggacaagttcagatgttcaagcctataatatttaggcagttcctcaaatttatgaaaagtgttctcagaattgggagacagtcaaagggtacaaagcctcagttaggaggaataagtgtgatttttttttaaagatcacttgcacagcatgctaaatataggaataattgaatgtatatttcaatattgctaagagagtaaatttctaatgttctcataaaaaagttaaatatttgagatcatatgttaattagtgtaatcattccaccttatattcaaaaatcataaaaccgtattgtaccctataaaaatatacaataatttgtcaatatataatcaaaataaaaaacaaaacatactctctcccccaaaaaaacatctcagtggggaacagatgtatcttttcatctgaaagacaatgctgggggaagagctccactgagatgcgggcagggaggctgggctcgagccagcccctgcgttagcaggagggggagaacagataggtaactcttttacatttcctttatgatctggcacttctccccagctccttccctctgccccccacccctactcctcaacagttctggtttgccctgacttctctacggctctggcttcttcccgaagagatataggagccatgtaagcacgcagtgggtgaactgcttaatttcactacgtgttgatgtacttgtcttccgtcctgtaggtcttttctatataactttatgccacccttaaatgaatcattgggtatacctgtcatgttggatcctgtaatcacagttttccctgctcacctttttgtctaagatctattgagaaagggaaatatgggaaggagaaccatttgatcagaatacaaccaatagtctttaagcattgttaaagtatgaaactgaaatacattcaaaacacttaatccttgaggcttgtgatctgagtaattagcaggtatgatgctgggactggaaaatagaaagtaataactaaagggttaatgtgcaacgttattttttggccttgttcatgattttatgttttcagtgtcctgtgtacatatagaattgttaaagttgtcatttccaatatttatattagaaaaattatttagatactttataattttaaccggcatttttaataatgacacttgcatttattgtattgtaataaatttcacttttaactttaaaagtttaactttaaaatttttttgtgatgttgccttgcctgaaaagataacaaaaatgagagaatttcttgatgttttaaaatgggcagttttgagcaataatctgtcctaacagaacagtagcaataagttttaggataccatcttgaatgtctagttggtgtgcaatagcttttctttctaagatggcaataatgattcatttctactacattttgcaaaagtgtttttgttgcttatacacattttcaataaccaaggtagccttcatatgtagccttaaagcattacctcttgattgtatctttagattgatataaagtacttgcatatagagtatttgaagtgatagattattagatttgctctatgtctgaaaagagagctattctgcagtgcctaaatatcatttaaacagtaaatattaataggaaatattgctatatctgaatatataatacaaaagtttgatcatggtgacacaaatgttggacatttttttccttataaaaggctctttttttatatattgtacaatatatttggagattcagagcatagtgactatagtcgaaaactgagattgcacttccaaaattggccacaagtaaataatcttatgaagggattctttatcatgtttcaaacaagtgggttacaagcagactttgagacacttttccacagaaacaatactatgaattggtgattgagttcccaggccaagcctccctcaacaggttcaactctaatatacctaacctgtgatactgaaggtgcctgcctgagttttgggtctctgagacagggtagtgtgagtagtttggaggaaggacagtgcaactttccaccccttttcctaagaacaaggtctttctccttttaatttttccactcattttcacctcctaatgcccttgagatccaggtacactcctgggagttttgttcacctctcccaactgagaaccttcccactgggctccatcctccctcctgaggttcttcatattccagagtcacccacccttctcctcccattagtcagttctctaagtacagctgatgtcatgtggtgctgagaagaaagcagatcacacttcatcacagaaagaatgccttgtgattatcttctccacatctgaaattccttttgacacctgcattgggccgactgccattcccatgactgctgcacctgcgtttttagagaatgcctcataacccactgattctcattcacagagaatgggagaacggaatgaagaaagattccagcagcttatagaaggatagcaatattttgggacagggaaaatcctgtcatacctcatctcttcctcaggaggagttctgagctggtcctgcttttcatagttgtttcttttcttccacttaagaactcatagatttttcttactgtcctaaggaagtccttacctctgaggtatctcctcaatgaatactgttttcaaggctgaaatagttcattatgttaataaccttctttatgttctcagggaaatgcttaggtggtgtcacaaaatgtgccttttcttttctttttttttttttttttttgaggcagagtctcgctctgttgcccaggctggagtgcagtggtgcgatcttggctcactgcaagctccgcctcccgggttcacgccattctcctgcctcagcctcccaaggagctgggactacaggctcccgccaccacgcctggctaatttttttgtatttttagtaaagacgggtttcatcgtgttagccaggatggtctcgatctcctgacctcatgatccgcccgcctctgcctcccaaagtgctgggattacaggcctgagccactgtgcccagccaaaatgtgcctttgcaaagtttgcgaaatcagattttgtatcccaatagaaccaaaatatttatgaggatgctagcattttccaagcatagtaattagttcacaactgagaaatattatgtctgtagtagataaatattagttgtgcattttaatttaattctcctttttccattttgtctcatgaagtaccttattgcaaaaatcccactgagtaatagctcataaattataatctttcaaatagccatgctaccagcgtacaacagtgatacatgtaaccccaaatgtgatgtgagaggacgattactttgtaaataaaacttgttattgacattttaaaaaaaaaaaaaaaaaa

SEQ ID NO: 259 - DNA, 611 bp, Homo sapiens
agtagcgaggccgggtctgaactatcaggcgcggcctctgcgagctgggggcggggttctgcaccggcgggggcggggttgtgagtggtgggggcggggtctggagcagcaggcgccgcgtttgcgagctaaggtcggagttctgcaccggcgggggcggggctctgcgtggccggggcgggctcgggatccgcggggcgactcccggtctggcttgggcaggctgcccgggccgtggcaggaagccggaagcagccgcggccccagttcgggagacatggcgggcgttaaagctctcgtggcattatccttcagtggggctattggactgacttttcttatgctgggatgtgccttagaggattatggagatgccacaacacccagctgattttttttagaagtttttgtagagaccgagtctctctgtgttgctcaggctggtcttgaactcctggcctcaagtcatcctcctgccttggcctcccaaagctgtatcttgatagtgaaccaggattatcatctatattggaagtcagcaaactgccacatataacctgctacctgtttttgtaataaaggttttattgaaatacaaaaaaaaaaaaaaa

SEQ ID NO: 260 - DNA, 3069 bp, Homo sapiens
gcagggtgcacacagagccgcctttcagccgcccgagaactgcccgccgcactccacgactgcggcgcctgctctcgggccggggtctgcgcgcaccacgcggccggcagaaagggtaagagaagggaaccccgctttgcagggctccaacttcggcggacgcgttacggcgagggcgaaatgagtcggccgtgaacggtgtttcctgttccgaatcccgagagccctggaaagttttgaaggaggaggcatggcccggcagccttatcgttttccccaggcaaggattccggagagaggatcaggtgttttcaggttaaccgtcagaaatgcaatggcacatcgtgattctgagatgaaagaagaatgtctaagggaagacctgaagttttacttcatgagcccttgtgaaaaataccgagccagacgccagattccgtggaaactgggtttgcagattttgaagatagtcatggtcaccacacagcttgttcgttttggtttaagtaaccagctggtggttgctttcaaagaagataacactgttgcttttaagcacttgtttttgaaaggatattctggtacagatgaagatgactacagctgcagtgtatatactcaagaggatgcctatgagagcatcttttttgctattaatcagtatcatcagctaaaggacattaccctggggacccttggttatggagaaaatgaagacaatagaattggcttaaaagtctgtaagcagcattacaagaaagggaccatgtttccttctaatgagacactgaatattgacaacgacgttgagctcgattgtgttcaattagaccttcaggacctctccaagaagcctccggactggaagaactcatcattcttcagactggaattttatcggctcttacaggttgaaatctcctttcatcttaaaggcattgacctacagacaattcattcccgtgagttaccagactgttatgtctttcagaatacgattatctttgacaataaagctcacagtggcaaaatcaaaatctattttgacagtgatgccaaaattgaagaatgtaaagacttgaacatatttggatctactcagaaaaatgctcagtatgtcctggtgtttgatgcatttgtcattgtgatttgcttggcatctcttattctgtgtacaagatccattgttcttgctctaaggttacggaagagatttctaaatttcttcctggagaagtacaagcggcctgtgtgtgacaccgaccagtgggagttcatcaacggctggtatgtcctggtgattatcagcgacctaatgacaatcattggctccatattaaaaatggaaatcaaagcaaagaatctcacaaactatgatctctgcagcatttttcttggaacctctacgctcttggtttgggttggagtcatcagatacctgggttatttccaggcatataatgtgctgattttaacaatgcaggcctcactgccaaaagttcttcggttttgtgcttgtgctggtatgatttatctgggttacacattctgtggctggattgtcttaggaccataccatgacaagtttgaaaatctgaacacagttgctgagtgtctgttttctctggtcaacggtgatgacatgtttgcaacctttgcccaaatccagcagaagagcatcttggtgtggctgttcagtcgtctgtatttatattccttcatcagcctttttatatatatgattctcagtctttttattgcacttattacagattcttatgacaccattaagaaattccaacagaatgggtttcctgaaacggatttgcaggaattcctgaaggaatgcagtagcaaagaagagtatcagaaagagtcctcagccttcctgtcctgcatctgctgtcggaggaggaaaagaagtgatgatcacttgatacctattagctaaagttctgctaaagatgattaaagttcaggcatccttatccagcggctgagcagaggaaccccaaatgacttggacaagcagttccaaaatgactctcttatttaattgtggagtgggaaagaggactcacagttagccagctgaccatgactgaagttccagctttactttttataaacttgaatgataaagaatagaccatgggctactactgggcattagtgcaatataacagcgataataaaattctctattagtctgttaatttatgacatgatctcggaatggaaaaagatcatttcagagtgtgcgaaataatagtctttaaccatgtaattaaatatgtgtgtttattgtcaaataaggatttgttttaaaggtgattcttgggtttgaagacatttgttaattcatggtctgtacagaaatgaagctggttgcaataccaatctagagagtccaagctggtgaactattaagctgtttaaagatcacccttggcctggcacagtggttcacacctgtaatcccagcactttgggaggcctaggcaggcagactgagctcaggagcttgagaccagcctgggcaacatggcaaaaacccacctctacaaaaagtacaaaaattagtcgggcgtgatggcaggcatctgtagtcccagctacttgggaagctgaagtgggaggatcacctgagctctggaggtggaggctgccatgagccatgatcgtgccactacactccagcctgggtgacagagtgagatcctgtctcaaaaaaaaaaaaaaatcacccttaaatcaacaaaaagacctcatgctcatgcagtggacatttcttggcctgttttcctgtgggttttcttcagcatgatatgaagcaactgttggcatagccagtgggataaataagaaatggaatcatttggctgcctcgtcacttgtgctaatggtcagttgtacacacatgacatgtggaagtgacctgtagcagcggtcactcattttaacaattgaactctgctgggttgggtatttacctttgtctagaaaagaaatatgatatattttctctaaataaatttattttcatcattccaaaaaaaaaaaaaaaaa

SEQ ID NO: 261 - DNA, 2887 bp, Homo sapiens
tgatttggaaccactctggccttctctgtagtcctataaatttgaggacaggcagttttgatgcctttgggcctagaatcttggctctcttgttcccgtttcctgaggccacagaacggaagctgagtgtacttgaatggtggcaactggctgttactcgtaaatgcaatggcacatcgtgattctgagatgaaagaagaatgtctaagggaagacctgaagttttacttcatgagcccttgtgaaaaataccgagccagacgccagattccgtggaaactgggtttgcagattttgaagatagtcatggtcaccacacagcttgttcgttttggtttaagtaaccagctggtggttgctttcaaagaagataacactgttgcttttaagcacttgtttttgaaaggatattctggtacagatgaagatgactacagctgcagtgtatatactcaagaggatgcctatgagagcatcttttttgctattaatcagtatcatcagctaaaggacattaccctggggacccttggttatggagaaaatgaagacaatagaattggcttaaaagtctgtaagcagcattacaagaaagggaccatgtttccttctaatgagacactgaatattgacaacgacgttgagctcgattgtgttcaattagaccttcaggacctctccaagaagcctccggactggaagaactcatcattcttcagactggaattttatcggctcttacaggttgaaatctcctttcatcttaaaggcattgacctacagacaattcattcccgtgagttaccagactgttatgtctttcagaatacgattatctttgacaataaagctcacagtggcaaaatcaaaatctattttgacagtgatgccaaaattgaagaatgtaaagacttgaacatatttggatctactcagaaaaatgctcagtatgtcctggtgtttgatgcatttgtcattgtgatttgcttggcatctcttattctgtgtacaagatccattgttcttgctctaaggttacggaagagatttctaaatttcttcctggagaagtacaagcggcctgtgtgtgacaccgaccagtgggagttcatcaacggctggtatgtcctggtgattatcagcgacctaatgacaatcattggctccatattaaaaatggaaatcaaagcaaagaatctcacaaactatgatctctgcagcatttttcttggaacctctacgctcttggtttgggttggagtcatcagatacctgggttatttccaggcatataatgtgctgattttaacaatgcaggcctcactgccaaaagttcttcggttttgtgcttgtgctggtatgatttatctgggttacacattctgtggctggattgtcttaggaccataccatgacaagtttgaaaatctgaacacagttgctgagtgtctgttttctctggtcaacggtgatgacatgtttgcaacctttgcccaaatccagcagaagagcatcttggtgtggctgttcagtcgtctgtatttatattccttcatcagcctttttatatatatgattctcagtctttttattgcacttattacagattcttatgacaccattaagaaattccaacagaatgggtttcctgaaacggatttgcaggaattcctgaaggaatgcagtagcaaagaagagtatcagaaagagtcctcagccttcctgtcctgcatctgctgtcggaggaggaaaagaagtgatgatcacttgatacctattagctaaagttctgctaaagatgattaaagttcaggcatccttatccagcggctgagcagaggaaccccaaatgacttggacaagcagttccaaaatgactctcttatttaattgtggagtgggaaagaggactcacagttagccagctgaccatgactgaagttccagctttactttttataaacttgaatgataaagaatagaccatgggctactactgggcattagtgcaatataacagcgataataaaattctctattagtctgttaatttatgacatgatctcggaatggaaaaagatcatttcagagtgtgcgaaataatagtctttaaccatgtaattaaatatgtgtgtttattgtcaaataaggatttgttttaaaggtgattcttgggtttgaagacatttgttaattcatggtctgtacagaaatgaagctggttgcaataccaatctagagagtccaagctggtgaactattaagctgtttaaagatcacccttggcctggcacagtggttcacacctgtaatcccagcactttgggaggcctaggcaggcagactgagctcaggagcttgagaccagcctgggcaacatggcaaaaacccacctctacaaaaagtacaaaaattagtcgggcgtgatggcaggcatctgtagtcccagctacttgggaagctgaagtgggaggatcacctgagctctggaggtggaggctgccatgagccatgatcgtgccactacactccagcctgggtgacagagtgagatcctgtctcaaaaaaaaaaaaaaatcacccttaaatcaacaaaaagacctcatgctcatgcagtggacatttcttggcctgttttcctgtgggttttcttcagcatgatatgaagcaactgttggcatagccagtgggataaataagaaatggaatcatttggctgcctcgtcacttgtgctaatggtcagttgtacacacatgacatgtggaagtgacctgtagcagcggtcactcattttaacaattgaactctgctgggttgggtatttacctttgtctagaaaagaaatatgatatattttctctaaataaatttattttcatcattcca

SEQ ID NO: 262 - DNA, 3170 bp, Homo sapiens
ccatgactccctctttgggtttgaatgatttgctagggaggctcacagaactcagggaaacacatttactggtttattgtaaaggttgttacaagggatacagtgaagaatacatgaggtaagctatggggaaggagtgtagagcttccgtgccctccccgggtacaacaccctccaggaactgccatgtgttccggaagctctcccaaccctgtcctcttgggccttttatggagactttattggataggtatgattgacaaccatgtagaaatgtgactggacaaaaagggtatgaacaaacactaatagactgcatgagggaaacccagcaaggcctgtctgttcagatccttctggcctctctgtgcagccttccttcttccagggtttggggcaggaccccttctgaaatgggagtcttgtgacctacaatcagacaggaaatgcaatggcacatcgtgattctgagatgaaagaagaatgtctaagggaagacctgaagttttacttcatgagcccttgtgaaaaataccgagccagacgccagattccgtggaaactgggtttgcagattttgaagatagtcatggtcaccacacagcttgttcgttttggtttaagtaaccagctggtggttgctttcaaagaagataacactgttgcttttaagcacttgtttttgaaaggatattctggtacagatgaagatgactacagctgcagtgtatatactcaagaggatgcctatgagagcatcttttttgctattaatcagtatcatcagctaaaggacattaccctggggacccttggttatggagaaaatgaagacaatagaattggcttaaaagtctgtaagcagcattacaagaaagggaccatgtttccttctaatgagacactgaatattgacaacgacgttgagctcgattgtgttcaattagaccttcaggacctctccaagaagcctccggactggaagaactcatcattcttcagactggaattttatcggctcttacaggttgaaatctcctttcatcttaaaggcattgacctacagacaattcattcccgtgagttaccagactgttatgtctttcagaatacgattatctttgacaataaagctcacagtggcaaaatcaaaatctattttgacagtgatgccaaaattgaagaatgtaaagacttgaacatatttggatctactcagaaaaatgctcagtatgtcctggtgtttgatgcatttgtcattgtgatttgcttggcatctcttattctgtgtacaagatccattgttcttgctctaaggttacggaagagatttctaaatttcttcctggagaagtacaagcggcctgtgtgtgacaccgaccagtgggagttcatcaacggctggtatgtcctggtgattatcagcgacctaatgacaatcattggctccatattaaaaatggaaatcaaagcaaagaatctcacaaactatgatctctgcagcatttttcttggaacctctacgctcttggtttgggttggagtcatcagatacctgggttatttccaggcatataatgtgctgattttaacaatgcaggcctcactgccaaaagttcttcggttttgtgcttgtgctggtatgatttatctgggttacacattctgtggctggattgtcttaggaccataccatgacaagtttgaaaatctgaacacagttgctgagtgtctgttttctctggtcaacggtgatgacatgtttgcaacctttgcccaaatccagcagaagagcatcttggtgtggctgttcagtcgtctgtatttatattccttcatcagcctttttatatatatgattctcagtctttttattgcacttattacagattcttatgacaccattaagaaattccaacagaatgggtttcctgaaacggatttgcaggaattcctgaaggaatgcagtagcaaagaagagtatcagaaagagtcctcagccttcctgtcctgcatctgctgtcggaggaggaaaagaagtgatgatcacttgatacctattagctaaagttctgctaaagatgattaaagttcaggcatccttatccagcggctgagcagaggaaccccaaatgacttggacaagcagttccaaaatgactctcttatttaattgtggagtgggaaagaggactcacagttagccagctgaccatgactgaagttccagctttactttttataaacttgaatgataaagaatagaccatgggctactactgggcattagtgcaatataacagcgataataaaattctctattagtctgttaatttatgacatgatctcggaatggaaaaagatcatttcagagtgtgcgaaataatagtctttaaccatgtaattaaatatgtgtgtttattgtcaaataaggatttgttttaaaggtgattcttgggtttgaagacatttgttaattcatggtctgtacagaaatgaagctggttgcaataccaatctagagagtccaagctggtgaactattaagctgtttaaagatcacccttggcctggcacagtggttcacacctgtaatcccagcactttgggaggcctaggcaggcagactgagctcaggagcttgagaccagcctgggcaacatggcaaaaacccacctctacaaaaagtacaaaaattagtcgggcgtgatggcaggcatctgtagtcccagctacttgggaagctgaagtgggaggatcacctgagctctggaggtggaggctgccatgagccatgatcgtgccactacactccagcctgggtgacagagtgagatcctgtctcaaaaaaaaaaaaaaatcacccttaaatcaacaaaaagacctcatgctcatgcagtggacatttcttggcctgttttcctgtgggttttcttcagcatgatatgaagcaactgttggcatagccagtgggataaataagaaatggaatcatttggctgcctcgtcacttgtgctaatggtcagttgtacacacatgacatgtggaagtgacctgtagcagcggtcactcattttaacaattgaactctgctgggttgggtatttacctttgtctagaaaagaaatatgatatattttctctaaataaatttattttcatcattcca

SEQ ID NO: 263 - DNA, 10749 bp, Homo sapiens
acacagagccgcctttcagccgcccgagaactgcccgccgcactccacgactgcggcgcctgctctcgggccggggtctgcgcgcaccacgcggccggcagaaagggtaagagaagggaaccccgctttgcagggctccaacttcggcggacgcgttacggcgagggcgaaatgagtcggccgtgaacggtgtttcctgttccgaatcccgagagccctggaaagttttgaaggaggaggcatggcccggcagccttatcgttttccccaggcaaggattccggagagaggatcaggtgttttcaggttaaccgtcagaaatgcaatggcacatcgtgattctgagatgaaagaagaatgtctaagggaagacctgaagttttacttcatgagcccttgtgaaaaataccgagccagacgccagattccgtggaaactgggtttgcagattttgaagatagtcatggtcaccacacagcttgttcgttttggtttaagtaaccagctggtggttgctttcaaagaagataacactgttgcttttaagcacttgtttttgaaaggatattctggtacagatgaagatgactacagctgcagtgtatatactcaagaggatgcctatgagagcatcttttttgctattaatcagtatcatcagctaaaggacattaccctggggacccttggttatggagaaaatgaagacaatagaattggcttaaaagtctgtaagcagcattacaagaaagggaccatgtttccttctaatgagacactgaatattgacaacgacgttgagctcgattgtgttcaattagaccttcaggacctctccaagaagcctccggactggaagaactcatcattcttcagactggaattttatcggctcttacaggttgaaatctcctttcatcttaaaggcattgacctacagacaattcattcccgtgagttaccagactgttatgtctttcagaatacgattatctttgacaataaagctcacagtggcaaaatcaaaatctattttgacagtgatgccaaaattgaagaatgtaaagacttgaacatatttggatctactcagaaaaatgctcagtatgtcctggtgtttgatgcatttgtcattgtgatttgcttggcatctcttattctgtgtacaagatccattgttcttgctctaaggttacggaagagatttctaaatttcttcctggagaagtacaagcggcctgtgtgtgacaccgaccagtgggagttcatcaacggctggtatgtcctggtgattatcagcgacctaatgacaatcattggctccatattaaaaatggaaatcaaagcaaagaatctcacaaactatgatctctgcagcatttttcttggaacctctacgctcttggtttgggttggagtcatcagatacctgggttatttccaggcatataatgtgctgattttaacaatgcaggcctcactgccaaaagttcttcggttttgtgcttgtgctggtatgatttatctgggttacacattctgtggctggattgtcttaggaccataccatgacaaggatatagaagtgactacaggatattgaaacaagaactgtacaatactagaaagcatgtattatagttgtctgggactggcttaaggggtcacatggttacccggtgatcatcaaatgggaaatgtttggacgtgagatcactatattaaaaatgaaaattaagtgaggaaaattattataaaaaatttccaatttaaagtattatgtttttcatccaagttaattgagaagaatgaagatgggcagagactgcctaaaacgaccatagtaggtttacgatagaaatggtgacacgtcttgtctctgcagacggttttgattacagcatcatctttctgccttattaaagatcagtatctgaattctaaactattaccaaacttcagttagcattataatctcagggacatcaaagttgtgctaagatgttcttgttataaaatgatacatttgattggtagatgcatcaggaaatgaaactaggtaagccttggttttaacccaaaaaagtaaaaggagttattttatcttatggcttttcctccatttgggcctgtggcagttggaacaacagaaacaacaaaaatagcagcagctaacacttactgcttgtgtgttagacactctgctgggcatttcggtgttctttcttatttactccccacaacaacccagggtactgttagcctcacttaggtgctctgcaaggagaaaagaggttaaaaatggtaagtattccttccaagtttgtataccagttcagccttaagttttgaccttgttagttgcattaaccaaatctgtgatcaaatctggtttacaaactgttatacatgaatcttaaacctccgtgctgtcctaccagaataatgtcgagtaacctggaacactcagactttcttctttttaggtgtcacatttaatatgtctagagagaattactgtttttcctatttgagatattatataattaacaaagtgacaacctctgggttggtagtaaatcttgataatattgctcttcatactccatgtcactgctttaaaggtgactcatgagaaaaaattattctttgatatgatctctctgatttggagaacttactgtcttagagcctggaaaaatgtatttttcttccttgcttgcctcatgctctgaaagcttttccacctctttgtcactagagggcagtgttgcactgtgtggaataaataccgttcctgaggattcggctttaattcactgactccaaggtctgtggacaagtggtcccatctcctttgcaccccatccccgtctcccctacctcatcattattctggaaggtgctcagataagattgctagaattttactagatggctaccattctcaagtgctgtctgttaggcatggtgcccaagattcttcatctcccttgctgtgttaacccttccctccccttctctgtgaagaaatctgattgtcctgttacagagaataggcaccttaatatattaaataatattcctgagattacccagctagaaagtggcagagatgggattcaaacccaggtcggcctgactccagtacctgtgctttgacccataccctgtagagcttttcttggtattatctaaaacagatcattgcaagagagcatttagcctgacaagaaacagtcttgtacttggagatcaactgtgagaggacagccatgtaatcggcttcattctttcaatggtgtcaaggtcacctcatggaaaatgaggttatttgttttgtgagcctgactgcatttccatatgttcaatttgtcctttcaaaggatccaggtgaaactgggatgctctgagccagcactgtccaagaaaaatacagtttgggctacaattgagagccttgcctatactgtaaaattttctagtagctacatgaagaaataaaaaaacagatgaaattatttttaattatatattttaagcctaatatacccaaaatattatttcagcatgtattcagtataaaatattgaaatattttacattcctccatactagtctttttgatctggtggatattttatccacatagcacgtctcaatttggactagctatctattggatgctggctattcacacattcctggtgactaccactatggacattgcagctctagacttatgtctttcacttaatgttagctttcctttatacccctggaggaggggagggataagggatgtctgtagggttgcctgcaggtctgtttatggcatctctcaccaggctgatatattggggaaatacacagctgagttaattcactgaatgtacaagtcagttgggggagagaacgtcagtctggttttggaactttgtgcttttcttcaccatattgctgcctctttgaatctgaagttagaatattttattgccccttgcatcctttcccccaaattaatccaagctgtcagcatgttcaggttctgccagtatctgaatcagaggactttcaggttacctgaagccttgaaaagctaggcattccaagcgggcatttttgtgggatttttagaatcacagcaaccttgattgtgaaagctaattctttctttaaaacaaaacaactaaaaaggagacattaggaaaaccgtttgactgatagctggggtcccataacacttcagcttcctatcttcctgttaggcatctgatttcaggggctcaatggaaagggagtcaagatgcaaaaggcttcctgctgatgtgtattcccagcactaatggactttggcacagtgccctttcaaaatgcctgggcacagagggtgagagactgttgatgttcttccagacctcatcttgaattattaaacattactctaatgcggcttttacatttccagaggactttttttcctgtgaggaataaatcatagccttgcattgtccccattttacaaatgagaagaccaagacttgaaaagttgttggacttcactgatgccatgggtcaaagttcagcagactctgcattacattttcctccttccaagccctctggttttagccaagtacccctcagctaaaacattttgcctaaagtttgcatgagattcttggcaccagctcttaaagcaaatatttatgttgttctctgacataagccattgcaggttatggtttcattgaaattaaaggtttttggcccaactgcaaacttatcatttgtgaaatgaatggttgagttctcatcgtgggcccagagaacctatggggactctttatggaaatacccatttaatacgtattaaatatctactgtgcacccaacattgctaggttcttgtagaccaagttcttggagggaaggaactgtagtttgttcctctttacattcccagtgtccagcacagcacatagaccatggtaggtgcccaaaaagtttgttttgaacaaacaagaagcagagagagagtagtacctgctttccaggggcttatgatcactcaagatccaaaggaatgccttacaaatgtggtccttctagactggaagcacattaggaccttgagtatttttaagctcacttctactatggaatttggccactgaaatagactctggttcacagccacttcttgtacaaaatggcagggtgttaccaaacacctaaaattgactgggtctctgttttaactctttggtgtgttaaaataattctcatgttcacaagaggagggggaggtaaaatggttatgaataatgttaatgttgagacagatattgtgtgtagcctggtaagtaactaaacagaaaattaaaaaatgaatgtgacatgtactgacaaactagctatttgcagttgaaacctgaagcacagacagttgtgcttggagttaggggttcttgaaactagagaaaggagttgactggattccaaaagaaactaagaaatgtgaattattaatggtgctgtcagagttgtagttgacatccatagaaaccaactttaatgtcaatgttttcagctttaacttcaatgttttaaggcttgtgtagcgtatggaaaatatttactctggcaatcgcctgttttactgttaaataatctacatattgttaagtgatctgttcatttggatatttcctctaggtctttttggaggaggactttagttcatcagagtttttgctgatgcagcaaagccatgggtgggatccttgtttggggtgcgtttgtagaccttctcccttggccaccaactttaccttgcctggtccagccacgtggctggtagtgtaaggcacggtgtttgtatctagttggagtacagggaagtgtgtataaaaacaattagaagaccatagttcattctgtgattcttaccgatacggagtgcagagaaaggactagaactaccagggcacttggtcttgaagtacactctgaaatgacccttgaacattggcttaattggacacagagaagagaaagaagaatagagcaggtgaggagaataaattccatgagggaaaaatgtagggatgggcctggtgttggaggagaagataagcacagcatattaatactgtcaaggaggagatgtgatgaggctgcataaaggaggaacttatcacaaccttcttggtttagatttttattttgcatccaaactttgtataatctcacaagggagaaatgacctgaaagccttcttcttaaagtacaggttttactgcagctttgactggggagggtaaagagattggagtaaaagagacttccttggaagtttctttaataattcagaaatttgtgttgacatcacagtagagtagtaagggtggattggagaaacatgtgataggaacagacaggccttagaagactgaaagcggggaagagtaatcaattcaacacagagttttaaggacttaattatttcagagtaaatgtttctttggtaggagattggaatcactgacagaaatagggcaatttagaaaaaaaagttcatttttctggttagggtggtgaaaagttttgttttgttggcattttcaaggaatggtctgttatataacaaatgccagctgagcacagtggctcatgcctgtaatccaagcactttgggaggctgaggtgggcggatcacctgaggccaggagttcgagaccagcctggccaacatggtgaaaccccatctctacaaaaaaatacaaaaattagccgggcttggtggcaggcacctgtaatcccatctatttgggaggccgacacatgagaatcgcttgaacactggaggcagaggttgcagtgagctgggattgcactgcactccagcctgggtggcagagtaagactctgtctcaaacaaacaaacaaaacctacaaatgctctctaagtgtagaaaacataagaagatgcttatgttaattaggagaaaaaccaggatctaaacttgttagatcctggttttagatatataaaaagtacatagggaaaaactgtgggaattgttaagagattaactttgagagtatggaggggtgtgtgtgtgtgtgtgtgtgtgttttaaagagacagggtctcgctgtgtcccccaggctgcagtgcagtggcagaagcttggctcactgtaccctgaacctcctggatgcaagagattctcccaccccagcctcctgaatagctgggactacaggcatatcaccatgcccagataatttttgtactttttgtagagatggggtcttgtaatctttcccaggctggtctcaaactcctgggctcaagtgatcctccaaccttggcctcccaaagtgctgggattgtagggatgagccactgtgcctggcccagagggggtttttgaataatgttttcctacttcttatggtgttctagcatcttaaaataagtaagttaccactactacaatgacaaaaacaatgttaacaaaacaagctaactagatatcctctgctttttagaatactctatttcagaaactagtttttatttccccctacagtttgaaaatctgaacacagttgctgagtgtctgttttctctggtcaacggtgatgacatgtttgcaacctttgcccaaatccagcagaagagcatcttggtgtggctgttcagtcgtctgtatttatattccttcatcagcctttttatatatatgattctcagtctttttattgcacttattacagattcttatgacaccattaaggtaagtaattatcaaaatttgctgccaaaaaatcactgcaaattctatatagattataggaaaataccacattttaaaaacttaaaatattacagttcagattttgaggttttgtggacaaactttttagacgctggagatgaattttagggcattgtccctgttacccacagcagggtggattggtttggaggggtggtgggaaagaaaagggaaatggggtaagcatgggttgaatggggtaagtcaggtagtcaggctgctggtcttagccctgacagatatacctgccagtgtggctgcctggaacttaggattgagtcataagtttcagggatgagaggtgaccggcaccctgacaactctcagatattgctacaactcacactggataatacagctactggcatggtgcaggcttcctttaaattatgaaaactaaggcttttgtgactgtttagcttcctgctttcttaagctacctgatgggttctgtatcctttcagactaggccatttaactgatttgtggcttgaaggaatttcacttccttgggtgctggtaccttattcacagcagatggtcatgcttagaaaaccctgcttcagggtcagtgactgaaaaaccaggggtgccatgccagtgcctttgtcagggctgttttctgcttaaccactttctcagaataatgcagaagaaacccagtccgctaccttttgagtgtgtgggaagataagtaagtgttcaggtgggaatggtagttgcctctcgcatcagggtttgcatggagaaggaagaggtgcacactcctgccacagagattcatgtctttgatgtggcaatgtctctgcgtggtgggggccaagcctcagtgttgaagtaggttatctcattaagcatgaggggagggagtctttgtgtctgcttggaaaaaaatctctcttctgttccactaagcgaccaacttccataaaagtagaggaaataatgattactttccaagcagagtctacattgccaatgtgtgtgtggagtgggaggtctcatctagtcttgctgttagcattaaaagtttagactttttttttttttaaaaaaagagagagggtcttgctctgtttcccaggctggaggacagtggtataatcctacctcattatagcctccaactccagggctcagtcgatcctcctgcctcagcctccagagtagctgggactacaggtgcacaccaccatggccagaaaatttttgtattttttgtagagatggggtctcaccatcttgcccaggccagtctcaaactcctgggctcaagcgatcctcccttcttggcctcccaaagtgctgggattacaggcatgagccatcatacccagactagacatttgacttttgattatttccttcattaccttttttttttttaaaaaaaacctctccctggctcttctctgctttctttctgaagtttttctttggattgttctctgttcccacagtggccctgccttggtgttctgggactgacagattgattcatcattgtaaatatcagttcttggatctgagctagcaatgtgggagagttttattttagcaaaggtgggcttggtttgttgacaaaagagcaatttctcatgccttataaataaggtaacaacattgtgtactttctaaagaaattccaacagaatgggtttcctgaaacggatttgcaggaattcctgaaggaatgcagtagcaaagaagagtatcagaaagagtcctcagccttcctgtcctgcatctgctgtcggaggaggaaaagaagtgatgatcacttgatacctattagctaaagttctgctaaagatgattaaagttcaggcatccttatccagcggctgagcagaggaaccccaaatgacttggacaagcagttccaaaatgactctcttatttaattgtggagtgggaaagaggactcacagttagccagctgaccatgactgaagttccagctttactttttataaacttgaatgataaagaatagaccatgggctactactgggcattagtgcaatataacagcgataataaaattctctattagtctgttaatttatgacatgatctcggaatggaaaaagatcatttcagagtgtgcgaaataatagtctttaaccatgtaattaaatatgtgtgtttattgtcaaataaggatttgttttaaaggtgattcttgggtttgaagacatttgttaattcatggtctgtacagaaatgaagctggttgcaataccaatctagagagtccaagctggtgaactattaagctgtttaaagatcacccttggcctggcacagtggttcacacctgtaatcccagcactttgggaggcctaggcaggcagactgagctcaggagcttgagaccagcctgggcaacatggcaaaaacccacctctacaaaaagtacaaaaattagtcgggcgtgatggcaggcatctgtagtcccagctacttgggaagctgaagtgggaggatcacctgagctctggaggtggaggctgccatgagccatgatcgtgccactacactccagcctgggtgacagagtgagatcctgtctcaaaaaaaaaaaaaaatcacccttaaatcaacaaaaagacctcatgctcatgcagtggacatttcttggcctgttttcctgtgggttttcttcagcatgatatgaagcaactgttggcatagccagtgggataaataagaaatggaatcatttggctgcctcgtcacttgtgctaatggtcagttgtacacacatgacatgtggaagtgacctgtagcagcggtcactcattttaacaattgaactctgctgggttgggtatttacctttgtctagaaaagaaatatgatatattttctctaaataaatttattttcatcattc

SEQ ID NO: 264 - DNA, 2830 bp, Homo sapiens
acagagccgcctttcagccgcccgagaactgcccgccgcactccacgactgcggcgcctgctctcgggccggggtctgcgcgcaccacgcggccggcagaaaggaaatgcaatggcacatcgtgattctgagatgaaagaagaatgtctaagggaagacctgaagttttacttcatgagcccttgtgaaaaataccgagccagacgccagattccgtggaaactgggtttgcagattttgaagatagtcatggtcaccacacagcttgttcgttttggtttaagtaaccagctggtggttgctttcaaagaagataacactgttgcttttaagcacttgtttttgaaaggatattctggtacagatgaagatgactacagctgcagtgtatatactcaagaggatgcctatgagagcatcttttttgctattaatcagtatcatcagctaaaggacattaccctggggacccttggttatggagaaaatgaagacaatagaattggcttaaaagtctgtaagcagcattacaagaaagggaccatgtttccttctaatgagacactgaatattgacaacgacgttgagctcgattgtgttcaattagaccttcaggacctctccaagaagcctccggactggaagaactcatcattcttcagactggaattttatcggctcttacaggttgaaatctcctttcatcttaaaggcattgacctacagacaattcattcccgtgagttaccagactgttatgtctttcagaatacgattatctttgacaataaagctcacagtggcaaaatcaaaatctattttgacagtgatgccaaaattgaagaatgtaaagacttgaacatatttggatctactcagaaaaatgctcagtatgtcctggtgtttgatgcatttgtcattgtgatttgcttggcatctcttattctgtgtacaagatccattgttcttgctctaaggttacggaagagatttctaaatttcttcctggagaagtacaagcggcctgtgtgtgacaccgaccagtgggagttcatcaacggctggtatgtcctggtgattatcagcgacctaatgacaatcattggctccatattaaaaatggaaatcaaagcaaagaatctcacaaactatgatctctgcagcatttttcttggaacctctacgctcttggtttgggttggagtcatcagatacctgggttatttccaggcatataatgtgctgattttaacaatgcaggcctcactgccaaaagttcttcggttttgtgcttgtgctggtatgatttatctgggttacacattctgtggctggattgtcttaggaccataccatgacaagtttgaaaatctgaacacagttgctgagtgtctgttttctctggtcaacggtgatgacatgtttgcaacctttgcccaaatccagcagaagagcatcttggtgtggctgttcagtcgtctgtatttatattccttcatcagcctttttatatatatgattctcagtctttttattgcacttattacagattcttatgacaccattaagaaattccaacagaatgggtttcctgaaacggatttgcaggaattcctgaaggaatgcagtagcaaagaagagtatcagaaagagtcctcagccttcctgtcctgcatctgctgtcggaggaggaaaagaagtgatgatcacttgatacctattagctaaagttctgctaaagatgattaaagttcaggcatccttatccagcggctgagcagaggaaccccaaatgacttggacaagcagttccaaaatgactctcttatttaattgtggagtgggaaagaggactcacagttagccagctgaccatgactgaagttccagctttactttttataaacttgaatgataaagaatagaccatgggctactactgggcattagtgcaatataacagcgataataaaattctctattagtctgttaatttatgacatgatctcggaatggaaaaagatcatttcagagtgtgcgaaataatagtctttaaccatgtaattaaatatgtgtgtttattgtcaaataaggatttgttttaaaggtgattcttgggtttgaagacatttgttaattcatggtctgtacagaaatgaagctggttgcaataccaatctagagagtccaagctggtgaactattaagctgtttaaagatcacccttggcctggcacagtggttcacacctgtaatcccagcactttgggaggcctaggcaggcagactgagctcaggagcttgagaccagcctgggcaacatggcaaaaacccacctctacaaaaagtacaaaaattagtcgggcgtgatggcaggcatctgtagtcccagctacttgggaagctgaagtgggaggatcacctgagctctggaggtggaggctgccatgagccatgatcgtgccactacactccagcctgggtgacagagtgagatcctgtctcaaaaaaaaaaaaaaatcacccttaaatcaacaaaaagacctcatgctcatgcagtggacatttcttggcctgttttcctgtgggttttcttcagcatgatatgaagcaactgttggcatagccagtgggataaataagaaatggaatcatttggctgcctcgtcacttgtgctaatggtcagttgtacacacatgacatgtggaagtgacctgtagcagcggtcactcattttaacaattgaactctgctgggttgggtatttacctttgtctagaaaagaaatatgatatattttctctaaataaatttattttcatcattcca

SEQ ID NO: 265 - DNA, 10676 bp, Homo sapiens
acacagagccgcctttcagccgcccgagaactgcccgccgcactccacgactgcggcgcctgctctcgggccggggtctgcgcgcaccacgcggccggcagaaagggtaagagaagggaaccccgctttgcagggctccaacttcggcggacgcgttacggcgagggcgaaatgagtcggccgtgaacggtgtttcctgttccgaatcccgagagccctggaaagttttgaaggaggaggcatggcccggcagccttatcgttttccccaggcaaggattccggagagaggatcaggtgttttcaggttaaccgtcagaaatgcaatggcacatcgtgattctgagatgaaagaagaatgtctaagggaagacctgaagttttacttcatgagcccttgtgaaaaataccgagccagacgccagattccgtggaaactgggtttgcagattttgaagatagtcatggtcaccacacagcttgttcgttttggtttaagtaaccagctggtggttgctttcaaagaagataacactgttgcttttaagcacttgtttttgaaaggatattctggtacagatgaagatgactacagctgcagtgtatatactcaagaggatgcctatgagagcatcttttttgctattaatcagtatcatcagctaaaggacattaccctggggacccttggttatggagaaaatgaagacaatagaattggcttaaaagtctgtaagcagcattacaagaaagggaccatgtttccttctaatgagacactgaatattgacaacgacgttgagctcgattgtgttcaattagaccttcaggacctctccaagaagcctccggactggaagaactcatcattcttcagactggaattttatcggctcttacaggttgaaatctcctttcatcttaaaggcattgacctacagacaattcattcccgtgagttaccagactgttatgtctttcagaatacgattatctttgacaataaagctcacagtggcaaaatcaaaatctattttgacagtgatgccaaaattgaagaatgtaaagacttgaacatatttggatctactcagaaaaatgctcagtatgtcctggtgtttgatgcatttgtcattgtgatttgcttggcatctcttattctgtgtacaagatccattgttcttgctctaaggttacggaagagatttctaaatttcttcctggagaagtacaagcggcctgtgtgtgacaccgaccagtgggagttcatcaacggctgaatctcacaaactatgatctctgcagcatttttcttggaacctctacgctcttggtttgggttggagtcatcagatacctgggttatttccaggcatataatgtgctgattttaacaatgcaggcctcactgccaaaagttcttcggttttgtgcttgtgctggtatgatttatctgggttacacattctgtggctggattgtcttaggaccataccatgacaaggatatagaagtgactacaggatattgaaacaagaactgtacaatactagaaagcatgtattatagttgtctgggactggcttaaggggtcacatggttacccggtgatcatcaaatgggaaatgtttggacgtgagatcactatattaaaaatgaaaattaagtgaggaaaattattataaaaaatttccaatttaaagtattatgtttttcatccaagttaattgagaagaatgaagatgggcagagactgcctaaaacgaccatagtaggtttacgatagaaatggtgacacgtcttgtctctgcagacggttttgattacagcatcatctttctgccttattaaagatcagtatctgaattctaaactattaccaaacttcagttagcattataatctcagggacatcaaagttgtgctaagatgttcttgttataaaatgatacatttgattggtagatgcatcaggaaatgaaactaggtaagccttggttttaacccaaaaaagtaaaaggagttattttatcttatggcttttcctccatttgggcctgtggcagttggaacaacagaaacaacaaaaatagcagcagctaacacttactgcttgtgtgttagacactctgctgggcatttcggtgttctttcttatttactccccacaacaacccagggtactgttagcctcacttaggtgctctgcaaggagaaaagaggttaaaaatggtaagtattccttccaagtttgtataccagttcagccttaagttttgaccttgttagttgcattaaccaaatctgtgatcaaatctggtttacaaactgttatacatgaatcttaaacctccgtgctgtcctaccagaataatgtcgagtaacctggaacactcagactttcttctttttaggtgtcacatttaatatgtctagagagaattactgtttttcctatttgagatattatataattaacaaagtgacaacctctgggttggtagtaaatcttgataatattgctcttcatactccatgtcactgctttaaaggtgactcatgagaaaaaattattctttgatatgatctctctgatttggagaacttactgtcttagagcctggaaaaatgtatttttcttccttgcttgcctcatgctctgaaagcttttccacctctttgtcactagagggcagtgttgcactgtgtggaataaataccgttcctgaggattcggctttaattcactgactccaaggtctgtggacaagtggtcccatctcctttgcaccccatccccgtctcccctacctcatcattattctggaaggtgctcagataagattgctagaattttactagatggctaccattctcaagtgctgtctgttaggcatggtgcccaagattcttcatctcccttgctgtgttaacccttccctccccttctctgtgaagaaatctgattgtcctgttacagagaataggcaccttaatatattaaataatattcctgagattacccagctagaaagtggcagagatgggattcaaacccaggtcggcctgactccagtacctgtgctttgacccataccctgtagagcttttcttggtattatctaaaacagatcattgcaagagagcatttagcctgacaagaaacagtcttgtacttggagatcaactgtgagaggacagccatgtaatcggcttcattctttcaatggtgtcaaggtcacctcatggaaaatgaggttatttgttttgtgagcctgactgcatttccatatgttcaatttgtcctttcaaaggatccaggtgaaactgggatgctctgagccagcactgtccaagaaaaatacagtttgggctacaattgagagccttgcctatactgtaaaattttctagtagctacatgaagaaataaaaaaacagatgaaattatttttaattatatattttaagcctaatatacccaaaatattatttcagcatgtattcagtataaaatattgaaatattttacattcctccatactagtctttttgatctggtggatattttatccacatagcacgtctcaatttggactagctatctattggatgctggctattcacacattcctggtgactaccactatggacattgcagctctagacttatgtctttcacttaatgttagctttcctttatacccctggaggaggggagggataagggatgtctgtagggttgcctgcaggtctgtttatggcatctctcaccaggctgatatattggggaaatacacagctgagttaattcactgaatgtacaagtcagttgggggagagaacgtcagtctggttttggaactttgtgcttttcttcaccatattgctgcctctttgaatctgaagttagaatattttattgccccttgcatcctttcccccaaattaatccaagctgtcagcatgttcaggttctgccagtatctgaatcagaggactttcaggttacctgaagccttgaaaagctaggcattccaagcgggcatttttgtgggatttttagaatcacagcaaccttgattgtgaaagctaattctttctttaaaacaaaacaactaaaaaggagacattaggaaaaccgtttgactgatagctggggtcccataacacttcagcttcctatcttcctgttaggcatctgatttcaggggctcaatggaaagggagtcaagatgcaaaaggcttcctgctgatgtgtattcccagcactaatggactttggcacagtgccctttcaaaatgcctgggcacagagggtgagagactgttgatgttcttccagacctcatcttgaattattaaacattactctaatgcggcttttacatttccagaggactttttttcctgtgaggaataaatcatagccttgcattgtccccattttacaaatgagaagaccaagacttgaaaagttgttggacttcactgatgccatgggtcaaagttcagcagactctgcattacattttcctccttccaagccctctggttttagccaagtacccctcagctaaaacattttgcctaaagtttgcatgagattcttggcaccagctcttaaagcaaatatttatgttgttctctgacataagccattgcaggttatggtttcattgaaattaaaggtttttggcccaactgcaaacttatcatttgtgaaatgaatggttgagttctcatcgtgggcccagagaacctatggggactctttatggaaatacccatttaatacgtattaaatatctactgtgcacccaacattgctaggttcttgtagaccaagttcttggagggaaggaactgtagtttgttcctctttacattcccagtgtccagcacagcacatagaccatggtaggtgcccaaaaagtttgttttgaacaaacaagaagcagagagagagtagtacctgctttccaggggcttatgatcactcaagatccaaaggaatgccttacaaatgtggtccttctagactggaagcacattaggaccttgagtatttttaagctcacttctactatggaatttggccactgaaatagactctggttcacagccacttcttgtacaaaatggcagggtgttaccaaacacctaaaattgactgggtctctgttttaactctttggtgtgttaaaataattctcatgttcacaagaggagggggaggtaaaatggttatgaataatgttaatgttgagacagatattgtgtgtagcctggtaagtaactaaacagaaaattaaaaaatgaatgtgacatgtactgacaaactagctatttgcagttgaaacctgaagcacagacagttgtgcttggagttaggggttcttgaaactagagaaaggagttgactggattccaaaagaaactaagaaatgtgaattattaatggtgctgtcagagttgtagttgacatccatagaaaccaactttaatgtcaatgttttcagctttaacttcaatgttttaaggcttgtgtagcgtatggaaaatatttactctggcaatcgcctgttttactgttaaataatctacatattgttaagtgatctgttcatttggatatttcctctaggtctttttggaggaggactttagttcatcagagtttttgctgatgcagcaaagccatgggtgggatccttgtttggggtgcgtttgtagaccttctcccttggccaccaactttaccttgcctggtccagccacgtggctggtagtgtaaggcacggtgtttgtatctagttggagtacagggaagtgtgtataaaaacaattagaagaccatagttcattctgtgattcttaccgatacggagtgcagagaaaggactagaactaccagggcacttggtcttgaagtacactctgaaatgacccttgaacattggcttaattggacacagagaagagaaagaagaatagagcaggtgaggagaataaattccatgagggaaaaatgtagggatgggcctggtgttggaggagaagataagcacagcatattaatactgtcaaggaggagatgtgatgaggctgcataaaggaggaacttatcacaaccttcttggtttagatttttattttgcatccaaactttgtataatctcacaagggagaaatgacctgaaagccttcttcttaaagtacaggttttactgcagctttgactggggagggtaaagagattggagtaaaagagacttccttggaagtttctttaataattcagaaatttgtgttgacatcacagtagagtagtaagggtggattggagaaacatgtgataggaacagacaggccttagaagactgaaagcggggaagagtaatcaattcaacacagagttttaaggacttaattatttcagagtaaatgtttctttggtaggagattggaatcactgacagaaatagggcaatttagaaaaaaaagttcatttttctggttagggtggtgaaaagttttgttttgttggcattttcaaggaatggtctgttatataacaaatgccagctgagcacagtggctcatgcctgtaatccaagcactttgggaggctgaggtgggcggatcacctgaggccaggagttcgagaccagcctggccaacatggtgaaaccccatctctacaaaaaaatacaaaaattagccgggcttggtggcaggcacctgtaatcccatctatttgggaggccgacacatgagaatcgcttgaacactggaggcagaggttgcagtgagctgggattgcactgcactccagcctgggtggcagagtaagactctgtctcaaacaaacaaacaaaacctacaaatgctctctaagtgtagaaaacataagaagatgcttatgttaattaggagaaaaaccaggatctaaacttgttagatcctggttttagatatataaaaagtacatagggaaaaactgtgggaattgttaagagattaactttgagagtatggaggggtgtgtgtgtgtgtgtgtgtgtgttttaaagagacagggtctcgctgtgtcccccaggctgcagtgcagtggcagaagcttggctcactgtaccctgaacctcctggatgcaagagattctcccaccccagcctcctgaatagctgggactacaggcatatcaccatgcccagataatttttgtactttttgtagagatggggtcttgtaatctttcccaggctggtctcaaactcctgggctcaagtgatcctccaaccttggcctcccaaagtgctgggattgtagggatgagccactgtgcctggcccagagggggtttttgaataatgttttcctacttcttatggtgttctagcatcttaaaataagtaagttaccactactacaatgacaaaaacaatgttaacaaaacaagctaactagatatcctctgctttttagaatactctatttcagaaactagtttttatttccccctacagtttgaaaatctgaacacagttgctgagtgtctgttttctctggtcaacggtgatgacatgtttgcaacctttgcccaaatccagcagaagagcatcttggtgtggctgttcagtcgtctgtatttatattccttcatcagcctttttatatatatgattctcagtctttttattgcacttattacagattcttatgacaccattaaggtaagtaattatcaaaatttgctgccaaaaaatcactgcaaattctatatagattataggaaaataccacattttaaaaacttaaaatattacagttcagattttgaggttttgtggacaaactttttagacgctggagatgaattttagggcattgtccctgttacccacagcagggtggattggtttggaggggtggtgggaaagaaaagggaaatggggtaagcatgggttgaatggggtaagtcaggtagtcaggctgctggtcttagccctgacagatatacctgccagtgtggctgcctggaacttaggattgagtcataagtttcagggatgagaggtgaccggcaccctgacaactctcagatattgctacaactcacactggataatacagctactggcatggtgcaggcttcctttaaattatgaaaactaaggcttttgtgactgtttagcttcctgctttcttaagctacctgatgggttctgtatcctttcagactaggccatttaactgatttgtggcttgaaggaatttcacttccttgggtgctggtaccttattcacagcagatggtcatgcttagaaaaccctgcttcagggtcagtgactgaaaaaccaggggtgccatgccagtgcctttgtcagggctgttttctgcttaaccactttctcagaataatgcagaagaaacccagtccgctaccttttgagtgtgtgggaagataagtaagtgttcaggtgggaatggtagttgcctctcgcatcagggtttgcatggagaaggaagaggtgcacactcctgccacagagattcatgtctttgatgtggcaatgtctctgcgtggtgggggccaagcctcagtgttgaagtaggttatctcattaagcatgaggggagggagtctttgtgtctgcttggaaaaaaatctctcttctgttccactaagcgaccaacttccataaaagtagaggaaataatgattactttccaagcagagtctacattgccaatgtgtgtgtggagtgggaggtctcatctagtcttgctgttagcattaaaagtttagactttttttttttttaaaaaaagagagagggtcttgctctgtttcccaggctggaggacagtggtataatcctacctcattatagcctccaactccagggctcagtcgatcctcctgcctcagcctccagagtagctgggactacaggtgcacaccaccatggccagaaaatttttgtattttttgtagagatggggtctcaccatcttgcccaggccagtctcaaactcctgggctcaagcgatcctcccttcttggcctcccaaagtgctgggattacaggcatgagccatcatacccagactagacatttgacttttgattatttccttcattaccttttttttttttaaaaaaaacctctccctggctcttctctgctttctttctgaagtttttctttggattgttctctgttcccacagtggccctgccttggtgttctgggactgacagattgattcatcattgtaaatatcagttcttggatctgagctagcaatgtgggagagttttattttagcaaaggtgggcttggtttgttgacaaaagagcaatttctcatgccttataaataaggtaacaacattgtgtactttctaaagaaattccaacagaatgggtttcctgaaacggatttgcaggaattcctgaaggaatgcagtagcaaagaagagtatcagaaagagtcctcagccttcctgtcctgcatctgctgtcggaggaggaaaagaagtgatgatcacttgatacctattagctaaagttctgctaaagatgattaaagttcaggcatccttatccagcggctgagcagaggaaccccaaatgacttggacaagcagttccaaaatgactctcttatttaattgtggagtgggaaagaggactcacagttagccagctgaccatgactgaagttccagctttactttttataaacttgaatgataaagaatagaccatgggctactactgggcattagtgcaatataacagcgataataaaattctctattagtctgttaatttatgacatgatctcggaatggaaaaagatcatttcagagtgtgcgaaataatagtctttaaccatgtaattaaatatgtgtgtttattgtcaaataaggatttgttttaaaggtgattcttgggtttgaagacatttgttaattcatggtctgtacagaaatgaagctggttgcaataccaatctagagagtccaagctggtgaactattaagctgtttaaagatcacccttggcctggcacagtggttcacacctgtaatcccagcactttgggaggcctaggcaggcagactgagctcaggagcttgagaccagcctgggcaacatggcaaaaacccacctctacaaaaagtacaaaaattagtcgggcgtgatggcaggcatctgtagtcccagctacttgggaagctgaagtgggaggatcacctgagctctggaggtggaggctgccatgagccatgatcgtgccactacactccagcctgggtgacagagtgagatcctgtctcaaaaaaaaaaaaaaatcacccttaaatcaacaaaaagacctcatgctcatgcagtggacatttcttggcctgttttcctgtgggttttcttcagcatgatatgaagcaactgttggcatagccagtgggataaataagaaatggaatcatttggctgcctcgtcacttgtgctaatggtcagttgtacacacatgacatgtggaagtgacctgtagcagcggtcactcattttaacaattgaactctgctgggttgggtatttacctttgtctagaaaagaaatatgatatattttctctaaataaatttattttcatcattc

SEQ ID NO: 266 - DNA, 1187 bp, Homo sapiens
acacagagccgcctttcagccgcccgagaactgcccgccgcactccacgactgcggcgcctgctctcgggccggggtctgcgcgcaccacgcggccggcagaaagggtaagagaagggaaccccgctttgcagggctccaacttcggcggacgcgttacggcgagggcgaaatgagtcggccgtgaacggtgtttcctgttccgaatcccgagagccctggaaagttttgaaggaggaggcatggcccggcagccttatcgttttccccaggcaaggattccggagagaggatcaggtgttttcaggttaaccgtcagaaatgcaatggcacatcgtgattctgagatgaaagaagaatgtctaagggaagacctgaagttttacttcatgagcccttgtgaaaaataccgagccagacgccagattccgtggaaactgggtttgcagattttgaagatagtcatggtcaccacacagcttgttcgttttggtttaagtaaccagctggtggttgctttcaaagaagataacactgttgcttttaagcacttgtttttgaaaggatattctggtacagatgaagatgactacagctgcagtgtatatactcaagaggatgcctatgagagcatcttttttgctattaatcagtatcatcagctaaaggacattaccctggggacccttggttatggagaaaatgaagacaatagaattggcttaaaagtctgtaagcagcattacaagaaagggaccatgtttccttctaatgagacactgaatattgacaacgacgttgagctcgattgtgttcaattagaccttcaggacctctccaagaagcctccggactggaagaactcatcattcttcagactggaattttatcggctcttacaggttgaaatctcctttcatcttaaaggcattgacctacagacaattcattcccgtgagttaccagactgttatgtctttcagaatacgattatctttgacaataaagctcacagtggcaaaatcaaaatctattttgacagtgatgccaaaattgaagaatgtaaagacttgaacatatttggatctaaatctcacaaactatgatctctgcagcatttttcttggaacctctacgctcttggtttgggttggagtcatcagatacctgggttatttccaggcatat

SEQ ID NO: 267 - DNA, 3152 bp, Homo sapiens
gcagggtgcacacagagccgcctttcagccgcccgagaactgcccgccgcactccacgactgcggcgcctgctctcgggccggggtctgcgcgcaccacgcggccggcagaaagggtaagagaagggaaccccgctttgcagggctccaacttcggcggacgcgttacggcgagggcgaaatgagtcggccgtgaacggtgtttcctgttccgaatcccgagagccctggaaagttttgaaggaggaggcatggcccggcagccttatcgttttccccaggcaaggattccggagagaggatcaggtgttttcaggttaaccgtcaggttggagtccagtggcacattctcagctcactgcaacctctgcctcctgggttccaagtgattcttgtgcctcagcctcccgagtagctggggttacagaaatgcaatggcacatcgtgattctgagatgaaagaagaatgtctaagggaagacctgaagttttacttcatgagcccttgtgaaaaataccgagccagacgccagattccgtggaaactgggtttgcagattttgaagatagtcatggtcaccacacagcttgttcgttttggtttaagtaaccagctggtggttgctttcaaagaagataacactgttgcttttaagcacttgtttttgaaaggatattctggtacagatgaagatgactacagctgcagtgtatatactcaagaggatgcctatgagagcatcttttttgctattaatcagtatcatcagctaaaggacattaccctggggacccttggttatggagaaaatgaagacaatagaattggcttaaaagtctgtaagcagcattacaagaaagggaccatgtttccttctaatgagacactgaatattgacaacgacgttgagctcgattgtgttcaattagaccttcaggacctctccaagaagcctccggactggaagaactcatcattcttcagactggaattttatcggctcttacaggttgaaatctcctttcatcttaaaggcattgacctacagacaattcattcccgtgagttaccagactgttatgtctttcagaatacgattatctttgacaataaagctcacagtggcaaaatcaaaatctattttgacagtgatgccaaaattgaagaatgtaaagacttgaacatatttggatctactcagaaaaatgctcagtatgtcctggtgtttgatgcatttgtcattgtgatttgcttggcatctcttattctgtgtacaagatccattgttcttgctctaaggttacggaagagatttctaaatttcttcctggagaagtacaagcggcctgtgtgtgacaccgaccagtgggagttcatcaacggctggtatgtcctggtgattatcagcgacctaatgacaatcattggctccatattaaaaatggaaatcaaagcaaagaatctcacaaactatgatctctgcagcatttttcttggaacctctacgctcttggtttgggttggagtcatcagatacctgggttatttccaggcatataatgtgctgattttaacaatgcaggcctcactgccaaaagttcttcggttttgtgcttgtgctggtatgatttatctgggttacacattctgtggctggattgtcttaggaccataccatgacaagtttgaaaatctgaacacagttgctgagtgtctgttttctctggtcaacggtgatgacatgtttgcaacctttgcccaaatccagcagaagagcatcttggtgtggctgttcagtcgtctgtatttatattccttcatcagcctttttatatatatgattctcagtctttttattgcacttattacagattcttatgacaccattaagaaattccaacagaatgggtttcctgaaacggatttgcaggaattcctgaaggaatgcagtagcaaagaagagtatcagaaagagtcctcagccttcctgtcctgcatctgctgtcggaggaggaaaagaagtgatgatcacttgatacctattagctaaagttctgctaaagatgattaaagttcaggcatccttatccagcggctgagcagaggaaccccaaatgacttggacaagcagttccaaaatgactctcttatttaattgtggagtgggaaagaggactcacagttagccagctgaccatgactgaagttccagctttactttttataaacttgaatgataaagaatagaccatgggctactactgggcattagtgcaatataacagcgataataaaattctctattagtctgttaatttatgacatgatctcggaatggaaaaagatcatttcagagtgtgcgaaataatagtctttaaccatgtaattaaatatgtgtgtttattgtcaaataaggatttgttttaaaggtgattcttgggtttgaagacatttgttaattcatggtctgtacagaaatgaagctggttgcaataccaatctagagagtccaagctggtgaactattaagctgtttaaagatcacccttggcctggcacagtggttcacacctgtaatcccagcactttgggaggcctaggcaggcagactgagctcaggagcttgagaccagcctgggcaacatggcaaaaacccacctctacaaaaagtacaaaaattagtcgggcgtgatggcaggcatctgtagtcccagctacttgggaagctgaagtgggaggatcacctgagctctggaggtggaggctgccatgagccatgatcgtgccactacactccagcctgggtgacagagtgagatcctgtctcaaaaaaaaaaaaaaatcacccttaaatcaacaaaaagacctcatgctcatgcagtggacatttcttggcctgttttcctgtgggttttcttcagcatgatatgaagcaactgttggcatagccagtgggataaataagaaatggaatcatttggctgcctcgtcacttgtgctaatggtcagttgtacacacatgacatgtggaagtgacctgtagcagcggtcactcattttaacaattgaactctgctgggttgggtatttacctttgtctagaaaagaaatatgatatattttctctaaataaatttattttcatcattcca

SEQ ID NO: 268 - DNA, 9071 bp, Homo sapiens
actggggtggcgcgctacctctgcggagaaggatctgacagtgttccggagccggggcgagcagccaaaaggcccgcggagtcgcgctgggccgccccggcgcagctgaaccgggggccgcgcctgccaggccgacgggtctggcccagcctggcgccaaggggttcgtgcgctgtggagacgcggagggtcgaggcggcgcggcctgagtgaaacccaatggaaaaagcatgacatttagaagtagaagacttagcttcaaatccctactccttcacttactaattttgtgatttggaaatatccgcgcaagatgttgacgttgcagacttggctagtgcaagccttgtttattttcctcaccactgaatctacaggtgaacttctagatccatgtggttatatcagtcctgaatctccagttgtacaacttcattctaatttcactgcagtttgtgtgctaaaggaaaaatgtatggattattttcatgtaaatgctaattacattgtctggaaaacaaaccattttactattcctaaggagcaatatactatcataaacagaacagcatccagtgtcacctttacagatatagcttcattaaatattcagctcacttgcaacattcttacattcggacagcttgaacagaatgtttatggaatcacaataatttcaggcttgcctccagaaaaacctaaaaatttgagttgcattgtgaacgaggggaagaaaatgaggtgtgagtgggatggtggaagggaaacacacttggagacaaacttcactttaaaatctgaatgggcaacacacaagtttgctgattgcaaagcaaaacgtgacacccccacctcatgcactgttgattattctactgtgtattttgtcaacattgaagtctgggtagaagcagagaatgcccttgggaaggttacatcagatcatatcaattttgatcctgtatataaagtgaagcccaatccgccacataatttatcagtgatcaactcagaggaactgtctagtatcttaaaattgacatggaccaacccaagtattaagagtgttataatactaaaatataacattcaatataggaccaaagatgcctcaacttggagccagattcctcctgaagacacagcatccacccgatcttcattcactgtccaagaccttaaaccttttacagaatatgtgtttaggattcgctgtatgaaggaagatggtaagggatactggagtgactggagtgaagaagcaagtgggatcacctatgaagatagaccatctaaagcaccaagtttctggtataaaatagatccatcccatactcaaggctacagaactgtacaactcgtgtggaagacattgcctccttttgaagccaatggaaaaatcttggattatgaagtgactctcacaagatggaaatcacatttacaaaattacacagttaatgccacaaaactgacagtaaatctcacaaatgatcgctatctagcaaccctaacagtaagaaatcttgttggcaaatcagatgcagctgttttaactatccctgcctgtgactttcaagctactcaccctgtaatggatcttaaagcattccccaaagataacatgctttgggtggaatggactactccaagggaatctgtaaagaaatatatacttgagtggtgtgtgttatcagataaagcaccctgtatcacagactggcaacaagaagatggtaccgtgcatcgcacctatttaagagggaacttagcagagagcaaatgctatttgataacagttactccagtatatgctgatggaccaggaagccctgaatccataaaggcataccttaaacaagctccaccttccaaaggacctactgttcggacaaaaaaagtagggaaaaacgaagctgtcttagagtgggaccaacttcctgttgatgttcagaatggatttatcagaaattatactatattttatagaaccatcattggaaatgaaactgctgtgaatgtggattcttcccacacagaatatacattgtcctctttgactagtgacacattgtacatggtacgaatggcagcatacacagatgaaggtgggaaggatggtccagaattcacttttactaccccaaagtttgctcaaggagaaattgaagccatagtcgtgcctgtttgcttagcattcctattgacaactcttctgggagtgctgttctgctttaataagcgagacctaattaaaaaacacatctggcctaatgttccagatccttcaaagagtcatattgcccagtggtcacctcacactcctccaaggcacaattttaattcaaaagatcaaatgtattcagatggcaatttcactgatgtaagtgttgtggaaatagaagcaaatgacaaaaagccttttccagaagatctgaaatcattggacctgttcaaaaaggaaaaaattaatactgaaggacacagcagtggtattggggggtcttcatgcatgtcatcttctaggccaagcatttctagcagtgatgaaaatgaatcttcacaaaacacttcgagcactgtccagtattctaccgtggtacacagtggctacagacaccaagttccgtcagtccaagtcttctcaagatccgagtctacccagcccttgttagattcagaggagcggccagaagatctacaattagtagatcatgtagatggcggtgatggtattttgcccaggcaacagtacttcaaacagaactgcagtcagcatgaatccagtccagatatttcacattttgaaaggtcaaagcaagtttcatcagtcaatgaggaagattttgttagacttaaacagcagatttcagatcatatttcacaatcctgtggatctgggcaaatgaaaatgtttcaggaagtttctgcagcagatgcttttggtccaggtactgagggacaagtagaaagatttgaaacagttggcatggaggctgcgactgatgaaggcatgcctaaaagttacttaccacagactgtacggcaaggcggctacatgcctcagtgaaggactagtagttcctgctacaacttcagcagtacctataaagtaaagctaaaatgattttatctgtgaattcagattttaaaaagtcttcactctctgaagatgatcatttgcccttaaggacaaaaatgaactgaagtttcacatgagctatttccattccagaatatctgggattctactttaagcactacataaactgactttatcctcagactagctgaatgattttgtgctgtttcaggatgtttgcactgaagaaaaacagaaagcttatctgaaatttataaaactttttgttttgctacatagaaaacagaaggtatttgaataataagcagtgatatgcttagtgagcacagctatactgattttgattagaatagtcatcagagtggcttagggacagttaatataaaagaggagcaaggtgtagaccatcatctacttctgctaaaataacttaaaaagaggtccataggccataactacatgagcccagcttttgtaatctgacaaaaaaatgaggagcagcttcgtgtatatcagtgtacacggtattccttaggtcccttccattggtagtgatgctgcgagttattactggagaaaaggaattctagagctttaacttggcagattaaaagtactcattttttattcatcaataattagtaatctcactagttttcaaaaatttgcatattattgacaacctctttgaagatgcatttcacaaactcaacagagtgccatgataagagctagggatcccccaaactatctcaagcatctaaaaaattgccatttttaaaggcttaaattgtagtagtaaaggggaaaacaggaagtagtagtaaaggggaaaaaaaaccaataaagcatctaaaaaattggcatgttaaaaggcttaaattgctaatgtgtgtatatatatatatatatatacacacacatatcattgacttttcttaagacttcagagtactgggtagatgaacactttatacagtatatatcttcagcttaaatttgttttgagtattttttttatttttaaataagtaggcaaagatttaaatttttttatttttagtaaatgtttgaggcacactaagacaacttgggcaatatttgccaaaacaaaacagaaccccaaaaaatgtacatcttgttcttagcaaatatcattattgtagagacacttaataaagagatggtattttaatgtctgcagttctgaggtagggtggaacttagttctacattgtgatttaggaatttttaaaaccttttttcttcaagggagaagtgacccaggcctcgagtttagtgctaaagccgctagtgtacttatgctgtcccctaaccaccacgtgcgatatggaagcagatgctaaatataggggttttcttagaaagtaagaggaaattagcaagcgttattagtgattgactactgctatcaagtgaattcaaaggaaacaggtttttatgccatatttaagttacagaaaccaggcatgcttagaatagtttctagaggttattggagaatagaaagctaagaaaacttggtatacatttacaatggaaatataattacactttttactctcagaatattgttcacattagacttcctgtttatcttttatattcttgcatttatataatgcctcatcctttcaaagttctttcacatattatatgatcttctttatgaaaaaaatagatgtttcattctgatatattcagtttcccactttaggcaaaagtagattaatagaatgacgaattcaaagtagatgaggaaaatcaggcacagagaagtaaaggtagggatagacccaaatttacacaacaagataatgacatctccagcttttaagttgatcatcaaaggctgggctggatttgtcttgctgtatgtgtcaggaaatttatacctattacattttccattttctcaaaatttaagtcacatgactaatatttagctgcaactttcctcataacaaatagtgtcatgaagaatgttgtagtgtgaagtttgtacatttcagggtcagatatacaatatgaactcttaatctacaggaatgagaatggaggatcattgaaggccatgatataaacaaatttgcatgttgaagcctgtataaaacatggtacagtgagtgaatatacccccatccccaagaacactttatacatattaaatggatatatgattactgtgcaaaaattcattctggaaatgaacatatatttgagcactaatatgtaatgtacacctgccctaaggagaaaataaattataaaactttttacattcaaaattactttcccaagcatgtcttagaataatctatgtgttgatgcatgtaaattgtactttaggtaggcaaagaaatctggttatttatgtaaaaactagtctaataaagttagttagtggctttatcactttaaatctttagtgtccaaaagtggtgtttaaagtaatagcacatcagaaaaccttgtctggacaaaactagttcactcactgcttctgcacctgcagttgctccctttagggttataaaataatgacccaaatgttacatgtgttgatattataacttgtcagttactgatgtctgtggtatcctaccctcatctctgaaagggataatactgaataattattagaaaactataaaacttcacactttgtaccattaaaacctaaaattttaatcttgtccttttttactatggatcagtcggcactcgggaacagcagcaaggaaaaaaagcaaatttcattcacatgttctgtgttcatacctcttctctacctaattgttcatttaaatttcagccttattccttgataagggattttaccacatgaagtcatccagtgaccctagctcttattgtgaagttagtggagtatacttagaaatgttacaactttaaaatgttacaaaacattcattaaagctcatatttaaagtagagcatctagtttgagaaatagaaatcaattattaaagatgtcttttttctacccatttaactagttaaaaccatgacatgtaaatgtagaagtagaataatcatagaattccctaaaatatttctgtttactaacatatattgaccaagtacatcaagcaggagagatcttccttcattctgttatagtccacatcattctaattttgctcagttgttattaagagcatattcctaaaccatacacttttgtttcaataaagttttattttgttgagatgaataaaataacaaagttataagctgcataagacaaaagttcaattgttcaaaaaaaatttactgggatagctttctattacaggtattgttagattatattgtgctgataagattactttctaaaaaatttgtacttttctgtaaattaaaagaatatggagtcataaaatggcaagtgttttaggattagcctaaaattggacattgtcattgatttcaaagaaggtatgaactagcagtcttacagcctaattcttctttggactggtccttggcagcagttccttttcagactcgataaacagaattcagatgatgtaagtcaaaacaaaactttacaaagccaagcgtattatcttttgcattaacctatttttttccatcatacatgctactagtatgtgcattagcatgatattctcatatacattgcattaaaaattaaaaggtggcagctcagggtgagctcttctgttgctcatttgttcctaaatttttaagggctttttctcagtcaatagtttgtacaaactggttagtttaacttcattacccatttcattaaagttgatgggtcgtgtgatgagatgcatttaaggccgatagtgatagatgttttttttatttcttgaacacaggctttgtctgaatgatgttcttttatctcttgaacacaagctttgaatgataactacaggttttaagtgctgttacattaataccataatgtgatgtgttagaaacaaagggatatttcaaaggtagatatttgaaaattctctagtctcaatatgtatgtgtattgaatatactctaaaaataaatgtgcaatttgctagtaggacaatgcagtgactgactagcattaggtatgtttcttttatatcctagctatgtcccactttcttctaagtgcaatcctttcatgttcacttgctgttttaccccatctactctaacttcatttggaaggcttgtctagagtatagcatgtatttttacctttgcagtgaattgcatgtgctaattgtaaccacagctatttttatgttgacataactccaaatgttatattaaatgttctattatatattagctctaatcccttaagtaaattttaagaaataaatacttgttcaaattttttttctgtatgtggttactatcatctgactatgcatatttgtaacagcatttatcattagtggtgttagctaaataagcatcttagtgtaaatgagatgcttcgtgtgggttttgtgacattttaaatgacataatggaatgtgatttaaaagaaaaccagtacactatcttggtcttaataacatagaatggagatggcaaatttatccactagttttccagatttactatttaatagctgaggtctgaaatcgtagcatcctccctcctagtggacattaaaaaaaaaaaaaaaaaaaaaaacctacttggttgtcaagagcccaagtatggaggtgctgcgccatcttgtggcctgtctgtgcccaccctgcactctgctggagtctccatccttgttgcagtgagacttgaagttcaagattgatacatggcatcctcctgctacttcttgaggttactaagtagtatatgaaactaatcagtcagcaagtccacctggaaggaaaagaaaatctcaactattaatgtgccttcacattgtgattttgtctaaaaaaatgtagtgagtcaaaaaacccacaagccagccaacagtaactccttcacatatataccagagtttatagaaataacatgtcagctttgggctatgtgctcctttgtttaaaatcttctatttggttatggcttgtataggctcaagcctgatttctttaaggtgtggtggctcatcttatcctaatgtgtatgatagatacagtccatcctgctttggaaaagattatgtaactccttgagagcatactctttctctagcccaaaggcagtgagagagttttcttgttcaggattgcttaactttccatttaagctttttctttttaaattaatacaaacttctacactttcaaaatacgaaatatattacaactgcgtataggctcttccatacttaagtccagtgcttgggcaagttaatggagtgaaagactacaagcaaagaggaactgaggtagaaaaagaagaatgtgtgaaagcagcaggaagctcagccaactcgaaagcagggtgaacagcttgagtcctgttgctgctgatcggggttggctcttggacaacttagtaagatcatggaaaggctgcttgggttctccatagaaaagttctgtctccatcaagggaggaaaatgtacctttcaactcaaaattcaatatttgtttttaaatatagctattttccccaaccgctaaagattttcaacagatacgaagccagagcttagttttagaaacctgtggacattcaaacctgattctttattccctgtgactatggttatgtcattttacatgtcaaaaaagtgtatctagaattgtcatttcttatttttgagctttttttagtgagaattatcccctcacttaaatggctttttatttaaacatctgtgcattctgtatgaaattgtagtctttctgggataacatggtgagctatatggtggtaatccacacacacaaaaataaaagccaaaaaaaaaccaaaaaaaaaaaaaaaaaa

SEQ ID NO: 269 - DNA, 8988 bp, Homo sapiens
actggggtggcgcgctacctctgcggagaaggatctgacagtgttccggagccggggcgagcagccaaaaggcccgcggagtcgcgctgggccgccccggcgcagctgaaccgggggccgcgcctgccaggccgacgggtctggcccagcctggcgccaaggggttcgtgcgctgtggagacgcggagggtcgaggcggcgcggcctgagtgaaacccaatggaaaaagcatgacatttagaagtagaagacttagcttcaaatccctactccttcacttactaattttgtgatttggaaatatccgcgcaagatgttgacgttgcagacttggctagtgcaagccttgtttattttcctcaccactgaatctacaggtgaacttctagatccatgtggttatatcagtcctgaatctccagttgtacaacttcattctaatttcactgcagtttgtgtgctaaaggaaaaatgtatggattattttcatgtaaatgctaattacattgtctggaaaacaaaccattttactattcctaaggagcaatatactatcataaacagaacagcatccagtgtcacctttacagatatagcttcattaaatattcagctcacttgcaacattcttacattcggacagcttgaacagaatgtttatggaatcacaataatttcaggcttgcctccagaaaaacctaaaaatttgagttgcattgtgaacgaggggaagaaaatgaggtgtgagtgggatggtggaagggaaacacacttggagacaaacttcactttaaaatctgaatgggcaacacacaagtttgctgattgcaaagcaaaacgtgacacccccacctcatgcactgttgattattctactgtgtattttgtcaacattgaagtctgggtagaagcagagaatgcccttgggaaggttacatcagatcatatcaattttgatcctgtatataaagtgaagcccaatccgccacataatttatcagtgatcaactcagaggaactgtctagtatcttaaaattgacatggaccaacccaagtattaagagtgttataatactaaaatataacattcaatataggaccaaagatgcctcaacttggagccagattcctcctgaagacacagcatccacccgatcttcattcactgtccaagaccttaaaccttttacagaatatgtgtttaggattcgctgtatgaaggaagatggtaagggatactggagtgactggagtgaagaagcaagtgggatcacctatgaagataacattgcctccttttgaagccaatggaaaaatcttggattatgaagtgactctcacaagatggaaatcacatttacaaaattacacagttaatgccacaaaactgacagtaaatctcacaaatgatcgctatctagcaaccctaacagtaagaaatcttgttggcaaatcagatgcagctgttttaactatccctgcctgtgactttcaagctactcaccctgtaatggatcttaaagcattccccaaagataacatgctttgggtggaatggactactccaagggaatctgtaaagaaatatatacttgagtggtgtgtgttatcagataaagcaccctgtatcacagactggcaacaagaagatggtaccgtgcatcgcacctatttaagagggaacttagcagagagcaaatgctatttgataacagttactccagtatatgctgatggaccaggaagccctgaatccataaaggcataccttaaacaagctccaccttccaaaggacctactgttcggacaaaaaaagtagggaaaaacgaagctgtcttagagtgggaccaacttcctgttgatgttcagaatggatttatcagaaattatactatattttatagaaccatcattggaaatgaaactgctgtgaatgtggattcttcccacacagaatatacattgtcctctttgactagtgacacattgtacatggtacgaatggcagcatacacagatgaaggtgggaaggatggtccagaattcacttttactaccccaaagtttgctcaaggagaaattgaagccatagtcgtgcctgtttgcttagcattcctattgacaactcttctgggagtgctgttctgctttaataagcgagacctaattaaaaaacacatctggcctaatgttccagatccttcaaagagtcatattgcccagtggtcacctcacactcctccaaggcacaattttaattcaaaagatcaaatgtattcagatggcaatttcactgatgtaagtgttgtggaaatagaagcaaatgacaaaaagccttttccagaagatctgaaatcattggacctgttcaaaaaggaaaaaattaatactgaaggacacagcagtggtattggggggtcttcatgcatgtcatcttctaggccaagcatttctagcagtgatgaaaatgaatcttcacaaaacacttcgagcactgtccagtattctaccgtggtacacagtggctacagacaccaagttccgtcagtccaagtcttctcaagatccgagtctacccagcccttgttagattcagaggagcggccagaagatctacaattagtagatcatgtagatggcggtgatggtattttgcccaggcaacagtacttcaaacagaactgcagtcagcatgaatccagtccagatatttcacattttgaaaggtcaaagcaagtttcatcagtcaatgaggaagattttgttagacttaaacagcagatttcagatcatatttcacaatcctgtggatctgggcaaatgaaaatgtttcaggaagtttctgcagcagatgcttttggtccaggtactgagggacaagtagaaagatttgaaacagttggcatggaggctgcgactgatgaaggcatgcctaaaagttacttaccacagactgtacggcaaggcggctacatgcctcagtgaaggactagtagttcctgctacaacttcagcagtacctataaagtaaagctaaaatgattttatctgtgaattcagattttaaaaagtcttcactctctgaagatgatcatttgcccttaaggacaaaaatgaactgaagtttcacatgagctatttccattccagaatatctgggattctactttaagcactacataaactgactttatcctcagactagctgaatgattttgtgctgtttcaggatgtttgcactgaagaaaaacagaaagcttatctgaaatttataaaactttttgttttgctacatagaaaacagaaggtatttgaataataagcagtgatatgcttagtgagcacagctatactgattttgattagaatagtcatcagagtggcttagggacagttaatataaaagaggagcaaggtgtagaccatcatctacttctgctaaaataacttaaaaagaggtccataggccataactacatgagcccagcttttgtaatctgacaaaaaaatgaggagcagcttcgtgtatatcagtgtacacggtattccttaggtcccttccattggtagtgatgctgcgagttattactggagaaaaggaattctagagctttaacttggcagattaaaagtactcattttttattcatcaataattagtaatctcactagttttcaaaaatttgcatattattgacaacctctttgaagatgcatttcacaaactcaacagagtgccatgataagagctagggatcccccaaactatctcaagcatctaaaaaattgccatttttaaaggcttaaattgtagtagtaaaggggaaaacaggaagtagtagtaaaggggaaaaaaaaccaataaagcatctaaaaaattggcatgttaaaaggcttaaattgctaatgtgtgtatatatatatatatatatacacacacatatcattgacttttcttaagacttcagagtactgggtagatgaacactttatacagtatatatcttcagcttaaatttgttttgagtattttttttatttttaaataagtaggcaaagatttaaatttttttatttttagtaaatgtttgaggcacactaagacaacttgggcaatatttgccaaaacaaaacagaaccccaaaaaatgtacatcttgttcttagcaaatatcattattgtagagacacttaataaagagatggtattttaatgtctgcagttctgaggtagggtggaacttagttctacattgtgatttaggaatttttaaaaccttttttcttcaagggagaagtgacccaggcctcgagtttagtgctaaagccgctagtgtacttatgctgtcccctaaccaccacgtgcgatatggaagcagatgctaaatataggggttttcttagaaagtaagaggaaattagcaagcgttattagtgattgactactgctatcaagtgaattcaaaggaaacaggtttttatgccatatttaagttacagaaaccaggcatgcttagaatagtttctagaggttattggagaatagaaagctaagaaaacttggtatacatttacaatggaaatataattacactttttactctcagaatattgttcacattagacttcctgtttatcttttatattcttgcatttatataatgcctcatcctttcaaagttctttcacatattatatgatcttctttatgaaaaaaatagatgtttcattctgatatattcagtttcccactttaggcaaaagtagattaatagaatgacgaattcaaagtagatgaggaaaatcaggcacagagaagtaaaggtagggatagacccaaatttacacaacaagataatgacatctccagcttttaagttgatcatcaaaggctgggctggatttgtcttgctgtatgtgtcaggaaatttatacctattacattttccattttctcaaaatttaagtcacatgactaatatttagctgcaactttcctcataacaaatagtgtcatgaagaatgttgtagtgtgaagtttgtacatttcagggtcagatatacaatatgaactcttaatctacaggaatgagaatggaggatcattgaaggccatgatataaacaaatttgcatgttgaagcctgtataaaacatggtacagtgagtgaatatacccccatccccaagaacactttatacatattaaatggatatatgattactgtgcaaaaattcattctggaaatgaacatatatttgagcactaatatgtaatgtacacctgccctaaggagaaaataaattataaaactttttacattcaaaattactttcccaagcatgtcttagaataatctatgtgttgatgcatgtaaattgtactttaggtaggcaaagaaatctggttatttatgtaaaaactagtctaataaagttagttagtggctttatcactttaaatctttagtgtccaaaagtggtgtttaaagtaatagcacatcagaaaaccttgtctggacaaaactagttcactcactgcttctgcacctgcagttgctccctttagggttataaaataatgacccaaatgttacatgtgttgatattataacttgtcagttactgatgtctgtggtatcctaccctcatctctgaaagggataatactgaataattattagaaaactataaaacttcacactttgtaccattaaaacctaaaattttaatcttgtccttttttactatggatcagtcggcactcgggaacagcagcaaggaaaaaaagcaaatttcattcacatgttctgtgttcatacctcttctctacctaattgttcatttaaatttcagccttattccttgataagggattttaccacatgaagtcatccagtgaccctagctcttattgtgaagttagtggagtatacttagaaatgttacaactttaaaatgttacaaaacattcattaaagctcatatttaaagtagagcatctagtttgagaaatagaaatcaattattaaagatgtcttttttctacccatttaactagttaaaaccatgacatgtaaatgtagaagtagaataatcatagaattccctaaaatatttctgtttactaacatatattgaccaagtacatcaagcaggagagatcttccttcattctgttatagtccacatcattctaattttgctcagttgttattaagagcatattcctaaaccatacacttttgtttcaataaagttttattttgttgagatgaataaaataacaaagttataagctgcataagacaaaagttcaattgttcaaaaaaaatttactgggatagctttctattacaggtattgttagattatattgtgctgataagattactttctaaaaaatttgtacttttctgtaaattaaaagaatatggagtcataaaatggcaagtgttttaggattagcctaaaattggacattgtcattgatttcaaagaaggtatgaactagcagtcttacagcctaattcttctttggactggtccttggcagcagttccttttcagactcgataaacagaattcagatgatgtaagtcaaaacaaaactttacaaagccaagcgtattatcttttgcattaacctatttttttccatcatacatgctactagtatgtgcattagcatgatattctcatatacattgcattaaaaattaaaaggtggcagctcagggtgagctcttctgttgctcatttgttcctaaatttttaagggctttttctcagtcaatagtttgtacaaactggttagtttaacttcattacccatttcattaaagttgatgggtcgtgtgatgagatgcatttaaggccgatagtgatagatgttttttttatttcttgaacacaggctttgtctgaatgatgttcttttatctcttgaacacaagctttgaatgataactacaggttttaagtgctgttacattaataccataatgtgatgtgttagaaacaaagggatatttcaaaggtagatatttgaaaattctctagtctcaatatgtatgtgtattgaatatactctaaaaataaatgtgcaatttgctagtaggacaatgcagtgactgactagcattaggtatgtttcttttatatcctagctatgtcccactttcttctaagtgcaatcctttcatgttcacttgctgttttaccccatctactctaacttcatttggaaggcttgtctagagtatagcatgtatttttacctttgcagtgaattgcatgtgctaattgtaaccacagctatttttatgttgacataactccaaatgttatattaaatgttctattatatattagctctaatcccttaagtaaattttaagaaataaatacttgttcaaattttttttctgtatgtggttactatcatctgactatgcatatttgtaacagcatttatcattagtggtgttagctaaataagcatcttagtgtaaatgagatgcttcgtgtgggttttgtgacattttaaatgacataatggaatgtgatttaaaagaaaaccagtacactatcttggtcttaataacatagaatggagatggcaaatttatccactagttttccagatttactatttaatagctgaggtctgaaatcgtagcatcctccctcctagtggacattaaaaaaaaaaaaaaaaaaaaaaacctacttggttgtcaagagcccaagtatggaggtgctgcgccatcttgtggcctgtctgtgcccaccctgcactctgctggagtctccatccttgttgcagtgagacttgaagttcaagattgatacatggcatcctcctgctacttcttgaggttactaagtagtatatgaaactaatcagtcagcaagtccacctggaaggaaaagaaaatctcaactattaatgtgccttcacattgtgattttgtctaaaaaaatgtagtgagtcaaaaaacccacaagccagccaacagtaactccttcacatatataccagagtttatagaaataacatgtcagctttgggctatgtgctcctttgtttaaaatcttctatttggttatggcttgtataggctcaagcctgatttctttaaggtgtggtggctcatcttatcctaatgtgtatgatagatacagtccatcctgctttggaaaagattatgtaactccttgagagcatactctttctctagcccaaaggcagtgagagagttttcttgttcaggattgcttaactttccatttaagctttttctttttaaattaatacaaacttctacactttcaaaatacgaaatatattacaactgcgtataggctcttccatacttaagtccagtgcttgggcaagttaatggagtgaaagactacaagcaaagaggaactgaggtagaaaaagaagaatgtgtgaaagcagcaggaagctcagccaactcgaaagcagggtgaacagcttgagtcctgttgctgctgatcggggttggctcttggacaacttagtaagatcatggaaaggctgcttgggttctccatagaaaagttctgtctccatcaagggaggaaaatgtacctttcaactcaaaattcaatatttgtttttaaatatagctattttccccaaccgctaaagattttcaacagatacgaagccagagcttagttttagaaacctgtggacattcaaacctgattctttattccctgtgactatggttatgtcattttacatgtcaaaaaagtgtatctagaattgtcatttcttatttttgagctttttttagtgagaattatcccctcacttaaatggctttttatttaaacatctgtgcattctgtatgaaattgtagtctttctgggataacatggtgagctatatggtggtaatccacacacacaaaaataaaagccaaaaaaaaaccaaaaaaaaaaaaaaaaaa

SEQ ID NO: 270 - DNA, 8888 bp, Homo sapiens
actggggtggcgcgctacctctgcggagaaggatctgacagtgttccggagccggggcgagcagccaaaaggcccgcggagtcgcgctgggccgccccggcgcagctgaaccgggggccgcgcctgccaggccgacgggtctggcccagcctggcgccaaggggttcgtgcgctgtggagacgcggagggtcgaggcggcgcggcctgagtgaaacccaatggaaaaagcatgacatttagaagtagaagacttagcttcaaatccctactccttcacttactaattttgtgatttggaaatatccgcgcaagatgttgacgttgcagacttggctagtgcaagccttgtttattttcctcaccactgaatctacaggtgaacttctagatccatgtggttatatcagtcctgaatctccagttgtacaacttcattctaatttcactgcagtttgtgtgctaaaggaaaaatgtatggattattttcatgtaaatgctaattacattgtctggaaaacaaaccattttactattcctaaggagcaatatactatcataaacagaacagcatccagtgtcacctttacagatatagcttcattaaatattcagctcacttgcaacattcttacattcggacagcttgaacagaatgtttatggaatcacaataatttcaggcttgcctccagaaaaacctaaaaatttgagttgcattgtgaacgaggggaagaaaatgaggtgtgagtgggatggtggaagggaaacacacttggagacaaacttcactttaaaatctgaatgggcaacacacaagtttgctgattgcaaagcaaaacgtgacacccccacctcatgcactgttgattattctactgtgtattttgtcaacattgaagtctgggtagaagcagagaatgcccttgggaaggttacatcagatcatatcaattttgatcctgtatataaagtgaagcccaatccgccacataatttatcagtgatcaactcagaggaactgtctagtatcttaaaattgacatggaccaacccaagtattaagagtgttataatactaaaatataacattcaatataggaccaaagatgcctcaacttggagccagattcctcctgaagacacagcatccacccgatcttcattcactgtccaagaccttaaaccttttacagaatatgtgtttaggattcgctgtatgaaggaagatggtaagggatactggagtgactggagtgaagaagcaagtgggatcacctatgaagatagaccatctaaagcaccaagtttctggtataaaatagatccatcccatactcaaggctacagaactgtacaactcgtgtggaagacattgcctccttttgaagccaatggaaaaatcttggattatgaagtgactctcacaagatggaaatcacatttacaaaattacacagttaatgccacaaaactgacagtaaatctcacaaatgatcgctatctagcaaccctaacagtaagaaatcttgttggcaaatcagatgcagctgttttaactatccctgcctgtgactttcaagggaacttagcagagagcaaatgctatttgataacagttactccagtatatgctgatggaccaggaagccctgaatccataaaggcataccttaaacaagctccaccttccaaaggacctactgttcggacaaaaaaagtagggaaaaacgaagctgtcttagagtgggaccaacttcctgttgatgttcagaatggatttatcagaaattatactatattttatagaaccatcattggaaatgaaactgctgtgaatgtggattcttcccacacagaatatacattgtcctctttgactagtgacacattgtacatggtacgaatggcagcatacacagatgaaggtgggaaggatggtccagaattcacttttactaccccaaagtttgctcaaggagaaattgaagccatagtcgtgcctgtttgcttagcattcctattgacaactcttctgggagtgctgttctgctttaataagcgagacctaattaaaaaacacatctggcctaatgttccagatccttcaaagagtcatattgcccagtggtcacctcacactcctccaaggcacaattttaattcaaaagatcaaatgtattcagatggcaatttcactgatgtaagtgttgtggaaatagaagcaaatgacaaaaagccttttccagaagatctgaaatcattggacctgttcaaaaaggaaaaaattaatactgaaggacacagcagtggtattggggggtcttcatgcatgtcatcttctaggccaagcatttctagcagtgatgaaaatgaatcttcacaaaacacttcgagcactgtccagtattctaccgtggtacacagtggctacagacaccaagttccgtcagtccaagtcttctcaagatccgagtctacccagcccttgttagattcagaggagcggccagaagatctacaattagtagatcatgtagatggcggtgatggtattttgcccaggcaacagtacttcaaacagaactgcagtcagcatgaatccagtccagatatttcacattttgaaaggtcaaagcaagtttcatcagtcaatgaggaagattttgttagacttaaacagcagatttcagatcatatttcacaatcctgtggatctgggcaaatgaaaatgtttcaggaagtttctgcagcagatgcttttggtccaggtactgagggacaagtagaaagatttgaaacagttggcatggaggctgcgactgatgaaggcatgcctaaaagttacttaccacagactgtacggcaaggcggctacatgcctcagtgaaggactagtagttcctgctacaacttcagcagtacctataaagtaaagctaaaatgattttatctgtgaattcagattttaaaaagtcttcactctctgaagatgatcatttgcccttaaggacaaaaatgaactgaagtttcacatgagctatttccattccagaatatctgggattctactttaagcactacataaactgactttatcctcagactagctgaatgattttgtgctgtttcaggatgtttgcactgaagaaaaacagaaagcttatctgaaatttataaaactttttgttttgctacatagaaaacagaaggtatttgaataataagcagtgatatgcttagtgagcacagctatactgattttgattagaatagtcatcagagtggcttagggacagttaatataaaagaggagcaaggtgtagaccatcatctacttctgctaaaataacttaaaaagaggtccataggccataactacatgagcccagcttttgtaatctgacaaaaaaatgaggagcagcttcgtgtatatcagtgtacacggtattccttaggtcccttccattggtagtgatgctgcgagttattactggagaaaaggaattctagagctttaacttggcagattaaaagtactcattttttattcatcaataattagtaatctcactagttttcaaaaatttgcatattattgacaacctctttgaagatgcatttcacaaactcaacagagtgccatgataagagctagggatcccccaaactatctcaagcatctaaaaaattgccatttttaaaggcttaaattgtagtagtaaaggggaaaacaggaagtagtagtaaaggggaaaaaaaaccaataaagcatctaaaaaattggcatgttaaaaggcttaaattgctaatgtgtgtatatatatatatatatatacacacacatatcattgacttttcttaagacttcagagtactgggtagatgaacactttatacagtatatatcttcagcttaaatttgttttgagtattttttttatttttaaataagtaggcaaagatttaaatttttttatttttagtaaatgtttgaggcacactaagacaacttgggcaatatttgccaaaacaaaacagaaccccaaaaaatgtacatcttgttcttagcaaatatcattattgtagagacacttaataaagagatggtattttaatgtctgcagttctgaggtagggtggaacttagttctacattgtgatttaggaatttttaaaaccttttttcttcaagggagaagtgacccaggcctcgagtttagtgctaaagccgctagtgtacttatgctgtcccctaaccaccacgtgcgatatggaagcagatgctaaatataggggttttcttagaaagtaagaggaaattagcaagcgttattagtgattgactactgctatcaagtgaattcaaaggaaacaggtttttatgccatatttaagttacagaaaccaggcatgcttagaatagtttctagaggttattggagaatagaaagctaagaaaacttggtatacatttacaatggaaatataattacactttttactctcagaatattgttcacattagacttcctgtttatcttttatattcttgcatttatataatgcctcatcctttcaaagttctttcacatattatatgatcttctttatgaaaaaaatagatgtttcattctgatatattcagtttcccactttaggcaaaagtagattaatagaatgacgaattcaaagtagatgaggaaaatcaggcacagagaagtaaaggtagggatagacccaaatttacacaacaagataatgacatctccagcttttaagttgatcatcaaaggctgggctggatttgtcttgctgtatgtgtcaggaaatttatacctattacattttccattttctcaaaatttaagtcacatgactaatatttagctgcaactttcctcataacaaatagtgtcatgaagaatgttgtagtgtgaagtttgtacatttcagggtcagatatacaatatgaactcttaatctacaggaatgagaatggaggatcattgaaggccatgatataaacaaatttgcatgttgaagcctgtataaaacatggtacagtgagtgaatatacccccatccccaagaacactttatacatattaaatggatatatgattactgtgcaaaaattcattctggaaatgaacatatatttgagcactaatatgtaatgtacacctgccctaaggagaaaataaattataaaactttttacattcaaaattactttcccaagcatgtcttagaataatctatgtgttgatgcatgtaaattgtactttaggtaggcaaagaaatctggttatttatgtaaaaactagtctaataaagttagttagtggctttatcactttaaatctttagtgtccaaaagtggtgtttaaagtaatagcacatcagaaaaccttgtctggacaaaactagttcactcactgcttctgcacctgcagttgctccctttagggttataaaataatgacccaaatgttacatgtgttgatattataacttgtcagttactgatgtctgtggtatcctaccctcatctctgaaagggataatactgaataattattagaaaactataaaacttcacactttgtaccattaaaacctaaaattttaatcttgtccttttttactatggatcagtcggcactcgggaacagcagcaaggaaaaaaagcaaatttcattcacatgttctgtgttcatacctcttctctacctaattgttcatttaaatttcagccttattccttgataagggattttaccacatgaagtcatccagtgaccctagctcttattgtgaagttagtggagtatacttagaaatgttacaactttaaaatgttacaaaacattcattaaagctcatatttaaagtagagcatctagtttgagaaatagaaatcaattattaaagatgtcttttttctacccatttaactagttaaaaccatgacatgtaaatgtagaagtagaataatcatagaattccctaaaatatttctgtttactaacatatattgaccaagtacatcaagcaggagagatcttccttcattctgttatagtccacatcattctaattttgctcagttgttattaagagcatattcctaaaccatacacttttgtttcaataaagttttattttgttgagatgaataaaataacaaagttataagctgcataagacaaaagttcaattgttcaaaaaaaatttactgggatagctttctattacaggtattgttagattatattgtgctgataagattactttctaaaaaatttgtacttttctgtaaattaaaagaatatggagtcataaaatggcaagtgttttaggattagcctaaaattggacattgtcattgatttcaaagaaggtatgaactagcagtcttacagcctaattcttctttggactggtccttggcagcagttccttttcagactcgataaacagaattcagatgatgtaagtcaaaacaaaactttacaaagccaagcgtattatcttttgcattaacctatttttttccatcatacatgctactagtatgtgcattagcatgatattctcatatacattgcattaaaaattaaaaggtggcagctcagggtgagctcttctgttgctcatttgttcctaaatttttaagggctttttctcagtcaatagtttgtacaaactggttagtttaacttcattacccatttcattaaagttgatgggtcgtgtgatgagatgcatttaaggccgatagtgatagatgttttttttatttcttgaacacaggctttgtctgaatgatgttcttttatctcttgaacacaagctttgaatgataactacaggttttaagtgctgttacattaataccataatgtgatgtgttagaaacaaagggatatttcaaaggtagatatttgaaaattctctagtctcaatatgtatgtgtattgaatatactctaaaaataaatgtgcaatttgctagtaggacaatgcagtgactgactagcattaggtatgtttcttttatatcctagctatgtcccactttcttctaagtgcaatcctttcatgttcacttgctgttttaccccatctactctaacttcatttggaaggcttgtctagagtatagcatgtatttttacctttgcagtgaattgcatgtgctaattgtaaccacagctatttttatgttgacataactccaaatgttatattaaatgttctattatatattagctctaatcccttaagtaaattttaagaaataaatacttgttcaaattttttttctgtatgtggttactatcatctgactatgcatatttgtaacagcatttatcattagtggtgttagctaaataagcatcttagtgtaaatgagatgcttcgtgtgggttttgtgacattttaaatgacataatggaatgtgatttaaaagaaaaccagtacactatcttggtcttaataacatagaatggagatggcaaatttatccactagttttccagatttactatttaatagctgaggtctgaaatcgtagcatcctccctcctagtggacattaaaaaaaaaaaaaaaaaaaaaaacctacttggttgtcaagagcccaagtatggaggtgctgcgccatcttgtggcctgtctgtgcccaccctgcactctgctggagtctccatccttgttgcagtgagacttgaagttcaagattgatacatggcatcctcctgctacttcttgaggttactaagtagtatatgaaactaatcagtcagcaagtccacctggaaggaaaagaaaatctcaactattaatgtgccttcacattgtgattttgtctaaaaaaatgtagtgagtcaaaaaacccacaagccagccaacagtaactccttcacatatataccagagtttatagaaataacatgtcagctttgggctatgtgctcctttgtttaaaatcttctatttggttatggcttgtataggctcaagcctgatttctttaaggtgtggtggctcatcttatcctaatgtgtatgatagatacagtccatcctgctttggaaaagattatgtaactccttgagagcatactctttctctagcccaaaggcagtgagagagttttcttgttcaggattgcttaactttccatttaagctttttctttttaaattaatacaaacttctacactttcaaaatacgaaatatattacaactgcgtataggctcttccatacttaagtccagtgcttgggcaagttaatggagtgaaagactacaagcaaagaggaactgaggtagaaaaagaagaatgtgtgaaagcagcaggaagctcagccaactcgaaagcagggtgaacagcttgagtcctgttgctgctgatcggggttggctcttggacaacttagtaagatcatggaaaggctgcttgggttctccatagaaaagttctgtctccatcaagggaggaaaatgtacctttcaactcaaaattcaatatttgtttttaaatatagctattttccccaaccgctaaagattttcaacagatacgaagccagagcttagttttagaaacctgtggacattcaaacctgattctttattccctgtgactatggttatgtcattttacatgtcaaaaaagtgtatctagaattgtcatttcttatttttgagctttttttagtgagaattatcccctcacttaaatggctttttatttaaacatctgtgcattctgtatgaaattgtagtctttctgggataacatggtgagctatatggtggtaatccacacacacaaaaataaaagccaaaaaaaaaccaaaaaaaaaaaaaaaaaa

SEQ ID NO: 271 - DNA, 9117 bp, Homo sapiens
actggggtggcgcgctacctctgcggagaaggatctgacagtgttccggagccggggcgagcagccaaaaggcccgcggagtcgcgctgggccgccccggcgcagctgaaccgggggccgcgcctgccaggccgacgggtctggcccagcctggcgccaaggggttcgtgcgctgtggagacgcggagggtcgaggcggcgcggcctgagtgaaacccaatggaaaaagcatgacatttagaagtagaagacttagcttcaaatccctactccttcacttactaattttgtgatttggaaatatccgcgcaagatgttgacgttgcagacttggctagtgcaagccttgtttattttcctcaccactgaatctacaggtgaacttctagatccatgtggttatatcagtcctgaatctccagttgtacaacttcattctaatttcactgcagtttgtgtgctaaaggaaaaatgtatggattattttcatgtaaatgctaattacattgtctggaaaacaaaccattttactattcctaaggagcaatatactatcataaacagaacagcatccagtgtcacctttacagatatagcttcattaaatattcagctcacttgcaacattcttacattcggacagcttgaacagaatgtttatggaatcacaataatttcaggcttgcctccagaaaaacctaaaaatttgagttgcattgtgaacgaggggaagaaaatgaggtgtgagtgggatggtggaagggaaacacacttggagacaaacttcactttaaaatctgaatgggcaacacacaagtttgctgattgcaaagcaaaacgtgacacccccacctcatgcactgttgattattctactgtgtattttgtcaacattgaagtctgggtagaagcagagaatgcccttgggaaggttacatcagatcatatcaattttgatcctgtatataaagtgaagcccaatccgccacataatttatcagtgatcaactcagaggaactgtctagtatcttaaaattgacatggaccaacccaagtattaagagtgttataatactaaaatataacattcaatataggaccaaagatgcctcaacttggagccagattcctcctgaagacacagcatccacccgatcttcattcactgtccaagaccttaaaccttttacagaatatgtgtttaggattcgctgtatgaaggaagatggtaagggatactggagtgactggagtgaagaagcaagtgggatcacctatgaagatacacttgataagcccctgggaagcggttgatcctggaattttggttggaccatctaaagcaccaagtttctggtataaaatagatccatcccatactcaaggctacagaactgtacaactcgtgtggaagacattgcctccttttgaagccaatggaaaaatcttggattatgaagtgactctcacaagatggaaatcacatttacaaaattacacagttaatgccacaaaactgacagtaaatctcacaaatgatcgctatctagcaaccctaacagtaagaaatcttgttggcaaatcagatgcagctgttttaactatccctgcctgtgactttcaagctactcaccctgtaatggatcttaaagcattccccaaagataacatgctttgggtggaatggactactccaagggaatctgtaaagaaatatatacttgagtggtgtgtgttatcagataaagcaccctgtatcacagactggcaacaagaagatggtaccgtgcatcgcacctatttaagagggaacttagcagagagcaaatgctatttgataacagttactccagtatatgctgatggaccaggaagccctgaatccataaaggcataccttaaacaagctccaccttccaaaggacctactgttcggacaaaaaaagtagggaaaaacgaagctgtcttagagtgggaccaacttcctgttgatgttcagaatggatttatcagaaattatactatattttatagaaccatcattggaaatgaaactgctgtgaatgtggattcttcccacacagaatatacattgtcctctttgactagtgacacattgtacatggtacgaatggcagcatacacagatgaaggtgggaaggatggtccagaattcacttttactaccccaaagtttgctcaaggagaaattgaagccatagtcgtgcctgtttgcttagcattcctattgacaactcttctgggagtgctgttctgctttaataagcgagacctaattaaaaaacacatctggcctaatgttccagatccttcaaagagtcatattgcccagtggtcacctcacactcctccaaggcacaattttaattcaaaagatcaaatgtattcagatggcaatttcactgatgtaagtgttgtggaaatagaagcaaatgacaaaaagccttttccagaagatctgaaatcattggacctgttcaaaaaggaaaaaattaatactgaaggacacagcagtggtattggggggtcttcatgcatgtcatcttctaggccaagcatttctagcagtgatgaaaatgaatcttcacaaaacacttcgagcactgtccagtattctaccgtggtacacagtggctacagacaccaagttccgtcagtccaagtcttctcaagatccgagtctacccagcccttgttagattcagaggagcggccagaagatctacaattagtagatcatgtagatggcggtgatggtattttgcccaggcaacagtacttcaaacagaactgcagtcagcatgaatccagtccagatatttcacattttgaaaggtcaaagcaagtttcatcagtcaatgaggaagattttgttagacttaaacagcagatttcagatcatatttcacaatcctgtggatctgggcaaatgaaaatgtttcaggaagtttctgcagcagatgcttttggtccaggtactgagggacaagtagaaagatttgaaacagttggcatggaggctgcgactgatgaaggcatgcctaaaagttacttaccacagactgtacggcaaggcggctacatgcctcagtgaaggactagtagttcctgctacaacttcagcagtacctataaagtaaagctaaaatgattttatctgtgaattcagattttaaaaagtcttcactctctgaagatgatcatttgcccttaaggacaaaaatgaactgaagtttcacatgagctatttccattccagaatatctgggattctactttaagcactacataaactgactttatcctcagactagctgaatgattttgtgctgtttcaggatgtttgcactgaagaaaaacagaaagcttatctgaaatttataaaactttttgttttgctacatagaaaacagaaggtatttgaataataagcagtgatatgcttagtgagcacagctatactgattttgattagaatagtcatcagagtggcttagggacagttaatataaaagaggagcaaggtgtagaccatcatctacttctgctaaaataacttaaaaagaggtccataggccataactacatgagcccagcttttgtaatctgacaaaaaaatgaggagcagcttcgtgtatatcagtgtacacggtattccttaggtcccttccattggtagtgatgctgcgagttattactggagaaaaggaattctagagctttaacttggcagattaaaagtactcattttttattcatcaataattagtaatctcactagttttcaaaaatttgcatattattgacaacctctttgaagatgcatttcacaaactcaacagagtgccatgataagagctagggatcccccaaactatctcaagcatctaaaaaattgccatttttaaaggcttaaattgtagtagtaaaggggaaaacaggaagtagtagtaaaggggaaaaaaaaccaataaagcatctaaaaaattggcatgttaaaaggcttaaattgctaatgtgtgtatatatatatatatatatacacacacatatcattgacttttcttaagacttcagagtactgggtagatgaacactttatacagtatatatcttcagcttaaatttgttttgagtattttttttatttttaaataagtaggcaaagatttaaatttttttatttttagtaaatgtttgaggcacactaagacaacttgggcaatatttgccaaaacaaaacagaaccccaaaaaatgtacatcttgttcttagcaaatatcattattgtagagacacttaataaagagatggtattttaatgtctgcagttctgaggtagggtggaacttagttctacattgtgatttaggaatttttaaaaccttttttcttcaagggagaagtgacccaggcctcgagtttagtgctaaagccgctagtgtacttatgctgtcccctaaccaccacgtgcgatatggaagcagatgctaaatataggggttttcttagaaagtaagaggaaattagcaagcgttattagtgattgactactgctatcaagtgaattcaaaggaaacaggtttttatgccatatttaagttacagaaaccaggcatgcttagaatagtttctagaggttattggagaatagaaagctaagaaaacttggtatacatttacaatggaaatataattacactttttactctcagaatattgttcacattagacttcctgtttatcttttatattcttgcatttatataatgcctcatcctttcaaagttctttcacatattatatgatcttctttatgaaaaaaatagatgtttcattctgatatattcagtttcccactttaggcaaaagtagattaatagaatgacgaattcaaagtagatgaggaaaatcaggcacagagaagtaaaggtagggatagacccaaatttacacaacaagataatgacatctccagcttttaagttgatcatcaaaggctgggctggatttgtcttgctgtatgtgtcaggaaatttatacctattacattttccattttctcaaaatttaagtcacatgactaatatttagctgcaactttcctcataacaaatagtgtcatgaagaatgttgtagtgtgaagtttgtacatttcagggtcagatatacaatatgaactcttaatctacaggaatgagaatggaggatcattgaaggccatgatataaacaaatttgcatgttgaagcctgtataaaacatggtacagtgagtgaatatacccccatccccaagaacactttatacatattaaatggatatatgattactgtgcaaaaattcattctggaaatgaacatatatttgagcactaatatgtaatgtacacctgccctaaggagaaaataaattataaaactttttacattcaaaattactttcccaagcatgtcttagaataatctatgtgttgatgcatgtaaattgtactttaggtaggcaaagaaatctggttatttatgtaaaaactagtctaataaagttagttagtggctttatcactttaaatctttagtgtccaaaagtggtgtttaaagtaatagcacatcagaaaaccttgtctggacaaaactagttcactcactgcttctgcacctgcagttgctccctttagggttataaaataatgacccaaatgttacatgtgttgatattataacttgtcagttactgatgtctgtggtatcctaccctcatctctgaaagggataatactgaataattattagaaaactataaaacttcacactttgtaccattaaaacctaaaattttaatcttgtccttttttactatggatcagtcggcactcgggaacagcagcaaggaaaaaaagcaaatttcattcacatgttctgtgttcatacctcttctctacctaattgttcatttaaatttcagccttattccttgataagggattttaccacatgaagtcatccagtgaccctagctcttattgtgaagttagtggagtatacttagaaatgttacaactttaaaatgttacaaaacattcattaaagctcatatttaaagtagagcatctagtttgagaaatagaaatcaattattaaagatgtcttttttctacccatttaactagttaaaaccatgacatgtaaatgtagaagtagaataatcatagaattccctaaaatatttctgtttactaacatatattgaccaagtacatcaagcaggagagatcttccttcattctgttatagtccacatcattctaattttgctcagttgttattaagagcatattcctaaaccatacacttttgtttcaataaagttttattttgttgagatgaataaaataacaaagttataagctgcataagacaaaagttcaattgttcaaaaaaaatttactgggatagctttctattacaggtattgttagattatattgtgctgataagattactttctaaaaaatttgtacttttctgtaaattaaaagaatatggagtcataaaatggcaagtgttttaggattagcctaaaattggacattgtcattgatttcaaagaaggtatgaactagcagtcttacagcctaattcttctttggactggtccttggcagcagttccttttcagactcgataaacagaattcagatgatgtaagtcaaaacaaaactttacaaagccaagcgtattatcttttgcattaacctatttttttccatcatacatgctactagtatgtgcattagcatgatattctcatatacattgcattaaaaattaaaaggtggcagctcagggtgagctcttctgttgctcatttgttcctaaatttttaagggctttttctcagtcaatagtttgtacaaactggttagtttaacttcattacccatttcattaaagttgatgggtcgtgtgatgagatgcatttaaggccgatagtgatagatgttttttttatttcttgaacacaggctttgtctgaatgatgttcttttatctcttgaacacaagctttgaatgataactacaggttttaagtgctgttacattaataccataatgtgatgtgttagaaacaaagggatatttcaaaggtagatatttgaaaattctctagtctcaatatgtatgtgtattgaatatactctaaaaataaatgtgcaatttgctagtaggacaatgcagtgactgactagcattaggtatgtttcttttatatcctagctatgtcccactttcttctaagtgcaatcctttcatgttcacttgctgttttaccccatctactctaacttcatttggaaggcttgtctagagtatagcatgtatttttacctttgcagtgaattgcatgtgctaattgtaaccacagctatttttatgttgacataactccaaatgttatattaaatgttctattatatattagctctaatcccttaagtaaattttaagaaataaatacttgttcaaattttttttctgtatgtggttactatcatctgactatgcatatttgtaacagcatttatcattagtggtgttagctaaataagcatcttagtgtaaatgagatgcttcgtgtgggttttgtgacattttaaatgacataatggaatgtgatttaaaagaaaaccagtacactatcttggtcttaataacatagaatggagatggcaaatttatccactagttttccagatttactatttaatagctgaggtctgaaatcgtagcatcctccctcctagtggacattaaaaaaaaaaaaaaaaaaaaaaacctacttggttgtcaagagcccaagtatggaggtgctgcgccatcttgtggcctgtctgtgcccaccctgcactctgctggagtctccatccttgttgcagtgagacttgaagttcaagattgatacatggcatcctcctgctacttcttgaggttactaagtagtatatgaaactaatcagtcagcaagtccacctggaaggaaaagaaaatctcaactattaatgtgccttcacattgtgattttgtctaaaaaaatgtagtgagtcaaaaaacccacaagccagccaacagtaactccttcacatatataccagagtttatagaaataacatgtcagctttgggctatgtgctcctttgtttaaaatcttctatttggttatggcttgtataggctcaagcctgatttctttaaggtgtggtggctcatcttatcctaatgtgtatgatagatacagtccatcctgctttggaaaagattatgtaactccttgagagcatactctttctctagcccaaaggcagtgagagagttttcttgttcaggattgcttaactttccatttaagctttttctttttaaattaatacaaacttctacactttcaaaatacgaaatatattacaactgcgtataggctcttccatacttaagtccagtgcttgggcaagttaatggagtgaaagactacaagcaaagaggaactgaggtagaaaaagaagaatgtgtgaaagcagcaggaagctcagccaactcgaaagcagggtgaacagcttgagtcctgttgctgctgatcggggttggctcttggacaacttagtaagatcatggaaaggctgcttgggttctccatagaaaagttctgtctccatcaagggaggaaaatgtacctttcaactcaaaattcaatatttgtttttaaatatagctattttccccaaccgctaaagattttcaacagatacgaagccagagcttagttttagaaacctgtggacattcaaacctgattctttattccctgtgactatggttatgtcattttacatgtcaaaaaagtgtatctagaattgtcatttcttatttttgagctttttttagtgagaattatcccctcacttaaatggctttttatttaaacatctgtgcattctgtatgaaattgtagtctttctgggataacatggtgagctatatggtggtaatccacacacacaaaaataaaagccaaaaaaaaaccaaaaaaaaaaaaaaaaaa

SEQ ID NO: 272 - DNA, 8387 bp, Homo sapiens
actggggtggcgcgctacctctgcggagaaggatctgacagtgttccggagccggggcgagcagccaaaaggcccgcggagtcgcgctgggccgccccggcgcagctgaaccgggggccgcgcctgccaggccgacgggtctggcccagcctggcgccaaggggttcgtgcgctgtggagacgcggagggtcgaggcggcgcggcctgagtgaaacccaatggaaaaagcatgacatttagaagtagaagacttagcttcaaatccctactccttcacttactaattttgtgatttggaaatatccgcgcaagatgttgacgttgcagacttggctagtgcaagccttgtttattttcctcaccactgaatctacaggtgaacttctagatccatgtggttatatcagtcctgaatctccagttgtacaacttcattctaatttcactgcagtttgtgtgctaaaggaaaaatgtatggattattttcatgtaaatgctaattacattgtctggaaaacaaaccattttactattcctaaggagcaatatactatcataaacagaacagcatccagtgtcacctttacagatatagcttcattaaatattcagctcacttgcaacattcttacattcggacagcttgaacagaatgtttatggaatcacaataatttcaggcttgcctccagaaaaacctaaaaatttgagttgcattgtgaacgaggggaagaaaatgaggtgtgagtgggatggtggaagggaaacacacttggagacaaacttcactttaaaatctgaatgggcaacacacaagtttgctgattgcaaagcaaaacgtgacacccccacctcatgcactgttgattattctactgtgtattttgtcaacattgaagtctgggtagaagcagagaatgcccttgggaaggttacatcagatcatatcaattttgatcctgtatataaagtgaagcccaatccgccacataatttatcagtgatcaactcagaggaactgtctagtatcttaaaattgacatggaccaacccaagtattaagagtgttataatactaaaatataacattcaatataggaccaaagatgcctcaacttggagccagattcctcctgaagacacagcatccacccgatcttcattcactgtccaagaccttaaaccttttacagaatatgtgtttaggattcgctgtatgaaggaagatggtaagggatactggagtgactggagtgaagaagcaagtgggatcacctatgaagatagaccatctaaagcaccaagtttctggtataaaatagatccatcccatactcaaggctacagaactgtacaactcgtgtggaagacattgcctccttttgaagccaatggaaaaatcttggattatgaagtgactctcacaagatggaaatcacatttacaaaattacacagttaatgccacaaaactgacagtaaatctcacaaatgatcgctatctagcaaccctaacagtaagaaatcttgttggcaaatcagatgcagctgttttaactatccctgcctgtgactttcaagctactcaccctgtaatggatcttaaagcattccccaaagataacatgctttgggtggaatggactactccaagggaatctgtaaagaaatatatacttgagtggtgtgtgttatcagataaagcaccctgtatcacagactggcaacaagaagatggtaccgtgcatcgcacctatttaagagggaacttagcagagagcaaatgctatttgataacagttactccagtatatgctgatggaccaggaagccctgaatccataaaggcataccttaaacaagctccaccttccaaaggacctactgttcggacaaaaaaagtagggaaaaacgaagctgtcttagagtgggaccaacttcctgttgatgttcagaatggatttatcagaaattatactatattttatagaaccatcattggaaatgaaactgctgtgaatgtggattcttcccacacagaatatacattgtcctctttgactagtgacacattgtacatggtacgaatggcagcatacacagatgaaggtgggaaggatggtccagaattcacttttactaccccaaagtttgtctcatggatccattatggcttcttcacatggcttgagtcttgccaacgaggaccttacagcttagttgaagaaattttgcataagtaaatcagaaaaaggagaacctgtggactatgtagacagtaaatagagtaggaatttaaatataccagtagtggataattttaccttcaaaggttttatgaagaagaaaatacttgagccttgagttagtatgtggacaaataggaagaaggtggcatcttagagagcagcatgagcaaaggcacaggcttgaaaacataaaagcagatgtttaataaagcaaagtttctgcctaaattagatttggcattttatatatatatacacacatacatacccatatcaatatatatatacacacatatatcaatatatacacacataaatatatatacatacacccatatatatatatatatgatgcttagcatttaagagttaatatttgccaacccatagtttattctcaagcatttaactgatttcttgatttctactgagcttcataggatgttagttacttacaaagggatatgtgtggtggaaggataaaattaagtgaatagtatatggctgcaatattactttcatacattttttactgtaaaagactaagtaaaattcaaaattaatcaggacagtcatttaaaaaatctccaatgttaattatcccaattagtgattaatttgatgaacaagtcctcttttaaatgcagatgaggatttgtgtggtatttagggatcttaggcttgtttactttttagtttattcctactcgtgccactcctcatgcccattgagcagctcctaaagttcttagccctgtaccagctatatcctccttttgaaaaatgctcaaggagaaattgaagccatagtcgtgcctgtttgcttagcattcctattgacaactcttctgggagtgctgttctgctttaataagcgagacctaattaaaaaacacatctggcctaatgttccagatccttcaaagagtcatattgcccagtggtcacctcacactcctccaaggcacaattttaattcaaaagatcaaatgtattcagatggcaatttcactgatgtaagtgttgtggaaatagaagcaaatgacaaaaagccttttccagaagatctgaaatcattggacctgttcaaaaaggaaaaaattaatactgaaggacacagcagtggtattggggggtcttcatgcatgtcatcttctaggccaagcatttctagcagtgatgaaaatgaatcttcacaaaacacttcgagcactgtccagtattctaccgtggtacacagtggctacagacaccaagttccgtcagtccaagtcttctcaagatccgagtctacccagcccttgttagattcagaggagcggccagaagatctacaattagtagatcatgtagatggcggtgatggtattttgcccaggcaacagtacttcaaacagaactgcagtcagcatgaatccagtccagatatttcacattttgaaaggtcaaagcaagtttcatcagtcaatgaggaagattttgttagacttaaacagcagatttcagatcatatttcacaatcctgtggatctgggcaaatgaaaatgtttcaggaagtttctgcagcagatgcttttggtccaggtactgagggacaagtagaaagatttgaaacagttggcatggaggctgcgactgatgaaggcatgcctaaaagttacttaccacagactgtacggcaaggcggctacatgcctcagtgaaggactagtagttcctgctacaacttcagcagtacctataaagtaaagctaaaatgattttatctgtgaattcagattttaaaaagtcttcactctctgaagatgatcatttgcccttaaggacaaaaatgaactgaagtttcacatgagctatttccattccagaatatctgggattctactttaagcactacataaactgactttatcctcagactagctgaatgattttgtgctgtttcaggatgtttgcactgaagaaaaacagaaagcttatctgaaatttataaaactttttgttttgctacatagaaaacagaaggtatttgaataataagcagtgatatgcttagtgagcacagctatactgattttgattagaatagtcatcagagtggcttagggacagttaatataaaagaggagcaaggtgtagaccatcatctacttctgctaaaataacttaaaaagaggtccataggccataactacatgagcccagcttttgtaatctgacaaaaaaatgaggagcagcttcgtgtatatcagtgtacacggtattccttaggtcccttccattggtagtgatgctgcgagttattactggagaaaaggaattctagagctttaacttggcagattaaaagtactcattttttattcatcaataattagtaatctcactagttttcaaaaatttgcatattattgacaacctctttgaagatgcatttcacaaactcaacagagtgccatgataagagctagggatcccccaaactatctcaagcatctaaaaaattgccatttttaaaggcttaaattgtagtagtaaaggggaaaacaggaagtagtagtaaaggggaaaaaaaaccaataaagcatctaaaaaattggcatgttaaaaggcttaaattgctaatgtgtgtatatatatatatatatatacacacacatatcattgacttttcttaagacttcagagtactgggtagatgaacactttatacagtatatatcttcagcttaaatttgttttgagtattttttttatttttaaataagtaggcaaagatttaaatttttttatttttagtaaatgtttgaggcacactaagacaacttgggcaatatttgccaaaacaaaacagaaccccaaaaaatgtacatcttgttcttagcaaatatcattattgtagagacacttaataaagagatggtattttaatgtctgcagttctgaggtagggtggaacttagttctacattgtgatttaggaatttttaaaaccttttttcttcaagggagaagtgacccaggcctcgagtttagtgctaaagccgctagtgtacttatgctgtcccctaaccaccacgtgcgatatggaagcagatgctaaatataggggttttcttagaaagtaagaggaaattagcaagcgttattagtgattgactactgctatcaagtgaattcaaaggaaacaggtttttatgccatatttaagttacagaaaccaggcatgcttagaatagtttctagaggttattggagaatagaaagctaagaaaacttggtatacatttacaatggaaatataattacactttttactctcagaatattgttcacattagacttcctgtttatcttttatattcttgcatttatataatgcctcatcctttcaaagttctttcacatattatatgatcttctttatgaaaaaaatagatgtttcattctgatatattcagtttcccactttaggcaaaagtagattaatagaatgacgaattcaaagtagatgaggaaaatcaggcacagagaagtaaaggtagggatagacccaaatttacacaacaagataatgacatctccagcttttaagttgatcatcaaaggctgggctggatttgtcttgctgtatgtgtcaggaaatttatacctattacattttccattttctcaaaatttaagtcacatgactaatatttagctgcaactttcctcataacaaatagtgtcatgaagaatgttgtagtgtgaagtttgtacatttcagggtcagatatacaatatgaactcttaatctacaggaatgagaatggaggatcattgaaggccatgatataaacaaatttgcatgttgaagcctgtataaaacatggtacagtgagtgaatatacccccatccccaagaacactttatacatattaaatggatatatgattactgtgcaaaaattcattctggaaatgaacatatatttgagcactaatatgtaatgtacacctgccctaaggagaaaataaattataaaactttttacattcaaaattactttcccaagcatgtcttagaataatctatgtgttgatgcatgtaaattgtactttaggtaggcaaagaaatctggttatttatgtaaaaactagtctaataaagttagttagtggctttatcactttaaatctttagtgtccaaaagtggtgtttaaagtaatagcacatcagaaaaccttgtctggacaaaactagttcactcactgcttctgcacctgcagttgctccctttagggttataaaataatgacccaaatgttacatgtgttgatattataacttgtcagttactgatgtctgtggtatcctaccctcatctctgaaagggataatactgaataattattagaaaactataaaacttcacactttgtaccattaaaacctaaaattttaatcttgtccttttttactatggatcagtcggcactcgggaacagcagcaaggaaaaaaagcaaatttcattcacatgttctgtgttcatacctcttctctacctaattgttcatttaaatttcagccttattccttgataagggattttaccacatgaagtcatccagtgaccctagctcttattgtgaagttagtggagtatacttagaaatgttacaactttaaaatgttacaaaacattcattaaagctcatatttaaagtagagcatctagtttgagaaatagaaatcaattattaaagatgtcttttttctacccatttaactagttaaaaccatgacatgtaaatgtagaagtagaataatcatagaattccctaaaatatttctgtttactaacatatattgaccaagtacatcaagcaggagagatcttccttcattctgttatagtccacatcattctaattttgctcagttgttattaagagcatattcctaaaccatacacttttgtttcaataaagttttattttgttgagatgaataaaataacaaagttataagctgcataagacaaaagttcaattgttcaaaaaaaatttactgggatagctttctattacaggtattgttagattatattgtgctgataagattactttctaaaaaatttgtacttttctgtaaattaaaagaatatggagtcataaaatggcaagtgttttaggattagcctaaaattggacattgtcattgatttcaaagaaggtatgaactagcagtcttacagcctaattcttctttggactggtccttggcagcagttccttttcagactcgataaacagaattcagatgatgtaagtcaaaacaaaactttacaaagccaagcgtattatcttttgcattaacctatttttttccatcatacatgctactagtatgtgcattagcatgatattctcatatacattgcattaaaaattaaaaggtggcagctcagggtgagctcttctgttgctcatttgttcctaaatttttaagggctttttctcagtcaatagtttgtacaaactggttagtttaacttcattacccatttcattaaagttgatgggtcgtgtgatgagatgcatttaaggccgatagtgatagatgttttttttatttcttgaacacaggctttgtctgaatgatgttcttttatctcttgaacacaagctttgaatgataactacaggttttaagtgctgttacattaataccataatgtgatgtgttagaaacaaagggatatttcaaaggtagatatttgaaaattctctagtctcaatatgtatgtgtattgaatatactctaaaaataaatgtgcaatttgctagtaggacaatgcagtgactgactagcattaggtatgtttcttttatatcctagctatgtcccactttcttctaagtgcaatcctttcatgttcacttgctgttttaccccatctactctaacttcatttggaaggcttgtctagagtatagcatgtatttttacctttgcagtgaattgcatgtgctaattgtaaccacagctatttttatgttgacataactccaaatgttatattaaatgttctattatatattagctctaatcccttaagtaaattttaagaaataaatacttgttcaaatttt

SEQ ID NO: 273 - DNA, 6310 bp, Homo sapiens
cggagaaggatctgacagtgttccggagccggggcgagcagccaaaaggcccgcggagtcgcgctgggccgccccggcgcagctgaaccgggggccgcgcctgccaggccgacgggtctggcccagcctggcgccaaggggttcgtgcgctgtggagacgcggagggtcgaggcggcgcggcctgagtgaaacccaatggaaaaagcatgacatttagaagtagaagacttagcttcaaatccctactccttcacttactaattttgtgatttggaaatatccgcgcaagatgttgacgttgcagacttggctagtgcaagccttgtttattttcctcaccactgaatctacaggtgaacttctagatccatgtggttatatcagtcctgaatctccagttgtacaacttcattctaatttcactgcagtttgtgtgctaaaggaaaaatgtatggattattttcatgtaaatgctaattacattgtctggaaaacaaaccattttactattcctaaggagcaatatactatcataaacagaacagcatccagtgtcacctttacagatatagcttcattaaatattcagctcacttgcaacattcttacattcggacagcttgaacagaatgtttatggaatcacaataatttcaggctggcaacacacaagtttgctgattgcaaagcaaaacgtgacacccccacctcatgcactgttgattattctactgtgtattttgtcaacattgaagtctgggtagaagcagagaatgcccttgggaaggttacatcagatcatatcaattttgatcctgtatataaagtgaagcccaatccgccacataatttatcagtgatcaactcagaggaactgtctagtatcttaaaattgacatggaccaacccaagtattaagagtgttataatactaaaatataacattcaatataggaccaaagatgcctcaacttggagccagattcctcctgaagacacagcatccacccgatcttcattcactgtccaagaccttaaaccttttacagaatatgtgtttaggattcgctgtatgaaggaagatggtaagggatactggagtgactggagtgaagaagcaagtgggatcacctatgaagatacacttgataagcccctgggaagcggttgatcctggaattttggttggaccatctaaagcaccaagtttctggtataaaatagatccatcccatactcaaggctacagaactgtacaactcgtgtggaagacattgcctccttttgaagccaatggaaaaatcttggattatgaagtgactctcacaagatggaaatcacatttacaaaattacacagttaatgccacaaaactgacagtaaatctcacaaatgatcgctatctagcaaccctaacagtaagaaatcttgttggcaaatcagatgcagctgttttaactatccctgcctgtgactttcaagctactcaccctgtaatggatcttaaagcattccccaaagataacatgctttgggtggaatggactactccaagggaatctgtaaagaaatatatacttgagtggtgtgtgttatcagataaagcaccctgtatcacagactggcaacaagaagatggtaccgtgcatcgcacctatttaagagggaacttagcagagagcaaatgctatttgataacagttactccagtatatgctgatggaccaggaagccctgaatccataaaggcataccttaaacaagctccaccttccaaaggacctactgttcggacaaaaaaagtagggaaaaacgaagctgtcttagagtgggaccaacttcctgttgatgttcagaatggatttatcagaaattatactatattttatagaaccatcattggaaatgaaactgctgtgaatgtggattcttcccacacagaatatacattgtcctctttgactagtgacacattgtacatggtacgaatggcagcatacacagatgaaggtgggaaggatggtccagaattcacttttactaccccaaagtttgctcaaggagaaattgaagccatagtcgtgcctgtttgcttagcattcctattgacaactcttctgggagtgctgttctgctttaataagcgagacctaattaaaaaacacatctggcctaatgttccagatccttcaaagagtcatattgcccagtggtcacctcacactcctccaaggcacaattttaattcaaaagatcaaatgtattcagatggcaatttcactgatgtaagtgttgtggaaatagaagcaaatgacaaaaagccttttccagaagatctgaaatcattggacctgttcaaaaaggaaaaaattaatactgaaggacacagcagtggtattggggggtcttcatgcatgtcatcttctaggccaagcatttctagcagtgatgaaaatgaatcttcacaaaacacttcgagcactgtccagtattctaccgtggtacacagtggctacagacaccaagttccgtcagtccaagtcttctcaagatccgagtctacccagcccttgttagattcagaggagcggccagaagatctacaattagtagatcatgtagatggcggtgatggtattttgcccaggcaacagtacttcaaacagaactgcagtcagcatgaatccagtccagatatttcacattttgaaaggtcaaagcaagtttcatcagtcaatgaggaagattttgttagacttaaacagcagatttcagatcatatttcacaatcctgtggatctgggcaaatgaaaatgtttcaggaagtttctgcagcagatgcttttggtccaggtactgagggacaagtagaaagatttgaaacagttggcatggaggctgcgactgatgaaggcatgcctaaaagttacttaccacagactgtacggcaaggcggctacatgcctcagtgaaggactagtagttcctgctacaacttcagcagtacctataaagtaaagctaaaatgattttatctgtgaattcagattttaaaaagtcttcactctctgaagatgatcatttgcccttaaggacaaaaatgaactgaagtttcacatgagctatttccattccagaatatctgggattctactttaagcactacataaactgactttatcctcagactagctgaatgattttgtgctgtttcaggatgtttgcactgaagaaaaacagaaagcttatctgaaatttataaaactttttgttttgctacatagaaaacagaaggtatttgaataataagcagtgatatgcttagtgagcacagctatactgattttgattagaatagtcatcagagtggcttagggacagttaatataaaagaggagcaaggtgtagaccatcatctacttctgctaaaataacttaaaaagaggtccataggccataactacatgagcccagcttttgtaatctgacaaaaaaatgaggagcagcttcgtgtatatcagtgtacacggtattccttaggtcccttccattggtagtgatgctgcgagttattactggagaaaaggaattctagagctttaacttggcagattaaaagtactcattttttattcatcaataattagtaatctcactagttttcaaaaatttgcatattattgacaacctctttgaagatgcatttcacaaactcaacagagtgccatgataagagctagggatcccccaaactatctcaagcatctaaaaaattgccatttttaaaggcttaaattgtagtagtaaaggggaaaacaggaagtagtagtaaaggggaaaaaaaaccaataaagcatctaaaaaattggcatgttaaaaggcttaaattgctaatgtgtgtatatatatatatatatatacacacacatatcattgacttttcttaagacttcagagtactgggtagatgaacactttatacagtatatatcttcagcttaaatttgttttgagtattttttttatttttaaataagtaggcaaagatttaaatttttttatttttagtaaatgtttgaggcacactaagacaacttgggcaatatttgccaaaacaaaacagaaccccaaaaaatgtacatcttgttcttagcaaatatcattattgtagagacacttaataaagagatggtattttaatgtctgcagttctgaggtagggtggaacttagttctacattgtgatttaggaatttttaaaaccttttttcttcaagggagaagtgacccaggcctcgagtttagtgctaaagccgctagtgtacttatgctgtcccctaaccaccacgtgcgatatggaagcagatgctaaatataggggttttcttagaaagtaagaggaaattagcaagcgttattagtgattgactactgctatcaagtgaattcaaaggaaacaggtttttatgccatatttaagttacagaaaccaggcatgcttagaatagtttctagaggttattggagaatagaaagctaagaaaacttggtatacatttacaatggaaatataattacactttttactctcagaatattgttcacattagacttcctgtttatcttttatattcttgcatttatataatgcctcatcctttcaaagttctttcacatattatatgatcttctttatgaaaaaaatagatgtttcattctgatatattcagtttcccactttaggcaaaagtagattaatagaatgacgaattcaaagtagatgaggaaaatcaggcacagagaagtaaaggtagggatagacccaaatttacacaacaagataatgacatctccagcttttaagttgatcatcaaaggctgggctggatttgtcttgctgtatgtgtcaggaaatttatacctattacattttccattttctcaaaatttaagtcacatgactaatatttagctgcaactttcctcataacaaatagtgtcatgaagaatgttgtagtgtgaagtttgtacatttcagggtcagatatacaatatgaactcttaatctacaggaatgagaatggaggatcattgaaggccatgatataaacaaatttgcatgttgaagcctgtataaaacatggtacagtgagtgaatatacccccatccccaagaacactttatacatattaaatggatatatgattactgtgcaaaaattcattctggaaatgaacatatatttgagcactaatatgtaatgtacacctgccctaaggagaaaataaattataaaactttttacattcaaaattactttcccaagcatgtcttagaataatctatgtgttgatgcatgtaaattgtactttaggtaggcaaagaaatctggttatttatgtaaaaactagtctaataaagttagttagtggctttatcactttaaatctttagtgtccaaaagtggtgtttaaagtaatagcacatcagaaaaccttgtctggacaaaactagttcactcactgcttctgcacctgcagttgctccctttagggttataaaataatgacccaaatgttacatgtgttgatattataacttgtcagttactgatgtctgtggtatcctaccctcatctctgaaagggataatactgaataattattagaaaactataaaacttcacactttgtaccattaaaacctaaaattttaatcttgtccttttttactatggatcagtcggcactcgggaacagcagcaaggaaaaaaagcaaatttcattcacatgttctgtgttcatacctcttctctacctaattgttcatttaaatttcagccttattccttgataagggattttaccacatgaagtcatccagtgaccctagctcttattgtgaagttagtggagtatacttagaaatgttacaactttaaaatgttacaaaacattcattaaagctcatatttaaagtagagcatctagtttgagaaatagaaatcaattattaaagatgtcttttttctacccatttaactagttaaaaccatgacatgtaaatgtagaagtagaataatcatagaattccctaaaatatttctgtttactaacatatattgaccaagtacatcaagcaggagagatcttccttcattctgttatagtccacatcattctaattttgctcagttgttattaagagcatattcctaaaccatacacttttgtttcaataaagttttattttgttgagatgaataaaataacaaagttataagctgcataagacaaaagttcaattgtt

SEQ ID NO: 274 - DNA, 6832 bp, Homo sapiens
actggggtggcgcgctacctctgcggagaaggatctgacagtgttccggagccggggcgagcagccaaaaggcccgcggagtcgcgctgggccgccccggcgcagctgaaccgggggccgcgcctgccaggccgacgggtctggcccagcctggcgccaaggggttcgtgcgctgtggagacgcggagggtcgaggcggcgcggcctgagtgaaacccaatggaaaaagcatgacatttagaagtagaagacttagcttcaaatccctactccttcacttactaattttgtgatttggaaatatccgcgcaagatgttgacgttgcagacttggctagtgcaagccttgtttattttcctcaccactgaatctacaggtgaacttctagatccatgtggttatatcagtcctgaatctccagttgtacaacttcattctaatttcactgcagtttgtgtgctaaaggaaaaatgtatggattattttcatgtaaatgctaattacattgtctggaaaacaaaccattttactattcctaaggagcaatatactatcataaacagaacagcatccagtgtcacctttacagatatagcttcattaaatattcagctcacttgcaacattcttacattcggacagcttgaacagaatgtttatggaatcacaataatttcaggctggcaacacacaagtttgctgattgcaaagcaaaacgtgacacccccacctcatgcactgttgattattctactgtgtattttgtcaacattgaagtctgggtagaagcagagaatgcccttgggaaggttacatcagatcatatcaattttgatcctgtatataaagtgaagcccaatccgccacataatttatcagtgatcaactcagaggaactgtctagtatcttaaaattgacatggaccaacccaagtattaagagtgttataatactaaaatataacattcaatataggaccaaagatgcctcaacttggagccagattcctcctgaagacacagcatccacccgatcttcattcactgtccaagaccttaaaccttttacagaatatgtgtttaggattcgctgtatgaaggaagatggtaagggatactggagtgactggagtgaagaagcaagtgggatcacctatgaagatagaccatctaaagcaccaagtttctggtataaaatagatccatcccatactcaaggctacagaactgtacaactcgtgtggaagacattgcctccttttgaagccaatggaaaaatcttggattatgaagtgactctcacaagatggaaatcacatttacaaaattacacagttaatgccacaaaactgacagtaaatctcacaaatgatcgctatctagcaaccctaacagtaagaaatcttgttggcaaatcagatgcagctgttttaactatccctgcctgtgactttcaagctactcaccctgtaatggatcttaaagcattccccaaagataacatgctttgggtggaatggactactccaagggaatctgtaaagaaatatatacttgagtggtgtgtgttatcagataaagcaccctgtatcacagactggcaacaagaagatggtaccgtgcatcgcacctatttaagagggaacttagcagagagcaaatgctatttgataacagttactccagtatatgctgatggaccaggaagccctgaatccataaaggcataccttaaacaagctccaccttccaaaggacctactgttcggacaaaaaaagtagggaaaaacgaagctgtcttagagtgggaccaacttcctgttgatgttcagaatggatttatcagaaattatactatattttatagaaccatcattggaaatgaaactgctgtgaatgtggattcttcccacacagaatatacattgtcctctttgactagtgacacattgtacatggtacgaatggcagcatacacagatgaaggtgggaaggatggtccagaattcacttttactaccccaaagtttgctcaaggagaaattgaagccatagtcgtgcctgtttgcttagcattcctattgacaactcttctgggagtgctgttctgctttaataagcgagacctaattaaaaaacacatctggcctaatgttccagatccttcaaagagtcatattgcccagtggtcacctcacactcctccaaggcacaattttaattcaaaagatcaaatgtattcagatggcaatttcactgatgtaagtgttgtggaaatagaagcaaatgacaaaaagccttttccagaagatctgaaatcattggacctgttcaaaaaggaaaaaattaatactgaaggacacagcagtggtattggggggtcttcatgcatgtcatcttctaggccaagcatttctagcagtgatgaaaatgaatcttcacaaaacacttcgagcactgtccagtattctaccgtggtacacagtggctacagacaccaagttccgtcagtccaagtcttctcaagatccgagtctacccagcccttgttagattcagaggagcggccagaagatctacaattagtagatcatgtagatggcggtgatggtattttgcccaggcaacagtacttcaaacagaactgcagtcagcatgaatccagtccagatatttcacattttgaaaggtcaaagcaagtttcatcagtcaatgaggaagattttgttagacttaaacagcagatttcagatcatatttcacaatcctgtggatctgggcaaatgaaaatgtttcaggaagtttctgcagcagatgcttttggtccaggtactgagggacaagtagaaagatttgaaacagttggcatggaggctgcgactgatgaaggcatgcctaaaagttacttaccacagactgtacggcaaggcggctacatgcctcagtgaaggactagtagttcctgctacaacttcagcagtacctataaagtaaagctaaaatgattttatctgtgaattcagattttaaaaagtcttcactctctgaagatgatcatttgcccttaaggacaaaaatgaactgaagtttcacatgagctatttccattccagaatatctgggattctactttaagcactacataaactgactttatcctcagactagctgaatgattttgtgctgtttcaggatgtttgcactgaagaaaaacagaaagcttatctgaaatttataaaactttttgttttgctacatagaaaacagaaggtatttgaataataagcagtgatatgcttagtgagcacagctatactgattttgattagaatagtcatcagagtggcttagggacagttaatataaaagaggagcaaggtgtagaccatcatctacttctgctaaaataacttaaaaagaggtccataggccataactacatgagcccagcttttgtaatctgacaaaaaaatgaggagcagcttcgtgtatatcagtgtacacggtattccttaggtcccttccattggtagtgatgctgcgagttattactggagaaaaggaattctagagctttaacttggcagattaaaagtactcattttttattcatcaataattagtaatctcactagttttcaaaaatttgcatattattgacaacctctttgaagatgcatttcacaaactcaacagagtgccatgataagagctagggatcccccaaactatctcaagcatctaaaaaattgccatttttaaaggcttaaattgtagtagtaaaggggaaaacaggaagtagtagtaaaggggaaaaaaaaccaataaagcatctaaaaaattggcatgttaaaaggcttaaattgctaatgtgtgtatatatatatatatatatacacacacatatcattgacttttcttaagacttcagagtactgggtagatgaacactttatacagtatatatcttcagcttaaatttgttttgagtattttttttatttttaaataagtaggcaaagatttaaatttttttatttttagtaaatgtttgaggcacactaagacaacttgggcaatatttgccaaaacaaaacagaaccccaaaaaatgtacatcttgttcttagcaaatatcattattgtagagacacttaataaagagatggtattttaatgtctgcagttctgaggtagggtggaacttagttctacattgtgatttaggaatttttaaaaccttttttcttcaagggagaagtgacccaggcctcgagtttagtgctaaagccgctagtgtacttatgctgtcccctaaccaccacgtgcgatatggaagcagatgctaaatataggggttttcttagaaagtaagaggaaattagcaagcgttattagtgattgactactgctatcaagtgaattcaaaggaaacaggtttttatgccatatttaagttacagaaaccaggcatgcttagaatagtttctagaggttattggagaatagaaagctaagaaaacttggtatacatttacaatggaaatataattacactttttactctcagaatattgttcacattagacttcctgtttatcttttatattcttgcatttatataatgcctcatcctttcaaagttctttcacatattatatgatcttctttatgaaaaaaatagatgtttcattctgatatattcagtttcccactttaggcaaaagtagattaatagaatgacgaattcaaagtagatgaggaaaatcaggcacagagaagtaaaggtagggatagacccaaatttacacaacaagataatgacatctccagcttttaagttgatcatcaaaggctgggctggatttgtcttgctgtatgtgtcaggaaatttatacctattacattttccattttctcaaaatttaagtcacatgactaatatttagctgcaactttcctcataacaaatagtgtcatgaagaatgttgtagtgtgaagtttgtacatttcagggtcagatatacaatatgaactcttaatctacaggaatgagaatggaggatcattgaaggccatgatataaacaaatttgcatgttgaagcctgtataaaacatggtacagtgagtgaatatacccccatccccaagaacactttatacatattaaatggatatatgattactgtgcaaaaattcattctggaaatgaacatatatttgagcactaatatgtaatgtacacctgccctaaggagaaaataaattataaaactttttacattcaaaattactttcccaagcatgtcttagaataatctatgtgttgatgcatgtaaattgtactttaggtaggcaaagaaatctggttatttatgtaaaaactagtctaataaagttagttagtggctttatcactttaaatctttagtgtccaaaagtggtgtttaaagtaatagcacatcagaaaaccttgtctggacaaaactagttcactcactgcttctgcacctgcagttgctccctttagggttataaaataatgacccaaatgttacatgtgttgatattataacttgtcagttactgatgtctgtggtatcctaccctcatctctgaaagggataatactgaataattattagaaaactataaaacttcacactttgtaccattaaaacctaaaattttaatcttgtccttttttactatggatcagtcggcactcgggaacagcagcaaggaaaaaaagcaaatttcattcacatgttctgtgttcatacctcttctctacctaattgttcatttaaatttcagccttattccttgataagggattttaccacatgaagtcatccagtgaccctagctcttattgtgaagttagtggagtatacttagaaatgttacaactttaaaatgttacaaaacattcattaaagctcatatttaaagtagagcatctagtttgagaaatagaaatcaattattaaagatgtcttttttctacccatttaactagttaaaaccatgacatgtaaatgtagaagtagaataatcatagaattccctaaaatatttctgtttactaacatatattgaccaagtacatcaagcaggagagatcttccttcattctgttatagtccacatcattctaattttgctcagttgttattaagagcatattcctaaaccatacacttttgtttcaataaagttttattttgttgagatgaataaaataacaaagttataagctgcataagacaaaagttcaattgttcaaaaaaaatttactgggatagctttctattacaggtattgttagattatattgtgctgataagattactttctaaaaaatttgtacttttctgtaaattaaaagaatatggagtcataaaatggcaagtgttttaggattagcctaaaattggacattgtcattgatttcaaagaaggtatgaactagcagtcttacagcctaattcttctttggactggtccttggcagcagttccttttcagactcgataaacagaattcagatgatgtaagtcaaaacaaaactttacaaagccaagcgtattatcttttgcattaacctatttttttccatcatacatgctactagtatgtgcattagcatgatattctcatatacattgcattaaaaattaaaaggtggcagctcagggtgagctcttctgttgctcatttgttcctaaatttttaagggctttttctcagtcaatagtttgtacaaactggttagtttaacttcattacccatttcattaaagttgatgggtcgtgtgatgagatgca

SEQ ID NO: 275 - DNA, 850 bp, Homo sapiens
cgggagcaagagagaaggaggcccagacagtgagggcaggagggagagaagagacgcagaaggagagcgagcgagagagaaagggttctggattggaggggagagcaagggagggaggaaggcggtgagagaggcgggggcctcgggagggtgaaaggagggaggagaagggcggggcacggaggcccgagcgagggacaagactccgactccagctctgacttttttcgcggctctcggcttccactgcagccatgtcactcctcttgctggtggtctcagcccttcacatcctcattcttatactgcttttcgtggccactttggacaagtcctggtggactctccctgggaaagagtccctgaatctctggtacgactgcacgtggaacaacgacaccaaaacatgggcctgcagtaatgtcagcgagaatggctggctgaaggcggtgcaggtcctcatggtgctctccctcattctctgctgtctctccttcatcctgttcatgttccagctctacaccatgcgacgaggaggtctcttctatgccaccggcctctgccagctttgcaccagcgtggcggtgtttactggcgccttgatctatgccattcacgccgaggagatcctggagaagcacccgcgagggggcagcttcggatactgcttcgccctggcctgggtggccttccccctcgccctggtcagcggcatcatctacatccacctacggaagcgggagtgagcgccccgcctcgctcggctgcccccgccccttcccggcccccctcgccgcgcgtcctccaaaaaataaaaccttaaccgcggaaaaaaaaaaaaaaaaaaaaa

SEQ ID NO: 276 - DNA, 645 bp, Homo sapiens
ctatccatttcctccagaagatgtccaacagtcaccagtctggcagcagggtggggcttccactgcagccatgtcactcctcttgctggtggtctcagcccttcacatcctcattcttatactgcttttcgtggccactttggacaagtcctggtggactctccctgggaaagagtccctgaatctctggtacgactgcacgtggaacaacgacaccaaaacatgggcctgcagtaatgtcagcgagaatggctggctgaaggcggtgcaggtcctcatggtgctctccctcattctctgctgtctctccttcatcctgttcatgttccagctctacaccatgcgacgaggaggtctcttctatgccaccggcctctgccagctttgcaccagcgtggcggtgtttactggcgccttgatctatgccattcacgccgaggagatcctggagaagcacccgcgagggggcagcttcggatactgcttcgccctggcctgggtggccttccccctcgccctggtcagcggcatcatctacatccacctacggaagcgggagtgagcgccccgcctcgctcggctgcccccgccccttcccggcccccctcgccgcgcgtcctccaaaaaataaaaccttaaccgcgg

SEQ ID NO: 277 - DNA, 762 bp, Homo sapiens
ggcgggggcctcgggagggtgaaaggagggaggagaagggcggggcacggaggcccgagcgagggacaagactccgactccagctctgacttttttcgcggctctcgcgcgaatcctatccatttcctccagaagatgtccaacagtcaccagtctggcagcagggtggggcttccactgcagccatgtcactcctcttgctggtggtctcagcccttcacatcctcattcttatactgcttttcgtggccactttggacaagtcctggtggactctccctgggaaagagtccctgaatctctggtacgactgcacgtggaacaacgacaccaaaacatgggcctgcagtaatgtcagcgagaatggctggctgaaggcggtgcaggtcctcatggtgctctccctcattctctgctgtctctccttcatcctgttcatgttccagctctacaccatgcgacgaggaggtctcttctatgccaccggcctctgccagctttgcaccagcgtggcggtgtttactggcgccttgatctatgccattcacgccgaggagatcctggagaagcacccgcgagggggcagcttcggatactgcttcgccctggcctgggtggccttccccctcgccctggtcagcggcatcatctacatccacctacggaagcgggagtgagcgccccgcctcgctcggctgcccccgccccttcccggcccccctcgccgcgcgtcctccaaaaaataaaaccttaaccgcgggc

SEQ ID NO: 278 - DNA, 2478 bp, Homo sapiens
gacgggggcgccccggcctaagcgggactaggagggcgcgccacccgcttccgctgcccgccggggaatcccccgggctggcgcgcagggaagttcccgaacgcgcgggcataaaagggcagccggcgcccgcgcgccacagctctgcagctcgtggcagcggcgcagcgctccagccatgtcgcgcggcctccagcttctgctcctgagctgcgcctacagcctggctcccgcgacgccggaggtgaaggtggcttgctccgaagatgtggacttgccctgcaccgccccctgggatccgcaggttccctacacggtctcctgggtcaagttattggagggtggtgaagagaggatggagacaccccaggaagaccacctcaggggacagcactatcatcagaaggggcaaaatggttctttcgacgcccccaatgaaaggccctattccctgaagatccgaaacactaccagctgcaactcggggacatacaggtgcactctgcaggacccggatgggcagagaaacctaagtggcaaggtgatcttgagagtgacaggatgccctgcacagcgtaaagaagagacttttaagaaatacagagcggagattgtcctgctgctggctctggttattttctacttaacactcatcattttcacttgtaagtttgcacggctacagagtatcttcccagatttttctaaagctggcatggaacgagcttttctcccagttacctccccaaataagcatttagggctagtgactcctcacaagacagaactggtatgagcaggatttctgcaggttcttcttcctgaagctgaggctcaggggtgtgcctgtctgttacactggaggagagaagaatgagcctacgctgaagatggcatcctgtgaagtccttcacctcactgaaaacatctggaaggggatcccaccccattttctgtgggcaggcctcgaaaaccatcacatgaccacatagcatgaggccactgctgcttctccatggccaccttttcagcgatgtatgcagctatctggtcaacctcctggacattttttcagtcatataaaagctatggtgagatgcagctggaaaagggtcttgggaaatatgaatgcccccagctggcccgtgacagactcctgaggacagctgtcctcttctgcatcttggggacatctctttgaattttctgtgttttgctgtaccagcccagatgttttacgtctgggagaaattgacagatcaagctgtgagacagtgggaaatatttagcaaataatttcctggtgtgaaggtcctgctattactaaggagtaatctgtgtacaaagaaataacaagtcgatgaactattccccagcagggtcttttcatctgggaaagacatccataaagaagcaataaagaagagtgccacatttatttttatatctatatgtacttgtcaaagaaggtttgtgtttttctgcttttgaaatctgtatctgtagtgagatagcattgtgaactgacaggcagcctggacatagagagggagaagaagtcagagagggtgacaagatagagagctatttaatggccggctggaaatgctgggctgacggtgcagtctgggtgctcgcccacttgtcccactatctgggtgcatgatcttgagcaagttccttctggtgtctgctttctccattgtaaaccacaaggctgttgcatgggctaatgaagatcatatacgtgaaaattatttgaaaacatataaagcactatacagattcgaaactccattgagtcattatccttgctatgatgatggtgttttggggatgagagggtgctatccatttctcatgttttccattgtttgaaacaaagaaggttaccaagaagcctttcctgtagccttctgtaggaattcttttggggaagtgaggaagccaggtccacggtctgttcttgaagcagtagcctaacacactccaagatatggacacacgggagccgctggcagaagggacttcacgaagtgttgcatggatgttttagccattgttggctttcccttatcaaacttgggcccttcccttcttggtttccaaaggcattttattgcttgagttatatgttcactgtccccctaatattagggagtaaaacggataccaagttgatttagtgtttttacctctgtcttggctttcatgttattaaacgtatgcatgtgaagaaagggtgtttttctgttttatattcaactcataagactttgggataggaaaaatgagtaatggttactaggcttaatacctgggtgattacataatctgtacaatgaacccccatgatgtaagtttacctatgtaacaaacctgcacttatacccatgaacttaaaatgaaagttaaaaataaaaaacatatacaaataaaaaaatcccgactttgggatgagtgctaggatgttgtaaa

SEQ ID NO: 279 - DNA, 2475 bp, Homo sapiens
gacgggggcgccccggcctaagcgggactaggagggcgcgccacccgcttccgctgcccgccggggaatcccccgggctggcgcgcagggaagttcccgaacgcgcgggcataaaagggcagccggcgcccgcgcgccacagctctgcagctcgtggcagcggcgcagcgctccagccatgtcgcgcggcctccagcttctgctcctgagctgcgcctacagcctggctcccgcgacgccggaggtgaaggtggcttgctccgaagatgtggacttgccctgcaccgccccctgggatccgcaggttccctacacggtctcctgggtcaagttattggagggtggtgaagagaggatggagacaccccaggaagaccacctcaggggacagcactatcatcagaaggggcaaaatggttctttcgacgcccccaatgaaaggccctattccctgaagatccgaaacactaccagctgcaactcggggacatacaggtgcactctgcaggacccggatgggcagagaaacctaagtggcaaggtgatcttgagagtgacaggatgccctgcacagcgtaaagaagagacttttaagaaatacagagcggagattgtcctgctgctggctctggttattttctacttaacactcatcattttcacttgttttgcacggctacagagtatcttcccagatttttctaaagctggcatggaacgagcttttctcccagttacctccccaaataagcatttagggctagtgactcctcacaagacagaactggtatgagcaggatttctgcaggttcttcttcctgaagctgaggctcaggggtgtgcctgtctgttacactggaggagagaagaatgagcctacgctgaagatggcatcctgtgaagtccttcacctcactgaaaacatctggaaggggatcccaccccattttctgtgggcaggcctcgaaaaccatcacatgaccacatagcatgaggccactgctgcttctccatggccaccttttcagcgatgtatgcagctatctggtcaacctcctggacattttttcagtcatataaaagctatggtgagatgcagctggaaaagggtcttgggaaatatgaatgcccccagctggcccgtgacagactcctgaggacagctgtcctcttctgcatcttggggacatctctttgaattttctgtgttttgctgtaccagcccagatgttttacgtctgggagaaattgacagatcaagctgtgagacagtgggaaatatttagcaaataatttcctggtgtgaaggtcctgctattactaaggagtaatctgtgtacaaagaaataacaagtcgatgaactattccccagcagggtcttttcatctgggaaagacatccataaagaagcaataaagaagagtgccacatttatttttatatctatatgtacttgtcaaagaaggtttgtgtttttctgcttttgaaatctgtatctgtagtgagatagcattgtgaactgacaggcagcctggacatagagagggagaagaagtcagagagggtgacaagatagagagctatttaatggccggctggaaatgctgggctgacggtgcagtctgggtgctcgcccacttgtcccactatctgggtgcatgatcttgagcaagttccttctggtgtctgctttctccattgtaaaccacaaggctgttgcatgggctaatgaagatcatatacgtgaaaattatttgaaaacatataaagcactatacagattcgaaactccattgagtcattatccttgctatgatgatggtgttttggggatgagagggtgctatccatttctcatgttttccattgtttgaaacaaagaaggttaccaagaagcctttcctgtagccttctgtaggaattcttttggggaagtgaggaagccaggtccacggtctgttcttgaagcagtagcctaacacactccaagatatggacacacgggagccgctggcagaagggacttcacgaagtgttgcatggatgttttagccattgttggctttcccttatcaaacttgggcccttcccttcttggtttccaaaggcattttattgcttgagttatatgttcactgtccccctaatattagggagtaaaacggataccaagttgatttagtgtttttacctctgtcttggctttcatgttattaaacgtatgcatgtgaagaaagggtgtttttctgttttatattcaactcataagactttgggataggaaaaatgagtaatggttactaggcttaatacctgggtgattacataatctgtacaatgaacccccatgatgtaagtttacctatgtaacaaacctgcacttatacccatgaacttaaaatgaaagttaaaaataaaaaacatatacaaataaaaaaatcccgactttgggatgagtgctaggatgttgtaaa

SEQ ID NO: 280 - DNA, 2307 bp, Homo sapiens
gattatcacagattctggagaagagtgaggacttgggttcaccacctacagcctggctcccgcgacgccggaggtgaaggtggcttgctccgaagatgtggacttgccctgcaccgccccctgggatccgcaggttccctacacggtctcctgggtcaagttattggagggtggtgaagagaggatggagacaccccaggaagaccacctcaggggacagcactatcatcagaaggggcaaaatggttctttcgacgcccccaatgaaaggccctattccctgaagatccgaaacactaccagctgcaactcggggacatacaggtgcactctgcaggacccggatgggcagagaaacctaagtggcaaggtgatcttgagagtgacaggatgccctgcacagcgtaaagaagagacttttaagaaatacagagcggagattgtcctgctgctggctctggttattttctacttaacactcatcattttcacttgtaagtttgcacggctacagagtatcttcccagatttttctaaagctggcatggaacgagcttttctcccagttacctccccaaataagcatttagggctagtgactcctcacaagacagaactggtatgagcaggatttctgcaggttcttcttcctgaagctgaggctcaggggtgtgcctgtctgttacactggaggagagaagaatgagcctacgctgaagatggcatcctgtgaagtccttcacctcactgaaaacatctggaaggggatcccaccccattttctgtgggcaggcctcgaaaaccatcacatgaccacatagcatgaggccactgctgcttctccatggccaccttttcagcgatgtatgcagctatctggtcaacctcctggacattttttcagtcatataaaagctatggtgagatgcagctggaaaagggtcttgggaaatatgaatgcccccagctggcccgtgacagactcctgaggacagctgtcctcttctgcatcttggggacatctctttgaattttctgtgttttgctgtaccagcccagatgttttacgtctgggagaaattgacagatcaagctgtgagacagtgggaaatatttagcaaataatttcctggtgtgaaggtcctgctattactaaggagtaatctgtgtacaaagaaataacaagtcgatgaactattccccagcagggtcttttcatctgggaaagacatccataaagaagcaataaagaagagtgccacatttatttttatatctatatgtacttgtcaaagaaggtttgtgtttttctgcttttgaaatctgtatctgtagtgagatagcattgtgaactgacaggcagcctggacatagagagggagaagaagtcagagagggtgacaagatagagagctatttaatggccggctggaaatgctgggctgacggtgcagtctgggtgctcgcccacttgtcccactatctgggtgcatgatcttgagcaagttccttctggtgtctgctttctccattgtaaaccacaaggctgttgcatgggctaatgaagatcatatacgtgaaaattatttgaaaacatataaagcactatacagattcgaaactccattgagtcattatccttgctatgatgatggtgttttggggatgagagggtgctatccatttctcatgttttccattgtttgaaacaaagaaggttaccaagaagcctttcctgtagccttctgtaggaattcttttggggaagtgaggaagccaggtccacggtctgttcttgaagcagtagcctaacacactccaagatatggacacacgggagccgctggcagaagggacttcacgaagtgttgcatggatgttttagccattgttggctttcccttatcaaacttgggcccttcccttcttggtttccaaaggcattttattgcttgagttatatgttcactgtccccctaatattagggagtaaaacggataccaagttgatttagtgtttttacctctgtcttggctttcatgttattaaacgtatgcatgtgaagaaagggtgtttttctgttttatattcaactcataagactttgggataggaaaaatgagtaatggttactaggcttaatacctgggtgattacataatctgtacaatgaacccccatgatgtaagtttacctatgtaacaaacctgcacttatacccatgaacttaaaatgaaagttaaaaataaaaaacatatacaaataaaaaaatcccgactttgggatgagtgctaggatgttgtaaa

SEQ ID NO: 281 - DNA, 3043 bp, Homo sapiens
tggattaggagagcttctggatagctgaacacatggaggtttctggagggtgtggcccccagagggcatggaagctctgcacccctgctcccatacctcaccctacgcatctcctcatctgtatcctttgcaatatcctttgtaataaaccgaaaattttatcataatgagcatcaaaagaatcccaaatgagaaaactgctttttgcataagtgtaaattaagagatggaagtcacatttcaccatggcaaacatttgctgcatgcaaaatgactgaaacaaggtcttgatctgtcaccaggctgaagtgcagtggtacaatcaaagctcactgcagtctcaacctcctaggctcaaacaatcctcccacttcagcctcccaaccagctgggaccacaggttgacatcaccacacccaggtctgctggaatttgctggaggtccactccagaccctgtttgtctggatatcaccagcagaggttgcagaacaacaaagattgctgcctgttccttcctctggaagctttgtcccagaggggcacccaccagacggcagctggagctctcctgtgtgccactggagtacgaaaaagaaaaaatcctgcagctagctcggtgtctgcccaaacggctgcccagttttgtgcttgaaacccagggcctgggtggtgtaggcacccgagggaattgcctggtctaagggttgtgaagatcacggaaaaggcatagagtctgggccggaatgcatcgttcctcgtggcacattccctcatggcttcccttagctaggggaggaagttccctggccccttgcacttcccgttccctctgctatggctcttcctcagtagaaacaactggcaacaaaattcaagtttatgattcattcatcagcaaacatgtgagaatcatctacaaagaaccaagaattgtgagaaagcgacctcaagatacaactggcaactgaggaaaaggcctcaattcaacaagagctaacaagcttgggagtttatttcggaatctttaaaagactcttctgcttacccacaatctgggatccactgcaggaaaacaaaaaaggaaaacttcatttaaaagaagcaagaagtaaaatgggacaaattgggaatgtttaagtctctgaaactctgcactgaaaagaaaataagattgataacttaagcttaacattctgaggcataaagaaacattaactttggagtattcatcttgactactgaaatacaagtttagaagacaagtggtttcattctggtcacagatcacagcttttctttaaatttataatcctatgggttggactcgttgactgtattttttaaaggttgctcgtcagttaactgagccttggaattcatggattttctaaagactaacaaatgaaaatattttcctgttgaagaacccagcggaaattttacagcaacaaatttcatgtttcttttgggtatttctgagaaaaaggaaatatttataaaaccatccaaagatccagataatttgcaaataaattggaggttatagaggttataatctgaatcccaaaggagactgcagctgatgaaagtgcttccaaactgaaaattggacgtgcctttacgatggtaagcgttaacagctcccactgcttctataatgactcctttaagtacactttgtatgggtgcatgttcagcatggtgtttgtgcttgggttaatatccaattgtgttgccatatacattttcatctgcgtcctcaaagtccgaaatgaaactacaacttacatgattaacttggcaatgtcagacttgctttttgtttttactttacccttcaggattttttacttcacaacacggaattggccatttggagatttactttgtaagatttctgtgatgctgttttataccaacatgtacggaagcattctgttcttaacctgtattagtgtagatcgatttctggcaattgtctacccatttaagtcaaagactctaagaaccaaaagaaatgcaaagattgtttgcactggcgtgtggttaactgtgatcggaggaagtgcacccgccgtttttgttcagtctacccactctcagggtaacaatgcctcagaagcctgctttgaaaattttccagaagccacatggaaaacatatctctcaaggattgtaattttcatcgaaatagtgggattttttattcctctaattttaaatgtaacttgttctagtatggtgctaaaaactttaaccaaacctgttacattaagtagaagcaaaataaacaaaactaaggttttaaaaatgatttttgtacatttgatcatattctgtttctgttttgttccttacaatatcaatcttattttatattctcttgtgagaacacaaacatttgttaattgctcagtagtggcagcagtaaggacaatgtacccaatcactctctgtattgctgtttccaactgttgttttgaccctatagtttactactttacatcggacacaattcagaattcaataaaaatgaaaaactggtctgtcaggagaagtgacttcagattctctgaagttcatggtgcagagaattttattcagcataacctacagaccttaaaaagtaagatatttgacaatgaatctgctgcctgaaataaaaccattaggactcactgggacagaactttcaagttccttcaactgtgaaaagtgtctttttggacaaactatttttccacctccaaaagaaattaacacatggacattttaaagtctttagtataaagaaaatttgtattcaatgtgttaagcattaacatgtattttatttgtgtatccactccatctgatttttctgagccattttgatttgttccttcattaaaaaaaatctcttaaagttatttagtgtctaaaagtgactgacttaaattatgtggtgccaatctgtaatgtctttgaattcctttttatattaaatgatttaatttactaaaaaaaaaaaaaaaaaaaaaaaaaaaaaaaaaaaaaaaaaa

SEQ ID NO: 282 - DNA, 2561 bp, Homo sapiens
gaagctgaggagaagctgatgccatgcttcctgtacagcctgaagaaccacaaggtcttgatctgtcaccaggctgaagtgcagtggtacaatcaaagctcactgcagtctcaacctcctaggctcaaacaatcctcccacttcagcctcccaaccagctgggaccacaggttgacatcaccacacccaggtctgctggaatttgctggaggtccactccagaccctgtttgtctggatatcaccagcagaggttgcagaacaacaaagattgctgcctgttccttcctctggaagctttgtcccagaggggcacccaccagacggcagctggagctctcctgttccctctgctatggctcttcctcagtagaaacaactggcaacaaaattcaagtttatgattcattcatcagcaaacatgtgagaatcatctacaaagaaccaagaattgtgagaaagcgacctcaagatacaactggcaactgaggaaaaggcctcaattcaacaagagctaacaagcttgggagtttatttcggaatctttaaaagactcttctgcttacccacaatctgggatccactgcaggaaaacaaaaaaggaaaacttcatttaaaagaagcaagaagtaaaatgggacaaattgggaatgtttaagtctctgaaactctgcactgaaaagaaaataagattgataacttaagcttaacattctgaggcataaagaaacattaactttggagtattcatcttgactactgaaatacaagtttagaagacaagtggtttcattctggtcacagatcacagcttttctttaaatttataatcctatgggttggactcgttgactgtattttttaaaggttgctcgtcagttaactgagccttggaattcatggattttctaaagactaacaaatgaaaatattttcctgttgaagaacccagcggaaattttacagcaacaaatttcatgtttcttttgggtatttctgagaaaaaggaaatatttataaaaccatccaaagatccagataatttgcaaataaattggaggttatagaggttataatctgaatcccaaaggagactgcagctgatgaaagtgcttccaaactgaaaattggacgtgcctttacgatggtaagcgttaacagctcccactgcttctataatgactcctttaagtacactttgtatgggtgcatgttcagcatggtgtttgtgcttgggttaatatccaattgtgttgccatatacattttcatctgcgtcctcaaagtccgaaatgaaactacaacttacatgattaacttggcaatgtcagacttgctttttgtttttactttacccttcaggattttttacttcacaacacggaattggccatttggagatttactttgtaagatttctgtgatgctgttttataccaacatgtacggaagcattctgttcttaacctgtattagtgtagatcgatttctggcaattgtctacccatttaagtcaaagactctaagaaccaaaagaaatgcaaagattgtttgcactggcgtgtggttaactgtgatcggaggaagtgcacccgccgtttttgttcagtctacccactctcagggtaacaatgcctcagaagcctgctttgaaaattttccagaagccacatggaaaacatatctctcaaggattgtaattttcatcgaaatagtgggattttttattcctctaattttaaatgtaacttgttctagtatggtgctaaaaactttaaccaaacctgttacattaagtagaagcaaaataaacaaaactaaggttttaaaaatgatttttgtacatttgatcatattctgtttctgttttgttccttacaatatcaatcttattttatattctcttgtgagaacacaaacatttgttaattgctcagtagtggcagcagtaaggacaatgtacccaatcactctctgtattgctgtttccaactgttgttttgaccctatagtttactactttacatcggacacaattcagaattcaataaaaatgaaaaactggtctgtcaggagaagtgacttcagattctctgaagttcatggtgcagagaattttattcagcataacctacagaccttaaaaagtaagatatttgacaatgaatctgctgcctgaaataaaaccattaggactcactgggacagaactttcaagttccttcaactgtgaaaagtgtctttttggacaaactatttttccacctccaaaagaaattaacacatggacattttaaagtctttagtataaagaaaatttgtattcaatgtgttaagcattaacatgtattttatttgtgtatccactccatctgatttttctgagccattttgatttgttccttcattaaaaaaaatctcttaaagttatttagtgtctaaaagtgactgacttaaattatgtggtgccaatctgtaatgtctttgaattcctttttatattaaatgatttaatttactaaaaaaaaaaaaaaaaaaaaaaaaaaaaaaaaaaaaaaaaaa

SEQ ID NO: 283 - DNA, 2512 bp, Homo sapiens
aatgctatgttaagatatcactaacaatttcaatttataaatacacacccatacacattttcttttctaaattgtcatatcccaaacacgaaaacaatcgaataagagaacaggctgaatagtgatttttttctttcaattattactactgaaacaaatcaaaacaactctgagaggttgccagcaccgcagaaggcatttccacataaaaagagttaatgagcagaccacgcagttcaacagccagtgaccatttgcaagcctcctaggtatattcccagcagacacattatcagattaaaggaagtgcaaacaaactgggctgaaagtttctttgtccaaacccagcctcttcttcctgtgatgtcatattacaaatctaggaagcctttctttttcacttcagagaaagcgacctcaagatacaactggcaactgaggaaaaggcctcaattcaacaagagctaacaagcttgggagtttatttcggaatctttaaaagactcttctgcttacccacaatctgggatccactgcaggaaaacaaaaaaggaaaacttcatttaaaagaagcaagaagtaaaatgggacaaattgggaatgtttaagtctctgaaactctgcactgaaaagaaaataagattgataacttaagcttaacattctgaggcataaagaaacattaactttggagtattcatcttgactactgaaatacaagtttagaagacaagtggtttcattctggtcacagatcacagcttttctttaaatttataatcctatgggttggactcgttgactgtattttttaaaggttgctcgtcagttaactgagccttggaattcatggattttctaaagactaacaaatgaaaatattttcctgttgaagaacccagcggaaattttacagcaacaaatttcatgtttcttttgggtatttctgagaaaaaggaaatatttataaaaccatccaaagatccagataatttgcaaataaattggaggttatagaggttataatctgaatcccaaaggagactgcagctgatgaaagtgcttccaaactgaaaattggacgtgcctttacgatggtaagcgttaacagctcccactgcttctataatgactcctttaagtacactttgtatgggtgcatgttcagcatggtgtttgtgcttgggttaatatccaattgtgttgccatatacattttcatctgcgtcctcaaagtccgaaatgaaactacaacttacatgattaacttggcaatgtcagacttgctttttgtttttactttacccttcaggattttttacttcacaacacggaattggccatttggagatttactttgtaagatttctgtgatgctgttttataccaacatgtacggaagcattctgttcttaacctgtattagtgtagatcgatttctggcaattgtctacccatttaagtcaaagactctaagaaccaaaagaaatgcaaagattgtttgcactggcgtgtggttaactgtgatcggaggaagtgcacccgccgtttttgttcagtctacccactctcagggtaacaatgcctcagaagcctgctttgaaaattttccagaagccacatggaaaacatatctctcaaggattgtaattttcatcgaaatagtgggattttttattcctctaattttaaatgtaacttgttctagtatggtgctaaaaactttaaccaaacctgttacattaagtagaagcaaaataaacaaaactaaggttttaaaaatgatttttgtacatttgatcatattctgtttctgttttgttccttacaatatcaatcttattttatattctcttgtgagaacacaaacatttgttaattgctcagtagtggcagcagtaaggacaatgtacccaatcactctctgtattgctgtttccaactgttgttttgaccctatagtttactactttacatcggacacaattcagaattcaataaaaatgaaaaactggtctgtcaggagaagtgacttcagattctctgaagttcatggtgcagagaattttattcagcataacctacagaccttaaaaagtaagatatttgacaatgaatctgctgcctgaaataaaaccattaggactcactgggacagaactttcaagttccttcaactgtgaaaagtgtctttttggacaaactatttttccacctccaaaagaaattaacacatggacattttaaagtctttagtataaagaaaatttgtattcaatgtgttaagcattaacatgtattttatttgtgtatccactccatctgatttttctgagccattttgatttgttccttcattaaaaaaaatctcttaaagttatttagtgtctaaaagtgactgacttaaattatgtggtgccaatctgtaatgtctttgaattcctttttatattaaatgatttaatttactaaaaaaaaaaaaaaaaaaaaaaaaaaaaaaaaaaaaaaaaaa

SEQ ID NO: 284 - DNA, 9730 bp, Homo sapiens
gccccgggagcgtgccctcggggcggagagcgtcgcggcccgcgccgaggcgatgctcgggtggctgcgagctgccggcggcgagaggccatagacgggcatgggccttgcgtcccaccacccctagggaccctcgagcctcgcccctctgctccgactcgccggaccgacgcgatggcctcagaagtggtgtgcgggctcatcttcaggctgctgctgcccatctgcctggcagtagcatgtgcattccgatacaatgggctctcctttgtctaccttatctacctcttgctcattcctctgttctcagaaccaacaaaaacgacgatgcaaggacatacgggacggttattaaagtctctgtgcttcatcagtctttccttcctgttgctgcacatcattttccacatcacgttggtgagccttgaagctcaacatcgtattgcacctggctacaactgctcaacatgggaaaagacattccggcagatcggctttgaaagcttaaagggagctgatgctggcaatgggatcagagtgtttgtacctgacatcgggatgttcattgctagtctgaccatctggctcctctgtagaaacattgttcagaaacctgtgacagacgaagcagcacagagtaacccggagtttgaaaatgaagaattggctgaaggagaaaaaattgattcagaagaggcactgatctatgaagaggatttcaatggaggagatggtgttgaaggcgagttggaagaaagcacgaagttaaaaatgttccgcaggcttgcctctgtggcctctaagctcaaggagttcattggcaacatgatcaccactgctgggaaagtcgttgttaccatcttactgggctcctcgggcatgatgttgccgtctttgacatcatctgtgtatttttttgtatttttgggtctgtgcacctggtggtcctggtgccggacgttcgacccattgctgttcagctgtctctgtgttctgctggctattttcactgctggacatttgattggactttatttataccagttccaattctttcaagaggcagttccacccaatgactactatgcaaggttgtttggtatcaagtcagtaattcaaacggactgttcaagtacttggaagatcatagtgaacccggacctgtcgtggtaccaccacgccaaccctatcctcctgctggtgatgtactacactctggccactctgatccgcatctggctgcaagagccccttgtgcaggatgaggggaccaaagaagaggacaaagccctggcttgtagccccatccaaataacagcggggaggaggcggagcctgtggtacgcaacccattaccccactgatgagagaaaacttttatccatgacccaggatgactacaaaccatctgatggcctgctggtgactgtgaacggcaaccccgtggattaccacaccatccacccaagcctgcccatggagaacggccctggcaaagccgacctctactccacccctcagtaccggtgggagccctctgatgaatcctcagaaaagcgagaggaggaagaggaagagaaagaagaatttgaagaagaaaggagccgtgaggaaaaaagaagtatcaaagttcatgccatggtctccgtattccaatttattatgaaacaaagttacatctgtgccctcatagctatgatggcctggagcatcacctatcacagctggctgaccttcgtgctgctgatctggtcgtgcactctttggatgattcgcaacagaagaaaatatgccatgatcagctctcccttcatggtggtttatggaaacctattgttgatattacagtatatatggagttttgaacttcctgaaattaaaaaagttccaggatttttagaaaagaaagagccaggagaacttgcttccaaaatccttttcaccattactttttggctactgctgaggcagcacctcacagagcaaaaagctctgcaagaaaaggaagctcttttatcggaagtcaaaattggcagtcaggaaaatgaagaaaaagatgaggaacttcaagatatacaagtggaaggagagcccaaagaggaggaagaagaggaagcgaaggaagagaagcaagagagaaagaaggtagagcaagaggaagctgaagaagaagatgagcaggacatcatgaaagtcctgggcaatctggtggtggccatgttcatcaagtactggatctacgtctgcggaggcatgttcttcttcgtcagcttcgagggtaaaatcgtaatgtacaaaatcatctacatggtgctgttcctgttctgtgtggccctataccaggtgcactatgaatggtggaggaaaattctaaaatatttttggatgtcagtggttatttacactatgctggtgcttatctttatatacacatatcagtttgagaacttcccaggcctgtggcaaaatatgactggactgaaaaaagaaaagcttgaggatcttggcttaaagcagtttactgtggctgaactattcactcgcatattcatcccaacctcctttctgctggtgtgcattttacacctgcactacttccatgaccggttccttgaactcacagacctcaagtccattcccagcaaagaagacaacaccatctacagactggcccacccggaaggaagcctcccggacctcaccatgatgcatctgactgccagcctggagaagccggaggtgaggaagttggctgagcctggggaggagaagcttgagggctactctgaaaaagcccagaagggtgatcttgggaaagacagcgaggagtcagaggaggacggagaggaagaggaggaatccgaggaggaggaagaaacatcagacttaaggaacaaatggcacctggtgattgaccgcctcactgtgctcttcttaaaattcctggagtattttcacaagctgcaggtgttcatgtggtggattttggagttgcacatcatcaaaatcgtttcctcttacattatctgggtttctgtgaaagaggtgtctctgttcaactatgtatttttgatttcttgggcttttgctctgccgtacgccaagctgcgccgtctggcttcaagtgtctgcacagtctggacgtgtgtgatcatcgtctgcaaaatgttgtaccagctccaaaccattaagcctgagaacttctctgttaactgttccttgccaaatgaaaatcaaacaaacatcccctttaatgagttgaacaagtctctgctctacagcgctcctatcgatcctacagagtgggtcggcctgcggaagtcttcgcctctgctagtctacctgaggaataacctcctgatgctggctatcctggcctttgaagtcaccatttaccgccatcaggaatactatcgaggtcgaaataacctgacggcccctgtgtctagaactatctttcatgacattacaagactacatctagatgatggacttattaattgtgccaaatatttcattaattacttcttttacaagtttggtctggagacctgtttcctaatgtcagttaacgtcattggccagcgaatggatttctatgccatgatccacgcctgctggctgatcgctgtcttatatagacgcagaaggaaagccatcgcagagatctggcccaagtactgctgcttcctggcatgcatcatcaccttccagtatttcatctgcattggcatcccacctgctccttgccgagattacccgtggagattcaagggtgccagcttcaatgacaacatcataaagtggctgtacttcccagatttcattgtgcggcccaaccctgtgtttctcgtctatgacttcatgctgcttctgtgtgcctccttacaacggcagatttttgaggatgagaacaaggctgcagtgcgaatcatggcaggtgacaatgtcgagatctgcatgaaccttgatgcggcctccttcagccaacataaccctgtgccagattttattcactgcagatcttacttagacatgtccaaagtgatcatcttcagctacctcttctggtttgtgctcaccatcatcttcatcactgggaccaccaggatcagcatcttttgcatggggtacctggtggcctgtttctacttcctgctctttgggggcgatttgctgttgaaacccatcaagagcatcctgcgctactgggactggctgatcgcatacaacgtttttgtgattacgatgaaaaatatcctgtcaataggagcatgtggatacattggaacattggtgcacaatagttgttggttgatccaggctttcagcctggcctgcacagtcaaaggctatcaaatgcctgctgctaattcaccctgtacacttcccagtggggaagcaggaatcatttgggacagcatatgttttgccttcctcctgctgcaaagaagagttttcatgagttattattttctacatgttgtggctgatataaaagcttcccagattctggcatcaagaggagctgaacttttccaggccacaattgtaaaagctgtaaaggcaagaattgaggaagagaagaagtccatggaccagctgaagcgacagatggatcgcatcaaggccaggcaacagaaatataaaaagggtaaggagaggatgctgagcttgacccaggagccaggggaaggccaggacatgcaaaaactctctgaagaggatgatgaaagagaagcagacaaacagaaagccaagggcaaaaaaaagcagtggtggcggccttgggttgatcatgcttccatggtcaggagtggagattattatttgtttgaaacggatagtgaagaggaggaagaggaagaattaaagaaggaagatgaagaacctccacgaaggtcagcattccagtttgtttatcaagcctggattactgatcctaaaacagcactccgacaaagacacaaagagaaaaaaaggtctgcaagagaagaacggaaacgaaggcggaaaggatccaaggagggtcctgtggaatgggaagaccgggaggatgaaccaatcaaaaagaaatccgatggaccagataatatcatcaagaggatatttaatattttgaaatttacctgggtcctatttctggcaacagtggacagtttcactacttggcttaactccatttcaagggagcatattgatatatctacagttctgagaattgaacgatgcatgctgaccagagaaattaagaagggcaatgttccaactcgggagagcatccacatgtactatcagaaccacatcatgaacctttccagagagtcgggactggacaccattgacgagcatcccggagctgcttcaggtgcacagacagcccacaggatggatagtttagattcacatgacagtatctccagcgagcccacgcagtgtaccatgctgtactcacgccaggggaccactgagaccatcgaggaggtggaggctgagcaggaggaggaggcagggagcacggcgcctgagcccagggaggccaaggagtacgaggccactgggtacgatgtgggagccatgggtgccgaggaggccagcctcaccccagaggaagagctgacacagttctccaccttggacggggatgtggaggccccaccctcctacagcaaggctgtgagcttcgagcatctgtccttcggctcgcaggacgactctgcaggcaagaaccgtatggcagtcagcccggacgacagccgcaccgacaagctggggtccagcatcttacctcccctgacccatgagctgacggccagcgagctgctgctgaaaaagatgtttcacgacgatgagcttgaagagtcagagaaattctacgtggggcagccccgatttctgctgctcttctatgccatgtacaataccctggtggcccgctcggagatggtgtgctacttcgtgatcatcctcaaccacatggtctctgcctccatgatcacgctcctgcttcccatcctcatcttcctctgggccatgttgtccgtccccaggcccagccgccggttctggatgatggccatcgtctatactgaggtggcaattgtagtcaagtatttcttccaatttgggttctttccctggaataagaatgtggaggtgaacaaagataaaccgtatcaccccccaaacatcataggagtggaaaagaaggaaggttatgttctctatgacctcatccagctcctggctctgttctttcatcgatcaattttgaagtgccatggcttatgggatgaagatgacatgactgaaagtggcatggccagggaggaatcagatgatgagctctccctcggtcatggcaggagggactcctccgattctctcaagtccatcaacctggccgcgtctgtggagtcagtgcatgtgaccttcccggagcagcagacagctgtccggaggaagcgctccggcagcagctccgagccatcccagagatccagcttttcttcaaacagatcccaaagaggcagcacaagcacccgaaacagcagtcaaaaaggaagcagtgttttgagtattaagcaaaaaggcaaaagggaactttatatggaaaagcttcaagaacatttaatcaaagcaaaagcctttaccataaagaagacgctggagatctatgtgcccatcaaacagttcttttacaacctcatccacccggagtatagcgccgtgactgacgtgtatgtactcatgttcctggctgacactgtggacttcatcatcattgtcttcggcttttgggcctttgggaaacactcagcagctgcagacatcacctcttcactgtcagaggaccaggtcccggggccgtttttggtgatggtcctcattcagtttggaaccatggtggtggaccgagccctctacctcaggaagactgtactgggaaaggtcatcttccaggtcattcttgtgttcggaattcacttctggatgttcttcatcttacctggtgtgactgagaggaaattcagccagaacctggttgcccagctttggtactttgtgaaatgtgtttacttcgggttgtctgcttaccagatccgttgtggctacccaacgcgagtcctggggaacttcctcaccaagagctacaattacgtcaacctcttcttattccaagggtttcgcctcgtgccctttttgactgagctgagggcagtgatggactgggtgtggacggacacaactttgagcctgtccagctggatctgtgtggaggacatctatgctcacatattcatcctgaagtgttggcgggagtcggagaagagataccctcagccacggggccagaagaagaagaaagtggtgaagtatggcatgggaggaatgatcatcgtcctgctcatctgcattgtctggtttcctcttctcttcatgtctttgatcaaatctgtggctggggtcatcaaccagcccctggacgtctccgtcacaattaccctgggagggtatcagcctattttcacaatgagtgcccaacaaagccagttgaaagttatggaccagcagagctttaacaaatttatacaagctttttctagggacaccggtgctatgcaatttctggaaaattatgaaaaagaagacataacagtagcagaactggaaggaaactcaaattctttgtggaccatcagcccacccagtaagcagaaaatgatacacgaactcctggaccccaatagtagcttctctgttgttttttcatggagtattcagagaaacttaagtctgggtgcaaaatcggaaatagcaacagataagctttcttttcctcttaaaaatattactcgaaagaatatcgctaaaatgatagcaggcaacagcacagaaagttcaaaaacaccagtgaccatagaaaagatttatccatattatgtgaaagcacctagtgattctaactcaaaacctataaagcaacttttatctgaaaataatttcatggatattaccatcattttgtccagagacaatacaactaaatataacagtgagtggtgggttctcaacctgactggaaacagaatatacaatccgaactctcaggccctggaactggtggtcttcaatgacaaagtcagtcccccaagtctggggttcctggctggctatggtattatgggattatatgcttcagttgtccttgtgattgggaaatttgtccgtgaattcttcagtgggatttctcactccatcatgtttgaagagcttccaaatgtggatcgaattttgaagttgtgcacagatatttttttagttcgagagacaggagaactggagctagaagaagatctctatgccaaattaatattcctatatcgctcaccagagacaatgatcaaatggactagagaaaaaacaaattgaaaccttagaacacagactgcaaataatgttaacatttgaattttttttaaaagcacaatattctcataagagctaagcatttctagttcgacggaaatggtttgtttctcttctgataggtagacaaaaggagctgatatccttctgcagtaaaagctaccttgcaagttaaggcactgttgaaaatgttatttgtaactccatttctctgaaatcagggctacttgctttatgttttagtcaacagtgtctcgcattctgattgatcatgtgaaggaatcatttatgggccccgtccctaagagaaacagaagaggagtcagaaagaaagatgcctgtgttttcctctgtggggcccgtgcacttcctggagagatgctacaatgcaatatacagcgctccatccccactggggaagctgctgtgatgagactagatgagccttcaacacactcagaaaatgcaacagcaatagggggcagacagctcctacctgtgtttctaggagcaaaagagagggaactaattgcccgtgaagacgccagtggaaggatcagcctcattctaagcaaaaacatagtattagtgatactcttactgccttatcttaaccaaggactaataggatacctttccattaaacaccagtgacttctcaggaaaaaaaaaaaaaaggagcaaaacaaatgatgtgtacacctgctttgttatggtccaccagtgaccagcttcaatgaggggaaccattctggagggctgcggtctcctgtgcaaacagacatgaggcagaagagtaaaaagaccaacccagtgggacctagaatactttgtaactctttaataactgaggtcaggaccgctcttctgccttccccttcccttaacgtgctttttcccatttccatgatttaaggcaatggtttttccagtatgtgacattttccttcctgtttttcaggtatatcaaagagtttacatattccaattcacatttttacatctgagacgggttttttaagttcataattatgaaagaaatatgtatattgagcttggggaaataaaaatggccttttcttaaattattattattggtaatacaacctcttcattaaataacaatgtagcatgaaaaatttatgattgaaatgtagttttcattccatattaagatacagtttctgagaagaatcattgaatggactagaatatgtcaaaaattgatcctgtgtagtttgggttcagggctgacttaaaataaagcacatcctgcaaagtcaaaaaaaaaaaaaaaaaa

SEQ ID NO: 285 - DNA, 10653 bp, Homo sapiens
ggagaagcgcgcgccgccggggagccccggctgcgccgcgagggcgaggctgcaaggcggcaggcggtggtcgcgctgggcgacgggacggcgctggtttttctcttgagttttaaattgaggcggtggaggagggagtgggagacccactcacccgatatgcgctctggtctccatttctccccacgctcgcgccgttccttcgagtgagggagggactcgcagcgccgcccgcgcaccggacccacaaggcgagccccgtggtggcggggatggttctgcgcgcctggcagctcccaccccggtctctccggcccgaagctggggggcgcaggggctgagctgcgctgcctctcggggatccgccgcgggccgcctgggggctggagggcgagacccggagcccgccgggcagctccgagagccggggccgaggccagagcgcggcagcctgcgtgggcagcggagacgaggccgggcaaaggagacgcggtggcttcagaggggcttccaagtagaaaactccccggccgcccccaaacgacgccccgggagccaggcgggagcacagcacgcccttcttgccccctttgctcgccgcgccgcctcccaggaccctcccaaagcgtccctctccaaggccccggcatcagctacccctgaagaagccgccgccgctgccggatccaggattcacactaaatgggccggccgcagggggccgggcgccgggctaggtggccgccaagagcctggtgaggggctacccagagcccggtgggcgaggggcggccaagagccccgggagcgtgccctcggggcggagagcgtcgcggcccgcgccgaggcgatgctcgggtggctgcgagctgccggcggcgagaggccatagacgggcatgggccttgcgtcccaccacccctagggaccctcgagcctcgcccctctgctccgactcgccggaccgacgcgatggcctcagaagtggtgtgcgggctcatcttcaggctgctgctgcccatctgcctggcagtagcatgtgcattccgatacaatgggctctcctttgtctaccttatctacctcttgctcattcctctgttctcagaaccaacaaaaacgacgatgcaaggacatacgggacggttattaaagtctctgtgcttcatcagtctttccttcctgttgctgcacatcattttccacatcacgttggtgagccttgaagctcaacatcgtattgcacctggctacaactgctcaacatgggaaaagacattccggcagatcggctttgaaagcttaaagggagctgatgctggcaatgggatcagagtgtttgtacctgacatcgggatgttcattgctagtctgaccatctggctcctctgtagaaacattgttcagaaacctgtgacagacgaagcagcacagagtaacccggagtttgaaaatgaagaattggctgaaggagaaaaaattgattcagaagaggcactgatctatgaagaggatttcaatggaggagatggtgttgaaggcgagttggaagaaagcacgaagttaaaaatgttccgcaggcttgcctctgtggcctctaagctcaaggagttcattggcaacatgatcaccactgctgggaaagtcgttgttaccatcttactgggctcctcgggcatgatgttgccgtctttgacatcatctgtgtatttttttgtatttttgggtctgtgcacctggtggtcctggtgccggacgttcgacccattgctgttcagctgtctctgtgttctgctggctattttcactgctggacatttgattggactttatttataccagttccaattctttcaagaggcagttccacccaatgactactatgcaaggttgtttggtatcaagtcagtaattcaaacggactgttcaagtacttggaagatcatagtgaacccggacctgtcgtggtaccaccacgccaaccctatcctcctgctggtgatgtactacactctggccactctgatccgcatctggctgcaagagccccttgtgcaggatgaggggaccaaagaagaggacaaagccctggcttgtagccccatccaaataacagcggggaggaggcggagcctgtggtacgcaacccattaccccactgatgagagaaaacttttatccatgacccaggatgactacaaaccatctgatggcctgctggtgactgtgaacggcaaccccgtggattaccacaccatccacccaagcctgcccatggagaacggccctggcaaagccgacctctactccacccctcagtaccggtgggagccctctgatgaatcctcagaaaagcgagaggaggaagaggaagagaaagaagaatttgaagaagaaaggagccgtgaggaaaaaagaagtatcaaagttcatgccatggtctccgtattccaatttattatgaaacaaagttacatctgtgccctcatagctatgatggcctggagcatcacctatcacagctggctgaccttcgtgctgctgatctggtcgtgcactctttggatgattcgcaacagaagaaaatatgccatgatcagctctcccttcatggtggtttatggaaacctattgttgatattacagtatatatggagttttgaacttcctgaaattaaaaaagttccaggatttttagaaaagaaagagccaggagaacttgcttccaaaatccttttcaccattactttttggctactgctgaggcagcacctcacagagcaaaaagctctgcaagaaaaggaagctcttttatcggaagtcaaaattggcagtcaggaaaatgaagaaaaagatgaggaacttcaagatatacaagtggaaggagagcccaaagaggaggaagaagaggaagcgaaggaagagaagcaagagagaaagaaggtagagcaagaggaagctgaagaagaagatgagcaggacatcatgaaagtcctgggcaatctggtggtggccatgttcatcaagtactggatctacgtctgcggaggcatgttcttcttcgtcagcttcgagggtaaaatcgtaatgtacaaaatcatctacatggtgctgttcctgttctgtgtggccctataccaggtgcactatgaatggtggaggaaaattctaaaatatttttggatgtcagtggttatttacactatgctggtgcttatctttatatacacatatcagtttgagaacttcccaggcctgtggcaaaatatgactggactgaaaaaagaaaagcttgaggatcttggcttaaagcagtttactgtggctgaactattcactcgcatattcatcccaacctcctttctgctggtgtgcattttacacctgcactacttccatgaccggttccttgaactcacagacctcaagtccattcccagcaaagaagacaacaccatctacagccatgccaaagtcaatggtcgcgtatatctaataataaataggatctcacacagtcttcccacggttgccaatcgacagttcgcatcagtaactctcagcatcaagaaaaaattaccaatccaccaaaatgaactggcccacccggaaggaagcctcccggacctcaccatgatgcatctgactgccagcctggagaagccggaggtgaggaagttggctgagcctggggaggagaagcttgagggctactctgaaaaagcccagaagggtgatcttgggaaagacagcgaggagtcagaggaggacggagaggaagaggaggaatccgaggaggaggaagaaacatcagacttaaggaacaaatggcacctggtgattgaccgcctcactgtgctcttcttaaaattcctggagtattttcacaagctgcaggtgttcatgtggtggattttggagttgcacatcatcaaaatcgtttcctcttacattatctgggtttctgtgaaagaggtgtctctgttcaactatgtatttttgatttcttgggcttttgctctgccgtacgccaagctgcgccgtctggcttcaagtgtctgcacagtctggacgtgtgtgatcatcgtctgcaaaatgttgtaccagctccaaaccattaagcctgagaacttctctgttaactgttccttgccaaatgaaaatcaaacaaacatcccctttaatgagttgaacaagtctctgctctacagcgctcctatcgatcctacagagtgggtcggcctgcggaagtcttcgcctctgctagtctacctgaggaataacctcctgatgctggctatcctggcctttgaagtcaccatttaccgccatcaggaatactatcgaggtcgaaataacctgacggcccctgtgtctagaactatctttcatgacattacaagactacatctagatgatggacttattaattgtgccaaatatttcattaattacttcttttacaagtttggtctggagacctgtttcctaatgtcagttaacgtcattggccagcgaatggatttctatgccatgatccacgcctgctggctgatcgctgtcttatatagacgcagaaggaaagccatcgcagagatctggcccaagtactgctgcttcctggcatgcatcatcaccttccagtatttcatctgcattggcatcccacctgctccttgccgagattacccgtggagattcaagggtgccagcttcaatgacaacatcataaagtggctgtacttcccagatttcattgtgcggcccaaccctgtgtttctcgtctatgacttcatgctgcttctgtgtgcctccttacaacggcagatttttgaggatgagaacaaggctgcagtgcgaatcatggcaggtgacaatgtcgagatctgcatgaaccttgatgcggcctccttcagccaacataaccctgtgccagattttattcactgcagatcttacttagacatgtccaaagtgatcatcttcagctacctcttctggtttgtgctcaccatcatcttcatcactgggaccaccaggatcagcatcttttgcatggggtacctggtggcctgtttctacttcctgctctttgggggcgatttgctgttgaaacccatcaagagcatcctgcgctactgggactggctgatcgcatacaacgtttttgtgattacgatgaaaaatatcctgtcaataggagcatgtggatacattggaacattggtgcacaatagttgttggttgatccaggctttcagcctggcctgcacagtcaaaggctatcaaatgcctgctgctaattcaccctgtacacttcccagtggggaagcaggaatcatttgggacagcatatgttttgccttcctcctgctgcaaagaagagttttcatgagttattattttctacatgttgtggctgatataaaagcttcccagattctggcatcaagaggagctgaacttttccaggccacaattgtaaaagctgtaaaggcaagaattgaggaagagaagaagtccatggaccagctgaagcgacagatggatcgcatcaaggccaggcaacagaaatataaaaagggtaaggagaggatgctgagcttgacccaggagccaggggaaggccaggacatgcaaaaactctctgaagaggatgatgaaagagaagcagacaaacagaaagccaagggcaaaaaaaagcagtggtggcggccttgggttgatcatgcttccatggtcaggagtggagattattatttgtttgaaacggatagtgaagaggaggaagaggaagaattaaagaaggaagatgaagaacctccacgaaggtcagcattccagtttgtttatcaagcctggattactgatcctaaaacagcactccgacaaagacacaaagagaaaaaaaggtctgcaagagaagaacggaaacgaaggcggaaaggatccaaggagggtcctgtggaatgggaagaccgggaggatgaaccaatcaaaaagaaatccgatggaccagataatatcatcaagaggatatttaatattttgaaatttacctgggtcctatttctggcaacagtggacagtttcactacttggcttaactccatttcaagggagcatattgatatatctacagttctgagaattgaacgatgcatgctgaccagagaaattaagaagggcaatgttccaactcgggagagcatccacatgtactatcagaaccacatcatgaacctttccagagagtcgggactggacaccattgacgagcatcccggagctgcttcaggtgcacagacagcccacaggatggatagtttagattcacatgacagtatctccagcgagcccacgcagtgtaccatgctgtactcacgccaggggaccactgagaccatcgaggaggtggaggctgagcaggaggaggaggcagggagcacggcgcctgagcccagggaggccaaggagtacgaggccactgggtacgatgtgggagccatgggtgccgaggaggccagcctcaccccagaggaagagctgacacagttctccaccttggacggggatgtggaggccccaccctcctacagcaaggctgtgagcttcgagcatctgtccttcggctcgcaggacgactctgcaggcaagaaccgtatggcagtcagcccggacgacagccgcaccgacaagctggggtccagcatcttacctcccctgacccatgagctgacggccagcgagctgctgctgaaaaagatgtttcacgacgatgagcttgaagagtcagagaaattctacgtggggcagccccgatttctgctgctcttctatgccatgtacaataccctggtggcccgctcggagatggtgtgctacttcgtgatcatcctcaaccacatggtctctgcctccatgatcacgctcctgcttcccatcctcatcttcctctgggccatgttgtccgtccccaggcccagccgccggttctggatgatggccatcgtctatactgaggtggcaattgtagtcaagtatttcttccaatttgggttctttccctggaataagaatgtggaggtgaacaaagataaaccgtatcaccccccaaacatcataggagtggaaaagaaggaaggttatgttctctatgacctcatccagctcctggctctgttctttcatcgatcaattttgaagtgccatggcttatgggatgaagatgacatgactgaaagtggcatggccagggaggaatcagatgatgagctctccctcggtcatggcaggagggactcctccgattctctcaagtccatcaacctggccgcgtctgtggagtcagtgcatgtgaccttcccggagcagcagacagctgtccggaggaagcgctccggcagcagctccgagccatcccagagatccagcttttcttcaaacagatcccaaagaggcagcacaagcacccgaaacagcagtcaaaaaggaagcagtgttttgagtattaagcaaaaaggcaaaagggaactttatatggaaaagcttcaagaacatttaatcaaagcaaaagcctttaccataaagaagacgctggagatctatgtgcccatcaaacagttcttttacaacctcatccacccggagtatagcgccgtgactgacgtgtatgtactcatgttcctggctgacactgtggacttcatcatcattgtcttcggcttttgggcctttgggaaacactcagcagctgcagacatcacctcttcactgtcagaggaccaggtcccggggccgtttttggtgatggtcctcattcagtttggaaccatggtggtggaccgagccctctacctcaggaagactgtactgggaaaggtcatcttccaggtcattcttgtgttcggaattcacttctggatgttcttcatcttacctggtgtgactgagaggaaattcagccagaacctggttgcccagctttggtactttgtgaaatgtgtttacttcgggttgtctgcttaccagatccgttgtggctacccaacgcgagtcctggggaacttcctcaccaagagctacaattacgtcaacctcttcttattccaagggtttcgcctcgtgccctttttgactgagctgagggcagtgatggactgggtgtggacggacacaactttgagcctgtccagctggatctgtgtggaggacatctatgctcacatattcatcctgaagtgttggcgggagtcggagaagagataccctcagccacggggccagaagaagaagaaagtggtgaagtatggcatgggaggaatgatcatcgtcctgctcatctgcattgtctggtttcctcttctcttcatgtctttgatcaaatctgtggctggggtcatcaaccagcccctggacgtctccgtcacaattaccctgggagggtatcagcctattttcacaatgagtgcccaacaaagccagttgaaagttatggaccagcagagctttaacaaatttatacaagctttttctagggacaccggtgctatgcaatttctggaaaattatgaaaaagaagacataacagtagcagaactggaaggaaactcaaattctttgtggaccatcagcccacccagtaagcagaaaatgatacacgaactcctggaccccaatagtagcttctctgttgttttttcatggagtattcagagaaacttaagtctgggtgcaaaatcggaaatagcaacagataagctttcttttcctcttaaaaatattactcgaaagaatatcgctaaaatgatagcaggcaacagcacagaaagttcaaaaacaccagtgaccatagaaaagatttatccatattatgtgaaagcacctagtgattctaactcaaaacctataaagcaacttttatctgaaaataatttcatggatattaccatcattttgtccagagacaatacaactaaatataacagtgagtggtgggttctcaacctgactggaaacagaatatacaatccgaactctcaggccctggaactggtggtcttcaatgacaaagtcagtcccccaagtctggggttcctggctggctatggtattatgggattatatgcttcagttgtccttgtgattgggaaatttgtccgtgaattcttcagtgggatttctcactccatcatgtttgaagagcttccaaatgtggatcgaattttgaagttgtgcacagatatttttttagttcgagagacaggagaactggagctagaagaagatctctatgccaaattaatattcctatatcgctcaccagagacaatgatcaaatggactagagaaaaaacaaattgaaaccttagaacacagactgcaaataatgttaacatttgaattttttttaaaagcacaatattctcataagagctaagcatttctagttcgacggaaatggtttgtttctcttctgataggtagacaaaaggagctgatatccttctgcagtaaaagctaccttgcaagttaaggcactgttgaaaatgttatttgtaactccatttctctgaaatcagggctacttgctttatgttttagtcaacagtgtctcgcattctgattgatcatgtgaaggaatcatttatgggccccgtccctaagagaaacagaagaggagtcagaaagaaagatgcctgtgttttcctctgtggggcccgtgcacttcctggagagatgctacaatgcaatatacagcgctccatccccactggggaagctgctgtgatgagactagatgagccttcaacacactcagaaaatgcaacagcaatagggggcagacagctcctacctgtgtttctaggagcaaaagagagggaactaattgcccgtgaagacgccagtggaaggatcagcctcattctaagcaaaaacatagtattagtgatactcttactgccttatcttaaccaaggactaataggatacctttccattaaacaccagtgacttctcaggaaaaaaaaaaaaaaggagcaaaacaaatgatgtgtacacctgctttgttatggtccaccagtgaccagcttcaatgaggggaaccattctggagggctgcggtctcctgtgcaaacagacatgaggcagaagagtaaaaagaccaacccagtgggacctagaatactttgtaactctttaataactgaggtcaggaccgctcttctgccttccccttcccttaacgtgctttttcccatttccatgatttaaggcaatggtttttccagtatgtgacattttccttcctgtttttcaggtatatcaaagagtttacatattccaattcacatttttacatctgagacgggttttttaagttcataattatgaaagaaatatgtatattgagcttggggaaataaaaatggccttttcttaaattattattattggtaatacaacctcttcattaaataacaatgtagcatgaaaaatttatgattgaaatgtagttttcattccatattaagatacagtttctgagaagaatcattgaatggactagaatatgtcaaaaattgatcctgtgtagtttgggttcagggctgacttaaaataaagcacatcctgcaaagtcattttaagaat

SEQ ID NO: 286 - DNA, 10614 bp, Homo sapiens
ggagaagcgcgcgccgccggggagccccggctgcgccgcgagggcgaggctgcaaggcggcaggcggtggtcgcgctgggcgacgggacggcgctggtttttctcttgagttttaaattgaggcggtggaggagggagtgggagacccactcacccgatatgcgctctggtctccatttctccccacgctcgcgccgttccttcgagtgagggagggactcgcagcgccgcccgcgcaccggacccacaaggcgagccccgtggtggcggggatggttctgcgcgcctggcagctcccaccccggtctctccggcccgaagctggggggcgcaggggctgagctgcgctgcctctcggggatccgccgcgggccgcctgggggctggagggcgagacccggagcccgccgggcagctccgagagccggggccgaggccagagcgcggcagcctgcgtgggcagcggagacgaggccgggcaaaggagacgcggtggcttcagaggggcttccaagtagaaaactccccggccgcccccaaacgacgccccgggagccaggcgggagcacagcacgcccttcttgccccctttgctcgccgcgccgcctcccaggaccctcccaaagcgtccctctccaaggccccggcatcagctacccctgaagaagccgccgccgctgccggatccaggattcacactaaatgggccggccgcagggggccgggcgccgggctaggtggccgccaagagcctggtgaggggctacccagagcccggtgggcgaggggcggccaagagccccgggagcgtgccctcggggcggagagcgtcgcggcccgcgccgaggcgatgctcgggtggctgcgagctgccggcggcgagaggccatagacgggcatgggccttgcgtcccaccacccctagggaccctcgagcctcgcccctctgctccgactcgccggaccgacgcgatggcctcagaagtggtgtgcgggctcatcttcaggctgctgctgcccatctgcctggcagtagcatgtgcattccgatacaatgggctctcctttgtctaccttatctacctcttgctcattcctctgttctcagaaccaacaaaaacgacgatgcaaggacatacgggacggttattaaagtctctgtgcttcatcagtctttccttcctgttgctgcacatcattttccacatcacgttggtgagccttgaagctcaacatcgtattgcacctggctacaactgctcaacatgggaaaagacattccggcagatcggctttgaaagcttaaagggagctgatgctggcaatgggatcagagtgtttgtacctgacatcgggatgttcattgctagtctgaccatctggctcctctgtagaaacattgttcagaaacctgtgacagacgaagcagcacagagtaacccggagtttgaaaatgaagaattggctgaaggagaaaaaattgattcagaagaggcactgatctatgaagaggatttcaatggaggagatggtgttgaaggcgagttggaagaaagcacgaagttaaaaatgttccgcaggcttgcctctgtggcctctaagctcaaggagttcattggcaacatgatcaccactgctgggaaagtcgttgttaccatcttactgggctcctcgggcatgatgttgccgtctttgacatcatctgtgtatttttttgtatttttgggtctgtgcacctggtggtcctggtgccggacgttcgacccattgctgttcagctgtctctgtgttctgctggctattttcactgctggacatttgattggactttatttataccagttccaattctttcaagaggcagttccacccaatgactactatgcaaggttgtttggtatcaagtcagtaattcaaacggactgttcaagtacttggaagatcatagtgaacccggacctgtcgtggtaccaccacgccaaccctatcctcctgctggtgatgtactacactctggccactctgatccgcatctggctgcaagagccccttgtgcaggatgaggggaccaaagaagaggacaaagccctggcttgtagccccatccaaataacagcggggaggaggcggagcctgtggtacgcaacccattaccccactgatgagagaaaaggcctgctggtgactgtgaacggcaaccccgtggattaccacaccatccacccaagcctgcccatggagaacggccctggcaaagccgacctctactccacccctcagtaccggtgggagccctctgatgaatcctcagaaaagcgagaggaggaagaggaagagaaagaagaatttgaagaagaaaggagccgtgaggaaaaaagaagtatcaaagttcatgccatggtctccgtattccaatttattatgaaacaaagttacatctgtgccctcatagctatgatggcctggagcatcacctatcacagctggctgaccttcgtgctgctgatctggtcgtgcactctttggatgattcgcaacagaagaaaatatgccatgatcagctctcccttcatggtggtttatggaaacctattgttgatattacagtatatatggagttttgaacttcctgaaattaaaaaagttccaggatttttagaaaagaaagagccaggagaacttgcttccaaaatccttttcaccattactttttggctactgctgaggcagcacctcacagagcaaaaagctctgcaagaaaaggaagctcttttatcggaagtcaaaattggcagtcaggaaaatgaagaaaaagatgaggaacttcaagatatacaagtggaaggagagcccaaagaggaggaagaagaggaagcgaaggaagagaagcaagagagaaagaaggtagagcaagaggaagctgaagaagaagatgagcaggacatcatgaaagtcctgggcaatctggtggtggccatgttcatcaagtactggatctacgtctgcggaggcatgttcttcttcgtcagcttcgagggtaaaatcgtaatgtacaaaatcatctacatggtgctgttcctgttctgtgtggccctataccaggtgcactatgaatggtggaggaaaattctaaaatatttttggatgtcagtggttatttacactatgctggtgcttatctttatatacacatatcagtttgagaacttcccaggcctgtggcaaaatatgactggactgaaaaaagaaaagcttgaggatcttggcttaaagcagtttactgtggctgaactattcactcgcatattcatcccaacctcctttctgctggtgtgcattttacacctgcactacttccatgaccggttccttgaactcacagacctcaagtccattcccagcaaagaagacaacaccatctacagccatgccaaagtcaatggtcgcgtatatctaataataaataggatctcacacagtcttcccacggttgccaatcgacagttcgcatcagtaactctcagcatcaagaaaaaattaccaatccaccaaaatgaactggcccacccggaaggaagcctcccggacctcaccatgatgcatctgactgccagcctggagaagccggaggtgaggaagttggctgagcctggggaggagaagcttgagggctactctgaaaaagcccagaagggtgatcttgggaaagacagcgaggagtcagaggaggacggagaggaagaggaggaatccgaggaggaggaagaaacatcagacttaaggaacaaatggcacctggtgattgaccgcctcactgtgctcttcttaaaattcctggagtattttcacaagctgcaggtgttcatgtggtggattttggagttgcacatcatcaaaatcgtttcctcttacattatctgggtttctgtgaaagaggtgtctctgttcaactatgtatttttgatttcttgggcttttgctctgccgtacgccaagctgcgccgtctggcttcaagtgtctgcacagtctggacgtgtgtgatcatcgtctgcaaaatgttgtaccagctccaaaccattaagcctgagaacttctctgttaactgttccttgccaaatgaaaatcaaacaaacatcccctttaatgagttgaacaagtctctgctctacagcgctcctatcgatcctacagagtgggtcggcctgcggaagtcttcgcctctgctagtctacctgaggaataacctcctgatgctggctatcctggcctttgaagtcaccatttaccgccatcaggaatactatcgaggtcgaaataacctgacggcccctgtgtctagaactatctttcatgacattacaagactacatctagatgatggacttattaattgtgccaaatatttcattaattacttcttttacaagtttggtctggagacctgtttcctaatgtcagttaacgtcattggccagcgaatggatttctatgccatgatccacgcctgctggctgatcgctgtcttatatagacgcagaaggaaagccatcgcagagatctggcccaagtactgctgcttcctggcatgcatcatcaccttccagtatttcatctgcattggcatcccacctgctccttgccgagattacccgtggagattcaagggtgccagcttcaatgacaacatcataaagtggctgtacttcccagatttcattgtgcggcccaaccctgtgtttctcgtctatgacttcatgctgcttctgtgtgcctccttacaacggcagatttttgaggatgagaacaaggctgcagtgcgaatcatggcaggtgacaatgtcgagatctgcatgaaccttgatgcggcctccttcagccaacataaccctgtgccagattttattcactgcagatcttacttagacatgtccaaagtgatcatcttcagctacctcttctggtttgtgctcaccatcatcttcatcactgggaccaccaggatcagcatcttttgcatggggtacctggtggcctgtttctacttcctgctctttgggggcgatttgctgttgaaacccatcaagagcatcctgcgctactgggactggctgatcgcatacaacgtttttgtgattacgatgaaaaatatcctgtcaataggagcatgtggatacattggaacattggtgcacaatagttgttggttgatccaggctttcagcctggcctgcacagtcaaaggctatcaaatgcctgctgctaattcaccctgtacacttcccagtggggaagcaggaatcatttgggacagcatatgttttgccttcctcctgctgcaaagaagagttttcatgagttattattttctacatgttgtggctgatataaaagcttcccagattctggcatcaagaggagctgaacttttccaggccacaattgtaaaagctgtaaaggcaagaattgaggaagagaagaagtccatggaccagctgaagcgacagatggatcgcatcaaggccaggcaacagaaatataaaaagggtaaggagaggatgctgagcttgacccaggagccaggggaaggccaggacatgcaaaaactctctgaagaggatgatgaaagagaagcagacaaacagaaagccaagggcaaaaaaaagcagtggtggcggccttgggttgatcatgcttccatggtcaggagtggagattattatttgtttgaaacggatagtgaagaggaggaagaggaagaattaaagaaggaagatgaagaacctccacgaaggtcagcattccagtttgtttatcaagcctggattactgatcctaaaacagcactccgacaaagacacaaagagaaaaaaaggtctgcaagagaagaacggaaacgaaggcggaaaggatccaaggagggtcctgtggaatgggaagaccgggaggatgaaccaatcaaaaagaaatccgatggaccagataatatcatcaagaggatatttaatattttgaaatttacctgggtcctatttctggcaacagtggacagtttcactacttggcttaactccatttcaagggagcatattgatatatctacagttctgagaattgaacgatgcatgctgaccagagaaattaagaagggcaatgttccaactcgggagagcatccacatgtactatcagaaccacatcatgaacctttccagagagtcgggactggacaccattgacgagcatcccggagctgcttcaggtgcacagacagcccacaggatggatagtttagattcacatgacagtatctccagcgagcccacgcagtgtaccatgctgtactcacgccaggggaccactgagaccatcgaggaggtggaggctgagcaggaggaggaggcagggagcacggcgcctgagcccagggaggccaaggagtacgaggccactgggtacgatgtgggagccatgggtgccgaggaggccagcctcaccccagaggaagagctgacacagttctccaccttggacggggatgtggaggccccaccctcctacagcaaggctgtgagcttcgagcatctgtccttcggctcgcaggacgactctgcaggcaagaaccgtatggcagtcagcccggacgacagccgcaccgacaagctggggtccagcatcttacctcccctgacccatgagctgacggccagcgagctgctgctgaaaaagatgtttcacgacgatgagcttgaagagtcagagaaattctacgtggggcagccccgatttctgctgctcttctatgccatgtacaataccctggtggcccgctcggagatggtgtgctacttcgtgatcatcctcaaccacatggtctctgcctccatgatcacgctcctgcttcccatcctcatcttcctctgggccatgttgtccgtccccaggcccagccgccggttctggatgatggccatcgtctatactgaggtggcaattgtagtcaagtatttcttccaatttgggttctttccctggaataagaatgtggaggtgaacaaagataaaccgtatcaccccccaaacatcataggagtggaaaagaaggaaggttatgttctctatgacctcatccagctcctggctctgttctttcatcgatcaattttgaagtgccatggcttatgggatgaagatgacatgactgaaagtggcatggccagggaggaatcagatgatgagctctccctcggtcatggcaggagggactcctccgattctctcaagtccatcaacctggccgcgtctgtggagtcagtgcatgtgaccttcccggagcagcagacagctgtccggaggaagcgctccggcagcagctccgagccatcccagagatccagcttttcttcaaacagatcccaaagaggcagcacaagcacccgaaacagcagtcaaaaaggaagcagtgttttgagtattaagcaaaaaggcaaaagggaactttatatggaaaagcttcaagaacatttaatcaaagcaaaagcctttaccataaagaagacgctggagatctatgtgcccatcaaacagttcttttacaacctcatccacccggagtatagcgccgtgactgacgtgtatgtactcatgttcctggctgacactgtggacttcatcatcattgtcttcggcttttgggcctttgggaaacactcagcagctgcagacatcacctcttcactgtcagaggaccaggtcccggggccgtttttggtgatggtcctcattcagtttggaaccatggtggtggaccgagccctctacctcaggaagactgtactgggaaaggtcatcttccaggtcattcttgtgttcggaattcacttctggatgttcttcatcttacctggtgtgactgagaggaaattcagccagaacctggttgcccagctttggtactttgtgaaatgtgtttacttcgggttgtctgcttaccagatccgttgtggctacccaacgcgagtcctggggaacttcctcaccaagagctacaattacgtcaacctcttcttattccaagggtttcgcctcgtgccctttttgactgagctgagggcagtgatggactgggtgtggacggacacaactttgagcctgtccagctggatctgtgtggaggacatctatgctcacatattcatcctgaagtgttggcgggagtcggagaagagataccctcagccacggggccagaagaagaagaaagtggtgaagtatggcatgggaggaatgatcatcgtcctgctcatctgcattgtctggtttcctcttctcttcatgtctttgatcaaatctgtggctggggtcatcaaccagcccctggacgtctccgtcacaattaccctgggagggtatcagcctattttcacaatgagtgcccaacaaagccagttgaaagttatggaccagcagagctttaacaaatttatacaagctttttctagggacaccggtgctatgcaatttctggaaaattatgaaaaagaagacataacagtagcagaactggaaggaaactcaaattctttgtggaccatcagcccacccagtaagcagaaaatgatacacgaactcctggaccccaatagtagcttctctgttgttttttcatggagtattcagagaaacttaagtctgggtgcaaaatcggaaatagcaacagataagctttcttttcctcttaaaaatattactcgaaagaatatcgctaaaatgatagcaggcaacagcacagaaagttcaaaaacaccagtgaccatagaaaagatttatccatattatgtgaaagcacctagtgattctaactcaaaacctataaagcaacttttatctgaaaataatttcatggatattaccatcattttgtccagagacaatacaactaaatataacagtgagtggtgggttctcaacctgactggaaacagaatatacaatccgaactctcaggccctggaactggtggtcttcaatgacaaagtcagtcccccaagtctggggttcctggctggctatggtattatgggattatatgcttcagttgtccttgtgattgggaaatttgtccgtgaattcttcagtgggatttctcactccatcatgtttgaagagcttccaaatgtggatcgaattttgaagttgtgcacagatatttttttagttcgagagacaggagaactggagctagaagaagatctctatgccaaattaatattcctatatcgctcaccagagacaatgatcaaatggactagagaaaaaacaaattgaaaccttagaacacagactgcaaataatgttaacatttgaattttttttaaaagcacaatattctcataagagctaagcatttctagttcgacggaaatggtttgtttctcttctgataggtagacaaaaggagctgatatccttctgcagtaaaagctaccttgcaagttaaggcactgttgaaaatgttatttgtaactccatttctctgaaatcagggctacttgctttatgttttagtcaacagtgtctcgcattctgattgatcatgtgaaggaatcatttatgggccccgtccctaagagaaacagaagaggagtcagaaagaaagatgcctgtgttttcctctgtggggcccgtgcacttcctggagagatgctacaatgcaatatacagcgctccatccccactggggaagctgctgtgatgagactagatgagccttcaacacactcagaaaatgcaacagcaatagggggcagacagctcctacctgtgtttctaggagcaaaagagagggaactaattgcccgtgaagacgccagtggaaggatcagcctcattctaagcaaaaacatagtattagtgatactcttactgccttatcttaaccaaggactaataggatacctttccattaaacaccagtgacttctcaggaaaaaaaaaaaaaaggagcaaaacaaatgatgtgtacacctgctttgttatggtccaccagtgaccagcttcaatgaggggaaccattctggagggctgcggtctcctgtgcaaacagacatgaggcagaagagtaaaaagaccaacccagtgggacctagaatactttgtaactctttaataactgaggtcaggaccgctcttctgccttccccttcccttaacgtgctttttcccatttccatgatttaaggcaatggtttttccagtatgtgacattttccttcctgtttttcaggtatatcaaagagtttacatattccaattcacatttttacatctgagacgggttttttaagttcataattatgaaagaaatatgtatattgagcttggggaaataaaaatggccttttcttaaattattattattggtaatacaacctcttcattaaataacaatgtagcatgaaaaatttatgattgaaatgtagttttcattccatattaagatacagtttctgagaagaatcattgaatggactagaatatgtcaaaaattgatcctgtgtagtttgggttcagggctgacttaaaataaagcacatcctgcaaagtcattttaagaat

SEQ ID NO: 287 - DNA, 10596 bp, Homo sapiens
ggagaagcgcgcgccgccggggagccccggctgcgccgcgagggcgaggctgcaaggcggcaggcggtggtcgcgctgggcgacgggacggcgctggtttttctcttgagttttaaattgaggcggtggaggagggagtgggagacccactcacccgatatgcgctctggtctccatttctccccacgctcgcgccgttccttcgagtgagggagggactcgcagcgccgcccgcgcaccggacccacaaggcgagccccgtggtggcggggatggttctgcgcgcctggcagctcccaccccggtctctccggcccgaagctggggggcgcaggggctgagctgcgctgcctctcggggatccgccgcgggccgcctgggggctggagggcgagacccggagcccgccgggcagctccgagagccggggccgaggccagagcgcggcagcctgcgtgggcagcggagacgaggccgggcaaaggagacgcggtggcttcagaggggcttccaagtagaaaactccccggccgcccccaaacgacgccccgggagccaggcgggagcacagcacgcccttcttgccccctttgctcgccgcgccgcctcccaggaccctcccaaagcgtccctctccaaggccccggcatcagctacccctgaagaagccgccgccgctgccggatccaggattcacactaaatgggccggccgcagggggccgggcgccgggctaggtggccgccaagagcctggtgaggggctacccagagcccggtgggcgaggggcggccaagagccccgggagcgtgccctcggggcggagagcgtcgcggcccgcgccgaggcgatgctcgggtggctgcgagctgccggcggcgagaggccatagacgggcatgggccttgcgtcccaccacccctagggaccctcgagcctcgcccctctgctccgactcgccggaccgacgcgatggcctcagaagtggtgtgcgggctcatcttcaggctgctgctgcccatctgcctggcagtagcatgtgcattccgatacaatgggctctcctttgtctaccttatctacctcttgctcattcctctgttctcagaaccaacaaaaacgacgatgcaaggacatacgggacggttattaaagtctctgtgcttcatcagtctttccttcctgttgctgcacatcattttccacatcacgttggtgagccttgaagctcaacatcgtattgcacctggctacaactgctcaacatgggaaaagacattccggcagatcggctttgaaagcttaaagggagctgatgctggcaatgggatcagagtgtttgtacctgacatcgggatgttcattgctagtctgaccatctggctcctctgtagaaacattgttcagaaacctgtgacagacgaagcagcacagagtaacccggagtttgaaaatgaagaattggctgaaggagaaaaaattgattcagaagaggcactgatctatgaagaggatttcaatggaggagatggtgttgaaggcgagttggaagaaagcacgaagttaaaaatgttccgcaggcttgcctctgtggcctctaagctcaaggagttcattggcaacatgatcaccactgctgggaaagtcgttgttaccatcttactgggctcctcgggcatgatgttgccgtctttgacatcatctgtgtatttttttgtatttttgggtctgtgcacctggtggtcctggtgccggacgttcgacccattgctgttcagctgtctctgtgttctgctggctattttcactgctggacatttgattggactttatttataccagttccaattctttcaagaggcagttccacccaatgactactatgcaaggttgtttggtatcaagtcagtaattcaaacggactgttcaagtacttggaagatcatagtgaacccggacctgtcgtggtaccaccacgccaaccctatcctcctgctggtgatgtactacactctggccactctgatccgcatctggctgcaagagccccttgtgcaggatgaggggaccaaagaagaggacaaagccctggcttgtagccccatccaaataacagcggggaggaggcggagcctgtggtacgcaacccattaccccactgatgagagaaaacttttatccatgacccaggatgactacaaaccatctgatggcctgctggtgactgtgaacggcaaccccgtggattaccacaccatccacccaagcctgcccatggagaacggccctggcaaagccgacctctactccacccctcagtaccggtgggagccctctgatgaatcctcagaaaagcgagaggaggaagaggaagagaaagaagaatttgaagaagaaaggagccgtgaggaaaaaagaagtatcaaagttcatgccatggtctccgtattccaatttattatgaaacaaagttacatctgtgccctcatagctatgatggcctggagcatcacctatcacagctggctgaccttcgtgctgctgatctggtcgtgcactctttggatgattcgcaacagaagaaaatatgccatgatcagctctcccttcatggtggtttatggaaacctattgttgatattacagtatatatggagttttgaacttcctgaaattaaaaaagttccaggatttttagaaaagaaagagccaggagaacttgcttccaaaatccttttcaccattactttttggctactgctgaggcagcacctcacagagcaaaaagctctgcaagaaaaggaagctcttttatcggaagtcaaaattggcagtcaggaaaatgaagaaaaagatgaggaacttcaagatatacaagtggaaggagagcccaaagaggaggaagaagaggaagcgaaggaagagaagcaagagagaaagaaggtagagcaagaggaagctgaagaagaagatgagcaggacatcatgaaagtcctgggcaatctggtggtggccatgttcatcaagtactggatctacgtctgcggaggcatgttcttcttcgtcagcttcgagggtaaaatcgtaatgtacaaaatcatctacatggtgctgttcctgttctgtgtggccctataccaggtgcactatgaatggtggaggaaaattctaaaatatttttggatgtcagtggttatttacactatgctggtgcttatctttatatacacatatcagtttgagaacttcccaggcctgtggcaaaatatgactggactgaaaaaagaaaagcttgaggatcttggcttaaagcagtttactgtggctgaactattcactcgcatattcatcccaacctcctttctgctggtgtgcattttacacctgcactacttccatgaccggttccttgaactcacagacctcaagtccattcccagcaaagaagacaacaccatctacagccatgccaaagtcaatggtcgcgtatatctaataataaatagcatcaagaaaaaattaccaatccaccaaaatgaactggcccacccggaaggaagcctcccggacctcaccatgatgcatctgactgccagcctggagaagccggaggtgaggaagttggctgagcctggggaggagaagcttgagggctactctgaaaaagcccagaagggtgatcttgggaaagacagcgaggagtcagaggaggacggagaggaagaggaggaatccgaggaggaggaagaaacatcagacttaaggaacaaatggcacctggtgattgaccgcctcactgtgctcttcttaaaattcctggagtattttcacaagctgcaggtgttcatgtggtggattttggagttgcacatcatcaaaatcgtttcctcttacattatctgggtttctgtgaaagaggtgtctctgttcaactatgtatttttgatttcttgggcttttgctctgccgtacgccaagctgcgccgtctggcttcaagtgtctgcacagtctggacgtgtgtgatcatcgtctgcaaaatgttgtaccagctccaaaccattaagcctgagaacttctctgttaactgttccttgccaaatgaaaatcaaacaaacatcccctttaatgagttgaacaagtctctgctctacagcgctcctatcgatcctacagagtgggtcggcctgcggaagtcttcgcctctgctagtctacctgaggaataacctcctgatgctggctatcctggcctttgaagtcaccatttaccgccatcaggaatactatcgaggtcgaaataacctgacggcccctgtgtctagaactatctttcatgacattacaagactacatctagatgatggacttattaattgtgccaaatatttcattaattacttcttttacaagtttggtctggagacctgtttcctaatgtcagttaacgtcattggccagcgaatggatttctatgccatgatccacgcctgctggctgatcgctgtcttatatagacgcagaaggaaagccatcgcagagatctggcccaagtactgctgcttcctggcatgcatcatcaccttccagtatttcatctgcattggcatcccacctgctccttgccgagattacccgtggagattcaagggtgccagcttcaatgacaacatcataaagtggctgtacttcccagatttcattgtgcggcccaaccctgtgtttctcgtctatgacttcatgctgcttctgtgtgcctccttacaacggcagatttttgaggatgagaacaaggctgcagtgcgaatcatggcaggtgacaatgtcgagatctgcatgaaccttgatgcggcctccttcagccaacataaccctgtgccagattttattcactgcagatcttacttagacatgtccaaagtgatcatcttcagctacctcttctggtttgtgctcaccatcatcttcatcactgggaccaccaggatcagcatcttttgcatggggtacctggtggcctgtttctacttcctgctctttgggggcgatttgctgttgaaacccatcaagagcatcctgcgctactgggactggctgatcgcatacaacgtttttgtgattacgatgaaaaatatcctgtcaataggagcatgtggatacattggaacattggtgcacaatagttgttggttgatccaggctttcagcctggcctgcacagtcaaaggctatcaaatgcctgctgctaattcaccctgtacacttcccagtggggaagcaggaatcatttgggacagcatatgttttgccttcctcctgctgcaaagaagagttttcatgagttattattttctacatgttgtggctgatataaaagcttcccagattctggcatcaagaggagctgaacttttccaggccacaattgtaaaagctgtaaaggcaagaattgaggaagagaagaagtccatggaccagctgaagcgacagatggatcgcatcaaggccaggcaacagaaatataaaaagggtaaggagaggatgctgagcttgacccaggagccaggggaaggccaggacatgcaaaaactctctgaagaggatgatgaaagagaagcagacaaacagaaagccaagggcaaaaaaaagcagtggtggcggccttgggttgatcatgcttccatggtcaggagtggagattattatttgtttgaaacggatagtgaagaggaggaagaggaagaattaaagaaggaagatgaagaacctccacgaaggtcagcattccagtttgtttatcaagcctggattactgatcctaaaacagcactccgacaaagacacaaagagaaaaaaaggtctgcaagagaagaacggaaacgaaggcggaaaggatccaaggagggtcctgtggaatgggaagaccgggaggatgaaccaatcaaaaagaaatccgatggaccagataatatcatcaagaggatatttaatattttgaaatttacctgggtcctatttctggcaacagtggacagtttcactacttggcttaactccatttcaagggagcatattgatatatctacagttctgagaattgaacgatgcatgctgaccagagaaattaagaagggcaatgttccaactcgggagagcatccacatgtactatcagaaccacatcatgaacctttccagagagtcgggactggacaccattgacgagcatcccggagctgcttcaggtgcacagacagcccacaggatggatagtttagattcacatgacagtatctccagcgagcccacgcagtgtaccatgctgtactcacgccaggggaccactgagaccatcgaggaggtggaggctgagcaggaggaggaggcagggagcacggcgcctgagcccagggaggccaaggagtacgaggccactgggtacgatgtgggagccatgggtgccgaggaggccagcctcaccccagaggaagagctgacacagttctccaccttggacggggatgtggaggccccaccctcctacagcaaggctgtgagcttcgagcatctgtccttcggctcgcaggacgactctgcaggcaagaaccgtatggcagtcagcccggacgacagccgcaccgacaagctggggtccagcatcttacctcccctgacccatgagctgacggccagcgagctgctgctgaaaaagatgtttcacgacgatgagcttgaagagtcagagaaattctacgtggggcagccccgatttctgctgctcttctatgccatgtacaataccctggtggcccgctcggagatggtgtgctacttcgtgatcatcctcaaccacatggtctctgcctccatgatcacgctcctgcttcccatcctcatcttcctctgggccatgttgtccgtccccaggcccagccgccggttctggatgatggccatcgtctatactgaggtggcaattgtagtcaagtatttcttccaatttgggttctttccctggaataagaatgtggaggtgaacaaagataaaccgtatcaccccccaaacatcataggagtggaaaagaaggaaggttatgttctctatgacctcatccagctcctggctctgttctttcatcgatcaattttgaagtgccatggcttatgggatgaagatgacatgactgaaagtggcatggccagggaggaatcagatgatgagctctccctcggtcatggcaggagggactcctccgattctctcaagtccatcaacctggccgcgtctgtggagtcagtgcatgtgaccttcccggagcagcagacagctgtccggaggaagcgctccggcagcagctccgagccatcccagagatccagcttttcttcaaacagatcccaaagaggcagcacaagcacccgaaacagcagtcaaaaaggaagcagtgttttgagtattaagcaaaaaggcaaaagggaactttatatggaaaagcttcaagaacatttaatcaaagcaaaagcctttaccataaagaagacgctggagatctatgtgcccatcaaacagttcttttacaacctcatccacccggagtatagcgccgtgactgacgtgtatgtactcatgttcctggctgacactgtggacttcatcatcattgtcttcggcttttgggcctttgggaaacactcagcagctgcagacatcacctcttcactgtcagaggaccaggtcccggggccgtttttggtgatggtcctcattcagtttggaaccatggtggtggaccgagccctctacctcaggaagactgtactgggaaaggtcatcttccaggtcattcttgtgttcggaattcacttctggatgttcttcatcttacctggtgtgactgagaggaaattcagccagaacctggttgcccagctttggtactttgtgaaatgtgtttacttcgggttgtctgcttaccagatccgttgtggctacccaacgcgagtcctggggaacttcctcaccaagagctacaattacgtcaacctcttcttattccaagggtttcgcctcgtgccctttttgactgagctgagggcagtgatggactgggtgtggacggacacaactttgagcctgtccagctggatctgtgtggaggacatctatgctcacatattcatcctgaagtgttggcgggagtcggagaagagataccctcagccacggggccagaagaagaagaaagtggtgaagtatggcatgggaggaatgatcatcgtcctgctcatctgcattgtctggtttcctcttctcttcatgtctttgatcaaatctgtggctggggtcatcaaccagcccctggacgtctccgtcacaattaccctgggagggtatcagcctattttcacaatgagtgcccaacaaagccagttgaaagttatggaccagcagagctttaacaaatttatacaagctttttctagggacaccggtgctatgcaatttctggaaaattatgaaaaagaagacataacagtagcagaactggaaggaaactcaaattctttgtggaccatcagcccacccagtaagcagaaaatgatacacgaactcctggaccccaatagtagcttctctgttgttttttcatggagtattcagagaaacttaagtctgggtgcaaaatcggaaatagcaacagataagctttcttttcctcttaaaaatattactcgaaagaatatcgctaaaatgatagcaggcaacagcacagaaagttcaaaaacaccagtgaccatagaaaagatttatccatattatgtgaaagcacctagtgattctaactcaaaacctataaagcaacttttatctgaaaataatttcatggatattaccatcattttgtccagagacaatacaactaaatataacagtgagtggtgggttctcaacctgactggaaacagaatatacaatccgaactctcaggccctggaactggtggtcttcaatgacaaagtcagtcccccaagtctggggttcctggctggctatggtattatgggattatatgcttcagttgtccttgtgattgggaaatttgtccgtgaattcttcagtgggatttctcactccatcatgtttgaagagcttccaaatgtggatcgaattttgaagttgtgcacagatatttttttagttcgagagacaggagaactggagctagaagaagatctctatgccaaattaatattcctatatcgctcaccagagacaatgatcaaatggactagagaaaaaacaaattgaaaccttagaacacagactgcaaataatgttaacatttgaattttttttaaaagcacaatattctcataagagctaagcatttctagttcgacggaaatggtttgtttctcttctgataggtagacaaaaggagctgatatccttctgcagtaaaagctaccttgcaagttaaggcactgttgaaaatgttatttgtaactccatttctctgaaatcagggctacttgctttatgttttagtcaacagtgtctcgcattctgattgatcatgtgaaggaatcatttatgggccccgtccctaagagaaacagaagaggagtcagaaagaaagatgcctgtgttttcctctgtggggcccgtgcacttcctggagagatgctacaatgcaatatacagcgctccatccccactggggaagctgctgtgatgagactagatgagccttcaacacactcagaaaatgcaacagcaatagggggcagacagctcctacctgtgtttctaggagcaaaagagagggaactaattgcccgtgaagacgccagtggaaggatcagcctcattctaagcaaaaacatagtattagtgatactcttactgccttatcttaaccaaggactaataggatacctttccattaaacaccagtgacttctcaggaaaaaaaaaaaaaaggagcaaaacaaatgatgtgtacacctgctttgttatggtccaccagtgaccagcttcaatgaggggaaccattctggagggctgcggtctcctgtgcaaacagacatgaggcagaagagtaaaaagaccaacccagtgggacctagaatactttgtaactctttaataactgaggtcaggaccgctcttctgccttccccttcccttaacgtgctttttcccatttccatgatttaaggcaatggtttttccagtatgtgacattttccttcctgtttttcaggtatatcaaagagtttacatattccaattcacatttttacatctgagacgggttttttaagttcataattatgaaagaaatatgtatattgagcttggggaaataaaaatggccttttcttaaattattattattggtaatacaacctcttcattaaataacaatgtagcatgaaaaatttatgattgaaatgtagttttcattccatattaagatacagtttctgagaagaatcattgaatggactagaatatgtcaaaaattgatcctgtgtagtttgggttcagggctgacttaaaataaagcacatcctgcaaagtcattttaagaat

SEQ ID NO: 288 - DNA, 10563 bp, Homo sapiens
ggagaagcgcgcgccgccggggagccccggctgcgccgcgagggcgaggctgcaaggcggcaggcggtggtcgcgctgggcgacgggacggcgctggtttttctcttgagttttaaattgaggcggtggaggagggagtgggagacccactcacccgatatgcgctctggtctccatttctccccacgctcgcgccgttccttcgagtgagggagggactcgcagcgccgcccgcgcaccggacccacaaggcgagccccgtggtggcggggatggttctgcgcgcctggcagctcccaccccggtctctccggcccgaagctggggggcgcaggggctgagctgcgctgcctctcggggatccgccgcgggccgcctgggggctggagggcgagacccggagcccgccgggcagctccgagagccggggccgaggccagagcgcggcagcctgcgtgggcagcggagacgaggccgggcaaaggagacgcggtggcttcagaggggcttccaagtagaaaactccccggccgcccccaaacgacgccccgggagccaggcgggagcacagcacgcccttcttgccccctttgctcgccgcgccgcctcccaggaccctcccaaagcgtccctctccaaggccccggcatcagctacccctgaagaagccgccgccgctgccggatccaggattcacactaaatgggccggccgcagggggccgggcgccgggctaggtggccgccaagagcctggtgaggggctacccagagcccggtgggcgaggggcggccaagagccccgggagcgtgccctcggggcggagagcgtcgcggcccgcgccgaggcgatgctcgggtggctgcgagctgccggcggcgagaggccatagacgggcatgggccttgcgtcccaccacccctagggaccctcgagcctcgcccctctgctccgactcgccggaccgacgcgatggcctcagaagtggtgtgcgggctcatcttcaggctgctgctgcccatctgcctggcagtagcatgtgcattccgatacaatgggctctcctttgtctaccttatctacctcttgctcattcctctgttctcagaaccaacaaaaacgacgatgcaaggacatacgggacggttattaaagtctctgtgcttcatcagtctttccttcctgttgctgcacatcattttccacatcacgttggtgagccttgaagctcaacatcgtattgcacctggctacaactgctcaacatgggaaaagacattccggcagatcggctttgaaagcttaaagggagctgatgctggcaatgggatcagagtgtttgtacctgacatcgggatgttcattgctagtctgaccatctggctcctctgtagaaacattgttcagaaacctgtgacagacgaagcagcacagagtaacccggagtttgaaaatgaagaattggctgaaggagaaaaaattgattcagaagaggcactgatctatgaagaggatttcaatggaggagatggtgttgaaggcgagttggaagaaagcacgaagttaaaaatgttccgcaggcttgcctctgtggcctctaagctcaaggagttcattggcaacatgatcaccactgctgggaaagtcgttgttaccatcttactgggctcctcgggcatgatgttgccgtctttgacatcatctgtgtatttttttgtatttttgggtctgtgcacctggtggtcctggtgccggacgttcgacccattgctgttcagctgtctctgtgttctgctggctattttcactgctggacatttgattggactttatttataccagttccaattctttcaagaggcagttccacccaatgactactatgcaaggttgtttggtatcaagtcagtaattcaaacggactgttcaagtacttggaagatcatagtgaacccggacctgtcgtggtaccaccacgccaaccctatcctcctgctggtgatgtactacactctggccactctgatccgcatctggctgcaagagccccttgtgcaggatgaggggaccaaagaagaggacaaagccctggcttgtagccccatccaaataacagcggggaggaggcggagcctgtggtacgcaacccattaccccactgatgagagaaaacttttatccatgacccaggatgactacaaaccatctgatggcctgctggtgactgtgaacggcaaccccgtggattaccacaccatccacccaagcctgcccatggagaacggccctggcaaagccgacctctactccacccctcagtaccggtgggagccctctgatgaatcctcagaaaagcgagaggaggaagaggaagagaaagaagaatttgaagaagaaaggagccgtgaggaaaaaagaagtatcaaagttcatgccatggtctccgtattccaatttattatgaaacaaagttacatctgtgccctcatagctatgatggcctggagcatcacctatcacagctggctgaccttcgtgctgctgatctggtcgtgcactctttggatgattcgcaacagaagaaaatatgccatgatcagctctcccttcatggtggtttatggaaacctattgttgatattacagtatatatggagttttgaacttcctgaaattaaaaaagttccaggatttttagaaaagaaagagccaggagaacttgcttccaaaatccttttcaccattactttttggctactgctgaggcagcacctcacagagcaaaaagctctgcaagaaaaggaagctcttttatcggaagtcaaaattggcagtcaggaaaatgaagaaaaagatgaggaacttcaagatatacaagtggaaggagagcccaaagaggaggaagaagaggaagcgaaggaagagaagcaagagagaaagaaggtagagcaagaggaagctgaagaagaagatgagcaggacatcatgaaagtcctgggcaatctggtggtggccatgttcatcaagtactggatctacgtctgcggaggcatgttcttcttcgtcagcttcgagggtaaaatcgtaatgtacaaaatcatctacatggtgctgttcctgttctgtgtggccctataccaggtgcactatgaatggtggaggaaaattctaaaatatttttggatgtcagtggttatttacactatgctggtgcttatctttatatacacatatcagtttgagaacttcccaggcctgtggcaaaatatgactggactgaaaaaagaaaagcttgaggatcttggcttaaagcagtttactgtggctgaactattcactcgcatattcatcccaacctcctttctgctggtgtgcattttacacctgcactacttccatgaccggttccttgaactcacagacctcaagtccattcccagcaaagaagacaacaccatctacagccatgccaaagtcaatggtcgcgtatatctaataataaatagactggcccacccggaaggaagcctcccggacctcaccatgatgcatctgactgccagcctggagaagccggaggtgaggaagttggctgagcctggggaggagaagcttgagggctactctgaaaaagcccagaagggtgatcttgggaaagacagcgaggagtcagaggaggacggagaggaagaggaggaatccgaggaggaggaagaaacatcagacttaaggaacaaatggcacctggtgattgaccgcctcactgtgctcttcttaaaattcctggagtattttcacaagctgcaggtgttcatgtggtggattttggagttgcacatcatcaaaatcgtttcctcttacattatctgggtttctgtgaaagaggtgtctctgttcaactatgtatttttgatttcttgggcttttgctctgccgtacgccaagctgcgccgtctggcttcaagtgtctgcacagtctggacgtgtgtgatcatcgtctgcaaaatgttgtaccagctccaaaccattaagcctgagaacttctctgttaactgttccttgccaaatgaaaatcaaacaaacatcccctttaatgagttgaacaagtctctgctctacagcgctcctatcgatcctacagagtgggtcggcctgcggaagtcttcgcctctgctagtctacctgaggaataacctcctgatgctggctatcctggcctttgaagtcaccatttaccgccatcaggaatactatcgaggtcgaaataacctgacggcccctgtgtctagaactatctttcatgacattacaagactacatctagatgatggacttattaattgtgccaaatatttcattaattacttcttttacaagtttggtctggagacctgtttcctaatgtcagttaacgtcattggccagcgaatggatttctatgccatgatccacgcctgctggctgatcgctgtcttatatagacgcagaaggaaagccatcgcagagatctggcccaagtactgctgcttcctggcatgcatcatcaccttccagtatttcatctgcattggcatcccacctgctccttgccgagattacccgtggagattcaagggtgccagcttcaatgacaacatcataaagtggctgtacttcccagatttcattgtgcggcccaaccctgtgtttctcgtctatgacttcatgctgcttctgtgtgcctccttacaacggcagatttttgaggatgagaacaaggctgcagtgcgaatcatggcaggtgacaatgtcgagatctgcatgaaccttgatgcggcctccttcagccaacataaccctgtgccagattttattcactgcagatcttacttagacatgtccaaagtgatcatcttcagctacctcttctggtttgtgctcaccatcatcttcatcactgggaccaccaggatcagcatcttttgcatggggtacctggtggcctgtttctacttcctgctctttgggggcgatttgctgttgaaacccatcaagagcatcctgcgctactgggactggctgatcgcatacaacgtttttgtgattacgatgaaaaatatcctgtcaataggagcatgtggatacattggaacattggtgcacaatagttgttggttgatccaggctttcagcctggcctgcacagtcaaaggctatcaaatgcctgctgctaattcaccctgtacacttcccagtggggaagcaggaatcatttgggacagcatatgttttgccttcctcctgctgcaaagaagagttttcatgagttattattttctacatgttgtggctgatataaaagcttcccagattctggcatcaagaggagctgaacttttccaggccacaattgtaaaagctgtaaaggcaagaattgaggaagagaagaagtccatggaccagctgaagcgacagatggatcgcatcaaggccaggcaacagaaatataaaaagggtaaggagaggatgctgagcttgacccaggagccaggggaaggccaggacatgcaaaaactctctgaagaggatgatgaaagagaagcagacaaacagaaagccaagggcaaaaaaaagcagtggtggcggccttgggttgatcatgcttccatggtcaggagtggagattattatttgtttgaaacggatagtgaagaggaggaagaggaagaattaaagaaggaagatgaagaacctccacgaaggtcagcattccagtttgtttatcaagcctggattactgatcctaaaacagcactccgacaaagacacaaagagaaaaaaaggtctgcaagagaagaacggaaacgaaggcggaaaggatccaaggagggtcctgtggaatgggaagaccgggaggatgaaccaatcaaaaagaaatccgatggaccagataatatcatcaagaggatatttaatattttgaaatttacctgggtcctatttctggcaacagtggacagtttcactacttggcttaactccatttcaagggagcatattgatatatctacagttctgagaattgaacgatgcatgctgaccagagaaattaagaagggcaatgttccaactcgggagagcatccacatgtactatcagaaccacatcatgaacctttccagagagtcgggactggacaccattgacgagcatcccggagctgcttcaggtgcacagacagcccacaggatggatagtttagattcacatgacagtatctccagcgagcccacgcagtgtaccatgctgtactcacgccaggggaccactgagaccatcgaggaggtggaggctgagcaggaggaggaggcagggagcacggcgcctgagcccagggaggccaaggagtacgaggccactgggtacgatgtgggagccatgggtgccgaggaggccagcctcaccccagaggaagagctgacacagttctccaccttggacggggatgtggaggccccaccctcctacagcaaggctgtgagcttcgagcatctgtccttcggctcgcaggacgactctgcaggcaagaaccgtatggcagtcagcccggacgacagccgcaccgacaagctggggtccagcatcttacctcccctgacccatgagctgacggccagcgagctgctgctgaaaaagatgtttcacgacgatgagcttgaagagtcagagaaattctacgtggggcagccccgatttctgctgctcttctatgccatgtacaataccctggtggcccgctcggagatggtgtgctacttcgtgatcatcctcaaccacatggtctctgcctccatgatcacgctcctgcttcccatcctcatcttcctctgggccatgttgtccgtccccaggcccagccgccggttctggatgatggccatcgtctatactgaggtggcaattgtagtcaagtatttcttccaatttgggttctttccctggaataagaatgtggaggtgaacaaagataaaccgtatcaccccccaaacatcataggagtggaaaagaaggaaggttatgttctctatgacctcatccagctcctggctctgttctttcatcgatcaattttgaagtgccatggcttatgggatgaagatgacatgactgaaagtggcatggccagggaggaatcagatgatgagctctccctcggtcatggcaggagggactcctccgattctctcaagtccatcaacctggccgcgtctgtggagtcagtgcatgtgaccttcccggagcagcagacagctgtccggaggaagcgctccggcagcagctccgagccatcccagagatccagcttttcttcaaacagatcccaaagaggcagcacaagcacccgaaacagcagtcaaaaaggaagcagtgttttgagtattaagcaaaaaggcaaaagggaactttatatggaaaagcttcaagaacatttaatcaaagcaaaagcctttaccataaagaagacgctggagatctatgtgcccatcaaacagttcttttacaacctcatccacccggagtatagcgccgtgactgacgtgtatgtactcatgttcctggctgacactgtggacttcatcatcattgtcttcggcttttgggcctttgggaaacactcagcagctgcagacatcacctcttcactgtcagaggaccaggtcccggggccgtttttggtgatggtcctcattcagtttggaaccatggtggtggaccgagccctctacctcaggaagactgtactgggaaaggtcatcttccaggtcattcttgtgttcggaattcacttctggatgttcttcatcttacctggtgtgactgagaggaaattcagccagaacctggttgcccagctttggtactttgtgaaatgtgtttacttcgggttgtctgcttaccagatccgttgtggctacccaacgcgagtcctggggaacttcctcaccaagagctacaattacgtcaacctcttcttattccaagggtttcgcctcgtgccctttttgactgagctgagggcagtgatggactgggtgtggacggacacaactttgagcctgtccagctggatctgtgtggaggacatctatgctcacatattcatcctgaagtgttggcgggagtcggagaagagataccctcagccacggggccagaagaagaagaaagtggtgaagtatggcatgggaggaatgatcatcgtcctgctcatctgcattgtctggtttcctcttctcttcatgtctttgatcaaatctgtggctggggtcatcaaccagcccctggacgtctccgtcacaattaccctgggagggtatcagcctattttcacaatgagtgcccaacaaagccagttgaaagttatggaccagcagagctttaacaaatttatacaagctttttctagggacaccggtgctatgcaatttctggaaaattatgaaaaagaagacataacagtagcagaactggaaggaaactcaaattctttgtggaccatcagcccacccagtaagcagaaaatgatacacgaactcctggaccccaatagtagcttctctgttgttttttcatggagtattcagagaaacttaagtctgggtgcaaaatcggaaatagcaacagataagctttcttttcctcttaaaaatattactcgaaagaatatcgctaaaatgatagcaggcaacagcacagaaagttcaaaaacaccagtgaccatagaaaagatttatccatattatgtgaaagcacctagtgattctaactcaaaacctataaagcaacttttatctgaaaataatttcatggatattaccatcattttgtccagagacaatacaactaaatataacagtgagtggtgggttctcaacctgactggaaacagaatatacaatccgaactctcaggccctggaactggtggtcttcaatgacaaagtcagtcccccaagtctggggttcctggctggctatggtattatgggattatatgcttcagttgtccttgtgattgggaaatttgtccgtgaattcttcagtgggatttctcactccatcatgtttgaagagcttccaaatgtggatcgaattttgaagttgtgcacagatatttttttagttcgagagacaggagaactggagctagaagaagatctctatgccaaattaatattcctatatcgctcaccagagacaatgatcaaatggactagagaaaaaacaaattgaaaccttagaacacagactgcaaataatgttaacatttgaattttttttaaaagcacaatattctcataagagctaagcatttctagttcgacggaaatggtttgtttctcttctgataggtagacaaaaggagctgatatccttctgcagtaaaagctaccttgcaagttaaggcactgttgaaaatgttatttgtaactccatttctctgaaatcagggctacttgctttatgttttagtcaacagtgtctcgcattctgattgatcatgtgaaggaatcatttatgggccccgtccctaagagaaacagaagaggagtcagaaagaaagatgcctgtgttttcctctgtggggcccgtgcacttcctggagagatgctacaatgcaatatacagcgctccatccccactggggaagctgctgtgatgagactagatgagccttcaacacactcagaaaatgcaacagcaatagggggcagacagctcctacctgtgtttctaggagcaaaagagagggaactaattgcccgtgaagacgccagtggaaggatcagcctcattctaagcaaaaacatagtattagtgatactcttactgccttatcttaaccaaggactaataggatacctttccattaaacaccagtgacttctcaggaaaaaaaaaaaaaaggagcaaaacaaatgatgtgtacacctgctttgttatggtccaccagtgaccagcttcaatgaggggaaccattctggagggctgcggtctcctgtgcaaacagacatgaggcagaagagtaaaaagaccaacccagtgggacctagaatactttgtaactctttaataactgaggtcaggaccgctcttctgccttccccttcccttaacgtgctttttcccatttccatgatttaaggcaatggtttttccagtatgtgacattttccttcctgtttttcaggtatatcaaagagtttacatattccaattcacatttttacatctgagacgggttttttaagttcataattatgaaagaaatatgtatattgagcttggggaaataaaaatggccttttcttaaattattattattggtaatacaacctcttcattaaataacaatgtagcatgaaaaatttatgattgaaatgtagttttcattccatattaagatacagtttctgagaagaatcattgaatggactagaatatgtcaaaaattgatcctgtgtagtttgggttcagggctgacttaaaataaagcacatcctgcaaagtcattttaagaat

SEQ ID NO: 289 - DNA, 10470 bp, Homo sapiens
ggagaagcgcgcgccgccggggagccccggctgcgccgcgagggcgaggctgcaaggcggcaggcggtggtcgcgctgggcgacgggacggcgctggtttttctcttgagttttaaattgaggcggtggaggagggagtgggagacccactcacccgatatgcgctctggtctccatttctccccacgctcgcgccgttccttcgagtgagggagggactcgcagcgccgcccgcgcaccggacccacaaggcgagccccgtggtggcggggatggttctgcgcgcctggcagctcccaccccggtctctccggcccgaagctggggggcgcaggggctgagctgcgctgcctctcggggatccgccgcgggccgcctgggggctggagggcgagacccggagcccgccgggcagctccgagagccggggccgaggccagagcgcggcagcctgcgtgggcagcggagacgaggccgggcaaaggagacgcggtggcttcagaggggcttccaagtagaaaactccccggccgcccccaaacgacgccccgggagccaggcgggagcacagcacgcccttcttgccccctttgctcgccgcgccgcctcccaggaccctcccaaagcgtccctctccaaggccccggcatcagctacccctgaagaagccgccgccgctgccggatccaggattcacactaaatgggccggccgcagggggccgggcgccgggctaggtggccgccaagagcctggtgaggggctacccagagcccggtgggcgaggggcggccaagagccccgggagcgtgccctcggggcggagagcgtcgcggcccgcgccgaggcgatgctcgggtggctgcgagctgccggcggcgagaggccatagacgggcatgggccttgcgtcccaccacccctagggaccctcgagcctcgcccctctgctccgactcgccggaccgacgcgatggcctcagaagtggtgtgcgggctcatcttcaggctgctgctgcccatctgcctggcagtagcatgtgcattccgatacaatgggctctcctttgtctaccttatctacctcttgctcattcctctgttctcagaaccaacaaaaacgacgatgcaaggacatacgggacggttattaaagtctctgtgcttcatcagtctttccttcctgttgctgcacatcattttccacatcacgttggtgagccttgaagctcaacatcgtattgcacctggctacaactgctcaacatgggaaaagacattccggcagatcggctttgaaagcttaaagggagctgatgctggcaatgggatcagagtgtttgtacctgacatcgggatgttcattgctagtctgaccatctggctcctctgtagaaacattgttcagaaacctgtgacagacgaagcagcacagagtaacccggagtttgaaaatgaagaattggctgaaggagaaaaaattgattcagaagaggcactgatctatgaagaggatttcaatggaggagatggtgttgaaggcgagttggaagaaagcacgaagttaaaaatgttccgcaggcttgcctctgtggcctctaagctcaaggagttcattggcaacatgatcaccactgctgggaaagtcgttgttaccatcttactgggctcctcgggcatgatgttgccgtctttgacatcatctgtgtatttttttgtatttttgggtctgtgcacctggtggtcctggtgccggacgttcgacccattgctgttcagctgtctctgtgttctgctggctattttcactgctggacatttgattggactttatttataccagttccaattctttcaagaggcagttccacccaatgactactatgcaaggttgtttggtatcaagtcagtaattcaaacggactgttcaagtacttggaagatcatagtgaacccggacctgtcgtggtaccaccacgccaaccctatcctcctgctggtgatgtactacactctggccactctgatccgcatctggctgcaagagccccttgtgcaggatgaggggaccaaagaagaggacaaagccctggcttgtagccccatccaaataacagcggggaggaggcggagcctgtggtacgcaacccattaccccactgatgagagaaaacttttatccatgacccaggatgactacaaaccatctgatggcctgctggtgactgtgaacggcaaccccgtggattaccacaccatccacccaagcctgcccatggagaacggccctggcaaagccgacctctactccacccctcagtaccggtgggagccctctgatgaatcctcagaaaagcgagaggaggaagaggaagagaaagaagaatttgaagaagaaaggagccgtgaggaaaaaagaagtatcaaagttcatgccatggtctccgtattccaatttattatgaaacaaagttacatctgtgccctcatagctatgatggcctggagcatcacctatcacagctggctgaccttcgtgctgctgatctggtcgtgcactctttggatgattcgcaacagaagaaaatatgccatgatcagctctcccttcatggtggtttatggaaacctattgttgatattacagtatatatggagttttgaacttcctgaaattaaaaaagttccaggatttttagaaaagaaagagccaggagaacttgcttccaaaatccttttcaccattactttttggctactgctgaggcagcacctcacagagcaaaaagctctgcaagaaaaggaagctcttttatcggaagtcaaaattggcagtcaggaaaatgaagaaaaagatgaggaacttcaagatatacaagtggaaggagagcccaaagaggaggaagaagaggaagcgaaggaagagaagcaagagagaaagaaggtagagcaagaggaagctgaagaagaagatgagcaggacatcatgaaagtcctgggcaatctggtggtggccatgttcatcaagtactggatctacgtctgcggaggcatgttcttcttcgtcagcttcgagggtaaaatcgtaatgtacaaaatcatctacatggtgctgttcctgttctgtgtggccctataccaggtgcactatgaatggtggaggaaaattctaaaatatttttggatgtcagtggttatttacactatgctggtgcttatctttatatacacatatcagtttgagaacttcccaggcctgtggcaaaatatgactggactgaaaaaagaaaagcttgaggatcttggcttaaagcagtttactgtggctgaactattcactcgcatattcatcccaacctcctttctgctggtgtgcattttacacctgcactacttccatgaccggttccttgaactcacagacctcaagtccattcccagcaaagaagacaacaccatctacagccatgccaaagtcaatggtcgcgtatatctaataataaataggatctcacacagtcttcccacggttgccaatcgacagttcgcatcagtaactctcagcatcaagaaaaaattaccaatccaccaaaatgaactggcccacccggaaggaagcctcccggacctcaccatgatgcatctgactgccagcctggagaagccggaggtgaggaagttggctgagcctggggaggagaagcttgagggctactctgaaaaagcccagaagggtgatcttgggaaagacagcgaggagtcagaggaggacggagaggaagaggaggaatccgaggaggaggaagaaacatcagacttaaggaacaaatggcacctggtgattgaccgcctcactgtgctcttcttaaaattcctggagtattttcacaagctgcaggtgttcatgtggtggattttggagttgcacatcatcaaaatcgtttcctcttacattatctgggtttctgtgaaagaggtgtctctgttcaactatgtatttttgatttcttgggcttttgctctgccgtacgccaagctgcgccgtctggcttcaagtgtctgcacagtctggacgtgtgtgatcatcgtctgcaaaatgttgtaccagctccaaaccattaagcctgagaacttctctgttaactgttccttgccaaatgaaaatcaaacaaacatcccctttaatgagttgaacaagtctctgctctacagcgctcctatcgatcctacagagtgggtcggcctgcggaagtcttcgcctctgctagtctacctgaggaataacctcctgatgctggctatcctggcctttgaagtcaccatttaccgccatcaggaatactatcgaggtcgaaataacctgacggcccctgtgtctagaactatctttcatgacattacaagactacatctagatgatggacttattaattgtgccaaatatttcattaattacttcttttacaagtttggtctggagacctgtttcctaatgtcagttaacgtcattggccagcgaatggatttctatgccatgatccacgcctgctggctgatcgctgtcttatatagacgcagaaggaaagccatcgcagagatctggcccaagtactgctgcttcctggcatgcatcatcaccttccagtatttcatctgcattggcatcccacctgctccttgccgagattacccgtggagattcaagggtgccagcttcaatgacaacatcataaagtggctgtacttcccagatttcattgtgcggcccaaccctgtgtttctcgtctatgacttcatgctgcttctgtgtgcctccttacaacggcagatttttgaggatgagaacaaggctgcagtgcgaatcatggcaggtgacaatgtcgagatctgcatgaaccttgatgcggcctccttcagccaacataaccctgtgccagattttattcactgcagatcttacttagacatgtccaaagtgatcatcttcagctacctcttctggtttgtgctcaccatcatcttcatcactgggaccaccaggatcagcatcttttgcatggggtacctggtggcctgtttctacttcctgctctttgggggcgatttgctgttgaaacccatcaagagcatcctgcgctactgggactggctgatcgcatacaacgtttttgtgattacgatgaaaaatatcctgtcaataggagcatgtggatacattggaacattggtgcacaatagttgttggttgatccaggctttcagcctggcctgcacagtcaaaggctatcaaatgcctgctgctaattcaccctgtacacttcccagtggggaagcaggaatcatttgggacagcatatgttttgccttcctcctgctgcaaagaagagttttcatgagttattattttctacatgttgtggctgatataaaagcttcccagattctggcatcaagaggagctgaacttttccaggccacaattgtaaaagctgtaaaggcaagaattgaggaagagaagaagtccatggaccagctgaagcgacagatggatcgcatcaaggccaggcaacagaaatataaaaagggtaaggagaggatgctgagcttgacccaggagccaggggaaggccaggacatgcaaaaactctctgaagaggatgatgaaagagaagcagacaaacagaaagccaagggcaaaaaaaagcagtggtggcggccttgggttgatcatgcttccatggtcaggagtggagattattatttgtttgaaacggatagtgaagaggaggaagaggaagaattaaagaaggaagatgaagaacctccacgaaggtcagcattccagtttgtttatcaagcctggattactgatcctaaaacagcactccgacaaagacacaaagagaaaaaaaggtctgcaagagaagaacggaaacgaaggcggaaaggatccaaggagggtcctgtggaatgggaagaccgggaggatgaaccaatcaaaaagaaatccgatggaccagataatatcatcaagaggatatttaatattttgaaatttacctgggtcctatttctggcaacagtggacagtttcactacttggcttaactccatttcaagggagcatattgatatatctacagttctgagaattgaacgatgcatgctgaccagagaaattaagaagggcaatgttccaactcgggagagcatccacatgtactatcagaaccacatcatgaacctttccagagagtcgggactggacaccattgacgagcatcccggagctgcttcaggtgcacagacagcccacaggatggatagtttagattcacatgacagtatctccagcgagcccacgcagtgtaccatgctgtactcacgccaggggaccactgagaccatcgaggaggtggaggctgagcaggaggaggaggcagggagcacggcgcctgagcccagggaggccaaggagtacgaggccactgggtacgatgtgggagccatgggtgccgaggaggccagcctcaccccagaggaagagctgacacagttctccaccttggacggggatgtggaggccccaccctcctacagcaaggctgtgagcttcgagcatctgtccttcggctcgcaggacgactctgcaggcaagaaccgtatggcagtcagcccggacgacagccgcaccgacaagctggggtccagcatcttacctcccctgacccatgagctgacggccagcgagctgctgctgaaaaagatgtttcacgacgatgagcttgaagagtcagagaaattctacgtggggcagccccgatttctgctgctcttctatgccatgtacaataccctggtggcccgctcggagatggtgtgctacttcgtgatcatcctcaaccacatggtctctgcctccatgatcacgctcctgcttcccatcctcatcttcctctgggccatgttgtccgtccccaggcccagccgccggttctggatgatggccatcgtctatactgagtgccatggcttatgggatgaagatgacatgactgaaagtggcatggccagggaggaatcagatgatgagctctccctcggtcatggcaggagggactcctccgattctctcaagtccatcaacctggccgcgtctgtggagtcagtgcatgtgaccttcccggagcagcagacagctgtccggaggaagcgctccggcagcagctccgagccatcccagagatccagcttttcttcaaacagatcccaaagaggcagcacaagcacccgaaacagcagtcaaaaaggaagcagtgttttgagtattaagcaaaaaggcaaaagggaactttatatggaaaagcttcaagaacatttaatcaaagcaaaagcctttaccataaagaagacgctggagatctatgtgcccatcaaacagttcttttacaacctcatccacccggagtatagcgccgtgactgacgtgtatgtactcatgttcctggctgacactgtggacttcatcatcattgtcttcggcttttgggcctttgggaaacactcagcagctgcagacatcacctcttcactgtcagaggaccaggtcccggggccgtttttggtgatggtcctcattcagtttggaaccatggtggtggaccgagccctctacctcaggaagactgtactgggaaaggtcatcttccaggtcattcttgtgttcggaattcacttctggatgttcttcatcttacctggtgtgactgagaggaaattcagccagaacctggttgcccagctttggtactttgtgaaatgtgtttacttcgggttgtctgcttaccagatccgttgtggctacccaacgcgagtcctggggaacttcctcaccaagagctacaattacgtcaacctcttcttattccaagggtttcgcctcgtgccctttttgactgagctgagggcagtgatggactgggtgtggacggacacaactttgagcctgtccagctggatctgtgtggaggacatctatgctcacatattcatcctgaagtgttggcgggagtcggagaagagataccctcagccacggggccagaagaagaagaaagtggtgaagtatggcatgggaggaatgatcatcgtcctgctcatctgcattgtctggtttcctcttctcttcatgtctttgatcaaatctgtggctggggtcatcaaccagcccctggacgtctccgtcacaattaccctgggagggtatcagcctattttcacaatgagtgcccaacaaagccagttgaaagttatggaccagcagagctttaacaaatttatacaagctttttctagggacaccggtgctatgcaatttctggaaaattatgaaaaagaagacataacagtagcagaactggaaggaaactcaaattctttgtggaccatcagcccacccagtaagcagaaaatgatacacgaactcctggaccccaatagtagcttctctgttgttttttcatggagtattcagagaaacttaagtctgggtgcaaaatcggaaatagcaacagataagctttcttttcctcttaaaaatattactcgaaagaatatcgctaaaatgatagcaggcaacagcacagaaagttcaaaaacaccagtgaccatagaaaagatttatccatattatgtgaaagcacctagtgattctaactcaaaacctataaagcaacttttatctgaaaataatttcatggatattaccatcattttgtccagagacaatacaactaaatataacagtgagtggtgggttctcaacctgactggaaacagaatatacaatccgaactctcaggccctggaactggtggtcttcaatgacaaagtcagtcccccaagtctggggttcctggctggctatggtattatgggattatatgcttcagttgtccttgtgattgggaaatttgtccgtgaattcttcagtgggatttctcactccatcatgtttgaagagcttccaaatgtggatcgaattttgaagttgtgcacagatatttttttagttcgagagacaggagaactggagctagaagaagatctctatgccaaattaatattcctatatcgctcaccagagacaatgatcaaatggactagagaaaaaacaaattgaaaccttagaacacagactgcaaataatgttaacatttgaattttttttaaaagcacaatattctcataagagctaagcatttctagttcgacggaaatggtttgtttctcttctgataggtagacaaaaggagctgatatccttctgcagtaaaagctaccttgcaagttaaggcactgttgaaaatgttatttgtaactccatttctctgaaatcagggctacttgctttatgttttagtcaacagtgtctcgcattctgattgatcatgtgaaggaatcatttatgggccccgtccctaagagaaacagaagaggagtcagaaagaaagatgcctgtgttttcctctgtggggcccgtgcacttcctggagagatgctacaatgcaatatacagcgctccatccccactggggaagctgctgtgatgagactagatgagccttcaacacactcagaaaatgcaacagcaatagggggcagacagctcctacctgtgtttctaggagcaaaagagagggaactaattgcccgtgaagacgccagtggaaggatcagcctcattctaagcaaaaacatagtattagtgatactcttactgccttatcttaaccaaggactaataggatacctttccattaaacaccagtgacttctcaggaaaaaaaaaaaaaaggagcaaaacaaatgatgtgtacacctgctttgttatggtccaccagtgaccagcttcaatgaggggaaccattctggagggctgcggtctcctgtgcaaacagacatgaggcagaagagtaaaaagaccaacccagtgggacctagaatactttgtaactctttaataactgaggtcaggaccgctcttctgccttccccttcccttaacgtgctttttcccatttccatgatttaaggcaatggtttttccagtatgtgacattttccttcctgtttttcaggtatatcaaagagtttacatattccaattcacatttttacatctgagacgggttttttaagttcataattatgaaagaaatatgtatattgagcttggggaaataaaaatggccttttcttaaattattattattggtaatacaacctcttcattaaataacaatgtagcatgaaaaatttatgattgaaatgtagttttcattccatattaagatacagtttctgagaagaatcattgaatggactagaatatgtcaaaaattgatcctgtgtagtttgggttcagggctgacttaaaataaagcacatcctgcaaagtcattttaagaat

SEQ ID NO: 290 - DNA, 8851 bp, Homo sapiens
tggagaagcgcgcgccgccggggagccccggctgcgccgcgagggcgaggctgcaaggcggcaggcggtggtcgcgctgggcgacgggacggcgctggtttttctcttgagttttaaattgaggcggtggaggagggagtgggagacccactcacccgatatgcgctctggtctccatttctccccacgctcgcgccgttccttcgagtgagggagggactcgcagcgccgcccgcgcaccggacccacaaggcgagccccgtggtggcggggatggttctgcgcgcctggcagctcccaccccggtctctccggcccgaagctggggggcgcaggggctgagctgcgctgcctctcggggatccgccgcgggccgcctgggggctggagggcgagacccggagcccgccgggcagctccgagagccggggccgaggccagagcgcggcagcctgcgtgggcagcggagacgaggccgggcaaaggagacgcggtggcttcagaggggcttccaagtagaaaactccccggccgcccccaaacgacgccccgggagccaggcgggagcacagcacgcccttcttgccccctttgctcgccgcgccgcctcccaggaccctcccaaagcgtccctctccaaggccccggcatcagctacccctgaagaagccgccgccgctgccggatccaggattcacactaaatgggccggccgcagggggccgggcgccgggctaggtggccgccaagagcctggtgaggggctacccagagcccggtgggcgaggggcggccaagagccccgggagcgtgccctcggggcggagagcgtcgcggcccgcgccgaggcgatgctcgggtggctgcgagctgccggcggcgagaggccatagacgggcatgggccttgcgtcccaccacccctagggaccctcgagcctcgcccctctgctccgactcgccggaccgacgcgatggcctcagaagtggtgtgcgggctcatcttcaggctgctgctgcccatctgcctggcagtagcatgtgcattccgatacaatgggctctcctttgtctaccttatctacctcttgctcattcctctgttctcagaaccaacaaaaacgacgatgcaaggacatacgggacggttattaaagtctctgtgcttcatcagtctttccttcctgttgctgcacatcattttccacatcacgttggtgagccttgaagctcaacatcgtattgcacctggctacaactgctcaacatgggaaaagacattccggcagatcggctttgaaagcttaaagggagctgatgctggcaatgggatcagagtgtttgtacctgacatcgggatgttcattgctagtctgaccatctggctcctctgtagaaacattgttcagaaacctgtgacagacgaagcagcacagagtaacccggagtttgaaaatgaagaattggctgaaggagaaaaaattgattcagaagaggcactgatctatgaagaggatttcaatggaggagatggtgttgaaggcgagttggaagaaagcacgaagttaaaaatgttccgcaggcttgcctctgtggcctctaagctcaaggagttcattggcaacatgatcaccactgctgggaaagtcgttgttaccatcttactgggctcctcgggcatgatgttgccgtctttgacatcatctgtgtatttttttgtatttttgggtctgtgcacctggtggtcctggtgccggacgttcgacccattgctgttcagctgtctctgtgttctgctggctattttcactgctggacatttgattggactttatttataccagttccaattctttcaagaggcagttccacccaatgactactatgcaaggttgtttggtatcaagtcagtaattcaaacggactgttcaagtacttggaagatcatagtgaacccggacctgtcgtggtaccaccacgccaaccctatcctcctgctggtgatgtactacactctggccactctgatccgcatctggctgcaagagccccttgtgcaggatgaggggaccaaagaagaggacaaagccctggcttgtagccccatccaaataacagcggggaggaggcggagcctgtggtacgcaacccattaccccactgatgagagaaaacttttatccatgacccaggatgactacaaaccatctgatggcctgctggtgactgtgaacggcaaccccgtggattaccacaccatccacccaagcctgcccatggagaacggccctggcaaagccgacctctactccacccctcagtaccggtgggagccctctgatgaatcctcagaaaagcgagaggaggaagaggaagagaaagaagaatttgaagaagaaaggagccgtgaggaaaaaagaagtatcaaagttcatgccatggtctccgtattccaatttattatgaaacaaagttacatctgtgccctcatagctatgatggcctggagcatcacctatcacagctggctgaccttcgtgctgctgatctggtcgtgcactctttggatgattcgcaacagaagaaaatatgccatgatcagctctcccttcatggtggtttatggaaacctattgttgatattacagtatatatggagttttgaacttcctgaaattaaaaaagttccaggatttttagaaaagaaagagccaggagaacttgcttccaaaatccttttcaccattactttttggctactgctgaggcagcacctcacagagcaaaaagctctgcaagaaaaggaagctcttttatcggaagtcaaaattggcagtcaggaaaatgaagaaaaagatgaggaacttcaagatatacaagtggaaggagagcccaaagaggaggaagaagaggaagcgaaggaagagaagcaagagagaaagaaggtagagcaagaggaagctgaagaagaagatgagcaggacatcatgaaagtcctgggcaatctggtggtggccatgttcatcaagtactggatctacgtctgcggaggcatgttcttcttcgtcagcttcgagggtaaaatcgtaatgtacaaaatcatctacatggtgctgttcctgttctgtgtggccctataccaggtgcactatgaatggtggaggaaaattctaaaatatttttggatgtcagtggttatttacactatgctggtgcttatctttatatacacatatcagtttgagaacttcccaggcctgtggcaaaatatgactggactgaaaaaagaaaagcttgaggatcttggcttaaagcagtttactgtggctgaactattcactcgcatattcatcccaacctcctttctgctggtgtgcattttacacctgcactacttccatgaccggttccttgaactcacagacctcaagtccattcccagcaaagaagacaacaccatctacagccatgccaaagtcaatggtcgcgtatatctaataataaataggatctcacacagtcttcccacggttgccaatcgacagttcgcatcagtaactctcagcatcaagaaaaaattaccaatccaccaaaatgaactggcccacccggaaggaagcctcccggacctcaccatgatgcatctgactgccagcctggagaagccggaggtgaggaagttggctgagcctggggaggagaagcttgagggctactctgaaaaagcccagaagggtgatcttgggaaagacagcgaggagtcagaggaggacggagaggaagaggaggaatccgaggaggaggaagaaacatcagacttaaggaacaaatggcacctggtgattgaccgcctcactgtgctcttcttaaaattcctggagtattttcacaagctgcaggtgttcatgtggtggattttggagttgcacatcatcaaaatcgtttcctcttacattatctgggtttctgtgaaagaggtgtctctgttcaactatgtatttttgatttcttgggcttttgctctgccgtacgccaagctgcgccgtctggcttcaagtgtctgcacagtctggacgtgtgtgatcatcgtctgcaaaatgttgtaccagctccaaaccattaagcctgagaacttctctgttaactgttccttgccaaatgaaaatcaaacaaacatcccctttaatgagttgaacaagtctctgctctacagcgctcctatcgatcctacagagtgggtcggcctgcggaagtcttcgcctctgctagtctacctgaggaataacctcctgatgctggctatcctggcctttgaagtcaccatttaccgccatcaggaatactatcgaggtcgaaataacctgacggcccctgtgtctagaactatctttcatgacattacaagactacatctagatgatggacttattaattgtgccaaatatttcattaattacttcttttacaagtttggtctggagacctgtttcctaatgtcagttaacgtcattggccagcgaatggatttctatgccatgatccacgcctgctggctgatcgctgtcttatatagacgcagaaggaaagccatcgcagagatctggcccaagtactgctgcttcctggcatgcatcatcaccttccagtatttcatctgcattggcatcccacctgctccttgccgagattacccgtggagattcaagggtgccagcttcaatgacaacatcataaagtggctgtacttcccagatttcattgtgcggcccaaccctgtgtttctcgtctatgacttcatgctgcttctgtgtgcctccttacaacggcagatttttgaggatgagaacaaggctgcagtgcgaatcatggcaggtgacaatgtcgagatctgcatgaaccttgatgcggcctccttcagccaacataaccctgtgccagattttattcactgcagatcttacttagacatgtccaaagtgatcatcttcagctacctcttctggtttgtgctcaccatcatcttcatcactgggaccaccaggatcagcatcttttgcatggggtacctggtggcctgtttctacttcctgctctttgggggcgatttgctgttgaaacccatcaagagcatcctgcgctactgggactggctgatcgcatacaacgtttttgtgattacgatgaaaaatatcctgtcaataggagcatgtggatacattggaacattggtgcacaatagttgttggttgatccaggctttcagcctggcctgcacagtcaaaggctatcaaatgcctgctgctaattcaccctgtacacttcccagtggggaagcaggaatcatttgggacagcatatgttttgccttcctcctgctgcaaagaagagttttcatgagttattattttctacatgttgtggctgatataaaagcttcccagattctggcatcaagaggagctgaacttttccaggccacaattgtaaaagctgtaaaggcaagaattgaggaagagaagaagtccatggaccagctgaagcgacagatggatcgcatcaaggccaggcaacagaaatataaaaagggtaaggagaggatgctgagcttgacccaggagccaggggaaggccaggacatgcaaaaactctctgaagaggatgatgaaagagaagcagacaaacagaaagccaagggcaaaaaaaagcagtggtggcggccttgggttgatcatgcttccatggtcaggagtggagattattatttgtttgaaacggatagtgaagaggaggaagaggaagaattaaagaaggaagatgaagaacctccacgaaggtcagcattccagtttgtttatcaagcctggattactgatcctaaaacagcactccgacaaagacacaaagagaaaaaaaggtctgcaagagaagaacggaaacgaaggcggaaaggatccaaggagggtcctgtggaatgggaagaccgggaggatgaaccaatcaaaaagaaatccgatggaccagataatatcatcaagaggatatttaatattttgaaatttacctgggtcctatttctggcaacagtggacagtttcactacttggcttaactccatttcaagggagcatattgatatatctacagttctgagaattgaacgatgcatgctgaccagagaaattaagaagggcaatgttccaactcgggagagcatccacatgtactatcagaaccacatcatgaacctttccagagagtcgggactggacaccattgacgagcatcccggagctgcttcaggtgcacagacagcccacaggatggatagtttagattcacatgacagtatctccagcgagcccacgcagtgtaccatgctgtactcacgccaggggaccactgagaccatcgaggaggtggaggctgagcaggaggaggaggcagggagcacggcgcctgagcccagggaggccaaggagtacgaggccactgggtacgatgtgggagccatgggtgccgaggaggccagcctcaccccagaggaagagctgacacagttctccaccttggacggggatgtggaggccccaccctcctacagcaaggctgtgagcttcgagcatctgtccttcggctcgcaggacgactctgcaggcaagaaccgtatggcagtcagcccggacgacagccgcaccgacaagctggggtccagcatcttacctcccctgacccatgagctgacggccagcgagctgctgctgaaaaagatgtttcacgacgatgagcttgaagagtcagagaaattctacgtggggcagccccgatttctgctgctcttctatgccatgtacaataccctggtggcccgctcggagatggtgtgctacttcgtgatcatcctcaaccacatggtctctgcctccatgatcacgctcctgcttcccatcctcatcttcctctgggccatgttgtccgtccccaggcccagccgccggttctggatgatggccatcgtctatactgaggtggcaattgtagtcaagtatttcttccaatttgggttctttccctggaataagaatgtggaggtgaacaaagataaaccgtatcaccccccaaacatcataggagtggaaaagaaggaaggttatgttctctatgacctcatccagctcctggctctgttctttcatcgatcaattttgaagtgccatggcttatgggatgaagatgacatgactgaaagtggcatggccagggaggaatcagatgatgagctctccctcggtcatggcaggagggactcctccgattctctcaagtccatcaacctggccgcgtctgtggagtcagtgcatgtgaccttcccggagcagcagacagctgtccggaggaagcgctccggcagcagctccgagccatcccagagatccagcttttcttcaaacagatcccaaagaggcagcacaagcacccgaaacagcagtcaaaaaggaagcagtgttttgagtattaagcaaaaaggcaaaagggaactttatatggaaaagcttcaagaacatttaatcaaagcaaaagcctttaccataaagaagacgctggagatctatgtgcccatcaaacagttcttttacaacctcatccacccggagtatagcgccgtgactgacgtgtatgtactcatgttcctggctgacactgtggacttcatcatcattgtcttcggcttttgggcctttgggaaacactcagcagctgcagacatcacctcttcactgtcagaggaccaggtcccggggccgtttttggtgatggtcctcattcagtttggaaccatggtggtggaccgagccctctacctcaggaagactgtactgggaaaggtcatcttccaggtcattcttgtgttcggaattcacttctggatgttcttcatcttacctggtgtgactgagaggaaattcagccagaacctggttgcccagctttggtactttgtgaaatgtgtttacttcgggttgtctgcttaccagatccgttgtggctacccaacgcgagtcctggggaacttcctcaccaagagctacaattacgtcaacctcttcttattccaagggtttcgcctcgtgccctttttgactgagctgagggcagtgatggactgggtgtggacggacacaactttgagcctgtccagctggatctgtgtggaggacatctatgctcacatattcatcctgaagtgttggcgggagtcggagaagagataccctcagccacggggccagaagaagaagaaagtggtgaagtatggcatgggaggaatgatcatcgtcctgctcatctgcattgtctggtttcctcttctcttcatgtctttgatcaaatctgtggctggggtcatcaaccagcccctggacgtctccgtcacaattaccctgggagggtatcagcctattttcacaatgagtgcccaacaaagccagttgaaagttatggaccagcagagctttaacaaatttatacaagctttttctagggacaccggtgctatgcaatttctggaaaattatgaaaaagaagacataacagtagcagaactggaaggaaactcaaattctttgtggaccatcagcccacccaaaacttaagtctgggtgcaaaatcggaaatagcaacagataagctttcttttcctcttaaaaatattactcgaaagaatatcgctaaaatgatagcaggcaacagcacagaaagttcaaaaacaccagtgaccatagaaaagatttatccatattatgtgaaagcacctagtgattctaactcaaaacctataaagcaacttttatctg

SEQ ID NO: 291 - DNA, 3344 bp, Homo sapiens
acctggctccgccccccaggacgccgagcctcggccgggcggtaaaatcggcgcttaccctttaagcggcgggacttctggtcacgtcgtccgcggtcgccggaaggggaagtttcgcctcagaaggctgcctcgctggtccgaattcggtggcgccacgtccgcccgtctccgccttctgcatcgcggcttcggcggcttccacctagacacctaacagtcgcggagccggccgcgtcgtgagggggtcggcacggggagtcgggcggtcttgtgcatcttggctacctgtgggtcgaagatgtcggacatcggagactggttcaggagcatcccggcgatcacgcgctattggttcgccgccaccgtcgccgtgcccttggtcggcaaactcggcctcatcagcccggcctacctcttcctctggcccgaagccttcctttatcgctttcagatttggaggccaatcactgccaccttttatttccctgtgggtccaggaactggatttctttatttggtcaatttatatttcttatatcagtattctacgcgacttgaaacaggagcttttgatgggaggccagcagactatttattcatgctcctctttaactggatttgcatcgtgattactggcttagcaatggatatgcagttgctgatgattcctctgatcatgtcagtactttatgtctgggcccagctgaacagagacatgattgtatcattttggtttggaacacgatttaaggcctgctatttaccctgggttatccttggattcaactatatcatcggaggctcggtaatcaatgagcttattggaaatctggttggacatctttattttttcctaatgttcagatacccaatggacttgggaggaagaaattttctatccacacctcagtttttgtaccgctggctgcccagtaggagaggaggagtatcaggatttggtgtgccccctgctagcatgaggcgagctgctgatcagaatggcggaggcgggagacacaactggggccagggctttcgacttggagaccagtgaaggggcggcctcgggcagccgctcctctcaagccacatttcctcccagtgctgggtgcacttaacaactgcgttctggctaacactgttggacctgacccacactgaatgtagtctttcagtacgagacaaagtttcttaaatcccgaagaaaaatataagtgttccacaagtttcacgattctcattcaagtccttactgctgtgaagaacaaataccaactgtgcaaattgcaaaactgactacattttttggtgtcttctcttctcccctttccgtctgaataatgggttttagcgggtcctagtctgctggcattgagctggggctgggtcaccaaacccttcccaaaaggacccttatctctttcttgcacacatgcctctctcccacttttcccaacccccacatttgcaactagaagaggttgcccataaaattgctctgcccttgacaggttctgttatttattgacttttgccaaggcttggtcacaacaatcatattcacgtaattttccccctttggtggcagaactgtagcaatagggggagaagacaagcagcggatgaagcgttttctcagcttttggaattgcttcgacctgacatccgttgtaaccgtttgccacttcttcagatatttttataaaaaagtaccactgagtcagtgagggccacagattggtattaatgagatacgagggttgttgctgggtgtttgtttcctgagctaagtgatcaagactgtagtggagttgcagctaacatgggttaggtttaaaccatgggggatgcaacccctttgcgtttcatatgtaggcctactggctttgtgtagctggagtagttgggttgctttgtgttaggaggatccagatcatgttggctacagggagatgctctctttgagaggctcctgggcattgattccatttcaatctcattctggatatgtgttcattgagtaaaggaggagagaccctcatacgctatttaaatgtcacttttttgcctatcccccgttttttggtcatgtttcaattaattgtgaggaaggcgcagctcctctctgcacgtagatcattttttaaagctaatgtaagcacatctaagggaataacatgatttaaggttgaaatggctttagaatcatttgggtttgagggtgtgttattttgagtcatgaatgtacaagctctgtgaatcagaccagcttaaatacccacacctttttttcgtaggtgggcttttcctatcagagcttggctcataaccaaataaagttttttgaaggccatggcttttcacacagttattttattttatgacgttatctgaaagcagactgttaggagcagtattgagtggctgtcacactttgaggcaactaaaaaggcttcaaacgttttgatcagtttcttttcaggaaacattgtgctctaacagtatgactattctttcccccactcttaaacagtgtgatgtgtgttatcctaggaaatgagagttggcaaacaacttctcattttgaatagagtttgtgtgtacctctccatatttaatttatatgataaaataggtggggagagtctgaaccttaactgtcatgttttgttgttcatctgtggccacaataaagtttacttgtaaaattttagaggccattactccaattatgttgcacgtacactcattgtacaggcgtggagactcattgtatgtataagaatattctgacagtgagtgacccggagtctctggtgtaccctcttaccagtcagctgcctgcgagcagtcattttttcctaaaggtttacaagtatttagaactcttcagttcagggcaaaatgttcatgaagttattcctcttaaacatggttaggaagctgatgacgttattgattttgtctggattatgtttctggaataattttaccaaaacaagctatttgagttttgacttgacaaggcaaaacatgacagtggattctctttacaaatggaaaaaaaaaatccttattttgtataaaggacttccctttttgtaaactaatcctttttattggtaaaaattgtaaattaaaatgtgcaacttgaaggttgtctgtgttaagtttccatgtccctgctctgctgtctcttagatatcacataatttgtgtaaccaattatctcttgaagagcatttaggaagtacccagtattttttgctggattaattcctggatgcagaattcctgggttttcattttaatgaaggaggatgcttgctaactttgaaaaa

SEQ ID NO: 292 - DNA, 3284 bp, Homo sapiens
acctggctccgccccccaggacgccgagcctcggccgggcggtaaaatcggcgcttaccctttaagcggcgggacttctggtcacgtcgtccgcggtcgccggaaggggaagtttcgcctcagaaggctgcctcgctggtccgaattcggtggcgccacgtccgcccgtctccgccttctgcatcgcggcttcggcggcttccacctagacacctaacagtcgcggagccggccgcgtcgtgagggggtcggcacggggagtcgggcggtcttgtgcatcttggctacctgtgggtcgaagatgtcggacatcggagactggttcaggagcatcccggcgatcacgcgctattggttcgccgccaccgtcgccgtgcccttggtcggcaaactcggcctcatcagcccggcctacctcttcctctggcccgaagccttcctttatcgctttcagatttggaggccaatcactgccaccttttatttccctgtgggtccaggaactggatttctttatttggtcaatttatatttcttatatcagtattctacgcgacttgaaacaggagcttttgatgggaggccagcagactatttattcatgctcctctttaactggatttgcatcgtgattactggcttagcaatggatatgcagttgctgatgattcctctgatcatgtcagtactttatgtctgggcccagctgaacagagacatgattgtatcattttggtttggaacacgatttaaggcctgctatttaccctgggttatccttggattcaactatatcatcggaggctcatacccaatggacttgggaggaagaaattttctatccacacctcagtttttgtaccgctggctgcccagtaggagaggaggagtatcaggatttggtgtgccccctgctagcatgaggcgagctgctgatcagaatggcggaggcgggagacacaactggggccagggctttcgacttggagaccagtgaaggggcggcctcgggcagccgctcctctcaagccacatttcctcccagtgctgggtgcacttaacaactgcgttctggctaacactgttggacctgacccacactgaatgtagtctttcagtacgagacaaagtttcttaaatcccgaagaaaaatataagtgttccacaagtttcacgattctcattcaagtccttactgctgtgaagaacaaataccaactgtgcaaattgcaaaactgactacattttttggtgtcttctcttctcccctttccgtctgaataatgggttttagcgggtcctagtctgctggcattgagctggggctgggtcaccaaacccttcccaaaaggacccttatctctttcttgcacacatgcctctctcccacttttcccaacccccacatttgcaactagaagaggttgcccataaaattgctctgcccttgacaggttctgttatttattgacttttgccaaggcttggtcacaacaatcatattcacgtaattttccccctttggtggcagaactgtagcaatagggggagaagacaagcagcggatgaagcgttttctcagcttttggaattgcttcgacctgacatccgttgtaaccgtttgccacttcttcagatatttttataaaaaagtaccactgagtcagtgagggccacagattggtattaatgagatacgagggttgttgctgggtgtttgtttcctgagctaagtgatcaagactgtagtggagttgcagctaacatgggttaggtttaaaccatgggggatgcaacccctttgcgtttcatatgtaggcctactggctttgtgtagctggagtagttgggttgctttgtgttaggaggatccagatcatgttggctacagggagatgctctctttgagaggctcctgggcattgattccatttcaatctcattctggatatgtgttcattgagtaaaggaggagagaccctcatacgctatttaaatgtcacttttttgcctatcccccgttttttggtcatgtttcaattaattgtgaggaaggcgcagctcctctctgcacgtagatcattttttaaagctaatgtaagcacatctaagggaataacatgatttaaggttgaaatggctttagaatcatttgggtttgagggtgtgttattttgagtcatgaatgtacaagctctgtgaatcagaccagcttaaatacccacacctttttttcgtaggtgggcttttcctatcagagcttggctcataaccaaataaagttttttgaaggccatggcttttcacacagttattttattttatgacgttatctgaaagcagactgttaggagcagtattgagtggctgtcacactttgaggcaactaaaaaggcttcaaacgttttgatcagtttcttttcaggaaacattgtgctctaacagtatgactattctttcccccactcttaaacagtgtgatgtgtgttatcctaggaaatgagagttggcaaacaacttctcattttgaatagagtttgtgtgtacctctccatatttaatttatatgataaaataggtggggagagtctgaaccttaactgtcatgttttgttgttcatctgtggccacaataaagtttacttgtaaaattttagaggccattactccaattatgttgcacgtacactcattgtacaggcgtggagactcattgtatgtataagaatattctgacagtgagtgacccggagtctctggtgtaccctcttaccagtcagctgcctgcgagcagtcattttttcctaaaggtttacaagtatttagaactcttcagttcagggcaaaatgttcatgaagttattcctcttaaacatggttaggaagctgatgacgttattgattttgtctggattatgtttctggaataattttaccaaaacaagctatttgagttttgacttgacaaggcaaaacatgacagtggattctctttacaaatggaaaaaaaaaatccttattttgtataaaggacttccctttttgtaaactaatcctttttattggtaaaaattgtaaattaaaatgtgcaacttgaaggttgtctgtgttaagtttccatgtccctgctctgctgtctcttagatatcacataatttgtgtaaccaattatctcttgaagagcatttaggaagtacccagtattttttgctggattaattcctggatgcagaattcctgggttttcattttaatgaaggaggatgcttgctaactttgaaaaa

SEQ ID NO: 293 - DNA, 2642 bp, Homo sapiens
attctcccttccagatgcagtatgaggactgagtcagaggctatggaaaggagcttttgatgggaggccagcagactatttattcatgctcctctttaactggatttgcatcgtgattactggcttagcaatggatatgcagttgctgatgattcctctgatcatgtcagtactttatgtctgggcccagctgaacagagacatgattgtatcattttggtttggaacacgatttaaggcctgctatttaccctgggttatccttggattcaactatatcatcggaggctcggtaatcaatgagcttattggaaatctggttggacatctttattttttcctaatgttcagatacccaatggacttgggaggaagaaattttctatccacacctcagtttttgtaccgctggctgcccagtaggagaggaggagtatcaggatttggtgtgccccctgctagcatgaggcgagctgctgatcagaatggcggaggcgggagacacaactggggccagggctttcgacttggagaccagtgaaggggcggcctcgggcagccgctcctctcaagccacatttcctcccagtgctgggtgcacttaacaactgcgttctggctaacactgttggacctgacccacactgaatgtagtctttcagtacgagacaaagtttcttaaatcccgaagaaaaatataagtgttccacaagtttcacgattctcattcaagtccttactgctgtgaagaacaaataccaactgtgcaaattgcaaaactgactacattttttggtgtcttctcttctcccctttccgtctgaataatgggttttagcgggtcctagtctgctggcattgagctggggctgggtcaccaaacccttcccaaaaggacccttatctctttcttgcacacatgcctctctcccacttttcccaacccccacatttgcaactagaagaggttgcccataaaattgctctgcccttgacaggttctgttatttattgacttttgccaaggcttggtcacaacaatcatattcacgtaattttccccctttggtggcagaactgtagcaatagggggagaagacaagcagcggatgaagcgttttctcagcttttggaattgcttcgacctgacatccgttgtaaccgtttgccacttcttcagatatttttataaaaaagtaccactgagtcagtgagggccacagattggtattaatgagatacgagggttgttgctgggtgtttgtttcctgagctaagtgatcaagactgtagtggagttgcagctaacatgggttaggtttaaaccatgggggatgcaacccctttgcgtttcatatgtaggcctactggctttgtgtagctggagtagttgggttgctttgtgttaggaggatccagatcatgttggctacagggagatgctctctttgagaggctcctgggcattgattccatttcaatctcattctggatatgtgttcattgagtaaaggaggagagaccctcatacgctatttaaatgtcacttttttgcctatcccccgttttttggtcatgtttcaattaattgtgaggaaggcgcagctcctctctgcacgtagatcattttttaaagctaatgtaagcacatctaagggaataacatgatttaaggttgaaatggctttagaatcatttgggtttgagggtgtgttattttgagtcatgaatgtacaagctctgtgaatcagaccagcttaaatacccacacctttttttcgtaggtgggcttttcctatcagagcttggctcataaccaaataaagttttttgaaggccatggcttttcacacagttattttattttatgacgttatctgaaagcagactgttaggagcagtattgagtggctgtcacactttgaggcaactaaaaaggcttcaaacgttttgatcagtttcttttcaggaaacattgtgctctaacagtatgactattctttcccccactcttaaacagtgtgatgtgtgttatcctaggaaatgagagttggcaaacaacttctcattttgaatagagtttgtgtgtacctctccatatttaatttatatgataaaataggtggggagagtctgaaccttaactgtcatgttttgttgttcatctgtggccacaataaagtttacttgtaaaattttagaggccattactccaattatgttgcacgtacactcattgtacaggcgtggagactcattgtatgtataagaatattctgacagtgagtgacccggagtctctggtgtaccctcttaccagtcagctgcctgcgagcagtcattttttcctaaaggtttacaagtatttagaactcttcagttcagggcaaaatgttcatgaagttattcctcttaaacatggttaggaagctgatgacgttattgattttgtctggattatgtttctggaataattttaccaaaacaagctatttgagttttgacttgacaaggcaaaacatgacagtggattctctttacaaatggaaaaaaaaaatccttattttgtataaaggacttccctttttgtaaactaatcctttttattggtaaaaattgtaaattaaaatgtgcaacttgaa

SEQ ID NO: 294 - DNA, 3228 bp, Homo sapiens
acctggctccgccccccaggacgccgagcctcggccgggcggtaaaatcggcgcttaccctttaagcggcgggacttctggtcacgtcgtccgcggtcgccggaaggggaagtttcgcctcagaaggctgcctcgctggtccgaattcggtggcgccacgtccgcccgtctccgccttctgcatcgcggcttcggcggcttccacctagacacctaacagtcgcggagccggccgcgtcgtgagggggtcggcacggggagtcgggcggtcttgtgcatcttggctacctgtgggtcgaagatgtcggacatcggagactggttcaggagcatcccggcgatcacgcgctattggttcgccgccaccgtcgccgtgcccttggtcggcaaactcggcctcatcagcccggcctacctcttcctctggcccgaagccttcctttatcgctttcaggagcttttgatgggaggccagcagactatttattcatgctcctctttaactggatttgcatcgtgattactggcttagcaatggatatgcagttgctgatgattcctctgatcatgtcagtactttatgtctgggcccagctgaacagagacatgattgtatcattttggtttggaacacgatttaaggcctgctatttaccctgggttatccttggattcaactatatcatcggaggctcggtaatcaatgagcttattggaaatctggttggacatctttattttttcctaatgttcagatacccaatggacttgggaggaagaaattttctatccacacctcagtttttgtaccgctggctgcccagtaggagaggaggagtatcaggatttggtgtgccccctgctagcatgaggcgagctgctgatcagaatggcggaggcgggagacacaactggggccagggctttcgacttggagaccagtgaaggggcggcctcgggcagccgctcctctcaagccacatttcctcccagtgctgggtgcacttaacaactgcgttctggctaacactgttggacctgacccacactgaatgtagtctttcagtacgagacaaagtttcttaaatcccgaagaaaaatataagtgttccacaagtttcacgattctcattcaagtccttactgctgtgaagaacaaataccaactgtgcaaattgcaaaactgactacattttttggtgtcttctcttctcccctttccgtctgaataatgggttttagcgggtcctagtctgctggcattgagctggggctgggtcaccaaacccttcccaaaaggacccttatctctttcttgcacacatgcctctctcccacttttcccaacccccacatttgcaactagaagaggttgcccataaaattgctctgcccttgacaggttctgttatttattgacttttgccaaggcttggtcacaacaatcatattcacgtaattttccccctttggtggcagaactgtagcaatagggggagaagacaagcagcggatgaagcgttttctcagcttttggaattgcttcgacctgacatccgttgtaaccgtttgccacttcttcagatatttttataaaaaagtaccactgagtcagtgagggccacagattggtattaatgagatacgagggttgttgctgggtgtttgtttcctgagctaagtgatcaagactgtagtggagttgcagctaacatgggttaggtttaaaccatgggggatgcaacccctttgcgtttcatatgtaggcctactggctttgtgtagctggagtagttgggttgctttgtgttaggaggatccagatcatgttggctacagggagatgctctctttgagaggctcctgggcattgattccatttcaatctcattctggatatgtgttcattgagtaaaggaggagagaccctcatacgctatttaaatgtcacttttttgcctatcccccgttttttggtcatgtttcaattaattgtgaggaaggcgcagctcctctctgcacgtagatcattttttaaagctaatgtaagcacatctaagggaataacatgatttaaggttgaaatggctttagaatcatttgggtttgagggtgtgttattttgagtcatgaatgtacaagctctgtgaatcagaccagcttaaatacccacacctttttttcgtaggtgggcttttcctatcagagcttggctcataaccaaataaagttttttgaaggccatggcttttcacacagttattttattttatgacgttatctgaaagcagactgttaggagcagtattgagtggctgtcacactttgaggcaactaaaaaggcttcaaacgttttgatcagtttcttttcaggaaacattgtgctctaacagtatgactattctttcccccactcttaaacagtgtgatgtgtgttatcctaggaaatgagagttggcaaacaacttctcattttgaatagagtttgtgtgtacctctccatatttaatttatatgataaaataggtggggagagtctgaaccttaactgtcatgttttgttgttcatctgtggccacaataaagtttacttgtaaaattttagaggccattactccaattatgttgcacgtacactcattgtacaggcgtggagactcattgtatgtataagaatattctgacagtgagtgacccggagtctctggtgtaccctcttaccagtcagctgcctgcgagcagtcattttttcctaaaggtttacaagtatttagaactcttcagttcagggcaaaatgttcatgaagttattcctcttaaacatggttaggaagctgatgacgttattgattttgtctggattatgtttctggaataattttaccaaaacaagctatttgagttttgacttgacaaggcaaaacatgacagtggattctctttacaaatggaaaaaaaaaatccttattttgtataaaggacttccctttttgtaaactaatcctttttattggtaaaaattgtaaattaaaatgtgcaacttgaaggttgtctgtgttaagtttccatgtccctgctctgctgtctcttagatatcacataatttgtgtaaccaattatctcttgaagagcatttaggaagtacccagtattttttgctggattaattcctggatgcagaattcctgggttttcattttaatgaaggaggatgcttgctaactttga

SEQ ID NO: 295 - DNA, 4801 bp, Homo sapiens
aaagggggaaaagaaagtgcggcggaaagtaagaggctcactggggaagactgccgggatccaggtctccggggtccgctttggccagaggcgcggaaggaagcagtgcccggcgacactgcacccatcccggctgcttttgctgcgccctctcagcttcccaagaaaggcatcgtcatgtgatcatcacctaagaactagaacatcagcaggccctagaagcctcactcttgcccctccctttaatatctcaaaggatgacacttctgtggtgtgtagtgagtctctacttttatggaatcctgcaaagtgatgcctcagaacgctgcgatgactggggactagacaccatgaggcaaatccaagtgtttgaagatgagccagctcgcatcaagtgcccactctttgaacacttcttgaaattcaactacagcacagcccattcagctggccttactctgatctggtattggactaggcaggaccgggaccttgaggagccaattaacttccgcctccccgagaaccgcattagtaaggagaaagatgtgctgtggttccggcccactctcctcaatgacactggcaactatacctgcatgttaaggaacactacatattgcagcaaagttgcatttcccttggaagttgttcaaaaagacagctgtttcaattcccccatgaaactcccagtgcataaactgtatatagaatatggcattcagaggatcacttgtccaaatgtagatggatattttccttccagtgtcaaaccgactatcacttggtatatgggctgttataaaatacagaattttaataatgtaatacccgaaggtatgaacttgagtttcctcattgccttaatttcaaataatggaaattacacatgtgttgttacatatccagaaaatggacgtacgtttcatctcaccaggactctgactgtaaaggtagtaggctctccaaaaaatgcagtgccccctgtgatccattcacctaatgatcatgtggtctatgagaaagaaccaggagaggagctactcattccctgtacggtctattttagttttctgatggattctcgcaatgaggtttggtggaccattgatggaaaaaaacctgatgacatcactattgatgtcaccattaacgaaagtataagtcatagtagaacagaagatgaaacaagaactcagattttgagcatcaagaaagttacctctgaggatctcaagcgcagctatgtctgtcatgctagaagtgccaaaggcgaagttgccaaagcagccaaggtgaagcagaaagtgccagctccaagatacacagtggaactggcttgtggttttggagccacagtcctgctagtggtgattctcattgttgtttaccatgtttactggctagagatggtcctattttaccgggctcattttggaacagatgaaaccattttagatggaaaagagtatgatatttatgtatcctatgcaaggaatgcggaagaagaagaatttgtattactgaccctccgtggagttttggagaatgaatttggatacaagctgtgcatctttgaccgagacagtctgcctgggggaattgtcacagatgagactttgagcttcattcagaaaagcagacgcctcctggttgttctaagccccaactacgtgctccagggaacccaagccctcctggagctcaaggctggcctagaaaatatggcctctcggggcaacatcaacgtcattttagtacagtacaaagctgtgaaggaaacgaaggtgaaagagctgaagagggctaagacggtgctcacggtcattaaatggaaaggggaaaaatccaagtatccacagggcaggttctggaagcagctgcaggtggccatgccagtgaagaaaagtcccaggcggtctagcagtgatgagcagggcctctcgtattcatctttgaaaaatgtatgaaaggaataatgaaaagggtaaaaagaacaaggggtgctccaggaagaaagagtccccccagtcttcattcgcagtttatggtttcataggcaaaaataatggtctaagcctcccaatagggataaatttagggtgactgtgtggctgactattctgcttcctcaggcaacactaaagtttagaaagatatcatcaacgttctgtcaccagtctctgatgccactatgttctttgcaggcaaagacttgttcaatgcgaatttccccttctacattgtctatccctgtttttatatgtctccattctttttaaaatcttaacatatggagcagcctttcctatgaatttaaatatgcctttaaaataagtcactgttgacagggtcatgagtttccgagtatagttttctttttatcttatttttactcgtccgttgaaaagataatcaaggcctacattttagctgaggataatgaacttttttcctcattcggctgtataatacataaccacagcaagactgacatccacttaggatgatacaaagcagtgtaactgaaaatgtttcttttaattgatttaaaggacttgtcttctataccacccttgtcctcatctcaggtaatttatgaaatctatgtaaacttgaaaaatatttcttaatttttgtttttgctccagtcaattcctgattatccacaggtcaacccacattttttcattccttctccctatctgcttatatcgcattgctcatttagagtttgcaggaggctccatactaggttcagtctgaaagaaatctcctaatggtgctatagagagggaggtaacagaaagactcttttagggcatttttctgactcatgaaaagagcacagaaaaggatgtttggcaatttgtcttttaagtcttaaccttgctaatgtgaatactgggaaagtgattttttctcactcgtttttgttgctccattgtaaagggcggaggtcagtcttagtggccttgagagttgcttttggcattaatattctaagagaattaactgtatttcctgtcacctattcactagtgcaggaaatatacttgctccaaataagtcagtatgagaagtcactgtcaatgaaagttgttttgtttgttttcagtaatattttgctgtttttaagacttggaaaactaagtgcagagtttacagagtggtaaatatctatgttacatgtagattatacatatatatacacacgtgtatatgagatatatatcttatatctccacaaacacaaattatatatatacatatccacacacatacattacatatatctgtgtatataaatccacatgcacatgaaatatatatatatatataatttgtgtgtgtgtatgtgtatgtatatgactttaaatagctatgggtacaatattaaaaaccactggaactcttgtccagtttttaaattatgtttttactggaatgtttttgtgtcagtgttttctgtacatattatttgttaattcacagctcacagagtgatagttgtcatagttcttgccttccctaagtttatataaataacttaagtattgctacagtttatctaggttgcagtggcatctgctgtgcacagagcttccatggtcactgctaagcagtagccagccatcgggcattaattgatttcctactatattcccagcagacacatttagaaactaagctatgttaacctcagtgctcaactatttgaactgttgagtgataaaggaaacaaatataactgtaaatgaatcttggtatcctgtgaaacagaataattcgtaatttaagaaagcccttatcccggtaacatgaatgttgatgaacaaatgtaaaattatatcctatatttaagtacccataataaatcatttccctctataagtgttattgattattttaaattgaaaaaagtttcacttggatgaaaaaagtagaaaagtaggtcattcttggatctacttttttttagccttattaatatttttccctattagaaaccacaattactccctctattaacccttcacttactagaccagaaaagaacttattccagataagctttgaatatcaattcttacataaactttaggcaaacagggaatagtctagtcaccaaaggaccattctcttgccaatgctgcattccttttgcacttttggattccatatttatcccaaatgctgttgggcacccctagaaataccttgatgttttttctatttatatgcctgcctttggtacttaattttacaaatgctgtaatataaagcatatcaagtttatgtgatacgtatcattgcaagagaatttgtttcaagatttttttttaatgttccagaagatggccaatagagaacattcaagggaaatggggaaacataatttagagaacaagaacaaaccatgtctcaaatttttttaaaaaaaattaatggttttaaatatatgctatagggacgttccatgcccaggttaacaaagaactgtgatatatagagtgtctaattacaaaatcatatacgatttatttaattctcttctgtattgtaacttagatgattcccaaggactctaataaaaaatcacttcattgtatttggaaacaaaaacatcattcattaattacttattttctttccataggttttaatattttgagagtgtcttttttatttcattcatgaacttttgtatttttcatttttcatttgatttgtaaatttacttatgttaaaaataaaccatttattttcagctttgaattttaaaaaaaaaaaaaaaaaa

SEQ ID NO: 296 - DNA, 2114 bp, Homo sapiens
aaagggggaaaagaaagtgcggcggaaagtaagaggctcactggggaagactgccgggatccaggtctccggggtccgctttggccagaggcgcggaaggaagcagtgcccggcgacactgcacccatcccggctgcttttgctgcgccctctcagcttcccaagaaaggcatcgtcatgtgatcatcacctaagaactagaacatcagcaggccctagaagcctcactcttgcccctccctttaatatctcaaaggatgacacttctgtggtgtgtagtgagtctctacttttatggaatcctgcaaagtgatgcctcagaacgctgcgatgactggggactagacaccatgaggcaaatccaagtgtttgaagatgagccagctcgcatcaagtgcccactctttgaacacttcttgaaattcaactacagcacagcccattcagctggccttactctgatctggtattggactaggcaggaccgggaccttgaggagccaattaacttccgcctccccgagaaccgcattagtaaggagaaagatgtgctgtggttccggcccactctcctcaatgacactggcaactatacctgcatgttaaggaacactacatattgcagcaaagttgcatttcccttggaagttgttcaaaaagacagctgtttcaattcccccatgaaactcccagtgcataaactgtatatagaatatggcattcagaggatcacttgtccaaatgtagatggatattttccttccagtgtcaaaccgactatcacttggtatatgggctgttataaaatacagaattttaataatgtaatacccgaaggtatgaacttgagtttcctcattgccttaatttcaaataatggaaattacacatgtgttgttacatatccagaaaatggacgtacgtttcatctcaccaggactctgactgtaaaggtagtaggctctccaaaaaatgcagtgccccctgtgatccattcacctaatgatcatgtggtctatgagaaagaaccaggagaggagctactcattccctgtacggtctattttagttttctgatggattctcgcaatgaggtttggtggaccattgatggaaaaaaacctgatgacatcactattgatgtcaccattaacgaaagtataagtcatagtagaacagaagatgaaacaagaactcagattttgagcatcaagaaagttacctctgaggatctcaagcgcagctatgtctgtcatgctagaagtgccaaaggcgaagttgccaaagcagccaaggtgaagcagaaaggtaatagatgcggtcagtgatgaatctctcagctccaaattaacattgtggtgaataaggacaaaaggagagattgagaacaagagagctccagcacctagcccgacggcatctaacccatagtaatgaatcaaacttaaatgaaaaatatgaaagttttcatctatgtaagatactcaaaatattgtttctgatattgttagtaccgtaatgcccaaatgtagctaaaaaaatcgacgtgagtacagtgagacacaattttgtgtctgtacaattatgaaaaattaaaaacaaagaaaatattcaaagctaccaaagatagaaaaaactggtagagccacatattgttggtgaattattaagacccttttaaaaatcattcatggtagacttcaagagtcataaaaaagattgcatcatctgacctaagactttcggaatttttcctgaacaaataacagaaagggaattatataccttttaatattattagaagcattatctgtagttgtaaaacattattaatagcagccatccaattgtatgcaactaattaaggtattgaatgtttattttccaaaaatgcataattataatattattttaaacactatgtatcaatatttaagcaggtttataatataccagcagccacaattgctaaaatgaaaatcatttaaattatgattttaaatggtataaacatgatttctatgttgatagtactatattattctacaataaatggaaattataaagccttcttgtcagaagtgctgctcctaaaaaaaaaaaaaaaaaaaaaa

SEQ ID NO: 297 - DNA, 4965 bp, Homo sapiens
aaagggggaaaagaaagtgcggcggaaagtaagaggctcactggggaagactgccgggatccaggtctccggggtccgctttggccagaggcgcggaaggaagcagtgcccggcgacactgcacccatcccggctgcttttgctgcgccctctcagcttcccaagaaagggctttgacctgaagcttgaaattgagtttgggacaataatgtgtctcatggggaattgcatggactccttatcataagccaaatgctgaggtaaagctgcggaattgagtcgtcctccaagaagggagagaaaatgatgtcttgtgacatttccagataactggcatcgtcatgtgatcatcacctaagaactagaacatcagcaggccctagaagcctcactcttgcccctccctttaatatctcaaaggatgacacttctgtggtgtgtagtgagtctctacttttatggaatcctgcaaagtgatgcctcagaacgctgcgatgactggggactagacaccatgaggcaaatccaagtgtttgaagatgagccagctcgcatcaagtgcccactctttgaacacttcttgaaattcaactacagcacagcccattcagctggccttactctgatctggtattggactaggcaggaccgggaccttgaggagccaattaacttccgcctccccgagaaccgcattagtaaggagaaagatgtgctgtggttccggcccactctcctcaatgacactggcaactatacctgcatgttaaggaacactacatattgcagcaaagttgcatttcccttggaagttgttcaaaaagacagctgtttcaattcccccatgaaactcccagtgcataaactgtatatagaatatggcattcagaggatcacttgtccaaatgtagatggatattttccttccagtgtcaaaccgactatcacttggtatatgggctgttataaaatacagaattttaataatgtaatacccgaaggtatgaacttgagtttcctcattgccttaatttcaaataatggaaattacacatgtgttgttacatatccagaaaatggacgtacgtttcatctcaccaggactctgactgtaaaggtagtaggctctccaaaaaatgcagtgccccctgtgatccattcacctaatgatcatgtggtctatgagaaagaaccaggagaggagctactcattccctgtacggtctattttagttttctgatggattctcgcaatgaggtttggtggaccattgatggaaaaaaacctgatgacatcactattgatgtcaccattaacgaaagtataagtcatagtagaacagaagatgaaacaagaactcagattttgagcatcaagaaagttacctctgaggatctcaagcgcagctatgtctgtcatgctagaagtgccaaaggcgaagttgccaaagcagccaaggtgaagcagaaagtgccagctccaagatacacagtggaactggcttgtggttttggagccacagtcctgctagtggtgattctcattgttgtttaccatgtttactggctagagatggtcctattttaccgggctcattttggaacagatgaaaccattttagatggaaaagagtatgatatttatgtatcctatgcaaggaatgcggaagaagaagaatttgtattactgaccctccgtggagttttggagaatgaatttggatacaagctgtgcatctttgaccgagacagtctgcctgggggaattgtcacagatgagactttgagcttcattcagaaaagcagacgcctcctggttgttctaagccccaactacgtgctccagggaacccaagccctcctggagctcaaggctggcctagaaaatatggcctctcggggcaacatcaacgtcattttagtacagtacaaagctgtgaaggaaacgaaggtgaaagagctgaagagggctaagacggtgctcacggtcattaaatggaaaggggaaaaatccaagtatccacagggcaggttctggaagcagctgcaggtggccatgccagtgaagaaaagtcccaggcggtctagcagtgatgagcagggcctctcgtattcatctttgaaaaatgtatgaaaggaataatgaaaagggtaaaaagaacaaggggtgctccaggaagaaagagtccccccagtcttcattcgcagtttatggtttcataggcaaaaataatggtctaagcctcccaatagggataaatttagggtgactgtgtggctgactattctgcttcctcaggcaacactaaagtttagaaagatatcatcaacgttctgtcaccagtctctgatgccactatgttctttgcaggcaaagacttgttcaatgcgaatttccccttctacattgtctatccctgtttttatatgtctccattctttttaaaatcttaacatatggagcagcctttcctatgaatttaaatatgcctttaaaataagtcactgttgacagggtcatgagtttccgagtatagttttctttttatcttatttttactcgtccgttgaaaagataatcaaggcctacattttagctgaggataatgaacttttttcctcattcggctgtataatacataaccacagcaagactgacatccacttaggatgatacaaagcagtgtaactgaaaatgtttcttttaattgatttaaaggacttgtcttctataccacccttgtcctcatctcaggtaatttatgaaatctatgtaaacttgaaaaatatttcttaatttttgtttttgctccagtcaattcctgattatccacaggtcaacccacattttttcattccttctccctatctgcttatatcgcattgctcatttagagtttgcaggaggctccatactaggttcagtctgaaagaaatctcctaatggtgctatagagagggaggtaacagaaagactcttttagggcatttttctgactcatgaaaagagcacagaaaaggatgtttggcaatttgtcttttaagtcttaaccttgctaatgtgaatactgggaaagtgattttttctcactcgtttttgttgctccattgtaaagggcggaggtcagtcttagtggccttgagagttgcttttggcattaatattctaagagaattaactgtatttcctgtcacctattcactagtgcaggaaatatacttgctccaaataagtcagtatgagaagtcactgtcaatgaaagttgttttgtttgttttcagtaatattttgctgtttttaagacttggaaaactaagtgcagagtttacagagtggtaaatatctatgttacatgtagattatacatatatatacacacgtgtatatgagatatatatcttatatctccacaaacacaaattatatatatacatatccacacacatacattacatatatctgtgtatataaatccacatgcacatgaaatatatatatatatataatttgtgtgtgtgtatgtgtatgtatatgactttaaatagctatgggtacaatattaaaaaccactggaactcttgtccagtttttaaattatgtttttactggaatgtttttgtgtcagtgttttctgtacatattatttgttaattcacagctcacagagtgatagttgtcatagttcttgccttccctaagtttatataaataacttaagtattgctacagtttatctaggttgcagtggcatctgctgtgcacagagcttccatggtcactgctaagcagtagccagccatcgggcattaattgatttcctactatattcccagcagacacatttagaaactaagctatgttaacctcagtgctcaactatttgaactgttgagtgataaaggaaacaaatataactgtaaatgaatcttggtatcctgtgaaacagaataattcgtaatttaagaaagcccttatcccggtaacatgaatgttgatgaacaaatgtaaaattatatcctatatttaagtacccataataaatcatttccctctataagtgttattgattattttaaattgaaaaaagtttcacttggatgaaaaaagtagaaaagtaggtcattcttggatctacttttttttagccttattaatatttttccctattagaaaccacaattactccctctattaacccttcacttactagaccagaaaagaacttattccagataagctttgaatatcaattcttacataaactttaggcaaacagggaatagtctagtcaccaaaggaccattctcttgccaatgctgcattccttttgcacttttggattccatatttatcccaaatgctgttgggcacccctagaaataccttgatgttttttctatttatatgcctgcctttggtacttaattttacaaatgctgtaatataaagcatatcaagtttatgtgatacgtatcattgcaagagaatttgtttcaagatttttttttaatgttccagaagatggccaatagagaacattcaagggaaatggggaaacataatttagagaacaagaacaaaccatgtctcaaatttttttaaaaaaaattaatggttttaaatatatgctatagggacgttccatgcccaggttaacaaagaactgtgatatatagagtgtctaattacaaaatcatatacgatttatttaattctcttctgtattgtaacttagatgattcccaaggactctaataaaaaatcacttcattgtatttggaaacaaaaacatcattcattaattacttattttctttccataggttttaatattttgagagtgtcttttttatttcattcatgaacttttgtatttttcatttttcatttgatttgtaaatttacttatgttaaaaataaaccatttattttcagctttgaattttaaaaaaaaaaaaaaaaaa

SEQ ID NO: 298 - DNA, 4714 bp, Homo sapiens
aaagggggaaaagaaagtgcggcggaaagtaagaggctcactggggaagactgccgggatccaggtctccggggtccgctttggccagaggcgcggaaggaagcagtgcccggcgacactgcacccatcccggctgcttttgctgcgccctctcagcttcccaagaaaggatgacacttctgtggtgtgtagtgagtctctacttttatggaatcctgcaaagtgatgcctcagaacgctgcgatgactggggactagacaccatgaggcaaatccaagtgtttgaagatgagccagctcgcatcaagtgcccactctttgaacacttcttgaaattcaactacagcacagcccattcagctggccttactctgatctggtattggactaggcaggaccgggaccttgaggagccaattaacttccgcctccccgagaaccgcattagtaaggagaaagatgtgctgtggttccggcccactctcctcaatgacactggcaactatacctgcatgttaaggaacactacatattgcagcaaagttgcatttcccttggaagttgttcaaaaagacagctgtttcaattcccccatgaaactcccagtgcataaactgtatatagaatatggcattcagaggatcacttgtccaaatgtagatggatattttccttccagtgtcaaaccgactatcacttggtatatgggctgttataaaatacagaattttaataatgtaatacccgaaggtatgaacttgagtttcctcattgccttaatttcaaataatggaaattacacatgtgttgttacatatccagaaaatggacgtacgtttcatctcaccaggactctgactgtaaaggtagtaggctctccaaaaaatgcagtgccccctgtgatccattcacctaatgatcatgtggtctatgagaaagaaccaggagaggagctactcattccctgtacggtctattttagttttctgatggattctcgcaatgaggtttggtggaccattgatggaaaaaaacctgatgacatcactattgatgtcaccattaacgaaagtataagtcatagtagaacagaagatgaaacaagaactcagattttgagcatcaagaaagttacctctgaggatctcaagcgcagctatgtctgtcatgctagaagtgccaaaggcgaagttgccaaagcagccaaggtgaagcagaaagtgccagctccaagatacacagtggaactggcttgtggttttggagccacagtcctgctagtggtgattctcattgttgtttaccatgtttactggctagagatggtcctattttaccgggctcattttggaacagatgaaaccattttagatggaaaagagtatgatatttatgtatcctatgcaaggaatgcggaagaagaagaatttgtattactgaccctccgtggagttttggagaatgaatttggatacaagctgtgcatctttgaccgagacagtctgcctgggggaattgtcacagatgagactttgagcttcattcagaaaagcagacgcctcctggttgttctaagccccaactacgtgctccagggaacccaagccctcctggagctcaaggctggcctagaaaatatggcctctcggggcaacatcaacgtcattttagtacagtacaaagctgtgaaggaaacgaaggtgaaagagctgaagagggctaagacggtgctcacggtcattaaatggaaaggggaaaaatccaagtatccacagggcaggttctggaagcagctgcaggtggccatgccagtgaagaaaagtcccaggcggtctagcagtgatgagcagggcctctcgtattcatctttgaaaaatgtatgaaaggaataatgaaaagggtaaaaagaacaaggggtgctccaggaagaaagagtccccccagtcttcattcgcagtttatggtttcataggcaaaaataatggtctaagcctcccaatagggataaatttagggtgactgtgtggctgactattctgcttcctcaggcaacactaaagtttagaaagatatcatcaacgttctgtcaccagtctctgatgccactatgttctttgcaggcaaagacttgttcaatgcgaatttccccttctacattgtctatccctgtttttatatgtctccattctttttaaaatcttaacatatggagcagcctttcctatgaatttaaatatgcctttaaaataagtcactgttgacagggtcatgagtttccgagtatagttttctttttatcttatttttactcgtccgttgaaaagataatcaaggcctacattttagctgaggataatgaacttttttcctcattcggctgtataatacataaccacagcaagactgacatccacttaggatgatacaaagcagtgtaactgaaaatgtttcttttaattgatttaaaggacttgtcttctataccacccttgtcctcatctcaggtaatttatgaaatctatgtaaacttgaaaaatatttcttaatttttgtttttgctccagtcaattcctgattatccacaggtcaacccacattttttcattccttctccctatctgcttatatcgcattgctcatttagagtttgcaggaggctccatactaggttcagtctgaaagaaatctcctaatggtgctatagagagggaggtaacagaaagactcttttagggcatttttctgactcatgaaaagagcacagaaaaggatgtttggcaatttgtcttttaagtcttaaccttgctaatgtgaatactgggaaagtgattttttctcactcgtttttgttgctccattgtaaagggcggaggtcagtcttagtggccttgagagttgcttttggcattaatattctaagagaattaactgtatttcctgtcacctattcactagtgcaggaaatatacttgctccaaataagtcagtatgagaagtcactgtcaatgaaagttgttttgtttgttttcagtaatattttgctgtttttaagacttggaaaactaagtgcagagtttacagagtggtaaatatctatgttacatgtagattatacatatatatacacacgtgtatatgagatatatatcttatatctccacaaacacaaattatatatatacatatccacacacatacattacatatatctgtgtatataaatccacatgcacatgaaatatatatatatatataatttgtgtgtgtgtatgtgtatgtatatgactttaaatagctatgggtacaatattaaaaaccactggaactcttgtccagtttttaaattatgtttttactggaatgtttttgtgtcagtgttttctgtacatattatttgttaattcacagctcacagagtgatagttgtcatagttcttgccttccctaagtttatataaataacttaagtattgctacagtttatctaggttgcagtggcatctgctgtgcacagagcttccatggtcactgctaagcagtagccagccatcgggcattaattgatttcctactatattcccagcagacacatttagaaactaagctatgttaacctcagtgctcaactatttgaactgttgagtgataaaggaaacaaatataactgtaaatgaatcttggtatcctgtgaaacagaataattcgtaatttaagaaagcccttatcccggtaacatgaatgttgatgaacaaatgtaaaattatatcctatatttaagtacccataataaatcatttccctctataagtgttattgattattttaaattgaaaaaagtttcacttggatgaaaaaagtagaaaagtaggtcattcttggatctacttttttttagccttattaatatttttccctattagaaaccacaattactccctctattaacccttcacttactagaccagaaaagaacttattccagataagctttgaatatcaattcttacataaactttaggcaaacagggaatagtctagtcaccaaaggaccattctcttgccaatgctgcattccttttgcacttttggattccatatttatcccaaatgctgttgggcacccctagaaataccttgatgttttttctatttatatgcctgcctttggtacttaattttacaaatgctgtaatataaagcatatcaagtttatgtgatacgtatcattgcaagagaatttgtttcaagatttttttttaatgttccagaagatggccaatagagaacattcaagggaaatggggaaacataatttagagaacaagaacaaaccatgtctcaaatttttttaaaaaaaattaatggttttaaatatatgctatagggacgttccatgcccaggttaacaaagaactgtgatatatagagtgtctaattacaaaatcatatacgatttatttaattctcttctgtattgtaacttagatgattcccaaggactctaataaaaaatcacttcattgtatttggaaacaaaaacatcattcattaattacttattttctttccataggttttaatattttgagagtgtcttttttatttcattcatgaacttttgtatttttcatttttcatttgatttgtaaatttacttatgttaaaaataaaccatttattttcagctttgaattttaaaaaaaaaaaaaaaaaa

SEQ ID NO: 299 - DNA, 2027 bp, Homo sapiens
aaagggggaaaagaaagtgcggcggaaagtaagaggctcactggggaagactgccgggatccaggtctccggggtccgctttggccagaggcgcggaaggaagcagtgcccggcgacactgcacccatcccggctgcttttgctgcgccctctcagcttcccaagaaaggatgacacttctgtggtgtgtagtgagtctctacttttatggaatcctgcaaagtgatgcctcagaacgctgcgatgactggggactagacaccatgaggcaaatccaagtgtttgaagatgagccagctcgcatcaagtgcccactctttgaacacttcttgaaattcaactacagcacagcccattcagctggccttactctgatctggtattggactaggcaggaccgggaccttgaggagccaattaacttccgcctccccgagaaccgcattagtaaggagaaagatgtgctgtggttccggcccactctcctcaatgacactggcaactatacctgcatgttaaggaacactacatattgcagcaaagttgcatttcccttggaagttgttcaaaaagacagctgtttcaattcccccatgaaactcccagtgcataaactgtatatagaatatggcattcagaggatcacttgtccaaatgtagatggatattttccttccagtgtcaaaccgactatcacttggtatatgggctgttataaaatacagaattttaataatgtaatacccgaaggtatgaacttgagtttcctcattgccttaatttcaaataatggaaattacacatgtgttgttacatatccagaaaatggacgtacgtttcatctcaccaggactctgactgtaaaggtagtaggctctccaaaaaatgcagtgccccctgtgatccattcacctaatgatcatgtggtctatgagaaagaaccaggagaggagctactcattccctgtacggtctattttagttttctgatggattctcgcaatgaggtttggtggaccattgatggaaaaaaacctgatgacatcactattgatgtcaccattaacgaaagtataagtcatagtagaacagaagatgaaacaagaactcagattttgagcatcaagaaagttacctctgaggatctcaagcgcagctatgtctgtcatgctagaagtgccaaaggcgaagttgccaaagcagccaaggtgaagcagaaaggtaatagatgcggtcagtgatgaatctctcagctccaaattaacattgtggtgaataaggacaaaaggagagattgagaacaagagagctccagcacctagcccgacggcatctaacccatagtaatgaatcaaacttaaatgaaaaatatgaaagttttcatctatgtaagatactcaaaatattgtttctgatattgttagtaccgtaatgcccaaatgtagctaaaaaaatcgacgtgagtacagtgagacacaattttgtgtctgtacaattatgaaaaattaaaaacaaagaaaatattcaaagctaccaaagatagaaaaaactggtagagccacatattgttggtgaattattaagacccttttaaaaatcattcatggtagacttcaagagtcataaaaaagattgcatcatctgacctaagactttcggaatttttcctgaacaaataacagaaagggaattatataccttttaatattattagaagcattatctgtagttgtaaaacattattaatagcagccatccaattgtatgcaactaattaaggtattgaatgtttattttccaaaaatgcataattataatattattttaaacactatgtatcaatatttaagcaggtttataatataccagcagccacaattgctaaaatgaaaatcatttaaattatgattttaaatggtataaacatgatttctatgttgatagtactatattattctacaataaatggaaattataaagccttcttgtcagaagtgctgctcctaaaaaaaaaaaaaaaaaaaaaa

SEQ ID NO: 300 - DNA, 2930 bp, Homo sapiens
aaagggggaaaagaaagtgcggcggaaagtaagaggctcactggggaagactgccgggatccaggtctccggggtccgctttggccagaggcgcggaaggaagcagtgcccggcgacactgcacccatcccggctgcttttgctgcgccctctcagcttcccaagaaaggcatcgtcatgtgatcatcacctaagaactagaacatcagcaggccctagaagcctcactcttgcccctccctttaatatctcaaaggatgacacttctgtggtgtgtagtgagtctctacttttatggaatcctgcaaagtgatgcctcagaacgctgcgatgactggggactagacaccatgaggcaaatccaagtgtttgaagatgagccagctcgcatcaagtgcccactctttgaacacttcttgaaattcaactacagcacagcccattcagctggccttactctgatctggtattggactaggcaggaccgggaccttgaggagccaattaacttccgcctccccgagaaccgcattagtaaggagaaagatgtgctgtggttccggcccactctcctcaatgacactggcaactatacctgcatgttaaggaacactacatattgcagcaaagttgcatttcccttggaagttgttcaaaaagacagctgtttcaattcccccatgaaactcccagtgcataaactgtatatagaatatggcattcagaggatcacttgtccaaatgtagatggatattttccttccagtgtcaaaccgactatcacttggtatatgggctgttataaaatacagaattttaataatgtaatacccgaaggtatgaacttgagtttcctcattgccttaatttcaaataatggaaattacacatgtgttgttacatatccagaaaatggacgtacgtttcatctcaccaggactctgactgtaaaggtagtaggctctccaaaaaatgcagtgccccctgtgatccattcacctaatgatcatgtggtctatgagaaagaaccaggagaggagctactcattccctgtacggtctattttagttttctgatggattctcgcaatgaggtttggtggaccattgatggaaaaaaacctgatgacatcactattgatgtcaccattaacgaaagtataagtcatagtagaacagaagatgaaacaagaactcagattttgagcatcaagaaagttacctctgaggatctcaagcgcagctatgtctgtcatgctagaagtgccaaaggcgaagttgccaaagcagccaaggtgaagcagaaagtgccagctccaagatacacagtggaactggcttgtggttttggagccacagtcctgctagtggtgattctcattgttgtttaccatgtttactggctagagatggtcctattttaccgggctcattttggaacagatgaaaccattttagatggaaaagagtatgatatttatgtatcctatgcaaggaatgcggaagaagaagaatttgtattactgaccctccgtggagttttggagaatgaatttggatacaagctgtgcatctttgaccgagacagtctgcctgggggaaatacagtggaagcagtttttgatttcattcagagaagcagaaggatgattgttgttctgagccctgactatgtgacagaaaagagcatcagcatgctggagtttaaactgggtgtcatgtgccagaactccattgccaccaagctcattgtggttgagtaccgtccccttgagcacccgcacccaggcattcttcagctcaaagagtctgtgtcttttgtgagctggaagggagaaaagtccaaacattctggctctaaattctggaaagctttgcggttggctcttcccctgagaagtctgagtgccagttctggctggaatgagagctgctcttcccagtctgacatcagtctggatcacgttcaaaggaggagaagtcgtttgaaagagcccccagaacttcagagctcagagagggctgcaggtagccctccagccccaggcacaatgtccaagcaccgagggaagtcctccgccacctgccgctgttgtgtcacctactgtgaaggagagaatcaccttaggaacaagagccgggcagagattcataaccagccccagtgggagacacacctctgtaagcctgttccccaagagtcagaaactcaatggatacaaaatggcaccagattggaaccccctgctccccagatctcagcccttgctcttcatcatttcacggacttatccaataacaacgacttttatatcctataattactgtgtgtggtgggtggtggctactatctctaccaaccctctgtatgtcatgaacctgtgggaaaatctgacatttttatcatctaatggactatcagatttctgtcccctttattgatttttaaaaactatttatttctaggagacaaaagacctgaaggacctgaatccagaattattgcctctaaaggcctcagaagagcacactcttcttgggccctagaaggtcagtatgtgaaagttgcctaaagtctgatcctctatcttgtccaatggtttaaaactgagctaagaatttaaatgtgtttcttttcagtgagttgatcaacctcacattataagtcagtcaggtgtacttgggctatgatgcttacagggtgtatgcattcccagggagcagcatggaaaggagctggttctggtggaagctgtaggacgaagctcaacagaaaacctacagcacatttttcctcaaagaaccaaacatacccacccagggatacatggcgttctctgtctcactgtaaactagtgttctctaaactgcctaacattgttagcatcaataaaattctatttttacgtcaaaaaaaaaaaaaaaaaaaa

SEQ ID NO: 301 - DNA, 3131 bp, Homo sapiens
aaagggggaaaagaaagtgcggcggaaagtaagaggctcactggggaagactgccgggatccaggtctccggggtccgctttggccagaggcgcggaaggaagcagtgcccggcgacactgcacccatcccggctgcttttgctgcgccctctcagcttcccaagaaaggatgacacttctgtggtgtgtagtgagtctctacttttatggaatcctgcaaagtgatgcctcagaacgctgcgatgactggggactagacaccatgaggcaaatccaagtgtttgaagatgagccagctcgcatcaagtgcccactctttgaacacttcttgaaattcaactacagcacagcccattcagctggccttactctgatctggtattggactaggcaggaccgggaccttgaggagccaattaacttccgcctccccgagaaccgcattagtaaggagaaagatgtgctgtggttccggcccactctcctcaatgacactggcaactatacctgcatgttaaggaacactacatattgcagcaaagttgcatttcccttggaagttgttcaaaaagacagctgtttcaattcccccatgaaactcccagtgcataaactgtatatagaatatggcattcagaggatcacttgtccaaatgtagatggatattttccttccagtgtcaaaccgactatcacttggtatatgggctgttataaaatacagaattttaataatgtaatacccgaaggtatgaacttgagtttcctcattgccttaatttcaaataatggaaattacacatgtgttgttacatatccagaaaatggacgtacgtttcatctcaccaggactctgactgtaaaggtagtaggctctccaaaaaatgcagtgccccctgtgatccattcacctaatgatcatgtggtctatgagaaagaaccaggagaggagctactcattccctgtacggtctattttagttttctgatggattctcgcaatgaggtttggtggaccattgatggaaaaaaacctgatgacatcactattgatgtcaccattaacgaaagtataagtcatagtagaacagaagatgaaacaagaactcagattttgagcatcaagaaagttacctctgaggatctcaagcgcagctatgtctgtcatgctagaagtgccaaaggcgaagttgccaaagcagccaaggtgaagcagaaagagtttccctcttgttgcccaggctggagtacagtggcgcgatctcggctcagtgcaacctccacctcctgggttcaaatgattctcctgcctcagcctcctgagtagctgggattagaggcacccgccaccataccagcgaattttttttttcttttcagtagagattgggtttcaccaaattttgttcatatctttgttcatgaaggatattggtttgtttggtttgtagtattcttttcttgtaatgctgtgactaatgtgagggttatgctggtctcattacatgagctgggtaatgttccctcttttgtgattatgtgaaagcctatgggtaaaactggtattatttcttgctcaaaagaattactcatataactatctgggcctgttgtgtttttttttttgttgttgttttttttgagaaggagtctcgctctttcgcccaggctggagtgcagtggcgcgatctcggctcactgcaagctcggcctcccgggttcacgccattctcctgcctcagcctcccgagtagctgggactacaggcgtccgcctccacggccggctaattttttgtattttcagtagagacggggtttcactgtgttaaccaggatggtctcgatctcctgaccttgtgatccgcccgcctaggcctcccaaagtgctgggattacaggcgtgagccaccgtgcccggccgttgttttctttttgggaaagcttttaattatgaattcagtgtcctttttagttattgagattttctgtttcttcttgtggcagttttggctttcaaggcatttttttccatttcatctaagttgtcacattattggcatacttttctttagattatttcctattatccttttaatgtctgcaggatttttagtgatgttccactgtcactcctgatattagtaattggtgttttgcctttttttgtccttcatcagtcaagataagggtttctcaattttgctaattttttcaatgaacatatttttattgatttttctctgttgtttatatatttatttactttattcatatacttattttcctctttttgcatactttgcacttcattttctttttgtcagtcatcctaaaatgtaagctgtatcactgatttttaagtaattcttcttttccaatataagtattctgagctatgtgttttcctcataggattagtttaactaaatccaacaaatgttgaaatgtcgagtttttgttattattaagttcaaaatactttctaatttctgttttcatttctttttgacctaagggttatttcagtgtgtgttttttaatttaaacatgcttggaattttccagatcgttttactacattatatatgaaaattcatttgaattttagagttggctttatgttcactcttgatagttatttgtaacatttcatattgtcatttaagtttagctaatgtaaaaaattagaaaaaaagtctgggagcaggtatctccaacttagaactacctgagagaactacattacggagtggagaaacataggtttttgttctagatagacctgggttcaagttccggactcagtgctggctgtgtatatgaactagtacaagccttccttttcttatccttcaggttcaatttccagggtatctgtgaaaaccgagggaatggggaatgagagctttgccacagtgctgcacacttgattctaatttctaatcttttatttaattctgatgtgtccaaagaacatactttgcatgattttattctttttaagcttattggtacttaaaaaaaaagtatttgcagactgcctatcttggtaaatgtttgatatgcatttgaaaaagacatatattttgtagtttcgagtggtgtccagtaaatgtcaactaagaaaa

SEQ ID NO: 302 - DNA, 4093 bp, Homo sapiens
aaacagctggcttataaaacaaattctgaaatataccatgtgtataaatgggagactgccttgtttattcacataggaacctccaaacatatagaagtaaagacacagggctgttataaaatacagaattttaataatgtaatacccgaaggtatgaacttgagtttcctcattgccttaatttcaaataatggaaattacacatgtgttgttacatatccagaaaatggacgtacgtttcatctcaccaggactctgactgtaaaggtagtaggctctccaaaaaatgcagtgccccctgtgatccattcacctaatgatcatgtggtctatgagaaagaaccaggagaggagctactcattccctgtacggtctattttagttttctgatggattctcgcaatgaggtttggtggaccattgatggaaaaaaacctgatgacatcactattgatgtcaccattaacgaaagtataagtcatagtagaacagaagatgaaacaagaactcagattttgagcatcaagaaagttacctctgaggatctcaagcgcagctatgtctgtcatgctagaagtgccaaaggcgaagttgccaaagcagccaaggtgaagcagaaagtgccagctccaagatacacagtggaactggcttgtggttttggagccacagtcctgctagtggtgattctcattgttgtttaccatgtttactggctagagatggtcctattttaccgggctcattttggaacagatgaaaccattttagatggaaaagagtatgatatttatgtatcctatgcaaggaatgcggaagaagaagaatttgtattactgaccctccgtggagttttggagaatgaatttggatacaagctgtgcatctttgaccgagacagtctgcctgggggaattgtcacagatgagactttgagcttcattcagaaaagcagacgcctcctggttgttctaagccccaactacgtgctccagggaacccaagccctcctggagctcaaggctggcctagaaaatatggcctctcggggcaacatcaacgtcattttagtacagtacaaagctgtgaaggaaacgaaggtgaaagagctgaagagggctaagacggtgctcacggtcattaaatggaaaggggaaaaatccaagtatccacagggcaggttctggaagcagctgcaggtggccatgccagtgaagaaaagtcccaggcggtctagcagtgatgagcagggcctctcgtattcatctttgaaaaatgtatgaaaggaataatgaaaagggtaaaaagaacaaggggtgctccaggaagaaagagtccccccagtcttcattcgcagtttatggtttcataggcaaaaataatggtctaagcctcccaatagggataaatttagggtgactgtgtggctgactattctgcttcctcaggcaacactaaagtttagaaagatatcatcaacgttctgtcaccagtctctgatgccactatgttctttgcaggcaaagacttgttcaatgcgaatttccccttctacattgtctatccctgtttttatatgtctccattctttttaaaatcttaacatatggagcagcctttcctatgaatttaaatatgcctttaaaataagtcactgttgacagggtcatgagtttccgagtatagttttctttttatcttatttttactcgtccgttgaaaagataatcaaggcctacattttagctgaggataatgaacttttttcctcattcggctgtataatacataaccacagcaagactgacatccacttaggatgatacaaagcagtgtaactgaaaatgtttcttttaattgatttaaaggacttgtcttctataccacccttgtcctcatctcaggtaatttatgaaatctatgtaaacttgaaaaatatttcttaatttttgtttttgctccagtcaattcctgattatccacaggtcaacccacattttttcattccttctccctatctgcttatatcgcattgctcatttagagtttgcaggaggctccatactaggttcagtctgaaagaaatctcctaatggtgctatagagagggaggtaacagaaagactcttttagggcatttttctgactcatgaaaagagcacagaaaaggatgtttggcaatttgtcttttaagtcttaaccttgctaatgtgaatactgggaaagtgattttttctcactcgtttttgttgctccattgtaaagggcggaggtcagtcttagtggccttgagagttgcttttggcattaatattctaagagaattaactgtatttcctgtcacctattcactagtgcaggaaatatacttgctccaaataagtcagtatgagaagtcactgtcaatgaaagttgttttgtttgttttcagtaatattttgctgtttttaagacttggaaaactaagtgcagagtttacagagtggtaaatatctatgttacatgtagattatacatatatatacacacgtgtatatgagatatatatcttatatctccacaaacacaaattatatatatacatatccacacacatacattacatatatctgtgtatataaatccacatgcacatgaaatatatatatatatataatttgtgtgtgtgtatgtgtatgtatatgactttaaatagctatgggtacaatattaaaaaccactggaactcttgtccagtttttaaattatgtttttactggaatgtttttgtgtcagtgttttctgtacatattatttgttaattcacagctcacagagtgatagttgtcatagttcttgccttccctaagtttatataaataacttaagtattgctacagtttatctaggttgcagtggcatctgctgtgcacagagcttccatggtcactgctaagcagtagccagccatcgggcattaattgatttcctactatattcccagcagacacatttagaaactaagctatgttaacctcagtgctcaactatttgaactgttgagtgataaaggaaacaaatataactgtaaatgaatcttggtatcctgtgaaacagaataattcgtaatttaagaaagcccttatcccggtaacatgaatgttgatgaacaaatgtaaaattatatcctatatttaagtacccataataaatcatttccctctataagtgttattgattattttaaattgaaaaaagtttcacttggatgaaaaaagtagaaaagtaggtcattcttggatctacttttttttagccttattaatatttttccctattagaaaccacaattactccctctattaacccttcacttactagaccagaaaagaacttattccagataagctttgaatatcaattcttacataaactttaggcaaacagggaatagtctagtcaccaaaggaccattctcttgccaatgctgcattccttttgcacttttggattccatatttatcccaaatgctgttgggcacccctagaaataccttgatgttttttctatttatatgcctgcctttggtacttaattttacaaatgctgtaatataaagcatatcaagtttatgtgatacgtatcattgcaagagaatttgtttcaagatttttttttaatgttccagaagatggccaatagagaacattcaagggaaatggggaaacataatttagagaacaagaacaaaccatgtctcaaatttttttaaaaaaaattaatggttttaaatatatgctatagggacgttccatgcccaggttaacaaagaactgtgatatatagagtgtctaattacaaaatcatatacgatttatttaattctcttctgtattgtaacttagatgattcccaaggactctaataaaaaatcacttcattgtatttggaaacaaaaacatcattcattaattacttattttctttccataggttttaatattttgagagtgtcttttttatttcattcatgaacttttgtatttttcatttttcatttgatttgtaaatttacttatgttaaaaataaaccatttattttcagctttgaa

SEQ ID NO: 303 - DNA, 2627 bp, Homo sapiens
ggacttcaggcctttttgtgtcctgtttgctaaaggcatgcgggctacagcattcaagagagggagtcgttaacaaagggaaagagataaatgtaaataagctcacatttacagaatgagcggtttgcagtaaaaagctgcggcagcccagagtctgctactttaggctgggctaacctttccctgtaaaaaaaaaaaaaaaaaaaaaaaaaaaaaaatggataaaaatatgcacttccaaagggcgagttgcccatttacatgtttattagctaattatctacaggcatcagcacattctctcatctagcacactctttcttggggaggaaaatatttcctaccggtccatagtgtcagagtggtgaacccctgcagccagcaggcctcctgaaaaaaaagtccatgggtgacagaagattcattgacttccaattccaagattcaaattcaagcctcagacccaggttgggcaatgctactgccaataatacttgcattgttgatgattccttcaagtataatctcaatggtgctgtctacagtgttgtattcatcttgggtctgataaccaacagtgtctctctgtttgtcttctgtttccgcatgaaaatgagaagtgagactgctatttttatcaccaatctagctgtctctgatttgctttttgtctgtacactaccttttaaaatattttacaacttcaaccgccactggccttttggtgacaccctctgcaagatctctggaactgcattccttaccaacatctatgggagcatgctctttctcacctgtattagtgtggatcgtttcctggccattgtctatccttttcgatctcgtactattaggactaggaggaattctgccattgtgtgtgctggtgtctggatcctagtcctcagtggcggtatttcagcctctttgttttccaccactaatgtcaacaatgcaaccaccacctgctttgaaggcttctccaaacgtgtctggaagacttatttatccaagatcacaatatttattgaagttgttgggtttatcattcctctaatattgaatgtctcttgctcttctgtggtgctgagaactcttcgcaagcctgctactctgtctcaaattgggaccaataagaaaaaagtactgaaaatgatcacagtacatatggcagtctttgtggtatgctttgtaccctacaactctgtcctcttcttgtatgccctggtgcgctcccaagctattactaattgctttttggaaagatttgcaaagatcatgtacccaatcaccttgtgccttgcaactctgaactgttgttttgaccctttcatctattacttcacccttgaatcctttcagaagtccttctacatcaatgcccacatcagaatggagtccctgtttaagactgaaacacctttgaccacaaagccttcccttccagctattcaagaggaagtgagtgatcaaacaacaaataatggtggtgaattaatgctagaatccaccttttaggtatgagaaatgtgttcaggtccagatatggtttctcctataatttttcctatgctataaactaaagatttgaagctaatgatactgagaataatgcaccaaatccagtcagatacatttgtttgaaggtatactgtagagtttttattgctgttttgttcagtaattataggtcaaatctaattacaacaaccaagatggattgccaaactcttctgcttggttggaatttcattgtatcgcattatccaggtggctagtggcatttgataatatagagatgactttgaaactttcaaaaaggtatttctattccaatgatatttggtaattaggttgggcctataaatatagaacaaattcagggatttttaaaaaattgtgttactactgatatatgctagttttattttatttttttgaactgtcattgagtttattttagcacaagaatatttttagcctaacattattaataagaaatgtgtcaaatttttaacattggtaaaatatgttatgtgcattttgaaaacagaaaacaaattgcgttggcatgtacgtgggtgggaagaaaaagaaaattaacaggatttacacaattataatcaccagcagtgtgagtttaaaaaacttcgttgtttttacaccaaattaaaattttcatgtcaaacttcaaagccagaaagctgctaaatacgtgtctggcaggtaaaagctggaaaattacttaaaacaggaaagtgtcaataaaaaaacttgagcaacaccaacatattttttcttaaaatgtcacgttatcttcattttgggaaactaggttctataaaatatttatcctccctgttatactttggagcacagcacagccagaaaggggctgcatttgtgcccaggtcaggagcaaattgaaaaaaaaaataaagtaatacaaaaaaatcaaactataaagcaaaaacatttattaaaacctgaattaatcctttttggagggaggagtagagatatataacctgaaaatacttattctttcttatcgaattttggagcctaatatagccaggagctgctgaatttgtgcccctggattggaagcaaataaaaaaaaaaaa

SEQ ID NO: 304 - DNA, 2155 bp, Homo sapiens
ggacttcaggcctttttgtgtcctgtttgctaaaggcatgcgggctacagcattcaagagagggagtcgttaacaaagggaaagagataaatgtaaataagctcacatttacagaatgagcggtttgcagtaaaaagctgcggcagcccagagtctgctactttaggctgggctaacctttccctgtaaaaaaaaaaaaaaaaaaaaaaaaaaaaaaatggataaaaatatgcacttccaaagggcgagttgcccatttacatgtttattagctaattatctacaggcatcagcacattctctcatctagcacactctttcttggggaagacagatttctggaggagtgtgaaaatcaactctccttaatattaaggaccctgcccaatggtaacagttgttgccaagaaaagaaaaaaagaaaaaaaaaagacccaatcacccattggaggaaatctctaactacagtgcctccaggaaactcattggttattccagtcttagataaaattggtgccaggatttggttcgaactaatgtggaggaaaatatttcctaccggtccatagtgtcagagtggtgaacccctgcagccagcaggcctcctgaaaaaaaagtccatgggtgacagaagattcattgacttccaattccaagattcaaattcaagcctcagacccaggttgggcaatgctactgccaataatacttgcattgttgatgattccttcaagtataatctcaatggtgctgtctacagtgttgtattcatcttgggtctgataaccaacagtgtctctctgtttgtcttctgtttccgcatgaaaatgagaagtgagactgctatttttatcaccaatctagctgtctctgatttgctttttgtctgtacactaccttttaaaatattttacaacttcaaccgccactggccttttggtgacaccctctgcaagatctctggaactgcattccttaccaacatctatgggagcatgctctttctcacctgtattagtgtggatcgtttcctggccattgtctatccttttcgatctcgtactattaggactaggaggaattctgccattgtgtgtgctggtgtctggatcctagtcctcagtggcggtatttcagcctctttgttttccaccactaatgtcaacaatgcaaccaccacctgctttgaaggcttctccaaacgtgtctggaagacttatttatccaagatcacaatatttattgaagttgttgggtttatcattcctctaatattgaatgtctcttgctcttctgtggtgctgagaactcttcgcaagcctgctactctgtctcaaattgggaccaataagaaaaaagtactgaaaatgatcacagtacatatggcagtctttgtggtatgctttgtaccctacaactctgtcctcttcttgtatgccctggtgcgctcccaagctattactaattgctttttggaaagatttgcaaagatcatgtacccaatcaccttgtgccttgcaactctgaactgttgttttgaccctttcatctattacttcacccttgaatcctttcagaagtccttctacatcaatgcccacatcagaatggagtccctgtttaagactgaaacacctttgaccacaaagccttcccttccagctattcaagaggaagtgagtgatcaaacaacaaataatggtggtgaattaatgctagaatccaccttttaggtatgagaaatgtgttcaggtccagatatggtttctcctataatttttcctatgctataaactaaagatttgaagctaatgatactgagaataatgcaccaaatccagtcagatacatttgtttgaaggtatactgtagagtttttattgctgttttgttcagtaattataggtcaaatctaattacaacaaccaagatggattgccaaactcttctgcttggttggaatttcattgtatcgcattatccaggtggctagtggcatttgataatatagagatgactttgaaactttcaaaaaggtatttctattccaatgatatttggtaattaggttgggcctataaatatagaacaaattcagggatttttaaaaaattgtgttactactgatatatgctagttttattttatttttttg

SEQ ID NO: 305 - DNA, 5727 bp, Homo sapiens
gcatttcctattgagacccccaagagttcccctggccgtcggctccagctcggacttcaggcctttttgtgtcctgtttgctaaaggcatgcgggctacagcattcaagagagggagtcgttaacaaagggaaagagataaatgtaaataagctcacatttacagaatgagcggtttgcagtaaaaagctgcggcagcccagagtctgctactttaggctgggctaacctttccctgtaaaaaaaaaaaaaaaaaaaaaaaaaaaaaaatggataaaaatatgcacttccaaagggcgagttgcccatttacatgtttattagctaattatctacaggcatcagcacattctctcatctagcacactctttcttgggatgaaaagttgcactcttgccaagaaggatgagttcacctgataaacttgatggcatctacattctaaagtctctcctgccaatcagagatgggaatgaaagccttattggaacaatcaggccagtctttcagaatgtgtgctctctgcaagttaaagggagaaccaggaagatgcctcacagaaacattcaggccaagcttagctaaagcttgatctattcaattgccttttgggaaaatgcagtgagaattgttgcccttgctgtggtttgttcagcgcctaattgtgtagctaccttttgtctgtgtatatggtcatcacatatagtctgcccttggccttcttgttgggggaagaacaaaacctgtaatgtgtttgcgaatattagtactgaaaattgggagcccaataaaaggttacctaccactgggaatccacctttactttaagcggataaataatcagttatcagaacaatgtaacgggtaaatgatctaatgattctacatggttatgtcctgaaatatgccgataacctcatattctgaggggtgaagtgaccaggaaacaggtgggaagggttgagggttgagacctaaacaattagaggtgatatgcctgctgaaatgagcacaaggacagaggatgaggaaaataagggaatttggaagactttaggatattagtggcatctttctctgtgattcttagcttccggtattaattaatactatttatttctaatattcaaataaatctagcaatcatttcattaagtctaataaaaattaatgaccctccttgcttgcagactttgaggaaataaaaaatgttttacagtggccaatgtaagcaggtgaaaataaatgatggaaaagaacagccagtaaggccaccagcatggcactcattgaaggttgcttttctgtcagtcaagactgaagattaaaggagaagagaaactgagactcagaaatggactgtgacttgctctcacagagctcgtgatggggctggatgtgtctatatttaattaatatcagttataaaaacttctgggtatttgaacttcctaatttgcttggattttgaataaaaggttttttgtataatcgttatcaactgtgaaaggcataaaataatgttaatgcttctgttttcctttacgataaaccaataaaatggaataaaatattcatttcattccaggaagacagatttctggaggagtgtgaaaatcaactctccttaatattaaggaccctgcccaatggtaacagttgttgccaagaaaagaaaaaaagaaaaaaaaaagacccaatcacccattggaggaaatctctaactacagtgcctccaggaaactcattggttattccagtcttagataaaattggtgccaggatttggttcgaactaatgtggaggaaaatatttcctaccggtccatagtgtcagagtggtgaacccctgcagccagcaggcctcctgaaaaaaaagtccatgggtgacagaagattcattgacttccaattccaagattcaaattcaagcctcagacccaggttgggcaatgctactgccaataatacttgcattgttgatgattccttcaagtataatctcaatggtgctgtctacagtgttgtattcatcttgggtctgataaccaacagtgtctctctgtttgtcttctgtttccgcatgaaaatgagaagtgagactgctatttttatcaccaatctagctgtctctgatttgctttttgtctgtacactaccttttaaaatattttacaacttcaaccgccactggccttttggtgacaccctctgcaagatctctggaactgcattccttaccaacatctatgggagcatgctctttctcacctgtattagtgtggatcgtttcctggccattgtctatccttttcgatctcgtactattaggactaggaggaattctgccattgtgtgtgctggtgtctggatcctagtcctcagtggcggtatttcagcctctttgttttccaccactaatgtcaacaatgcaaccaccacctgctttgaaggcttctccaaacgtgtctggaagacttatttatccaagatcacaatatttattgaagttgttgggtttatcattcctctaatattgaatgtctcttgctcttctgtggtgctgagaactcttcgcaagcctgctactctgtctcaaattgggaccaataagaaaaaagtactgaaaatgatcacagtacatatggcagtctttgtggtatgctttgtaccctacaactctgtcctcttcttgtatgccctggtgcgctcccaagctattactaattgctttttggaaagatttgcaaagatcatgtacccaatcaccttgtgccttgcaactctgaactgttgttttgaccctttcatctattacttcacccttgaatcctttcagaagtccttctacatcaatgcccacatcagaatggagtccctgtttaagactgaaacacctttgaccacaaagccttcccttccagctattcaagaggaagtgagtgatcaaacaacaaataatggtggtgaattaatgctagaatccaccttttaggtatgagaaatgtgttcaggtccagatatggtttctcctataatttttcctatgctataaactaaagatttgaagctaatgatactgagaataatgcaccaaatccagtcagatacatttgtttgaaggtatactgtagagtttttattgctgttttgttcagtaattataggtcaaatctaattacaacaaccaagatggattgccaaactcttctgcttggttggaatttcattgtatcgcattatccaggtggctagtggcatttgataatatagagatgactttgaaactttcaaaaaggtatttctattccaatgatatttggtaattaggttgggcctataaatatagaacaaattcagggatttttaaaaaattgtgttactactgatatatgctagttttattttatttttttgaactgtcattgagtttattttagcacaagaatatttttagcctaacattattaataagaaatgtgtcaaatttttaacattggtaaaatatgttatgtgcattttgaaaacagaaaacaaattgcgttggcatgtacgtgggtgggaagaaaaagaaaattaacaggatttacacaattataatcaccagcagtgtgagtttaaaaaacttcgttgtttttacaccaaattaaaattttcatgtcaaacttcaaagccagaaagctgctaaatacgtgtctggcaggtaaaagctggaaaattacttaaaacaggaaagtgtcaataaaaaaacttgagcaacaccaacatattttttcttaaaatgtcacgttatcttcattttgggaaactaggttctataaaatatttatcctccctgttatactttggagcacagcacagccagaaaggggctgcatttgtgcccaggtcaggagcaaattgaaaaaaaaaataaagtaatacaaaaaaatcaaactataaagcaaaaacatttattaaaacctgaattaatcctttttggagggaggagtagagatatataacctgaaaatacttattctttcttatcgaattttggagcctaatatagccaggagctgctgaatttgtgcccctggattggaagcaaataaaaaaaaaaaacaacacataaactaaaccaaaccaaaacaaaaaaaccagagaaccccaagaaaaataaaaataaaaaaacctcaacaataatttgtaacactttcattactatttgttgaggttctgtaaatgtaaaaatactatgtcatttgcataacattttgaagcacaacgcagctaccaagtggctaaattcgtctcctggttaggaacaagttgtgggaaaaaaaggtcaaaaatcaaactgcgataaaacaaacaaaacaagcacaaacaaaatttagaacttgcattttctgagcatctgcgaaacttacaaaacactataacattcatataatgctttggatcaaattgcaactaagaagctgctaaaatggcacccagtttaaaaggaattaaaaacagtattttaaaatctacaaaaaaagagaaaatttttttataatttacttaaaccgcaaaaatctttaaaactcttactagtttttaaactaaagtggatatttaagaatattagaacttgtaaatataacttctgagcttgaaagatgctacatttgtgctcaagtcaggagcagtggaaataaaccctcgtatacacacatacacagcagcagcaacaacaaaaaccaaaattaaatgttaaaccctgaaaaacaacaaaaatattttaaaatgtgcattaatcaatttttaaaatatttggataacatggcaatttaaaaatgctaagaattttaaaacaaaacttccaggaaaaatgtatcctgcaagttgctgaacttgtgccagaaagtggttaaacaattataaagcacagaacaataacaaaaaagtaaaacttctaaaacaataagcaaatttttaaaactcattaacttgtttttctttctgatgatatgcagacttaaaaatactgagacttttaagtaaaaatctgttagcataatgtaactttaaaaactgtaaaatctgtgtctgggttaggaacaaagtgaaaaaatgctaaaacaatagtaaaaacaaattcttaaaactggcattactttttcccaatgaaagtcctaaaagtaattatgcattatgtagtcttatgaaaagaggctatagatggaatatataaggcattagattcagttaaataaaattaggttaagataagttcagttgttagattatatggtaagatcaaatcagtaataaaagcgtgaataatcttttgtttctttcagtattcatgtttttccatttcttgttaagtataaaatatatgtgaacatttgtttgtgcccttgcttcttaacattataaaattttatgattatgacaccaaaccatttaatgggatattaactaagttgaaataaaatatattattaaatgtttcttgtgtaatttccatgtttagttttaatttttttatatttcacttctcaaatttccatttttatagttaatataaattgctaataataaaacttgtcacattaacaatgtaaccaagaaaatgtaaagtataactaaatataaaagtgactatgttacatcgaaaggaaaagcaattttgcagctgtaattgcaacttggattttaaatgtttattaaatgtaataaaatatatttgaatta

SEQ ID NO: 306 - DNA, 4668 bp, Homo sapiens
gcatttcctattgagacccccaagagttcccctggccgtcggctccagctcggacttcaggcctttttgtgtcctgtttgctaaaggcatgcgggctacagcattcaagagagggagtcgttaacaaagggaaagagataaatgtaaataagctcacatttacagaatgagcggtttgcagtaaaaagctgcggcagcccagagtctgctactttaggctgggctaacctttccctgtaaaaaaaaaaaaaaaaaaaaaaaaaaaaaaatggataaaaatatgcacttccaaagggcgagttgcccatttacatgtttattagctaattatctacaggcatcagcacattctctcatctagcacactctttcttggggtaagtttctcttttaaaaagatttgattttggcgtttgggggtgggggatagcataacaaactacagtggaaacactgatgctttgagagtgtaaggaaagaagttagacttcaactctgaagtactgaacaaggatcttcgtgatgaatggaagacagatttctggaggagtgtgaaaatcaactctccttaatattaaggaccctgcccaatggtaacagttgttgccaagaaaagaaaaaaagaaaaaaaaaagacccaatcacccattggaggaaatctctaactacagtgcctccaggaaactcattggttattccagtcttagataaaattggtgccaggatttggttcgaactaatgtggaggaaaatatttcctaccggtccatagtgtcagagtggtgaacccctgcagccagcaggcctcctgaaaaaaaagtccatgggtgacagaagattcattgacttccaattccaagattcaaattcaagcctcagacccaggttgggcaatgctactgccaataatacttgcattgttgatgattccttcaagtataatctcaatggtgctgtctacagtgttgtattcatcttgggtctgataaccaacagtgtctctctgtttgtcttctgtttccgcatgaaaatgagaagtgagactgctatttttatcaccaatctagctgtctctgatttgctttttgtctgtacactaccttttaaaatattttacaacttcaaccgccactggccttttggtgacaccctctgcaagatctctggaactgcattccttaccaacatctatgggagcatgctctttctcacctgtattagtgtggatcgtttcctggccattgtctatccttttcgatctcgtactattaggactaggaggaattctgccattgtgtgtgctggtgtctggatcctagtcctcagtggcggtatttcagcctctttgttttccaccactaatgtcaacaatgcaaccaccacctgctttgaaggcttctccaaacgtgtctggaagacttatttatccaagatcacaatatttattgaagttgttgggtttatcattcctctaatattgaatgtctcttgctcttctgtggtgctgagaactcttcgcaagcctgctactctgtctcaaattgggaccaataagaaaaaagtactgaaaatgatcacagtacatatggcagtctttgtggtatgctttgtaccctacaactctgtcctcttcttgtatgccctggtgcgctcccaagctattactaattgctttttggaaagatttgcaaagatcatgtacccaatcaccttgtgccttgcaactctgaactgttgttttgaccctttcatctattacttcacccttgaatcctttcagaagtccttctacatcaatgcccacatcagaatggagtccctgtttaagactgaaacacctttgaccacaaagccttcccttccagctattcaagaggaagtgagtgatcaaacaacaaataatggtggtgaattaatgctagaatccaccttttaggtatgagaaatgtgttcaggtccagatatggtttctcctataatttttcctatgctataaactaaagatttgaagctaatgatactgagaataatgcaccaaatccagtcagatacatttgtttgaaggtatactgtagagtttttattgctgttttgttcagtaattataggtcaaatctaattacaacaaccaagatggattgccaaactcttctgcttggttggaatttcattgtatcgcattatccaggtggctagtggcatttgataatatagagatgactttgaaactttcaaaaaggtatttctattccaatgatatttggtaattaggttgggcctataaatatagaacaaattcagggatttttaaaaaattgtgttactactgatatatgctagttttattttatttttttgaactgtcattgagtttattttagcacaagaatatttttagcctaacattattaataagaaatgtgtcaaatttttaacattggtaaaatatgttatgtgcattttgaaaacagaaaacaaattgcgttggcatgtacgtgggtgggaagaaaaagaaaattaacaggatttacacaattataatcaccagcagtgtgagtttaaaaaacttcgttgtttttacaccaaattaaaattttcatgtcaaacttcaaagccagaaagctgctaaatacgtgtctggcaggtaaaagctggaaaattacttaaaacaggaaagtgtcaataaaaaaacttgagcaacaccaacatattttttcttaaaatgtcacgttatcttcattttgggaaactaggttctataaaatatttatcctccctgttatactttggagcacagcacagccagaaaggggctgcatttgtgcccaggtcaggagcaaattgaaaaaaaaaataaagtaatacaaaaaaatcaaactataaagcaaaaacatttattaaaacctgaattaatcctttttggagggaggagtagagatatataacctgaaaatacttattctttcttatcgaattttggagcctaatatagccaggagctgctgaatttgtgcccctggattggaagcaaataaaaaaaaaaaacaacacataaactaaaccaaaccaaaacaaaaaaaccagagaaccccaagaaaaataaaaataaaaaaacctcaacaataatttgtaacactttcattactatttgttgaggttctgtaaatgtaaaaatactatgtcatttgcataacattttgaagcacaacgcagctaccaagtggctaaattcgtctcctggttaggaacaagttgtgggaaaaaaaggtcaaaaatcaaactgcgataaaacaaacaaaacaagcacaaacaaaatttagaacttgcattttctgagcatctgcgaaacttacaaaacactataacattcatataatgctttggatcaaattgcaactaagaagctgctaaaatggcacccagtttaaaaggaattaaaaacagtattttaaaatctacaaaaaaagagaaaatttttttataatttacttaaaccgcaaaaatctttaaaactcttactagtttttaaactaaagtggatatttaagaatattagaacttgtaaatataacttctgagcttgaaagatgctacatttgtgctcaagtcaggagcagtggaaataaaccctcgtatacacacatacacagcagcagcaacaacaaaaaccaaaattaaatgttaaaccctgaaaaacaacaaaaatattttaaaatgtgcattaatcaatttttaaaatatttggataacatggcaatttaaaaatgctaagaattttaaaacaaaacttccaggaaaaatgtatcctgcaagttgctgaacttgtgccagaaagtggttaaacaattataaagcacagaacaataacaaaaaagtaaaacttctaaaacaataagcaaatttttaaaactcattaacttgtttttctttctgatgatatgcagacttaaaaatactgagacttttaagtaaaaatctgttagcataatgtaactttaaaaactgtaaaatctgtgtctgggttaggaacaaagtgaaaaaatgctaaaacaatagtaaaaacaaattcttaaaactggcattactttttcccaatgaaagtcctaaaagtaattatgcattatgtagtcttatgaaaagaggctatagatggaatatataaggcattagattcagttaaataaaattaggttaagataagttcagttgttagattatatggtaagatcaaatcagtaataaaagcgtgaataatcttttgtttctttcagtattcatgtttttccatttcttgttaagtataaaatatatgtgaacatttgtttgtgcccttgcttcttaacattataaaattttatgattatgacaccaaaccatttaatgggatattaactaagttgaaataaaatatattattaaatgtttcttgtgtaatttccatgtttagttttaatttttttatatttcacttctcaaatttccatttttatagttaatataaattgctaataataaaacttgtcacattaacaatgtaaccaagaaaatgtaaagtataactaaatataaaagtgactatgttacatcgaaaggaaaagcaattttgcagctgtaattgcaacttggattttaaatgtttattaaatgtaataaaatatatttgaatta

SEQ ID NO: 307 - DNA, 4380 bp, Homo sapiens
ctgtttgctaaaggcatgcgggctacagcattcaagagagggagtcgttaacaaagggaaagagataaatgtaaataagctcacatttacagaatgagcggtttgcagtaaaaagctgcggcagcccagagtctgctactttaggctgggctaacctttccctgtaaaaaaaaaaaaaaaaaaaaaaaaaaaaaaatggataaaaatatgcacttccaaagggcgagttgcccatttacatgtttattagctaattatctacaggcatcagcacattctctcatctagcacactctttcttggggaagacagatttctggaggagtgtgaaaatcaactctccttaatattaagcacccattggaggaaatctctaactacagtgcctccaggaaactcattggttattccagtcttagataaaattggtgccaggatttggttcgaactaatgtggaggaaaatatttcctaccggtccatagtgtcagagtggtgaacccctgcagccagcaggcctcctgaaaaaaaagtccatgggtgacagaagattcattgacttccaattccaagattcaaattcaagcctcagacccaggttgggcaatgctactgccaataatacttgcattgttgatgattccttcaagtataatctcaatggtgctgtctacagtgttgtattcatcttgggtctgataaccaacagtgtctctctgtttgtcttctgtttccgcatgaaaatgagaagtgagactgctatttttatcaccaatctagctgtctctgatttgctttttgtctgtacactaccttttaaaatattttacaacttcaaccgccactggccttttggtgacaccctctgcaagatctctggaactgcattccttaccaacatctatgggagcatgctctttctcacctgtattagtgtggatcgtttcctggccattgtctatccttttcgatctcgtactattaggactaggaggaattctgccattgtgtgtgctggtgtctggatcctagtcctcagtggcggtatttcagcctctttgttttccaccactaatgtcaacaatgcaaccaccacctgctttgaaggcttctccaaacgtgtctggaagacttatttatccaagatcacaatatttattgaagttgttgggtttatcattcctctaatattgaatgtctcttgctcttctgtggtgctgagaactcttcgcaagcctgctactctgtctcaaattgggaccaataagaaaaaagtactgaaaatgatcacagtacatatggcagtctttgtggtatgctttgtaccctacaactctgtcctcttcttgtatgccctggtgcgctcccaagctattactaattgctttttggaaagatttgcaaagatcatgtacccaatcaccttgtgccttgcaactctgaactgttgttttgaccctttcatctattacttcacccttgaatcctttcagaagtccttctacatcaatgcccacatcagaatggagtccctgtttaagactgaaacacctttgaccacaaagccttcccttccagctattcaagaggaagtgagtgatcaaacaacaaataatggtggtgaattaatgctagaatccaccttttaggtatgagaaatgtgttcaggtccagatatggtttctcctataatttttcctatgctataaactaaagatttgaagctaatgatactgagaataatgcaccaaatccagtcagatacatttgtttgaaggtatactgtagagtttttattgctgttttgttcagtaattataggtcaaatctaattacaacaaccaagatggattgccaaactcttctgcttggttggaatttcattgtatcgcattatccaggtggctagtggcatttgataatatagagatgactttgaaactttcaaaaaggtatttctattccaatgatatttggtaattaggttgggcctataaatatagaacaaattcagggatttttaaaaaattgtgttactactgatatatgctagttttattttatttttttgaactgtcattgagtttattttagcacaagaatatttttagcctaacattattaataagaaatgtgtcaaatttttaacattggtaaaatatgttatgtgcattttgaaaacagaaaacaaattgcgttggcatgtacgtgggtgggaagaaaaagaaaattaacaggatttacacaattataatcaccagcagtgtgagtttaaaaaacttcgttgtttttacaccaaattaaaattttcatgtcaaacttcaaagccagaaagctgctaaatacgtgtctggcaggtaaaagctggaaaattacttaaaacaggaaagtgtcaataaaaaaacttgagcaacaccaacatattttttcttaaaatgtcacgttatcttcattttgggaaactaggttctataaaatatttatcctccctgttatactttggagcacagcacagccagaaaggggctgcatttgtgcccaggtcaggagcaaattgaaaaaaaaaataaagtaatacaaaaaaatcaaactataaagcaaaaacatttattaaaacctgaattaatcctttttggagggaggagtagagatatataacctgaaaatacttattctttcttatcgaattttggagcctaatatagccaggagctgctgaatttgtgcccctggattggaagcaaataaaaaaaaaaaacaacacataaactaaaccaaaccaaaacaaaaaaaccagagaaccccaagaaaaataaaaataaaaaaacctcaacaataatttgtaacactttcattactatttgttgaggttctgtaaatgtaaaaatactatgtcatttgcataacattttgaagcacaacgcagctaccaagtggctaaattcgtctcctggttaggaacaagttgtgggaaaaaaaggtcaaaaatcaaactgcgataaaacaaacaaaacaagcacaaacaaaatttagaacttgcattttctgagcatctgcgaaacttacaaaacactataacattcatataatgctttggatcaaattgcaactaagaagctgctaaaatggcacccagtttaaaaggaattaaaaacagtattttaaaatctacaaaaaaagagaaaatttttttataatttacttaaaccgcaaaaatctttaaaactcttactagtttttaaactaaagtggatatttaagaatattagaacttgtaaatataacttctgagcttgaaagatgctacatttgtgctcaagtcaggagcagtggaaataaaccctcgtatacacacatacacagcagcagcaacaacaaaaaccaaaattaaatgttaaaccctgaaaaacaacaaaaatattttaaaatgtgcattaatcaatttttaaaatatttggataacatggcaatttaaaaatgctaagaattttaaaacaaaacttccaggaaaaatgtatcctgcaagttgctgaacttgtgccagaaagtggttaaacaattataaagcacagaacaataacaaaaaagtaaaacttctaaaacaataagcaaatttttaaaactcattaacttgtttttctttctgatgatatgcagacttaaaaatactgagacttttaagtaaaaatctgttagcataatgtaactttaaaaactgtaaaatctgtgtctgggttaggaacaaagtgaaaaaatgctaaaacaatagtaaaaacaaattcttaaaactggcattactttttcccaatgaaagtcctaaaagtaattatgcattatgtagtcttatgaaaagaggctatagatggaatatataaggcattagattcagttaaataaaattaggttaagataagttcagttgttagattatatggtaagatcaaatcagtaataaaagcgtgaataatcttttgtttctttcagtattcatgtttttccatttcttgttaagtataaaatatatgtgaacatttgtttgtgcccttgcttcttaacattataaaattttatgattatgacaccaaaccatttaatgggatattaactaagttgaaataaaatatattattaaatgtttcttgtgtaatttccatgtttagttttaatttttttatatttcacttctcaaatttccatttttatagttaatataaattgctaataataaaacttgtcacattaacaatgtaaccaagaaaatgtaaagtataactaaatataaaagtgactatgttacatcgaaaggaaaagcaattttgcagctgtaattgcaacttggattttaaatgtttattaaatgtaataaaatatatttgaatta

SEQ ID NO: 308 - DNA, 4403 bp, Homo sapiens
gcatttcctattgagacccccaagagttcccctggccgtcggctccagctcggacttcaggcctttttgtgtcctgtttgctaaaggcatgcgggctacagcattcaagagagggagtcgttaacaaagggaaagagataaatgtaaataagctcacatttacagaatgagcggtttgcagtaaaaagctgcggcagcccagagtctgctactttaggctgggctaacctttccctgtaaaaaaaaaaaaaaaaaaaaaaaaaaaaaaatggataaaaatatgcacttccaaagggcgagttgcccatttacatgtttattagctaattatctacaggcatcagcacattctctcatctagcacactctttcttgggcacccattggaggaaatctctaactacagtgcctccaggaaactcattggttattccagtcttagataaaattggtgccaggatttggttcgaactaatgtggaggaaaatatttcctaccggtccatagtgtcagagtggtgaacccctgcagccagcaggcctcctgaaaaaaaagtccatgggtgacagaagattcattgacttccaattccaagattcaaattcaagcctcagacccaggttgggcaatgctactgccaataatacttgcattgttgatgattccttcaagtataatctcaatggtgctgtctacagtgttgtattcatcttgggtctgataaccaacagtgtctctctgtttgtcttctgtttccgcatgaaaatgagaagtgagactgctatttttatcaccaatctagctgtctctgatttgctttttgtctgtacactaccttttaaaatattttacaacttcaaccgccactggccttttggtgacaccctctgcaagatctctggaactgcattccttaccaacatctatgggagcatgctctttctcacctgtattagtgtggatcgtttcctggccattgtctatccttttcgatctcgtactattaggactaggaggaattctgccattgtgtgtgctggtgtctggatcctagtcctcagtggcggtatttcagcctctttgttttccaccactaatgtcaacaatgcaaccaccacctgctttgaaggcttctccaaacgtgtctggaagacttatttatccaagatcacaatatttattgaagttgttgggtttatcattcctctaatattgaatgtctcttgctcttctgtggtgctgagaactcttcgcaagcctgctactctgtctcaaattgggaccaataagaaaaaagtactgaaaatgatcacagtacatatggcagtctttgtggtatgctttgtaccctacaactctgtcctcttcttgtatgccctggtgcgctcccaagctattactaattgctttttggaaagatttgcaaagatcatgtacccaatcaccttgtgccttgcaactctgaactgttgttttgaccctttcatctattacttcacccttgaatcctttcagaagtccttctacatcaatgcccacatcagaatggagtccctgtttaagactgaaacacctttgaccacaaagccttcccttccagctattcaagaggaagtgagtgatcaaacaacaaataatggtggtgaattaatgctagaatccaccttttaggtatgagaaatgtgttcaggtccagatatggtttctcctataatttttcctatgctataaactaaagatttgaagctaatgatactgagaataatgcaccaaatccagtcagatacatttgtttgaaggtatactgtagagtttttattgctgttttgttcagtaattataggtcaaatctaattacaacaaccaagatggattgccaaactcttctgcttggttggaatttcattgtatcgcattatccaggtggctagtggcatttgataatatagagatgactttgaaactttcaaaaaggtatttctattccaatgatatttggtaattaggttgggcctataaatatagaacaaattcagggatttttaaaaaattgtgttactactgatatatgctagttttattttatttttttgaactgtcattgagtttattttagcacaagaatatttttagcctaacattattaataagaaatgtgtcaaatttttaacattggtaaaatatgttatgtgcattttgaaaacagaaaacaaattgcgttggcatgtacgtgggtgggaagaaaaagaaaattaacaggatttacacaattataatcaccagcagtgtgagtttaaaaaacttcgttgtttttacaccaaattaaaattttcatgtcaaacttcaaagccagaaagctgctaaatacgtgtctggcaggtaaaagctggaaaattacttaaaacaggaaagtgtcaataaaaaaacttgagcaacaccaacatattttttcttaaaatgtcacgttatcttcattttgggaaactaggttctataaaatatttatcctccctgttatactttggagcacagcacagccagaaaggggctgcatttgtgcccaggtcaggagcaaattgaaaaaaaaaataaagtaatacaaaaaaatcaaactataaagcaaaaacatttattaaaacctgaattaatcctttttggagggaggagtagagatatataacctgaaaatacttattctttcttatcgaattttggagcctaatatagccaggagctgctgaatttgtgcccctggattggaagcaaataaaaaaaaaaaacaacacataaactaaaccaaaccaaaacaaaaaaaccagagaaccccaagaaaaataaaaataaaaaaacctcaacaataatttgtaacactttcattactatttgttgaggttctgtaaatgtaaaaatactatgtcatttgcataacattttgaagcacaacgcagctaccaagtggctaaattcgtctcctggttaggaacaagttgtgggaaaaaaaggtcaaaaatcaaactgcgataaaacaaacaaaacaagcacaaacaaaatttagaacttgcattttctgagcatctgcgaaacttacaaaacactataacattcatataatgctttggatcaaattgcaactaagaagctgctaaaatggcacccagtttaaaaggaattaaaaacagtattttaaaatctacaaaaaaagagaaaatttttttataatttacttaaaccgcaaaaatctttaaaactcttactagtttttaaactaaagtggatatttaagaatattagaacttgtaaatataacttctgagcttgaaagatgctacatttgtgctcaagtcaggagcagtggaaataaaccctcgtatacacacatacacagcagcagcaacaacaaaaaccaaaattaaatgttaaaccctgaaaaacaacaaaaatattttaaaatgtgcattaatcaatttttaaaatatttggataacatggcaatttaaaaatgctaagaattttaaaacaaaacttccaggaaaaatgtatcctgcaagttgctgaacttgtgccagaaagtggttaaacaattataaagcacagaacaataacaaaaaagtaaaacttctaaaacaataagcaaatttttaaaactcattaacttgtttttctttctgatgatatgcagacttaaaaatactgagacttttaagtaaaaatctgttagcataatgtaactttaaaaactgtaaaatctgtgtctgggttaggaacaaagtgaaaaaatgctaaaacaatagtaaaaacaaattcttaaaactggcattactttttcccaatgaaagtcctaaaagtaattatgcattatgtagtcttatgaaaagaggctatagatggaatatataaggcattagattcagttaaataaaattaggttaagataagttcagttgttagattatatggtaagatcaaatcagtaataaaagcgtgaataatcttttgtttctttcagtattcatgtttttccatttcttgttaagtataaaatatatgtgaacatttgtttgtgcccttgcttcttaacattataaaattttatgattatgacaccaaaccatttaatgggatattaactaagttgaaataaaatatattattaaatgtttcttgtgtaatttccatgtttagttttaatttttttatatttcacttctcaaatttccatttttatagttaatataaattgctaataataaaacttgtcacattaacaatgtaaccaagaaaatgtaaagtataactaaatataaaagtgactatgttacatcgaaaggaaaagcaattttgcagctgtaattgcaacttggattttaaatgtttattaaatgtaataaaatatatttgaatta

SEQ ID NO: 309 - DNA, 2259 bp, Homo sapiens
cgataaagcccccgccgccgcggcagccagcttgcgctgtggggctgcccgggctgcgcggcgtctgcaggcgccaccgctgcctctttccggctgtgaccctcctcgccgccgccgcttggctgcgtcctccgactccccgcgccgccgagaccaggctcccgctccggttgcggccgcaccgccctccgcggccgccccctggggatccagcgagcgcggtcgtccttggtggaaggaaccatgaactggcatctccccctcttcctcttggcctctgtgacgctgccttccatctgctcccacttcaatcctctgtctctcgaggaactaggctccaacacggggatccaggttttcaatcagattgtgaagtcgaggcctcatgacaacatcgtgatctctccccatgggattgcgtcggtcctggggatgcttcagctgggggcggacggcaggaccaagaagcagctcgccatggtgatgagatacggcgtaaatggagttggtaaaatattaaagaagatcaacaaggccatcgtctccaagaagaataaagacattgtgacagtggctaacgccgtgtttgttaagaatgcctctgaaattgaagtgccttttgttacaaggaacaaagatgtgttccagtgtgaggtccggaatgtgaactttgaggatccagcctctgcctgtgattccatcaatgcatgggttaaaaatgaaaccagggatatgattgacaatctgctgtccccagatcttattgatggtgtgctcaccagactggtcctcgtcaacgcagtgtatttcaagggtctgtggaaatcacggttccaacccgagaacacaaagaaacgcactttcgtggcagccgacgggaaatcctatcaagtgccaatgctggcccagctctccgtgttccggtgtgggtcgacaagtgcccccaatgatttatggtacaacttcattgaactgccctaccacggggaaagcatcagcatgctgattgcactgccgactgagagctccactccgctgtctgccatcatcccacacatcagcaccaagaccatagacagctggatgagcatcatggtgcccaagagggtgcaggtgatcctgcccaagttcacagctgtagcacaaacagatttgaaggagccgctgaaagttcttggcattactgacatgtttgattcatcaaaggcaaattttgcaaaaataacaacagggtcagaaaacctccatgtttctcatatcttgcaaaaagcaaaaattgaagtcagtgaagatggaaccaaagcttcagcagcaacaactgcaattctcattgcaagatcatcgcctccctggtttatagtagacagaccttttctgtttttcatccgacataatcctacaggtgctgtgttattcatggggcagataaacaaaccctgaagagtatacaaaagaaaccatgcaaagcaacgactactttgctacgaagaaagactcctttcctgcatctttcatagttctgttaaatatttttgtacatcgcttctttttcaaaactagttcttaggaacagactcgatgcaagtgtttctgttctgggaggtattggagggaaaaaacaagcaggatggctggaacactgtactgaggaatgaatagaaaggcttccagatgtctaaaagattctttaaactactgaactgttacctaggttaacaaccctgttgagtatttgctgtttgtccagttcaggaatttttgttttgttttgtctatatgtgcggcttttcagaagaaatttaatcagtgtgacagaaaaaaaaatgttttatggtagcttttactttttatgaaaaaaaaattatttgccttttaaattcttttcccccatccccctccaaagtcttgatagcaagcgttattttgggggtagaaacggtgaaatctctagcctctttgtgtttttgttgttgttgttgttgttgttttatataatgcatgtattcactaaaataaaatttaaaaaactcctgtcttgctagacaaggttgctgttgtgcagtgtgcctgtcactactggtctgtactccttggatttgcatttttgtattttgtacaaagtaaaaataaactgttatgagtagtaaaaataaagctatttctctgctatttgaaaatacaatagaagaaactgagccttttagacattcgtcagcctcttctaataaacctttgtactatgtaaacatcaggaaattc

SEQ ID NO: 310 - DNA, 2256 bp, Homo sapiens
cgataaagcccccgccgccgcggcagccagcttgcgctgtggggctgcccgggctgcgcggcgtctgcaggcgccaccgctgcctctttccggctgtgaccctcctcgccgccgccgcttggctgcgtcctccgactccccgcgccgccgagaccaggctcccgctccggttgcggccgcaccgccctccgcggccgccccctggggatccagcgagcgcggtcgtccttggtggaaggaaccatgaactggcatctccccctcttcctcttggcctctgtgacgctgccttccatctgctcccacttcaatcctctgtctctcgaggaactaggctccaacacggggatccaggttttcaatcagattgtgaagtcgaggcctcatgacaacatcgtgatctctccccatgggattgcgtcggtcctggggatgcttcagctgggggcggacggcaggaccaagaagcagctcgccatggtgatgagatacggcgtaaatggagttggtaaaatattaaagaagatcaacaaggccatcgtctccaagaagaataaagacattgtgacagtggctaacgccgtgtttgttaagaatgcctctgaaattgaagtgccttttgttacaaggaacaaagatgtgttccagtgtgaggtccggaatgtgaactttgaggatccagcctctgcctgtgattccatcaatgcatgggttaaaaatgaaaccagggatatgattgacaatctgctgtccccagatcttattgatggtgtgctcaccagactggtcctcgtcaacgcagtgtatttcaagggtctgtggaaatcacggttccaacccgagaacacaaagaaacgcactttcgtggcagccgacgggaaatcctatcaagtgccaatgctggcccagctctccgtgttccggtgtgggtcgacaagtgcccccaatgatttatggtacaacttcattgaactgccctaccacggggaaagcatcagcatgctgattgcactgccgactgagagctccactccgctgtctgccatcatcccacacatcagcaccaagaccatagacagctggatgagcatcatggtgcccaagagggtgcaggtgatcctgcccaagttcacagctgtagcacaaacagatttgaaggagccgctgaaagttcttggcattactgacatgtttgattcatcaaaggcaaattttgcaaaaataacaaggtcagaaaacctccatgtttctcatatcttgcaaaaagcaaaaattgaagtcagtgaagatggaaccaaagcttcagcagcaacaactgcaattctcattgcaagatcatcgcctccctggtttatagtagacagaccttttctgtttttcatccgacataatcctacaggtgctgtgttattcatggggcagataaacaaaccctgaagagtatacaaaagaaaccatgcaaagcaacgactactttgctacgaagaaagactcctttcctgcatctttcatagttctgttaaatatttttgtacatcgcttctttttcaaaactagttcttaggaacagactcgatgcaagtgtttctgttctgggaggtattggagggaaaaaacaagcaggatggctggaacactgtactgaggaatgaatagaaaggcttccagatgtctaaaagattctttaaactactgaactgttacctaggttaacaaccctgttgagtatttgctgtttgtccagttcaggaatttttgttttgttttgtctatatgtgcggcttttcagaagaaatttaatcagtgtgacagaaaaaaaaatgttttatggtagcttttactttttatgaaaaaaaaattatttgccttttaaattcttttcccccatccccctccaaagtcttgatagcaagcgttattttgggggtagaaacggtgaaatctctagcctctttgtgtttttgttgttgttgttgttgttgttttatataatgcatgtattcactaaaataaaatttaaaaaactcctgtcttgctagacaaggttgctgttgtgcagtgtgcctgtcactactggtctgtactccttggatttgcatttttgtattttgtacaaagtaaaaataaactgttatgagtagtaaaaataaagctatttctctgctatttgaaaatacaatagaagaaactgagccttttagacattcgtcagcctcttctaataaacctttgtactatgtaaacatcaggaaattc

SEQ ID NO: 311 - DNA, 2186 bp, Homo sapiens
gttacctctgcctgggcagagggaggtgacgcgcggtgtggggaaagcctttaacttggcctctggcagccgatttaacccgagcgagcaggtctttgctattttcatcatctgtagaaacgggagttgcgaggcggatgagtgactgcaggtcgtccttggtggaaggaaccatgaactggcatctccccctcttcctcttggcctctgtgacgctgccttccatctgctcccacttcaatcctctgtctctcgaggaactaggctccaacacggggatccaggttttcaatcagattgtgaagtcgaggcctcatgacaacatcgtgatctctccccatgggattgcgtcggtcctggggatgcttcagctgggggcggacggcaggaccaagaagcagctcgccatggtgatgagatacggcgtaaatggagttggtaaaatattaaagaagatcaacaaggccatcgtctccaagaagaataaagacattgtgacagtggctaacgccgtgtttgttaagaatgcctctgaaattgaagtgccttttgttacaaggaacaaagatgtgttccagtgtgaggtccggaatgtgaactttgaggatccagcctctgcctgtgattccatcaatgcatgggttaaaaatgaaaccagggatatgattgacaatctgctgtccccagatcttattgatggtgtgctcaccagactggtcctcgtcaacgcagtgtatttcaagggtctgtggaaatcacggttccaacccgagaacacaaagaaacgcactttcgtggcagccgacgggaaatcctatcaagtgccaatgctggcccagctctccgtgttccggtgtgggtcgacaagtgcccccaatgatttatggtacaacttcattgaactgccctaccacggggaaagcatcagcatgctgattgcactgccgactgagagctccactccgctgtctgccatcatcccacacatcagcaccaagaccatagacagctggatgagcatcatggtgcccaagagggtgcaggtgatcctgcccaagttcacagctgtagcacaaacagatttgaaggagccgctgaaagttcttggcattactgacatgtttgattcatcaaaggcaaattttgcaaaaataacaaggtcagaaaacctccatgtttctcatatcttgcaaaaagcaaaaattgaagtcagtgaagatggaaccaaagcttcagcagcaacaactgcaattctcattgcaagatcatcgcctccctggtttatagtagacagaccttttctgtttttcatccgacataatcctacaggtgctgtgttattcatggggcagataaacaaaccctgaagagtatacaaaagaaaccatgcaaagcaacgactactttgctacgaagaaagactcctttcctgcatctttcatagttctgttaaatatttttgtacatcgcttctttttcaaaactagttcttaggaacagactcgatgcaagtgtttctgttctgggaggtattggagggaaaaaacaagcaggatggctggaacactgtactgaggaatgaatagaaaggcttccagatgtctaaaagattctttaaactactgaactgttacctaggttaacaaccctgttgagtatttgctgtttgtccagttcaggaatttttgttttgttttgtctatatgtgcggcttttcagaagaaatttaatcagtgtgacagaaaaaaaaatgttttatggtagcttttactttttatgaaaaaaaaattatttgccttttaaattcttttcccccatccccctccaaagtcttgatagcaagcgttattttgggggtagaaacggtgaaatctctagcctctttgtgtttttgttgttgttgttgttgttgttttatataatgcatgtattcactaaaataaaatttaaaaaactcctgtcttgctagacaaggttgctgttgtgcagtgtgcctgtcactactggtctgtactccttggatttgcatttttgtattttgtacaaagtaaaaataaactgttatgagtagtaaaaataaagctatttctctgctatttgaaaatacaatagaagaaactgagccttttagacattcgtcagcctcttctaataaacctttgtactatgtaaacatcaggaaattc

SEQ ID NO: 312 - DNA, 2674 bp, Homo sapiens
aatccttggttaggaggaaagggagtggagaggaccgtgctgcctggcgttccccagctgcctttctttctgttttccccccaacggaatctctatgtggtctcctagagcctcgtgcctgcctctcagctagatgctgatatcattcccactcatgtagttgggaaggaagggtgtggcagagataaagggtccacggtcacgcagtatgtggggggtcacacagcctgtatgccaaagtggcacaccctgtgaatatgtagggtcgcacagcctttatgtgtcagtgccagagcctggacccgggtctgtagatgtgtgaaccgtgagctgataccatggatattcaaagatttacatcccatcaatgtttataccttcttgagaagaaatttgtgtcaaagcacactcctcctttcaagactacctcctcgccgtgctgcgtgatagccctagtatcacaaccaaaacacatgatacagaaagaggccagtatctgtgtggcttcaggctcttgtgcgttggccatgaagcaaaggaaggctgttgcatgaaataacctccttctgactccacccttgcatttgtgagatgtaaacagcagtgttaccaagaggtcttccagggaacacgttgcaggtcgtccttggtggaaggaaccatgaactggcatctccccctcttcctcttggcctctgtgacgctgccttccatctgctcccacttcaatcctctgtctctcgaggaactaggctccaacacggggatccaggttttcaatcagattgtgaagtcgaggcctcatgacaacatcgtgatctctccccatgggattgcgtcggtcctggggatgcttcagctgggggcggacggcaggaccaagaagcagctcgccatggtgatgagatacggcgtaaatggagttggtaaaatattaaagaagatcaacaaggccatcgtctccaagaagaataaagacattgtgacagtggctaacgccgtgtttgttaagaatgcctctgaaattgaagtgccttttgttacaaggaacaaagatgtgttccagtgtgaggtccggaatgtgaactttgaggatccagcctctgcctgtgattccatcaatgcatgggttaaaaatgaaaccagggatatgattgacaatctgctgtccccagatcttattgatggtgtgctcaccagactggtcctcgtcaacgcagtgtatttcaagggtctgtggaaatcacggttccaacccgagaacacaaagaaacgcactttcgtggcagccgacgggaaatcctatcaagtgccaatgctggcccagctctccgtgttccggtgtgggtcgacaagtgcccccaatgatttatggtacaacttcattgaactgccctaccacggggaaagcatcagcatgctgattgcactgccgactgagagctccactccgctgtctgccatcatcccacacatcagcaccaagaccatagacagctggatgagcatcatggtgcccaagagggtgcaggtgatcctgcccaagttcacagctgtagcacaaacagatttgaaggagccgctgaaagttcttggcattactgacatgtttgattcatcaaaggcaaattttgcaaaaataacaaggtcagaaaacctccatgtttctcatatcttgcaaaaagcaaaaattgaagtcagtgaagatggaaccaaagcttcagcagcaacaactgcaattctcattgcaagatcatcgcctccctggtttatagtagacagaccttttctgtttttcatccgacataatcctacaggtgctgtgttattcatggggcagataaacaaaccctgaagagtatacaaaagaaaccatgcaaagcaacgactactttgctacgaagaaagactcctttcctgcatctttcatagttctgttaaatatttttgtacatcgcttctttttcaaaactagttcttaggaacagactcgatgcaagtgtttctgttctgggaggtattggagggaaaaaacaagcaggatggctggaacactgtactgaggaatgaatagaaaggcttccagatgtctaaaagattctttaaactactgaactgttacctaggttaacaaccctgttgagtatttgctgtttgtccagttcaggaatttttgttttgttttgtctatatgtgcggcttttcagaagaaatttaatcagtgtgacagaaaaaaaaatgttttatggtagcttttactttttatgaaaaaaaaattatttgccttttaaattcttttcccccatccccctccaaagtcttgatagcaagcgttattttgggggtagaaacggtgaaatctctagcctctttgtgtttttgttgttgttgttgttgttgttttatataatgcatgtattcactaaaataaaatttaaaaaactcctgtcttgctagacaaggttgctgttgtgcagtgtgcctgtcactactggtctgtactccttggatttgcatttttgtattttgtacaaagtaaaaataaactgttatgagtagtaaaaataaagctatttctctgctatttgaaaatacaatagaagaaactgagccttttagacattcgtcagcctcttctaataaacctttgtactatgtaaacatcaggaaattc

SEQ ID NO: 313 - DNA, 2243 bp, Homo sapiens
tacccgcagctgggagcaccggggccggcgtggctcctgcccggccatccgagccggccctgaccctgaacctgaggtttccagctgctcgccggcaacccctaccccggacttaggctgcgcgccgccggatggggagagactggcgcactcttacttgttacctctgcctgggcagagggaggtgacgcgcggtgtggggaaagcctttaacttggcctctggcagccgatttaacccgagcgagcaggtctttgctattttcatcatctgtagaaacgggagttgcgaggcggatgagtgactgcaggtcgtccttggtggaaggaaccatgaactggcatctccccctcttcctcttggcctctgtgacgctgccttccatctgctcccacttcaatcctctgtctctcgaggaactaggctccaacacggggatccaggttttcaatcagattgtgaagtcgaggcctcatgacaacatcgtgatctctccccatgggattgcgtcggtcctggggatgcttcagctgggggcggacggcaggaccaagaagcagctcgccatggtgatgagatacggcgtaaatggagttggtaaaatattaaagaagatcaacaaggccatcgtctccaagaagaataaagacattgtgacagtggctaacgccgtgtttgttaagaatgcctctgaaattgaagtgccttttgttacaaggaacaaagatgtgttccagtgtgaggtccggaatgtgaactttgaggatccagcctctgcctgtgattccatcaatgcatgggttaaaaatgaaaccagggatatgattgacaatctgctgtccccagatcttattgatggtgtgctcaccagactggtcctcgtcaacgcagtgtatttcaagggtctgtggaaatcacggttccaacccgagaacacaaagaaacgcactttcgtggcagccgacgggaaatcctatcaagtgccaatgctggcccagctctccgtgttccggtgtgggtcgacaagtgcccccaatgatttatggtacaacttcattgaactgccctaccacggggaaagcatcagcatgctgattgcactgccgactgagagctccactccgctgtctgccatcatcccacacatcagcaccaagaccatagacagctggatgagcatcatggtgcccaagagggtgcaggtgatcctgcccaagttcacagctgtagcacaaacagatttgaaggagccgctgaaagttcttggcattactgacatgtttgattcatcaaaggcaaattttgcaaaaataacaacagggtcagaaaacctccatgtttctcatatcttgcaaaaagcaaaaattgaagtcagtgaagatggaaccaaagcttcagcagcaacaactgcaattctcattgcaagatcatcgcctccctggtttatagtagacagaccttttctgtttttcatccgacataatcctacaggtgctgtgttattcatggggcagataaacaaaccctgaagagtatacaaaagaaaccatgcaaagcaacgactactttgctacgaagaaagactcctttcctgcatctttcatagttctgttaaatatttttgtacatcgcttctttttcaaaactagttcttaggaacagactcgatgcaagtgtttctgttctgggaggtattggagggaaaaaacaagcaggatggctggaacactgtactgaggaatgaatagaaaggcttccagatgtctaaaagattctttaaactactgaactgttacctaggttaacaaccctgttgagtatttgctgtttgtccagttcaggaatttttgttttgttttgtctatatgtgcggcttttcagaagaaatttaatcagtgtgacagaaaaaaaaatgttttatggtagcttttactttttatgaaaaaaaaattatttgccttttaaattcttttcccccatccccctccaaagtcttgatagcaagcgttattttggtggtagaaacggtgaaatctctagcctctttgtgtttttgttgttgttgttgttgttgttttatataatgcatgtattcactaaaataaaatttaaaaaactcctgtcttgctagacaaggttgctgttgtgcagtgtgcctgtcactactggtctgtactccttggatttgcatttttgtattttgtacaaagtaaaaataaactgttatgagtagtaaaaataaa

SEQ ID NO: 314 - DNA, 2135 bp, Homo sapiens
tttcctgctgcactctcagtgggcagtactccccaatgatcacctggtcatctgtcctgcccgcaggcttcaggctcttgtgcgttggccatgaagcaaaggaaggctgttgcatgaaataacctccttctgactccacccttgcatttgtgagatgtaaacagcagtgttaccaagaggtcttccagggaacacgttgcaggtcgtccttggtggaaggaaccatgaactggcatctccccctcttcctcttggcctctgtgacgctgccttccatctgctcccacttcaatcctctgtctctcgaggaactaggctccaacacggggatccaggttttcaatcagattgtgaagtcgaggcctcatgacaacatcgtgatctctccccatgggattgcgtcggtcctggggatgcttcagctgggggcggacggcaggaccaagaagcagctcgccatggtgatgagatacggcgtaaatggagttggtaaaatattaaagaagatcaacaaggccatcgtctccaagaagaataaagacattgtgacagtggctaacgccgtgtttgttaagaatgcctctgaaattgaagtgccttttgttacaaggaacaaagatgtgttccagtgtgaggtccggaatgtgaactttgaggatccagcctctgcctgtgattccatcaatgcatgggttaaaaatgaaaccagggatatgattgacaatctgctgtccccagatcttattgatggtgtgctcaccagactggtcctcgtcaacgcagtgtatttcaagggtctgtggaaatcacggttccaacccgagaacacaaagaaacgcactttcgtggcagccgacgggaaatcctatcaagtgccaatgctggcccagctctccgtgttccggtgtgggtcgacaagtgcccccaatgatttatggtacaacttcattgaactgccctaccacggggaaagcatcagcatgctgattgcactgccgactgagagctccactccgctgtctgccatcatcccacacatcagcaccaagaccatagacagctggatgagcatcatggtgcccaagagggtgcaggtgatcctgcccaagttcacagctgtagcacaaacagatttgaaggagccgctgaaagttcttggcattactgacatgtttgattcatcaaaggcaaattttgcaaaaataacaacagggtcagaaaacctccatgtttctcatatcttgcaaaaagcaaaaattgaagtcagtgaagatggaaccaaagcttcagcagcaacaactgcaattctcattgcaagatcatcgcctccctggtttatagtagacagaccttttctgtttttcatccgacataatcctacaggtgctgtgttattcatggggcagataaacaaaccctgaagagtatacaaaagaaaccatgcaaagcaacgactactttgctacgaagaaagactcctttcctgcatctttcatagttctgttaaatatttttgtacatcgcttctttttcaaaactagttcttaggaacagactcgatgcaagtgtttctgttctgggaggtattggagggaaaaaacaagcaggatggctggaacactgtactgaggaatgaatagaaaggcttccagatgtctaaaagattctttaaactactgaactgttacctaggttaacaaccctgttgagtatttgctgtttgtccagttcaggaatttttgttttgttttgtctatatgtgcggcttttcagaagaaatttaatcagtgtgacagaaaaaaaaatgttttatggtagcttttactttttatgaaaaaaaaattatttgccttttaaattcttttcccccatccccctccaaagtcttgatagcaagcgttattttggtggtagaaacggtgaaatctctagcctctttgtgtttttgttgttgttgttgttgttgttttatataatgcatgtattcactaaaataaaatttaaaaaactcctgtcttgctagacaaggttgctgttgtgcagtgtgcctgtcactactggtctgtactccttggatttgcatttttgtattttgtacaaagtaaaaataaactgttatgagtagtaaaaataaa

SEQ ID NO: 315 - DNA, 1972 bp, Homo sapiens
atttggatgttgctgccatacttttcagcggctgaaaaggtcgtccttggtggaaggaaccatgaactggcatctccccctcttcctcttggcctctgtgacgctgccttccatctgctcccacttcaatcctctgtctctcgaggaactaggctccaacacggggatccaggttttcaatcagattgtgaagtcgaggcctcatgacaacatcgtgatctctccccatgggattgcgtcggtcctggggatgcttcagctgggggcggacggcaggaccaagaagcagctcgccatggtgatgagatacggcgtaaatggagttggtaaaatattaaagaagatcaacaaggccatcgtctccaagaagaataaagacattgtgacagtggctaacgccgtgtttgttaagaatgcctctgaaattgaagtgccttttgttacaaggaacaaagatgtgttccagtgtgaggtccggaatgtgaactttgaggatccagcctctgcctgtgattccatcaatgcatgggttaaaaatgaaaccagggatatgattgacaatctgctgtccccagatcttattgatggtgtgctcaccagactggtcctcgtcaacgcagtgtatttcaagggtctgtggaaatcacggttccaacccgagaacacaaagaaacgcactttcgtggcagccgacgggaaatcctatcaagtgccaatgctggcccagctctccgtgttccggtgtgggtcgacaagtgcccccaatgatttatggtacaacttcattgaactgccctaccacggggaaagcatcagcatgctgattgcactgccgactgagagctccactccgctgtctgccatcatcccacacatcagcaccaagaccatagacagctggatgagcatcatggtgcccaagagggtgcaggtgatcctgcccaagttcacagctgtagcacaaacagatttgaaggagccgctgaaagttcttggcattactgacatgtttgattcatcaaaggcaaattttgcaaaaataacaacagggtcagaaaacctccatgtttctcatatcttgcaaaaagcaaaaattgaagtcagtgaagatggaaccaaagcttcagcagcaacaactgcaattctcattgcaagatcatcgcctccctggtttatagtagacagaccttttctgtttttcatccgacataatcctacaggtgctgtgttattcatggggcagataaacaaaccctgaagagtatacaaaagaaaccatgcaaagcaacgactactttgctacgaagaaagactcctttcctgcatctttcatagttctgttaaatatttttgtacatcgcttctttttcaaaactagttcttaggaacagactcgatgcaagtgtttctgttctgggaggtattggagggaaaaaacaagcaggatggctggaacactgtactgaggaatgaatagaaaggcttccagatgtctaaaagattctttaaactactgaactgttacctaggttaacaaccctgttgagtatttgctgtttgtccagttcaggaatttttgttttgttttgtctatatgtgcggcttttcagaagaaatttaatcagtgtgacagaaaaaaaaatgttttatggtagcttttactttttatgaaaaaaaaattatttgccttttaaattcttttcccccatccccctccaaagtcttgatagcaagcgttattttggtggtagaaacggtgaaatctctagcctctttgtgtttttgttgttgttgttgttgttgttttatataatgcatgtattcactaaaataaaatttaaaaaactcctgtcttgctagacaaggttgctgttgtgcagtgtgcctgtcactactggtctgtactccttggatttgcatttttgtattttgtacaaagtaaaaataaactgttatgagtagtaaaaataaa

SEQ ID NO: 316 - DNA, 2132 bp, Homo sapiens
tttcctgctgcactctcagtgggcagtactccccaatgatcacctggtcatctgtcctgcccgcaggcttcaggctcttgtgcgttggccatgaagcaaaggaaggctgttgcatgaaataacctccttctgactccacccttgcatttgtgagatgtaaacagcagtgttaccaagaggtcttccagggaacacgttgcaggtcgtccttggtggaaggaaccatgaactggcatctccccctcttcctcttggcctctgtgacgctgccttccatctgctcccacttcaatcctctgtctctcgaggaactaggctccaacacggggatccaggttttcaatcagattgtgaagtcgaggcctcatgacaacatcgtgatctctccccatgggattgcgtcggtcctggggatgcttcagctgggggcggacggcaggaccaagaagcagctcgccatggtgatgagatacggcgtaaatggagttggtaaaatattaaagaagatcaacaaggccatcgtctccaagaagaataaagacattgtgacagtggctaacgccgtgtttgttaagaatgcctctgaaattgaagtgccttttgttacaaggaacaaagatgtgttccagtgtgaggtccggaatgtgaactttgaggatccagcctctgcctgtgattccatcaatgcatgggttaaaaatgaaaccagggatatgattgacaatctgctgtccccagatcttattgatggtgtgctcaccagactggtcctcgtcaacgcagtgtatttcaagggtctgtggaaatcacggttccaacccgagaacacaaagaaacgcactttcgtggcagccgacgggaaatcctatcaagtgccaatgctggcccagctctccgtgttccggtgtgggtcgacaagtgcccccaatgatttatggtacaacttcattgaactgccctaccacggggaaagcatcagcatgctgattgcactgccgactgagagctccactccgctgtctgccatcatcccacacatcagcaccaagaccatagacagctggatgagcatcatggtgcccaagagggtgcaggtgatcctgcccaagttcacagctgtagcacaaacagatttgaaggagccgctgaaagttcttggcattactgacatgtttgattcatcaaaggcaaattttgcaaaaataacaaggtcagaaaacctccatgtttctcatatcttgcaaaaagcaaaaattgaagtcagtgaagatggaaccaaagcttcagcagcaacaactgcaattctcattgcaagatcatcgcctccctggtttatagtagacagaccttttctgtttttcatccgacataatcctacaggtgctgtgttattcatggggcagataaacaaaccctgaagagtatacaaaagaaaccatgcaaagcaacgactactttgctacgaagaaagactcctttcctgcatctttcatagttctgttaaatatttttgtacatcgcttctttttcaaaactagttcttaggaacagactcgatgcaagtgtttctgttctgggaggtattggagggaaaaaacaagcaggatggctggaacactgtactgaggaatgaatagaaaggcttccagatgtctaaaagattctttaaactactgaactgttacctaggttaacaaccctgttgagtatttgctgtttgtccagttcaggaatttttgttttgttttgtctatatgtgcggcttttcagaagaaatttaatcagtgtgacagaaaaaaaaatgttttatggtagcttttactttttatgaaaaaaaaattatttgccttttaaattcttttcccccatccccctccaaagtcttgatagcaagcgttattttggtggtagaaacggtgaaatctctagcctctttgtgtttttgttgttgttgttgttgttgttttatataatgcatgtattcactaaaataaaatttaaaaaactcctgtcttgctagacaaggttgctgttgtgcagtgtgcctgtcactactggtctgtactccttggatttgcatttttgtattttgtacaaagtaaaaataaactgttatgagtagtaaaaataaa

SEQ ID NO: 317 - DNA, 1969 bp, Homo sapiens
atttggatgttgctgccatacttttcagcggctgaaaaggtcgtccttggtggaaggaaccatgaactggcatctccccctcttcctcttggcctctgtgacgctgccttccatctgctcccacttcaatcctctgtctctcgaggaactaggctccaacacggggatccaggttttcaatcagattgtgaagtcgaggcctcatgacaacatcgtgatctctccccatgggattgcgtcggtcctggggatgcttcagctgggggcggacggcaggaccaagaagcagctcgccatggtgatgagatacggcgtaaatggagttggtaaaatattaaagaagatcaacaaggccatcgtctccaagaagaataaagacattgtgacagtggctaacgccgtgtttgttaagaatgcctctgaaattgaagtgccttttgttacaaggaacaaagatgtgttccagtgtgaggtccggaatgtgaactttgaggatccagcctctgcctgtgattccatcaatgcatgggttaaaaatgaaaccagggatatgattgacaatctgctgtccccagatcttattgatggtgtgctcaccagactggtcctcgtcaacgcagtgtatttcaagggtctgtggaaatcacggttccaacccgagaacacaaagaaacgcactttcgtggcagccgacgggaaatcctatcaagtgccaatgctggcccagctctccgtgttccggtgtgggtcgacaagtgcccccaatgatttatggtacaacttcattgaactgccctaccacggggaaagcatcagcatgctgattgcactgccgactgagagctccactccgctgtctgccatcatcccacacatcagcaccaagaccatagacagctggatgagcatcatggtgcccaagagggtgcaggtgatcctgcccaagttcacagctgtagcacaaacagatttgaaggagccgctgaaagttcttggcattactgacatgtttgattcatcaaaggcaaattttgcaaaaataacaaggtcagaaaacctccatgtttctcatatcttgcaaaaagcaaaaattgaagtcagtgaagatggaaccaaagcttcagcagcaacaactgcaattctcattgcaagatcatcgcctccctggtttatagtagacagaccttttctgtttttcatccgacataatcctacaggtgctgtgttattcatggggcagataaacaaaccctgaagagtatacaaaagaaaccatgcaaagcaacgactactttgctacgaagaaagactcctttcctgcatctttcatagttctgttaaatatttttgtacatcgcttctttttcaaaactagttcttaggaacagactcgatgcaagtgtttctgttctgggaggtattggagggaaaaaacaagcaggatggctggaacactgtactgaggaatgaatagaaaggcttccagatgtctaaaagattctttaaactactgaactgttacctaggttaacaaccctgttgagtatttgctgtttgtccagttcaggaatttttgttttgttttgtctatatgtgcggcttttcagaagaaatttaatcagtgtgacagaaaaaaaaatgttttatggtagcttttactttttatgaaaaaaaaattatttgccttttaaattcttttcccccatccccctccaaagtcttgatagcaagcgttattttggtggtagaaacggtgaaatctctagcctctttgtgtttttgttgttgttgttgttgttgttttatataatgcatgtattcactaaaataaaatttaaaaaactcctgtcttgctagacaaggttgctgttgtgcagtgtgcctgtcactactggtctgtactccttggatttgcatttttgtattttgtacaaagtaaaaataaactgttatgagtagtaaaaataaa

SEQ ID NO: 318 - DNA, 6199 bp, Homo sapiens
cctccgccccaccttccctgcccgatgaggggcagtggctgccgccgtcacgtgtgctggcagccgccaagtgaggccgcttttgcgacgcggtgacagccaaatggtgcgacaggaggagctgcagccgcggccgcagcgcccgcacggagaggcttgaggcggctcctggcgtcgcccagagggagcgactagacgaacagtccggtgagggcggcgagaggaagcccgctacgagtgccctagctccccgccgctctcgatgaaccggacggaataagccgcgcctccagcaggggctgcgcctccatgaatccctagttgtttttttttttttctttctctcccctctcctcacccccaccccgagccccgtcccgccttctcccttcgccagaggcggccgcgtccaggtgcggagtccataccggagcgcaatggcgtccaaccccgaacggggggagattctgctcacggaactgcagggggattcccgaagtcttccgttttctgagaatgtgagtgctgttcaaaaattagacttttcagatacaatggtgcagcagaaattggatgatatcaaggatcgaattaagagagaaataaggaaagaactgaaaatcaaagaaggagctgaaaatctgaggaaagtcacaacagataaaaaaagtttggcttatgtagacaacattttgaaaaaatcaaataaaaaattagaagaactacatcacaagctgcaggaattaaatgcacatattgttgtatcagatccagaagatattacagattgcccaaggactccagatactccaaataatgaccctcgttgttctactagcaacaatagattgaaggccttacaaaaacaattggatatagaacttaaagtaaaacaaggtgcagagaatatgatacagatgtattcaaatggatcttcaaaggatcggaaactccatggtacagctcagcaactgctccaggacagcaagacaaaaatagaagtcatacgaatgcagattcttcaggcagtccagactaatgaattggcttttgataatgcaaaacctgtgataagtcctcttgaacttcggatggaagaattaaggcatcattttaggatagagtttgcagtagcagaaggtgcaaagaatgtaatgaaattacttggctcaggaaaagtaacagacagaaaagcactttcagaagctcaagcaagatttaatgaatcaagtcagaagttggaccttttaaagtattcattagagcaaagattaaacgaagtccccaagaatcatcccaaaagcaggattattattgaagaactttcacttgttgctgcatcaccaacactaagtccacgtcaaagtatgatatctacgcaaaatcaatatagtacactatccaaaccagcagcactaacaggtactttggaagttcgtcttatgggctgccaagatatcctagagaatgtccctggacggtcaaaagcaacatcagttgcactgcctggttggagtccaagtgaaaccagatcatctttcatgagcagaacgagtaaaagtaaaagcggaagtagtcgaaatcttctaaaaaccgatgacttgtccaatgatgtctgtgctgttttgaagctcgataatactgtggttggccaaactagctggaaacccatttccaatcagtcatgggaccagaagtttacactggaactggacaggtcacgtgaactggaaatttcagtttattggcgtgattggcggtctctgtgtgctgtaaaatttctgaggttagaagattttttagacaaccaacggcatggcatgtgtctctatttggaaccacagggtactttatttgcagaggttaccttttttaatccagttattgaaagaagaccaaaacttcaaagacaaaagaaaattttttcaaagcaacaaggcaaaacatttctcagagctcctcaaatgaatattaatattgccacttggggaaggctagtaagaagagctattcctacagtaaatcattctggcaccttcagccctcaagctcctgtgcctactacagtgccagtggttgatgtacgcatccctcaactagcacctccagctagtgattctacagtaaccaaattggactttgatcttgagcctgaacctcctccagccccaccacgagcttcttctcttggagaaatagatgaatcttctgaattaagagttttggatataccaggacaggattcagagactgtttttgatattcagaatgacagaaatagtatacttccaaaatctcaatctgaatacaagcctgatactcctcagtcaggcctagaatatagtggtattcaagaacttgaggacagaagatctcagcaaaggtttcagtttaatctacaagatttcaggtgttgtgctgtcttgggaagaggacattttggaaaggtgcttttagctgaatataaaaacacaaatgagatgtttgctataaaagccttaaagaaaggagatattgtggctcgagatgaagtagacagcctgatgtgtgaaaaaagaatttttgaaactgtgaatagtgtaaggcatccctttttggtgaacctttttgcatgtttccaaaccaaagagcatgtttgctttgtaatggaatatgctgccggtggggacctaatgatgcacattcatactgatgtcttttctgaaccaagagctgtattttatgctgcttgtgtagttcttgggttgcagtatttacatgaacacaaaattgtttatagagatttgaaattggataacttattgctagatacagagggctttgtgaaaattgctgattttggtctttgcaaagaaggaatgggatatggagatagaacaagcacattttgtggcactcctgaatttcttgccccagaagtattaacagaaacttcttatacaagggctgtagattggtggggccttggcgtgcttatatatgaaatgcttgttggtgagtctccctttcctggtgatgatgaagaggaagtttttgacagtattgtaaatgatgaagtaaggtatccaaggttcttatctacagaagccatttctataatgagaaggctgttaagaagaaatcctgaacggcgccttggggctagcgagaaagatgcagaggatgtaaaaaagcacccatttttccggctaattgattggagcgctctgatggacaaaaaagtaaagccaccatttatacctaccataagaggacgagaagatgttagtaattttgatgatgaatttacctcagaagcacctattctgactccacctcgagaaccaaggatactttcggaagaggagcaggaaatgttcagagattttgactacattgctgattggtgttaagttgctagacactgcgaaaccaagctgactcacaagaagacctcttaaaaatagcaacccttcatttgctctctgtgccaccaatagcttctgagttttttgttgttgttgtttttattgaaacacgtgaagatttgtttaaaagtaccattctaatacttcttcaaaagtggctcctcattgtacttcagcgtaaatatgagcactggaaacagtttcatggagtttaagttgagtgaacatcggccatgaaaatccatcacgaatacttttggatcaatagtctatttttaaaaagaaagaaaaaaaccacttttttatagtccctagctttgccatatgcccgccttaagtggaaggaaagttaatcacttaactatgttttataaaaagaaaaaagggcttggaatgctattactgttcacacaaagtatgattctgtttgaataaggcaaatgctcctttttttaaaaaaaaagacattactgtaatatcaaaaaccgtggcagtttgtatacaactcggggcttgattttttttaaaaaaacagaatgaattgatgtcttattttataaatgttctatatttattaggagaaaactttatattgccttttttatcaatcatgtaacaggcttatagctttccaacagagctgcttgccaaacaattttttttgtttattaaacagtgctgaaacaaacaggatcagcatttacttaagatgttaagaatgaggacttttaatcagccgaaccaagatattgttacctgtatgcattcccaaagtctagatgctcagtatgttcagtcatatctttcagaatcagtgaaccgattaccctttttttggtattcactctacatctgccaacctagttcaccttggttttgtgtctgctgtagaagggaaccataacttggttaaaccgtagggattatcattgtatacatgctgtgaacatgtatatgtgcaagttttaatgtattctatgttgtaggcttattatttaattttaccacttcatcacttttgtacagtggccaagcagacacctcaaactccagcatttacattaagtgcatttgtacattttaggccactggatccagattttatattggcagttattgagggcaaaagcaatatattgtaacagaatgtataaatatttttgataaaacagtctatattttattaaaaaatgaattataacactaaagctgtacctcaaaagtctcaaaaataatttgatgaaatattttatacaactcttcaaaggatccgtctgtggctttttatactcttttagggttgtctttttacaaaccatgactttccacttgcctgtagttttttgtttgttttggtttggtttgattttatatttttttctcctaatctatgactttattgttttttcttagtttagtaatagcatctttgatcctgtgcttagcatgttagggtcattatacctcaggaatagcaagctgttaagtaaccatactgaattaactatttaattacagtgagctcatctcttaaaaattgttcaggtgtaaatcttatgagaaacatgaaaaagcacactgatttatggagagttgagctaaaaacatttataaatatttgctgggatgttttagcatcttttcattgtactctgagaacaattaaaattgtccagagatcatttatattaccttccaaattgtttattacccaagatcctttgggagaaaatcttatagaatgggggaacaatatgtggtttaaagttattttaaaatgccagttaatttcctcggcaaaggacaatagaggaacttagcttaattgtctggctttaatttaaactgtgttaatacaacattaaaataaaacactaaatacttttgaggtacagtctgctcacttttttggttctcaaatagcaaagaaagtaatgtctaaaataggctcttagcattaaaaactgacagcatttcgtaactacacagtgtacagaatttttttttaattgaagtcaatcactaaaaaaattagaaggcagggtctatttacacaattaagctgaagaaagcactaattttttgtagtttaaaatatatatatattttagtcagatttaaaattttaagctttatagagtgtaaatatattttgctattactgtatgtgtatgtgactgctcaagcactttgtaaagaaattaggatattttagaatggtacactatgcattcaaatgaaatgtgcctttcactatgtcattctaagaaaacaagtgttttttgcagtcataaattatcacaaatgcacaaattaaagtctatatagattgaaatttgtaactttggttttaagtattctttccttttagaaacttcctaatgattaaaatatactttaacttttctgtgttcaaaatctcaaagactaattaactttaataaacattcttgcaagtactttttgtcctagtgaaggcttaaaaccatgaacattcagagcaaactgtccacttcattgggaataatgggaaaagtttgtattctgctcctgtaaggtcagtagcatcttttatttgaagcatatttatggactgcttactgtgtatagatactgagaataggaagtttttttttttaaagcaacaaaatgttgatgaatgaagaacagcctgttttaattaagatgcaagcaccagtattgtatgtacttttctcttgtttgaggttagcttattttaatttaggacctggcttctcaaaaaggcaaatgaataaaacagaatactagta

SEQ ID NO: 319 - DNA, 6151 bp, Homo sapiens
cctccgccccaccttccctgcccgatgaggggcagtggctgccgccgtcacgtgtgctggcagccgccaagtgaggccgcttttgcgacgcggtgacagccaaatggtgcgacaggaggagctgcagccgcggccgcagcgcccgcacggagaggcttgaggcggctcctggcgtcgcccagagggagcgactagacgaacagtccggtgagggcggcgagaggaagcccgctacgagtgccctagctccccgccgctctcgatgaaccggacggaataagccgcgcctccagcaggggctgcgcctccatgaatccctagttgtttttttttttttctttctctcccctctcctcacccccaccccgagccccgtcccgccttctcccttcgccagaggcggccgcgtccaggtgcggagtccataccggagcgcaatggcgtccaaccccgaacggggggagattctgctcacggaactgcagggggattcccgaagtcttccgttttctgagaatgtgagtgctgttcaaaaattagacttttcagatacaatggtgcagcagaaattggatgatatcaaggatcgaattaagagagaaataaggaaagaactgaaaatcaaagaaggagctgaaaatctgaggaaagtcacaacagataaaaaaagtttggcttatgtagacaacattttgaaaaaatcaaataaaaaattagaagaactacatcacaagctgcaggaattaaatgcacatattgttgtatcagatccagaagatattacagattgcccaaggactccagatactccaaataatgaccctcgttgttctactagcaacaatagattgaaggccttacaaaaacaattggatatagaacttaaagtaaaacaaggtgcagagaatatgatacagatgtattcaaatggatcttcaaaggatcggaaactccatggtacagctcagcaactgctccaggacagcaagacaaaaatagaagtcatacgaatgcagattcttcaggcagtccagactaatgaattggcttttgataatgcaaaacctgtgataagtcctcttgaacttcggatggaagaattaaggcatcattttaggatagagtttgcagtagcagaaggtgcaaagaatgtaatgaaattacttggctcaggaaaagtaacagacagaaaagcactttcagaagctcaagcaagatttaatgaatcaagtcagaagttggaccttttaaagtattcattagagcaaagattaaacgaagtccccaagaatcatcccaaaagcaggattattattgaagaactttcacttgttgctgcatcaccaacactaagtccacgtcaaagtatgatatctacgcaaaatcaatatagtacactatccaaaccagcagcactaacaggtactttggaagttcgtcttatgggctgccaagatatcctagagaatgtccctggacggtcaaaagcaacatcagttgcactgcctggttggagtccaagtgaaaccagatcatctttcatgagcagaacgagtaaaaatgatgtctgtgctgttttgaagctcgataatactgtggttggccaaactagctggaaacccatttccaatcagtcatgggaccagaagtttacactggaactggacaggtcacgtgaactggaaatttcagtttattggcgtgattggcggtctctgtgtgctgtaaaatttctgaggttagaagattttttagacaaccaacggcatggcatgtgtctctatttggaaccacagggtactttatttgcagaggttaccttttttaatccagttattgaaagaagaccaaaacttcaaagacaaaagaaaattttttcaaagcaacaaggcaaaacatttctcagagctcctcaaatgaatattaatattgccacttggggaaggctagtaagaagagctattcctacagtaaatcattctggcaccttcagccctcaagctcctgtgcctactacagtgccagtggttgatgtacgcatccctcaactagcacctccagctagtgattctacagtaaccaaattggactttgatcttgagcctgaacctcctccagccccaccacgagcttcttctcttggagaaatagatgaatcttctgaattaagagttttggatataccaggacaggattcagagactgtttttgatattcagaatgacagaaatagtatacttccaaaatctcaatctgaatacaagcctgatactcctcagtcaggcctagaatatagtggtattcaagaacttgaggacagaagatctcagcaaaggtttcagtttaatctacaagatttcaggtgttgtgctgtcttgggaagaggacattttggaaaggtgcttttagctgaatataaaaacacaaatgagatgtttgctataaaagccttaaagaaaggagatattgtggctcgagatgaagtagacagcctgatgtgtgaaaaaagaatttttgaaactgtgaatagtgtaaggcatccctttttggtgaacctttttgcatgtttccaaaccaaagagcatgtttgctttgtaatggaatatgctgccggtggggacctaatgatgcacattcatactgatgtcttttctgaaccaagagctgtattttatgctgcttgtgtagttcttgggttgcagtatttacatgaacacaaaattgtttatagagatttgaaattggataacttattgctagatacagagggctttgtgaaaattgctgattttggtctttgcaaagaaggaatgggatatggagatagaacaagcacattttgtggcactcctgaatttcttgccccagaagtattaacagaaacttcttatacaagggctgtagattggtggggccttggcgtgcttatatatgaaatgcttgttggtgagtctccctttcctggtgatgatgaagaggaagtttttgacagtattgtaaatgatgaagtaaggtatccaaggttcttatctacagaagccatttctataatgagaaggctgttaagaagaaatcctgaacggcgccttggggctagcgagaaagatgcagaggatgtaaaaaagcacccatttttccggctaattgattggagcgctctgatggacaaaaaagtaaagccaccatttatacctaccataagaggacgagaagatgttagtaattttgatgatgaatttacctcagaagcacctattctgactccacctcgagaaccaaggatactttcggaagaggagcaggaaatgttcagagattttgactacattgctgattggtgttaagttgctagacactgcgaaaccaagctgactcacaagaagacctcttaaaaatagcaacccttcatttgctctctgtgccaccaatagcttctgagttttttgttgttgttgtttttattgaaacacgtgaagatttgtttaaaagtaccattctaatacttcttcaaaagtggctcctcattgtacttcagcgtaaatatgagcactggaaacagtttcatggagtttaagttgagtgaacatcggccatgaaaatccatcacgaatacttttggatcaatagtctatttttaaaaagaaagaaaaaaaccacttttttatagtccctagctttgccatatgcccgccttaagtggaaggaaagttaatcacttaactatgttttataaaaagaaaaaagggcttggaatgctattactgttcacacaaagtatgattctgtttgaataaggcaaatgctcctttttttaaaaaaaaagacattactgtaatatcaaaaaccgtggcagtttgtatacaactcggggcttgattttttttaaaaaaacagaatgaattgatgtcttattttataaatgttctatatttattaggagaaaactttatattgccttttttatcaatcatgtaacaggcttatagctttccaacagagctgcttgccaaacaattttttttgtttattaaacagtgctgaaacaaacaggatcagcatttacttaagatgttaagaatgaggacttttaatcagccgaaccaagatattgttacctgtatgcattcccaaagtctagatgctcagtatgttcagtcatatctttcagaatcagtgaaccgattaccctttttttggtattcactctacatctgccaacctagttcaccttggttttgtgtctgctgtagaagggaaccataacttggttaaaccgtagggattatcattgtatacatgctgtgaacatgtatatgtgcaagttttaatgtattctatgttgtaggcttattatttaattttaccacttcatcacttttgtacagtggccaagcagacacctcaaactccagcatttacattaagtgcatttgtacattttaggccactggatccagattttatattggcagttattgagggcaaaagcaatatattgtaacagaatgtataaatatttttgataaaacagtctatattttattaaaaaatgaattataacactaaagctgtacctcaaaagtctcaaaaataatttgatgaaatattttatacaactcttcaaaggatccgtctgtggctttttatactcttttagggttgtctttttacaaaccatgactttccacttgcctgtagttttttgtttgttttggtttggtttgattttatatttttttctcctaatctatgactttattgttttttcttagtttagtaatagcatctttgatcctgtgcttagcatgttagggtcattatacctcaggaatagcaagctgttaagtaaccatactgaattaactatttaattacagtgagctcatctcttaaaaattgttcaggtgtaaatcttatgagaaacatgaaaaagcacactgatttatggagagttgagctaaaaacatttataaatatttgctgggatgttttagcatcttttcattgtactctgagaacaattaaaattgtccagagatcatttatattaccttccaaattgtttattacccaagatcctttgggagaaaatcttatagaatgggggaacaatatgtggtttaaagttattttaaaatgccagttaatttcctcggcaaaggacaatagaggaacttagcttaattgtctggctttaatttaaactgtgttaatacaacattaaaataaaacactaaatacttttgaggtacagtctgctcacttttttggttctcaaatagcaaagaaagtaatgtctaaaataggctcttagcattaaaaactgacagcatttcgtaactacacagtgtacagaatttttttttaattgaagtcaatcactaaaaaaattagaaggcagggtctatttacacaattaagctgaagaaagcactaattttttgtagtttaaaatatatatatattttagtcagatttaaaattttaagctttatagagtgtaaatatattttgctattactgtatgtgtatgtgactgctcaagcactttgtaaagaaattaggatattttagaatggtacactatgcattcaaatgaaatgtgcctttcactatgtcattctaagaaaacaagtgttttttgcagtcataaattatcacaaatgcacaaattaaagtctatatagattgaaatttgtaactttggttttaagtattctttccttttagaaacttcctaatgattaaaatatactttaacttttctgtgttcaaaatctcaaagactaattaactttaataaacattcttgcaagtactttttgtcctagtgaaggcttaaaaccatgaacattcagagcaaactgtccacttcattgggaataatgggaaaagtttgtattctgctcctgtaaggtcagtagcatcttttatttgaagcatatttatggactgcttactgtgtatagatactgagaataggaagtttttttttttaaagcaacaaaatgttgatgaatgaagaacagcctgttttaattaagatgcaagcaccagtattgtatgtacttttctcttgtttgaggttagcttattttaatttaggacctggcttctcaaaaaggcaaatgaataaaacagaatactagta

SEQ ID NO: 320 - DNA, 6055 bp, Homo sapiens
cctccgccccaccttccctgcccgatgaggggcagtggctgccgccgtcacgtgtgctggcagccgccaagtgaggccgcttttgcgacgcggtgacagccaaatggtgcgacaggaggagctgcagccgcggccgcagcgcccgcacggagaggcttgaggcggctcctggcgtcgcccagagggagcgactagacgaacagtccggtgagggcggcgagaggaagcccgctacgagtgccctagctccccgccgctctcgatgaaccggacggaataagccgcgcctccagcaggggctgcgcctccatgaatccctagttgtttttttttttttctttctctcccctctcctcacccccaccccgagccccgtcccgccttctcccttcgccagaggcggccgcgtccaggtgcggagtccataccggagcgcaatggcgtccaaccccgaacggggggagattctgctcacggaactgcagggggattcccgaagtcttccgttttctgagaatgtgagtgctgttcaaaaattagacttttcagatacaatggtgcagcagaaattggatgatatcaaggatcgaattaagagagaaataaggaaagaactgaaaatcaaagaaggagctgaaaatctgaggaaagtcacaacagataaaaaaagtttggcttatgtagacaacattttgaaaaaatcaaataaaaaattagaagaactacatcacaagctgcaggaattaaatgcacatattgttgtatcagatccagaagatattacagattgcccaaggactccagatactccaaataatgaccctcgttgttctactagcaacaatagattgaaggccttacaaaaacaattggatatagaacttaaagtaaaacaaggtgcagagaatatgatacagatgtattcaaatggatcttcaaaggatcggaaactccatggtacagctcagcaactgctccaggacagcaagacaaaaatagaagtcatacgaatgcagattcttcaggcagtccagactaatgaattggcttttgataatgcaaaacctgtgataagtcctcttgaacttcggatggaagaattaaggcatcattttaggatagagtttgcagtagcagaaggtgcaaagaatgtaatgaaattacttggctcaggaaaagtaacagacagaaaagcactttcagaagctcaagcaagatttaatgaatcaagtcagaagttggaccttttaaagtattcattagagcaaagattaaacgaagtccccaagaatcatcccaaaagcaggattattattgaagaactttcacttgttgctgcatcaccaacactaagtccacgtcaaagtatgatatctacgcaaaatcaatatagtacactatccaaaccagcagcactaacaggtactttggaagttcgtcttatgggctgccaagatatcctagagaatgtccctggacggtcaaaagcaacatcagttgcactgcctggttggagtccaagtgaaaccagatcatctttcatgagcagaacgagtaaaagtaaaagcggaagtagtcgaaatcttctaaaaaccgatgacttgtccaatgatgtctgtgctgttttgaagctcgataatactgtggttggccaaactagctggaaacccatttccaatcagtcatgggaccagaagtttacactggaactggacagggttaccttttttaatccagttattgaaagaagaccaaaacttcaaagacaaaagaaaattttttcaaagcaacaaggcaaaacatttctcagagctcctcaaatgaatattaatattgccacttggggaaggctagtaagaagagctattcctacagtaaatcattctggcaccttcagccctcaagctcctgtgcctactacagtgccagtggttgatgtacgcatccctcaactagcacctccagctagtgattctacagtaaccaaattggactttgatcttgagcctgaacctcctccagccccaccacgagcttcttctcttggagaaatagatgaatcttctgaattaagagttttggatataccaggacaggattcagagactgtttttgatattcagaatgacagaaatagtatacttccaaaatctcaatctgaatacaagcctgatactcctcagtcaggcctagaatatagtggtattcaagaacttgaggacagaagatctcagcaaaggtttcagtttaatctacaagatttcaggtgttgtgctgtcttgggaagaggacattttggaaaggtgcttttagctgaatataaaaacacaaatgagatgtttgctataaaagccttaaagaaaggagatattgtggctcgagatgaagtagacagcctgatgtgtgaaaaaagaatttttgaaactgtgaatagtgtaaggcatccctttttggtgaacctttttgcatgtttccaaaccaaagagcatgtttgctttgtaatggaatatgctgccggtggggacctaatgatgcacattcatactgatgtcttttctgaaccaagagctgtattttatgctgcttgtgtagttcttgggttgcagtatttacatgaacacaaaattgtttatagagatttgaaattggataacttattgctagatacagagggctttgtgaaaattgctgattttggtctttgcaaagaaggaatgggatatggagatagaacaagcacattttgtggcactcctgaatttcttgccccagaagtattaacagaaacttcttatacaagggctgtagattggtggggccttggcgtgcttatatatgaaatgcttgttggtgagtctccctttcctggtgatgatgaagaggaagtttttgacagtattgtaaatgatgaagtaaggtatccaaggttcttatctacagaagccatttctataatgagaaggctgttaagaagaaatcctgaacggcgccttggggctagcgagaaagatgcagaggatgtaaaaaagcacccatttttccggctaattgattggagcgctctgatggacaaaaaagtaaagccaccatttatacctaccataagaggacgagaagatgttagtaattttgatgatgaatttacctcagaagcacctattctgactccacctcgagaaccaaggatactttcggaagaggagcaggaaatgttcagagattttgactacattgctgattggtgttaagttgctagacactgcgaaaccaagctgactcacaagaagacctcttaaaaatagcaacccttcatttgctctctgtgccaccaatagcttctgagttttttgttgttgttgtttttattgaaacacgtgaagatttgtttaaaagtaccattctaatacttcttcaaaagtggctcctcattgtacttcagcgtaaatatgagcactggaaacagtttcatggagtttaagttgagtgaacatcggccatgaaaatccatcacgaatacttttggatcaatagtctatttttaaaaagaaagaaaaaaaccacttttttatagtccctagctttgccatatgcccgccttaagtggaaggaaagttaatcacttaactatgttttataaaaagaaaaaagggcttggaatgctattactgttcacacaaagtatgattctgtttgaataaggcaaatgctcctttttttaaaaaaaaagacattactgtaatatcaaaaaccgtggcagtttgtatacaactcggggcttgattttttttaaaaaaacagaatgaattgatgtcttattttataaatgttctatatttattaggagaaaactttatattgccttttttatcaatcatgtaacaggcttatagctttccaacagagctgcttgccaaacaattttttttgtttattaaacagtgctgaaacaaacaggatcagcatttacttaagatgttaagaatgaggacttttaatcagccgaaccaagatattgttacctgtatgcattcccaaagtctagatgctcagtatgttcagtcatatctttcagaatcagtgaaccgattaccctttttttggtattcactctacatctgccaacctagttcaccttggttttgtgtctgctgtagaagggaaccataacttggttaaaccgtagggattatcattgtatacatgctgtgaacatgtatatgtgcaagttttaatgtattctatgttgtaggcttattatttaattttaccacttcatcacttttgtacagtggccaagcagacacctcaaactccagcatttacattaagtgcatttgtacattttaggccactggatccagattttatattggcagttattgagggcaaaagcaatatattgtaacagaatgtataaatatttttgataaaacagtctatattttattaaaaaatgaattataacactaaagctgtacctcaaaagtctcaaaaataatttgatgaaatattttatacaactcttcaaaggatccgtctgtggctttttatactcttttagggttgtctttttacaaaccatgactttccacttgcctgtagttttttgtttgttttggtttggtttgattttatatttttttctcctaatctatgactttattgttttttcttagtttagtaatagcatctttgatcctgtgcttagcatgttagggtcattatacctcaggaatagcaagctgttaagtaaccatactgaattaactatttaattacagtgagctcatctcttaaaaattgttcaggtgtaaatcttatgagaaacatgaaaaagcacactgatttatggagagttgagctaaaaacatttataaatatttgctgggatgttttagcatcttttcattgtactctgagaacaattaaaattgtccagagatcatttatattaccttccaaattgtttattacccaagatcctttgggagaaaatcttatagaatgggggaacaatatgtggtttaaagttattttaaaatgccagttaatttcctcggcaaaggacaatagaggaacttagcttaattgtctggctttaatttaaactgtgttaatacaacattaaaataaaacactaaatacttttgaggtacagtctgctcacttttttggttctcaaatagcaaagaaagtaatgtctaaaataggctcttagcattaaaaactgacagcatttcgtaactacacagtgtacagaatttttttttaattgaagtcaatcactaaaaaaattagaaggcagggtctatttacacaattaagctgaagaaagcactaattttttgtagtttaaaatatatatatattttagtcagatttaaaattttaagctttatagagtgtaaatatattttgctattactgtatgtgtatgtgactgctcaagcactttgtaaagaaattaggatattttagaatggtacactatgcattcaaatgaaatgtgcctttcactatgtcattctaagaaaacaagtgttttttgcagtcataaattatcacaaatgcacaaattaaagtctatatagattgaaatttgtaactttggttttaagtattctttccttttagaaacttcctaatgattaaaatatactttaacttttctgtgttcaaaatctcaaagactaattaactttaataaacattcttgcaagtactttttgtcctagtgaaggcttaaaaccatgaacattcagagcaaactgtccacttcattgggaataatgggaaaagtttgtattctgctcctgtaaggtcagtagcatcttttatttgaagcatatttatggactgcttactgtgtatagatactgagaataggaagtttttttttttaaagcaacaaaatgttgatgaatgaagaacagcctgttttaattaagatgcaagcaccagtattgtatgtacttttctcttgtttgaggttagcttattttaatttaggacctggcttctcaaaaaggcaaatgaataaaacagaatactagta

SEQ ID NO: 321 - DNA, 5898 bp, Homo sapiens
cctccgccccaccttccctgcccgatgaggggcagtggctgccgccgtcacgtgtgctggcagccgccaagtgaggccgcttttgcgacgcggtgacagccaaatggtgcgacaggaggagctgcagccgcggccgcagcgcccgcacggagaggcttgaggcggctcctggcgtcgcccagagggagcgactagacgaacagtccggtgagggcggcgagaggaagcccgctacgagtgccctagctccccgccgctctcgatgaaccggacggaataagccgcgcctccagcaggggctgcgcctccatgaatccctagttgtttttttttttttctttctctcccctctcctcacccccaccccgagccccgtcccgccttctcccttcgccagaggcggccgcgtccaggtgcggagtccataccggagcgcaatggcgtccaaccccgaacggggggagattctgctcacggaactgcagattgcccaaggactccagatactccaaataatgaccctcgttgttctactagcaacaatagattgaaggccttacaaaaacaattggatatagaacttaaagtaaaacaaggtgcagagaatatgatacagatgtattcaaatggatcttcaaaggatcggaaactccatggtacagctcagcaactgctccaggacagcaagacaaaaatagaagtcatacgaatgcagattcttcaggcagtccagactaatgaattggcttttgataatgcaaaacctgtgataagtcctcttgaacttcggatggaagaattaaggcatcattttaggatagagtttgcagtagcagaaggtgcaaagaatgtaatgaaattacttggctcaggaaaagtaacagacagaaaagcactttcagaagctcaagcaagatttaatgaatcaagtcagaagttggaccttttaaagtattcattagagcaaagattaaacgaagtccccaagaatcatcccaaaagcaggattattattgaagaactttcacttgttgctgcatcaccaacactaagtccacgtcaaagtatgatatctacgcaaaatcaatatagtacactatccaaaccagcagcactaacaggtactttggaagttcgtcttatgggctgccaagatatcctagagaatgtccctggacggtcaaaagcaacatcagttgcactgcctggttggagtccaagtgaaaccagatcatctttcatgagcagaacgagtaaaagtaaaagcggaagtagtcgaaatcttctaaaaaccgatgacttgtccaatgatgtctgtgctgttttgaagctcgataatactgtggttggccaaactagctggaaacccatttccaatcagtcatgggaccagaagtttacactggaactggacaggtcacgtgaactggaaatttcagtttattggcgtgattggcggtctctgtgtgctgtaaaatttctgaggttagaagattttttagacaaccaacggcatggcatgtgtctctatttggaaccacagggtactttatttgcagaggttaccttttttaatccagttattgaaagaagaccaaaacttcaaagacaaaagaaaattttttcaaagcaacaaggcaaaacatttctcagagctcctcaaatgaatattaatattgccacttggggaaggctagtaagaagagctattcctacagtaaatcattctggcaccttcagccctcaagctcctgtgcctactacagtgccagtggttgatgtacgcatccctcaactagcacctccagctagtgattctacagtaaccaaattggactttgatcttgagcctgaacctcctccagccccaccacgagcttcttctcttggagaaatagatgaatcttctgaattaagagttttggatataccaggacaggattcagagactgtttttgatattcagaatgacagaaatagtatacttccaaaatctcaatctgaatacaagcctgatactcctcagtcaggcctagaatatagtggtattcaagaacttgaggacagaagatctcagcaaaggtttcagtttaatctacaagatttcaggtgttgtgctgtcttgggaagaggacattttggaaaggtgcttttagctgaatataaaaacacaaatgagatgtttgctataaaagccttaaagaaaggagatattgtggctcgagatgaagtagacagcctgatgtgtgaaaaaagaatttttgaaactgtgaatagtgtaaggcatccctttttggtgaacctttttgcatgtttccaaaccaaagagcatgtttgctttgtaatggaatatgctgccggtggggacctaatgatgcacattcatactgatgtcttttctgaaccaagagctgtattttatgctgcttgtgtagttcttgggttgcagtatttacatgaacacaaaattgtttatagagatttgaaattggataacttattgctagatacagagggctttgtgaaaattgctgattttggtctttgcaaagaaggaatgggatatggagatagaacaagcacattttgtggcactcctgaatttcttgccccagaagtattaacagaaacttcttatacaagggctgtagattggtggggccttggcgtgcttatatatgaaatgcttgttggtgagtctccctttcctggtgatgatgaagaggaagtttttgacagtattgtaaatgatgaagtaaggtatccaaggttcttatctacagaagccatttctataatgagaaggctgttaagaagaaatcctgaacggcgccttggggctagcgagaaagatgcagaggatgtaaaaaagcacccatttttccggctaattgattggagcgctctgatggacaaaaaagtaaagccaccatttatacctaccataagaggacgagaagatgttagtaattttgatgatgaatttacctcagaagcacctattctgactccacctcgagaaccaaggatactttcggaagaggagcaggaaatgttcagagattttgactacattgctgattggtgttaagttgctagacactgcgaaaccaagctgactcacaagaagacctcttaaaaatagcaacccttcatttgctctctgtgccaccaatagcttctgagttttttgttgttgttgtttttattgaaacacgtgaagatttgtttaaaagtaccattctaatacttcttcaaaagtggctcctcattgtacttcagcgtaaatatgagcactggaaacagtttcatggagtttaagttgagtgaacatcggccatgaaaatccatcacgaatacttttggatcaatagtctatttttaaaaagaaagaaaaaaaccacttttttatagtccctagctttgccatatgcccgccttaagtggaaggaaagttaatcacttaactatgttttataaaaagaaaaaagggcttggaatgctattactgttcacacaaagtatgattctgtttgaataaggcaaatgctcctttttttaaaaaaaaagacattactgtaatatcaaaaaccgtggcagtttgtatacaactcggggcttgattttttttaaaaaaacagaatgaattgatgtcttattttataaatgttctatatttattaggagaaaactttatattgccttttttatcaatcatgtaacaggcttatagctttccaacagagctgcttgccaaacaattttttttgtttattaaacagtgctgaaacaaacaggatcagcatttacttaagatgttaagaatgaggacttttaatcagccgaaccaagatattgttacctgtatgcattcccaaagtctagatgctcagtatgttcagtcatatctttcagaatcagtgaaccgattaccctttttttggtattcactctacatctgccaacctagttcaccttggttttgtgtctgctgtagaagggaaccataacttggttaaaccgtagggattatcattgtatacatgctgtgaacatgtatatgtgcaagttttaatgtattctatgttgtaggcttattatttaattttaccacttcatcacttttgtacagtggccaagcagacacctcaaactccagcatttacattaagtgcatttgtacattttaggccactggatccagattttatattggcagttattgagggcaaaagcaatatattgtaacagaatgtataaatatttttgataaaacagtctatattttattaaaaaatgaattataacactaaagctgtacctcaaaagtctcaaaaataatttgatgaaatattttatacaactcttcaaaggatccgtctgtggctttttatactcttttagggttgtctttttacaaaccatgactttccacttgcctgtagttttttgtttgttttggtttggtttgattttatatttttttctcctaatctatgactttattgttttttcttagtttagtaatagcatctttgatcctgtgcttagcatgttagggtcattatacctcaggaatagcaagctgttaagtaaccatactgaattaactatttaattacagtgagctcatctcttaaaaattgttcaggtgtaaatcttatgagaaacatgaaaaagcacactgatttatggagagttgagctaaaaacatttataaatatttgctgggatgttttagcatcttttcattgtactctgagaacaattaaaattgtccagagatcatttatattaccttccaaattgtttattacccaagatcctttgggagaaaatcttatagaatgggggaacaatatgtggtttaaagttattttaaaatgccagttaatttcctcggcaaaggacaatagaggaacttagcttaattgtctggctttaatttaaactgtgttaatacaacattaaaataaaacactaaatacttttgaggtacagtctgctcacttttttggttctcaaatagcaaagaaagtaatgtctaaaataggctcttagcattaaaaactgacagcatttcgtaactacacagtgtacagaatttttttttaattgaagtcaatcactaaaaaaattagaaggcagggtctatttacacaattaagctgaagaaagcactaattttttgtagtttaaaatatatatatattttagtcagatttaaaattttaagctttatagagtgtaaatatattttgctattactgtatgtgtatgtgactgctcaagcactttgtaaagaaattaggatattttagaatggtacactatgcattcaaatgaaatgtgcctttcactatgtcattctaagaaaacaagtgttttttgcagtcataaattatcacaaatgcacaaattaaagtctatatagattgaaatttgtaactttggttttaagtattctttccttttagaaacttcctaatgattaaaatatactttaacttttctgtgttcaaaatctcaaagactaattaactttaataaacattcttgcaagtactttttgtcctagtgaaggcttaaaaccatgaacattcagagcaaactgtccacttcattgggaataatgggaaaagtttgtattctgctcctgtaaggtcagtagcatcttttatttgaagcatatttatggactgcttactgtgtatagatactgagaataggaagtttttttttttaaagcaacaaaatgttgatgaatgaagaacagcctgttttaattaagatgcaagcaccagtattgtatgtacttttctcttgtttgaggttagcttattttaatttaggacctggcttctcaaaaaggcaaatgaataaaacagaatactagta

SEQ ID NO: 322 - DNA, 5631 bp, Homo sapiens
acgtgtgctggcagccgccaagtgaggccgcttttgcgacgcggtgacagccaaatggtgcgacaggaggagctgcagccgcggccgcagcgcccgcacggagaggcttgaggcggctcctggcgtcgcccagagggagcgactagacgaacagtccggtgagggcggcgagaggaagcccgctacgagtgccctagctccccgccgctctcgatgaaccggacggaataagccgcgcctccagcaggggctgcgcctccatgaatccctagttgtttttttttttttctttctctcccctctcctcacccccaccccgagccccgtcccgccttctcccttcgccagaggcggccgcgtccaggtgcggagtccataccggagcgcaatggcgtccaaccccgaacggggggagattctgctcacggaactgcagggggattcccgaagtcttccgttttctgagaatgtgagtgctgttcaaaaattagacttttcagatacaatggtgcagcagaaattggatgatatcaaggatcgaattaagagagaaataaggaaagaactgaaaatcaaagaaggagctgaaaatctgaggaaagtcacaacagataaaaaaagtttggcttatgtagacaacattttgaaaaaatcaaataaaaaattagaagaactacatcacaagctgcaggaattaaatgcacatattgttgtatcagatccagaagatattacagattgcccaaggactccagatactccaaataatgaccctcgttgttctactagcaacaatagattgaaggccttacaaaaacaattggatatagaacttaaagtaaaacaaggtgcagagaatatgatacagatgtattcaaatggatcttcaaaggatcggaaactccatggtacagctcagcaactgctccaggacagcaagacaaaaatagaagtcatacgaatgcagattcttcaggcagtccagactaatgaattggcttttgataatgcaaaacctgtgataagtcctcttgaacttcggatggaagaattaaggcatcattttaggatagagtttgcagtagcagaaggtgcaaagaatgtaatgaaattacttggctcaggaaaagtaacagacagaaaagcactttcagaagctcaagcaagatttaatgaatcaagtcagaagttggaccttttaaagtattcattagagcaaagattaaacgaagtccccaagaatcatcccaaaagcaggattattattgaagaactttcacttgttgctgcatcaccaacactaagtccacgtcaaagtatgatatctacgcaaaatcaatatagtacactatccaaaccagcagcactaacagatgatgtctgtgctgttttgaagctcgataatactgtggttggccaaactagctggaaacccatttccaatcagtcatgggaccagaagtttacactggaactggacaggtcacgtgaactggaaatttcagtttattggcgtgattggcggtctctgtgtgctgtaaaatttctgaggttagaagattttttagacaaccaacggcatggcatgtgtctctatttggaaccacagggtactttatttgcagaggttaccttttttaatccagttattgaaagaagaccaaaacttcaaagacaaaagaaaattttttcaaagcaacaaggcaaaacatttctcagagctcctcaaatgaatattaatattgccacttggggaaggctagtaagaagagctattcctacagtaaatcattctggcaccttcagccctcaagctcctgtgcctactacagtgccagtggttgatgtacgcatccctcaactagcacctccagctagtgattctacagtaaccaaattggactttgatcttgagcctgaacctcctccagccccaccacgagcttcttctcttggagaaatagatgaatcttctgaattaagagttttggatataccaggacaggattcagagactgtttttgatattcagaatgacagaaatagtatacttccaaaatctcaatctgaatacaagcctgatactcctcagtcaggcctagaatatagtggtattcaagaacttgaggacagaagatctcagcaaaggtttcagtttaatctacaagatttcaggtgttgtgctgtcttgggaagaggacattttggaaaggtgcttttagctgaatataaaaacacaaatgagatgtttgctataaaagccttaaagaaaggagatattgtggctcgagatgaagtagacagcctgatgtgtgaaaaaagaatttttgaaactgtgaatagtgtaaggcatccctttttggtgaacctttttgcatgtttccaaaccaaagagcatgtttgctttgtaatggaatatgctgccggtggggacctaatgatgcacattcatactgatgtcttttctgaaccaagagctgtattttatgctgcttgtgtagttcttgggttgcagtatttacatgaacacaaaattgtttatagagatttgaaattggataacttattgctagatacagagggctttgtgaaaattgctgattttggtctttgcaaagaaggaatgggatatggagatagaacaagcacattttgtggcactcctgaatttcttgccccagaagtattaacagaaacttcttatacaagggctgtagattggtggggccttggcgtgcttatatatgaaatgcttgttggtgagtctccctttcctggtgatgatgaagaggaagtttttgacagtattgtaaatgatgaagtaaggtatccaaggttcttatctacagaagccatttctataatgagaaggctgttaagaagaaatcctgaacggcgccttggggctagcgagaaagatgcagaggatgtaaaaaagcacccatttttccggctaattgattggagcgctctgatggacaaaaaagtaaagccaccatttatacctaccataagaggacgagaagatgttagtaattttgatgatgaatttacctcagaagcacctattctgactccacctcgagaaccaaggatactttcggaagaggagcaggaaatgttcagagattttgactacattgctgattggtgttaagttgctagacactgcgaaaccaagctgactcacaagaagacctcttaaaaatagcaacccttcatttgctctctgtgccaccaatagcttctgagttttttgttgttgttgtttttattgaaacacgtgaagatttgtttaaaagtaccattctaatacttcttcaaaagtggctcctcattgtacttcagcgtaaatatgagcactggaaacagtttcatggagtttaagttgagtgaacatcggccatgaaaatccatcacgaatacttttggatcaatagtctatttttaaaaagaaagaaaaaaaccacttttttatagtccctagctttgccatatgcccgccttaagtggaaggaaagttaatcacttaactatgttttataaaaagaaaaaagggcttggaatgctattactgttcacacaaagtatgattctgtttgaataaggcaaatgctcctttttttaaaaaaaaagacattactgtaatatcaaaaaccgtggcagtttgtatacaactcggggcttgattttttttaaaaaaacagaatgaattgatgtcttattttataaatgttctatatttattaggagaaaactttatattgccttttttatcaatcatgtaacaggcttatagctttccaacagagctgcttgccaaacaattttttttgtttattaaacagtgctgaaacaaacaggatcagcatttacttaagatgttaagaatgaggacttttaatcagccgaaccaagatattgttacctgtatgcattcccaaagtctagatgctcagtatgttcagtcatatctttcagaatcagtgaaccgattaccctttttttggtattcactctacatctgccaacctagttcaccttggttttgtgtctgctgtagaagggaaccataacttggttaaaccgtagggattatcattgtatacatgctgtgaacatgtatatgtgcaagttttaatgtattctatgttgtaggcttattatttaattttaccacttcatcacttttgtacagtggccaagcagacacctcaaactccagcatttacattaagtgcatttgtacattttaggccactggatccagattttatattggcagttattgagggcaaaagcaatatattgtaacagaatgtataaatatttttgataaaacagtctatattttattaaaaaatgaattataacactaaagctgtacctcaaaagtctcaaaaataatttgatgaaatattttatacaactcttcaaaggatccgtctgtggctttttatactcttttagggttgtctttttacaaaccatgactttccacttgcctgtagttttttgtttgttttggtttggtttgattttatatttttttctcctaatctatgactttattgttttttcttagtttagtaatagcatctttgatcctgtgcttagcatgttagggtcattatacctcaggaatagcaagctgttaagtaaccatactgaattaactatttaattacagtgagctcatctcttaaaaattgttcaggtgtaaatcttatgagaaacatgaaaaagcacactgatttatggagagttgagctaaaaacatttataaatatttgctgggatgttttagcatcttttcattgtactctgagaacaattaaaattgtccagagatcatttatattaccttccaaattgtttattacccaagatcctttgggagaaaatcttatagaatgggggaacaatatgtggtttaaagttattttaaaatgccagttaatttcctcggcaaaggacaatagaggaacttagcttaattgtctggctttaatttaaactgtgttaatacaacattaaaataaaacactaaatacttttgaggtacagtctgctcacttttttggttctcaaatagcaaagaaagtaatgtctaaaataggctcttagcattaaaaactgacagcatttcgtaactacacagtgtacagaatttttttttaattgaagtcaatcactaaaaaaattagaaggcagggtctatttacacaattaagctgaagaaagcactaattttttgtagtttaaaatatatatatattttagtcagatttaaaattttaagctttatagagtgtaaatatattttgctattactgtatgtgtatgtgactgctcaagcactttgtaaagaaattaggatattttagaatggtacactatgcattcaaatgaaatgtgcctttcactatgtcattctaagaaaacaagtgttttttgcagtcataaattatcacaaatgcacaaattaaagtctatatagattgaaatttgtaactttggttttaagtattctttccttttagaaacttcctaatgattaaaatatactttaacttttctgtgttcaaaatctcaaagactaattaactttaataaacattcttgcaagta

SEQ ID NO: 323 - DNA, 5625 bp, Homo sapiens
acgtgtgctggcagccgccaagtgaggccgcttttgcgacgcggtgacagccaaatggtgcgacaggaggagctgcagccgcggccgcagcgcccgcacggagaggcttgaggcggctcctggcgtcgcccagagggagcgactagacgaacagtccggtgagggcggcgagaggaagcccgctacgagtgccctagctccccgccgctctcgatgaaccggacggaataagccgcgcctccagcaggggctgcgcctccatgaatccctagttgtttttttttttttctttctctcccctctcctcacccccaccccgagccccgtcccgccttctcccttcgccagaggcggccgcgtccaggtgcggagtccataccggagcgcaatggcgtccaaccccgaacggggggagattctgctcacggaactgcagggggattcccgaagtcttccgttttctgagaatgtgagtgctgttcaaaaattagacttttcagatacaatggtgcagcagaaattggatgatatcaaggatcgaattaagagagaaataaggaaagaactgaaaatcaaagaaggagctgaaaatctgaggaaagtcacaacagataaaaaaagtttggcttatgtagacaacattttgaaaaaatcaaataaaaaattagaagaactacatcacaagctgcaggaattaaatgcacatattgttgtatcagatccagaagatattacagattgcccaaggactccagatactccaaataatgaccctcgttgttctactagcaacaatagattgaaggccttacaaaaacaattggatatagaacttaaagtaaaacaaggtgcagagaatatgatacagatgtattcaaatggatcttcaaaggatcggaaactccatggtacagctcagcaactgctccaggacagcaagacaaaaatagaagtcatacgaatgcagattcttcaggcagtccagactaatgaattggcttttgataatgcaaaacctgtgataagtcctcttgaacttcggatggaagaattaaggcatcattttaggatagagtttgcagtagcagaaggtgcaaagaatgtaatgaaattacttggctcaggaaaagtaacagacagaaaagcactttcagaagctcaagcaagatttaatgaatcaagtcagaagttggaccttttaaagtattcattagagcaaagattaaacgaagtccccaagaatcatcccaaaagcaggattattattgaagaactttcacttgttgctgcatcaccaacactaagtccacgtcaaagtatgatatctacgcaaaatcaatatagtacactatccaaaccagcagcactaacaggtactttggaagttcgtcttatgggctgccaagatatcctagagaatgtccctggacggtcaaaagcaacatcagttgcactgcctggttggagtccaagtgaaaccagatcatctttcatgagcagaacgagtaaaaatgatgtctgtgctgttttgaagctcgataatactgtggttggccaaactagctggaaacccatttccaatcagtcatgggaccagaagtttacactggaactggacagggttaccttttttaatccagttattgaaagaagaccaaaacttcaaagacaaaagaaaattttttcaaagcaacaaggcaaaacatttctcagagctcctcaaatgaatattaatattgccacttggggaaggctagtaagaagagctattcctacagtaaatcattctggcaccttcagccctcaagctcctgtgcctactacagtgccagtggttgatgtacgcatccctcaactagcacctccagctagtgattctacagtaaccaaattggactttgatcttgagcctgaacctcctccagccccaccacgagcttcttctcttggagaaatagatgaatcttctgaattaagagttttggatataccaggacaggattcagagactgtttttgatattcagaatgacagaaatagtatacttccaaaatctcaatctgaatacaagcctgatactcctcagtcaggcctagaatatagtggtattcaagaacttgaggacagaagatctcagcaaaggtttcagtttaatctacaagatttcaggtgttgtgctgtcttgggaagaggacattttggaaaggtgcttttagctgaatataaaaacacaaatgagatgtttgctataaaagccttaaagaaaggagatattgtggctcgagatgaagtagacagcctgatgtgtgaaaaaagaatttttgaaactgtgaatagtgtaaggcatccctttttggtgaacctttttgcatgtttccaaaccaaagagcatgtttgctttgtaatggaatatgctgccggtggggacctaatgatgcacattcatactgatgtcttttctgaaccaagagctgtattttatgctgcttgtgtagttcttgggttgcagtatttacatgaacacaaaattgtttatagagatttgaaattggataacttattgctagatacagagggctttgtgaaaattgctgattttggtctttgcaaagaaggaatgggatatggagatagaacaagcacattttgtggcactcctgaatttcttgccccagaagtattaacagaaacttcttatacaagggctgtagattggtggggccttggcgtgcttatatatgaaatgcttgttggtgagtctccctttcctggtgatgatgaagaggaagtttttgacagtattgtaaatgatgaagtaaggtatccaaggttcttatctacagaagccatttctataatgagaaggctgttaagaagaaatcctgaacggcgccttggggctagcgagaaagatgcagaggatgtaaaaaagcacccatttttccggctaattgattggagcgctctgatggacaaaaaagtaaagccaccatttatacctaccataagaggacgagaagatgttagtaattttgatgatgaatttacctcagaagcacctattctgactccacctcgagaaccaaggatactttcggaagaggagcaggaaatgttcagagattttgactacattgctgattggtgttaagttgctagacactgcgaaaccaagctgactcacaagaagacctcttaaaaatagcaacccttcatttgctctctgtgccaccaatagcttctgagttttttgttgttgttgtttttattgaaacacgtgaagatttgtttaaaagtaccattctaatacttcttcaaaagtggctcctcattgtacttcagcgtaaatatgagcactggaaacagtttcatggagtttaagttgagtgaacatcggccatgaaaatccatcacgaatacttttggatcaatagtctatttttaaaaagaaagaaaaaaaccacttttttatagtccctagctttgccatatgcccgccttaagtggaaggaaagttaatcacttaactatgttttataaaaagaaaaaagggcttggaatgctattactgttcacacaaagtatgattctgtttgaataaggcaaatgctcctttttttaaaaaaaaagacattactgtaatatcaaaaaccgtggcagtttgtatacaactcggggcttgattttttttaaaaaaacagaatgaattgatgtcttattttataaatgttctatatttattaggagaaaactttatattgccttttttatcaatcatgtaacaggcttatagctttccaacagagctgcttgccaaacaattttttttgtttattaaacagtgctgaaacaaacaggatcagcatttacttaagatgttaagaatgaggacttttaatcagccgaaccaagatattgttacctgtatgcattcccaaagtctagatgctcagtatgttcagtcatatctttcagaatcagtgaaccgattaccctttttttggtattcactctacatctgccaacctagttcaccttggttttgtgtctgctgtagaagggaaccataacttggttaaaccgtagggattatcattgtatacatgctgtgaacatgtatatgtgcaagttttaatgtattctatgttgtaggcttattatttaattttaccacttcatcacttttgtacagtggccaagcagacacctcaaactccagcatttacattaagtgcatttgtacattttaggccactggatccagattttatattggcagttattgagggcaaaagcaatatattgtaacagaatgtataaatatttttgataaaacagtctatattttattaaaaaatgaattataacactaaagctgtacctcaaaagtctcaaaaataatttgatgaaatattttatacaactcttcaaaggatccgtctgtggctttttatactcttttagggttgtctttttacaaaccatgactttccacttgcctgtagttttttgtttgttttggtttggtttgattttatatttttttctcctaatctatgactttattgttttttcttagtttagtaatagcatctttgatcctgtgcttagcatgttagggtcattatacctcaggaatagcaagctgttaagtaaccatactgaattaactatttaattacagtgagctcatctcttaaaaattgttcaggtgtaaatcttatgagaaacatgaaaaagcacactgatttatggagagttgagctaaaaacatttataaatatttgctgggatgttttagcatcttttcattgtactctgagaacaattaaaattgtccagagatcatttatattaccttccaaattgtttattacccaagatcctttgggagaaaatcttatagaatgggggaacaatatgtggtttaaagttattttaaaatgccagttaatttcctcggcaaaggacaatagaggaacttagcttaattgtctggctttaatttaaactgtgttaatacaacattaaaataaaacactaaatacttttgaggtacagtctgctcacttttttggttctcaaatagcaaagaaagtaatgtctaaaataggctcttagcattaaaaactgacagcatttcgtaactacacagtgtacagaatttttttttaattgaagtcaatcactaaaaaaattagaaggcagggtctatttacacaattaagctgaagaaagcactaattttttgtagtttaaaatatatatatattttagtcagatttaaaattttaagctttatagagtgtaaatatattttgctattactgtatgtgtatgtgactgctcaagcactttgtaaagaaattaggatattttagaatggtacactatgcattcaaatgaaatgtgcctttcactatgtcattctaagaaaacaagtgttttttgcagtcataaattatcacaaatgcacaaattaaagtctatatagattgaaatttgtaactttggttttaagtattctttccttttagaaacttcctaatgattaaaatatactttaacttttctgtgttcaaaatctcaaagactaattaactttaataaacattcttgcaagta

SEQ ID NO: 324 - DNA, 6204 bp, Homo sapiens
ttcattacatatatctttttaaaaaacaatttcacaaggccagatttattaaaggaatatactttattctgcaattatgtccatcctagatactagatactatgtgatctgatctgtaccacatgaggaccttcttactccatcattttctctgacatcacctacaaaggcttcttttttatggaccatgtgaatatgacatatttttgttacacagactttccagaatcctttaattttcttataaatattaatgccaacaaaccttaaaatttttgaggttatgaaagtgttcttcaatattgcatagcatactatcacattccggttgttaaagagtatcattaatcagttttattctgtgttaaacttatacatcaaaacatgaaggacaaatttacagttaaacttcgctgttgccactaattaggatcagtctaaatgtgcagttcacaaattgagtgcttaaatctgaggcaacctgggataccaaagtgaattcacagggccacatcaggattttgtttttgagggatgcacagcattatctgtacttcatgtagtcaccattcagactactagctcaaggtagttacagtttcagggttaggtggagctacattcctttcagtgatgttgtgtatttatgaagctgggttttcctcaattgctgtgattttggtttttttaaagtgctgtgtgaaatcagtgtggaataggaaatcagtgtggtagtttccaaactgattccaaagctttagagttatacagtgcccaaaaagaagtaatcttgcttaagaatgaaatgaaaatactttttcttttagttatatgtattttttttcaaatagctattaatttgttaggaaagcaatcatatcctatgtttggacctaactgtttaatcaacaaaactataaggtatatcttttggcctagggacacagttaaaaaatagtttaataaaacattagggcaccatgaactgagaaagcttgggaacctctgatctaattctttcatattgataactatttatctttccagtcatatctgtgtaactcctatcatgaatattctgtcataaactggtttgtgcccagtgcctcccctaccttgcttaaatgtctttgccttagtattcatcttcttatatgtatttttaaatcaaaactggaatatagacctgtaaagagcaaagaccttgtcatctacctacatataatcctagcctccagcacaggatatttgatacattcaacaagtacttggtaaatagtatctgacaattaggcagggactatactgcaggcaaggactgtacttattgtctgctaagtttcaccaccttttggctcaatgctgaacacattgttgatactcaagcatttctgaatgatccattgattaaaataaggttgtcaaatattttgaataacaatatttctagaaaagtaataaaatcacattttagaaactcagctgataatgactggaaatttttttccttttctattctagtctcctgttccctcctttcagttccttcttcccctgttcctcattccattactgaactttactcaaagttatataagtcaccaacctaaaaagaagtatcttacaattcttaagacatttttaaaaaattctttaagctcctactggaccataaactaaattttaagtaactagggagagaaatactactgacattaatagaagactacacatgacgaaaagatgaacatggatgaatagtactttggaagttcgtcttatgggctgccaagatatcctagagaatgtccctggacggtcaaaagcaacatcagttgcactgcctggttggagtccaagtgaaaccagatcatctttcatgagcagaacgagtaaaagtaaaagcggaagtagtcgaaatcttctaaaaaccgatgacttgtccaatgatgtctgtgctgttttgaagctcgataatactgtggttggccaaactagctggaaacccatttccaatcagtcatgggaccagaagtttacactggaactggacaggtcacgtgaactggaaatttcagtttattggcgtgattggcggtctctgtgtgctgtaaaatttctgaggttagaagattttttagacaaccaacggcatggcatgtgtctctatttggaaccacagggtactttatttgcagaggttaccttttttaatccagttattgaaagaagaccaaaacttcaaagacaaaagaaaattttttcaaagcaacaaggcaaaacatttctcagagctcctcaaatgaatattaatattgccacttggggaaggctagtaagaagagctattcctacagtaaatcattctggcaccttcagccctcaagctcctgtgcctactacagtgccagtggttgatgtacgcatccctcaactagcacctccagctagtgattctacagtaaccaaattggactttgatcttgagcctgaacctcctccagccccaccacgagcttcttctcttggagaaatagatgaatcttctgaattaagagttttggatataccaggacaggattcagagactgtttttgatattcagaatgacagaaatagtatacttccaaaatctcaatctgaatacaagcctgatactcctcagtcaggcctagaatatagtggtattcaagaacttgaggacagaagatctcagcaaaggtttcagtttaatctacaagatttcaggtgttgtgctgtcttgggaagaggacattttggaaaggtgcttttagctgaatataaaaacacaaatgagatgtttgctataaaagccttaaagaaaggagatattgtggctcgagatgaagtagacagcctgatgtgtgaaaaaagaatttttgaaactgtgaatagtgtaaggcatccctttttggtgaacctttttgcatgtttccaaaccaaagagcatgtttgctttgtaatggaatatgctgccggtggggacctaatgatgcacattcatactgatgtcttttctgaaccaagagctgtattttatgctgcttgtgtagttcttgggttgcagtatttacatgaacacaaaattgtttatagagatttgaaattggataacttattgctagatacagagggctttgtgaaaattgctgattttggtctttgcaaagaaggaatgggatatggagatagaacaagcacattttgtggcactcctgaatttcttgccccagaagtattaacagaaacttcttatacaagggctgtagattggtggggccttggcgtgcttatatatgaaatgcttgttggtgagtctccctttcctggtgatgatgaagaggaagtttttgacagtattgtaaatgatgaagtaaggtatccaaggttcttatctacagaagccatttctataatgagaaggctgttaagaagaaatcctgaacggcgccttggggctagcgagaaagatgcagaggatgtaaaaaagcacccatttttccggctaattgattggagcgctctgatggacaaaaaagtaaagccaccatttatacctaccataagaggacgagaagatgttagtaattttgatgatgaatttacctcagaagcacctattctgactccacctcgagaaccaaggatactttcggaagaggagcaggaaatgttcagagattttgactacattgctgattggtgttaagttgctagacactgcgaaaccaagctgactcacaagaagacctcttaaaaatagcaacccttcatttgctctctgtgccaccaatagcttctgagttttttgttgttgttgtttttattgaaacacgtgaagatttgtttaaaagtaccattctaatacttcttcaaaagtggctcctcattgtacttcagcgtaaatatgagcactggaaacagtttcatggagtttaagttgagtgaacatcggccatgaaaatccatcacgaatacttttggatcaatagtctatttttaaaaagaaagaaaaaaaccacttttttatagtccctagctttgccatatgcccgccttaagtggaaggaaagttaatcacttaactatgttttataaaaagaaaaaagggcttggaatgctattactgttcacacaaagtatgattctgtttgaataaggcaaatgctcctttttttaaaaaaaaagacattactgtaatatcaaaaaccgtggcagtttgtatacaactcggggcttgattttttttaaaaaaacagaatgaattgatgtcttattttataaatgttctatatttattaggagaaaactttatattgccttttttatcaatcatgtaacaggcttatagctttccaacagagctgcttgccaaacaattttttttgtttattaaacagtgctgaaacaaacaggatcagcatttacttaagatgttaagaatgaggacttttaatcagccgaaccaagatattgttacctgtatgcattcccaaagtctagatgctcagtatgttcagtcatatctttcagaatcagtgaaccgattaccctttttttggtattcactctacatctgccaacctagttcaccttggttttgtgtctgctgtagaagggaaccataacttggttaaaccgtagggattatcattgtatacatgctgtgaacatgtatatgtgcaagttttaatgtattctatgttgtaggcttattatttaattttaccacttcatcacttttgtacagtggccaagcagacacctcaaactccagcatttacattaagtgcatttgtacattttaggccactggatccagattttatattggcagttattgagggcaaaagcaatatattgtaacagaatgtataaatatttttgataaaacagtctatattttattaaaaaatgaattataacactaaagctgtacctcaaaagtctcaaaaataatttgatgaaatattttatacaactcttcaaaggatccgtctgtggctttttatactcttttagggttgtctttttacaaaccatgactttccacttgcctgtagttttttgtttgttttggtttggtttgattttatatttttttctcctaatctatgactttattgttttttcttagtttagtaatagcatctttgatcctgtgcttagcatgttagggtcattatacctcaggaatagcaagctgttaagtaaccatactgaattaactatttaattacagtgagctcatctcttaaaaattgttcaggtgtaaatcttatgagaaacatgaaaaagcacactgatttatggagagttgagctaaaaacatttataaatatttgctgggatgttttagcatcttttcattgtactctgagaacaattaaaattgtccagagatcatttatattaccttccaaattgtttattacccaagatcctttgggagaaaatcttatagaatgggggaacaatatgtggtttaaagttattttaaaatgccagttaatttcctcggcaaaggacaatagaggaacttagcttaattgtctggctttaatttaaactgtgttaatacaacattaaaataaaacactaaatacttttgaggtacagtctgctcacttttttggttctcaaatagcaaagaaagtaatgtctaaaataggctcttagcattaaaaactgacagcatttcgtaactacacagtgtacagaatttttttttaattgaagtcaatcactaaaaaaattagaaggcagggtctatttacacaattaagctgaagaaagcactaattttttgtagtttaaaatatatatatattttagtcagatttaaaattttaagctttatagagtgtaaatatattttgctattactgtatgtgtatgtgactgctcaagcactttgtaaagaaattaggatattttagaatggtacactatgcattcaaatgaaatgtgcctttcactatgtcattctaagaaaacaagtgttttttgcagtcataaattatcacaaatgcacaaattaaagtctatatagattgaaatttgtaactttggttttaagtattctttccttttagaaacttcctaatgattaaaatatactttaacttttctgtgttcaaaatctcaaagactaattaactttaataaacattcttgcaagta

SEQ ID NO: 325 - DNA, 2173 bp, Homo sapiens
atctttccgtcccgggcagccagcgccagtcggagccagcgcgagccgccgccgccatcactgccgctgccaagtcctccacccgctgcccccgccatgtctgctaccgctgccacggccccccctgctgccccggctggggagggtggtccccctgcaccccctccaaacctcaccagtaacaggagactgcagcagacccaggcccaggtggatgaggtggtggacatcatgagggtgaacgtggacaaggtcctggagcgagaccagaagctgtcggagctggacgaccgtgcagatgcactccaggcgggggcctcccagtttgaaacaagcgcagccaagctcaagcgcaaatactggtggaaaaacctcaagatgatgatcatcttgggagtgatttgcgccatcatcctcatcatcatcatagtttacttcagcacttaaatccccgaggagtctgccctgcctagagaagggcctctcccccaaccctcagccgttcctccacctctcagccatatctttcagcccccactcccctggatccgtgtgtgtgtgtgtccgtgtgtgtgtccccctgtaaatagccagctgttatttatacatatataatattatatatatttggtctgtttgtagttttattactagatgatttttccggttgtccttaacaccccttcctgaggttcccttcacccctctctcttgccttccttccctttccctttcttcctgactagccccaagtcccttcatttgcatctgctatgcaatagtccctctcctttccttcttcttccctcagatttagctgatccttcctcccaccctggccttcctttcctctttcctcctcactctccccgtcatgctccctctgccccgccctcaaaaaaaaaaaaaaaaaaaaaaaaacaacagcacctgtccaggcttccttaggtacatcttctttgtatccattgggaggctctgagactggccccacttggtcctaagaatcccaaggtctttgggagcgtccagcatgttaattagcgtatcattacatactgctatccctttccatttctttttgttccatcactcttctctcaacctgtgtttctttttttactgaggagttagtccccattagttcttgtatcacattttcatttgcacgacattactcgcaggtggtggggagcctgggcttttggggaaccaggctgctctggtccccagcattgcctcctcctagcccctctagtccagtttgcctcccttaccctcattttccaaacctcttgtaccctcctctccctcccccagctggtatgtaagtgtcttgaagttcagtatgttatgatggaccaataattctgccacttcgggtttctccctacattcctgctccccagttttcatgtggggtactcaactgacattcccatggggtttccctcccatctgcctgatccacctcctcctcccaccaggagagttgggggttggccacaattgatctcttgtgagaggggtggctaccagtgtgtgtgtgggggtcatcactgccttggggaggagtggggcagggcagagaatccccccaattcctgcctgaaatctctggcctcacccctgctgggggttggactgaaaaccctcctccccaatttggggggtgttgccccatcactgcccagctcctctgactgccccccctgaatttagggtgggggtactagtcactgccaatgtgtgtatgggacttgctggaaaacggggatgcttgcccctctccaggactattgagcccagagagagctgtcctctcattgggtgaactgattgaggaagggtctattgtctttttaaatggcacaattttaagggtttgagggtacagtcccttaacctgccacgggagggggcccccaaactttcttccccccacacttctggttttctgtgtggagggggagcagggatatctaagctgtggtgtgaaagggtaggagagatgctggaggtgggggtgctgtgttttagaccccccatattatcccagtgtcccctgcccccctcttcccccaccccatgcccccaattctgtggcgcatccagattgtgaaaatgtacaataaatgtgtaatgagtaaccaggaaaaaaaaaaaaaaaaaa

SEQ ID NO: 326 - DNA, 2508 bp, Homo sapiens
tgagtcggccgcccgccaccctcaccgcgcttccctgcgccggccgccgcccttggcaaccggccgtcgggagtgcccggggtctctcctgcgttccccgcgccccggggccaggcccaagccggtgactgcgcgcgggcggccgaggagccccgcgtcccgggctggccggctcgggcgatggccgcgggaaggagcggacccagtgtcctcctgcccctccccgcccctgtcaccgcggccgcctgtcttttcgggtcgacccggatcgcatctgtgaggtcgccctcagttgacaggcggggaaactgaggccgggggggcctcgctcaaggtcacgcagctcatcggcggcagggctggaccgagaccagggcttacatcgggtggccttcctcccgaaaaggaggactggagggacgaggatggacaggtctgctaccgctgccacggccccccctgctgccccggctggggagggtggtccccctgcaccccctccaaacctcaccagtaacaggagactgcagcagacccaggcccaggtggatgaggtggtggacatcatgagggtgaacgtggacaaggtcctggagcgagaccagaagctgtcggagctggacgaccgtgcagatgcactccaggcgggggcctcccagtttgaaacaagcgcagccaagctcaagcgcaaatactggtggaaaaacctcaagatgatgatcatcttgggagtgatttgcgccatcatcctcatcatcatcatagtttacttcagcacttaaatccccgaggagtctgccctgcctagagaagggcctctcccccaaccctcagccgttcctccacctctcagccatatctttcagcccccactcccctggatccgtgtgtgtgtgtgtccgtgtgtgtgtccccctgtaaatagccagctgttatttatacatatataatattatatatatttggtctgtttgtagttttattactagatgatttttccggttgtccttaacaccccttcctgaggttcccttcacccctctctcttgccttccttccctttccctttcttcctgactagccccaagtcccttcatttgcatctgctatgcaatagtccctctcctttccttcttcttccctcagatttagctgatccttcctcccaccctggccttcctttcctctttcctcctcactctccccgtcatgctccctctgccccgccctcaaaaaaaaaaaaaaaaaaaaaaaaacaacagcacctgtccaggcttccttaggtacatcttctttgtatccattgggaggctctgagactggccccacttggtcctaagaatcccaaggtctttgggagcgtccagcatgttaattagcgtatcattacatactgctatccctttccatttctttttgttccatcactcttctctcaacctgtgtttctttttttactgaggagttagtccccattagttcttgtatcacattttcatttgcacgacattactcgcaggtggtggggagcctgggcttttggggaaccaggctgctctggtccccagcattgcctcctcctagcccctctagtccagtttgcctcccttaccctcattttccaaacctcttgtaccctcctctccctcccccagctggtatgtaagtgtcttgaagttcagtatgttatgatggaccaataattctgccacttcgggtttctccctacattcctgctccccagttttcatgtggggtactcaactgacattcccatggggtttccctcccatctgcctgatccacctcctcctcccaccaggagagttgggggttggccacaattgatctcttgtgagaggggtggctaccagtgtgtgtgtgggggtcatcactgccttggggaggagtggggcagggcagagaatccccccaattcctgcctgaaatctctggcctcacccctgctgggggttggactgaaaaccctcctccccaatttggggggtgttgccccatcactgcccagctcctctgactgccccccctgaatttagggtgggggtactagtcactgccaatgtgtgtatgggacttgctggaaaacggggatgcttgcccctctccaggactattgagcccagagagagctgtcctctcattgggtgaactgattgaggaagggtctattgtctttttaaatggcacaattttaagggtttgagggtacagtcccttaacctgccacgggagggggcccccaaactttcttccccccacacttctggttttctgtgtggagggggagcagggatatctaagctgtggtgtgaaagggtaggagagatgctggaggtgggggtgctgtgttttagaccccccatattatcccagtgtcccctgcccccctcttcccccaccccatgcccccaattctgtggcgcatccagattgtgaaaatgtacaataaatgtgtaatgagtaaccaggaaaaaaaaaaaaaaaaaa

SEQ ID NO: 327 - DNA, 2867 bp, Homo sapiens
ttgagtgattggaacagcacattatcatttatcctatcttgttaggaagttacctgttctagctgaaaatgtgtgtctgacatgcaagctcagtggggcagagacccgtggattgctgtgccctgccctccggacctggatcatgaaggtgttgggaagaagcttcttctgggtgctgtttcccgtccttccctgggcggtgcaggctgtggagcacgaggaggtggcgcagcgtgtgatcaaactgcaccgcgggcgaggggtggctgccatgcagagccggcagtgggtccgggacagctgcaggaagctctcagggcttctccgccagaagaatgcagttctgaacaaactgaaaactgcaattggagcagtggagaaagacgtgggcctgtcggatgaagagaaactgtttcaggtgcacacgtttgaaattttccagaaagagctgaatgaaagtgaaaattccgttttccaagctgtctacggactgcagagagccctgcagggggattacaaagatgtcgtgaacatgaaggagagcagccggcagcgcctggaggccctgagagaggctgcaataaaggaagaaacagaatatatggaacttctggcagcagaaaaacatcaagttgaagcccttaaaaatatgcaacatcaaaaccaaagtttatccatgcttgacgagattcttgaagatgtaagaaaggcagcggatcgtctggaggaagagatagaggaacatgcttttgacgacaataaatcagtcaagggggtcaattttgaggcagttctgagggtggaggaagaagaggccaattctaagcaaaatataacaaaacgagaagtggaggatgacttgggtcttagcatgctgattgactcccagaacaaccagtatattttgaccaagcccagagattcaaccatcccacgtgcagatcaccactttataaaggacattgttaccataggaatgctgtccttgccttgtggctggctatgtacagccataggattgcctacaatgtttggttatattatttgtggtgtacttctgggaccttcaggactaaatagtattaagtctattgtgcaagtggagacattaggagaatttggggtgttttttactctttttcttgttggcttagaattttctccagaaaagctaagaaaggtgtggaagatttccttacaagggccgtgttacatgacactgttaatgattgcatttggcttgctgtgggggcatctcttgcggatcaaacccacgcagagcgtcttcatttccacgtgtctgtccttgtcaagcacacccctcgtgtccaggttcctcatgggcagtgctcggggtgacaaagaaggcgacattgactacagcaccgtgctcctcggcatgctggtgacgcaggacgtgcagctcgggctcttcatggccgtcatgccgactctcatacaggcgggcgccagtgcatcttctagcattgtcgtggaagttctccgaatcctggttttgattggtcagattcttttttcactagcggcggtttttcttttatgtcttgttataaagaagtatctcattggaccctattatcggaagctgcacatggaaagcaaggggaacaaagaaatcctgatcttgggaatatctgcctttatcttcttaatgttaacggtcacggagctgctggacgtctccatggagctgggctgtttcctggctggagcgctcgtctcctctcagggccccgtggtcaccgaggagatcgccacctccatcgaacccatccgcgacttcctggccatcgttttcttcgcctccatagggctccacgtgttccccacgtttgtggcgtacgagctcacggtgctggtgttcctcaccttgtcagtggtggtgatgaagtttctcctggcggcgctggtcctgtctctcattctgccgaggagcagccagtacatcaagtggatcgtctctgcggggcttgcccaggtcagcgagttttcctttgtcctggggagccgggcgcgaagagcgggcgtcatctctcgggaggtgtacctccttatactgagtgtgaccacgctcagcctcttgctcgccccggtgctgtggagagctgcaatcacgaggtgtgtgcccagaccggagagacggtccagcctctgatggctcggagatgatggaccgtggaagggaagcgtctgtggggagtgagcgcttagatggccagcagctgctccttctgggaagctcgcaccttggcaacagaacagccctctagcagagcgtcagtgcagtcgtgttatcccggcttttacagaatattcttgtcctattttagaattttccggagtagtttatttgcagtctgttgattatgtgcagtagacccgggacactgcgttttaccgatcaccttgaatgtggtgcctggatgtgccttttttttttttccctgaaattattattaattttctattgtgagttcatcagttcatagtttttttagtaaagaagcaaaattaaaaggcttttaaaaatgtacaacttcagaattataatctgttagtcaaatatttgttattaaacatttctgtaatatgaagttgtaatcctggccgtgagcttggaagcttacttttgattcttaaagcctatgttttctaaaatgagacaaatacggatgtctatttgccttttattgtaacttttaaatgaaataatttcatgtcaatttctattagatatatcacttaaaatatttggttttaaatcacaagaatatgtattctttaataaagataatttatgatcatggtataattaattgaaatttattaaaatctgtttttattaa

SEQ ID NO: 328 - DNA, 3210 bp, Homo sapiens
tgctgttgttgcccaagctggagtacaatggcgtgatctgggctccctgcaacgtccgcctcccgggttctagcgattagtagctgggattacaggcgtgcgccaccaggcccatatttttagtagaaacagggtttcaccatgttaaccaggctggtcttgaactcctgacctcaggtgatctgcctgccttggtctcccaaagtgcttgggattacaggcataagccaccatgcccaaccaacatggactctcttaaatagacttggttaatgtcttttgcacatggtggagttggtagagatacgaggctgcgtcgccccccaaaaaaatgacctttaatcctttctataaagatgtagctgacctttaatcatctcagcccttcacaaagcaccatacaagctgaaaatgtgtgtctgacatgcaagctcagtggggcagagacccgtggattgctgtgccctgccctccggacctggatcatgaaggtgttgggaagaagcttcttctgggtgctgtttcccgtccttccctgggcggtgcaggctgtggagcacgaggaggtggcgcagcgtgtgatcaaactgcaccgcgggcgaggggtggctgccatgcagagccggcagtgggtccgggacagctgcaggaagctctcagggcttctccgccagaagaatgcagttctgaacaaactgaaaactgcaattggagcagtggagaaagacgtgggcctgtcggatgaagagaaactgtttcaggtgcacacgtttgaaattttccagaaagagctgaatgaaagtgaaaattccgttttccaagctgtctacggactgcagagagccctgcagggggattacaaagatgtcgtgaacatgaaggagagcagccggcagcgcctggaggccctgagagaggctgcaataaaggaagaaacagaatatatggaacttctggcagcagaaaaacatcaagttgaagcccttaaaaatatgcaacatcaaaaccaaagtttatccatgcttgacgagattcttgaagatgtaagaaaggcagcggatcgtctggaggaagagatagaggaacatgcttttgacgacaataaatcagtcaagggggtcaattttgaggcagttctgagggtggaggaagaagaggccaattctaagcaaaatataacaaaacgagaagtggaggatgacttgggtcttagcatgctgattgactcccagaacaaccagtatattttgaccaagcccagagattcaaccatcccacgtgcagatcaccactttataaaggacattgttaccataggaatgctgtccttgccttgtggctggctatgtacagccataggattgcctacaatgtttggttatattatttgtggtgtacttctgggaccttcaggactaaatagtattaagtctattgtgcaagtggagacattaggagaatttggggtgttttttactctttttcttgttggcttagaattttctccagaaaagctaagaaaggtgtggaagatttccttacaagggccgtgttacatgacactgttaatgattgcatttggcttgctgtgggggcatctcttgcggatcaaacccacgcagagcgtcttcatttccacgtgtctgtccttgtcaagcacacccctcgtgtccaggttcctcatgggcagtgctcggggtgacaaagaaggcgacattgactacagcaccgtgctcctcggcatgctggtgacgcaggacgtgcagctcgggctcttcatggccgtcatgccgactctcatacaggcgggcgccagtgcatcttctagcattgtcgtggaagttctccgaatcctggttttgattggtcagattcttttttcactagcggcggtttttcttttatgtcttgttataaagaagtatctcattggaccctattatcggaagctgcacatggaaagcaaggggaacaaagaaatcctgatcttgggaatatctgcctttatcttcttaatgttaacggtcacggagctgctggacgtctccatggagctgggctgtttcctggctggagcgctcgtctcctctcagggccccgtggtcaccgaggagatcgccacctccatcgaacccatccgcgacttcctggccatcgttttcttcgcctccatagggctccacgtgttccccacgtttgtggcgtacgagctcacggtgctggtgttcctcaccttgtcagtggtggtgatgaagtttctcctggcggcgctggtcctgtctctcattctgccgaggagcagccagtacatcaagtggatcgtctctgcggggcttgcccaggtcagcgagttttcctttgtcctggggagccgggcgcgaagagcgggcgtcatctctcgggaggtgtacctccttatactgagtgtgaccacgctcagcctcttgctcgccccggtgctgtggagagctgcaatcacgaggtgtgtgcccagaccggagagacggtccagcctctgatggctcggagatgatggaccgtggaagggaagcgtctgtggggagtgagcgcttagatggccagcagctgctccttctgggaagctcgcaccttggcaacagaacagccctctagcagagcgtcagtgcagtcgtgttatcccggcttttacagaatattcttgtcctattttagaattttccggagtagtttatttgcagtctgttgattatgtgcagtagacccgggacactgcgttttaccgatcaccttgaatgtggtgcctggatgtgccttttttttttttccctgaaattattattaattttctattgtgagttcatcagttcatagtttttttagtaaagaagcaaaattaaaaggcttttaaaaatgtacaacttcagaattataatctgttagtcaaatatttgttattaaacatttctgtaatatgaagttgtaatcctggccgtgagcttggaagcttacttttgattcttaaagcctatgttttctaaaatgagacaaatacggatgtctatttgccttttattgtaacttttaaatgaaataatttcatgtcaatttctattagatatatcacttaaaatatttggttttaaatcacaagaatatgtattctttaataaagataatttatgatcatggtataattaattgaaatttattaaaatctgtttttattaa

SEQ ID NO: 329 - DNA, 2903 bp, Homo sapiens
ttaaagggggcagtgactgcggctgggcgggagtccgggtcggcttggctgagcgggggcggtgctgggcagggcggcggccgctccctcccggactcccggcctcccggcctccctggtcccgcctgggaagggatgcaaggaagccctccggcgctgcgctccgaggcgggagacagcgtccccctccgcccctcgggtcctggcgcctcagagcccggcccaggccgcggaacggtgatgctcgggccggacgggcgggcgcggatccctgcgtcccgctgaaaatgtgtgtctgacatgcaagctcagtggggcagagacccgtggattgctgtgccctgccctccggacctggatcatgaaggtgttgggaagaagcttcttctgggtgctgtttcccgtccttccctgggcggtgcaggctgtggagcacgaggaggtggcgcagcgtgtgatcaaactgcaccgcgggcgaggggtggctgccatgcagagccggcagtgggtccgggacagctgcaggaagctctcagggcttctccgccagaagaatgcagttctgaacaaactgaaaactgcaattggagcagtggagaaagacgtgggcctgtcggatgaagagaaactgtttcaggtgcacacgtttgaaattttccagaaagagctgaatgaaagtgaaaattccgttttccaagctgtctacggactgcagagagccctgcagggggattacaaagatgtcgtgaacatgaaggagagcagccggcagcgcctggaggccctgagagaggctgcaataaaggaagaaacagaatatatggaacttctggcagcagaaaaacatcaagttgaagcccttaaaaatatgcaacatcaaaaccaaagtttatccatgcttgacgagattcttgaagatgtaagaaaggcagcggatcgtctggaggaagagatagaggaacatgcttttgacgacaataaatcagtcaagggggtcaattttgaggcagttctgagggtggaggaagaagaggccaattctaagcaaaatataacaaaacgagaagtggaggatgacttgggtcttagcatgctgattgactcccagaacaaccagtatattttgaccaagcccagagattcaaccatcccacgtgcagatcaccactttataaaggacattgttaccataggaatgctgtccttgccttgtggctggctatgtacagccataggattgcctacaatgtttggttatattatttgtggtgtacttctgggaccttcaggactaaatagtattaagtctattgtgcaagtggagacattaggagaatttggggtgttttttactctttttcttgttggcttagaattttctccagaaaagctaagaaagcattgtcgtggaagttctccgaatcctggttttgattggtcagattcttttttcactagcggcggtttttcttttatgtcttgttataaagaagtatctcattggaccctattatcggaagctgcacatggaaagcaaggggaacaaagaaatcctgatcttgggaatatctgcctttatcttcttaatgttaacggttggccggtgtcagccgtgcgtcatccggaaggctgccataagcctgcgtttcgcagagctgcgctgaggctcccgtgtcgcggccgtccggccggcgcgctgatgtggctgcaaacctgggtcacggagctgctggacgtctccatggagctgggctgtttcctggctggagcgctcgtctcctctcagggccccgtggtcaccgaggagatcgccacctccatcgaacccatccgcgacttcctggccatcgttttcttcgcctccatagggctccacgtgttccccacgtttgtggcgtacgagctcacggtgctggtgttcctcaccttgtcagtggtggtgatgaagtttctcctggcggcgctggtcctgtctctcattctgccgaggagcagccagtacatcaagtggatcgtctctgcggggcttgcccaggtcagcgagttttcctttgtcctggggagccgggcgcgaagagcgggcgtcatctctcgggaggtgtacctccttatactgagtgtgaccacgctcagcctcttgctcgccccggtgctgtggagagctgcaatcacgaggtgtgtgcccagaccggagagacggtccagcctctgatggctcggagatgatggaccgtggaagggaagcgtctgtggggagtgagcgcttagatggccagcagctgctccttctgggaagctcgcaccttggcaacagaacagccctctagcagagcgtcagtgcagtcgtgttatcccggcttttacagaatattcttgtcctattttagaattttccggagtagtttatttgcagtctgttgattatgtgcagtagacccgggacactgcgttttaccgatcaccttgaatgtggtgcctggatgtgccttttttttttttccctgaaattattattaattttctattgtgagttcatcagttcatagtttttttagtaaagaagcaaaattaaaaggcttttaaaaatgtacaacttcagaattataatctgttagtcaaatatttgttattaaacatttctgtaatatgaagttgtaatcctggccgtgagcttggaagcttacttttgattcttaaagcctatgttttctaaaatgagacaaatacggatgtctatttgccttttattgtaacttttaaatgaaataatttcatgtcaatttctattagatatatcacttaaaatatttggttttaaatcacaagaatatgtattctttaataaagataatttatgatcatggtataattaattgaaatttattaaaatctgtttttattaa

SEQ ID NO: 330 - DNA, 4393 bp, Homo sapiens
ttaaagggggcagtgactgcggctgggcgggagtccgggtcggcttggctgagcgggggcggtgctgggcagggcggcggccgctccctcccggactcccggcctcccggcctccctggtcccgcctgggaagggatgcaaggaagccctccggcgctgcgctccgaggcgggagacagcgtccccctccgcccctcgggtcctggcgcctcagagcccggcccaggccgcggaacggtgatgctcgggccggacgggcgggcgcggatccctgcgtcccgctgaaaatgtgtgtctgacatgcaagctcagtggggcagagacccgtggattgctgtgccctgccctccggacctggatcatgaaggtgttgggaagaagcttcttctgggtgctgtttcccgtccttccctgggcggtgcaggctgtggagcacgaggaggtggcgcagcgtgtgatcaaactgcaccgcgggcgaggggtggctgccatgcagagccggcagtgggtccgggacagctgcaggaagctctcagggcttctccgccagaagaatgcagttctgaacaaactgaaaactgcaattggagcagtggagaaagacgtgggcctgtcggatgaagagaaactgtttcaggtgcacacgtttgaaattttccagaaagagctgaatgaaagtgaaaattccgttttccaagctgtctacggactgcagagagccctgcagggggattacaaagatgtcgtgaacatgaaggagagcagccggcagcgcctggaggccctgagagaggctgcaataaaggaagaaacagaatatatggaacttctggcagcagaaaaacatcaagttgaagcccttaaaaatatgcaacatcaaaaccaaagtttatccatgcttgacgagattcttgaagatgtaagaaaggcagcggatcgtctggaggaagagatagaggaacatgcttttgacgacaataaatcagtcaagggggtcaattttgaggcagttctgagggtggaggaagaagaggccaattctaagcaaaatataacaaaacgagaagtggaggatgacttgggtcttagcatgctgattgactcccagaacaaccagtatattttgaccaagcccagagattcaaccatcccacgtgcagatcaccactttataaaggacattgttaccataggaatgctgtccttgccttgtggctggctatgtacagccataggattgcctacaatgtttggttatattatttgtggtgtacttctgggaccttcaggactaaatagtattaagtctattgtgcaagtggagacattaggagaatttggggtgttttttactctttttcttgttggcttagaattttctccagaaaagctaagaaaggtgtggaagatttccttacaagggccgtgttacatgacactgttaatgattgcatttggcttgctgtgggggcatctcttgcggatcaaacccacgcagagcgtcttcatttccacgtgtctgtccttgtcaagcacacccctcgtgtccaggttcctcatgggcagtgctcggggtgacaaagaaggcgacattgactacagcaccgtgctcctcggcatgctggtgacgcaggacgtgcagctcgggctcttcatggccgtcatgccgactctcatacaggcgggcgccagtgcatcttctaggtcagatgtgctgatgggaagcttgtccaaacacgctgagacagtcagaacagccgtggacacggcgccccgtatgtgcagatcaagagcagcacacgcgtggacctgcaggtggcacggcgccctgtacatacagatcaagagcagcatgcgtgtggacctgcaggtgacacggcgccccgtacgtgcagatcaagagcagcacacgcgtggacctgcaggtggcacggcaccccgtacatgcagatcaagagcagcacacgcgtgtggacctgcaggtggcacggcgccccgtacgtgcagatcaagagcagcacgcgtgtggacctgcaggtgacacggcgccccgtacatgcagatcaagagcagcacgcacgtggacctgccggtggcacggcggcaagccggaatcctgagaaacttgtcacggtgattgtctttcaaagaggtcagagttgagcgcactgtggcttctgattggcatctttctgagccctcatcactgtgcatttaatggacactgtgggagtcttctgggaattagacctaaatccaaaccctggggatggtggctgtggagagcttgtgtagccgttaggggcttggtcctggagccagatacctgagttgtccccagctctctgcactgggcgtgtggcctggagcagatcacctggtctctgcccctgttctcatctgtgacgtagcagtggggatcgtacagctcttaccaggctgccataataggtggcacacagtgctctgcacacagtgctctaggggctcaggatgcaagggtgagctcagcagaggacgttccccatgtggggagctgctgttgtgttttggagaggcaatgaatgaatgatgcacaaatgagtggtagacaagacatccgcagcagggaaccgccctgcgaatgattcaaacaggaagaggagctggtgagcagccgtgagcccccagacgcacaggctctacctttggagatgtggctggaatttgaggaatgcagctaagcctgttgggagaagagtctagggtagggacctcccaggcaaggggctctgtggcctgtgtgggtgggctggggcagtggaagggcatggcagggcagagaagcctgggttccatcccagcgtccaggagctgattgagggtcctgatgagctgtctgggcctctgtgtggagagcagatggatcaggaggaggccactggagctgtgggggaaggggtggcagcccaggcagggaccacggtgctgggcccagggccagacgtgggcctggcagtgtggcaaagctgtcaggagtgcggcaggcctggtctgcttggccgtgagtctgtctccgttcctgccagggctgcagaaaggggcctctctctgagtcgcggacttgggccctgcagtgagctctgaaggacgctgcctccctccttctaagtcgcagacgtgggccctgcagcgagctctgaaggacgctgcctccctcctgaagtcgcagacgtgggccctgcagcgagctctgaaggacgctgcctccctcctactgaagtcgcagacgtgggccctgcagcgagctctgaaggacgctgcctccctcctgaagtcgcagacgtgggccctgcagcgagctctgaaggacgctgcctccctcctgaagtcgcagacgtgggccctgcagcgagctctgaaggacgctgcctccctcctgaagtcgcagacgtgggccctgcagcgagctctgaaggacgctgcctccctcctactgaagtcgcagacgtgggccctgcagcgagctctgaaggacgctgcctccctcctgaagttgcagacgtgggccctgcagcgagctctgaatgatgctccttcacagctgcttctgtggccgttgttgatcccttcattccatcccttcattccatcccttcattccatccctctctgcttcaagcccagctctgctgtggttccccgaaggaatcatggcagtttgagatttgcgtttccagcacttctgctttaagccagactgcagaggctgacgcccttgggaatcataggtttcctccaccgaggaaactttcaccagaattgtggcctgagtggtggaaggctaaggttaaatataggtatatttgtgaagacggcagatagtggatgtccgctggctgagatggtgatctattctgagatctgggtagtatattctaaacagaacatagcaaaggatcactttctctgtgtctgaatcacagacacagacctcagagctggctgcctcgggagtgccttgctgacggtcgctggagttcgtccatcaggcgactgcggtggggcacggagagcaaccgctgcctggcggagactttgatgtgcggctgaggcctggcgaggaattttatcgtcaggcatcagctgagataggaacgctgtcagtcgagaattttcacattctagaatacgcattcaccccagagtattgactgcaaaccaatgcagcttccacctttggctcaacacaacttaatttctgagatgagtatgattcataggtgtttttgtatttgaaaataaagatgtgtatgattcaggtaatttattttgtagcatgttaaagaaaaaaactgaaagattattttattgagttttagagaactgtgttttggaagtgaaatcacgtctc

SEQ ID NO: 331 - DNA, 2320 bp, Homo sapiens
ttaaagggggcagtgactgcggctgggcgggagtccgggtcggcttggctgagcgggggcggtgctgggcagggcggcggccgctccctcccggactcccggcctcccggcctccctggtcccgcctgggaagggatgcaaggaagccctccggcgctgcgctccgaggcgggagacagcgtccccctccgcccctcgggtcctggcgcctcagagcccggcccaggccgcggaacggtgatgctcgggccggacgggcgggcgcggatccctgcgtcccgctgaaaatgtgtgtctgacatgcaagctcagtggggcagagacccgtggattgctgtgccctgccctccggacctggatcatgaaggtgttgggaagaagcttcttctgggtgctgtttcccgtccttccctgggcggtgcaggctgtggagcacgaggaggtggcgcagcgtgtgatcaaactgcaccgcgggcgaggggtggctgccatgcagagccggcagtgggtccgggacagctgcaggaagctctcagggcttctccgccagaagaatgcagttctgaacaaactgaaaactgcaattggagcagtggagaaagacgtgggcctgtcggatgaagagaaactgtttcaggtgcacacgtttgaaattttccagaaagagctgaatgaaagtgaaaattccgttttccaagctgtctacggactgcagagagccctgcagggggattacaaagatgtcgtgaacatgaaggagagcagccggcagcgcctggaggccctgagagaggctgcaataaaggaagaaacagaatatatggaacttctggcagcagaaaaacatcaagttgaagcccttaaaaatatgcaacatcaaaaccaaagtttatccatgcttgacgagattcttgaagatgtaagaaaggcagcggatcgtctggaggaagagatagaggaacatgcttttgacgacaataaatcagtcaagggggtcaattttgaggcagttctgagggtggaggaagaagaggccaattctaagcaaaatataacaaaacgagaagtggaggatgacttgggtcttagcatgctgattgactcccagaacaaccagtatattttgaccaagcccagagattcaaccatcccacgtgcagatcaccactttataaaggacattgttaccataggaatgctgtccttgccttgtggctggctatgtacagccataggattgcctacaatgtttggttatattatttgtggtgtacttctgggaccttcaggactaaatagtattaagtctattgtgcaagtggagacattaggagaatttggggtgttttttactctttttcttgttggcttagaattttctccagaaaagctaagaaaggtgtggaagatttccttacaagggccgtgttacatgacactgttaatgattgcatttggcttgctgtgggggcatctcttgcggatcaaacccacgcagagcgtcttcatttccacgtgtctgtccttgtcaagcacacccctcgtgtccaggttcctcatgggcagtgctcggggtgacaaagaaggcgacattgactacagcaccgtgctcctcggcatgctggtgacgcaggacgtgcagctcgggctcttcatggccgtcatgccgactctcatacaggcgggcgccagtgcatcttctagcattgtcgtggaagttctccgaatcctggttttgattggtcagattcttttttcactagcggcggtttttcttttatgtcttgttataaagaagtatctcattggaccctattatcggaagctgcacatggaaagcaaggggaacaaagaaatcctgatcttgggaatatctgcctttatcttcttaatgttaacgagtatttttctctttgaaaataactcccagcagaattgtcttatctggacaacttccgtgttgccctcccagtggcttcttccattacagtgactctgcccggctctcaggttttctcgctctctgggcagccctcaccgtgcacctgctgccagctgcttggggtgctgggccttctgcacatctgcacccgatgccacaatgtattctttccactgttcagtcttaggattcgtttccatttagagctgctgcccattctcgtgtttctggaaggtgctttcactgctgatgagcctagtagagtgcctgtggaggtagggttgcagggccacagtaaacaggagctcagccgtagccatgacgtgggtttccccaaagtcgccatgccagcccgtcctgctgctgtgccgtgagcac

SEQ ID NO: 332 - DNA, 3207 bp, Homo sapiens
ttaaagggggcagtgactgcggctgggcgggagtccgggtcggcttggctgagcgggggcggtgctgggcagggcggcggccgctccctcccggactcccggcctcccggcctccctggtcccgcctgggaagggatgcaaggaagccctccggcgctgcgctccgaggcgggagacagcgtccccctccgcccctcgggtcctggcgcctcagagcccggcccaggccgcggaacggtgatgctcgggccggacgggcgggcgcggatccctgcgtcccgctgaaaatgtgtgtctgacatgcaagctcagtggggcagagacccgtggattgctgtgccctgccctccggacctggatcatgaaggtgttgggaagaagcttcttctgggtgctgtttcccgtccttccctgggcggtgcaggctgtggagcacgaggaggtggcgcagcgtgtgatcaaactgcaccgcgggcgaggggtggctgccatgcagagccggcagtgggtccgggacagctgcaggaagctctcagggcttctccgccagaagaatgcagttctgaacaaactgaaaactgcaattggagcagtggagaaagacgtgggcctgtcggatgaagagaaactgtttcaggtgcacacgtttgaaattttccagaaagagctgaatgaaagtgaaaattccgttttccaagctgtctacggactgcagagagccctgcagggggattacaaagatgtcgtgaacatgaaggagagcagccggcagcgcctggaggccctgagagaggctgcaataaaggaagaaacagaatatatggaacttctggcagcagaaaaacatcaagttgaagcccttaaaaatatgcaacatcaaaaccaaagtttatccatgcttgacgagattcttgaagatgtaagaaaggcagcggatcgtctggaggaagagatagaggaacatgcttttgacgacaataaatcagtcaagggggtcaattttgaggcagttctgagggtggaggaagaagaggccaattctaagcaaaatataacaaaacgagaagtggaggatgacttgggtcttagcatgctgattgactcccagaacaaccagtatattttgaccaagcccagagattcaaccatcccacgtgcagatcaccactttataaaggacattgttaccataggaatgctgtccttgccttgtggctggctatgtacagccataggattgcctacaatgtttggttatattatttgtggtgtacttctgggaccttcaggactaaatagtattaagtctattgtgcaagtggagacattaggagaatttggggtgttttttactctttttcttgttggcttagaattttctccagaaaagctaagaaaggtgtggaagatttccttacaagggccgtgttacatgacactgttaatgattgcatttggcttgctgtgggggcatctcttgcggatcaaacccacgcagagcgtcttcatttccacgtgtctgtccttgtcaagcacacccctcgtgtccaggttcctcatgggcagtgctcggggtgacaaagaaggcgacattgactacagcaccgtgctcctcggcatgctggtgacgcaggacgtgcagctcgggctcttcatggccgtcatgccgactctcatacaggcgggcgccagtgcatcttctagcattgtcgtggaagttctccgaatcctggttttgattggtcagattcttttttcactagcggcggtttttcttttatgtcttgttataaagaagtatctcattggaccctattatcggaagctgcacatggaaagcaaggggaacaaagaaatcctgatcttgggaatatctgcctttatcttcttaatgttaacggttggccggtgtcagccgtgcgtcatccggaaggctgccataagcctgcgtttcgcagagctgcgctgaggctcccgtgtcgcggccgtccggccggcgcgctgatgtggctgcaaacctgggtcacggagctgctggacgtctccatggagctgggctgtttcctggctggagcgctcgtctcctctcagggccccgtggtcaccgaggagatcgccacctccatcgaacccatccgcgacttcctggccatcgttttcttcgcctccatagggctccacgtgttccccacgtttgtggcgtacgagctcacggtgctggtgttcctcaccttgtcagtggtggtgatgaagtttctcctggcggcgctggtcctgtctctcattctgccgaggagcagccagtacatcaagtggatcgtctctgcggggcttgcccaggtcagcgagttttcctttgtcctggggagccgggcgcgaagagcgggcgtcatctctcgggaggtgtacctccttatactgagtgtgaccacgctcagcctcttgctcgccccggtgctgtggagagctgcaatcacgaggtgtgtgcccagaccggagagacggtccagcctctgatggctcggagatgatggaccgtggaagggaagcgtctgtggggagtgagcgcttagatggccagcagctgctccttctgggaagctcgcaccttggcaacagaacagccctctagcagagcgtcagtgcagtcgtgttatcccggcttttacagaatattcttgtcctattttagaattttccggagtagtttatttgcagtctgttgattatgtgcagtagacccgggacactgcgttttaccgatcaccttgaatgtggtgcctggatgtgccttttttttttttccctgaaattattattaattttctattgtgagttcatcagttcatagtttttttagtaaagaagcaaaattaaaaggcttttaaaaatgtacaacttcagaattataatctgttagtcaaatatttgttattaaacatttctgtaatatgaagttgtaatcctggccgtgagcttggaagcttacttttgattcttaaagcctatgttttctaaaatgagacaaatacggatgtctatttgccttttattgtaacttttaaatgaaataatttcatgtcaatttctattagatatatcacttaaaatatttggttttaaatcacaagaatatgtattctttaataaagataatttatgatcatggtataattaattgaaatttattaaaatctgtttttatta

SEQ ID NO: 333 - DNA, 2700 bp, Homo sapiens
ttaaagggggcagtgactgcggctgggcgggagtccgggtcggcttggctgagcgggggcggtgctgggcagggcggcggccgctccctcccggactcccggcctcccggcctccctggtcccgcctgggaagggatgcaaggaagccctccggcgctgcgctccgaggcgggagacagcgtccccctccgcccctcgggtcctggcgcctcagagcccggcccaggccgcggaacggtgatgctcgggccggacgggcgggcgcggatccctgcgtcccgctgaaaatgtgtgtctgacatgcaagctcagtggggcagagacccgtggattgctgtgccctgccctccggacctggatcatgaaggtgttgggaagaagcttcttctgggtgctgtttcccgtccttccctgggcggtgcaggctgtggagcacgaggaggtggcgcagcgtgtgatcaaactgcaccgcgggcgaggggtggctgccatgcagagccggcagtgggtccgggacagctgcaggaagctctcagggcttctccgccagaagaatgcagttctgaacaaactgaaaactgcaattggagcagtggagaaagacgtgggcctgtcggatgaagagaaactgtttcaggtgcacacgtttgaaattttccagaaagagctgaatgaaagtgaaaattccgttttccaagctgtctacggactgcagagagccctgcagggggattacaaagatgtcgtgaacatgaaggagagcagccggcagcgcctggaggccctgagagaggctgcaataaaggaagaaacagaatatatggaacttctggcagcagaaaaacatcaagttgaagcccttaaaaatatgcaacatcaaaaccaaagtttatccatgcttgacgagattcttgaagatgtaagaaaggcagcggatcgtctggaggaagagatagaggaacatgcttttgacgacaataaatcagtcaagggggtcaattttgaggcagttctgagggtggaggaagaagaggccaattctaagcaaaatataacaaaacgagaagtggaggatgacttgggtcttagcatgctgattgactcccagaacaaccagtatattttgaccaagcccagagattcaaccatcccacgtgcagatcaccactttataaaggacattgttaccataggaatgctgtccttgccttgtggctggctatgtacagccataggattgcctacaatgtttggttatattatttgtggtgtacttctgggaccttcaggactaaatagtattaagtctattgtgcaagtggagacattaggagaatttggggtgttttttactctttttcttgttggcttagaattttctccagaaaagctaagaaagcattgtcgtggaagttctccgaatcctggttttgattggtcagattcttttttcactagcggcggtttttcttttatgtcttgttataaagaagtatctcattggaccctattatcggaagctgcacatggaaagcaaggggaacaaagaaatcctgatcttgggaatatctgcctttatcttcttaatgttaacggtcacggagctgctggacgtctccatggagctgggctgtttcctggctggagcgctcgtctcctctcagggccccgtggtcaccgaggagatcgccacctccatcgaacccatccgcgacttcctggccatcgttttcttcgcctccatagtttctcctggcggcgctggtcctgtctctcattctgccgaggagcagccagtacatcaagtggatcgtctctgcggggcttgcccaggtcagcgagttttcctttgtcctggggagccgggcgcgaagagcgggcgtcatctctcgggaggtgtacctccttatactgagtgtgaccacgctcagcctcttgctcgccccggtgctgtggagagctgcaatcacgaggtgtgtgcccagaccggagagacggtccagcctctgatggctcggagatgatggaccgtggaagggaagcgtctgtggggagtgagcgcttagatggccagcagctgctccttctgggaagctcgcaccttggcaacagaacagccctctagcagagcgtcagtgcagtcgtgttatcccggcttttacagaatattcttgtcctattttagaattttccggagtagtttatttgcagtctgttgattatgtgcagtagacccgggacactgcgttttaccgatcaccttgaatgtggtgcctggatgtgccttttttttttttccctgaaattattattaattttctattgtgagttcatcagttcatagtttttttagtaaagaagcaaaattaaaaggcttttaaaaatgtacaacttcagaattataatctgttagtcaaatatttgttattaaacatttctgtaatatgaagttgtaatcctggccgtgagcttggaagcttacttttgattcttaaagcctatgttttctaaaatgagacaaatacggatgtctatttgccttttattgtaacttttaaatgaaataatttcatgtcaatttctattagatatatcacttaaaatatttggttttaaatcacaagaatatgtattctttaataaagataatttatgatcatggtataattaattgaaatttattaaaatctgtttttatta

SEQ ID NO: 334 - DNA, 4271 bp, Homo sapiens
ttaaagggggcagtgactgcggctgggcgggagtccgggtcggcttggctgagcgggggcggtgctgggcagggcggcggccgctccctcccggactcccggcctcccggcctccctggtcccgcctgggaagggatgcaaggaagccctccggcgctgcgctccgaggcgggagacagcgtccccctccgcccctcgggtcctggcgcctcagagcccggcccaggccgcggaacggtgatgctcgggccggacgggcgggcgcggatccctgcgtcccgctgaaaatgtgtgtctgacatgcaagctcagtggggcagagacccgtggattgctgtgccctgccctccggacctggatcatgaaggtgttgggaagaagcttcttctgggtgctgtttcccgtccttccctgggcggtgcaggctgtggagcacgaggaggtggcgcagcgtgtgatcaaactgcaccgcgggcgaggggtggctgccatgcagagccggcagtgggtccgggacagctgcaggaagctctcagggcttctccgccagaagaatgcagttctgaacaaactgaaaactgcaattggagcagtggagaaagacgtgggcctgtcggatgaagagaaactgtttcaggtgcacacgtttgaaattttccagaaagagctgaatgaaagtgaaaattccgttttccaagctgtctacggactgcagagagccctgcagggggattacaaagatgtcgtgaacatgaaggagagcagccggcagcgcctggaggccctgagagaggctgcaataaaggaagaaacagaatatatggaacttctggcagcagaaaaacatcaagttgaagcccttaaaaatatgcaacatcaaaaccaaagtttatccatgcttgacgagattcttgaagatgtaagaaaggcagcggatcgtctggaggaagagatagaggaacatgcttttgacgacaataaatcagtcaagggggtcaattttgaggcagttctgagggtggaggaagaagaggccaattctaagcaaaatataacaaaacgagaagtggaggatgacttgggtcttagcatgctgattgactcccagaacaaccagtatattttgaccaagcccagagattcaaccatcccacgtgcagatcaccactttataaaggacattgttaccataggaatgctgtccttgccttgtggctggctatgtacagccataggattgcctacaatgtttggttatattatttgtggtgtacttctgggaccttcaggactaaatagtattaagtctattgtgcaagtggagacattaggagaatttggggtgttttttactctttttcttgttggcttagaattttctccagaaaagctaagaaaggtgtggaagatttccttacaagggccgtgttacatgacactgttaatgattgcatttggcttgctgtgggggcatctcttgcggatcaaacccacgcagagcgtcttcatttccacgtgtctgtccttgtcaagcacacccctcgtgtccaggttcctcatgggcagtgctcggggtgacaaagaaggcgacattgactacagcaccgtgctcctcggcatgctggtgacgcaggacgtgcagctcgggctcttcatggccgtcatgccgactctcatacaggcgggcgccagtgcatcttctagagagtgtttgtggccttttgaagcgttttagtcatggctgctttaacaccctcatcagataactccagtatccgttcgtctcgatgtgaagtctggcgcttgtcttttctccttcaagttgtgattttcccgattcttaatatgatgagcgacttttcgttgtatcctgggtggttcgtgtgtttattaggaggctttaaaccagtgactcccctggggagggtggtgtgaggcctggccagggggttctgcttcctgccaggcctccagccccaccccggcccaaacagctggcaagcgcttcctcatggcaggcggtggggtggaagaattttttagtatttgccttttgccagatcttctgttacatcttccctgctgtcggtagctcagccaggcaggcaggaaagtagaaggaatgaagggctgtttacctgggttttccagaggttcagcccaggctagagccccagcttggccatgctctggccgtgcaagccctggcagctttctgtgaattggggaggacgtgggaacagtgcctacctggtggaccgtgggaagactgaaagagaaaaccaggcagggcacttagtgcagccgctggtggaggcagtggttagagttcactcgctagagggtccttgtgataagagggtccttatgataagagggtccttatgataagagggtccttatcatggccattttcctttgatccagatgtctttaaatatcagaaaaataacgcttttagtcccaaccgccacatcggaatcagttcttattccttctggctacaatgtccaacataagttgaacaacataatttggacaacagaaggaagggttgtcatgctagccggagatgacttctagttaagaggtctgagcattttccacgcacaaccagttattctcaacggagggcggactctccatacgaaacaagcagagccctggcagagactgcagggcatttgtaaaactcaaacaccacgttgatctcactgccacgttctttccagttacacgcaggtctaacatgctggcataagacattgtcttaatcagaacacttttaaagcttttttttcccttttttccaattcaaaaaattaatgcagtacaggtattgatcccaccgaaattgttctaattcagtcatgacacttcatgtttacaaagagttgatgacttggaaaaatactctgtaatgctgttaaacttaagaaacagaatcgggccgggtgcagcggctcacgctgtcatcccagcgctttgggaggctgaggcaggaagatggcttgagagccgggcgcagcggcttccgcctgtcatcctagcgctttgggaggctgaggggggcggatcacgaggtcaggagatcgagaccatcctggctaacacggtgaaaccccgtctctactaaaaatacaaaaaattagccaggcatggtggcacgtgcctgtattcccagctactcgggaggctgaggcaggagaatcacttgaacccaggaggcagaggttgcagtgagctgagatcacgacactgcactccagcttgggcgacagagcaagactctatctcaaaaaaaaaaaacaaaagaaacagaaacagagtcagaattgtagaccacgttcctcctgacgctaacacagagctcccatttgacccagctgttcgctcctcggtatttacccgcaagaaacaaaaacacacatccacattcagactgatacacggtggtgatgggggtacaacagtgtgaatccacctgataccacagagttacacactcagaaatggttaacatggtacattttattgtatgagagtttcaccacaatgaaaaacttgtacctgaatgttcaagcagcattattcgtatagttaaaaagtattaagaactcaaatgtcaattagataacaggtagatatacaaaacatactatattcagcaaaggaatattattcagccataatatagaatgaacattgattcatcctatagcacagatgaagcacgatgcttctgaaagaaccggacaaaaagtccacacgctgtgtgattccattcataccaacgtccagactaggccagtccgtacagacaggatgaattactggttgccggagggtggggaggttgggggagatggggaggaagtgctgatgggtacagggtttctttttgggatgatgaaagtattctaacatggattgtggtaatagttgtgtaattttgtgaatatgctggaaaccattgaattgtatactttaaatgggtaagttgtatggtaagtgaattatatatcatagctgttaaaaatatatacgatattttaattagacatagaagaacatgaatagagactagaaatatatatatgtatatataacaaggtgttaatgattttctactagtagactggtagatttgtactaagttttttctactatatatacttttctgtaatttaggaaaacctccctttcaattttaataacgagggaaaatttatatttaaaatatcaaagaaataaaattagttgcaacataa

SEQ ID NO: 335 - DNA, 1869 bp, Homo sapiens
ttaaagggggcagtgactgcggctgggcgggagtccgggtcggcttggctgagcgggggcggtgctgggcagggcggcggccgctccctcccggactcccggcctcccggcctccctggtcccgcctgggaagggatgcaaggaagccctccggcgctgcgctccgaggcgggagacagcgtccccctccgcccctcgggtcctggcgcctcagagcccggcccaggccgcggaacggtgatgctcgggccggacgggcgggcgcggatccctgcgtcccgctgaaaatgtgtgtctgacatgcaagctcagtggggcagagacccgtggattgctgtgccctgccctccggacctggatcatgaaggtgttgggaagaagcttcttctgggtgctgtttcccgtccttccctgggcggtgcaggctgtggagcacgaggaggtggcgcagcgtgtgatcaaactgcaccgcgggcgaggggtggctgccatgcagagccggcagtgggtccgggacagctgcaggaagctctcagggcttctccgccagaagaatgcagttctgaacaaactgaaaactgcaattggagcagtggagaaagacgtgggcctgtcggatgaagagaaactgtttcaggtgcacacgtttgaaattttccagaaagagctgaatgaaagtgaaaattccgttttccaagctgtctacggactgcagagagccctgcagggggattacaaagatgtcgtgaacatgaaggagagcagccggcagcgcctggaggccctgagagaggctgcaataaaggaagaaacagaatatatggaacttctggcagcagaaaaacatcaagttgaagcccttaaaaatatgcaacatcaaaaccaaagtttatccatgcttgacgagattcttgaagatgtaagaaaggcagcggatcgtctggaggaagagatagaggaacatgcttttgacgacaataaatcagtcaagggggtcaattttgaggcagttctgagggtggaggaagaagaggccaattctaagcaaaatataacaaaacgagaagtggaggatgacttgggtcttagcatgctgattgactcccagaacaaccagtatattttgaccaagcccagagattcaaccatcccacgtgcagatcaccactttataaaggacattgttaccataggaatgctgtccttgccttgtggctggctatgtacagccataggattgcctacaatgtttggttatattatttgtggtgtacttctgggaccttcaggactaaatagtattaagtctattgtgcaagtggagacattaggagaatttggggtgttttttactctttttcttgttggcttagaattttctccagaaaagctaagaaaggtgtggaagatttccttacaagggccgtgttacatgacactgttaatgattgcatttggcttgctgtgggggcatctcttgcggatcaaacccacgcagagcgtcttcatttccacgtgtctgtccttgtcaagcacacccctcgtgtccaggttcctcatgggcagtgctcggggtgacaaagaaggatcattaaattcattcttcccaatttggacaccagccttgtgtcttagagatgcacattgaaaggtatggttaagaggatgactggggtttcccttaggagggtagagtggaggttagtgtatgaaacaaggttagtctgcctgatcatggaaactggattatttgttccttgagatgcactgtatttttctttctacttttgcatatgcttgaaattttattagaaattcctatatatgtccaggcatggtggctcatgcctgtaatcccagcactttggg

SEQ ID NO: 336 - DNA, 3272 bp, Homo sapiens
ttaaagggggcagtgactgcggctgggcgggagtccgggtcggcttggctgagcgggggcggtgctgggcagggcggcggccgctccctcccggactcccggcctcccggcctccctggtcccgcctgggaagggatgcaaggaagccctccggcgctgcgctccgaggcgggagacagcgtccccctccgcccctcgggtcctggcgcctcagagcccggcccaggccgcggaacggtgatgctcgggccggacgggcgggcgcggatccctgcgtcccgctgaaaatgtgtgtctgacatgcaagctcagtggggcagagacccgtggattgctgtgccctgccctccggacctggatcatgaaggtgttgggaagaagcttcttctgggtgctgtttcccgtccttccctgggcggtgcaggctgtggagcacgaggaggtggcgcagcgtgtgatcaaactgcaccgcgggcgaggggtggctgccatgcagagccggcagtgggtccgggacagctgcaggaagctctcagggcttctccgccagaagaatgcagttctgaacaaactgaaaactgcaattggagcagtggagaaagacgtgggcctgtcggatgaagagaaactgtttcaggtgcacacgtttgaaattttccagaaagagctgaatgaaagtgaaaattccgttttccaagctgtctacggactgcagagagccctgcagggggattacaaagatgtcgtgaacatgaaggagagcagccggcagcgcctggaggccctgagagaggctgcaataaaggaagaaacagaatatatggaacttctggcagcagaaaaacatcaagttgaagcccttaaaaatatgcaacatcaaaaccaaagtttatccatgcttgacgagattcttgaagatgtaagaaaggcagcggatcgtctggaggaagagatagaggaacatgcttttgacgacaataaatcagtcaagggggtcaattttgaggcagttctgagggtggaggaagaagaggccaattctaagcaaaatataacaaaacgagaagtggaggatgacttgggtcttagcatgctgattgactcccagaacaaccagtatattttgaccaagcccagagattcaaccatcccacgtgcagatcaccactttataaaggacattgttaccataggaatgctgtccttgccttgtggctggctatgtacagccataggattgcctacaatgtttggttatattatttgtggtgtacttctgggaccttcaggactaaatagtattaagtctattgtgcaagtggagacattaggagaatttggggtgttttttactctttttcttgttggcttagaattttctccagaaaagctaagaaaggtgtggaagatttccttacaagggccgtgttacatgacactgttaatgattgcatttggcttgctgtgggggcatctcttgcggatcaaacccacgcagagcgtcttcatttccacgtgtctgtccttgtcaagcacacccctcgtgtccaggttcctcatgggcagtgctcggggtgacaaagaagagttgttccttagtctcttcagctagtcatggctactactgttctgccctcgtgagccggtgtttgtctgccgggcccgccttggtcacacagtgaaggctcattccgtgtggtggcttgggtgcgtctgcaccatttggacaccaagtctgtgttggtcacacagtgaaggctcattccgtgtggtggcttgggtgcgtctgcaccatttggacaccaagtctgtcttggtctcacagcgaaggctcattccgtgtggtggcttgggcgacattgactacagcaccgtgctcctcggcatgctggtgacgcaggacgtgcagctcgggctcttcatggccgtcatgccgactctcatacaggcgggcgccagtgcatcttctagcattgtcgtggaagttctccgaatcctggttttgattggtcagattcttttttcactagcggcggtttttcttttatgtcttgttataaagaagtatctcattggaccctattatcggaagctgcacatggaaagcaaggggaacaaagaaatcctgatcttgggaatatctgcctttatcttcttaatgttaacggtcacggagctgctggacgtctccatggagctgggctgtttcctggctggagcgctcgtctcctctcagggccccgtggtcaccgaggagatcgccacctccatcgaacccatccgcgacttcctggccatcgttttcttcgcctccatagtttctcctggcggcgctggtcctgtctctcattctgccgaggagcagccagtacatcaagtggatcgtctctgcggggcttgcccaggtcagcgagttttcctttgtcctggggagccgggcgcgaagagcgggcgtcatctctcgggaggtgtacctccttatactgagtgtgaccacgctcagcctcttgctcgccccggtgctgtggagagctgcaatcacgaggtgtgtgcccagaccggagagacggtccagcctctgatggctcggagatgatggaccgtggaagggaagcgtctgtggggagtgagcgcttagatggccagcagctgctccttctgggaagctcgcaccttggcaacagaacagccctctagcagagcgtcagtgcagtcgtgttatcccggcttttacagaatattcttgtcctattttagaattttccggagtagtttatttgcagtctgttgattatgtgcagtagacccgggacactgcgttttaccgatcaccttgaatgtggtgcctggatgtgccttttttttttttccctgaaattattattaattttctattgtgagttcatcagttcatagtttttttagtaaagaagcaaaattaaaaggcttttaaaaatgtacaacttcagaattataatctgttagtcaaatatttgttattaaacatttctgtaatatgaagttgtaatcctggccgtgagcttggaagcttacttttgattcttaaagcctatgttttctaaaatgagacaaatacggatgtctatttgccttttattgtaacttttaaatgaaataatttcatgtcaatttctattagatatatcacttaaaatatttggttttaaatcacaagaatatgtattctttaataaagataatttatgatcatggtataattaattgaaatttattaaaatctgtttttatta

SEQ ID NO: 337 - DNA, 1627 bp, Homo sapiens
ttaaagggggcagtgactgcggctgggcgggagtccgggtcggcttggctgagcgggggcggtgctgggcagggcggcggccgctccctcccggactcccggcctcccggcctccctggtcccgcctgggaagggatgcaaggaagccctccggcgctgcgctccgaggcgggagacagcgtccccctccgcccctcgggtcctggcgcctcagagcccggcccaggccgcggaacggtgatgctcgggccggacgggcgggcgcggatccctgcgtcccgctgaaaatgtgtgtctgacatgcaagctcagtggggcagagacccgtggattgctgtgccctgccctccggacctggatcatgaaggtgttgggaagaagcttcttctgggtgctgtttcccgtccttccctgggcggtgcaggctgtggagcacgaggaggtggcgcagcgtgtgatcaaactgcaccgcgggcgaggggtggctgccatgcagagccggcagtgggtccgggacagctgcaggaagctctcagggcttctccgccagaagaatgcagttctgaacaaactgaaaactgcaattggagcagtggagaaagacgtgggcctgtcggatgaagagaaactgtttcaggtgcacacgtttgaaattttccagaaagagctgaatgaaagtgaaaattccgttttccaagctgtctacggactgcagagagccctgcagggggattacaaagatgtcgtgaacatgaaggagagcagccggcagcgcctggaggccctgagagaggctgcaataaaggaagaaacagaatatatggaacttctggcagcagaaaaacatcaagttgaagcccttaaaaatatgcaacatcaaaaccaaagtttatccatgcttgacgagattcttgaagatgtaagaaaggcagcggatcgtctggaggaagagatagaggaacatgcttttgacgacaataaatcagtcaagggggtcaattttgaggcagttctgagggtggaggaagaagaggccaattctaagcaaaatataacaaaacgagaagtggaggatgacttgggtcttagcatgctgattgactcccagaacaaccagtatattttgaccaagcccagagattcaaccatcccacgtgcagatcaccactttataaaggacattgttaccataggaatgctgtccttgccttgtggctggctatgtacagccataggattgcctacaatgtttggttatattatttgtggtgtacttctgggaccttcaggactaaatagtattaagtctattgtgcaagtggagacattaggagaatttggggtgttttttactctttttcttgttggcttagaattttctccagaaaagctaagaaagcattgtcgtggaagttctccgaatcctggttttgattggtcagattcttttttcactagcggcggtttttcttttatgtcttgttataaagaagtatctcattggaccctattatcggaagctgcacatggaaagcaaggggaacaaagaaatcctgatcttgggaatatctgcctttatcttcttaatgttaacgagtatttttctctttgaaaataactcccagca

SEQ ID NO: 338 - DNA, 3025 bp, Homo sapiens
ttaaagggggcagtgactgcggctgggcgggagtccgggtcggcttggctgagcgggggcggtgctgggcagggcggcggccgctccctcccggactcccggcctcccggcctccctggtcccgcctgggaagggatgcaaggaagccctccggcgctgcgctccgaggcgggagacagcgtccccctccgcccctcgggtcctggcgcctcagagcccggcccaggccgcggaacggtgatgctcgggccggacgggcgggcgcggatccctgcgtcccgctgaaaatgtgtgtctgacatgcaagctcagtggggcagagacccgtggattgctgtgccctgccctccggacctggatcatgaaggtgttgggaagaagcttcttctgggtgctgtttcccgtccttccctgggcggtgcaggctgtggagcacgaggaggtggcgcagcgtgtgatcaaactgcaccgcgggcgaggggtggctgccatgcagagccggcagtgggtccgggacagctgcaggaagctctcagggcttctccgccagaagaatgcagttctgaacaaactgaaaactgcaattggagcagtggagaaagacgtgggcctgtcggatgaagagaaactgtttcaggtgcacacgtttgaaattttccagaaagagctgaatgaaagtgaaaattccgttttccaagctgtctacggactgcagagagccctgcagggggattacaaagatgtcgtgaacatgaaggagagcagccggcagcgcctggaggccctgagagaggctgcaataaaggaagaaacagaatatatggaacttctggcagcagaaaaacatcaagttgaagcccttaaaaatatgcaacatcaaaaccaaagtttatccatgcttgacgagattcttgaagatgtaagaaaggcagcggatcgtctggaggaagagatagaggaacatgcttttgacgacaataaatcagtcaagggggtcaattttgaggcagttctgagggtggaggaagaagaggccaattctaagcaaaatataacaaaacgagaagtggaggatgacttgggtcttagcatgctgattgactcccagaacaaccagtatattttgaccaagcccagagattcaaccatcccacgtgcagatcaccactttataaaggacattgttaccataggaatgctgtccttgccttgtggctggctatgtacagccataggattgcctacaatgtttggttatattatttgtggtgtacttctgggaccttcaggactaaatagtattaagtctattgtgcaagtggagacattaggagaatttggggtgttttttactctttttcttgttggcttagaattttctccagaaaagctaagaaaggtgtggaagatttccttacaagggccgtgttacatgacactgttaatgattgcatttggcttgctgtgggggcatctcttgcggatcaaacccacgcagagcgtcttcatttccacgtgtctgtccttgtcaagcacacccctcgtgtccaggttcctcatgggcagtgctcggggtgacaaagaaggactttcctaaccatggtggataccagggcttacattctgcaaggaaatggtgtccctgtgaactcagctcctccaaacctccacttctccacttgattaagaaaaatgcccgtgaggattgattgagggccagagagaaattggaccaagattttgaaaaaccagtcagcactggaaaatgacctgtggaactggtggattttaggaagttgcgtatgttttgctgctttaattctagcaggcactgggaattgatacacttttgatactttcttcctgtgaaatcaaggtgctttggtaactgaaggtgttcccgactctttggctttggccttagtttcatcgtatgtatgaaacattgccgcttctaagtcgtgactgtttagtggaagccgacttgctcggagcctaggcaggaccgtgtccctctgcggggaggacagtggaagccgactcactcggaagcctaggcaggaccgtgtccctgtgcggggaggacagtggaagccgacttgctcggagcctaggcaggaccgtgtccctgtgcggggaggacagtggaagccgactcactcggaaacctaggcaggaccgtgtccctgtgcggggaggcttggcaggtggctgtttctgacagcctgcctacccactgggtaagctgtcactgttttgctcttattttgtaaaagtcagtaaaatacggggtcgaaatgtcacagtcacttcactctgacgttcaccctgcacagaacacacaggcatagaagagaaaatacggaaagagaaaaccaaagaggtatgtctgacctctcccataaaccgagaggctctgtgccggcaactgagaggctgagcagagctggccatgggccgccaagcagggtgctggagcatgtgggacccacatgtgccctcactgtgtgacaggcagttgggaagcatctgtctgtgaaaggaggcagggaaaactttttaaaaatctgcggctttctgcggggcctgaggcgccagtaggacacggatgcagcctccctgctagacgctggacgggtggccccggccatgggcctcctccgtgctggtgccagcatccctgtgggctggtcctagggtcagccccatcgtgagactggacagggttggagggtcgggggctgagtgaaatgaaaaaagaccaagtggggaccaggaacgacgcatgaaaacagctcctagtttagtggcccgcacacgggacacccacacctgtgaagaaatctgtggctggaaaagagctgacggactcagcagtcacagcgtgaactgcccttatggacagagaagcttcacaaagacttcaaaatcagtgcacggtgtatatacactcggaggtgtgcagtatatatacactcggagtcacggaggccgggactggagaggcagagggccggagtgtaga

SEQ ID NO: 339 - DNA, 2507 bp, Homo sapiens
ttaaagggggcagtgactgcggctgggcgggagtccgggtcggcttggctgagcgggggcggtgctgggcagggcggcggccgctccctcccggactcccggcctcccggcctccctggtcccgcctgggaagggatgcaaggaagccctccggcgctgcgctccgaggcgggagacagcgtccccctccgcccctcgggtcctggcgcctcagagcccggcccaggccgcggaacggtgatgctcgggccggacgggcgggcgcggatccctgcgtcccgctgaaaatgtgtgtctgacatgcaagctcagtggggcagagacccgtggattgctgtgccctgccctccggacctggatcatgaaggtgttgggaagaagcttcttctgggtgctgtttcccgtccttccctgggcggtgcaggctgtggagcacgaggaggtggcgcagcgtgtgatcaaactgcaccgcgggcgaggggtggctgccatgcagagccggcagtgggtccgggacagctgcaggaagctctcagggcttctccgccagaagaatgcagttctgaacaaactgaaaactgcaattggagcagtggagaaagacgtgggcctgtcggatgaagagaaactgtttcaggtgcacacgtttgaaattttccagaaagagctgaatgaaagtgaaaattccgttttccaagctgtctacggactgcagagagccctgcagggggattacaaagatgtcgtgaacatgaaggagagcagccggcagcgcctggaggccctgagagaggctgcaataaaggaagaaacagaatatatggaacttctggcagcagaaaaacatcaagttgaagcccttaaaaatatgcaacatcaaaaccaaagtttatccatgcttgacgagattcttgaagatgtaagaaaggcagcggatcgtctggaggaagagatagaggaacatgcttttgacgacaataaatcagtcaagggggtcaattttgaggcagttctgagggtggaggaagaagaggccaattctaagcaaaatataacaaaacgagaagtggaggatgacttgggtcttagcatgctgattgactcccagaacaaccagtatattttgaccaagcccagagattcaaccatcccacgtgcagatcaccactttataaaggacattgttaccataggaatgctgtccttgccttgtggctggctatgtacagccataggattgcctacaatgtttggttatattatttgtggtgtacttctgggaccttcaggactaaatagtattaagtctattgtgcaagtggagacattaggagaatttggggtgttttttactctttttcttgttggcttagaattttctccagaaaagctaagaaaggtgtggaagatttccttacaagggccgtgttacatgacactgttaatgattgcatttggcttgctgtgggggcatctcttgcggatcaaacccacgcagagcgtcttcatttccacgtgtctgtccttgtcaagcacacccctcgtgtccaggttcctcatgggcagtgctcggggtgacaaagaaggactttcctaaccatggtggataccagggcttacattctgcaaggaaatggtgtccctgtgaactcagctcctccaaacctccacttctccacttgattaagaaaaatgcccgtgaggattgattgagggccagagagaaattggaccaagattttgaaaaaccagtcagcactggaaaatgacctgtggaactggtggattttaggaagttgcgtatgttttgctgctttaattctagcaggcactgggaattgatacacttttgatactttcttcctgtgaaatcaaggtgctttggtaactgaaggtgttcccgactctttggctttggccttagtttcatcgtatgtatgaaacattgccgcttctaagtcgtgactgtttagtggaagccgacttgctcggagcctaggcaggaccgtgtccctctgcggggaggacagtggaagccgactcactcggaagcctaggcaggaccgtgtccctgtgcggggaggacagtggaagccgacttgctcggagcctaggcaggaccgtgtccctgtgcggggaggacagtggaagccgactcactcggaaacctaggcaggaccgtgtccctgtgcggggaggcttggcaggtggctgtttctgacagcctgcctacccactggagttgttccttagtctcttcagctagtcatggctactactgttctgccctcgtgagccggtgtttgtctgccgggcccgccttggtcacacagtgaaggctcattccgtgtggtggcttgggtgcgtctgcaccatttggacaccaagtctgtgttggtcacacagtgaaggctcattccgtgtggtggcttgggtgcgtctgcaccatttggacaccaagtctgtcttggtctcacagcgaaggctcattccgtgtggtggcttgg

SEQ ID NO: 340 - DNA, 1607 bp, Homo sapiens
ttaaagggggcagtgactgcggctgggcgggagtccgggtcggcttggctgagcgggggcggtgctgggcagggcggcggccgctccctcccggactcccggcctcccggcctccctggtcccgcctgggaagggatgcaaggaagccctccggcgctgcgctccgaggcgggagacagcgtccccctccgcccctcgggtcctggcgcctcagagcccggcccaggccgcggaacggtgatgctcgggccggacgggcgggcgcggatccctgcgtcccgctgaaaatgtgtgtctgacatgcaagctcagtggggcagagacccgtggattgctgtgccctgccctccggacctggatcatgaaggtgttgggaagaagcttcttctgggtgctgtttcccgtccttccctgggcggtgcaggctgtggagcacgaggaggtggcgcagcgtgtgatcaaactgcaccgcgggcgaggggtggctgccatgcagagccggcagtgggtccgggacagctgcaggaagctctcagggcttctccgccagaagaatgcagttctgaacaaactgaaaactgcaattggagcagtggagaaagacgtgggcctgtcggatgaagagaaactgtttcaggtgcacacgtttgaaattttccagaaagagctgaatgaaagtgaaaattccgttttccaagctgtctacggactgcagagagccctgcagggggattacaaagatgtcgtgaacatgaaggagagcagccggcagcgcctggaggccctgagagaggctgcaataaaggaagaaacagaatatatggaacttctggcagcagaaaaacatcaagttgaagcccttaaaaatatgcaacatcaaaaccaaagtttatccatgcttgacgagattcttgaagatgtaagaaaggcagcggatcgtctggaggaagagatagaggaacatgcttttgacgacaataaatcagtcaagggggtcaattttgaggcagttctgagggtggaggaagaagaggccaattctaagcaaaatataacaaaacgagaagtggaggatgacttgggtcttagcatgctgattgactcccagaacaaccagtatattttgaccaagcccagagattcaaccatcccacgtgcagatcaccactttataaaggacattgttaccataggaatgctgtccttgccttgtggctggctatgtacagccataggattgcctacaatgtttggttatattatttgtggtgtacttctgggaccttcaggactaaatagtattaagtctattgtgcaagtggagacattaggagaatttggggtgttttttactctttttcttgttggcttagaattttctccagaaaagctaagaaaggcgacattgactacagcaccgtgctcctcggcatgctggtgacgcaggacgtgcagctcgggctcttcatggccgtcatgccgactctcatacaggcgggcgccagtgcatcttctagcattgtcgtggaagttctccgaatcctggttttgattggtcagattcttttttcactagcggcggtttttcttttatgtcttgttataaa

SEQ ID NO: 341 - DNA, 2039 bp, Homo sapiens
ttaaagggggcagtgactgcggctgggcgggagtccgggtcggcttggctgagcgggggcggtgctgggcagggcggcggccgctccctcccggactcccggcctcccggcctccctggtcccgcctgggaagggatgcaaggaagccctccggcgctgcgctccgaggcgggagacagcgtccccctccgcccctcgggtcctggcgcctcagagcccggcccaggccgcggaacggtgatgctcgggccggacgggcgggcgcggatccctgcgtcccgctgaaaatgtgtgtctgacatgcaagctcagtggggcagagacccgtggattgctgtgccctgccctccggacctggatcatgaaggtgttgggaagaagcttcttctgggtgctgtttcccgtccttccctgggcggtgcaggctgtggagcacgaggaggtggcgcagcgtgtgatcaaactgcaccgcgggcgaggggtggctgccatgcagagccggcagtgggtccgggacagctgcaggaagctctcagggcttctccgccagaagaatgcagttctgaacaaactgaaaactgcaattggagcagtggagaaagacgtgggcctgtcggatgaagagaaactgtttcaggtgcacacgtttgaaattttccagaaagagctgaatgaaagtgaaaattccgttttccaagctgtctacggactgcagagagccctgcagggggattacaaagatgtcgtgaacatgaaggagagcagccggcagcgcctggaggccctgagagaggctgcaataaaggaagaaacagaatatatggaacttctggcagcagaaaaacatcaagttgaagcccttaaaaatatgcaacatcaaaaccaaagtttatccatgcttgacgagattcttgaagatgtaagaaaggcagcggatcgtctggaggaagagatagaggaacatgcttttgacgacaataaatcagtcaagggggtcaattttgaggcagttctgagggtggaggaagaagaggccaattctaagcaaaatataacaaaacgagaagtggaggatgacttgggtcttagcatgctgattgactcccagaacaaccagtatattttgaccaagcccagagattcaaccatcccacgtgcagatcaccactttataaaggacattgttaccataggaatgctgtccttgccttgtggctggctatgtacagccataggattgcctacaatgtttggttatattatttgtggtgtacttctgggaccttcaggactaaatagtattaagtctattgtgcaagtggagacattaggagaatttggggtgttttttactctttttcttgttggcttagaattttctccagaaaagctaagaaagaaacagtggaaccagtcctgagcatctaacggtcagttcagctgcggcgtgactaccatggagtgttaggtagccactgcaaagtaacaagagcatcagcaacagagcaaaatatcggttggaaagctaaatgtggggaaaaaaggagcatgtaacatgaccgcggcaatgtaaaagaagcaccaatacatgggggaaaaatgggaaagaagcgttccgggtagccatgatgacttctggtttcttctccatattttccaaattttctataataagcagtcaatactttgtcattaggaggaagaataaacttttcttttaaaggcttgtgtttactttcagaagtcaactctgatctcactggcatgtttttctttatactctcttcccatttgcttcctcagttcatcctcttacctagaactttttgttttctttatctttctgtttttccactaaaagctccgtttttccatcttcccattactctccctttcctgtgtacactcctgaagacaggcatcctcataaggtgttctgaattaactttagggtgttctccaggtactttgcatctttttatatttcttgtaaattgttaatttctaagctccatgattaaagagaattcaccactctc

SEQ ID NO: 342 - DNA, 3085 bp, Homo sapiens
gtcctcggacggccgcggccctcggctccggggcagtgccgggagccggccgcggggactcccactcccggcatgctcagcgccgcccgggggcccacgggagctcgcgccccacagcccctgcgcgtccagccctctgcgagggccttggctcgcccctgcggggtccaacgccagcctgcggctgccaggccccacgccggccaggaagtgctcgccgcccgcggccgacgggacccgcccacgccccgcctcttaaagggggcagtgactgcggctgggcgggagtccgggtcggcttggctgagcgggggcggtgctgggcagggcggcggccgctccctcccggactcccggcctcccggcctccctggtcccgcctgggaagggatgcaaggaagccctccggcgctgcgctccgaggcgggagacagcgtccccctccgcccctcgggtcctggcgcctcagagcccggcccaggccgcggaacggtgatgctcgggccggacgggcgggcgcggatccctgcgtcccgctgaaaatgtgtgtctgacatgcaagctcagtggggcagagacccgtggattgctgtgccctgccctccggacctggatcatgaaggtgttgggaagaagcttcttctgggtgctgtttcccgtccttccctgggcggtgcaggctgtggagcacgaggaggtggcgcagcgtgtgatcaaactgcaccgcgggcgaggggtggctgccatgcagagccggcagtgggtccgggacagctgcaggaagctctcagggcttctccgccagaagaatgcagttctgaacaaactgaaaactgcaattggagcagtggagaaagacgtgggcctgtcggatgaagagaaactgtttcaggtgcacacgtttgaaattttccagaaagagctgaatgaaagtgaaaattccgttttccaagctgtctacggactgcagagagccctgcagggggattacaaagatgtcgtgaacatgaaggagagcagccggcagcgcctggaggccctgagagaggctgcaataaaggaagaaacagaatatatggaacttctggcagcagaaaaacatcaagttgaagcccttaaaaatatgcaacatcaaaaccaaagtttatccatgcttgacgagattcttgaagatgtaagaaaggcagcggatcgtctggaggaagagatagaggaacatgcttttgacgacaataaatcagacattgttaccataggaatgctgtccttgccttgtggctggctatgtacagccataggattgcctacaatgtttggttatattatttgtggtgtacttctgggaccttcaggactaaatagtattaagtctattgtgcaagtggagacattaggagaatttggggtgttttttactctttttcttgttggcttagaattttctccagaaaagctaagaaaggtgtggaagatttccttacaagggccgtgttacatgacactgttaatgattgcatttggcttgctgtgggggcatctcttgcggatcaaacccacgcagagcgtcttcatttccacgtgtctgtccttgtcaagcacacccctcgtgtccaggttcctcatgggcagtgctcggggtgacaaagaaggcgacattgactacagcaccgtgctcctcggcatgctggtgacgcaggacgtgcagctcgggctcttcatggccgtcatgccgactctcatacaggcgggcgccagtgcatcttctagcattgtcgtggaagttctccgaatcctggttttgattggtcagattcttttttcactagcggcggtttttcttttatgtcttgttataaagaagtatctcattggaccctattatcggaagctgcacatggaaagcaaggggaacaaagaaatcctgatcttgggaatatctgcctttatcttcttaatgttaacggtcacggagctgctggacgtctccatggagctgggctgtttcctggctggagcgctcgtctcctctcagggccccgtggtcaccgaggagatcgccacctccatcgaacccatccgcgacttcctggccatcgttttcttcgcctccatagtttctcctggcggcgctggtcctgtctctcattctgccgaggagcagccagtacatcaagtggatcgtctctgcggggcttgcccaggtcagcgagttttcctttgtcctggggagccgggcgcgaagagcgggcgtcatctctcgggaggtgtacctccttatactgagtgtgaccacgctcagcctcttgctcgccccggtgctgtggagagctgcaatcacgaggtgtgtgcccagaccggagagacggtccagcctctgatggctcggagatgatggaccgtggaagggaagcgtctgtggggagtgagcgcttagatggccagcagctgctccttctgggaagctcgcaccttggcaacagaacagccctctagcagagcgtcagtgcagtcgtgttatcccggcttttacagaatattcttgtcctattttagaattttccggagtagtttatttgcagtctgttgattatgtgcagtagacccgggacactgcgttttaccgatcaccttgaatgtggtgcctggatgtgccttttttttttttccctgaaattattattaattttctattgtgagttcatcagttcatagtttttttagtaaagaagcaaaattaaaaggcttttaaaaatgtacaacttcagaattataatctgttagtcaaatatttgttattaaacatttctgtaatatgaagttgtaatcctggccgtgagcttggaagcttacttttgattcttaaagcctatgttttctaaaatgagacaaatacggatgtctatttgccttttattgtaacttttaaatgaaataatttcatgtcaatttctattagatatatcacttaaaatatttggttttaaatcacaagaatatgtattctttaataaagataatttatgatcatggtataattaattgaaatttattaaaatctgtttttattaaaaaaaaaaaaaaaaaa

SEQ ID NO: 343 - DNA, 2860 bp, Homo sapiens
gtcctcggacggccgcggccctcggctccggggcagtgccgggagccggccgcggggactcccactcccggcatgctcagcgccgcccgggggcccacgggagctcgcgccccacagcccctgcgcgtccagccctctgcgagggccttggctcgcccctgcggggtccaacgccagcctgcggctgccaggccccacgccggccaggaagtgctcgccgcccgcggccgacgggacccgcccacgccccgcctcttaaagggggcagtgactgcggctgggcgggagtccgggtcggcttggctgagcgggggcggtgctgggcagggcggcggccgctccctcccggactcccggcctcccggcctccctggtcccgcctgggaagggatgcaaggaagccctccggcgctgcgctccgaggcgggagacagcgtccccctccgcccctcgggtcctggcgcctcagagcccggcccaggccgcggaacggtgatgctcgggccggacgggcgggcgcggatccctgcgtcccgctgaaaatgtgtgtctgacatgcaagctcagtggggcagagacccgtggattgctgtgccctgccctccggacctggatcatgaaggtgttgggaagaagcttcttctgggtgctgtttcccgtccttccctgggcggtgcaggctgtggagcacgaggaggtggcgcagcgtgtgatcaaactgcaccgcgggcgaggggtggctgccatgcagagccggcagtgggtccgggacagctgcaggaagctctcagggcttctccgccagaagaatgcagttctgaacaaactgaaaactgcaattggagcagtggagaaagacgtgggcctgtcggatgaagagaaactgtttcaggtgcacacgtttgaaattttccagaaagagctgaatgaaagtgaaaattccgttttccaagctgtctacggactgcagagagccctgcagggggattacaaagatgtcgtgaacatgaaggagagcagccggcagcgcctggaggccctgagagaggctgcaataaaggaagaaacagaatatatggaacttctggcagcagaaaaacatcaagttgaagcccttaaaaatatgcaacatcaaaaccaaagtttatccatgcttgacgagattcttgaagatgtaagaaaggcagcggatcgtctggaggaagagatagaggaacatgcttttgacgacaataaatcagacattgttaccataggaatgctgtccttgccttgtggctggctatgtacagccataggattgcctacaatgtttggttatattatttgtggtgtacttctgggaccttcaggactaaatagtattaagtctattgtgcaagtggagacattaggagaatttggggtgttttttactctttttcttgttggcttagaattttctccagaaaagctaagaaagcattgtcgtggaagttctccgaatcctggttttgattggtcagattcttttttcactagcggcggtttttcttttatgtcttgttataaagaagtatctcattggaccctattatcggaagctgcacatggaaagcaaggggaacaaagaaatcctgatcttgggaatatctgcctttatcttcttaatgttaacggtcacggagctgctggacgtctccatggagctgggctgtttcctggctggagcgctcgtctcctctcagggccccgtggtcaccgaggagatcgccacctccatcgaacccatccgcgacttcctggccatcgttttcttcgcctccatagggctccacgtgttccccacgtttgtggcgtacgagctcacggtgctggtgttcctcaccttgtcagtggtggtgatgaagtttctcctggcggcgctggtcctgtctctcattctgccgaggagcagccagtacatcaagtggatcgtctctgcggggcttgcccaggtcagcgagttttcctttgtcctggggagccgggcgcgaagagcgggcgtcatctctcgggaggtgtacctccttatactgagtgtgaccacgctcagcctcttgctcgccccggtgctgtggagagctgcaatcacgaggtgtgtgcccagaccggagagacggtccagcctctgatggctcggagatgatggaccgtggaagggaagcgtctgtggggagtgagcgcttagatggccagcagctgctccttctgggaagctcgcaccttggcaacagaacagccctctagcagagcgtcagtgcagtcgtgttatcccggcttttacagaatattcttgtcctattttagaattttccggagtagtttatttgcagtctgttgattatgtgcagtagacccgggacactgcgttttaccgatcaccttgaatgtggtgcctggatgtgccttttttttttttccctgaaattattattaattttctattgtgagttcatcagttcatagtttttttagtaaagaagcaaaattaaaaggcttttaaaaatgtacaacttcagaattataatctgttagtcaaatatttgttattaaacatttctgtaatatgaagttgtaatcctggccgtgagcttggaagcttacttttgattcttaaagcctatgttttctaaaatgagacaaatacggatgtctatttgccttttattgtaacttttaaatgaaataatttcatgtcaatttctattagatatatcacttaaaatatttggttttaaatcacaagaatatgtattctttaataaagataatttatgatcatggtataattaattgaaatttattaaaatctgtttttattaaaaaaaaaaaaaaaaaa

SEQ ID NO: 344 - DNA, 2297 bp, Homo sapiens
gtcctcggacggccgcggccctcggctccggggcagtgccgggagccggccgcggggactcccactcccggcatgctcagcgccgcccgggggcccacgggagctcgcgccccacagcccctgcgcgtccagccctctgcgagggccttggctcgcccctgcggggtccaacgccagcctgcggctgccaggccccacgccggccaggaagtgctcgccgcccgcggccgacgggacccgcccacgccccgcctcttaaagggggcagtgactgcggctgggcgggagtccgggtcggcttggctgagcgggggcggtgctgggcagggcggcggccgctccctcccggactcccggcctcccggcctccctggtcccgcctgggaagggatgcaaggaagccctccggcgctgcgctccgaggcgggagacagcgtccccctccgcccctcgggtcctggcgcctcagagcccggcccaggccgcggaacggtgatgctcgggccggacgggcgggcgcggatccctgcgtcccgctgaaaatgtgtgtctgacatgcaagctcagtggggcagagacccgtggattgctgtgccctgccctccggacctggatcatgaaggtgttgggaagaagcttcttctgggtgctgtttcccgtccttccctgggcggtgcaggctgtggagcacgaggaggtggcgcagcgtgtgatcaaactgcaccgcgggcgaggggtggctgccatgcagagccggcagtgggtccgggacagctgcaggaagctctcagggcttctccgccagaagaatgcagttctgaacaaactgaaaactgcaattggagcagtggagaaagacgtgggcctgtcggatgaagagaaactgtttcaggtgcacacgtttgaaattttccagaaagagctgaatgaaagtgaaaattccgttttccaagctgtctacggactgcagagagccctgcagggggattacaaagatgtcgtgaacatgaaggagagcagccggcagcgcctggaggccctgagagaggctgcaataaaggaagaaacagaatatatggaacttctggcagcagaaaaacatcaagttgaagcccttaaaaatatgcaacatcaaaaccaaagtttatccatgcttgacgagattcttgaagatgtaagaaaggcagcggatcgtctggaggaagagatagaggaacatgcttttgacgacaataaatcagtcaagggggtcaattttgaggcagttctgagggtggaggaagaagaggccaattctaagcaaaatataacaaaacgagaagtggaggatgacttgggtcttagcatgctgattgactcccagaacaaccagtatattttgaccaagcccagagattcaaccatcccacgtgcagatcaccactttataaaggacattgttaccataggaatgctgtccttgccttgtggctggctatgtacagccataggattgcctacaatgtttggttatattatttgtggtgtacttctgggaccttcaggactaaatagtattaagtctattgtgcaagtggagacattaggagaatttggggtgttttttactctttttcttgttggcttagaattttctccagaaaagctaagaaaggtgtggaagatttccttacaagggccgtgttacatgacactgttaatgattgcatttggcttgctgtgggggcatctcttgcggatcaaacccacgcagagcgtcttcatttccacgtgtctgtccttgtcaagcacacccctcgtgtccaggttcctcatgggcagtgctcggggtgacaaagaaggcgacattgactacagcaccgtgctcctcggcatgctggtgacgcaggacgtgcagctcgggctcttcatggccgtcatgccgactctcatacaggcgggcgccagtgcatcttctagcattgtcgtggaagttctccgaatcctggttttgattggtcagattcttttttcactagcggcggtttttcttttatgtcttgttataaagaagtatctcattggaccctattatcggaagctgcacatggaaagcaaggggaacaaagaaatcctgatcttgggaatatctgcctttatcttcttaatgttaacggtaattctcaaactatgtgttatttatgtaatctgatacataatctctttcactgaaatcttgtgatccattctttacctttccattttaataatggttaaaatatttgaaaaaaaaaaaaaaaaaaaaaaaaaaaaaaaaa

SEQ ID NO: 345 - DNA, 3052 bp, Homo sapiens
gtcctcggacggccgcggccctcggctccggggcagtgccgggagccggccgcggggactcccactcccggcatgctcagcgccgcccgggggcccacgggagctcgcgccccacagcccctgcgcgtccagccctctgcgagggccttggctcgcccctgcggggtccaacgccagcctgcggctgccaggccccacgccggccaggaagtgctcgccgcccgcggccgacgggacccgcccacgccccgcctcttaaagggggcagtgactgcggctgggcgggagtccgggtcggcttggctgagcgggggcggtgctgggcagggcggcggccgctccctcccggactcccggcctcccggcctccctggtcccgcctgggaagggatgcaaggaagccctccggcgctgcgctccgaggcgggagacagcgtccccctccgcccctcgggtcctggcgcctcagagcccggcccaggccgcggaacggtgatgctcgggccggacgggcgggcgcggatccctgcgtcccgctgaaaatgtgtgtctgacatgcaagctcagtggggcagagacccgtggattgctgtgccctgccctccggacctggatcatgaaggtgttgggaagaagcttcttctgggtgctgtttcccgtccttccctgggcggtgcaggctgtggagcacgaggaggtggcgcagcgtgtgatcaaactgcaccgcgggcgaggggtggctgccatgcagagccggcagtgggtccgggacagctgcaggaagctctcagggcttctccgccagaagaatgcagttctgaacaaactgaaaactgcaattggagcagtggagaaagacgtgggcctgtcggatgaagagaaactgtttcaggtgcacacgtttgaaattttccagaaagagctgaatgaaagtgaaaattccgttttccaagctgtctacggactgcagagagccctgcagggggattacaaagatgtcgtgaacatgaaggagagcagccggcagcgcctggaggccctgagagaggctgcaataaaggaagaaacagaatatatggaacttctggcagcagaaaaacatcaagttgaagcccttaaaaatatgcaacatcaaaaccaaagtttatccatgcttgacgagattcttgaagatgtaagaaaggcagcggatcgtctggaggaagagatagaggaacatgcttttgacgacaataaatcagtcaagggggtcaattttgaggcagttctgagggtggaggaagaagaggccaattctaagcaaaatataacaaaacgagaagtggaggatgacttgggtcttagcatgctgattgactcccagaacaaccagtatattttgaccaagcccagagattcaaccatcccacgtgcagatcaccactttataaaggacattgttaccataggaatgctgtccttgccttgtggctggctatgtacagccataggattgcctacaatgtttggttatattatttgtggtgtacttctgggaccttcaggactaaatagtattaagtctattgtgcaagtggagacattaggagaatttggggtgttttttactctttttcttgttggcttagaattttctccagaaaagctaagaaagcattgtcgtggaagttctccgaatcctggttttgattggtcagattcttttttcactagcggcggtttttcttttatgtcttgttataaagaagtatctcattggaccctattatcggaagctgcacatggaaagcaaggggaacaaagaaatcctgatcttgggaatatctgcctttatcttcttaatgttaacggtcacggagctgctggacgtctccatggagctgggctgtttcctggctggagcgctcgtctcctctcagggccccgtggtcaccgaggagatcgccacctccatcgaacccatccgcgacttcctggccatcgttttcttcgcctccatagggctccacgtgttccccacgtttgtggcgtacgagctcacggtgctggtgttcctcaccttgtcagtggtggtgatgaagtttctcctggcggcgctggtcctgtctctcattctgccgaggagcagccagtacatcaagtggatcgtctctgcggggcttgcccaggtcagcgagttttcctttgtcctggggagccgggcgcgaagagcgggcgtcatctctcgggaggtgtacctccttatactgagtgtgaccacgctcagcctcttgctcgccccggtgctgtggagagctgcaatcacgaggtgtgtgcccagaccggagagacggtccagcctctgatggctcggagatgatggaccgtggaagggaagcgtctgtggggagtgagcgcttagatggccagcagctgctccttctgggaagctcgcaccttggcaacagaacagccctctagcagagcgtcagtgcagtcgtgttatcccggcttttacagaatattcttgtcctattttagaattttccggagtagtttatttgcagtctgttgattatgtgcagtagacccgggacactgcgttttaccgatcaccttgaatgtggtgcctggatgtgccttttttttttttccctgaaattattattaattttctattgtgagttcatcagttcatagtttttttagtaaagaagcaaaattaaaaggcttttaaaaatgtacaacttcagaattataatctgttagtcaaatatttgttattaaacatttctgtaatatgaagttgtaatcctggccgtgagcttggaagcttacttttgattcttaaagcctatgttttctaaaatgagacaaatacggatgtctatttgccttttattgtaacttttaaatgaaataatttcatgtcaatttctattagatatatcacttaaaatatttggttttaaatcacaagaatatgtattctttaataaagataatttatgatcatggtataattaattgaaatttattaaaatctgtttttattaaaaaaaaaaaaaaaaaa

SEQ ID NO: 346 - DNA, 3277 bp, Homo sapiens
gtcctcggacggccgcggccctcggctccggggcagtgccgggagccggccgcggggactcccactcccggcatgctcagcgccgcccgggggcccacgggagctcgcgccccacagcccctgcgcgtccagccctctgcgagggccttggctcgcccctgcggggtccaacgccagcctgcggctgccaggccccacgccggccaggaagtgctcgccgcccgcggccgacgggacccgcccacgccccgcctcttaaagggggcagtgactgcggctgggcgggagtccgggtcggcttggctgagcgggggcggtgctgggcagggcggcggccgctccctcccggactcccggcctcccggcctccctggtcccgcctgggaagggatgcaaggaagccctccggcgctgcgctccgaggcgggagacagcgtccccctccgcccctcgggtcctggcgcctcagagcccggcccaggccgcggaacggtgatgctcgggccggacgggcgggcgcggatccctgcgtcccgctgaaaatgtgtgtctgacatgcaagctcagtggggcagagacccgtggattgctgtgccctgccctccggacctggatcatgaaggtgttgggaagaagcttcttctgggtgctgtttcccgtccttccctgggcggtgcaggctgtggagcacgaggaggtggcgcagcgtgtgatcaaactgcaccgcgggcgaggggtggctgccatgcagagccggcagtgggtccgggacagctgcaggaagctctcagggcttctccgccagaagaatgcagttctgaacaaactgaaaactgcaattggagcagtggagaaagacgtgggcctgtcggatgaagagaaactgtttcaggtgcacacgtttgaaattttccagaaagagctgaatgaaagtgaaaattccgttttccaagctgtctacggactgcagagagccctgcagggggattacaaagatgtcgtgaacatgaaggagagcagccggcagcgcctggaggccctgagagaggctgcaataaaggaagaaacagaatatatggaacttctggcagcagaaaaacatcaagttgaagcccttaaaaatatgcaacatcaaaaccaaagtttatccatgcttgacgagattcttgaagatgtaagaaaggcagcggatcgtctggaggaagagatagaggaacatgcttttgacgacaataaatcagtcaagggggtcaattttgaggcagttctgagggtggaggaagaagaggccaattctaagcaaaatataacaaaacgagaagtggaggatgacttgggtcttagcatgctgattgactcccagaacaaccagtatattttgaccaagcccagagattcaaccatcccacgtgcagatcaccactttataaaggacattgttaccataggaatgctgtccttgccttgtggctggctatgtacagccataggattgcctacaatgtttggttatattatttgtggtgtacttctgggaccttcaggactaaatagtattaagtctattgtgcaagtggagacattaggagaatttggggtgttttttactctttttcttgttggcttagaattttctccagaaaagctaagaaaggtgtggaagatttccttacaagggccgtgttacatgacactgttaatgattgcatttggcttgctgtgggggcatctcttgcggatcaaacccacgcagagcgtcttcatttccacgtgtctgtccttgtcaagcacacccctcgtgtccaggttcctcatgggcagtgctcggggtgacaaagaaggcgacattgactacagcaccgtgctcctcggcatgctggtgacgcaggacgtgcagctcgggctcttcatggccgtcatgccgactctcatacaggcgggcgccagtgcatcttctagcattgtcgtggaagttctccgaatcctggttttgattggtcagattcttttttcactagcggcggtttttcttttatgtcttgttataaagaagtatctcattggaccctattatcggaagctgcacatggaaagcaaggggaacaaagaaatcctgatcttgggaatatctgcctttatcttcttaatgttaacggtcacggagctgctggacgtctccatggagctgggctgtttcctggctggagcgctcgtctcctctcagggccccgtggtcaccgaggagatcgccacctccatcgaacccatccgcgacttcctggccatcgttttcttcgcctccatagtttctcctggcggcgctggtcctgtctctcattctgccgaggagcagccagtacatcaagtggatcgtctctgcggggcttgcccaggtcagcgagttttcctttgtcctggggagccgggcgcgaagagcgggcgtcatctctcgggaggtgtacctccttatactgagtgtgaccacgctcagcctcttgctcgccccggtgctgtggagagctgcaatcacgaggtgtgtgcccagaccggagagacggtccagcctctgatggctcggagatgatggaccgtggaagggaagcgtctgtggggagtgagcgcttagatggccagcagctgctccttctgggaagctcgcaccttggcaacagaacagccctctagcagagcgtcagtgcagtcgtgttatcccggcttttacagaatattcttgtcctattttagaattttccggagtagtttatttgcagtctgttgattatgtgcagtagacccgggacactgcgttttaccgatcaccttgaatgtggtgcctggatgtgccttttttttttttccctgaaattattattaattttctattgtgagttcatcagttcatagtttttttagtaaagaagcaaaattaaaaggcttttaaaaatgtacaacttcagaattataatctgttagtcaaatatttgttattaaacatttctgtaatatgaagttgtaatcctggccgtgagcttggaagcttacttttgattcttaaagcctatgttttctaaaatgagacaaatacggatgtctatttgccttttattgtaacttttaaatgaaataatttcatgtcaatttctattagatatatcacttaaaatatttggttttaaatcacaagaatatgtattctttaataaagataatttatgatcatggtataattaattgaaatttattaaaatctgtttttattaaaaaaaaaaaaaaaaaa

SEQ ID NO: 347 - DNA, 3165 bp, Homo sapiens
gtcctcggacggccgcggccctcggctccggggcagtgccgggagccggccgcggggactcccactcccggcatgctcagcgccgcccgggggcccacgggagctcgcgccccacagcccctgcgcgtccagccctctgcgagggccttggctcgcccctgcggggtccaacgccagcctgcggctgccaggccccacgccggccaggaagtgctcgccgcccgcggccgacgggacccgcccacgccccgcctcttaaagggggcagtgactgcggctgggcgggagtccgggtcggcttggctgagcgggggcggtgctgggcagggcggcggccgctccctcccggactcccggcctcccggcctccctggtcccgcctgggaagggatgcaaggaagccctccggcgctgcgctccgaggcgggagacagcgtccccctccgcccctcgggtcctggcgcctcagagcccggcccaggccgcggaacggtgatgctcgggccggacgggcgggcgcggatccctgcgtcccgctgaaaatgtgtgtctgacatgcaagctcagtggggcagagacccgtggattgctgtgccctgccctccggacctggatcatgaaggtgttgggaagaagcttcttctgggtgctgtttcccgtccttccctgggcggtgcaggctgtggagcacgaggaggtggcgcagcgtgtgatcaaactgcaccgcgggcgaggggtggctgccatgcagagccggcagtgggtccgggacagctgcaggaagctctcagggcttctccgccagaagaatgcagttctgaacaaactgaaaactgcaattggagcagtggagaaagacgtgggcctgtcggatgaagagaaactgtttcaggtgcacacgtttgaaattttccagaaagagctgaatgaaagtgaaaattccgttttccaagctgtctacggactgcagagagccctgcagggggattacaaagatgtcgtgaacatgaaggagagcagccggcagcgcctggaggccctgagagaggctgcaataaaggaagaaacagaatatatggaacttctggcagcagaaaaacatcaagttgaagcccttaaaaatatgcaacatcaaaaccaaagtttatccatgcttgacgagattcttgaagatgtaagaaaggcagcggatcgtctggaggaagagatagaggaacatgcttttgacgacaataaatcagacattgttaccataggaatgctgtccttgccttgtggctggctatgtacagccataggattgcctacaatgtttggttatattatttgtggtgtacttctgggaccttcaggactaaatagtattaagtctattgtgcaagtggagacattaggagaatttggggtgttttttactctttttcttgttggcttagaattttctccagaaaagctaagaaaggtgtggaagatttccttacaagggccgtgttacatgacactgttaatgattgcatttggcttgctgtgggggcatctcttgcggatcaaacccacgcagagcgtcttcatttccacgtgtctgtccttgtcaagcacacccctcgtgtccaggttcctcatgggcagtgctcggggtgacaaagaaggcgacattgactacagcaccgtgctcctcggcatgctggtgacgcaggacgtgcagctcgggctcttcatggccgtcatgccgactctcatacaggcgggcgccagtgcatcttctagcattgtcgtggaagttctccgaatcctggttttgattggtcagattcttttttcactagcggcggtttttcttttatgtcttgttataaagaagtatctcattggaccctattatcggaagctgcacatggaaagcaaggggaacaaagaaatcctgatcttgggaatatctgcctttatcttcttaatgttaacggtcacggagctgctggacgtctccatggagctgggctgtttcctggctggagcgctcgtctcctctcagggccccgtggtcaccgaggagatcgccacctccatcgaacccatccgcgacttcctggccatcgttttcttcgcctccatagggctccacgtgttccccacgtttgtggcgtacgagctcacggtgctggtgttcctcaccttgtcagtggtggtgatgaagtttctcctggcggcgctggtcctgtctctcattctgccgaggagcagccagtacatcaagtggatcgtctctgcggggcttgcccaggtcagcgagttttcctttgtcctggggagccgggcgcgaagagcgggcgtcatctctcgggaggtgtacctccttatactgagtgtgaccacgctcagcctcttgctcgccccggtgctgtggagagctgcaatcacgaggtgtgtgcccagaccggagagacggtccagcctctgatggctcggagatgatggaccgtggaagggaagcgtctgtggggagtgagcgcttagatggccagcagctgctccttctgggaagctcgcaccttggcaacagaacagccctctagcagagcgtcagtgcagtcgtgttatcccggcttttacagaatattcttgtcctattttagaattttccggagtagtttatttgcagtctgttgattatgtgcagtagacccgggacactgcgttttaccgatcaccttgaatgtggtgcctggatgtgccttttttttttttccctgaaattattattaattttctattgtgagttcatcagttcatagtttttttagtaaagaagcaaaattaaaaggcttttaaaaatgtacaacttcagaattataatctgttagtcaaatatttgttattaaacatttctgtaatatgaagttgtaatcctggccgtgagcttggaagcttacttttgattcttaaagcctatgttttctaaaatgagacaaatacggatgtctatttgccttttattgtaacttttaaatgaaataatttcatgtcaatttctattagatatatcacttaaaatatttggttttaaatcacaagaatatgtattctttaataaagataatttatgatcatggtataattaattgaaatttattaaaatctgtttttattaaaaaaaaaaaaaaaaaa

SEQ ID NO: 348 - DNA, 3357 bp, Homo sapiens
gtcctcggacggccgcggccctcggctccggggcagtgccgggagccggccgcggggactcccactcccggcatgctcagcgccgcccgggggcccacgggagctcgcgccccacagcccctgcgcgtccagccctctgcgagggccttggctcgcccctgcggggtccaacgccagcctgcggctgccaggccccacgccggccaggaagtgctcgccgcccgcggccgacgggacccgcccacgccccgcctcttaaagggggcagtgactgcggctgggcgggagtccgggtcggcttggctgagcgggggcggtgctgggcagggcggcggccgctccctcccggactcccggcctcccggcctccctggtcccgcctgggaagggatgcaaggaagccctccggcgctgcgctccgaggcgggagacagcgtccccctccgcccctcgggtcctggcgcctcagagcccggcccaggccgcggaacggtgatgctcgggccggacgggcgggcgcggatccctgcgtcccgctgaaaatgtgtgtctgacatgcaagctcagtggggcagagacccgtggattgctgtgccctgccctccggacctggatcatgaaggtgttgggaagaagcttcttctgggtgctgtttcccgtccttccctgggcggtgcaggctgtggagcacgaggaggtggcgcagcgtgtgatcaaactgcaccgcgggcgaggggtggctgccatgcagagccggcagtgggtccgggacagctgcaggaagctctcagggcttctccgccagaagaatgcagttctgaacaaactgaaaactgcaattggagcagtggagaaagacgtgggcctgtcggatgaagagaaactgtttcaggtgcacacgtttgaaattttccagaaagagctgaatgaaagtgaaaattccgttttccaagctgtctacggactgcagagagccctgcagggggattacaaagatgtcgtgaacatgaaggagagcagccggcagcgcctggaggccctgagagaggctgcaataaaggaagaaacagaatatatggaacttctggcagcagaaaaacatcaagttgaagcccttaaaaatatgcaacatcaaaaccaaagtttatccatgcttgacgagattcttgaagatgtaagaaaggcagcggatcgtctggaggaagagatagaggaacatgcttttgacgacaataaatcagtcaagggggtcaattttgaggcagttctgagggtggaggaagaagaggccaattctaagcaaaatataacaaaacgagaagtggaggatgacttgggtcttagcatgctgattgactcccagaacaaccagtatattttgaccaagcccagagattcaaccatcccacgtgcagatcaccactttataaaggacattgttaccataggaatgctgtccttgccttgtggctggctatgtacagccataggattgcctacaatgtttggttatattatttgtggtgtacttctgggaccttcaggactaaatagtattaagtctattgtgcaagtggagacattaggagaatttggggtgttttttactctttttcttgttggcttagaattttctccagaaaagctaagaaaggtgtggaagatttccttacaagggccgtgttacatgacactgttaatgattgcatttggcttgctgtgggggcatctcttgcggatcaaacccacgcagagcgtcttcatttccacgtgtctgtccttgtcaagcacacccctcgtgtccaggttcctcatgggcagtgctcggggtgacaaagaaggcgacattgactacagcaccgtgctcctcggcatgctggtgacgcaggacgtgcagctcgggctcttcatggccgtcatgccgactctcatacaggcgggcgccagtgcatcttctagcattgtcgtggaagttctccgaatcctggttttgattggtcagattcttttttcactagcggcggtttttcttttatgtcttgttataaagaagtatctcattggaccctattatcggaagctgcacatggaaagcaaggggaacaaagaaatcctgatcttgggaatatctgcctttatcttcttaatgttaacggtcacggagctgctggacgtctccatggagctgggctgtttcctggctggagcgctcgtctcctctcagggccccgtggtcaccgaggagatcgccacctccatcgaacccatccgcgacttcctggccatcgttttcttcgcctccatagggctccacgtgttccccacgtttgtggcgtacgagctcacggtgctggtgttcctcaccttgtcagtggtggtgatgaagtttctcctggcggcgctggtcctgtctctcattctgccgaggagcagccagtacatcaagtggatcgtctctgcggggcttgcccaggtcagcgagttttcctttgtcctggggagccgggcgcgaagagcgggcgtcatctctcgggaggtgtacctccttatactgagtgtgaccacgctcagcctcttgctcgccccggtgctgtggagagctgcaatcacgaggtgtgtgcccagaccggagagacggtccagcctctgatggctcggagatgatggaccgtggaagggaagcgtctgtggggagtgagcgcttagatggccagcagctgctccttctgggaagctcgcaccttggcaacagaacagccctctagcagagcgtcagtgcagtcgtgttatcccggcttttacagaatattcttgtcctattttagaattttccggagtagtttatttgcagtctgttgattatgtgcagtagacccgggacactgcgttttaccgatcaccttgaatgtggtgcctggatgtgccttttttttttttccctgaaattattattaattttctattgtgagttcatcagttcatagtttttttagtaaagaagcaaaattaaaaggcttttaaaaatgtacaacttcagaattataatctgttagtcaaatatttgttattaaacatttctgtaatatgaagttgtaatcctggccgtgagcttggaagcttacttttgattcttaaagcctatgttttctaaaatgagacaaatacggatgtctatttgccttttattgtaacttttaaatgaaataatttcatgtcaatttctattagatatatcacttaaaatatttggttttaaatcacaagaatatgtattctttaataaagataatttatgatcatggtataattaattgaaatttattaaaatctgtttttattaaaaaaaaaaaaaaaaaa

SEQ ID NO: 349 - DNA, 3081 bp, Homo sapiens
gtcctcggacggccgcggccctcggctccggggcagtgccgggagccggccgcggggactcccactcccggcatgctcagcgccgcccgggggcccacgggagctcgcgccccacagcccctgcgcgtccagccctctgcgagggccttggctcgcccctgcggggtccaacgccagcctgcggctgccaggccccacgccggccaggaagtgctcgccgcccgcggccgacgggacccgcccacgccccgcctcttaaagggggcagtgactgcggctgggcgggagtccgggtcggcttggctgagcgggggcggtgctgggcagggcggcggccgctccctcccggactcccggcctcccggcctccctggtcccgcctgggaagggatgcaaggaagccctccggcgctgcgctccgaggcgggagacagcgtccccctccgcccctcgggtcctggcgcctcagagcccggcccaggccgcggaacggtgatgctcgggccggacgggcgggcgcggatccctgcgtcccgctgaaaatgtgtgtctgacatgcaagctcagtggggcagagacccgtggattgctgtgccctgccctccggacctggatcatgaaggtgttgggaagaagcttcttctgggtgctgtttcccgtccttccctgggcggtgcaggctgtggagcacgaggaggtggcgcagcgtgtgatcaaactgcaccgcgggcgaggggtggctgccatgcagagccggcagtgggtccgggacagctgcaggaagctctcagggcttctccgccagaagaatgcagttctgaacaaactgaaaactgcaattggagcagtggagaaagacgtgggcctgtcggatgaagagaaactgtttcaggtgcacacgtttgaaattttccagaaagagctgaatgaaagtgaaaattccgttttccaagctgtctacggactgcagagagccctgcagggggattacaaagatgtcgtgaacatgaaggagagcagccggcagcgcctggaggccctgagagaggctgcaataaaggaagaaacagaatatatggaacttctggcagcagaaaaacatcaagttgaagcccttaaaaatatgcaacatcaaaaccaaagtttatccatgcttgacgagattcttgaagatgtaagaaaggcagcggatcgtctggaggaagagatagaggaacatgcttttgacgacaataaatcagtcaagggggtcaattttgaggcagttctgagggtggaggaagaagaggccaattctaagcaaaatataacaaaacgagaagtggaggatgacttgggtcttagcatgctgattgactcccagaacaaccagtatattttgaccaagcccagagattcaaccatcccacgtgcagatcaccactttataaaggacattgttaccataggaatgctgtccttgccttgtggctggctatgtacagccataggattgcctacaatgtttggttatattatttgtggtgtacttctgggaccttcaggactaaatagtattaagtctattgtgcaagtggagacattaggagaatttggggtgttttttactctttttcttgttggcttagaattttctccagaaaagctaagaaaggtgtggaagatttccttacaagggccgtgttacatgacactgttaatgattgcatttggcttgctgtgggggcatctcttgcggatcaaacccacgcagagcgtcttcatttccacgtgtctgtccttgtcaagcacacccctcgtgtccaggttcctcatgggcagtgctcggggtgacaaagaaggcgacattgactacagcaccgtgctcctcggcatgctggtgacgcaggacgtgcagctcgggctcttcatggccgtcatgccgactctcatacaggcgggcgccagtgcatcttctaggtcacggagctgctggacgtctccatggagctgggctgtttcctggctggagcgctcgtctcctctcagggccccgtggtcaccgaggagatcgccacctccatcgaacccatccgcgacttcctggccatcgttttcttcgcctccatagtttctcctggcggcgctggtcctgtctctcattctgccgaggagcagccagtacatcaagtggatcgtctctgcggggcttgcccaggtcagcgagttttcctttgtcctggggagccgggcgcgaagagcgggcgtcatctctcgggaggtgtacctccttatactgagtgtgaccacgctcagcctcttgctcgccccggtgctgtggagagctgcaatcacgaggtgtgtgcccagaccggagagacggtccagcctctgatggctcggagatgatggaccgtggaagggaagcgtctgtggggagtgagcgcttagatggccagcagctgctccttctgggaagctcgcaccttggcaacagaacagccctctagcagagcgtcagtgcagtcgtgttatcccggcttttacagaatattcttgtcctattttagaattttccggagtagtttatttgcagtctgttgattatgtgcagtagacccgggacactgcgttttaccgatcaccttgaatgtggtgcctggatgtgccttttttttttttccctgaaattattattaattttctattgtgagttcatcagttcatagtttttttagtaaagaagcaaaattaaaaggcttttaaaaatgtacaacttcagaattataatctgttagtcaaatatttgttattaaacatttctgtaatatgaagttgtaatcctggccgtgagcttggaagcttacttttgattcttaaagcctatgttttctaaaatgagacaaatacggatgtctatttgccttttattgtaacttttaaatgaaataatttcatgtcaatttctattagatatatcacttaaaatatttggttttaaatcacaagaatatgtattctttaataaagataatttatgatcatggtataattaattgaaatttattaaaatctgtttttattaaaaaaaaaaaaaaaaaa

SEQ ID NO: 350 - DNA, 3161 bp, Homo sapiens
gtcctcggacggccgcggccctcggctccggggcagtgccgggagccggccgcggggactcccactcccggcatgctcagcgccgcccgggggcccacgggagctcgcgccccacagcccctgcgcgtccagccctctgcgagggccttggctcgcccctgcggggtccaacgccagcctgcggctgccaggccccacgccggccaggaagtgctcgccgcccgcggccgacgggacccgcccacgccccgcctcttaaagggggcagtgactgcggctgggcgggagtccgggtcggcttggctgagcgggggcggtgctgggcagggcggcggccgctccctcccggactcccggcctcccggcctccctggtcccgcctgggaagggatgcaaggaagccctccggcgctgcgctccgaggcgggagacagcgtccccctccgcccctcgggtcctggcgcctcagagcccggcccaggccgcggaacggtgatgctcgggccggacgggcgggcgcggatccctgcgtcccgctgaaaatgtgtgtctgacatgcaagctcagtggggcagagacccgtggattgctgtgccctgccctccggacctggatcatgaaggtgttgggaagaagcttcttctgggtgctgtttcccgtccttccctgggcggtgcaggctgtggagcacgaggaggtggcgcagcgtgtgatcaaactgcaccgcgggcgaggggtggctgccatgcagagccggcagtgggtccgggacagctgcaggaagctctcagggcttctccgccagaagaatgcagttctgaacaaactgaaaactgcaattggagcagtggagaaagacgtgggcctgtcggatgaagagaaactgtttcaggtgcacacgtttgaaattttccagaaagagctgaatgaaagtgaaaattccgttttccaagctgtctacggactgcagagagccctgcagggggattacaaagatgtcgtgaacatgaaggagagcagccggcagcgcctggaggccctgagagaggctgcaataaaggaagaaacagaatatatggaacttctggcagcagaaaaacatcaagttgaagcccttaaaaatatgcaacatcaaaaccaaagtttatccatgcttgacgagattcttgaagatgtaagaaaggcagcggatcgtctggaggaagagatagaggaacatgcttttgacgacaataaatcagtcaagggggtcaattttgaggcagttctgagggtggaggaagaagaggccaattctaagcaaaatataacaaaacgagaagtggaggatgacttgggtcttagcatgctgattgactcccagaacaaccagtatattttgaccaagcccagagattcaaccatcccacgtgcagatcaccactttataaaggacattgttaccataggaatgctgtccttgccttgtggctggctatgtacagccataggattgcctacaatgtttggttatattatttgtggtgtacttctgggaccttcaggactaaatagtattaagtctattgtgcaagtggagacattaggagaatttggggtgttttttactctttttcttgttggcttagaattttctccagaaaagctaagaaaggtgtggaagatttccttacaagggccgtgttacatgacactgttaatgattgcatttggcttgctgtgggggcatctcttgcggatcaaacccacgcagagcgtcttcatttccacgtgtctgtccttgtcaagcacacccctcgtgtccaggttcctcatgggcagtgctcggggtgacaaagaaggcgacattgactacagcaccgtgctcctcggcatgctggtgacgcaggacgtgcagctcgggctcttcatggccgtcatgccgactctcatacaggcgggcgccagtgcatcttctaggtcacggagctgctggacgtctccatggagctgggctgtttcctggctggagcgctcgtctcctctcagggccccgtggtcaccgaggagatcgccacctccatcgaacccatccgcgacttcctggccatcgttttcttcgcctccatagggctccacgtgttccccacgtttgtggcgtacgagctcacggtgctggtgttcctcaccttgtcagtggtggtgatgaagtttctcctggcggcgctggtcctgtctctcattctgccgaggagcagccagtacatcaagtggatcgtctctgcggggcttgcccaggtcagcgagttttcctttgtcctggggagccgggcgcgaagagcgggcgtcatctctcgggaggtgtacctccttatactgagtgtgaccacgctcagcctcttgctcgccccggtgctgtggagagctgcaatcacgaggtgtgtgcccagaccggagagacggtccagcctctgatggctcggagatgatggaccgtggaagggaagcgtctgtggggagtgagcgcttagatggccagcagctgctccttctgggaagctcgcaccttggcaacagaacagccctctagcagagcgtcagtgcagtcgtgttatcccggcttttacagaatattcttgtcctattttagaattttccggagtagtttatttgcagtctgttgattatgtgcagtagacccgggacactgcgttttaccgatcaccttgaatgtggtgcctggatgtgccttttttttttttccctgaaattattattaattttctattgtgagttcatcagttcatagtttttttagtaaagaagcaaaattaaaaggcttttaaaaatgtacaacttcagaattataatctgttagtcaaatatttgttattaaacatttctgtaatatgaagttgtaatcctggccgtgagcttggaagcttacttttgattcttaaagcctatgttttctaaaatgagacaaatacggatgtctatttgccttttattgtaacttttaaatgaaataatttcatgtcaatttctattagatatatcacttaaaatatttggttttaaatcacaagaatatgtattctttaataaagataatttatgatcatggtataattaattgaaatttattaaaatctgtttttattaaaaaaaaaaaaaaaaaa

SEQ ID NO: 351 - DNA, 2541 bp, Homo sapiens
attggaggagcgctcccactcccaagaggccacgcgtagacggggcgcttcatgcggaagtcagcggcgtccggtcccagcctcctctgggagcgggcagttggcgaccctgcactgacccgcgtccctccgtcccgagcccgcgcgccctcagagggtgcccggacagactgaagccatggcgattctttttgctgttgttgccagggggaccactatccttgccaaacatgcttggtgtggaggaaacttcctggaggattttgaacgttcccgagcctttaattttctgaatgagataaagaagaggttccagactacttacggttcaagagcacagacagcacttccatatgccatgaatagcgagttctcaagtgtcttagctgcacagctgaagcatcactctgagaataagggcctagacaaagtgatggagactcaagcccaagtggatgaactgaaaggaatcatggtcagaaacatagatctggtagctcagcgaggagaaagattggaattattgattgacaaaacagaaaatcttgtggattcttctgtcaccttcaaaactaccagcagaaatcttgctcgagccatgtgtatgaagaacctcaagctcactattatcatcatcatcgtatcaattgtgttcatctatatcattgtttcacctctctgtggtggatttacatggccaagctgtgtgaagaaataggaaagaagaagttaccattaaccaaggatatgagagaacaaggagttaaaagcaatccatgtgactcaagcctttcacatactgacagatggtatctgccagtctcttcaaccctcttctcactttttaaaatcttgttccatgcctccaggtttatctttgtcttatctaccagtttattcctgtgaacttcagattgaaccattcattgcagcagtagccttaaaaaggcttttgtttatttctttggtttgttaactagtgtcatctatttagagaaacatttttgtttttaattgctcaaagctgtcgccgctagtcttatgagctatctactaaaactatggagaaactttgtatgtgcacacaaaagtattcaagagacagtattgctaacatctcatcttaatgtcttttgttattgagaagttttaggtgcttcaaaacaatataaatggataatagttgttatttggggaattgtaatgatgttggtgctgcttccttctaagagctcagacaagtaaagtatgaaacattcttatttcagttagatggggaacattttgctagcccattagaagcacacagaattatccttgtcctcctaatattgactttcaggaataaagttcagtgtgctgatcattcacaatacagtggatagcttgatatcttctgttttcccattgcagttgatttgagaagatgaaggtttaaatattgttgaaagttgcagttttttaaatgtgttcctttttcttctgtgaatatttagggcaatcgtgtcgctaatagaatatgtagtagagggggtggggaggtaaattcctctgacttgccaaagaaaaagaagggaaccacagtggatatgctagcattttagctgtgcaaagggaggtagtgtgggaaaagtgtttccattctgggaaaagcccaaaccgaatacggtcagcagtcaactccagggtttgggcttgattcctgttgaataatagttttgagcattctttgtggttaaataaattcttaaatctgcctagttttgatgaattcttttgtgaaacttgaaagagaatagacagtatgacatatagaattaatacaaaacagtttaacaaccatttaactgcagtgtaagaaaattggactgtaatcatatcgctactggcatctgttatctagtatgcatttctggtgtgtatctgaaaggaagacattttctaccctagatccaattgcatttatttatcaataagtgccattaaattgaaattatattacattttacactttctcaatgaatgaacaaattagtctgtagaatctagccacctgtttagcctagtcatgtgccttgaacatatatgtgtcccataatctggctcatggtacctgttcttctatccaaacctttcaattcatgctacctgattcatttatttgacatagatcttaggcccacttgaactcttttcttgtttatctagcatagcacaaacgtttttccagtcttctttatcaacactaatgcctcttaattgcatcagtatttcctattggaaaatacatctgttccagaaaaacatttggcattcctgaataatttccaaatgtttttaatccaaagaaaaaggtttaaagcttatttccctttcttatacacacctgaataaaattgatgtgcatgttttagggatcaattacctaactgttccttggtctatttatgtataagaatgctttttaaagcacatgtctcattttaaatgacgcacaaactgaagatgttaataaaatttaagagtaatacaatgaaaaaa

SEQ ID NO: 352 - DNA, 2664 bp, Homo sapiens
attggaggagcgctcccactcccaagaggccacgcgtagacggggcgcttcatgcggaagtcagcggcgtccggtcccagcctcctctgggagcgggcagttggcgaccctgcactgacccgcgtccctccgtcccgagcccgcgcgccctcagagggtgcccggacagactgaagccatggcgattctttttgctgttgttgccagggggaccactatccttgccaaacatgcttggtgtggaggaaacttcctggaggtgacagagcagattctggctaagataccttctgaaaataacaaactaacgtactcacatggcaattatttgtttcattacatctgccaagacaggattgtatatctttgtatcactgatgatgattttgaacgttcccgagcctttaattttctgaatgagataaagaagaggttccagactacttacggttcaagagcacagacagcacttccatatgccatgaatagcgagttctcaagtgtcttagctgcacagctgaagcatcactctgagaataagggcctagacaaagtgatggagactcaagcccaagtggatgaactgaaaggaatcatggtcagaaacatagatctggtagctcagcgaggagaaagattggaattattgattgacaaaacagaaaatcttgtggattcttctgtcaccttcaaaactaccagcagaaatcttgctcgagccatgtgtatgaagaacctcaagctcactattatcatcatcatcgtatcaattgtgttcatctatatcattgtttcacctctctgtggtggatttacatggccaagctgtgtgaagaaataggaaagaagaagttaccattaaccaaggatatgagagaacaaggagttaaaagcaatccatgtgactcaagcctttcacatactgacagatggtatctgccagtctcttcaaccctcttctcactttttaaaatcttgttccatgcctccaggtttatctttgtcttatctaccagtttattcctgtgaacttcagattgaaccattcattgcagcagtagccttaaaaaggcttttgtttatttctttggtttgttaactagtgtcatctatttagagaaacatttttgtttttaattgctcaaagctgtcgccgctagtcttatgagctatctactaaaactatggagaaactttgtatgtgcacacaaaagtattcaagagacagtattgctaacatctcatcttaatgtcttttgttattgagaagttttaggtgcttcaaaacaatataaatggataatagttgttatttggggaattgtaatgatgttggtgctgcttccttctaagagctcagacaagtaaagtatgaaacattcttatttcagttagatggggaacattttgctagcccattagaagcacacagaattatccttgtcctcctaatattgactttcaggaataaagttcagtgtgctgatcattcacaatacagtggatagcttgatatcttctgttttcccattgcagttgatttgagaagatgaaggtttaaatattgttgaaagttgcagttttttaaatgtgttcctttttcttctgtgaatatttagggcaatcgtgtcgctaatagaatatgtagtagagggggtggggaggtaaattcctctgacttgccaaagaaaaagaagggaaccacagtggatatgctagcattttagctgtgcaaagggaggtagtgtgggaaaagtgtttccattctgggaaaagcccaaaccgaatacggtcagcagtcaactccagggtttgggcttgattcctgttgaataatagttttgagcattctttgtggttaaataaattcttaaatctgcctagttttgatgaattcttttgtgaaacttgaaagagaatagacagtatgacatatagaattaatacaaaacagtttaacaaccatttaactgcagtgtaagaaaattggactgtaatcatatcgctactggcatctgttatctagtatgcatttctggtgtgtatctgaaaggaagacattttctaccctagatccaattgcatttatttatcaataagtgccattaaattgaaattatattacattttacactttctcaatgaatgaacaaattagtctgtagaatctagccacctgtttagcctagtcatgtgccttgaacatatatgtgtcccataatctggctcatggtacctgttcttctatccaaacctttcaattcatgctacctgattcatttatttgacatagatcttaggcccacttgaactcttttcttgtttatctagcatagcacaaacgtttttccagtcttctttatcaacactaatgcctcttaattgcatcagtatttcctattggaaaatacatctgttccagaaaaacatttggcattcctgaataatttccaaatgtttttaatccaaagaaaaaggtttaaagcttatttccctttcttatacacacctgaataaaattgatgtgcatgttttagggatcaattacctaactgttccttggtctatttatgtataagaatgctttttaaagcacatgtctcattttaaatgacgcacaaactgaagatgttaataaaatttaagagtaatacaatgaaaaaa

SEQ ID NO: 353 - DNA, 2596 bp, Homo sapiens
attggaggagcgctcccactcccaagaggccacgcgtagacggggcgcttcatgcggaagtcagcggcgtccggtcccagcctcctctgggagcgggcagttggcgaccctgcactgacccgcgtccctccgtcccgagcccgcgcgccctcagagggtgcccggacagactgaagccatggcgattctttttgctgttgttgccagggggaccactatccttgccaaacatgcttggtgtggaggaaacttcctggaggtgacagagcagattctggctaagataccttctgaaaataacaaactaacgtactcacatggcaattatttgtttcattacatctgccaagacaggattgtatatctttgtatcactgatgatgattttgaacgttcccgagcctttaattttctgaatgagataaagaagaggttccagactacttacggttcaagagcacagacagcacttccatatgccatgaatagcgagttctcaagtgtcttagctgcacagctgaagcatcactctgagaataagggcctagacaaagtgatggagactcaagcccaagtggatgaactgaaaggaatcatggtcagaaacatagtctgtcaccttcaaaactaccagcagaaatcttgctcgagccatgtgtatgaagaacctcaagctcactattatcatcatcatcgtatcaattgtgttcatctatatcattgtttcacctctctgtggtggatttacatggccaagctgtgtgaagaaataggaaagaagaagttaccattaaccaaggatatgagagaacaaggagttaaaagcaatccatgtgactcaagcctttcacatactgacagatggtatctgccagtctcttcaaccctcttctcactttttaaaatcttgttccatgcctccaggtttatctttgtcttatctaccagtttattcctgtgaacttcagattgaaccattcattgcagcagtagccttaaaaaggcttttgtttatttctttggtttgttaactagtgtcatctatttagagaaacatttttgtttttaattgctcaaagctgtcgccgctagtcttatgagctatctactaaaactatggagaaactttgtatgtgcacacaaaagtattcaagagacagtattgctaacatctcatcttaatgtcttttgttattgagaagttttaggtgcttcaaaacaatataaatggataatagttgttatttggggaattgtaatgatgttggtgctgcttccttctaagagctcagacaagtaaagtatgaaacattcttatttcagttagatggggaacattttgctagcccattagaagcacacagaattatccttgtcctcctaatattgactttcaggaataaagttcagtgtgctgatcattcacaatacagtggatagcttgatatcttctgttttcccattgcagttgatttgagaagatgaaggtttaaatattgttgaaagttgcagttttttaaatgtgttcctttttcttctgtgaatatttagggcaatcgtgtcgctaatagaatatgtagtagagggggtggggaggtaaattcctctgacttgccaaagaaaaagaagggaaccacagtggatatgctagcattttagctgtgcaaagggaggtagtgtgggaaaagtgtttccattctgggaaaagcccaaaccgaatacggtcagcagtcaactccagggtttgggcttgattcctgttgaataatagttttgagcattctttgtggttaaataaattcttaaatctgcctagttttgatgaattcttttgtgaaacttgaaagagaatagacagtatgacatatagaattaatacaaaacagtttaacaaccatttaactgcagtgtaagaaaattggactgtaatcatatcgctactggcatctgttatctagtatgcatttctggtgtgtatctgaaaggaagacattttctaccctagatccaattgcatttatttatcaataagtgccattaaattgaaattatattacattttacactttctcaatgaatgaacaaattagtctgtagaatctagccacctgtttagcctagtcatgtgccttgaacatatatgtgtcccataatctggctcatggtacctgttcttctatccaaacctttcaattcatgctacctgattcatttatttgacatagatcttaggcccacttgaactcttttcttgtttatctagcatagcacaaacgtttttccagtcttctttatcaacactaatgcctcttaattgcatcagtatttcctattggaaaatacatctgttccagaaaaacatttggcattcctgaataatttccaaatgtttttaatccaaagaaaaaggtttaaagcttatttccctttcttatacacacctgaataaaattgatgtgcatgttttagggatcaattacctaactgttccttggtctatttatgtataagaatgctttttaaagcacatgtctcattttaaatgacgcacaaactgaagatgttaataaaatttaagagtaatacaatgaaaaaa

SEQ ID NO: 354 - DNA, 2606 bp, Homo sapiens
attggaggagcgctcccactcccaagaggccacgcgtagacggggcgcttcatgcggaagtcagcggcgtccggtcccagcctcctctgggagcgggcagttggcgaccctgcactgacccgcgtccctccgtcccgagcccgcgcgccctcagagggtgcccggacagactgaagccatggcgattctttttgctgttgttgccagggggaccactatccttgccaaacatgcttggtgtggaggaaacttcctggaggtgacagagcagattctggctaagataccttctgaaaataacaaactaacgtactcacatggcaagattttgaacgttcccgagcctttaattttctgaatgagataaagaagaggttccagactacttacggttcaagagcacagacagcacttccatatgccatgaatagcgagttctcaagtgtcttagctgcacagctgaagcatcactctgagaataagggcctagacaaagtgatggagactcaagcccaagtggatgaactgaaaggaatcatggtcagaaacatagatctggtagctcagcgaggagaaagattggaattattgattgacaaaacagaaaatcttgtggattcttctgtcaccttcaaaactaccagcagaaatcttgctcgagccatgtgtatgaagaacctcaagctcactattatcatcatcatcgtatcaattgtgttcatctatatcattgtttcacctctctgtggtggatttacatggccaagctgtgtgaagaaataggaaagaagaagttaccattaaccaaggatatgagagaacaaggagttaaaagcaatccatgtgactcaagcctttcacatactgacagatggtatctgccagtctcttcaaccctcttctcactttttaaaatcttgttccatgcctccaggtttatctttgtcttatctaccagtttattcctgtgaacttcagattgaaccattcattgcagcagtagccttaaaaaggcttttgtttatttctttggtttgttaactagtgtcatctatttagagaaacatttttgtttttaattgctcaaagctgtcgccgctagtcttatgagctatctactaaaactatggagaaactttgtatgtgcacacaaaagtattcaagagacagtattgctaacatctcatcttaatgtcttttgttattgagaagttttaggtgcttcaaaacaatataaatggataatagttgttatttggggaattgtaatgatgttggtgctgcttccttctaagagctcagacaagtaaagtatgaaacattcttatttcagttagatggggaacattttgctagcccattagaagcacacagaattatccttgtcctcctaatattgactttcaggaataaagttcagtgtgctgatcattcacaatacagtggatagcttgatatcttctgttttcccattgcagttgatttgagaagatgaaggtttaaatattgttgaaagttgcagttttttaaatgtgttcctttttcttctgtgaatatttagggcaatcgtgtcgctaatagaatatgtagtagagggggtggggaggtaaattcctctgacttgccaaagaaaaagaagggaaccacagtggatatgctagcattttagctgtgcaaagggaggtagtgtgggaaaagtgtttccattctgggaaaagcccaaaccgaatacggtcagcagtcaactccagggtttgggcttgattcctgttgaataatagttttgagcattctttgtggttaaataaattcttaaatctgcctagttttgatgaattcttttgtgaaacttgaaagagaatagacagtatgacatatagaattaatacaaaacagtttaacaaccatttaactgcagtgtaagaaaattggactgtaatcatatcgctactggcatctgttatctagtatgcatttctggtgtgtatctgaaaggaagacattttctaccctagatccaattgcatttatttatcaataagtgccattaaattgaaattatattacattttacactttctcaatgaatgaacaaattagtctgtagaatctagccacctgtttagcctagtcatgtgccttgaacatatatgtgtcccataatctggctcatggtacctgttcttctatccaaacctttcaattcatgctacctgattcatttatttgacatagatcttaggcccacttgaactcttttcttgtttatctagcatagcacaaacgtttttccagtcttctttatcaacactaatgcctcttaattgcatcagtatttcctattggaaaatacatctgttccagaaaaacatttggcattcctgaataatttccaaatgtttttaatccaaagaaaaaggtttaaagcttatttccctttcttatacacacctgaataaaattgatgtgcatgttttagggatcaattacctaactgttccttggtctatttatgtataagaatgctttttaaagcacatgtctcattttaaatgacgcacaaactgaagatgttaataaaatttaagagtaatacaatgaaaaaa

SEQ ID NO: 355 - DNA, 2599 bp, Homo sapiens
attggaggagcgctcccactcccaagaggccacgcgtagacggggcgcttcatgcggaagtcagcggcgtccggtcccagcctcctctgggagcgggcagttggcgaccctgcactgacccgcgtccctccgtcccgagcccgcgcgccctcagagggtgcccggacagactgaagccatggcgattctttttgctgttgttgccagggggaccactatccttgccaaacatgcttggtgtggaggaaacttcctggagttatttgtttcattacatctgccaagacaggattgtatatctttgtatcactgatgatgattttgaacgttcccgagcctttaattttctgaatgagataaagaagaggttccagactacttacggttcaagagcacagacagcacttccatatgccatgaatagcgagttctcaagtgtcttagctgcacagctgaagcatcactctgagaataagggcctagacaaagtgatggagactcaagcccaagtggatgaactgaaaggaatcatggtcagaaacatagatctggtagctcagcgaggagaaagattggaattattgattgacaaaacagaaaatcttgtggattcttctgtcaccttcaaaactaccagcagaaatcttgctcgagccatgtgtatgaagaacctcaagctcactattatcatcatcatcgtatcaattgtgttcatctatatcattgtttcacctctctgtggtggatttacatggccaagctgtgtgaagaaataggaaagaagaagttaccattaaccaaggatatgagagaacaaggagttaaaagcaatccatgtgactcaagcctttcacatactgacagatggtatctgccagtctcttcaaccctcttctcactttttaaaatcttgttccatgcctccaggtttatctttgtcttatctaccagtttattcctgtgaacttcagattgaaccattcattgcagcagtagccttaaaaaggcttttgtttatttctttggtttgttaactagtgtcatctatttagagaaacatttttgtttttaattgctcaaagctgtcgccgctagtcttatgagctatctactaaaactatggagaaactttgtatgtgcacacaaaagtattcaagagacagtattgctaacatctcatcttaatgtcttttgttattgagaagttttaggtgcttcaaaacaatataaatggataatagttgttatttggggaattgtaatgatgttggtgctgcttccttctaagagctcagacaagtaaagtatgaaacattcttatttcagttagatggggaacattttgctagcccattagaagcacacagaattatccttgtcctcctaatattgactttcaggaataaagttcagtgtgctgatcattcacaatacagtggatagcttgatatcttctgttttcccattgcagttgatttgagaagatgaaggtttaaatattgttgaaagttgcagttttttaaatgtgttcctttttcttctgtgaatatttagggcaatcgtgtcgctaatagaatatgtagtagagggggtggggaggtaaattcctctgacttgccaaagaaaaagaagggaaccacagtggatatgctagcattttagctgtgcaaagggaggtagtgtgggaaaagtgtttccattctgggaaaagcccaaaccgaatacggtcagcagtcaactccagggtttgggcttgattcctgttgaataatagttttgagcattctttgtggttaaataaattcttaaatctgcctagttttgatgaattcttttgtgaaacttgaaagagaatagacagtatgacatatagaattaatacaaaacagtttaacaaccatttaactgcagtgtaagaaaattggactgtaatcatatcgctactggcatctgttatctagtatgcatttctggtgtgtatctgaaaggaagacattttctaccctagatccaattgcatttatttatcaataagtgccattaaattgaaattatattacattttacactttctcaatgaatgaacaaattagtctgtagaatctagccacctgtttagcctagtcatgtgccttgaacatatatgtgtcccataatctggctcatggtacctgttcttctatccaaacctttcaattcatgctacctgattcatttatttgacatagatcttaggcccacttgaactcttttcttgtttatctagcatagcacaaacgtttttccagtcttctttatcaacactaatgcctcttaattgcatcagtatttcctattggaaaatacatctgttccagaaaaacatttggcattcctgaataatttccaaatgtttttaatccaaagaaaaaggtttaaagcttatttccctttcttatacacacctgaataaaattgatgtgcatgttttagggatcaattacctaactgttccttggtctatttatgtataagaatgctttttaaagcacatgtctcattttaaatgacgcacaaactgaagatgttaataaaatttaagagtaatacaatgaaaaaa

SEQ ID NO: 356 - DNA, 2570 bp, Homo sapiens
gggcgcttcatgcggaagtcagcggcgtccggtcccagcctcctctgggagcgggcagttggcgaccctgcactgacccgcgtccctccgtcccgagcccgcgcgccctcagagggtgcccggacagactgaagccatggcgattctttttgctgttgttgccagggggaccactatccttgccaaacatgcttggtgtggaggaaacttcctggaggtgacagagcagattctggctaagataccttctgaaaataacaaactaacgtactcacatggcaagtgagttctgttctgcatgtgttatttgtttcattacatctgccaagacaggattgtatatctttgtatcactgatgatgattttgaacgttcccgagcctttaattttctgaatgagataaagaagaggttccagactacttacggttcaagagcacagacagcacttccatatgccatgaatagcgagttctcaagtgtcttagctgcacagctgaagcatcactctgagaataagggcctagacaaagtgatggagactcaagcccaagtggatgaactgaaaggaatcatggtcagaaacatagtctgtcaccttcaaaactaccagcagaaatcttgctcgagccatgtgtatgaagaacctcaagctcactattatcatcatcatcgtatcaattgtgttcatctatatcattgtttcacctctctgtggtggatttacatggccaagctgtgtgaagaaataggaaagaagaagttaccattaaccaaggatatgagagaacaaggagttaaaagcaatccatgtgactcaagcctttcacatactgacagatggtatctgccagtctcttcaaccctcttctcactttttaaaatcttgttccatgcctccaggtttatctttgtcttatctaccagtttattcctgtgaacttcagattgaaccattcattgcagcagtagccttaaaaaggcttttgtttatttctttggtttgttaactagtgtcatctatttagagaaacatttttgtttttaattgctcaaagctgtcgccgctagtcttatgagctatctactaaaactatggagaaactttgtatgtgcacacaaaagtattcaagagacagtattgctaacatctcatcttaatgtcttttgttattgagaagttttaggtgcttcaaaacaatataaatggataatagttgttatttggggaattgtaatgatgttggtgctgcttccttctaagagctcagacaagtaaagtatgaaacattcttatttcagttagatggggaacattttgctagcccattagaagcacacagaattatccttgtcctcctaatattgactttcaggaataaagttcagtgtgctgatcattcacaatacagtggatagcttgatatcttctgttttcccattgcagttgatttgagaagatgaaggtttaaatattgttgaaagttgcagttttttaaatgtgttcctttttcttctgtgaatatttagggcaatcgtgtcgctaatagaatatgtagtagagggggtggggaggtaaattcctctgacttgccaaagaaaaagaagggaaccacagtggatatgctagcattttagctgtgcaaagggaggtagtgtgggaaaagtgtttccattctgggaaaagcccaaaccgaatacggtcagcagtcaactccagggtttgggcttgattcctgttgaataatagttttgagcattctttgtggttaaataaattcttaaatctgcctagttttgatgaattcttttgtgaaacttgaaagagaatagacagtatgacatatagaattaatacaaaacagtttaacaaccatttaactgcagtgtaagaaaattggactgtaatcatatcgctactggcatctgttatctagtatgcatttctggtgtgtatctgaaaggaagacattttctaccctagatccaattgcatttatttatcaataagtgccattaaattgaaattatattacattttacactttctcaatgaatgaacaaattagtctgtagaatctagccacctgtttagcctagtcatgtgccttgaacatatatgtgtcccataatctggctcatggtacctgttcttctatccaaacctttcaattcatgctacctgattcatttatttgacatagatcttaggcccacttgaactcttttcttgtttatctagcatagcacaaacgtttttccagtcttctttatcaacactaatgcctcttaattgcatcagtatttcctattggaaaatacatctgttccagaaaaacatttggcattcctgaataatttccaaatgtttttaatccaaagaaaaaggtttaaagcttatttccctttcttatacacacctgaataaaattgatgtgcatgttttagggatcaattacctaactgttccttggtctatttatgtataagaatgctttttaaagcacatgtctcattttaaatgacgcacaaactgaagatgttaataaaatttaagagtaatacaatga

SEQ ID NO: 357 - DNA, 2570 bp, Homo sapiens; identical to SEQ ID NO: 356

SEQ ID NO: 358 - DNA, 2642 bp, Homo sapiens
gacggggcgcttcatgcggaagtcagcggcgtccggtcccagcctcctctgggagcgggcagttggcgaccctgcactgacccgcgtccctccgtcccgagcccgcgcgccctcagagggtgcccggacagactgaagccatggcgattctttttgctgttgttgccagggggaccactatccttgccaaacatgcttggtgtggaggaaacttcctggaggtgacagagcagattctggctaagataccttctgaaaataacaaactaacgtactcacatggcaagtgagttctgttctgcatgtgttatttgtttcattacatctgccaagacaggattgtatatctttgtatcactgatgatgattttgaacgttcccgagcctttaattttctgaatgagataaagaagaggttccagactacttacggttcaagagcacagacagcacttccatatgccatgaatagcgagttctcaagtgtcttagctgcacagctgaagcatcactctgagaataagggcctagacaaagtgatggagactcaagcccaagtggatgaactgaaaggaatcatggtcagaaacatagatctggtagctcagcgaggagaaagattggaattattgattgacaaaacagaaaatcttgtggattcttctgtcaccttcaaaactaccagcagaaatcttgctcgagccatgtgtatgaagaacctcaagctcactattatcatcatcatcgtatcaattgtgttcatctatatcattgtttcacctctctgtggtggatttacatggccaagctgtgtgaagaaataggaaagaagaagttaccattaaccaaggatatgagagaacaaggagttaaaagcaatccatgtgactcaagcctttcacatactgacagatggtatctgccagtctcttcaaccctcttctcactttttaaaatcttgttccatgcctccaggtttatctttgtcttatctaccagtttattcctgtgaacttcagattgaaccattcattgcagcagtagccttaaaaaggcttttgtttatttctttggtttgttaactagtgtcatctatttagagaaacatttttgtttttaattgctcaaagctgtcgccgctagtcttatgagctatctactaaaactatggagaaactttgtatgtgcacacaaaagtattcaagagacagtattgctaacatctcatcttaatgtcttttgttattgagaagttttaggtgcttcaaaacaatataaatggataatagttgttatttggggaattgtaatgatgttggtgctgcttccttctaagagctcagacaagtaaagtatgaaacattcttatttcagttagatggggaacattttgctagcccattagaagcacacagaattatccttgtcctcctaatattgactttcaggaataaagttcagtgtgctgatcattcacaatacagtggatagcttgatatcttctgttttcccattgcagttgatttgagaagatgaaggtttaaatattgttgaaagttgcagttttttaaatgtgttcctttttcttctgtgaatatttagggcaatcgtgtcgctaatagaatatgtagtagagggggtggggaggtaaattcctctgacttgccaaagaaaaagaagggaaccacagtggatatgctagcattttagctgtgcaaagggaggtagtgtgggaaaagtgtttccattctgggaaaagcccaaaccgaatacggtcagcagtcaactccagggtttgggcttgattcctgttgaataatagttttgagcattctttgtggttaaataaattcttaaatctgcctagttttgatgaattcttttgtgaaacttgaaagagaatagacagtatgacatatagaattaatacaaaacagtttaacaaccatttaactgcagtgtaagaaaattggactgtaatcatatcgctactggcatctgttatctagtatgcatttctggtgtgtatctgaaaggaagacattttctaccctagatccaattgcatttatttatcaataagtgccattaaattgaaattatattacattttacactttctcaatgaatgaacaaattagtctgtagaatctagccacctgtttagcctagtcatgtgccttgaacatatatgtgtcccataatctggctcatggtacctgttcttctatccaaacctttcaattcatgctacctgattcatttatttgacatagatcttaggcccacttgaactcttttcttgtttatctagcatagcacaaacgtttttccagtcttctttatcaacactaatgcctcttaattgcatcagtatttcctattggaaaatacatctgttccagaaaaacatttggcattcctgaataatttccaaatgtttttaatccaaagaaaaaggtttaaagcttatttccctttcttatacacacctgaataaaattgatgtgcatgttttagggatcaattacctaactgttccttggtctatttatgtataagaatgctttttaaagcacatgtctcattttaaatgacgcacaaactgaagatgttaataaaatttaagagtaatacaatga

SEQ ID NO: 359 - DNA, 2642 bp, Homo sapiens; identical to SEQ ID NO: 358

SEQ ID NO: 360 - DNA, 1477 bp, Homo sapiens
agaacaacttttttgacttcctgcaaagaggacccttacagtatttttggagaagttagtaaaaccgaatctgacatcatcacctagcagttcatgcagctagcaagtggtttgttcttagggtaacagaggaggaaattgttcctcgtctgataagacaacagtggagaaaggacgcatgctgtttcttagggacacggctgacttccagatatgaccatgtatttgtggcttaaactcttggcatttggctttgcctttctggacacagaagtatttgtgacagggcaaagcccaacaccttcccccactggccatctgcaagctgaggagcaaggaagccaatccaagtcaccaaacctcaaaagtagggaagctgacagttcagccttcagttggtggccaaaggcccgagagcccctcacaaaccactggagtaagtccaagagtccaaaagctgaggaacttggagtctgatgttcaagagcaggaagcagccagcacgagagaaagatgaagaccagaagactcagcaagctcacttctcctaccttcttgtgcctgctttttctagccgtgctggcagttgcttggatgatgcccactcatattgggtgggggtgggggggttggggagggtctgcctcccccagtccactgactcaaatgttaatctcccttggcaatacgctcacaggcacacccaggaacaatactttgcatccttcaatccaatcaagttgacactcaatattaaccatcaaatactattataaggagaatgttgcatgattttccttctagtctgtttgtaattcacatctaatgaaagagtgagagtggacgataaagggaacttgttgaaacatttctctcaaagcaaaagggatcattggaagcaggcagacaccagaattggtttaacctaaaaataacaaattaataattatcaagtctataatgatgacagtgacttaatgtgaatagaaagaattctaaactctctccttccttcctccctcccttctttcctactttctttccactccctttctcccacccccttttcttttcctttcttttctcccaccctctctccctccctttcttttattcaatgcatagtagttgaaaaaatctaaagttagacctgattttacactgaagactagaggtagttactatcctattactgtacttagttggctatgctggcatgtcattatgggtaaaagtttgatggatttatttgtgagttatttggttatgaaaatctagagattgaagtttttcattagaaaataacacacataacaagtctatgatcattttgcatttctgtaatcacagaatagttctgcaatatttcatgtatattggaattgaagttcaattgaattttatctgtatttagtaaaaattaactttagctttgatactaatgaataaagctgggttttttatttaaaaaaaaaaa

SEQ ID NO: 361 - DNA, 5429 bp, Homo sapiens
agaacaacttttttgacttcctgcaaagaggacccttacagtatttttggagaagttagtaaaaccgaatctgacatcatcacctagcagttcatgcagctagcaagtggtttgttcttagggtaacagaggaggaaattgttcctcgtctgataagacaacagtggagaaaggacgcatgctgtttcttagggacacggctgacttccagatatgaccatgtatttgtggcttaaactcttggcatttggctttgcctttctggacacagaagtatttgtgacagggcaaagcccaacaccttcccccactggattgactacagcaaagatgcccagtgttccactttcaagtgaccccttacctactcacaccactgcattctcacccgcaagcacctttgaaagagaaaatgacttctcagagaccacaacttctcttagtccagacaatacttccacccaagtatccccggactctttggataatgctagtgcttttaataccacaggtgtttcatcagtacagacgcctcaccttcccacgcacgcagactcgcagacgccctctgctggaactgacacgcagacattcagcggctccgccgccaatgcaaaactcaaccctaccccaggcagcaatgctatctcagatgtcccaggagagaggagtacagccagcacctttcctacagacccagtttccccattgacaaccaccctcagccttgcacaccacagctctgctgccttacctgcacgcacctccaacaccaccatcacagcgaacacctcagatgcctaccttaatgcctctgaaacaaccactctgagcccttctggaagcgctgtcatttcaaccacaacaatagctactactccatctaagccaacatgtgatgaaaaatatgcaaacatcactgtggattacttatataacaaggaaactaaattatttacagcaaagctaaatgttaatgagaatgtggaatgtggaaacaatacttgcacaaacaatgaggtgcataaccttacagaatgtaaaaatgcgtctgtttccatatctcataattcatgtactgctcctgataagacattaatattagatgtgccaccaggggttgaaaagtttcagttacatgattgtacacaagttgaaaaagcagatactactatttgtttaaaatggaaaaatattgaaacctttacttgtgatacacagaatattacctacagatttcagtgtggtaatatgatatttgataataaagaaattaaattagaaaaccttgaacccgaacatgagtataagtgtgactcagaaatactctataataaccacaagtttactaacgcaagtaaaattattaaaacagattttgggagtccaggagagcctcagattattttttgtagaagtgaagctgcacatcaaggagtaattacctggaatccccctcaaagatcatttcataattttaccctctgttatataaaagagacagaaaaagattgcctcaatctggataaaaacctgatcaaatatgatttgcaaaatttaaaaccttatacgaaatatgttttatcattacatgcctacatcattgcaaaagtgcaacgtaatggaagtgctgcaatgtgtcatttcacaactaaaagtgctcctccaagccaggtctggaacatgactgtctccatgacatcagataatagtatgcatgtcaagtgtaggcctcccagggaccgtaatggcccccatgaacgttaccatttggaagttgaagctggaaatactctggttagaaatgagtcgcataagaattgcgatttccgtgtaaaagatcttcaatattcaacagactacacttttaaggcctattttcacaatggagactatcctggagaaccctttattttacatcattcaacatcttataattctaaggcactgatagcatttctggcatttctgattattgtgacatcaatagccctgcttgttgttctctacaaaatctatgatctacataagaaaagatcctgcaatttagatgaacagcaggagcttgttgaaagggatgatgaaaaacaactgatgaatgtggagccaatccatgcagatattttgttggaaacttataagaggaagattgctgatgaaggaagactttttctggctgaatttcagagcatcccgcgggtgttcagcaagtttcctataaaggaagctcgaaagccctttaaccagaataaaaaccgttatgttgacattcttccttatgattataaccgtgttgaactctctgagataaacggagatgcagggtcaaactacataaatgccagctatattgatggtttcaaagaacccaggaaatacattgctgcacaaggtcccagggatgaaactgttgatgatttctggaggatgatttgggaacagaaagccacagttattgtcatggtcactcgatgtgaagaaggaaacaggaacaagtgtgcagaatactggccgtcaatggaagagggcactcgggcttttggagatgttgttgtaaagatcaaccagcacaaaagatgtccagattacatcattcagaaattgaacattgtaaataaaaaagaaaaagcaactggaagagaggtgactcacattcagttcaccagctggccagaccacggggtgcctgaggatcctcacttgctcctcaaactgagaaggagagtgaatgccttcagcaatttcttcagtggtcccattgtggtgcactgcagtgctggtgttgggcgcacaggaacctatatcggaattgatgccatgctagaaggcctggaagccgagaacaaagtggatgtttatggttatgttgtcaagctaaggcgacagagatgcctgatggttcaagtagaggcccagtacatcttgatccatcaggctttggtggaatacaatcagtttggagaaacagaagtgaatttgtctgaattacatccatatctacataacatgaagaaaagggatccacccagtgagccgtctccactagaggctgaattccagagacttccttcatataggagctggaggacacagcacattggaaatcaagaagaaaataaaagtaaaaacaggaattctaatgtcatcccatatgactataacagagtgccacttaaacatgagctggaaatgagtaaagagagtgagcatgattcagatgaatcctctgatgatgacagtgattcagaggaaccaagcaaatacatcaatgcatcttttataatgagctactggaaacctgaagtgatgattgctgctcagggaccactgaaggagaccattggtgacttttggcagatgatcttccaaagaaaagtcaaagttattgttatgctgacagaactgaaacatggagaccaggaaatctgtgctcagtactggggagaaggaaagcaaacatatggagatattgaagttgacctgaaagacacagacaaatcttcaacttatacccttcgtgtctttgaactgagacattccaagaggaaagactctcgaactgtgtaccagtaccaatatacaaactggagtgtggagcagcttcctgcagaacccaaggaattaatctctatgattcaggtcgtcaaacaaaaacttccccagaagaattcctctgaagggaacaagcatcacaagagtacacctctactcattcactgcagggatggatctcagcaaacgggaatattttgtgctttgttaaatctcttagaaagtgcggaaacagaagaggtagtggatatttttcaagtggtaaaagctctacgcaaagctaggccaggcatggtttccacattcgagcaatatcaattcctatatgacgtcattgccagcacctaccctgctcagaatggacaagtaaagaaaaacaaccatcaagaagataaaattgaatttgataatgaagtggacaaagtaaagcaggatgctaattgtgttaatccacttggtgccccagaaaagctccctgaagcaaaggaacaggctgaaggttctgaacccacgagtggcactgaggggccagaacattctgtcaatggtcctgcaagtccagctttaaatcaaggttcataggaaaagacataaatgaggaaactccaaacctcctgttagctgttatttctatttttgtagaagtaggaagtgaaaataggtatacagtggattaattaaatgcagcgaaccaatatttgtagaagggttatattttactactgtggaaaaatatttaagatagttttgccagaacagtttgtacagacgtatgcttattttaaaattttatctcttattcagtaaaaaacaacttctttgtaatcgttatgtgtgtatatgtatgtgtgtatgggtgtgtgtttgtgtgagagacagagaaagagagagaattctttcaagtgaatctaaaagcttttgcttttcctttgtttttatgaagaaaaaatacattttatattagaagtgttaacttagcttgaaggatctgtttttaaaaatcataaactgtgtgcagactcaataaaatcatgtacatttctgaaatgacctcaagatgtcctccttgttctactcatatatatctatcttatatagtttactattttacttctagagatagtacataaaggtggtatgtgtgtgtatgctactacaaaaaagttgttaactaaattaacattgggaaatcttatattccatatattagcatttagtccaatgtctttttaagcttatttaattaaaaaatttccagtgagcttatcatgctgtctttacatggggttttcaattttgcatgctcgattattccctgtacaatatttaaaatttattgcttgatacttttgacaacaaattaggttttgtacaattgaacttaaataaatgtcattaaaataaataaatgcaatatgtattaatattcattgtataaaaatagaagaatacaaacatatttgttaaatatttacatatgaaatttaatatagctatttttatggaatttttcattgatatgaaaaatatgatattgcatatgcatagttcccatgttaaatcccattcataactttcattaaagcatttactttgaatttctccaatgcttagaatgtttttaccaggaatggatgtcgctaatcataataaaattcaaccattatttttttcttgtttataatacattgtgttatatgttcaaatatgaaatgtgtatgcacctattgaaatatgtttaatgcatttattaacatttgcaggacacttttacaggccccaattatccaatagtctaataattgtttaagatctagaaaaaaaaaatcaagaatagtggtatttttcatgaagtaataaaaactcgttttggtgaa

SEQ ID NO: 362 - DNA, 4946 bp, Homo sapiens
agaacaacttttttgacttcctgcaaagaggacccttacagtatttttggagaagttagtaaaaccgaatctgacatcatcacctagcagttcatgcagctagcaagtggtttgttcttagggtaacagaggaggaaattgttcctcgtctgataagacaacagtggagaaaggacgcatgctgtttcttagggacacggctgacttccagatatgaccatgtatttgtggcttaaactcttggcatttggctttgcctttctggacacagaagtatttgtgacagggcaaagcccaacaccttcccccactgatgcctaccttaatgcctctgaaacaaccactctgagcccttctggaagcgctgtcatttcaaccacaacaatagctactactccatctaagccaacatgtgatgaaaaatatgcaaacatcactgtggattacttatataacaaggaaactaaattatttacagcaaagctaaatgttaatgagaatgtggaatgtggaaacaatacttgcacaaacaatgaggtgcataaccttacagaatgtaaaaatgcgtctgtttccatatctcataattcatgtactgctcctgataagacattaatattagatgtgccaccaggggttgaaaagtttcagttacatgattgtacacaagttgaaaaagcagatactactatttgtttaaaatggaaaaatattgaaacctttacttgtgatacacagaatattacctacagatttcagtgtggtaatatgatatttgataataaagaaattaaattagaaaaccttgaacccgaacatgagtataagtgtgactcagaaatactctataataaccacaagtttactaacgcaagtaaaattattaaaacagattttgggagtccaggagagcctcagattattttttgtagaagtgaagctgcacatcaaggagtaattacctggaatccccctcaaagatcatttcataattttaccctctgttatataaaagagacagaaaaagattgcctcaatctggataaaaacctgatcaaatatgatttgcaaaatttaaaaccttatacgaaatatgttttatcattacatgcctacatcattgcaaaagtgcaacgtaatggaagtgctgcaatgtgtcatttcacaactaaaagtgctcctccaagccaggtctggaacatgactgtctccatgacatcagataatagtatgcatgtcaagtgtaggcctcccagggaccgtaatggcccccatgaacgttaccatttggaagttgaagctggaaatactctggttagaaatgagtcgcataagaattgcgatttccgtgtaaaagatcttcaatattcaacagactacacttttaaggcctattttcacaatggagactatcctggagaaccctttattttacatcattcaacatcttataattctaaggcactgatagcatttctggcatttctgattattgtgacatcaatagccctgcttgttgttctctacaaaatctatgatctacataagaaaagatcctgcaatttagatgaacagcaggagcttgttgaaagggatgatgaaaaacaactgatgaatgtggagccaatccatgcagatattttgttggaaacttataagaggaagattgctgatgaaggaagactttttctggctgaatttcagagcatcccgcgggtgttcagcaagtttcctataaaggaagctcgaaagccctttaaccagaataaaaaccgttatgttgacattcttccttatgattataaccgtgttgaactctctgagataaacggagatgcagggtcaaactacataaatgccagctatattgatggtttcaaagaacccaggaaatacattgctgcacaaggtcccagggatgaaactgttgatgatttctggaggatgatttgggaacagaaagccacagttattgtcatggtcactcgatgtgaagaaggaaacaggaacaagtgtgcagaatactggccgtcaatggaagagggcactcgggcttttggagatgttgttgtaaagatcaaccagcacaaaagatgtccagattacatcattcagaaattgaacattgtaaataaaaaagaaaaagcaactggaagagaggtgactcacattcagttcaccagctggccagaccacggggtgcctgaggatcctcacttgctcctcaaactgagaaggagagtgaatgccttcagcaatttcttcagtggtcccattgtggtgcactgcagtgctggtgttgggcgcacaggaacctatatcggaattgatgccatgctagaaggcctggaagccgagaacaaagtggatgtttatggttatgttgtcaagctaaggcgacagagatgcctgatggttcaagtagaggcccagtacatcttgatccatcaggctttggtggaatacaatcagtttggagaaacagaagtgaatttgtctgaattacatccatatctacataacatgaagaaaagggatccacccagtgagccgtctccactagaggctgaattccagagacttccttcatataggagctggaggacacagcacattggaaatcaagaagaaaataaaagtaaaaacaggaattctaatgtcatcccatatgactataacagagtgccacttaaacatgagctggaaatgagtaaagagagtgagcatgattcagatgaatcctctgatgatgacagtgattcagaggaaccaagcaaatacatcaatgcatcttttataatgagctactggaaacctgaagtgatgattgctgctcagggaccactgaaggagaccattggtgacttttggcagatgatcttccaaagaaaagtcaaagttattgttatgctgacagaactgaaacatggagaccaggaaatctgtgctcagtactggggagaaggaaagcaaacatatggagatattgaagttgacctgaaagacacagacaaatcttcaacttatacccttcgtgtctttgaactgagacattccaagaggaaagactctcgaactgtgtaccagtaccaatatacaaactggagtgtggagcagcttcctgcagaacccaaggaattaatctctatgattcaggtcgtcaaacaaaaacttccccagaagaattcctctgaagggaacaagcatcacaagagtacacctctactcattcactgcagggatggatctcagcaaacgggaatattttgtgctttgttaaatctcttagaaagtgcggaaacagaagaggtagtggatatttttcaagtggtaaaagctctacgcaaagctaggccaggcatggtttccacattcgagcaatatcaattcctatatgacgtcattgccagcacctaccctgctcagaatggacaagtaaagaaaaacaaccatcaagaagataaaattgaatttgataatgaagtggacaaagtaaagcaggatgctaattgtgttaatccacttggtgccccagaaaagctccctgaagcaaaggaacaggctgaaggttctgaacccacgagtggcactgaggggccagaacattctgtcaatggtcctgcaagtccagctttaaatcaaggttcataggaaaagacataaatgaggaaactccaaacctcctgttagctgttatttctatttttgtagaagtaggaagtgaaaataggtatacagtggattaattaaatgcagcgaaccaatatttgtagaagggttatattttactactgtggaaaaatatttaagatagttttgccagaacagtttgtacagacgtatgcttattttaaaattttatctcttattcagtaaaaaacaacttctttgtaatcgttatgtgtgtatatgtatgtgtgtatgggtgtgtgtttgtgtgagagacagagaaagagagagaattctttcaagtgaatctaaaagcttttgcttttcctttgtttttatgaagaaaaaatacattttatattagaagtgttaacttagcttgaaggatctgtttttaaaaatcataaactgtgtgcagactcaataaaatcatgtacatttctgaaatgacctcaagatgtcctccttgttctactcatatatatctatcttatatagtttactattttacttctagagatagtacataaaggtggtatgtgtgtgtatgctactacaaaaaagttgttaactaaattaacattgggaaatcttatattccatatattagcatttagtccaatgtctttttaagcttatttaattaaaaaatttccagtgagcttatcatgctgtctttacatggggttttcaattttgcatgctcgattattccctgtacaatatttaaaatttattgcttgatacttttgacaacaaattaggttttgtacaattgaacttaaataaatgtcattaaaataaataaatgcaatatgtattaatattcattgtataaaaatagaagaatacaaacatatttgttaaatatttacatatgaaatttaatatagctatttttatggaatttttcattgatatgaaaaatatgatattgcatatgcatagttcccatgttaaatcccattcataactttcattaaagcatttactttgaatttctccaatgcttagaatgtttttaccaggaatggatgtcgctaatcataataaaattcaaccattatttttttcttgtttataatacattgtgttatatgttcaaatatgaaatgtgtatgcacctattgaaatatgtttaatgcatttattaacatttgcaggacacttttacaggccccaattatccaatagtctaataattgtttaagatctagaaaaaaaaaatcaagaatagtggtatttttcatgaagtaataaaaactcgttttggtgaa

SEQ ID NO: 363 - DNA, 1156 bp, Homo sapiens
agaacaacttttttgacttcctgcaaagaggacccttacagtatttttggagaagttagtaaaaccgaatctgacatcatcacctagcagttcatgcagctagcaagtggtttgttcttagggtaacagaggaggaaattgttcctcgtctgataagacaacagtggagaaaggacgcatgctgtttcttagggacacggctgacttccagatatgaccatgtatttgtggcttaaactcttggcatttggctttgcctttctggacacagaagtatttgtgacagggcaaagcccaacaccttcccccactggtaagaattaatatttatatttttactaattttattttcttgttgcaaagtttatatatttaactacaattttctattattaacactgaaattatttttaaggataaattttataatcatgagtgattcttgacattcacttgttcttaaactttctgcttatacgttatagagtttaataactacctaaacatgttattaaatttgtatatatattttgtgtataaatagtaacttttcccaaacttgacagtaaatcacacaacaggtttctactctcttttaatattttaagactataaaaaaatgcatttaaattagataacaaaattttatagtctgaaagcaggttaacagctgtctatgtatgttatagatatgtagataacagatttgcatatgtctatatttctttaagagtatgttgcttttttcaatggtatgcaaaacctttgagactattgagatatttttaaataataattttcaaattctactgaacacttcaatagtccttataaatgtcttaatcatgagataaatttaaaacacagagatgctgcaaataaattcatacatagtacatacaaaataagagaaaaaattaaattgcagatggttaaatatcacatcacttaactgatgttactgaaaatgtattttcctgcataatcatatggttgacagtatgcattaagaaggtaagtaaaacaatgaagacaattttgatttaatatggtaatgcacaattccaactaacgtacattcaacagatcatgaaattgggttattaaaatgaatatttttgtcattaaataaaaattccgtccaaaaaaaaaaaaa

SEQ ID NO: 364 - DNA, 5053 bp, Homo sapiens
agtatttttggagaagttagtaaaaccgaatctgacatcatcacctagcagttcatgcagctagcaagtggtttgttcttagggtaacagaggaggaaattgttcctcgtctgataagacaacagtggagaaaggacgcatgctgtttcttagggacacggctgacttccagatatgaccatgtatttgtggcttaaactcttggcatttggctttgcctttctggacacagaagtatttgtgacagggcaaagcccaacaccttcccccactggattgactacagcaaagatgcccagtgttccactttcaagtgaccccttacctactcacaccactgcattctcacccgcaagcacctttgaaagagaaaatgacttctcagagaccacaacttctcttagtccagacaatacttccacccaagtatccccggactctttggataatgctagtgcttttaataccacaggtgtttcatcagtacagacgcctcaccttcccacgcacgcagactcgcagacgccctctgctggaactgacacgcagacattcagcggctccgccgccaatgcaaaactcaaccctaccccaggcagcaatgctatctcagatgcctaccttaatgcctctgaaacaaccactctgagcccttctggaagcgctgtcatttcaaccacaacaatagctactactccatctaagccaacatgtgatgaaaaatatgcaaacatcactgtggattacttatataacaaggaaactaaattatttacagcaaagctaaatgttaatgagaatgtggaatgtggaaacaatacttgcacaaacaatgaggtgcataaccttacagaatgtaaaaatgcgtctgtttccatatctcataattcatgtactgctcctgataagacattaatattagatgtgccaccaggggttgaaaagtttcagttacatgattgtacacaagttgaaaaagcagatactactatttgtttaaaatggaaaaatattgaaacctttacttgtgatacacagaatattacctacagatttcagtgtggtaatatgatatttgataataaagaaattaaattagaaaaccttgaacccgaacatgagtataagtgtgactcagaaatactctataataaccacaagtttactaacgcaagtaaaattattaaaacagattttgggagtccaggagagcctcagattattttttgtagaagtgaagctgcacatcaaggagtaattacctggaatccccctcaaagatcatttcataattttaccctctgttatataaaagagacagaaaaagattgcctcaatctggataaaaacctgatcaaatatgatttgcaaaatttaaaaccttatacgaaatatgttttatcattacatgcctacatcattgcaaaagtgcaacgtaatggaagtgctgcaatgtgtcatttcacaactaaaagtgctcctccaagccaggtctggaacatgactgtctccatgacatcagataatagtatgcatgtcaagtgtaggcctcccagggaccgtaatggcccccatgaacgttaccatttggaagttgaagctggaaatactctggttagaaatgagtcgcataagaattgcgatttccgtgtaaaagatcttcaatattcaacagactacacttttaaggcctattttcacaatggagactatcctggagaaccctttattttacatcattcaacatcttataattctaaggcactgatagcatttctggcatttctgattattgtgacatcaatagccctgcttgttgttctctacaaaatctatgatctacataagaaaagatcctgcaatttagatgaacagcaggagcttgttgaaagggatgatgaaaaacaactgatgaatgtggagccaatccatgcagatattttgttggaaacttataagaggaagattgctgatgaaggaagactttttctggctgaatttcagagcatcccgcgggtgttcagcaagtttcctataaaggaagctcgaaagccctttaaccagaataaaaaccgttatgttgacattcttccttatgattataaccgtgttgaactctctgagataaacggagatgcagggtcaaactacataaatgccagctatattgatggtttcaaagaacccaggaaatacattgctgcacaaggtcccagggatgaaactgttgatgatttctggaggatgatttgggaacagaaagccacagttattgtcatggtcactcgatgtgaagaaggaaacaggaacaagtgtgcagaatactggccgtcaatggaagagggcactcgggcttttggagatgttgttgtaaagatcaaccagcacaaaagatgtccagattacatcattcagaaattgaacattgtaaataaaaaagaaaaagcaactggaagagaggtgactcacattcagttcaccagctggccagaccacggggtgcctgaggatcctcacttgctcctcaaactgagaaggagagtgaatgccttcagcaatttcttcagtggtcccattgtggtgcactgcagtgctggtgttgggcgcacaggaacctatatcggaattgatgccatgctagaaggcctggaagccgagaacaaagtggatgtttatggttatgttgtcaagctaaggcgacagagatgcctgatggttcaagtagaggcccagtacatcttgatccatcaggctttggtggaatacaatcagtttggagaaacagaagtgaatttgtctgaattacatccatatctacataacatgaagaaaagggatccacccagtgagccgtctccactagaggctgaattccagagacttccttcatataggagctggaggacacagcacattggaaatcaagaagaaaataaaagtaaaaacaggaattctaatgtcatcccatatgactataacagagtgccacttaaacatgagctggaaatgagtaaagagagtgagcatgattcagatgaatcctctgatgatgacagtgattcagaggaaccaagcaaatacatcaatgcatcttttataatgagctactggaaacctgaagtgatgattgctgctcagggaccactgaaggagaccattggtgacttttggcagatgatcttccaaagaaaagtcaaagttattgttatgctgacagaactgaaacatggagaccaggaaatctgtgctcagtactggggagaaggaaagcaaacatatggagatattgaagttgacctgaaagacacagacaaatcttcaacttatacccttcgtgtctttgaactgagacattccaagaggaaagactctcgaactgtgtaccagtaccaatatacaaactggagtgtggagcagcttcctgcagaacccaaggaattaatctctatgattcaggtcgtcaaacaaaaacttccccagaagaattcctctgaagggaacaagcatcacaagagtacacctctactcattcactgcagggatggatctcagcaaacgggaatattttgtgctttgttaaatctcttagaaagtgcggaaacagaagaggtagtggatatttttcaagtggtaaaagctctacgcaaagctaggccaggcatggtttccacattcgagcaatatcaattcctatatgacgtcattgccagcacctaccctgctcagaatggacaagtaaagaaaaacaaccatcaagaagataaaattgaatttgataatgaagtggacaaagtaaagcaggatgctaattgtgttaatccacttggtgccccagaaaagctccctgaagcaaaggaacaggctgaaggttctgaacccacgagtggcactgaggggccagaacattctgtcaatggtcctgcaagtccagctttaaatcaaggttcataggaaaagacataaatgaggaaactccaaacctcctgttagctgttatttctatttttgtagaagtaggaagtgaaaataggtatacagtggattaattaaatgcagcgaaccaatatttgtagaagggttatattttactactgtggaaaaatatttaagatagttttgccagaacagtttgtacagacgtatgcttattttaaaattttatctcttattcagtaaaaaacaacttctttgtaatcgttatgtgtgtatatgtatgtgtgtatgggtgtgtgtttgtgtgagagacagagaaagagagagaattctttcaagtgaatctaaaagcttttgcttttcctttgtttttatgaagaaaaaatacattttatattagaagtgttaacttagcttgaaggatctgtttttaaaaatcataaactgtgtgcagactcaataaaatcatgtacatttctgaaatgacctcaagatgtcctccttgttctactcatatatatctatcttatatagtttactattttacttctagagatagtacataaaggtggtatgtgtgtgtatgctactacaaaaaagttgttaactaaattaacattgggaaatcttatattccatatattagcatttagtccaatgtctttttaagcttatttaattaaaaaatttccagtgagcttatcatgctgtctttacatggggttttcaattttgcatgctcgattattccctgtacaatatttaaaatttattgcttgatacttttgacaacaaattaggttttgtacaattgaacttaaataaatgtcattaaaataaataaatgcaatatgtattaatattcattgtataaaaatagaagaatacaaacatatttgttaaatatttacatatgaaatttaatatagctatttttatggaatttttcattgatatgaaaaatatgatattgcatatgcatagttcccatgttaaatcccattcataactttcattaaagcatttactttgaatttctccaatgcttagaatgtttttaccaggaatggatgtcgctaatcataataaaattcaaccattatttttttcttgtttataa

SEQ ID NO: 365 - DNA, 4981 bp, Homo sapiens
agtaaaaccgaatctgacatcatcacctagcagttcatgcagctagcaagtggtttgttcttagggtaacagaggaggaaattgttcctcgtctgataagacaacagtggagaaaggacgcatgctgtttcttagggacacggctgacttccagatatgaccatgtatttgtggcttaaactcttggcatttggctttgcctttctggacacagaagtatttgtgacagggcaaagcccaacaccttcccccactggtgtttcatcagtacagacgcctcaccttcccacgcacgcagactcgcagacgccctctgctggaactgacacgcagacattcagcggctccgccgccaatgcaaaactcaaccctaccccaggcagcaatgctatctcagatgtcccaggagagaggagtacagccagcacctttcctacagacccagtttccccattgacaaccaccctcagccttgcacaccacagctctgctgccttacctgcacgcacctccaacaccaccatcacagcgaacacctcagatgcctaccttaatgcctctgaaacaaccactctgagcccttctggaagcgctgtcatttcaaccacaacaatagctactactccatctaagccaacatgtgatgaaaaatatgcaaacatcactgtggattacttatataacaaggaaactaaattatttacagcaaagctaaatgttaatgagaatgtggaatgtggaaacaatacttgcacaaacaatgaggtgcataaccttacagaatgtaaaaatgcgtctgtttccatatctcataattcatgtactgctcctgataagacattaatattagatgtgccaccaggggttgaaaagtttcagttacatgattgtacacaagttgaaaaagcagatactactatttgtttaaaatggaaaaatattgaaacctttacttgtgatacacagaatattacctacagatttcagtgtggtaatatgatatttgataataaagaaattaaattagaaaaccttgaacccgaacatgagtataagtgtgactcagaaatactctataataaccacaagtttactaacgcaagtaaaattattaaaacagattttgggagtccaggagagcctcagattattttttgtagaagtgaagctgcacatcaaggagtaattacctggaatccccctcaaagatcatttcataattttaccctctgttatataaaagagacagaaaaagattgcctcaatctggataaaaacctgatcaaatatgatttgcaaaatttaaaaccttatacgaaatatgttttatcattacatgcctacatcattgcaaaagtgcaacgtaatggaagtgctgcaatgtgtcatttcacaactaaaagtgctcctccaagccaggtctggaacatgactgtctccatgacatcagataatagtatgcatgtcaagtgtaggcctcccagggaccgtaatggcccccatgaacgttaccatttggaagttgaagctggaaatactctggttagaaatgagtcgcataagaattgcgatttccgtgtaaaagatcttcaatattcaacagactacacttttaaggcctattttcacaatggagactatcctggagaaccctttattttacatcattcaacatcttataattctaaggcactgatagcatttctggcatttctgattattgtgacatcaatagccctgcttgttgttctctacaaaatctatgatctacataagaaaagatcctgcaatttagatgaacagcaggagcttgttgaaagggatgatgaaaaacaactgatgaatgtggagccaatccatgcagatattttgttggaaacttataagaggaagattgctgatgaaggaagactttttctggctgaatttcagagcatcccgcgggtgttcagcaagtttcctataaaggaagctcgaaagccctttaaccagaataaaaaccgttatgttgacattcttccttatgattataaccgtgttgaactctctgagataaacggagatgcagggtcaaactacataaatgccagctatattgatggtttcaaagaacccaggaaatacattgctgcacaaggtcccagggatgaaactgttgatgatttctggaggatgatttgggaacagaaagccacagttattgtcatggtcactcgatgtgaagaaggaaacaggaacaagtgtgcagaatactggccgtcaatggaagagggcactcgggcttttggagatgttgttgtaaagatcaaccagcacaaaagatgtccagattacatcattcagaaattgaacattgtaaataaaaaagaaaaagcaactggaagagaggtgactcacattcagttcaccagctggccagaccacggggtgcctgaggatcctcacttgctcctcaaactgagaaggagagtgaatgccttcagcaatttcttcagtggtcccattgtggtgcactgcagtgctggtgttgggcgcacaggaacctatatcggaattgatgccatgctagaaggcctggaagccgagaacaaagtggatgtttatggttatgttgtcaagctaaggcgacagagatgcctgatggttcaagtagaggcccagtacatcttgatccatcaggctttggtggaatacaatcagtttggagaaacagaagtgaatttgtctgaattacatccatatctacataacatgaagaaaagggatccacccagtgagccgtctccactagaggctgaattccagagacttccttcatataggagctggaggacacagcacattggaaatcaagaagaaaataaaagtaaaaacaggaattctaatgtcatcccatatgactataacagagtgccacttaaacatgagctggaaatgagtaaagagagtgagcatgattcagatgaatcctctgatgatgacagtgattcagaggaaccaagcaaatacatcaatgcatcttttataatgagctactggaaacctgaagtgatgattgctgctcagggaccactgaaggagaccattggtgacttttggcagatgatcttccaaagaaaagtcaaagttattgttatgctgacagaactgaaacatggagaccaggaaatctgtgctcagtactggggagaaggaaagcaaacatatggagatattgaagttgacctgaaagacacagacaaatcttcaacttatacccttcgtgtctttgaactgagacattccaagaggaaagactctcgaactgtgtaccagtaccaatatacaaactggagtgtggagcagcttcctgcagaacccaaggaattaatctctatgattcaggtcgtcaaacaaaaacttccccagaagaattcctctgaagggaacaagcatcacaagagtacacctctactcattcactgcagggatggatctcagcaaacgggaatattttgtgctttgttaaatctcttagaaagtgcggaaacagaagaggtagtggatatttttcaagtggtaaaagctctacgcaaagctaggccaggcatggtttccacattcgagcaatatcaattcctatatgacgtcattgccagcacctaccctgctcagaatggacaagtaaagaaaaacaaccatcaagaagataaaattgaatttgataatgaagtggacaaagtaaagcaggatgctaattgtgttaatccacttggtgccccagaaaagctccctgaagcaaaggaacaggctgaaggttctgaacccacgagtggcactgaggggccagaacattctgtcaatggtcctgcaagtccagctttaaatcaaggttcataggaaaagacataaatgaggaaactccaaacctcctgttagctgttatttctatttttgtagaagtaggaagtgaaaataggtatacagtggattaattaaatgcagcgaaccaatatttgtagaagggttatattttactactgtggaaaaatatttaagatagttttgccagaacagtttgtacagacgtatgcttattttaaaattttatctcttattcagtaaaaaacaacttctttgtaatcgttatgtgtgtatatgtatgtgtgtatgggtgtgtgtttgtgtgagagacagagaaagagagagaattctttcaagtgaatctaaaagcttttgcttttcctttgtttttatgaagaaaaaatacattttatattagaagtgttaacttagcttgaaggatctgtttttaaaaatcataaactgtgtgcagactcaataaaatcatgtacatttctgaaatgacctcaagatgtcctccttgttctactcatatatatctatcttatatagtttactattttacttctagagatagtacataaaggtggtatgtgtgtgtatgctactacaaaaaagttgttaactaaattaacattgggaaatcttatattccatatattagcatttagtccaatgtctttttaagcttatttaattaaaaaatttccagtgagcttatcatgctgtctttacatggggttttcaattttgcatgctcgattattccctgtacaatatttaaaatttattgcttgatacttttgacaacaaattaggttttgtacaattgaacttaaataaatgtcattaaaataaataaatgcaatatgtattaatattcattgtataaaaatagaagaatacaaacatatttgttaaatatttacatatgaaatttaatatagctatttttatggaatttttcattgatatgaaaaatatgatattgcatatgcatagttcccatgttaaatcccattcataactttcattaaagcatttactttgaatttctccaatgcttagaatgtttttaccaggaatggatgtcgctaatcataataaaattcaaccattatttttttcttgtttataa

SEQ ID NO: 366 - DNA, 4837 bp, Homo sapiens
agtaaaaccgaatctgacatcatcacctagcagttcatgcagctagcaagtggtttgttcttagggtaacagaggaggaaattgttcctcgtctgataagacaacagtggagaaaggacgcatgctgtttcttagggacacggctgacttccagatatgaccatgtatttgtggcttaaactcttggcatttggctttgcctttctggacacagaagtatttgtgacagggcaaagcccaacaccttcccccactggtgtttcatcagtacagacgcctcaccttcccacgcacgcagactcgcagacgccctctgctggaactgacacgcagacattcagcggctccgccgccaatgcaaaactcaaccctaccccaggcagcaatgctatctcagatgcctaccttaatgcctctgaaacaaccactctgagcccttctggaagcgctgtcatttcaaccacaacaatagctactactccatctaagccaacatgtgatgaaaaatatgcaaacatcactgtggattacttatataacaaggaaactaaattatttacagcaaagctaaatgttaatgagaatgtggaatgtggaaacaatacttgcacaaacaatgaggtgcataaccttacagaatgtaaaaatgcgtctgtttccatatctcataattcatgtactgctcctgataagacattaatattagatgtgccaccaggggttgaaaagtttcagttacatgattgtacacaagttgaaaaagcagatactactatttgtttaaaatggaaaaatattgaaacctttacttgtgatacacagaatattacctacagatttcagtgtggtaatatgatatttgataataaagaaattaaattagaaaaccttgaacccgaacatgagtataagtgtgactcagaaatactctataataaccacaagtttactaacgcaagtaaaattattaaaacagattttgggagtccaggagagcctcagattattttttgtagaagtgaagctgcacatcaaggagtaattacctggaatccccctcaaagatcatttcataattttaccctctgttatataaaagagacagaaaaagattgcctcaatctggataaaaacctgatcaaatatgatttgcaaaatttaaaaccttatacgaaatatgttttatcattacatgcctacatcattgcaaaagtgcaacgtaatggaagtgctgcaatgtgtcatttcacaactaaaagtgctcctccaagccaggtctggaacatgactgtctccatgacatcagataatagtatgcatgtcaagtgtaggcctcccagggaccgtaatggcccccatgaacgttaccatttggaagttgaagctggaaatactctggttagaaatgagtcgcataagaattgcgatttccgtgtaaaagatcttcaatattcaacagactacacttttaaggcctattttcacaatggagactatcctggagaaccctttattttacatcattcaacatcttataattctaaggcactgatagcatttctggcatttctgattattgtgacatcaatagccctgcttgttgttctctacaaaatctatgatctacataagaaaagatcctgcaatttagatgaacagcaggagcttgttgaaagggatgatgaaaaacaactgatgaatgtggagccaatccatgcagatattttgttggaaacttataagaggaagattgctgatgaaggaagactttttctggctgaatttcagagcatcccgcgggtgttcagcaagtttcctataaaggaagctcgaaagccctttaaccagaataaaaaccgttatgttgacattcttccttatgattataaccgtgttgaactctctgagataaacggagatgcagggtcaaactacataaatgccagctatattgatggtttcaaagaacccaggaaatacattgctgcacaaggtcccagggatgaaactgttgatgatttctggaggatgatttgggaacagaaagccacagttattgtcatggtcactcgatgtgaagaaggaaacaggaacaagtgtgcagaatactggccgtcaatggaagagggcactcgggcttttggagatgttgttgtaaagatcaaccagcacaaaagatgtccagattacatcattcagaaattgaacattgtaaataaaaaagaaaaagcaactggaagagaggtgactcacattcagttcaccagctggccagaccacggggtgcctgaggatcctcacttgctcctcaaactgagaaggagagtgaatgccttcagcaatttcttcagtggtcccattgtggtgcactgcagtgctggtgttgggcgcacaggaacctatatcggaattgatgccatgctagaaggcctggaagccgagaacaaagtggatgtttatggttatgttgtcaagctaaggcgacagagatgcctgatggttcaagtagaggcccagtacatcttgatccatcaggctttggtggaatacaatcagtttggagaaacagaagtgaatttgtctgaattacatccatatctacataacatgaagaaaagggatccacccagtgagccgtctccactagaggctgaattccagagacttccttcatataggagctggaggacacagcacattggaaatcaagaagaaaataaaagtaaaaacaggaattctaatgtcatcccatatgactataacagagtgccacttaaacatgagctggaaatgagtaaagagagtgagcatgattcagatgaatcctctgatgatgacagtgattcagaggaaccaagcaaatacatcaatgcatcttttataatgagctactggaaacctgaagtgatgattgctgctcagggaccactgaaggagaccattggtgacttttggcagatgatcttccaaagaaaagtcaaagttattgttatgctgacagaactgaaacatggagaccaggaaatctgtgctcagtactggggagaaggaaagcaaacatatggagatattgaagttgacctgaaagacacagacaaatcttcaacttatacccttcgtgtctttgaactgagacattccaagaggaaagactctcgaactgtgtaccagtaccaatatacaaactggagtgtggagcagcttcctgcagaacccaaggaattaatctctatgattcaggtcgtcaaacaaaaacttccccagaagaattcctctgaagggaacaagcatcacaagagtacacctctactcattcactgcagggatggatctcagcaaacgggaatattttgtgctttgttaaatctcttagaaagtgcggaaacagaagaggtagtggatatttttcaagtggtaaaagctctacgcaaagctaggccaggcatggtttccacattcgagcaatatcaattcctatatgacgtcattgccagcacctaccctgctcagaatggacaagtaaagaaaaacaaccatcaagaagataaaattgaatttgataatgaagtggacaaagtaaagcaggatgctaattgtgttaatccacttggtgccccagaaaagctccctgaagcaaaggaacaggctgaaggttctgaacccacgagtggcactgaggggccagaacattctgtcaatggtcctgcaagtccagctttaaatcaaggttcataggaaaagacataaatgaggaaactccaaacctcctgttagctgttatttctatttttgtagaagtaggaagtgaaaataggtatacagtggattaattaaatgcagcgaaccaatatttgtagaagggttatattttactactgtggaaaaatatttaagatagttttgccagaacagtttgtacagacgtatgcttattttaaaattttatctcttattcagtaaaaaacaacttctttgtaatcgttatgtgtgtatatgtatgtgtgtatgggtgtgtgtttgtgtgagagacagagaaagagagagaattctttcaagtgaatctaaaagcttttgcttttcctttgtttttatgaagaaaaaatacattttatattagaagtgttaacttagcttgaaggatctgtttttaaaaatcataaactgtgtgcagactcaataaaatcatgtacatttctgaaatgacctcaagatgtcctccttgttctactcatatatatctatcttatatagtttactattttacttctagagatagtacataaaggtggtatgtgtgtgtatgctactacaaaaaagttgttaactaaattaacattgggaaatcttatattccatatattagcatttagtccaatgtctttttaagcttatttaattaaaaaatttccagtgagcttatcatgctgtctttacatggggttttcaattttgcatgctcgattattccctgtacaatatttaaaatttattgcttgatacttttgacaacaaattaggttttgtacaattgaacttaaataaatgtcattaaaataaataaatgcaatatgtattaatattcattgtataaaaatagaagaatacaaacatatttgttaaatatttacatatgaaatttaatatagctatttttatggaatttttcattgatatgaaaaatatgatattgcatatgcatagttcccatgttaaatcccattcataactttcattaaagcatttactttgaatttctccaatgcttagaatgtttttaccaggaatggatgtcgctaatcataataaaattcaaccattatttttttcttgtttataa

SEQ ID NO: 367 - DNA, 5093 bp, Homo sapiens
acgcacagcccccctgggggccgggggcggggccaggctataaaccgccggttaggggccgccatcccctcagagcgtcgggatatcgggtggcggctcgggacggaggacgcgctagtgttcttctgtgtggcagttcagaatgatggatcaagctagatcagcattctctaacttgtttggtggagaaccattgtcatatacccggttcagcctggctcggcaagtagatggcgataacagtcatgtggagatgaaacttgctgtagatgaagaagaaaatgctgacaataacacaaaggccaatgtcacaaaaccaaaaaggtgtagtggaagtatctgctatgggactattgctgtgatcgtctttttcttgattggatttatgattggctacttgggctattgtaaaggggtagaaccaaaaactgagtgtgagagactggcaggaaccgagtctccagtgagggaggagccaggagaggacttccctgcagcacgtcgcttatattgggatgacctgaagagaaagttgtcggagaaactggacagcacagacttcaccggcaccatcaagctgctgaatgaaaattcatatgtccctcgtgaggctggatctcaaaaagatgaaaatcttgcgttgtatgttgaaaatcaatttcgtgaatttaaactcagcaaagtctggcgtgatcaacattttgttaagattcaggtcaaagacagcgctcaaaactcggtgatcatagttgataagaacggtagacttgtttacctggtggagaatcctgggggttatgtggcgtatagtaaggctgcaacagttactggtaaactggtccatgctaattttggtactaaaaaagattttgaggatttatacactcctgtgaatggatctatagtgattgtcagagcagggaaaatcacctttgcagaaaaggttgcaaatgctgaaagcttaaatgcaattggtgtgttgatatacatggaccagactaaatttcccattgttaacgcagaactttcattctttggacatgctcatctggggacaggtgacccttacacacctggattcccttccttcaatcacactcagtttccaccatctcggtcatcaggattgcctaatatacctgtccagacaatctccagagctgctgcagaaaagctgtttgggaatatggaaggagactgtccctctgactggaaaacagactctacatgtaggatggtaacctcagaaagcaagaatgtgaagctcactgtgagcaatgtgctgaaagagataaaaattcttaacatctttggagttattaaaggctttgtagaaccagatcactatgttgtagttggggcccagagagatgcatggggccctggagctgcaaaatccggtgtaggcacagctctcctattgaaacttgcccagatgttctcagatatggtcttaaaagatgggtttcagcccagcagaagcattatctttgccagttggagtgctggagactttggatcggttggtgccactgaatggctagagggatacctttcgtccctgcatttaaaggctttcacttatattaatctggataaagcggttcttggtaccagcaacttcaaggtttctgccagcccactgttgtatacgcttattgagaaaacaatgcaaaatgtgaagcatccggttactgggcaatttctatatcaggacagcaactgggccagcaaagttgagaaactcactttagacaatgctgctttccctttccttgcatattctggaatcccagcagtttctttctgtttttgcgaggacacagattatccttatttgggtaccaccatggacacctataaggaactgattgagaggattcctgagttgaacaaagtggcacgagcagctgcagaggtcgctggtcagttcgtgattaaactaacccatgatgttgaattgaacctggactatgagaggtacaacagccaactgctttcatttgtgagggatctgaaccaatacagagcagacataaaggaaatgggcctgagtttacagtggctgtattctgctcgtggagacttcttccgtgctacttccagactaacaacagatttcgggaatgctgagaaaacagacagatttgtcatgaagaaactcaatgatcgtgtcatgagagtggagtatcacttcctctctccctacgtatctccaaaagagtctcctttccgacatgtcttctggggctccggctctcacacgctgccagctttactggagaacttgaaactgcgtaaacaaaataacggtgcttttaatgaaacgctgttcagaaaccagttggctctagctacttggactattcagggagctgcaaatgccctctctggtgacgtttgggacattgacaatgagttttaaatgtgatacccatagcttccatgagaacagcagggtagtctggtttctagacttgtgctgatcgtgctaaattttcagtagggctacaaaacctgatgttaaaattccatcccatcatcttggtactactagatgtctttaggcagcagcttttaatacagggtagataacctgtacttcaagttaaagtgaataaccacttaaaaaatgtccatgatggaatattcccctatctctagaattttaagtgctttgtaatgggaactgcctctttcctgttgttgttaatgaaaatgtcagaaaccagttatgtgaatgatctctctgaatcctaagggctggtctctgctgaaggttgtaagtggtcgcttactttgagtgatcctccaacttcatttgatgctaaataggagataccaggttgaaagaccttctccaaatgagatctaagcctttccataaggaatgtagctggtttcctcattcctgaaagaaacagttaactttcagaagagatgggcttgttttcttgccaatgaggtctgaaatggaggtccttctgctggataaaatgaggttcaactgttgattgcaggaataaggccttaatatgttaacctcagtgtcatttatgaaaagaggggaccagaagccaaagacttagtatattttcttttcctctgtcccttcccccataagcctccatttagttctttgttatttttgtttcttccaaagcacattgaaagagaaccagtttcaggtgtttagttgcagactcagtttgtcagactttaaagaataatatgctgccaaattttggccaaagtgttaatcttaggggagagctttctgtccttttggcactgagatatttattgtttatttatcagtgacagagttcactataaatggtgtttttttaatagaatataattatcggaagcagtgccttccataattatgacagttatactgtcggttttttttaaataaaagcagcatctgctaataaaacccaacagatactggaagttttgcatttatggtcaacacttaagggttttagaaaacagccgtcagccaaatgtaattgaataaagttgaagctaagatttagagatgaattaaatttaattaggggttgctaagaagcgagcactgaccagataagaatgctggttttcctaaatgcagtgaattgtgaccaagttataaatcaatgtcacttaaaggctgtggtagtactcctgcaaaattttatagctcagtttatccaaggtgtaactctaattcccattttgcaaaatttccagtacctttgtcacaatcctaacacattatcgggagcagtgtcttccataatgtataaagaacaaggtagtttttacctaccacagtgtctgtatcggagacagtgatctccatatgttacactaagggtgtaagtaattatcgggaacagtgtttcccataattttcttcatgcaatgacatcttcaaagcttgaagatcgttagtatctaacatgtatcccaactcctataattccctatcttttagttttagttgcagaaacattttgtggtcattaagcattgggtgggtaaattcaaccactgtaaaatgaaattactacaaaatttgaaatttagcttgggtttttgttacctttatggtttctccaggtcctctacttaatgagatagtagcatacatttataatgtttgctattgacaagtcattttaactttatcacattatttgcatgttacctcctataaacttagtgcggacaagttttaatccagaattgaccttttgacttaaagcagagggactttgtatagaaggtttgggggctgtggggaaggagagtcccctgaaggtctgacacgtctgcctacccattcgtggtgatcaattaaatgtaggtatgaataagttcgaagctccgtgagtgaaccatcattataaacgtgatgatcagctgtttgtcatagggcagttggaaacggcctcctagggaaaagttcatagggtctcttcaggttcttagtgtcacttacctagatttacagcctcacttgaatgtgtcactactcacagtctctttaatcttcagttttatctttaatctcctcttttatcttggactgacatttagcgtagctaagtgaaaaggtcatagctgagattcctggttcgggtgttacgcacacgtacttaaatgaaagcatgtggcatgttcatcgtataacacaatatgaatacagggcatgcattttgcagcagtgagtctcttcagaaaacccttttctacagttagggttgagttacttcctatcaagccagtacgtgctaacaggctcaatattcctgaatgaaatatcagactagtgacaagctcctggtcttgagatgtcttctcgttaaggagatgggccttttggaggtaaaggataaaatgaatgagttctgtcatgattcactattctagaacttgcatgacctttactgtgttagctctttgaatgttcttgaaattttagactttctttgtaaacaaatgatatgtccttatcattgtataaaagctgttatgtgcaacagtgtggagattccttgtctgatttaataaaatacttaaacactgaaaaaaaaaaa

SEQ ID NO: 368 - DNA, 5234 bp, Homo sapiens
agagcgtcgggatatcgggtggcggctcgggacggaggacgcgctagtgtgagtgcgggcttctagaactacaccgaccctcgtgtcctcccttcatcctgcggggctggctggagcggccgctccggtgctgtccagcagccatagggagccgcacggggagcgggaaagcggtcgcggccccaggcggggcggccgggatggagcggggccgcgagcctgtggggaaggggctgtggcggcgcctcgagcggctgcaggttcttctgtgtggcagttcagaatgatggatcaagctagatcagcattctctaacttgtttggtggagaaccattgtcatatacccggttcagcctggctcggcaagtagatggcgataacagtcatgtggagatgaaacttgctgtagatgaagaagaaaatgctgacaataacacaaaggccaatgtcacaaaaccaaaaaggtgtagtggaagtatctgctatgggactattgctgtgatcgtctttttcttgattggatttatgattggctacttgggctattgtaaaggggtagaaccaaaaactgagtgtgagagactggcaggaaccgagtctccagtgagggaggagccaggagaggacttccctgcagcacgtcgcttatattgggatgacctgaagagaaagttgtcggagaaactggacagcacagacttcaccggcaccatcaagctgctgaatgaaaattcatatgtccctcgtgaggctggatctcaaaaagatgaaaatcttgcgttgtatgttgaaaatcaatttcgtgaatttaaactcagcaaagtctggcgtgatcaacattttgttaagattcaggtcaaagacagcgctcaaaactcggtgatcatagttgataagaacggtagacttgtttacctggtggagaatcctgggggttatgtggcgtatagtaaggctgcaacagttactggtaaactggtccatgctaattttggtactaaaaaagattttgaggatttatacactcctgtgaatggatctatagtgattgtcagagcagggaaaatcacctttgcagaaaaggttgcaaatgctgaaagcttaaatgcaattggtgtgttgatatacatggaccagactaaatttcccattgttaacgcagaactttcattctttggacatgctcatctggggacaggtgacccttacacacctggattcccttccttcaatcacactcagtttccaccatctcggtcatcaggattgcctaatatacctgtccagacaatctccagagctgctgcagaaaagctgtttgggaatatggaaggagactgtccctctgactggaaaacagactctacatgtaggatggtaacctcagaaagcaagaatgtgaagctcactgtgagcaatgtgctgaaagagataaaaattcttaacatctttggagttattaaaggctttgtagaaccagatcactatgttgtagttggggcccagagagatgcatggggccctggagctgcaaaatccggtgtaggcacagctctcctattgaaacttgcccagatgttctcagatatggtcttaaaagatgggtttcagcccagcagaagcattatctttgccagttggagtgctggagactttggatcggttggtgccactgaatggctagagggatacctttcgtccctgcatttaaaggctttcacttatattaatctggataaagcggttcttggtaccagcaacttcaaggtttctgccagcccactgttgtatacgcttattgagaaaacaatgcaaaatgtgaagcatccggttactgggcaatttctatatcaggacagcaactgggccagcaaagttgagaaactcactttagacaatgctgctttccctttccttgcatattctggaatcccagcagtttctttctgtttttgcgaggacacagattatccttatttgggtaccaccatggacacctataaggaactgattgagaggattcctgagttgaacaaagtggcacgagcagctgcagaggtcgctggtcagttcgtgattaaactaacccatgatgttgaattgaacctggactatgagaggtacaacagccaactgctttcatttgtgagggatctgaaccaatacagagcagacataaaggaaatgggcctgagtttacagtggctgtattctgctcgtggagacttcttccgtgctacttccagactaacaacagatttcgggaatgctgagaaaacagacagatttgtcatgaagaaactcaatgatcgtgtcatgagagtggagtatcacttcctctctccctacgtatctccaaaagagtctcctttccgacatgtcttctggggctccggctctcacacgctgccagctttactggagaacttgaaactgcgtaaacaaaataacggtgcttttaatgaaacgctgttcagaaaccagttggctctagctacttggactattcagggagctgcaaatgccctctctggtgacgtttgggacattgacaatgagttttaaatgtgatacccatagcttccatgagaacagcagggtagtctggtttctagacttgtgctgatcgtgctaaattttcagtagggctacaaaacctgatgttaaaattccatcccatcatcttggtactactagatgtctttaggcagcagcttttaatacagggtagataacctgtacttcaagttaaagtgaataaccacttaaaaaatgtccatgatggaatattcccctatctctagaattttaagtgctttgtaatgggaactgcctctttcctgttgttgttaatgaaaatgtcagaaaccagttatgtgaatgatctctctgaatcctaagggctggtctctgctgaaggttgtaagtggtcgcttactttgagtgatcctccaacttcatttgatgctaaataggagataccaggttgaaagaccttctccaaatgagatctaagcctttccataaggaatgtagctggtttcctcattcctgaaagaaacagttaactttcagaagagatgggcttgttttcttgccaatgaggtctgaaatggaggtccttctgctggataaaatgaggttcaactgttgattgcaggaataaggccttaatatgttaacctcagtgtcatttatgaaaagaggggaccagaagccaaagacttagtatattttcttttcctctgtcccttcccccataagcctccatttagttctttgttatttttgtttcttccaaagcacattgaaagagaaccagtttcaggtgtttagttgcagactcagtttgtcagactttaaagaataatatgctgccaaattttggccaaagtgttaatcttaggggagagctttctgtccttttggcactgagatatttattgtttatttatcagtgacagagttcactataaatggtgtttttttaatagaatataattatcggaagcagtgccttccataattatgacagttatactgtcggttttttttaaataaaagcagcatctgctaataaaacccaacagatactggaagttttgcatttatggtcaacacttaagggttttagaaaacagccgtcagccaaatgtaattgaataaagttgaagctaagatttagagatgaattaaatttaattaggggttgctaagaagcgagcactgaccagataagaatgctggttttcctaaatgcagtgaattgtgaccaagttataaatcaatgtcacttaaaggctgtggtagtactcctgcaaaattttatagctcagtttatccaaggtgtaactctaattcccattttgcaaaatttccagtacctttgtcacaatcctaacacattatcgggagcagtgtcttccataatgtataaagaacaaggtagtttttacctaccacagtgtctgtatcggagacagtgatctccatatgttacactaagggtgtaagtaattatcgggaacagtgtttcccataattttcttcatgcaatgacatcttcaaagcttgaagatcgttagtatctaacatgtatcccaactcctataattccctatcttttagttttagttgcagaaacattttgtggtcattaagcattgggtgggtaaattcaaccactgtaaaatgaaattactacaaaatttgaaatttagcttgggtttttgttacctttatggtttctccaggtcctctacttaatgagatagtagcatacatttataatgtttgctattgacaagtcattttaactttatcacattatttgcatgttacctcctataaacttagtgcggacaagttttaatccagaattgaccttttgacttaaagcagagggactttgtatagaaggtttgggggctgtggggaaggagagtcccctgaaggtctgacacgtctgcctacccattcgtggtgatcaattaaatgtaggtatgaataagttcgaagctccgtgagtgaaccatcattataaacgtgatgatcagctgtttgtcatagggcagttggaaacggcctcctagggaaaagttcatagggtctcttcaggttcttagtgtcacttacctagatttacagcctcacttgaatgtgtcactactcacagtctctttaatcttcagttttatctttaatctcctcttttatcttggactgacatttagcgtagctaagtgaaaaggtcatagctgagattcctggttcgggtgttacgcacacgtacttaaatgaaagcatgtggcatgttcatcgtataacacaatatgaatacagggcatgcattttgcagcagtgagtctcttcagaaaacccttttctacagttagggttgagttacttcctatcaagccagtacgtgctaacaggctcaatattcctgaatgaaatatcagactagtgacaagctcctggtcttgagatgtcttctcgttaaggagatgggccttttggaggtaaaggataaaatgaatgagttctgtcatgattcactattctagaacttgcatgacctttactgtgttagctctttgaatgttcttgaaattttagactttctttgtaaacaaatgatatgtccttatcattgtataaaagctgttatgtgcaacagtgtggagattccttgtctgatttaataaaatacttaaacactgaaaaaaaaaaa

SEQ ID NO: 369 - DNA, 4891 bp, Homo sapiens
acgcacagcccccctgggggccgggggcggggccaggctataaaccgccggttaggggccgccatcccctcagagcgtcgggatatcgggtggcggctcgggacggaggacgcgctagtgttcttctgtgtggcagttcagaatgatggatcaagctagatcagcattctctaacttggatttatgattggctacttgggctattgtaaaggggtagaaccaaaaactgagtgtgagagactggcaggaaccgagtctccagtgagggaggagccaggagaggacttccctgcagcacgtcgcttatattgggatgacctgaagagaaagttgtcggagaaactggacagcacagacttcaccggcaccatcaagctgctgaatgaaaattcatatgtccctcgtgaggctggatctcaaaaagatgaaaatcttgcgttgtatgttgaaaatcaatttcgtgaatttaaactcagcaaagtctggcgtgatcaacattttgttaagattcaggtcaaagacagcgctcaaaactcggtgatcatagttgataagaacggtagacttgtttacctggtggagaatcctgggggttatgtggcgtatagtaaggctgcaacagttactggtaaactggtccatgctaattttggtactaaaaaagattttgaggatttatacactcctgtgaatggatctatagtgattgtcagagcagggaaaatcacctttgcagaaaaggttgcaaatgctgaaagcttaaatgcaattggtgtgttgatatacatggaccagactaaatttcccattgttaacgcagaactttcattctttggacatgctcatctggggacaggtgacccttacacacctggattcccttccttcaatcacactcagtttccaccatctcggtcatcaggattgcctaatatacctgtccagacaatctccagagctgctgcagaaaagctgtttgggaatatggaaggagactgtccctctgactggaaaacagactctacatgtaggatggtaacctcagaaagcaagaatgtgaagctcactgtgagcaatgtgctgaaagagataaaaattcttaacatctttggagttattaaaggctttgtagaaccagatcactatgttgtagttggggcccagagagatgcatggggccctggagctgcaaaatccggtgtaggcacagctctcctattgaaacttgcccagatgttctcagatatggtcttaaaagatgggtttcagcccagcagaagcattatctttgccagttggagtgctggagactttggatcggttggtgccactgaatggctagagggatacctttcgtccctgcatttaaaggctttcacttatattaatctggataaagcggttcttggtaccagcaacttcaaggtttctgccagcccactgttgtatacgcttattgagaaaacaatgcaaaatgtgaagcatccggttactgggcaatttctatatcaggacagcaactgggccagcaaagttgagaaactcactttagacaatgctgctttccctttccttgcatattctggaatcccagcagtttctttctgtttttgcgaggacacagattatccttatttgggtaccaccatggacacctataaggaactgattgagaggattcctgagttgaacaaagtggcacgagcagctgcagaggtcgctggtcagttcgtgattaaactaacccatgatgttgaattgaacctggactatgagaggtacaacagccaactgctttcatttgtgagggatctgaaccaatacagagcagacataaaggaaatgggcctgagtttacagtggctgtattctgctcgtggagacttcttccgtgctacttccagactaacaacagatttcgggaatgctgagaaaacagacagatttgtcatgaagaaactcaatgatcgtgtcatgagagtggagtatcacttcctctctccctacgtatctccaaaagagtctcctttccgacatgtcttctggggctccggctctcacacgctgccagctttactggagaacttgaaactgcgtaaacaaaataacggtgcttttaatgaaacgctgttcagaaaccagttggctctagctacttggactattcagggagctgcaaatgccctctctggtgacgtttgggacattgacaatgagttttaaatgtgatacccatagcttccatgagaacagcagggtagtctggtttctagacttgtgctgatcgtgctaaattttcagtagggctacaaaacctgatgttaaaattccatcccatcatcttggtactactagatgtctttaggcagcagcttttaatacagggtagataacctgtacttcaagttaaagtgaataaccacttaaaaaatgtccatgatggaatattcccctatctctagaattttaagtgctttgtaatgggaactgcctctttcctgttgttgttaatgaaaatgtcagaaaccagttatgtgaatgatctctctgaatcctaagggctggtctctgctgaaggttgtaagtggtcgcttactttgagtgatcctccaacttcatttgatgctaaataggagataccaggttgaaagaccttctccaaatgagatctaagcctttccataaggaatgtagctggtttcctcattcctgaaagaaacagttaactttcagaagagatgggcttgttttcttgccaatgaggtctgaaatggaggtccttctgctggataaaatgaggttcaactgttgattgcaggaataaggccttaatatgttaacctcagtgtcatttatgaaaagaggggaccagaagccaaagacttagtatattttcttttcctctgtcccttcccccataagcctccatttagttctttgttatttttgtttcttccaaagcacattgaaagagaaccagtttcaggtgtttagttgcagactcagtttgtcagactttaaagaataatatgctgccaaattttggccaaagtgttaatcttaggggagagctttctgtccttttggcactgagatatttattgtttatttatcagtgacagagttcactataaatggtgtttttttaatagaatataattatcggaagcagtgccttccataattatgacagttatactgtcggttttttttaaataaaagcagcatctgctaataaaacccaacagatactggaagttttgcatttatggtcaacacttaagggttttagaaaacagccgtcagccaaatgtaattgaataaagttgaagctaagatttagagatgaattaaatttaattaggggttgctaagaagcgagcactgaccagataagaatgctggttttcctaaatgcagtgaattgtgaccaagttataaatcaatgtcacttaaaggctgtggtagtactcctgcaaaattttatagctcagtttatccaaggtgtaactctaattcccattttgcaaaatttccagtacctttgtcacaatcctaacacattatcgggagcagtgtcttccataatgtataaagaacaaggtagtttttacctaccacagtgtctgtatcggagacagtgatctccatatgttacactaagggtgtaagtaattatcgggaacagtgtttcccataattttcttcatgcaatgacatcttcaaagcttgaagatcgttagtatctaacatgtatcccaactcctataattccctatcttttagttttagttgcagaaacattttgtggtcattaagcattgggtgggtaaattcaaccactgtaaaatgaaattactacaaaatttgaaatttagcttgggtttttgttacctttatggtttctccaggtcctctacttaatgagatagtagcatacatttataatgtttgctattgacaagtcattttaactttatcacattatttgcatgttacctcctataaacttagtgcggacaagttttaatccagaattgaccttttgacttaaagcagagggactttgtatagaaggtttgggggctgtggggaaggagagtcccctgaaggtctgacacgtctgcctacccattcgtggtgatcaattaaatgtaggtatgaataagttcgaagctccgtgagtgaaccatcattataaacgtgatgatcagctgtttgtcatagggcagttggaaacggcctcctagggaaaagttcatagggtctcttcaggttcttagtgtcacttacctagatttacagcctcacttgaatgtgtcactactcacagtctctttaatcttcagttttatctttaatctcctcttttatcttggactgacatttagcgtagctaagtgaaaaggtcatagctgagattcctggttcgggtgttacgcacacgtacttaaatgaaagcatgtggcatgttcatcgtataacacaatatgaatacagggcatgcattttgcagcagtgagtctcttcagaaaacccttttctacagttagggttgagttacttcctatcaagccagtacgtgctaacaggctcaatattcctgaatgaaatatcagactagtgacaagctcctggtcttgagatgtcttctcgttaaggagatgggccttttggaggtaaaggataaaatgaatgagttctgtcatgattcactattctagaacttgcatgacctttactgtgttagctctttgaatgttcttgaaattttagactttctttgtaaacaaatgatatgtccttatcattgtataaaagctgttatgtgcaacagtgtggagattccttgtctgatttaataaaatacttaaacactgaaaaaaaaaaa

SEQ ID NO: 370 - DNA, 4695 bp, Homo sapiens
acgcacagcccccctgggggccgggggcggggccaggctataaaccgccggttaggggccgccatcccctcagagcgtcgggatatcgggtggcggctcgggacggaggacgcgctagtgttcttctgtgtggcagttcagaatgatggatcaagctagatcagcattctctaacttggctgctgaatgaaaattcatatgtccctcgtgaggctggatctcaaaaagatgaaaatcttgcgttgtatgttgaaaatcaatttcgtgaatttaaactcagcaaagtctggcgtgatcaacattttgttaagattcaggtcaaagacagcgctcaaaactcggtgatcatagttgataagaacggtagacttgtttacctggtggagaatcctgggggttatgtggcgtatagtaaggctgcaacagttactggtaaactggtccatgctaattttggtactaaaaaagattttgaggatttatacactcctgtgaatggatctatagtgattgtcagagcagggaaaatcacctttgcagaaaaggttgcaaatgctgaaagcttaaatgcaattggtgtgttgatatacatggaccagactaaatttcccattgttaacgcagaactttcattctttggacatgctcatctggggacaggtgacccttacacacctggattcccttccttcaatcacactcagtttccaccatctcggtcatcaggattgcctaatatacctgtccagacaatctccagagctgctgcagaaaagctgtttgggaatatggaaggagactgtccctctgactggaaaacagactctacatgtaggatggtaacctcagaaagcaagaatgtgaagctcactgtgagcaatgtgctgaaagagataaaaattcttaacatctttggagttattaaaggctttgtagaaccagatcactatgttgtagttggggcccagagagatgcatggggccctggagctgcaaaatccggtgtaggcacagctctcctattgaaacttgcccagatgttctcagatatggtcttaaaagatgggtttcagcccagcagaagcattatctttgccagttggagtgctggagactttggatcggttggtgccactgaatggctagagggatacctttcgtccctgcatttaaaggctttcacttatattaatctggataaagcggttcttggtaccagcaacttcaaggtttctgccagcccactgttgtatacgcttattgagaaaacaatgcaaaatgtgaagcatccggttactgggcaatttctatatcaggacagcaactgggccagcaaagttgagaaactcactttagacaatgctgctttccctttccttgcatattctggaatcccagcagtttctttctgtttttgcgaggacacagattatccttatttgggtaccaccatggacacctataaggaactgattgagaggattcctgagttgaacaaagtggcacgagcagctgcagaggtcgctggtcagttcgtgattaaactaacccatgatgttgaattgaacctggactatgagaggtacaacagccaactgctttcatttgtgagggatctgaaccaatacagagcagacataaaggaaatgggcctgagtttacagtggctgtattctgctcgtggagacttcttccgtgctacttccagactaacaacagatttcgggaatgctgagaaaacagacagatttgtcatgaagaaactcaatgatcgtgtcatgagagtggagtatcacttcctctctccctacgtatctccaaaagagtctcctttccgacatgtcttctggggctccggctctcacacgctgccagctttactggagaacttgaaactgcgtaaacaaaataacggtgcttttaatgaaacgctgttcagaaaccagttggctctagctacttggactattcagggagctgcaaatgccctctctggtgacgtttgggacattgacaatgagttttaaatgtgatacccatagcttccatgagaacagcagggtagtctggtttctagacttgtgctgatcgtgctaaattttcagtagggctacaaaacctgatgttaaaattccatcccatcatcttggtactactagatgtctttaggcagcagcttttaatacagggtagataacctgtacttcaagttaaagtgaataaccacttaaaaaatgtccatgatggaatattcccctatctctagaattttaagtgctttgtaatgggaactgcctctttcctgttgttgttaatgaaaatgtcagaaaccagttatgtgaatgatctctctgaatcctaagggctggtctctgctgaaggttgtaagtggtcgcttactttgagtgatcctccaacttcatttgatgctaaataggagataccaggttgaaagaccttctccaaatgagatctaagcctttccataaggaatgtagctggtttcctcattcctgaaagaaacagttaactttcagaagagatgggcttgttttcttgccaatgaggtctgaaatggaggtccttctgctggataaaatgaggttcaactgttgattgcaggaataaggccttaatatgttaacctcagtgtcatttatgaaaagaggggaccagaagccaaagacttagtatattttcttttcctctgtcccttcccccataagcctccatttagttctttgttatttttgtttcttccaaagcacattgaaagagaaccagtttcaggtgtttagttgcagactcagtttgtcagactttaaagaataatatgctgccaaattttggccaaagtgttaatcttaggggagagctttctgtccttttggcactgagatatttattgtttatttatcagtgacagagttcactataaatggtgtttttttaatagaatataattatcggaagcagtgccttccataattatgacagttatactgtcggttttttttaaataaaagcagcatctgctaataaaacccaacagatactggaagttttgcatttatggtcaacacttaagggttttagaaaacagccgtcagccaaatgtaattgaataaagttgaagctaagatttagagatgaattaaatttaattaggggttgctaagaagcgagcactgaccagataagaatgctggttttcctaaatgcagtgaattgtgaccaagttataaatcaatgtcacttaaaggctgtggtagtactcctgcaaaattttatagctcagtttatccaaggtgtaactctaattcccattttgcaaaatttccagtacctttgtcacaatcctaacacattatcgggagcagtgtcttccataatgtataaagaacaaggtagtttttacctaccacagtgtctgtatcggagacagtgatctccatatgttacactaagggtgtaagtaattatcgggaacagtgtttcccataattttcttcatgcaatgacatcttcaaagcttgaagatcgttagtatctaacatgtatcccaactcctataattccctatcttttagttttagttgcagaaacattttgtggtcattaagcattgggtgggtaaattcaaccactgtaaaatgaaattactacaaaatttgaaatttagcttgggtttttgttacctttatggtttctccaggtcctctacttaatgagatagtagcatacatttataatgtttgctattgacaagtcattttaactttatcacattatttgcatgttacctcctataaacttagtgcggacaagttttaatccagaattgaccttttgacttaaagcagagggactttgtatagaaggtttgggggctgtggggaaggagagtcccctgaaggtctgacacgtctgcctacccattcgtggtgatcaattaaatgtaggtatgaataagttcgaagctccgtgagtgaaccatcattataaacgtgatgatcagctgtttgtcatagggcagttggaaacggcctcctagggaaaagttcatagggtctcttcaggttcttagtgtcacttacctagatttacagcctcacttgaatgtgtcactactcacagtctctttaatcttcagttttatctttaatctcctcttttatcttggactgacatttagcgtagctaagtgaaaaggtcatagctgagattcctggttcgggtgttacgcacacgtacttaaatgaaagcatgtggcatgttcatcgtataacacaatatgaatacagggcatgcattttgcagcagtgagtctcttcagaaaacccttttctacagttagggttgagttacttcctatcaagccagtacgtgctaacaggctcaatattcctgaatgaaatatcagactagtgacaagctcctggtcttgagatgtcttctcgttaaggagatgggccttttggaggtaaaggataaaatgaatgagttctgtcatgattcactattctagaacttgcatgacctttactgtgttagctctttgaatgttcttgaaattttagactttctttgtaaacaaatgatatgtccttatcattgtataaaagctgttatgtgcaacagtgtggagattccttgtctgatttaataaaatacttaaacactgaaaaaaaaaaa

SEQ ID NO: 371 - DNA, 2776 bp, Homo sapiens
agccgtggggagcgccgcaggtggggacgagccgggcggcacctgccccgggaccagagcggacgctccctccccgctgcgccgagggaggggaaacccgaggggttccttggagaaggtggtgcgtcctggggcggcagctgaggaagaaagacgcagtgccccgaagcccctgagctgaaaagggccagaaagggggcggcatggcatggcccaaactgcccgcaccttggctgctgctctgcacctggctcccagcagggtgcctgtccttgcttgtgacggtccagcacacagaacgctatgtcaccctgtttgcctctatcatcctcaaatgtgactacaccacctctgcccagctccaggacgtggtggtgacatggcgcttcaagtccttctgcaaggaccctatctttgactactactcagcgtcataccaggcagctttatccctgggccaggacccatccaatgactgcaacgacaaccagcgggaagttcgcatagtggcccagcggcgggggcagaatgagcccgtgctgggggtagattaccggcagcgcaagatcaccatccagaaccgagcagatctcgtgataaatgaagtgatgtggtgggaccatggagtgtattactgcaccattgaggctccaggggacacatcaggagaccccgataaggaagtaaagctcatcgtcctacactggctgacagtgatcttcatcatcctgggagccctcctcctcctgctgctgattggagtgtgctggtgccagtgctgtcctcagtattgctgctgctatatccgctgtccctgctgtcctgcccactgctgctgtcctgaggaagatttgtccctgccgtccagcctcccgcagatgccaatgacccagaccaccaatcagcctcccatcgccaatggtgtcctggagtatttggagaaagaactgcggaacctcaacctggcccagcctctgccccctgacctcaaaggcagatttggccatccctgcagcatgctgtcctccctgggctctgaggtcgtggaacgcagaatcatccacctgcccccactgatcagagacctgtcatcctcaaggaggaccagtgactccctgcaccagcagtggctcaccccaattccctccaggccctgggatctgagggaggggagaagccaccaccattaccctgatttccaccaggagctccaggaccgggggccaaagtcttgggcattggaaagaagggagttggacccatcgtggagtggaaggcaccgtagctctaggctgaatgggtcacccatacactggtcagacagggacagcctaagcgatgtcccctcatccagtgaggcacgctggcggccgagccaccctcctttcaggagccgctgtcaggagaggccccgcaggcccagcccccgggagagcactcagaggcacgggagacgacgcaggcaccgcagctactctcctcccttgccctccggcctcagttcctggagctctgaagaggacaaggagaggcagccccagagctggcgggcccaccgccgcggctcgcactccccacactggcccgaggagaagccgcctagctaccgctcacttgatatcactccaggcaagaatagcaggaaaaaagggagtgtggagaggcgctcggagaaagacagctctcatagtggaaggagtgtggtcatttagtcaccaagcacagcacaacttctgtggctacttctcggctcctgtgtgtcatcagcatcacctaggtttccagctgacttgggaactgcaagtctgagtctaacagtttttggcttagattctgagaatcaaatagaagaattttaaatacaagagtttgagattgggtatagtggctcacacctgtaatcacagcactttgggaggctaagaatcacttgagactaggagttcaagatcagcctgggaaacatagtgagaccccgtctctacaaaaaatataaaaattagttaggtgtggtggcatgcacttgtagtcccagctactcaagaggctgaggcagaaggatcccttgagcccaggagtgcaaggctgcaatgagccaggatcccatgatcacacatctgtattccagcctgggcaatagagcaagtccccattactaaaaaacccaaaaggccaaaaaacaaaaaagttagagttcgaggaattaccaactgtagttttagccttggttcatgctctcttgcatatttatataatctctgacttgtaatggaccctgactggaatgtgatccctcaggaacttagtagcctgagtctttcagtagactacactgcccagaaccctggccattctcaaaatgagaacttgggaatgtttaagaagaaatcaaacatgtttcaggaaaaggaaatctatggagtattatagggacattcccatgggaatgtatcttcctccatggcatgtcttgagggtcctttcttgttaggagtttatcctgccagcccataaatggactatttattgtaagtgtagaaaatcacagagaagcagttttgcaccagccttattcctgtgccttgttttcctcttgctctttttttacctgtatatctaatttatattttcatatatattgtgtattgattgaagtcactttaaatccttcttgggaatgacacagtatataaataaggaagaaagaaaacatgccaagctgagcatgctgctccaaataaatatctgctttcctaaaaaaaaaaaaaaaaaaaaa

SEQ ID NO: 372 - DNA, 2908 bp, Homo sapiens
agccgtggggagcgccgcaggtggggacgagccgggcggcacctgccccgggaccagagcggacgctccctccccgctgcgccgagggaggggaaacccgaggggttccttggagaaggtggtgcgtcctggggcggcagctgaggaagaaagacgcagtgccccgaagcccctgagctgaaaagggccagaaagggggcggcatggcatggcccaaactgcccgcaccttggctgctgctctgcacctggctcccagcagggtgcctgtccttgcttgtgacggtccagcacacagaacgctatgtcaccctgtttgcctctatcatcctcaaatgtgactacaccacctctgcccagctccaggacgtggtggtgacatggcgcttcaagtccttctgcaaggaccctatctttgactactactcagcgtcataccaggcagctttatccctgggccaggacccatccaatgactgcaacgacaaccagcgggaagttcgcatagtggcccagcggcgggggcagaatgagcccgtgctgggggtagattaccggcagcgcaagatcaccatccagaaccgagcagatctcgtgataaatgaagtgatgtggtgggaccatggagtgtattactgcaccattgaggctccaggggacacatcaggagaccccgataaggaagtaaagctcatcgtcctacactggctgacagtgatcttcatcatcctgggagccctcctcctcctgctgctgattggagtgtgctggtgccagtgctgtcctcagtattgctgctgctatatccgctgtccctgctgtcctgcccactgctgctgtcctgaggaagccctggcccgccaccgctacatgaagcaggcccaggccctaggtcctcagatgatgggaaaacccctgtactggggggcggacaggagctcccaggtttcatcttatccaatgcacccgctgctgcagcgagatttgtccctgccgtccagcctcccgcagatgccaatgacccagaccaccaatcagcctcccatcgccaatggtgtcctggagtatttggagaaagaactgcggaacctcaacctggcccagcctctgccccctgacctcaaaggcagatttggccatccctgcagcatgctgtcctccctgggctctgaggtcgtggaacgcagaatcatccacctgcccccactgatcagagacctgtcatcctcaaggaggaccagtgactccctgcaccagcagtggctcaccccaattccctccaggccctgggatctgagggaggggagaagccaccaccattaccctgatttccaccaggagctccaggaccgggggccaaagtcttgggcattggaaagaagggagttggacccatcgtggagtggaaggcaccgtagctctaggctgaatgggtcacccatacactggtcagacagggacagcctaagcgatgtcccctcatccagtgaggcacgctggcggccgagccaccctcctttcaggagccgctgtcaggagaggccccgcaggcccagcccccgggagagcactcagaggcacgggagacgacgcaggcaccgcagctactctcctcccttgccctccggcctcagttcctggagctctgaagaggacaaggagaggcagccccagagctggcgggcccaccgccgcggctcgcactccccacactggcccgaggagaagccgcctagctaccgctcacttgatatcactccaggcaagaatagcaggaaaaaagggagtgtggagaggcgctcggagaaagacagctctcatagtggaaggagtgtggtcatttagtcaccaagcacagcacaacttctgtggctacttctcggctcctgtgtgtcatcagcatcacctaggtttccagctgacttgggaactgcaagtctgagtctaacagtttttggcttagattctgagaatcaaatagaagaattttaaatacaagagtttgagattgggtatagtggctcacacctgtaatcacagcactttgggaggctaagaatcacttgagactaggagttcaagatcagcctgggaaacatagtgagaccccgtctctacaaaaaatataaaaattagttaggtgtggtggcatgcacttgtagtcccagctactcaagaggctgaggcagaaggatcccttgagcccaggagtgcaaggctgcaatgagccaggatcccatgatcacacatctgtattccagcctgggcaatagagcaagtccccattactaaaaaacccaaaaggccaaaaaacaaaaaagttagagttcgaggaattaccaactgtagttttagccttggttcatgctctcttgcatatttatataatctctgacttgtaatggaccctgactggaatgtgatccctcaggaacttagtagcctgagtctttcagtagactacactgcccagaaccctggccattctcaaaatgagaacttgggaatgtttaagaagaaatcaaacatgtttcaggaaaaggaaatctatggagtattatagggacattcccatgggaatgtatcttcctccatggcatgtcttgagggtcctttcttgttaggagtttatcctgccagcccataaatggactatttattgtaagtgtagaaaatcacagagaagcagttttgcaccagccttattcctgtgccttgttttcctcttgctctttttttacctgtatatctaatttatattttcatatatattgtgtattgattgaagtcactttaaatccttcttgggaatgacacagtatataaataaggaagaaagaaaacatgccaagctgagcatgctgctccaaataaatatctgctttcctaaaaaaaaaaaaaaaaaaaaa

SEQ ID NO: 373 - DNA, 2641 bp, Homo sapiens
agccgtggggagcgccgcaggtggggacgagccgggcggcacctgccccgggaccagagcggacgctccctccccgctgcgccgagggaggggaaacccgaggggttccttggagaaggtggtgcgtcctggggcggcagctgaggaagaaagacgcagtgccccgaagcccctgagctgaaaagggccagaaagggggcggcatggcatggcccaaactgcccgcaccttggctgctgctctgcacctggctcccagcagggtgcctgtccttgcttgtgacggtccagcacacagaacgctatgtcaccctgtttgcctctatcatcctcaaatgtgactacaccacctctgcccagctccaggacgtggtggtgacatggcgcttcaagtccttctgcaaggaccctatctttgactactactcagcgtcataccaggcagctttatccctgggccaggacccatccaatgactgcaacgacaaccagcgggaagttcgcatagtggcccagcggcgggggcagaatgagcccgtgctgggggtagattaccggcagcgcaagatcaccatccagaaccccctggcccgccaccgctacatgaagcaggcccaggccctaggtcctcagatgatgggaaaacccctgtactggggggcggacaggagctcccaggtttcatcttatccaatgcacccgctgctgcagcgagatttgtccctgccgtccagcctcccgcagatgccaatgacccagaccaccaatcagcctcccatcgccaatggtgtcctggagtatttggagaaagaactgcggaacctcaacctggcccagcctctgccccctgacctcaaaggcagatttggccatccctgcagcatgctgtcctccctgggctctgaggtcgtggaacgcagaatcatccacctgcccccactgatcagagacctgtcatcctcaaggaggaccagtgactccctgcaccagcagtggctcaccccaattccctccaggccctgggatctgagggaggggagaagccaccaccattaccctgatttccaccaggagctccaggaccgggggccaaagtcttgggcattggaaagaagggagttggacccatcgtggagtggaaggcaccgtagctctaggctgaatgggtcacccatacactggtcagacagggacagcctaagcgatgtcccctcatccagtgaggcacgctggcggccgagccaccctcctttcaggagccgctgtcaggagaggccccgcaggcccagcccccgggagagcactcagaggcacgggagacgacgcaggcaccgcagctactctcctcccttgccctccggcctcagttcctggagctctgaagaggacaaggagaggcagccccagagctggcgggcccaccgccgcggctcgcactccccacactggcccgaggagaagccgcctagctaccgctcacttgatatcactccaggcaagaatagcaggaaaaaagggagtgtggagaggcgctcggagaaagacagctctcatagtggaaggagtgtggtcatttagtcaccaagcacagcacaacttctgtggctacttctcggctcctgtgtgtcatcagcatcacctaggtttccagctgacttgggaactgcaagtctgagtctaacagtttttggcttagattctgagaatcaaatagaagaattttaaatacaagagtttgagattgggtatagtggctcacacctgtaatcacagcactttgggaggctaagaatcacttgagactaggagttcaagatcagcctgggaaacatagtgagaccccgtctctacaaaaaatataaaaattagttaggtgtggtggcatgcacttgtagtcccagctactcaagaggctgaggcagaaggatcccttgagcccaggagtgcaaggctgcaatgagccaggatcccatgatcacacatctgtattccagcctgggcaatagagcaagtccccattactaaaaaacccaaaaggccaaaaaacaaaaaagttagagttcgaggaattaccaactgtagttttagccttggttcatgctctcttgcatatttatataatctctgacttgtaatggaccctgactggaatgtgatccctcaggaacttagtagcctgagtctttcagtagactacactgcccagaaccctggccattctcaaaatgagaacttgggaatgtttaagaagaaatcaaacatgtttcaggaaaaggaaatctatggagtattatagggacattcccatgggaatgtatcttcctccatggcatgtcttgagggtcctttcttgttaggagtttatcctgccagcccataaatggactatttattgtaagtgtagaaaatcacagagaagcagttttgcaccagccttattcctgtgccttgttttcctcttgctctttttttacctgtatatctaatttatattttcatatatattgtgtattgattgaagtcactttaaatccttcttgggaatgacacagtatataaataaggaagaaagaaaacatgccaagctgagcatgctgctccaaataaatatctgctttcctaaaaaaaaaaaaaaaaaaaaa

SEQ ID NO: 374 - DNA, 2827 bp, Homo sapiens
gtggggacgagccgggcggcacctgccccgggaccagagcggacgctccctccccgctgcgccgagggaggggaaacccgaggggttccttggagaaggtggtgcgtcctggggcggcagctgaggaagaaagacgcagtgccccgaagcccctgagctgaaaagggccagaaagggggcggcatggcatggcccaaactgcccgcaccttggctgctgctctgcacctggctcccagcagggtgcctgtccttgcttgtgacggtccagcacacagaacgctatgtcaccctgtttgcctctatcatcctcaaatgtgactacaccacctctgcccagctccaggacgtggtggtgacatggcgcttcaagtccttctgcaaggaccctatctttgactactactcagcgtcataccaggcagctttatccctgggccaggacccatccaatgactgcaacgacaaccagcgggaagttcgcatagtggcccagcggcgggggcagaatgagcccgtgctgggggtagattaccggcagcgcaagatcaccatccagaaccgagcagatctcgtgataaatgaagtgatgtggtgggaccatggagtgtattactgcaccattgaggctccaggggacacatcaggagaccccgataaggaagtaaagctcatcgtcctacactggctgacagtgatcttcatcatcctgggagccctcctcctcctgctgctgattggagtgtgctggtgccagtgctgtcctcagtattgctgctgctatatccgctgtccctgctgtcctgcccactgctgctgtcctgaggaagccctggcccgccaccgctacatgaagcaggcccaggccctaggtcctcagatgatgggaaaacccctgtactggggggcggacaggagctcccaggtttcatcttatccaatgcacccgctgctgcagcgagatttgtccctgccgtccagcctcccgcagatgccaatgacccagaccaccaatcagcctcccatcgccaatggtgtcctggagtatttggagaaagaactgcggaacctcaacctggcccagcctctgccccctgacctcaaaggcagatttggccatccctgcagcatgctgtcctccctgggctctgaggtcgtggaacgcagaatcatccacctgcccccactgatcagagacctgtcatcctcaaggaggaccagtgactccctgcaccagcagtggctcaccccaattccctccaggccctgggatctgagggaggggagaagccaccaccattaccctgatttccaccaggagctccaggaccgggggccaaagtcttgggcattggaaagaagggagttggacccatcgtggagtggaaggcaccgtagctctaggctgaatgggtcacccatacactggtcagacagggacagcctaagcgatgtcccctcatccagtgaggcacgctggcggccgagccaccctcctttcaggagccgctgtcaggagaggccccgcaggcccagcccccgggagagcactcagaggcacgggagacgacgcaggcaccgcagctactctcctcccttgccctccggcctcagttcctggagctctgaagaggacaaggagaggcagccccagagctggcgggcccaccgccgcggctcgcactccccacactggcccgaggagaagccgcctagctaccgctcacttgatatcactccaggagaaagacagctctcatagtggaaggagtgtggtcatttagtcaccaagcacagcacaacttctgtggctacttctcggctcctgtgtgtcatcagcatcacctaggtttccagctgacttgggaactgcaagtctgagtctaacagtttttggcttagattctgagaatcaaatagaagaattttaaatacaagagtttgagattgggtatagtggctcacacctgtaatcacagcactttgggaggctaagaatcacttgagactaggagttcaagatcagcctgggaaacatagtgagaccccgtctctacaaaaaatataaaaattagttaggtgtggtggcatgcacttgtagtcccagctactcaagaggctgaggcagaaggatcccttgagcccaggagtgcaaggctgcaatgagccaggatcccatgatcacacatctgtattccagcctgggcaatagagcaagtccccattactaaaaaacccaaaaggccaaaaaacaaaaaagttagagttcgaggaattaccaactgtagttttagccttggttcatgctctcttgcatatttatataatctctgacttgtaatggaccctgactggaatgtgatccctcaggaacttagtagcctgagtctttcagtagactacactgcccagaaccctggccattctcaaaatgagaacttgggaatgtttaagaagaaatcaaacatgtttcaggaaaaggaaatctatggagtattatagggacattcccatgggaatgtatcttcctccatggcatgtcttgagggtcctttcttgttaggagtttatcctgccagcccataaatggactatttattgtaagtgtagaaaatcacagagaagcagttttgcaccagccttattcctgtgccttgttttcctcttgctctttttttacctgtatatctaatttatattttcatatatattgtgtattgattgaagtcactttaaatccttcttgggaatgacacagtatataaataaggaagaaagaaaacatgccaagctgagcatgctgctccaaataaatatctgctttccta

SEQ ID NO: 375 - DNA, 3168 bp, Homo sapiens
ccctgtctatggggtagacagaagtagaaaccctgttcagctgaggtcccaaggcacgaatcataattagcccagggaagagagtggagcagtggcaggtgatgtggaagagtgctccaggctgaaagagctgcacctggagaagagaatggtcttagcatgggaaggactgaagaaagctcagaatggctgacccctcgatgggacgtgaagggacacggggcagacgagaagggcagtaggctgacctaacgggtttcgtaggcctggttagggagcttgaactttatccttaggaaacgggaaaccattttaagaagagacatgatgtgaggaaaaaaatatattagcagtgtcacttctgtacaaatgtggctttattttgatacaatccttatattgttgttggatatgtcatcactgttaatgcactgtaaattcctgggagttttcctcactcctttcttcctatgtccctctgaggctgctgagtgcgttctcaccccaccccacccatagcctgcccaggtgagtaagaacccagactctgtctgtgagctcctagccaggtcaggcaggatggcaggcaatatcttttgcccatttgcattgtttttcttacccatgagcagagtaggtcaccttcagcattttctcctgctcttggctttagggtgcctgtccttgcttgtgacggtccagcacacagaacgctatgtcaccctgtttgcctctatcatcctcaaatgtgactacaccacctctgcccagctccaggacgtggtggtgacatggcgcttcaagtccttctgcaaggaccctatctttgactactactcagcgtcataccaggcagctttatccctgggccaggacccatccaatgactgcaacgacaaccagcgggaagttcgcatagtggcccagcggcgggggcagaatgagcccgtgctgggggtagattaccggcagcgcaagatcaccatccagaaccgagcagatctcgtgataaatgaagtgatgtggtgggaccatggagtgtattactgcaccattgaggctccaggggacacatcaggagaccccgataaggaagtaaagctcatcgtcctacactggctgacagtgatcttcatcatcctgggagccctcctcctcctgctgctgattggagtgtgctggtgccagtgctgtcctcagtattgctgctgctatatccgctgtccctgctgtcctgcccactgctgctgtcctgaggaagatttgtccctgccgtccagcctcccgcagatgccaatgacccagaccaccaatcagcctcccatcgccaatggtgtcctggagtatttggagaaagaactgcggaacctcaacctggcccagcctctgccccctgacctcaaaggcagatttggccatccctgcagcatgctgtcctccctgggctctgaggtcgtggaacgcagaatcatccacctgcccccactgatcagagacctgtcatcctcaaggaggaccagtgactccctgcaccagcagtggctcaccccaattccctccaggccctgggatctgagggaggggagaagccaccaccattaccctgatttccaccaggagctccaggaccgggggccaaagtcttgggcattggaaagaagggagttggacccatcgtggagtggaaggcaccgtagctctaggctgaatgggtcacccatacactggtcagacagggacagcctaagcgatgtcccctcatccagtgaggcacgctggcggccgagccaccctcctttcaggagccgctgtcaggagaggccccgcaggcccagcccccgggagagcactcagaggcacgggagacgacgcaggcaccgcagctactctcctcccttgccctccggcctcagttcctggagctctgaagaggacaaggagaggcagccccagagctggcgggcccaccgccgcggctcgcactccccacactggcccgaggagaagccgcctagctaccgctcacttgatatcactccaggcaagaatagcaggaaaaaagggagtgtggagaggcgctcggagaaagacagctctcatagtggaaggagtgtggtcatttagtcaccaagcacagcacaacttctgtggctacttctcggctcctgtgtgtcatcagcatcacctaggtttccagctgacttgggaactgcaagtctgagtctaacagtttttggcttagattctgagaatcaaatagaagaattttaaatacaagagtttgagattgggtatagtggctcacacctgtaatcacagcactttgggaggctaagaatcacttgagactaggagttcaagatcagcctgggaaacatagtgagaccccgtctctacaaaaaatataaaaattagttaggtgtggtggcatgcacttgtagtcccagctactcaagaggctgaggcagaaggatcccttgagcccaggagtgcaaggctgcaatgagccaggatcccatgatcacacatctgtattccagcctgggcaatagagcaagtccccattactaaaaaacccaaaaggccaaaaaacaaaaaagttagagttcgaggaattaccaactgtagttttagccttggttcatgctctcttgcatatttatataatctctgacttgtaatggaccctgactggaatgtgatccctcaggaacttagtagcctgagtctttcagtagactacactgcccagaaccctggccattctcaaaatgagaacttgggaatgtttaagaagaaatcaaacatgtttcaggaaaaggaaatctatggagtattatagggacattcccatgggaatgtatcttcctccatggcatgtcttgagggtcctttcttgttaggagtttatcctgccagcccataaatggactatttattgtaagtgtagaaaatcacagagaagcagttttgcaccagccttattcctgtgccttgttttcctcttgctctttttttacctgtatatctaatttatattttcatatatattgtgtattgattgaagtcactttaaatccttcttgggaatgacacagtatataaataaggaagaaagaaaacatgccaagctgagcatgctgctccaaataaatatctgctttccta

SEQ ID NO: 376 - DNA, 2630 bp, Homo sapiens
cacctccgcctcctgagtcactgggattacaggcatgagccattgacctcagctctgtttaacctttaaaatggaggaaggaagaactctgggtctggctggcctgactccagattatttccaccgacagcagagggtgcctgtccttgcttgtgacggtccagcacacagaacgctatgtcaccctgtttgcctctatcatcctcaaatgtgactacaccacctctgcccagctccaggacgtggtggtgacatggcgcttcaagtccttctgcaaggaccctatctttgactactactcagcgtcataccaggcagctttatccctgggccaggacccatccaatgactgcaacgacaaccagcgggaagttcgcatagtggcccagcggcgggggcagaatgagcccgtgctgggggtagattaccggcagcgcaagatcaccatccagaaccgagcagatctcgtgataaatgaagtgatgtggtgggaccatggagtgtattactgcaccattgaggctccaggggacacatcaggagaccccgataaggaagtaaagctcatcgtcctacactggctgacagtgatcttcatcatcctgggagccctcctcctcctgctgctgattggagtgtgctggtgccagtgctgtcctcagtattgctgctgctatatccgctgtccctgctgtcctgcccactgctgctgtcctgaggaagatttgtccctgccgtccagcctcccgcagatgccaatgacccagaccaccaatcagcctcccatcgccaatggtgtcctggagtatttggagaaagaactgcggaacctcaacctggcccagcctctgccccctgacctcaaaggcagatttggccatccctgcagcatgctgtcctccctgggctctgaggtcgtggaacgcagaatcatccacctgcccccactgatcagagacctgtcatcctcaaggaggaccagtgactccctgcaccagcagtggctcaccccaattccctccaggccctgggatctgagggaggggagaagccaccaccattaccctgatttccaccaggagctccaggaccgggggccaaagtcttgggcattggaaagaagggagttggacccatcgtggagtggaaggcaccgtagctctaggctgaatgggtcacccatacactggtcagacagggacagcctaagcgatgtcccctcatccagtgaggcacgctggcggccgagccaccctcctttcaggagccgctgtcaggagaggccccgcaggcccagcccccgggagagcactcagaggcacgggagacgacgcaggcaccgcagctactctcctcccttgccctccggcctcagttcctggagctctgaagaggacaaggagaggcagccccagagctggcgggcccaccgccgcggctcgcactccccacactggcccgaggagaagccgcctagctaccgctcacttgatatcactccaggcaagaatagcaggaaaaaagggagtgtggagaggcgctcggagaaagacagctctcatagtggaaggagtgtggtcatttagtcaccaagcacagcacaacttctgtggctacttctcggctcctgtgtgtcatcagcatcacctaggtttccagctgacttgggaactgcaagtctgagtctaacagtttttggcttagattctgagaatcaaatagaagaattttaaatacaagagtttgagattgggtatagtggctcacacctgtaatcacagcactttgggaggctaagaatcacttgagactaggagttcaagatcagcctgggaaacatagtgagaccccgtctctacaaaaaatataaaaattagttaggtgtggtggcatgcacttgtagtcccagctactcaagaggctgaggcagaaggatcccttgagcccaggagtgcaaggctgcaatgagccaggatcccatgatcacacatctgtattccagcctgggcaatagagcaagtccccattactaaaaaacccaaaaggccaaaaaacaaaaaagttagagttcgaggaattaccaactgtagttttagccttggttcatgctctcttgcatatttatataatctctgacttgtaatggaccctgactggaatgtgatccctcaggaacttagtagcctgagtctttcagtagactacactgcccagaaccctggccattctcaaaatgagaacttgggaatgtttaagaagaaatcaaacatgtttcaggaaaaggaaatctatggagtattatagggacattcccatgggaatgtatcttcctccatggcatgtcttgagggtcctttcttgttaggagtttatcctgccagcccataaatggactatttattgtaagtgtagaaaatcacagagaagcagttttgcaccagccttattcctgtgccttgttttcctcttgctctttttttacctgtatatctaatttatattttcatatatattgtgtattgattgaagtcactttaaatccttcttgggaatgacacagtatataaataaggaagaaagaaaacatgccaagctgagcatgctgctccaaataaatatctgctttccta

SEQ ID NO: 377 - DNA, 2908 bp, Homo sapiens; identical to SEQ ID NO: 372

SEQ ID NO: 378 - protein, 546 aa, Homo sapiens
MAWPKLPAPWLLLCTWLPAGCLSLLVTVQHTERYVTLFASIILKCDYTTSAQLQDVVVTWRFKSFCKDPIFDYYSASYQAALSLGQDPSNDCNDNQREVRIVAQRRGQNEPVLGVDYRQRKITIQNRADLVINEVMWWDHGVYYCTIEAPGDTSGDPDKEVKLIVLHWLTVIFIILGALLLLLLIGVCWCQCCPQYCCCYIRCPCCPAHCCCPEEALARHRYMKQAQALGPQMMGKPLYWGADRSSQVSSYPMHPLLQRDLSLPSSLPQMPMTQTTNQPPIANGVLEYLEKELRNLNLAQPLPPDLKGRFGHPCSMLSSLGSEVVERRIIHLPPLIRDLSSSRRTSDSLHQQWLTPIPSRPWDLREGRSHHHYPDFHQELQDRGPKSWALERRELDPSWSGRHRSSRLNGSPIHWSDRDSLSDVPSSSEARWRPSHPPFRSRCQERPRRPSPRESTQRHGRRRRHRSYSPPLPSGLSSWSSEEDKERQPQSWRAHRRGSHSPHWPEEKPPSYRSLDITPGKNSRKKGSVERRSEKDSSHSGRSVVI

SEQ ID NO: 379 - DNA, 2641 bp, Homo sapiens; identical to SEQ ID NO: 373

SEQ ID NO: 380 - protein, 457 aa, Homo sapiens
MAWPKLPAPWLLLCTWLPAGCLSLLVTVQHTERYVTLFASIILKCDYTTSAQLQDVVVTWRFKSFCKDPIFDYYSASYQAALSLGQDPSNDCNDNQREVRIVAQRRGQNEPVLGVDYRQRKITIQNPLARHRYMKQAQALGPQMMGKPLYWGADRSSQVSSYPMHPLLQRDLSLPSSLPQMPMTQTTNQPPIANGVLEYLEKELRNLNLAQPLPPDLKGRFGHPCSMLSSLGSEVVERRIIHLPPLIRDLSSSRRTSDSLHQQWLTPIPSRPWDLREGRSHHHYPDFHQELQDRGPKSWALERRELDPSWSGRHRSSRLNGSPIHWSDRDSLSDVPSSSEARWRPSHPPFRSRCQERPRRPSPRESTQRHGRRRRHRSYSPPLPSGLSSWSSEEDKERQPQSWRAHRRGSHSPHWPEEKPPSYRSLDITPGKNSRKKGSVERRSEKDSSHSGRSVVI

SEQ ID NO: 381 - DNA, 2776 bp, Homo sapiens; identical to SEQ ID NO: 371

SEQ ID NO: 382 - protein, 502 aa, Homo sapiens
MAWPKLPAPWLLLCTWLPAGCLSLLVTVQHTERYVTLFASIILKCDYTTSAQLQDVVVTWRFKSFCKDPIFDYYSASYQAALSLGQDPSNDCNDNQREVRIVAQRRGQNEPVLGVDYRQRKITIQNRADLVINEVMWWDHGVYYCTIEAPGDTSGDPDKEVKLIVLHWLTVIFIILGALLLLLLIGVCWCQCCPQYCCCYIRCPCCPAHCCCPEEDLSLPSSLPQMPMTQTTNQPPIANGVLEYLEKELRNLNLAQPLPPDLKGRFGHPCSMLSSLGSEVVERRIIHLPPLIRDLSSSRRTSDSLHQQWLTPIPSRPWDLREGRSHHHYPDFHQELQDRGPKSWALERRELDPSWSGRHRSSRLNGSPIHWSDRDSLSDVPSSSEARWRPSHPPFRSRCQERPRRPSPRESTQRHGRRRRHRSYSPPLPSGLSSWSSEEDKERQPQSWRAHRRGSHSPHWPEEKPPSYRSLDITPGKNSRKKGSVERRSEKDSSHSGRSVVI

SEQ ID NO: 383 - DNA, 3060 bp, Homo sapiens
gccgggtttgggggttgggacctccggctgcaggtccgcctgggccagacgcgcgagcgcaagcagcgggttagtggtcgcgcgcccgacctccgcagtcccagccgagccgcgacccttccggccgtccccaccccacctcgccgccatgcgcctccgccgcctagcgctgttcccgggtgtggcgctgcttcttgccgcggcccgcctcgccgctgcctccgacgtgctagaactcacggacgacaacttcgagagtcgcatctccgacacgggctctgcgggcctcatgctcgtcgagttcttcgccccctggtgtggacactgcaagagacttgcacctgagtatgaagctgcagctaccagattaaaaggaatagtcccattagcaaaggttgattgcactgccaacactaacacctgtaataaatatggagtcagtggatatccaaccctgaagatatttagagatggtgaagaagcaggtgcttatgatggacctaggactgctgatggaattgtcagccacttgaagaagcaggcaggaccagcttcagtgcctctcaggactgaggaagaatttaagaaattcattagtgataaagatgcctctatagtaggttttttcgatgattcattcagtgaggctcactccgagttcctaaaagcagccagcaacttgagggataactaccgatttgcacatacgaatgttgagtctctggtgaacgagtatgatgataatggagagggtatcatcttatttcgtccttcacatctcactaacaagtttgaggacaagactgtggcatatacagagcaaaaaatgaccagtggcaaaattaaaaagtttatccaggaaaacatttttggtatctgccctcacatgacagaagacaataaagatttgatacagggcaaggacttacttattgcttactatgatgtggactatgaaaagaacgctaaaggttccaactactggagaaacagggtaatgatggtggcaaagaaattcctggatgctgggcacaaactcaactttgctgtagctagccgcaaaacctttagccatgaactttctgattttggcttggagagcactgctggagagattcctgttgttgctatcagaactgctaaaggagagaagtttgtcatgcaggaggagttctcgcgtgatgggaaggctctggagaggttcctgcaggattactttgatggcaatctgaagagatacctgaagtctgaacctatcccagagagcaatgatgggcctgtgaaggtagtggtagcagagaattttgatgaaatagtgaataatgaaaataaagatgtgctgattgaattttatgccccttggtgtggtcactgtaagaacctggagcccaagtataaagaacttggcgagaagctcagcaaagacccaaatatcgtcatagccaagatggatgccacagccaatgatgtgccttctccatatgaagtcagaggttttcctaccatatacttctctccagccaacaagaagctaaatccaaagaaatatgaaggtggccgtgaattaagtgattttattagctatctacaaagagaagctacaaacccccctgtaattcaagaagaaaaacccaagaagaagaagaaggcacaggaggatctctaaagcagtagccaaacaccactttgtaaaaggactcttccatcagagatgggaaaaccattggggaggactaggacccatatgggaattattacctctcagggccgagaggacagaatggatataatctgaatcctgttaaattttctctaaactgtttcttagctgcactgtttatggaaataccaggaccagtttatgtttgtggttttgggaaaaattatttgtgttgggggaaatgttgtgggggtggggttgagttgggggtattttctaattttttttgtacatttggaacagtgacaataaatgagacccctttaaactgtcttattttccaccagattgagaaccagatgttctctacacactatcactgttcaatagagctttcttcagtgatggaaatgctctgtaatctacactgttcagtacaggtagctacggagcatctgaaatatggctagaaactacatttttgttttgattaatttaaatagccatacagttgctaccatactggtcacggcagctgtagactgactgggtccatagttcatcacctcaaaattctttcaaaatttattatctctttctctccttacatgtttatttcccaggcctaccctggtgattagaacagctgaagggcctttcttgttaggctgtccatgccctaaggatgggttcctgtttatccttgccacgcagctgagcttactgcatgtttatatctcccaaggactgttctctgctcagaaatgccctgtcaagggtgtggcatcacgcagtttcatccaagttgtttcaggaattgctgacactgctgggtgcagttctatcccctaaagcctagggtgtggccctttaacttccccttcagtagaactgggaaaggcagtaccattcctagttatgagtgaagcatccactttcttttgtaacaatgaggaacagaaaggataagactgaagagtgatcttttgtccaactaaaccatttatctccttttgtaggtaaattcaaatcctgcccagttatagttttcagtcactggagaattccaggtaggagccctactttaggtgatcctaggaactcctatgttcagaaaagaattttcttcctactatataattacagtatttagctgtcaattttaagatgaatttggtagagccttatagtaaagtatgtatcttggtcacacacaaagcttggaaaaagtaaaagatgtctaaaccataatcttgtaactcataacatctgggctggggcccggggatctaattgtttagagagccccaaaagtggctcagatgtaaagccagggttaagaaccatctgccttggaagatttaagggaaacatataaacttgtacaaaggacaaaaaaa

SEQ ID NO: 384 - DNA, 3159 bp, Homo sapiens
agtgacagagcgattactaagcctacggttcccaaacgactcaggtgaacctgatttacaggaaaggcgggctgtagctagggatggagacagtacctatcagcaagcggctccacagctcggttctctatctattctgaagacatgcggggccactcactgctcctgatagtcctctacctcccacagaccccacccactacgacacggaaaactggattacccaaatacctgcctctgagtctggggacgcaggcaagcacaaagacaagggggatggagcttctacacagggccccagcgctgtcgctgtggctgctgctgccgctacggcttagtgcaccagacgctgcatttcaggtgctcctacaaaagaggccactcctggaacgccgggagctcagacgctgccctttgctcgcgagccaagtcagccaaggttaaccttcgcggaacccggcgaggagcgcaagcctggccttccccaaacacagatccgagcttttcaccctctaccctcccctcagcctggccttttcttccgccctcacagccaccgcgacccaacgctgaggaaagaccccgacttgtggtgtccttccccttgcccaaactggccacgaaaggacatatagcgagagagaaagaggattttctgccgtctcttggcaaaaatggcaaataatgatgctgttctgaagagactggagcagaagggtgcagaggcagatcaaatcattgaatatcttaagcagcaagtttctctacttaaggagaaagcaattttgcaggcaactttgagggaagagaagaaacttcgagttgaaaatgctaaactgaagaaagaaattgaagaactgaaacaagagctaattcaggcagaaattcaaaatggagtgaagcaaataccatttccatctggtactccactgcacgctaattctatggtttctgaaaatgtgatacagtctacagcagtaacaaccgtatcttctggtaccaaagaacagataaaaggaggaacaggagacgaaaagaaagcgaaagagaaaattgaaaagaaaggagagaagaaggagaaaaaacagcaatcaatagctggaagtgccgactctaagccaatagatgtttcccgtctggatcttcgaattggttgcatcataactgctagaaaacaccctgatgcagattctttgtatgtggaagaagtagatgtcggagaaatagccccaaggacagttgtcagtggcctggtgaatcatgttcctcttgaacagatgcaaaatcggatggtgattttactttgtaacctgaaacctgcaaagatgaggggagtattatctcaagcaatggtcatgtgtgctagttcaccagagaaaattgaaatcttggctcctccaaatgggtctgttcctggagacagaattacttttgatgctttcccaggagagcctgacaaggagctgaatcctaagaagaagatttgggagcagatccagcctgatcttcacactaatgatgagtgtgtggctacatacaaaggagttccctttgaggtgaaagggaagggagtatgtagggctcaaaccatgagcaacagtggaatcaaataaaatgcttccactaccaaaagacattagagaaaaccttaaaagtaataaagagaaatatatttgtcacttatacctaaaatatgagtggctcatttttgcattactctcttctagacttgactagtcatttacttggtatatattgttttcattgattggggaaacactagatttttacctcggtttttgatcatttataatggagagaggaagttgcctatgttttgtaataatttattttttagcaggaatattgattagcagcttttttttctttatacacatagataactaactagattaatgtttagtttcttatttgtaggcacaggatgcatgaaatttcaagctctgggattttttgtatattgtgtatctgtatcaaaaatatcctctccttttcaaaaatgacaggttggaaaatgtttgtcagacttattaactggtcatattataataatactgataatgaccaactgctcattctgaaagccaaacataaaagctaggagaagtggcatctgaacatttttgctttgctgccagagtaaccctgactaataatacaataacagcaatttttttaaaaaactgagatttcctactggcttgaagtttttctatttagcaaaataattagtaataagttttgactaggtctaaagaatgaacacattgtaaacagttgccacagtagtttctaataaattgatcataaaagcagctatcctttttttttttaattctagcttctttttaaagattatttgggtacctaataaaggataatttatatcttattacagactgatattttgctttttcatgtgtcatcatactgtcagtatattaaaagaaattacagcctaaaacttaacatataccatacatatatattaaggtgtcaaatagctattctcactcatcttacaaatattgtaagagcaataaaaattaattgaggaattataagcctacaggtcatcagccttgaggtgattactgatgatttgggcttacacacatgtcagcaagatagggagtgtggataggggagggctggtagctaacaaggggcctcacagagaaatattagtgactttaaccaggtttcagaatctgggccttacctttacaggttcaacaaaagaatggcatcaatagaggcagaagtatagacattgttttaaaaatacacacatgcacacacacacaaaacattttagcattatagctgtctgaatccttcaataagaaggagaggcacacacaaatacacacactcacacaaaactcaacaaccataaaacaaccctgcatgttataaaaggcagaattaaattttatttatttaaatccatggaactctggtaggccaggatatattatagtaccattatcaatgtgatattctgaaaatatgaactgagcgtcattaacaattgttggtacctaaacacaaaatgaatttcaaaagttactttgttctcaagatatgtcattcttttgggaataaatacttctggtgacaaaaaaaaaaaaaaaa

SEQ ID NO: 385 - DNA, 2537 bp, Homo sapiens
aaaccaaagcaaaattctgcctccaaggattttctgccgtctcttggcaaaaatggcaaataatgatgctgttctgaagagactggagcagaagggtgcagaggcagatcaaatcattgaatatcttaagcagcaagtttctctacttaaggagaaagcaattttgcaggcaactttgagggaagagaagaaacttcgagttgaaaatgctaaactgaagaaagaaattgaagaactgaaacaagagctaattcaggcagaaattcaaaatggagtgaagcaaataccatttccatctggtactccactgcacgctaattctatggtttctgaaaatgtgatacagtctacagcagtaacaaccgtatcttctggtaccaaagaacagataaaaggaggaacaggagacgaaaagaaagcgaaagagaaaattgaaaagaaaggagagaagaaggagaaaaaacagcaatcaatagctggaagtgccgactctaagccaatagatgtttcccgtctggatcttcgaattggttgcatcataactgctagaaaacaccctgatgcagattctttgtatgtggaagaagtagatgtcggagaaatagccccaaggacagttgtcagtggcctggtgaatcatgttcctcttgaacagatgcaaaatcggatggtgattttactttgtaacctgaaacctgcaaagatgaggggagtattatctcaagcaatggtcatgtgtgctagttcaccagagaaaattgaaatcttggctcctccaaatgggtctgttcctggagacagaattacttttgatgctttcccaggagagcctgacaaggagctgaatcctaagaagaagatttgggagcagatccagcctgatcttcacactaatgatgagtgtgtggctacatacaaaggagttccctttgaggtgaaagggaagggagtatgtagggctcaaaccatgagcaacagtggaatcaaataaaatgcttccactaccaaaagacattagagaaaaccttaaaagtaataaagagaaatatatttgtcacttatacctaaaatatgagtggctcatttttgcattactctcttctagacttgactagtcatttacttggtatatattgttttcattgattggggaaacactagatttttacctcggtttttgatcatttataatggagagaggaagttgcctatgttttgtaataatttattttttagcaggaatattgattagcagcttttttttctttatacacatagataactaactagattaatgtttagtttcttatttgtaggcacaggatgcatgaaatttcaagctctgggattttttgtatattgtgtatctgtatcaaaaatatcctctccttttcaaaaatgacaggttggaaaatgtttgtcagacttattaactggtcatattataataatactgataatgaccaactgctcattctgaaagccaaacataaaagctaggagaagtggcatctgaacatttttgctttgctgccagagtaaccctgactaataatacaataacagcaatttttttaaaaaactgagatttcctactggcttgaagtttttctatttagcaaaataattagtaataagttttgactaggtctaaagaatgaacacattgtaaacagttgccacagtagtttctaataaattgatcataaaagcagctatcctttttttttttaattctagcttctttttaaagattatttgggtacctaataaaggataatttatatcttattacagactgatattttgctttttcatgtgtcatcatactgtcagtatattaaaagaaattacagcctaaaacttaacatataccatacatatatattaaggtgtcaaatagctattctcactcatcttacaaatattgtaagagcaataaaaattaattgaggaattataagcctacaggtcatcagccttgaggtgattactgatgatttgggcttacacacatgtcagcaagatagggagtgtggataggggagggctggtagctaacaaggggcctcacagagaaatattagtgactttaaccaggtttcagaatctgggccttacctttacaggttcaacaaaagaatggcatcaatagaggcagaagtatagacattgttttaaaaatacacacatgcacacacacacaaaacattttagcattatagctgtctgaatccttcaataagaaggagaggcacacacaaatacacacactcacacaaaactcaacaaccataaaacaaccctgcatgttataaaaggcagaattaaattttatttatttaaatccatggaactctggtaggccaggatatattatagtaccattatcaatgtgatattctgaaaatatgaactgagcgtcattaacaattgttggtacctaaacacaaaatgaatttcaaaagttactttgttctcaagatatgtcattcttttgggaataaatacttctggtgacaaaaaaaaaaaaaaaa

SEQ ID NO: 386 - DNA, 2598 bp, Homo sapiens
gtcctttctcactgctatagtacgcgggtggctggacctacatgcttcctgctgtggctgtctcggaacccgtggtcctccgcttcatgattttctgccgtctcttggcaaaaatggcaaataatgatgctgttctgaagagactggagcagaagggtgcagaggcagatcaaatcattgaatatcttaagcagcaagtttctctacttaaggagaaagcaattttgcaggcaactttgagggaagagaagaaacttcgagttgaaaatgctaaactgaagaaagaaattgaagaactgaaacaagagctaattcaggcagaaattcaaaatggagtgaagcaaataccatttccatctggtactccactgcacgctaattctatggtttctgaaaatgtgatacagtctacagcagtaacaaccgtatcttctggtaccaaagaacagataaaaggaggaacaggagacgaaaagaaagcgaaagagaaaattgaaaagaaaggagagaagaaggagaaaaaacagcaatcaatagctggaagtgccgactctaagccaatagatgtttcccgtctggatcttcgaattggttgcatcataactgctagaaaacaccctgatgcagattctttgtatgtggaagaagtagatgtcggagaaatagccccaaggacagttgtcagtggcctggtgaatcatgttcctcttgaacagatgcaaaatcggatggtgattttactttgtaacctgaaacctgcaaagatgaggggagtattatctcaagcaatggtcatgtgtgctagttcaccagagaaaattgaaatcttggctcctccaaatgggtctgttcctggagacagaattacttttgatgctttcccaggagagcctgacaaggagctgaatcctaagaagaagatttgggagcagatccagcctgatcttcacactaatgatgagtgtgtggctacatacaaaggagttccctttgaggtgaaagggaagggagtatgtagggctcaaaccatgagcaacagtggaatcaaataaaatgcttccactaccaaaagacattagagaaaaccttaaaagtaataaagagaaatatatttgtcacttatacctaaaatatgagtggctcatttttgcattactctcttctagacttgactagtcatttacttggtatatattgttttcattgattggggaaacactagatttttacctcggtttttgatcatttataatggagagaggaagttgcctatgttttgtaataatttattttttagcaggaatattgattagcagcttttttttctttatacacatagataactaactagattaatgtttagtttcttatttgtaggcacaggatgcatgaaatttcaagctctgggattttttgtatattgtgtatctgtatcaaaaatatcctctccttttcaaaaatgacaggttggaaaatgtttgtcagacttattaactggtcatattataataatactgataatgaccaactgctcattctgaaagccaaacataaaagctaggagaagtggcatctgaacatttttgctttgctgccagagtaaccctgactaataatacaataacagcaatttttttaaaaaactgagatttcctactggcttgaagtttttctatttagcaaaataattagtaataagttttgactaggtctaaagaatgaacacattgtaaacagttgccacagtagtttctaataaattgatcataaaagcagctatcctttttttttttaattctagcttctttttaaagattatttgggtacctaataaaggataatttatatcttattacagactgatattttgctttttcatgtgtcatcatactgtcagtatattaaaagaaattacagcctaaaacttaacatataccatacatatatattaaggtgtcaaatagctattctcactcatcttacaaatattgtaagagcaataaaaattaattgaggaattataagcctacaggtcatcagccttgaggtgattactgatgatttgggcttacacacatgtcagcaagatagggagtgtggataggggagggctggtagctaacaaggggcctcacagagaaatattagtgactttaaccaggtttcagaatctgggccttacctttacaggttcaacaaaagaatggcatcaatagaggcagaagtatagacattgttttaaaaatacacacatgcacacacacacaaaacattttagcattatagctgtctgaatccttcaataagaaggagaggcacacacaaatacacacactcacacaaaactcaacaaccataaaacaaccctgcatgttataaaaggcagaattaaattttatttatttaaatccatggaactctggtaggccaggatatattatagtaccattatcaatgtgatattctgaaaatatgaactgagcgtcattaacaattgttggtacctaaacacaaaatgaatttcaaaagttactttgttctcaagatatgtcattcttttgggaataaatacttctggtgacaaaaaaaaaaaaaaaa

SEQ ID NO: 387 - DNA, 5139 bp, Homo sapiens
gttactgtgtatgtggggaaacaaagggtgatacaagataaaaatccagggttaaatttaaaagaagtctgtcaataaataatataggatgtgtctaagtaataagaaagcattgggtcagttgattcaatagtgttttttttcataatgtacataaaataatagagcttcttgggattgaagccattttacaattgatggcattttagatttcttgtatagtatttaaagcttccaacaaaaatgtaaatttttacctactgtaattctgaaatagggaaattagaggttttgagtagagacactttcaaatttgtgtagcgttcctatatagcataagaattctaaaattaaaagtctgcctgtaaaactttgatttcaaagtagtaacttacttatgtttgattcccaatgttgtcatcgtggggcagagattttgctttttcaaaaagattgcaggcaatttagatggtgtgggtggggaggactactgaggaaattgctcagtaaacaaaaatgatagtgaagatctcagaatctcaaaaatcatcttttgtgtgtgtattttaatgattaagatgtactataaattcatgtacagtatttgggattctgcattagaggcatcgtatgattaatggctttttaggtttgatgaagtatgataattaacattgagaaggacaaaattaatgtgaagggacagaatgatttagataatatgtttcaaaagcttttgtcctaaaaaatgcattattaccattttaatttagtaaaggaaaaagaaaaggtcttgatcctcaccaaacacaattaacatacttggtctacagttttctgtgcttctctcttcataaatgttttatattttcaattactgtgcatgtcattcttatatctattttaatctcacagtcttaatttttttacattttagtccagagacttaaactagcatttcctaaactgttttagagaatactagttcaaataaatgttaatagctgttcctgtgttaggattctgtcattaaatatattggaaaatgcttcgtaattatatcctttagagaaattatagctagagcattaaaagagctaactgcagcatcagacagacctgagtttcaatcctcgtttactatgtattacatgaggcaaattaattttaattcaagttttcttctctgtataatggagattattacagtattcgaaattgacttgtgtaaagcatttagccagccatagcgcatgttctacaaatatatgtagttgttattatcatctatgagaaactttatacatattagaaactctgaggatttaaaattttgaaggttgacttatactcaatgtaaaattgaaaaatcacaggggagtaattagcatagagattaatgaaatgagcactgggttgaatggtaaaagatttgtttgagctttaagcagtattgttgttaaactatcactgtgccctaagcgtaacattattttaaaaatgtcttcaactgtgtttcccccatttgtctgaaagcttagttagttcaaagaacatgtttatttttgttctctactataaacccagcacatgacacaaaatcagggagtgtaaagttggggtcatgaacttattttaggagcctggtaggtaatataaatggcagacaacagggagtagtaaagtgtctgtctgtcttacttaaagacattcacatcagttatttccaacactgttagccctggaaaagaaagctatccctgaactttgtcaggctagtttgtgatccctagaaaagattagtgattaagaccaaaccctgaagaacagcatcattaatgggacagattaaaaaaaaaaggagccctgaaaggaggtgacaaggaagtaggaggtgaaatcaggtacaagtaattttttaaattaagaaaagtatagccctctccctctccctctccctctccgcaccgtctccctctgatgccgagccgaggctggactgtactgccaccatcttgactcactgcaacctccctgcctgattctcctgcctcagtctgccgagttcctgggattgcaggtgcgcgccgccactcctgactggtttttgtattttttggtggagacggggtttcaccgtgttggccgggctggtctccagctcctgaccgcgagtgatctgccagcctcggcgtcctgaggtgccgggattgcagacggagtctcgctcactcagtgctcaatgttgcccatgctggagtgcagtggcgtgatcttggctcgctacaacctccacctcccagccgcctgccttggcctcccaaagtgccgagattgcagcctctgcccggccgccaccccgtctaggaagtgaggagcgtctttgcctggccgcccatcgtcggggatgtgaggagcccctctgcccggccgcccagtctgggaagtgaggagcacctcttcccggccgtcatcctgtctaggaagtgaggagcgtctctgcccagccgcccatcatctgggatgtggggagcatctctgccccgtcgccccgtctgagatgtgaagagcgcctctgcccggccgcgaccctgtctgggaactgaggagtgtctctgccccgccgccaccccgtctgggaggattttctgccgtctcttggcaaaaatggcaaataatgatgctgttctgaagagactggagcagaagggtgcagaggcagatcaaatcattgaatatcttaagcagcaagtttctctacttaaggagaaagcaattttgcaggcaactttgagggaagagaagaaacttcgagttgaaaatgctaaactgaagaaagaaattgaagaactgaaacaagagctaattcaggcagaaattcaaaatggagtgaagcaaataccatttccatctggtactccactgcacgctaattctatggtttctgaaaatgtgatacagtctacagcagtaacaaccgtatcttctggtaccaaagaacagataaaaggaggaacaggagacgaaaagaaagcgaaagagaaaattgaaaagaaaggagagaagaaggagaaaaaacagcaatcaatagctggaagtgccgactctaagccaatagatgtttcccgtctggatcttcgaattggttgcatcataactgctagaaaacaccctgatgcagattctttgtatgtggaagaagtagatgtcggagaaatagccccaaggacagttgtcagtggcctggtgaatcatgttcctcttgaacagatgcaaaatcggatggtgattttactttgtaacctgaaacctgcaaagatgaggggagtattatctcaagcaatggtcatgtgtgctagttcaccagagaaaattgaaatcttggctcctccaaatgggtctgttcctggagacagaattacttttgatgctttcccaggagagcctgacaaggagctgaatcctaagaagaagatttgggagcagatccagcctgatcttcacactaatgatgagtgtgtggctacatacaaaggagttccctttgaggtgaaagggaagggagtatgtagggctcaaaccatgagcaacagtggaatcaaataaaatgcttccactaccaaaagacattagagaaaaccttaaaagtaataaagagaaatatatttgtcacttatacctaaaatatgagtggctcatttttgcattactctcttctagacttgactagtcatttacttggtatatattgttttcattgattggggaaacactagatttttacctcggtttttgatcatttataatggagagaggaagttgcctatgttttgtaataatttattttttagcaggaatattgattagcagcttttttttctttatacacatagataactaactagattaatgtttagtttcttatttgtaggcacaggatgcatgaaatttcaagctctgggattttttgtatattgtgtatctgtatcaaaaatatcctctccttttcaaaaatgacaggttggaaaatgtttgtcagacttattaactggtcatattataataatactgataatgaccaactgctcattctgaaagccaaacataaaagctaggagaagtggcatctgaacatttttgctttgctgccagagtaaccctgactaataatacaataacagcaatttttttaaaaaactgagatttcctactggcttgaagtttttctatttagcaaaataattagtaataagttttgactaggtctaaagaatgaacacattgtaaacagttgccacagtagtttctaataaattgatcataaaagcagctatcctttttttttttaattctagcttctttttaaagattatttgggtacctaataaaggataatttatatcttattacagactgatattttgctttttcatgtgtcatcatactgtcagtatattaaaagaaattacagcctaaaacttaacatataccatacatatatattaaggtgtcaaatagctattctcactcatcttacaaatattgtaagagcaataaaaattaattgaggaattataagcctacaggtcatcagccttgaggtgattactgatgatttgggcttacacacatgtcagcaagatagggagtgtggataggggagggctggtagctaacaaggggcctcacagagaaatattagtgactttaaccaggtttcagaatctgggccttacctttacaggttcaacaaaagaatggcatcaatagaggcagaagtatagacattgttttaaaaatacacacatgcacacacacacaaaacattttagcattatagctgtctgaatccttcaataagaaggagaggcacacacaaatacacacactcacacaaaactcaacaaccataaaacaaccctgcatgttataaaaggcagaattaaattttatttatttaaatccatggaactctggtaggccaggatatattatagtaccattatcaatgtgatattctgaaaatatgaactgagcgtcattaacaattgttggtacctaaacacaaaatgaatttcaaaagttactttgttctcaagatatgtcattcttttgggaataaatacttctggtgacaaa

SEQ ID NO: 388 - DNA, 4577 bp, Homo sapiens
gttactgtgtatgtggggaaacaaagggtgatacaagataaaaatccagggttaaatttaaaagaagtctgtcaataaataatataggatgtgtctaagtaataagaaagcattgggtcagttgattcaatagtgttttttttcataatgtacataaaataatagagcttcttgggattgaagccattttacaattgatggcattttagatttcttgtatagtatttaaagcttccaacaaaaatgtaaatttttacctactgtaattctgaaatagggaaattagaggttttgagtagagacactttcaaatttgtgtagcgttcctatatagcataagaattctaaaattaaaagtctgcctgtaaaactttgatttcaaagtagtaacttacttatgtttgattcccaatgttgtcatcgtggggcagagattttgctttttcaaaaagattgcaggcaatttagatggtgtgggtggggaggactactgaggaaattgctcagtaaacaaaaatgatagtgaagatctcagaatctcaaaaatcatcttttgtgtgtgtattttaatgattaagatgtactataaattcatgtacagtatttgggattctgcattagaggcatcgtatgattaatggctttttaggtttgatgaagtatgataattaacattgagaaggacaaaattaatgtgaagggacagaatgatttagataatatgtttcaaaagcttttgtcctaaaaaatgcattattaccattttaatttagtaaaggaaaaagaaaaggtcttgatcctcaccaaacacaattaacatacttggtctacagttttctgtgcttctctcttcataaatgttttatattttcaattactgtgcatgtcattcttatatctattttaatctcacagtcttaatttttttacattttagtccagagacttaaactagcatttcctaaactgttttagagaatactagttcaaataaatgttaatagctgttcctgtgttaggattctgtcattaaatatattggaaaatgcttcgtaattatatcctttagagaaattatagctagagcattaaaagagctaactgcagcatcagacagacctgagtttcaatcctcgtttactatgtattacatgaggcaaattaattttaattcaagttttcttctctgtataatggagattattacagtattcgaaattgacttgtgtaaagcatttagccagccatagcgcatgttctacaaatatatgtagttgttattatcatctatgagaaactttatacatattagaaactctgaggatttaaaattttgaaggttgacttatactcaatgtaaaattgaaaaatcacaggggagtaattagcatagagattaatgaaatgagcactgggttgaatggtaaaagatttgtttgagctttaagcagtattgttgttaaactatcactgtgccctaagcgtaacattattttaaaaatgtcttcaactgtgtttcccccatttgtctgaaagcttagttagttcaaagaacatgtttatttttgttctctactataaacccagcacatgacacaaaatcagggagtgtaaagttggggtcatgaacttattttaggagcctggtaggtaatataaatggcagacaacagggagtagtaaagtgtctgtctgtcttacttaaagacattcacatcagttatttccaacactgttagccctggaaaagaaagctatccctgaactttgtcaggctagtttgtgatccctagaaaagattagtgattaagaccaaaccctgaagaacagcatcattaatgggacagattaaaaaaaaaaggagccctgaaaggaggtgacaaggaagtaggaggtgaaatcaggtacaagtaattttttaaattaagaaaagtatagccctctccctctccctctccctctccgcaccgtctccctctgatgccgagccgaggctggactgtactgccaccatcttgactcactgcaacctccctgcctgattctcctgcctcagtctgccgagttcctgggattgcaggattttctgccgtctcttggcaaaaatggcaaataatgatgctgttctgaagagactggagcagaagggtgcagaggcagatcaaatcattgaatatcttaagcagcaagtttctctacttaaggagaaagcaattttgcaggcaactttgagggaagagaagaaacttcgagttgaaaatgctaaactgaagaaagaaattgaagaactgaaacaagagctaattcaggcagaaattcaaaatggagtgaagcaaataccatttccatctggtactccactgcacgctaattctatggtttctgaaaatgtgatacagtctacagcagtaacaaccgtatcttctggtaccaaagaacagataaaaggaggaacaggagacgaaaagaaagcgaaagagaaaattgaaaagaaaggagagaagaaggagaaaaaacagcaatcaatagctggaagtgccgactctaagccaatagatgtttcccgtctggatcttcgaattggttgcatcataactgctagaaaacaccctgatgcagattctttgtatgtggaagaagtagatgtcggagaaatagccccaaggacagttgtcagtggcctggtgaatcatgttcctcttgaacagatgcaaaatcggatggtgattttactttgtaacctgaaacctgcaaagatgaggggagtattatctcaagcaatggtcatgtgtgctagttcaccagagaaaattgaaatcttggctcctccaaatgggtctgttcctggagacagaattacttttgatgctttcccaggagagcctgacaaggagctgaatcctaagaagaagatttgggagcagatccagcctgatcttcacactaatgatgagtgtgtggctacatacaaaggagttccctttgaggtgaaagggaagggagtatgtagggctcaaaccatgagcaacagtggaatcaaataaaatgcttccactaccaaaagacattagagaaaaccttaaaagtaataaagagaaatatatttgtcacttatacctaaaatatgagtggctcatttttgcattactctcttctagacttgactagtcatttacttggtatatattgttttcattgattggggaaacactagatttttacctcggtttttgatcatttataatggagagaggaagttgcctatgttttgtaataatttattttttagcaggaatattgattagcagcttttttttctttatacacatagataactaactagattaatgtttagtttcttatttgtaggcacaggatgcatgaaatttcaagctctgggattttttgtatattgtgtatctgtatcaaaaatatcctctccttttcaaaaatgacaggttggaaaatgtttgtcagacttattaactggtcatattataataatactgataatgaccaactgctcattctgaaagccaaacataaaagctaggagaagtggcatctgaacatttttgctttgctgccagagtaaccctgactaataatacaataacagcaatttttttaaaaaactgagatttcctactggcttgaagtttttctatttagcaaaataattagtaataagttttgactaggtctaaagaatgaacacattgtaaacagttgccacagtagtttctaataaattgatcataaaagcagctatcctttttttttttaattctagcttctttttaaagattatttgggtacctaataaaggataatttatatcttattacagactgatattttgctttttcatgtgtcatcatactgtcagtatattaaaagaaattacagcctaaaacttaacatataccatacatatatattaaggtgtcaaatagctattctcactcatcttacaaatattgtaagagcaataaaaattaattgaggaattataagcctacaggtcatcagccttgaggtgattactgatgatttgggcttacacacatgtcagcaagatagggagtgtggataggggagggctggtagctaacaaggggcctcacagagaaatattagtgactttaaccaggtttcagaatctgggccttacctttacaggttcaacaaaagaatggcatcaatagaggcagaagtatagacattgttttaaaaatacacacatgcacacacacacaaaacattttagcattatagctgtctgaatccttcaataagaaggagaggcacacacaaatacacacactcacacaaaactcaacaaccataaaacaaccctgcatgttataaaaggcagaattaaattttatttatttaaatccatggaactctggtaggccaggatatattatagtaccattatcaatgtgatattctgaaaatatgaactgagcgtcattaacaattgttggtacctaaacacaaaatgaatttcaaaagttactttgttctcaagatatgtcattcttttgggaataaatacttctggtgacaaa

SEQ ID NO: 389 - DNA, 5970 bp, Homo sapiens
actttcagctccagctcccgccaccgccgcctgtatcgccgccgccgccaccacctcctcttcgttgtcctccttcctcctccgcctggcagcgttgttctctgcagcggaggagagaagtgctatgtcaggaaagttccgggagggactacatggagccatgctccctgggctcttccgcgggcgcccgcgcgctgcccttcgcttgaggcaaaaggactcttgtggaagatggaactcattgtccattttccagaatgtatttccaagcccatcaatgggacctgatactgctgttctgtgttgaaatgcttgaagaactcctgcatctctgcttgcatcttccatcctactgaaaccatggtcttctcggcagtgttgactgcgttccataccgggacatccaacacaacatttgtcgtgtatgaaaacacctacatgaatattacactccctccaccattccagcatcctgacctcagtccattgcttagatatagttttgaaaccatggctcccactggtttgagttccttgaccgtgaatagtacagctgtgcccacaacaccagcagcatttaagagcctaaacttgcctcttcagatcaccctttctgctataatgatattcattctgtttgtgtcttttcttgggaacttggttgtttgcctcatggtttaccaaaaagctgccatgaggtctgcaattaacatcctccttgccagcctagcttttgcagacatgttgcttgcagtgctgaacatgccctttgccctggtaactattcttactacccgatggatttttgggaaattcttctgtagggtatctgctatgtttttctggttatttgtgatagaaggagtagccatcctgctcatcattagcatagataggttccttattatagtccagaggcaggataagctaaacccatatagagctaaggttctgattgcagtttcttgggcaacttccttttgtgtagcttttcctttagccgtaggaaaccccgacctgcagataccttcccgagctccccagtgtgtgtttgggtacacaaccaatccaggctaccaggcttatgtgattttgatttctctcatttctttcttcatacccttcctggtaatactgtactcatttatgggcatactcaacacccttcggcacaatgccttgaggatccatagctaccctgaaggtatatgcctcagccaggccagcaaactgggtctcatgagtctgcagagacctttccagatgagcattgacatgggctttaaaacacgtgccttcaccactattttgattctctttgctgtcttcattgtctgctgggccccattcaccacttacagccttgtggcaacattcagtaagcacttttactatcagcacaacttttttgagattagcacctggctactgtggctctgctacctcaagtctgcattgaatccgctgatctactactggaggattaagaaattccatgatgcttgcctggacatgatgcctaagtccttcaagtttttgccgcagctccctggtcacacaaagcgacggatacgtcctagtgctgtctatgtgtgtggggaacatcggacggtggtgtgaatattggaactggctgacattttgggtgatgcttgttctttattgacattgaattctctttctcatagcctctccactttatttttttttatagggtttgtgtatgtatgtgtgtgagcagtgtaaagaaagaatggtaattatagttctgttaccaagaataaataataggaaagtgattacaaatattacctccagggttcaatagaaatcctcaatttagggtgaggagacttttttttggttttggggtttttccttgattgattttgttttcatagtgggaatcaggattgtgctttattgagcctgcagttacattgaattgtaggtgtttcgtgtgctgctaaggtatgcttatttgagtttatcaagactttttttttctggaagacactgctgcttttaccatcacattggagccaaacatctcaatcaatatatatttagttttattttaaaaactaacccaggaaggttagcgacattttaagggtcattactatttactttggtgcactttaagagataatgtacaaattaattcagtcttatttttcagaattgtttttatacatgatatgtgctttaggaaatgtgcattatcatttatgggaagatagttttaagaaatgttttatctgcatgtacagttgtaaaagagaacataaaatgtagatacttttctaagcacaatagcaactcttcaagcaatagcgcaaaatctaggagacaggatccttgcaaatttaaaaggtgaatgtagtgagggggatggcaagtggctggtacaggctgtggtgattccttttactcaagggtttttgtggagtatagggagaaggggttgatatttatggacacctatgtgtcaggcactgtgcatcattttatccttacaggatgttgtgaggtaggtattattgttttcatttttacaggtgaagaaagcaggtctcagagggactaaaatcctgcccaaggttagtggtagagctgggatccaaaaatctgtcagaatcctgagactgcgctgttccactgtgccacgcagacagttcattcagtttagatgtcacatagtcaagagggaactctatgcatcctttaattttttagactatgatattctttttaaaaattagcctttattttctaactaccaaaagaaatatgaaagcattacagaaacactggaaaatagaaaagaaaaaataaaatcacttacaaccactttttgttttttggagtctcgctttgccacccaggctggagtgcagtggtgtgatcatggctcattgtagcctcaacctcccaggctcaggtaatcctcctgtctcagcctcctgaatagctggaaccacacacacacacgcacacacaggtgtgtgccaccacacccagctatttttttgtattttcttttgtaaagacaaggtttcaccatgttgcccaggctggtctcagagtcctgagctcaaacgatctgcctgccttggcctcccaaaatgttgggattacaggcatgagccaccacatctgacctacaaccactttttaatgtgagacttaaaaatcttagataaataaggctgtgaagcaaaaccagtgatttttttttttgtttttgatttgcaaaacaagtgactgacaattattgagaaattaaagatagctatgtgtaggtcttgcccctgcgggtttggaggtttccagttgtccatctgtgttagttgtaagtgttctgggcagaatagtattgttgccccaatgcttgccctagcagagctggagtttgtgaacgtgctcagatgtgtgtctcctacaaagaagggaaaatgaaccctcgtctgagcctagaacaagttttaatagggcatgtctgacatttcaaattgtttttctcttgctgacagtctgcccccaggtgcatctagggccttggtcagcttctctgttaccagtggctcactttataaaacagcccacagggataagggctgaaaatatagccacttggctacatcattgactaattaagtaagttaactgtggatttatagcatcttttcaggatgttagtgttttgtgagccagtggaaaaaataagcttctatttcttcatttgtaaaaccagagagttggattagatgaatctctaacgtcctgtccagctcaaatgtgctttcctctatactagggtatagatttttgaagagcctagctgacttcagcatcacctcaccctttggtctccagtattacttctttacattttacttcattagctatttcttaatattaaatgtctgaagagtgtggcactgtatcaggagttggggcattgaaaggttgaagacatcatgaaatatctgggaaactctgctcttaaggaaattgcaccgatgttggaactcattgtccagttaaagagctctttggggactcaagcatattattcaacatgttgttttgggattatcttcaaatgatagtcacctacctctttcatttctaatttttattcacaggtaaaattgtttttgtccatagggattttataggacataagcactgtagtagatactagtagcattttgaagtgtattatgctctccattttccatataaactagatttcaagcagatattgataaggacattttttattagacttttctctgaggaaagtcagcatgatctgtattcatcttacatattgataggtcatgaagactcctttttggctggaggtgaaactgagctttgttttctttgttcctgttttatgggcagtctttaggtactttcatgctgcttaataggcagtgcctcatttggtgagagctctggagtgcctgccgagacgctccctgtttgtgaacaaagattatgaaggggtctttgtgagaattcagcagcaacactgaacagcagttctttttacactggattatcttgatctgatgagagtttacaaatcattttgaacatttttattatgtatacattgtgaaagctttaaaaataagtactatggagcacctttgagaaacgtaggtgcaaaatcatatgttgcctattcccccatattttcttgaggcagggaaagataccactactaattctcactgcttacaggcataatcagaaatggttttttgtttgcctgtttttccttctggctagtaagaagcgtaaaagagataatgaaatatttgtggtcaaaagaaagatgcaagggaaattccaaatagtatggagtaacattatttaaactttaatacatgtttaagcatccccaagggagcttgttaacagtacagattcctgggcctccagagggtctgtggttgagcccaggaatgtgcatttttattttattgagcactctgcctgactctggctcaggtagtccctgggaaactcttcaggaaacattcctgtagaaaatatatctatttaaatatcatctgttttatcccacaatgtttgtttcgtgttgcaagccattatcttctaggcatgggtaatccacattgagaggaaaatccacacaacattgtgcctgatttgctgccacctgtgtttgtgctggatcttgccagtgttagctttattttctttcaactggcaaaattctgataaagcatatagcttcacagtagagcaaaatgggtgacttaattgaaagtcatgactttcagcagtctaattatgctcatattttattttcttatagagagctgtctttattgtgtgtaattcccggaagaatgtaaagatttatctaattcctattgctctgccagttgtgttcaatgcaagcattgaagtaaaataaaaataacctttttaatatgtgtatttctgttgcccacaaagatatttaatttttttcttgatctttgtttttgtttatgtgaaaatatttacatatgtatcatttctgtatatatcacagaaaagttttcacttgcttgacattttattctacaatgatttttagtttaagtttaaagaatggctacattcagatttattttcacaactatagtcctgctaaactgccttcattgaaaactcagtttttatgataaaaaatatcaaagcacaagtttgttattggaggtaaattatacatttcttagatatctattggtactagacctttgtaattaaaattaatttattttacaatagtaactgacctgtatggaaaaaaaaacaaccttgaattatgggttctaatatttaaatatcgaaaaatatggttatttgtgcatattcttattacaaccaagaaaagaactcctgataagaaaataaataaatatttaacatttctaa

SEQ ID NO: 390 - DNA, 6088 bp, Homo sapiens
actttcagctccagctcccgccaccgccgcctgtatcgccgccgccgccaccacctcctcttcgttgtcctccttcctcctccgcctggcagcgttgttctctgcagcggaggagagaagtgctatgtcaggaaagttccgggagggactacatggagccatgctccctgggctcttccgcgggcgcccgcgcgctgcccttcgcttgagagtctcaccgtgttgcccaggctggaatgcagtggcgcgatctcggctcacagcaacctccgcctcccgggttcaagcgattctcatgcttcagcctcctgagtacctgggattactggcaaaaggactcttgtggaagatggaactcattgtccattttccagaatgtatttccaagcccatcaatgggacctgatactgctgttctgtgttgaaatgcttgaagaactcctgcatctctgcttgcatcttccatcctactgaaaccatggtcttctcggcagtgttgactgcgttccataccgggacatccaacacaacatttgtcgtgtatgaaaacacctacatgaatattacactccctccaccattccagcatcctgacctcagtccattgcttagatatagttttgaaaccatggctcccactggtttgagttccttgaccgtgaatagtacagctgtgcccacaacaccagcagcatttaagagcctaaacttgcctcttcagatcaccctttctgctataatgatattcattctgtttgtgtcttttcttgggaacttggttgtttgcctcatggtttaccaaaaagctgccatgaggtctgcaattaacatcctccttgccagcctagcttttgcagacatgttgcttgcagtgctgaacatgccctttgccctggtaactattcttactacccgatggatttttgggaaattcttctgtagggtatctgctatgtttttctggttatttgtgatagaaggagtagccatcctgctcatcattagcatagataggttccttattatagtccagaggcaggataagctaaacccatatagagctaaggttctgattgcagtttcttgggcaacttccttttgtgtagcttttcctttagccgtaggaaaccccgacctgcagataccttcccgagctccccagtgtgtgtttgggtacacaaccaatccaggctaccaggcttatgtgattttgatttctctcatttctttcttcatacccttcctggtaatactgtactcatttatgggcatactcaacacccttcggcacaatgccttgaggatccatagctaccctgaaggtatatgcctcagccaggccagcaaactgggtctcatgagtctgcagagacctttccagatgagcattgacatgggctttaaaacacgtgccttcaccactattttgattctctttgctgtcttcattgtctgctgggccccattcaccacttacagccttgtggcaacattcagtaagcacttttactatcagcacaacttttttgagattagcacctggctactgtggctctgctacctcaagtctgcattgaatccgctgatctactactggaggattaagaaattccatgatgcttgcctggacatgatgcctaagtccttcaagtttttgccgcagctccctggtcacacaaagcgacggatacgtcctagtgctgtctatgtgtgtggggaacatcggacggtggtgtgaatattggaactggctgacattttgggtgatgcttgttctttattgacattgaattctctttctcatagcctctccactttatttttttttatagggtttgtgtatgtatgtgtgtgagcagtgtaaagaaagaatggtaattatagttctgttaccaagaataaataataggaaagtgattacaaatattacctccagggttcaatagaaatcctcaatttagggtgaggagacttttttttggttttggggtttttccttgattgattttgttttcatagtgggaatcaggattgtgctttattgagcctgcagttacattgaattgtaggtgtttcgtgtgctgctaaggtatgcttatttgagtttatcaagactttttttttctggaagacactgctgcttttaccatcacattggagccaaacatctcaatcaatatatatttagttttattttaaaaactaacccaggaaggttagcgacattttaagggtcattactatttactttggtgcactttaagagataatgtacaaattaattcagtcttatttttcagaattgtttttatacatgatatgtgctttaggaaatgtgcattatcatttatgggaagatagttttaagaaatgttttatctgcatgtacagttgtaaaagagaacataaaatgtagatacttttctaagcacaatagcaactcttcaagcaatagcgcaaaatctaggagacaggatccttgcaaatttaaaaggtgaatgtagtgagggggatggcaagtggctggtacaggctgtggtgattccttttactcaagggtttttgtggagtatagggagaaggggttgatatttatggacacctatgtgtcaggcactgtgcatcattttatccttacaggatgttgtgaggtaggtattattgttttcatttttacaggtgaagaaagcaggtctcagagggactaaaatcctgcccaaggttagtggtagagctgggatccaaaaatctgtcagaatcctgagactgcgctgttccactgtgccacgcagacagttcattcagtttagatgtcacatagtcaagagggaactctatgcatcctttaattttttagactatgatattctttttaaaaattagcctttattttctaactaccaaaagaaatatgaaagcattacagaaacactggaaaatagaaaagaaaaaataaaatcacttacaaccactttttgttttttggagtctcgctttgccacccaggctggagtgcagtggtgtgatcatggctcattgtagcctcaacctcccaggctcaggtaatcctcctgtctcagcctcctgaatagctggaaccacacacacacacgcacacacaggtgtgtgccaccacacccagctatttttttgtattttcttttgtaaagacaaggtttcaccatgttgcccaggctggtctcagagtcctgagctcaaacgatctgcctgccttggcctcccaaaatgttgggattacaggcatgagccaccacatctgacctacaaccactttttaatgtgagacttaaaaatcttagataaataaggctgtgaagcaaaaccagtgatttttttttttgtttttgatttgcaaaacaagtgactgacaattattgagaaattaaagatagctatgtgtaggtcttgcccctgcgggtttggaggtttccagttgtccatctgtgttagttgtaagtgttctgggcagaatagtattgttgccccaatgcttgccctagcagagctggagtttgtgaacgtgctcagatgtgtgtctcctacaaagaagggaaaatgaaccctcgtctgagcctagaacaagttttaatagggcatgtctgacatttcaaattgtttttctcttgctgacagtctgcccccaggtgcatctagggccttggtcagcttctctgttaccagtggctcactttataaaacagcccacagggataagggctgaaaatatagccacttggctacatcattgactaattaagtaagttaactgtggatttatagcatcttttcaggatgttagtgttttgtgagccagtggaaaaaataagcttctatttcttcatttgtaaaaccagagagttggattagatgaatctctaacgtcctgtccagctcaaatgtgctttcctctatactagggtatagatttttgaagagcctagctgacttcagcatcacctcaccctttggtctccagtattacttctttacattttacttcattagctatttcttaatattaaatgtctgaagagtgtggcactgtatcaggagttggggcattgaaaggttgaagacatcatgaaatatctgggaaactctgctcttaaggaaattgcaccgatgttggaactcattgtccagttaaagagctctttggggactcaagcatattattcaacatgttgttttgggattatcttcaaatgatagtcacctacctctttcatttctaatttttattcacaggtaaaattgtttttgtccatagggattttataggacataagcactgtagtagatactagtagcattttgaagtgtattatgctctccattttccatataaactagatttcaagcagatattgataaggacattttttattagacttttctctgaggaaagtcagcatgatctgtattcatcttacatattgataggtcatgaagactcctttttggctggaggtgaaactgagctttgttttctttgttcctgttttatgggcagtctttaggtactttcatgctgcttaataggcagtgcctcatttggtgagagctctggagtgcctgccgagacgctccctgtttgtgaacaaagattatgaaggggtctttgtgagaattcagcagcaacactgaacagcagttctttttacactggattatcttgatctgatgagagtttacaaatcattttgaacatttttattatgtatacattgtgaaagctttaaaaataagtactatggagcacctttgagaaacgtaggtgcaaaatcatatgttgcctattcccccatattttcttgaggcagggaaagataccactactaattctcactgcttacaggcataatcagaaatggttttttgtttgcctgtttttccttctggctagtaagaagcgtaaaagagataatgaaatatttgtggtcaaaagaaagatgcaagggaaattccaaatagtatggagtaacattatttaaactttaatacatgtttaagcatccccaagggagcttgttaacagtacagattcctgggcctccagagggtctgtggttgagcccaggaatgtgcatttttattttattgagcactctgcctgactctggctcaggtagtccctgggaaactcttcaggaaacattcctgtagaaaatatatctatttaaatatcatctgttttatcccacaatgtttgtttcgtgttgcaagccattatcttctaggcatgggtaatccacattgagaggaaaatccacacaacattgtgcctgatttgctgccacctgtgtttgtgctggatcttgccagtgttagctttattttctttcaactggcaaaattctgataaagcatatagcttcacagtagagcaaaatgggtgacttaattgaaagtcatgactttcagcagtctaattatgctcatattttattttcttatagagagctgtctttattgtgtgtaattcccggaagaatgtaaagatttatctaattcctattgctctgccagttgtgttcaatgcaagcattgaagtaaaataaaaataacctttttaatatgtgtatttctgttgcccacaaagatatttaatttttttcttgatctttgtttttgtttatgtgaaaatatttacatatgtatcatttctgtatatatcacagaaaagttttcacttgcttgacattttattctacaatgatttttagtttaagtttaaagaatggctacattcagatttattttcacaactatagtcctgctaaactgccttcattgaaaactcagtttttatgataaaaaatatcaaagcacaagtttgttattggaggtaaattatacatttcttagatatctattggtactagacctttgtaattaaaattaatttattttacaatagtaactgacctgtatggaaaaaaaaacaaccttgaattatgggttctaatatttaaatatcgaaaaatatggttatttgtgcatattcttattacaaccaagaaaagaactcctgataagaaaataaataaatatttaacatttctaa

SEQ ID NO: 391 - DNA, 6028 bp, Homo sapiens
gcggggagcgcttgcatccgctgcgctgggcagggcgagcagtttggcggagtgcggggaggaatgaggctggagagaccgaagttgtgccggagaagcttgggttttcgggagggtttttgcagctggactggagttatttcggtcggcgccacacgattaagaagccttcaaccagttctaggagtagtgtttctaagaatcatggataaaaacctcatgtttcttgcataagctgatactgcttcagacattctaatccattgacgaggcaaaaggactcttgtggaagatggaactcattgtccattttccagaatgtatttccaagcccatcaatgggacctgatactgctgttctgtgttgaaatgcttgaagaactcctgcatctctgcttgcatcttccatcctactgaaaccatggtcttctcggcagtgttgactgcgttccataccgggacatccaacacaacatttgtcgtgtatgaaaacacctacatgaatattacactccctccaccattccagcatcctgacctcagtccattgcttagatatagttttgaaaccatggctcccactggtttgagttccttgaccgtgaatagtacagctgtgcccacaacaccagcagcatttaagagcctaaacttgcctcttcagatcaccctttctgctataatgatattcattctgtttgtgtcttttcttgggaacttggttgtttgcctcatggtttaccaaaaagctgccatgaggtctgcaattaacatcctccttgccagcctagcttttgcagacatgttgcttgcagtgctgaacatgccctttgccctggtaactattcttactacccgatggatttttgggaaattcttctgtagggtatctgctatgtttttctggttatttgtgatagaaggagtagccatcctgctcatcattagcatagataggttccttattatagtccagaggcaggataagctaaacccatatagagctaaggttctgattgcagtttcttgggcaacttccttttgtgtagcttttcctttagccgtaggaaaccccgacctgcagataccttcccgagctccccagtgtgtgtttgggtacacaaccaatccaggctaccaggcttatgtgattttgatttctctcatttctttcttcatacccttcctggtaatactgtactcatttatgggcatactcaacacccttcggcacaatgccttgaggatccatagctaccctgaaggtatatgcctcagccaggccagcaaactgggtctcatgagtctgcagagacctttccagatgagcattgacatgggctttaaaacacgtgccttcaccactattttgattctctttgctgtcttcattgtctgctgggccccattcaccacttacagccttgtggcaacattcagtaagcacttttactatcagcacaacttttttgagattagcacctggctactgtggctctgctacctcaagtctgcattgaatccgctgatctactactggaggattaagaaattccatgatgcttgcctggacatgatgcctaagtccttcaagtttttgccgcagctccctggtcacacaaagcgacggatacgtcctagtgctgtctatgtgtgtggggaacatcggacggtggtgtgaatattggaactggctgacattttgggtgatgcttgttctttattgacattgaattctctttctcatagcctctccactttatttttttttatagggtttgtgtatgtatgtgtgtgagcagtgtaaagaaagaatggtaattatagttctgttaccaagaataaataataggaaagtgattacaaatattacctccagggttcaatagaaatcctcaatttagggtgaggagacttttttttggttttggggtttttccttgattgattttgttttcatagtgggaatcaggattgtgctttattgagcctgcagttacattgaattgtaggtgtttcgtgtgctgctaaggtatgcttatttgagtttatcaagactttttttttctggaagacactgctgcttttaccatcacattggagccaaacatctcaatcaatatatatttagttttattttaaaaactaacccaggaaggttagcgacattttaagggtcattactatttactttggtgcactttaagagataatgtacaaattaattcagtcttatttttcagaattgtttttatacatgatatgtgctttaggaaatgtgcattatcatttatgggaagatagttttaagaaatgttttatctgcatgtacagttgtaaaagagaacataaaatgtagatacttttctaagcacaatagcaactcttcaagcaatagcgcaaaatctaggagacaggatccttgcaaatttaaaaggtgaatgtagtgagggggatggcaagtggctggtacaggctgtggtgattccttttactcaagggtttttgtggagtatagggagaaggggttgatatttatggacacctatgtgtcaggcactgtgcatcattttatccttacaggatgttgtgaggtaggtattattgttttcatttttacaggtgaagaaagcaggtctcagagggactaaaatcctgcccaaggttagtggtagagctgggatccaaaaatctgtcagaatcctgagactgcgctgttccactgtgccacgcagacagttcattcagtttagatgtcacatagtcaagagggaactctatgcatcctttaattttttagactatgatattctttttaaaaattagcctttattttctaactaccaaaagaaatatgaaagcattacagaaacactggaaaatagaaaagaaaaaataaaatcacttacaaccactttttgttttttggagtctcgctttgccacccaggctggagtgcagtggtgtgatcatggctcattgtagcctcaacctcccaggctcaggtaatcctcctgtctcagcctcctgaatagctggaaccacacacacacacgcacacacaggtgtgtgccaccacacccagctatttttttgtattttcttttgtaaagacaaggtttcaccatgttgcccaggctggtctcagagtcctgagctcaaacgatctgcctgccttggcctcccaaaatgttgggattacaggcatgagccaccacatctgacctacaaccactttttaatgtgagacttaaaaatcttagataaataaggctgtgaagcaaaaccagtgatttttttttttgtttttgatttgcaaaacaagtgactgacaattattgagaaattaaagatagctatgtgtaggtcttgcccctgcgggtttggaggtttccagttgtccatctgtgttagttgtaagtgttctgggcagaatagtattgttgccccaatgcttgccctagcagagctggagtttgtgaacgtgctcagatgtgtgtctcctacaaagaagggaaaatgaaccctcgtctgagcctagaacaagttttaatagggcatgtctgacatttcaaattgtttttctcttgctgacagtctgcccccaggtgcatctagggccttggtcagcttctctgttaccagtggctcactttataaaacagcccacagggataagggctgaaaatatagccacttggctacatcattgactaattaagtaagttaactgtggatttatagcatcttttcaggatgttagtgttttgtgagccagtggaaaaaataagcttctatttcttcatttgtaaaaccagagagttggattagatgaatctctaacgtcctgtccagctcaaatgtgctttcctctatactagggtatagatttttgaagagcctagctgacttcagcatcacctcaccctttggtctccagtattacttctttacattttacttcattagctatttcttaatattaaatgtctgaagagtgtggcactgtatcaggagttggggcattgaaaggttgaagacatcatgaaatatctgggaaactctgctcttaaggaaattgcaccgatgttggaactcattgtccagttaaagagctctttggggactcaagcatattattcaacatgttgttttgggattatcttcaaatgatagtcacctacctctttcatttctaatttttattcacaggtaaaattgtttttgtccatagggattttataggacataagcactgtagtagatactagtagcattttgaagtgtattatgctctccattttccatataaactagatttcaagcagatattgataaggacattttttattagacttttctctgaggaaagtcagcatgatctgtattcatcttacatattgataggtcatgaagactcctttttggctggaggtgaaactgagctttgttttctttgttcctgttttatgggcagtctttaggtactttcatgctgcttaataggcagtgcctcatttggtgagagctctggagtgcctgccgagacgctccctgtttgtgaacaaagattatgaaggggtctttgtgagaattcagcagcaacactgaacagcagttctttttacactggattatcttgatctgatgagagtttacaaatcattttgaacatttttattatgtatacattgtgaaagctttaaaaataagtactatggagcacctttgagaaacgtaggtgcaaaatcatatgttgcctattcccccatattttcttgaggcagggaaagataccactactaattctcactgcttacaggcataatcagaaatggttttttgtttgcctgtttttccttctggctagtaagaagcgtaaaagagataatgaaatatttgtggtcaaaagaaagatgcaagggaaattccaaatagtatggagtaacattatttaaactttaatacatgtttaagcatccccaagggagcttgttaacagtacagattcctgggcctccagagggtctgtggttgagcccaggaatgtgcatttttattttattgagcactctgcctgactctggctcaggtagtccctgggaaactcttcaggaaacattcctgtagaaaatatatctatttaaatatcatctgttttatcccacaatgtttgtttcgtgttgcaagccattatcttctaggcatgggtaatccacattgagaggaaaatccacacaacattgtgcctgatttgctgccacctgtgtttgtgctggatcttgccagtgttagctttattttctttcaactggcaaaattctgataaagcatatagcttcacagtagagcaaaatgggtgacttaattgaaagtcatgactttcagcagtctaattatgctcatattttattttcttatagagagctgtctttattgtgtgtaattcccggaagaatgtaaagatttatctaattcctattgctctgccagttgtgttcaatgcaagcattgaagtaaaataaaaataacctttttaatatgtgtatttctgttgcccacaaagatatttaatttttttcttgatctttgtttttgtttatgtgaaaatatttacatatgtatcatttctgtatatatcacagaaaagttttcacttgcttgacattttattctacaatgatttttagtttaagtttaaagaatggctacattcagatttattttcacaactatagtcctgctaaactgccttcattgaaaactcagtttttatgataaaaaatatcaaagcacaagtttgttattggaggtaaattatacatttcttagatatctattggtactagacctttgtaattaaaattaatttattttacaatagtaactgacctgtatggaaaaaaaaacaaccttgaattatgggttctaatatttaaatatcgaaaaatatggttatttgtgcatattcttattacaaccaagaaaagaactcctgataagaaaataaataaatatttaacatttc

SEQ ID NO: 392 - DNA, 6495 bp, Homo sapiens
cccctcccctgcccgtctgagcggttaggccttctaggaaaacggtcggctgcagaggggcaccccatgccggctcctttcctgctgggctgttctggttgagaattcagtgctgggagtgagaggaaggagatgagctccacttgaacttttacacggtggtctcgctgcttgagggctgaaatttaccttgtttgcgagagcgaaaggtcctttcgcgctccaacagttaagagaggttccctcttccatgtggttcagcttgcggcgctgtgtgttgcatccttggccggttttcaacgtcgccctgatttcagtcttttctcctctgccccttttcggaaacattcttctttttaataataaaatatgttgtggaggctcagagtgcttaaaaaaaaaatccaacaacatatctttatgaaaatttcccccagggcttgcccaaattttcaaagagatcgtttagtcttggatgagactgagtctcgacacttagggaatacaggcatccctatagtagcatgcaggtttttagtgaggtaggatgaagtttaaaccatatgtttttaaaataggatttctctttgtttattgggtgagcttgtttttcattatgtcttagattaagaagccttcaaccagttctaggagtagtgtttctaagaatcatggataaaaacctcatgtttcttgcataagctgatactgcttcagacattctaatccattgacgaggcaaaaggactcttgtggaagatggaactcattgtccattttccagaatgtatttccaagcccatcaatgggacctgatactgctgttctgtgttgaaatgcttgaagaactcctgcatctctgcttgcatcttccatcctactgaaaccatggtcttctcggcagtgttgactgcgttccataccgggacatccaacacaacatttgtcgtgtatgaaaacacctacatgaatattacactccctccaccattccagcatcctgacctcagtccattgcttagatatagttttgaaaccatggctcccactggtttgagttccttgaccgtgaatagtacagctgtgcccacaacaccagcagcatttaagagcctaaacttgcctcttcagatcaccctttctgctataatgatattcattctgtttgtgtcttttcttgggaacttggttgtttgcctcatggtttaccaaaaagctgccatgaggtctgcaattaacatcctccttgccagcctagcttttgcagacatgttgcttgcagtgctgaacatgccctttgccctggtaactattcttactacccgatggatttttgggaaattcttctgtagggtatctgctatgtttttctggttatttgtgatagaaggagtagccatcctgctcatcattagcatagataggttccttattatagtccagaggcaggataagctaaacccatatagagctaaggttctgattgcagtttcttgggcaacttccttttgtgtagcttttcctttagccgtaggaaaccccgacctgcagataccttcccgagctccccagtgtgtgtttgggtacacaaccaatccaggctaccaggcttatgtgattttgatttctctcatttctttcttcatacccttcctggtaatactgtactcatttatgggcatactcaacacccttcggcacaatgccttgaggatccatagctaccctgaaggtatatgcctcagccaggccagcaaactgggtctcatgagtctgcagagacctttccagatgagcattgacatgggctttaaaacacgtgccttcaccactattttgattctctttgctgtcttcattgtctgctgggccccattcaccacttacagccttgtggcaacattcagtaagcacttttactatcagcacaacttttttgagattagcacctggctactgtggctctgctacctcaagtctgcattgaatccgctgatctactactggaggattaagaaattccatgatgcttgcctggacatgatgcctaagtccttcaagtttttgccgcagctccctggtcacacaaagcgacggatacgtcctagtgctgtctatgtgtgtggggaacatcggacggtggtgtgaatattggaactggctgacattttgggtgatgcttgttctttattgacattgaattctctttctcatagcctctccactttatttttttttatagggtttgtgtatgtatgtgtgtgagcagtgtaaagaaagaatggtaattatagttctgttaccaagaataaataataggaaagtgattacaaatattacctccagggttcaatagaaatcctcaatttagggtgaggagacttttttttggttttggggtttttccttgattgattttgttttcatagtgggaatcaggattgtgctttattgagcctgcagttacattgaattgtaggtgtttcgtgtgctgctaaggtatgcttatttgagtttatcaagactttttttttctggaagacactgctgcttttaccatcacattggagccaaacatctcaatcaatatatatttagttttattttaaaaactaacccaggaaggttagcgacattttaagggtcattactatttactttggtgcactttaagagataatgtacaaattaattcagtcttatttttcagaattgtttttatacatgatatgtgctttaggaaatgtgcattatcatttatgggaagatagttttaagaaatgttttatctgcatgtacagttgtaaaagagaacataaaatgtagatacttttctaagcacaatagcaactcttcaagcaatagcgcaaaatctaggagacaggatccttgcaaatttaaaaggtgaatgtagtgagggggatggcaagtggctggtacaggctgtggtgattccttttactcaagggtttttgtggagtatagggagaaggggttgatatttatggacacctatgtgtcaggcactgtgcatcattttatccttacaggatgttgtgaggtaggtattattgttttcatttttacaggtgaagaaagcaggtctcagagggactaaaatcctgcccaaggttagtggtagagctgggatccaaaaatctgtcagaatcctgagactgcgctgttccactgtgccacgcagacagttcattcagtttagatgtcacatagtcaagagggaactctatgcatcctttaattttttagactatgatattctttttaaaaattagcctttattttctaactaccaaaagaaatatgaaagcattacagaaacactggaaaatagaaaagaaaaaataaaatcacttacaaccactttttgttttttggagtctcgctttgccacccaggctggagtgcagtggtgtgatcatggctcattgtagcctcaacctcccaggctcaggtaatcctcctgtctcagcctcctgaatagctggaaccacacacacacacgcacacacaggtgtgtgccaccacacccagctatttttttgtattttcttttgtaaagacaaggtttcaccatgttgcccaggctggtctcagagtcctgagctcaaacgatctgcctgccttggcctcccaaaatgttgggattacaggcatgagccaccacatctgacctacaaccactttttaatgtgagacttaaaaatcttagataaataaggctgtgaagcaaaaccagtgatttttttttttgtttttgatttgcaaaacaagtgactgacaattattgagaaattaaagatagctatgtgtaggtcttgcccctgcgggtttggaggtttccagttgtccatctgtgttagttgtaagtgttctgggcagaatagtattgttgccccaatgcttgccctagcagagctggagtttgtgaacgtgctcagatgtgtgtctcctacaaagaagggaaaatgaaccctcgtctgagcctagaacaagttttaatagggcatgtctgacatttcaaattgtttttctcttgctgacagtctgcccccaggtgcatctagggccttggtcagcttctctgttaccagtggctcactttataaaacagcccacagggataagggctgaaaatatagccacttggctacatcattgactaattaagtaagttaactgtggatttatagcatcttttcaggatgttagtgttttgtgagccagtggaaaaaataagcttctatttcttcatttgtaaaaccagagagttggattagatgaatctctaacgtcctgtccagctcaaatgtgctttcctctatactagggtatagatttttgaagagcctagctgacttcagcatcacctcaccctttggtctccagtattacttctttacattttacttcattagctatttcttaatattaaatgtctgaagagtgtggcactgtatcaggagttggggcattgaaaggttgaagacatcatgaaatatctgggaaactctgctcttaaggaaattgcaccgatgttggaactcattgtccagttaaagagctctttggggactcaagcatattattcaacatgttgttttgggattatcttcaaatgatagtcacctacctctttcatttctaatttttattcacaggtaaaattgtttttgtccatagggattttataggacataagcactgtagtagatactagtagcattttgaagtgtattatgctctccattttccatataaactagatttcaagcagatattgataaggacattttttattagacttttctctgaggaaagtcagcatgatctgtattcatcttacatattgataggtcatgaagactcctttttggctggaggtgaaactgagctttgttttctttgttcctgttttatgggcagtctttaggtactttcatgctgcttaataggcagtgcctcatttggtgagagctctggagtgcctgccgagacgctccctgtttgtgaacaaagattatgaaggggtctttgtgagaattcagcagcaacactgaacagcagttctttttacactggattatcttgatctgatgagagtttacaaatcattttgaacatttttattatgtatacattgtgaaagctttaaaaataagtactatggagcacctttgagaaacgtaggtgcaaaatcatatgttgcctattcccccatattttcttgaggcagggaaagataccactactaattctcactgcttacaggcataatcagaaatggttttttgtttgcctgtttttccttctggctagtaagaagcgtaaaagagataatgaaatatttgtggtcaaaagaaagatgcaagggaaattccaaatagtatggagtaacattatttaaactttaatacatgtttaagcatccccaagggagcttgttaacagtacagattcctgggcctccagagggtctgtggttgagcccaggaatgtgcatttttattttattgagcactctgcctgactctggctcaggtagtccctgggaaactcttcaggaaacattcctgtagaaaatatatctatttaaatatcatctgttttatcccacaatgtttgtttcgtgttgcaagccattatcttctaggcatgggtaatccacattgagaggaaaatccacacaacattgtgcctgatttgctgccacctgtgtttgtgctggatcttgccagtgttagctttattttctttcaactggcaaaattctgataaagcatatagcttcacagtagagcaaaatgggtgacttaattgaaagtcatgactttcagcagtctaattatgctcatattttattttcttatagagagctgtctttattgtgtgtaattcccggaagaatgtaaagatttatctaattcctattgctctgccagttgtgttcaatgcaagcattgaagtaaaataaaaataacctttttaatatgtgtatttctgttgcccacaaagatatttaatttttttcttgatctttgtttttgtttatgtgaaaatatttacatatgtatcatttctgtatatatcacagaaaagttttcacttgcttgacattttattctacaatgatttttagtttaagtttaaagaatggctacattcagatttattttcacaactatagtcctgctaaactgccttcattgaaaactcagtttttatgataaaaaatatcaaagcacaagtttgttattggaggtaaattatacatttcttagatatctattggtactagacctttgtaattaaaattaatttattttacaatagtaactgacctgtatggaaaaaaaaacaaccttgaattatgggttctaatatttaaatatcgaaaaatatggttatttgtgcatattcttattacaaccaagaaaagaactcctgataagaaaataaataaatatttaacatttc

SEQ ID NO: 393 - DNA, 5901 bp, Homo sapiens
cccggcccgcgatccccggcccgcgggacagattaagaagccttcaaccagttctaggagtagtgtttctaagaatcatggataaaaacctcatgtttcttgcataagctgatactgcttcagacattctaatccattgacgaggcaaaaggactcttgtggaagatggaactcattgtccattttccagaatgtatttccaagcccatcaatgggacctgatactgctgttctgtgttgaaatgcttgaagaactcctgcatctctgcttgcatcttccatcctactgaaaccatggtcttctcggcagtgttgactgcgttccataccgggacatccaacacaacatttgtcgtgtatgaaaacacctacatgaatattacactccctccaccattccagcatcctgacctcagtccattgcttagatatagttttgaaaccatggctcccactggtttgagttccttgaccgtgaatagtacagctgtgcccacaacaccagcagcatttaagagcctaaacttgcctcttcagatcaccctttctgctataatgatattcattctgtttgtgtcttttcttgggaacttggttgtttgcctcatggtttaccaaaaagctgccatgaggtctgcaattaacatcctccttgccagcctagcttttgcagacatgttgcttgcagtgctgaacatgccctttgccctggtaactattcttactacccgatggatttttgggaaattcttctgtagggtatctgctatgtttttctggttatttgtgatagaaggagtagccatcctgctcatcattagcatagataggttccttattatagtccagaggcaggataagctaaacccatatagagctaaggttctgattgcagtttcttgggcaacttccttttgtgtagcttttcctttagccgtaggaaaccccgacctgcagataccttcccgagctccccagtgtgtgtttgggtacacaaccaatccaggctaccaggcttatgtgattttgatttctctcatttctttcttcatacccttcctggtaatactgtactcatttatgggcatactcaacacccttcggcacaatgccttgaggatccatagctaccctgaaggtatatgcctcagccaggccagcaaactgggtctcatgagtctgcagagacctttccagatgagcattgacatgggctttaaaacacgtgccttcaccactattttgattctctttgctgtcttcattgtctgctgggccccattcaccacttacagccttgtggcaacattcagtaagcacttttactatcagcacaacttttttgagattagcacctggctactgtggctctgctacctcaagtctgcattgaatccgctgatctactactggaggattaagaaattccatgatgcttgcctggacatgatgcctaagtccttcaagtttttgccgcagctccctggtcacacaaagcgacggatacgtcctagtgctgtctatgtgtgtggggaacatcggacggtggtgtgaatattggaactggctgacattttgggtgatgcttgttctttattgacattgaattctctttctcatagcctctccactttatttttttttatagggtttgtgtatgtatgtgtgtgagcagtgtaaagaaagaatggtaattatagttctgttaccaagaataaataataggaaagtgattacaaatattacctccagggttcaatagaaatcctcaatttagggtgaggagacttttttttggttttggggtttttccttgattgattttgttttcatagtgggaatcaggattgtgctttattgagcctgcagttacattgaattgtaggtgtttcgtgtgctgctaaggtatgcttatttgagtttatcaagactttttttttctggaagacactgctgcttttaccatcacattggagccaaacatctcaatcaatatatatttagttttattttaaaaactaacccaggaaggttagcgacattttaagggtcattactatttactttggtgcactttaagagataatgtacaaattaattcagtcttatttttcagaattgtttttatacatgatatgtgctttaggaaatgtgcattatcatttatgggaagatagttttaagaaatgttttatctgcatgtacagttgtaaaagagaacataaaatgtagatacttttctaagcacaatagcaactcttcaagcaatagcgcaaaatctaggagacaggatccttgcaaatttaaaaggtgaatgtagtgagggggatggcaagtggctggtacaggctgtggtgattccttttactcaagggtttttgtggagtatagggagaaggggttgatatttatggacacctatgtgtcaggcactgtgcatcattttatccttacaggatgttgtgaggtaggtattattgttttcatttttacaggtgaagaaagcaggtctcagagggactaaaatcctgcccaaggttagtggtagagctgggatccaaaaatctgtcagaatcctgagactgcgctgttccactgtgccacgcagacagttcattcagtttagatgtcacatagtcaagagggaactctatgcatcctttaattttttagactatgatattctttttaaaaattagcctttattttctaactaccaaaagaaatatgaaagcattacagaaacactggaaaatagaaaagaaaaaataaaatcacttacaaccactttttgttttttggagtctcgctttgccacccaggctggagtgcagtggtgtgatcatggctcattgtagcctcaacctcccaggctcaggtaatcctcctgtctcagcctcctgaatagctggaaccacacacacacacgcacacacaggtgtgtgccaccacacccagctatttttttgtattttcttttgtaaagacaaggtttcaccatgttgcccaggctggtctcagagtcctgagctcaaacgatctgcctgccttggcctcccaaaatgttgggattacaggcatgagccaccacatctgacctacaaccactttttaatgtgagacttaaaaatcttagataaataaggctgtgaagcaaaaccagtgatttttttttttgtttttgatttgcaaaacaagtgactgacaattattgagaaattaaagatagctatgtgtaggtcttgcccctgcgggtttggaggtttccagttgtccatctgtgttagttgtaagtgttctgggcagaatagtattgttgccccaatgcttgccctagcagagctggagtttgtgaacgtgctcagatgtgtgtctcctacaaagaagggaaaatgaaccctcgtctgagcctagaacaagttttaatagggcatgtctgacatttcaaattgtttttctcttgctgacagtctgcccccaggtgcatctagggccttggtcagcttctctgttaccagtggctcactttataaaacagcccacagggataagggctgaaaatatagccacttggctacatcattgactaattaagtaagttaactgtggatttatagcatcttttcaggatgttagtgttttgtgagccagtggaaaaaataagcttctatttcttcatttgtaaaaccagagagttggattagatgaatctctaacgtcctgtccagctcaaatgtgctttcctctatactagggtatagatttttgaagagcctagctgacttcagcatcacctcaccctttggtctccagtattacttctttacattttacttcattagctatttcttaatattaaatgtctgaagagtgtggcactgtatcaggagttggggcattgaaaggttgaagacatcatgaaatatctgggaaactctgctcttaaggaaattgcaccgatgttggaactcattgtccagttaaagagctctttggggactcaagcatattattcaacatgttgttttgggattatcttcaaatgatagtcacctacctctttcatttctaatttttattcacaggtaaaattgtttttgtccatagggattttataggacataagcactgtagtagatactagtagcattttgaagtgtattatgctctccattttccatataaactagatttcaagcagatattgataaggacattttttattagacttttctctgaggaaagtcagcatgatctgtattcatcttacatattgataggtcatgaagactcctttttggctggaggtgaaactgagctttgttttctttgttcctgttttatgggcagtctttaggtactttcatgctgcttaataggcagtgcctcatttggtgagagctctggagtgcctgccgagacgctccctgtttgtgaacaaagattatgaaggggtctttgtgagaattcagcagcaacactgaacagcagttctttttacactggattatcttgatctgatgagagtttacaaatcattttgaacatttttattatgtatacattgtgaaagctttaaaaataagtactatggagcacctttgagaaacgtaggtgcaaaatcatatgttgcctattcccccatattttcttgaggcagggaaagataccactactaattctcactgcttacaggcataatcagaaatggttttttgtttgcctgtttttccttctggctagtaagaagcgtaaaagagataatgaaatatttgtggtcaaaagaaagatgcaagggaaattccaaatagtatggagtaacattatttaaactttaatacatgtttaagcatccccaagggagcttgttaacagtacagattcctgggcctccagagggtctgtggttgagcccaggaatgtgcatttttattttattgagcactctgcctgactctggctcaggtagtccctgggaaactcttcaggaaacattcctgtagaaaatatatctatttaaatatcatctgttttatcccacaatgtttgtttcgtgttgcaagccattatcttctaggcatgggtaatccacattgagaggaaaatccacacaacattgtgcctgatttgctgccacctgtgtttgtgctggatcttgccagtgttagctttattttctttcaactggcaaaattctgataaagcatatagcttcacagtagagcaaaatgggtgacttaattgaaagtcatgactttcagcagtctaattatgctcatattttattttcttatagagagctgtctttattgtgtgtaattcccggaagaatgtaaagatttatctaattcctattgctctgccagttgtgttcaatgcaagcattgaagtaaaataaaaataacctttttaatatgtgtatttctgttgcccacaaagatatttaatttttttcttgatctttgtttttgtttatgtgaaaatatttacatatgtatcatttctgtatatatcacagaaaagttttcacttgcttgacattttattctacaatgatttttagtttaagtttaaagaatggctacattcagatttattttcacaactatagtcctgctaaactgccttcattgaaaactcagtttttatgataaaaaatatcaaagcacaagtttgttattggaggtaaattatacatttcttagatatctattggtactagacctttgtaattaaaattaatttattttacaatagtaactgacctgtatggaaaaaaaaacaaccttgaattatgggttctaatatttaaatatcgaaaaatatggttatttgtgcatattcttattacaaccaagaaaagaactcctgataagaaaataaataaatatttaacatttc

SEQ ID NO: 394 - DNA, 6080 bp, Homo sapiens
actttcagctccagctcccgccaccgccgcctgtatcgccgccgccgccaccacctcctcttcgttgtcctccttcctcctccgcctggcagcgttgttctctgcagcggaggagagaagtgctatgtcaggaaagttccgggagggactacatggagccatgctccctgggctcttccgcgggcgcccgcgcgctgcccttcgcttgagattaagaagccttcaaccagttctaggagtagtgtttctaagaatcatggataaaaacctcatgtttcttgcataagctgatactgcttcagacattctaatccattgacgaggcaaaaggactcttgtggaagatggaactcattgtccattttccagaatgtatttccaagcccatcaatgggacctgatactgctgttctgtgttgaaatgcttgaagaactcctgcatctctgcttgcatcttccatcctactgaaaccatggtcttctcggcagtgttgactgcgttccataccgggacatccaacacaacatttgtcgtgtatgaaaacacctacatgaatattacactccctccaccattccagcatcctgacctcagtccattgcttagatatagttttgaaaccatggctcccactggtttgagttccttgaccgtgaatagtacagctgtgcccacaacaccagcagcatttaagagcctaaacttgcctcttcagatcaccctttctgctataatgatattcattctgtttgtgtcttttcttgggaacttggttgtttgcctcatggtttaccaaaaagctgccatgaggtctgcaattaacatcctccttgccagcctagcttttgcagacatgttgcttgcagtgctgaacatgccctttgccctggtaactattcttactacccgatggatttttgggaaattcttctgtagggtatctgctatgtttttctggttatttgtgatagaaggagtagccatcctgctcatcattagcatagataggttccttattatagtccagaggcaggataagctaaacccatatagagctaaggttctgattgcagtttcttgggcaacttccttttgtgtagcttttcctttagccgtaggaaaccccgacctgcagataccttcccgagctccccagtgtgtgtttgggtacacaaccaatccaggctaccaggcttatgtgattttgatttctctcatttctttcttcatacccttcctggtaatactgtactcatttatgggcatactcaacacccttcggcacaatgccttgaggatccatagctaccctgaaggtatatgcctcagccaggccagcaaactgggtctcatgagtctgcagagacctttccagatgagcattgacatgggctttaaaacacgtgccttcaccactattttgattctctttgctgtcttcattgtctgctgggccccattcaccacttacagccttgtggcaacattcagtaagcacttttactatcagcacaacttttttgagattagcacctggctactgtggctctgctacctcaagtctgcattgaatccgctgatctactactggaggattaagaaattccatgatgcttgcctggacatgatgcctaagtccttcaagtttttgccgcagctccctggtcacacaaagcgacggatacgtcctagtgctgtctatgtgtgtggggaacatcggacggtggtgtgaatattggaactggctgacattttgggtgatgcttgttctttattgacattgaattctctttctcatagcctctccactttatttttttttatagggtttgtgtatgtatgtgtgtgagcagtgtaaagaaagaatggtaattatagttctgttaccaagaataaataataggaaagtgattacaaatattacctccagggttcaatagaaatcctcaatttagggtgaggagacttttttttggttttggggtttttccttgattgattttgttttcatagtgggaatcaggattgtgctttattgagcctgcagttacattgaattgtaggtgtttcgtgtgctgctaaggtatgcttatttgagtttatcaagactttttttttctggaagacactgctgcttttaccatcacattggagccaaacatctcaatcaatatatatttagttttattttaaaaactaacccaggaaggttagcgacattttaagggtcattactatttactttggtgcactttaagagataatgtacaaattaattcagtcttatttttcagaattgtttttatacatgatatgtgctttaggaaatgtgcattatcatttatgggaagatagttttaagaaatgttttatctgcatgtacagttgtaaaagagaacataaaatgtagatacttttctaagcacaatagcaactcttcaagcaatagcgcaaaatctaggagacaggatccttgcaaatttaaaaggtgaatgtagtgagggggatggcaagtggctggtacaggctgtggtgattccttttactcaagggtttttgtggagtatagggagaaggggttgatatttatggacacctatgtgtcaggcactgtgcatcattttatccttacaggatgttgtgaggtaggtattattgttttcatttttacaggtgaagaaagcaggtctcagagggactaaaatcctgcccaaggttagtggtagagctgggatccaaaaatctgtcagaatcctgagactgcgctgttccactgtgccacgcagacagttcattcagtttagatgtcacatagtcaagagggaactctatgcatcctttaattttttagactatgatattctttttaaaaattagcctttattttctaactaccaaaagaaatatgaaagcattacagaaacactggaaaatagaaaagaaaaaataaaatcacttacaaccactttttgttttttggagtctcgctttgccacccaggctggagtgcagtggtgtgatcatggctcattgtagcctcaacctcccaggctcaggtaatcctcctgtctcagcctcctgaatagctggaaccacacacacacacgcacacacaggtgtgtgccaccacacccagctatttttttgtattttcttttgtaaagacaaggtttcaccatgttgcccaggctggtctcagagtcctgagctcaaacgatctgcctgccttggcctcccaaaatgttgggattacaggcatgagccaccacatctgacctacaaccactttttaatgtgagacttaaaaatcttagataaataaggctgtgaagcaaaaccagtgatttttttttttgtttttgatttgcaaaacaagtgactgacaattattgagaaattaaagatagctatgtgtaggtcttgcccctgcgggtttggaggtttccagttgtccatctgtgttagttgtaagtgttctgggcagaatagtattgttgccccaatgcttgccctagcagagctggagtttgtgaacgtgctcagatgtgtgtctcctacaaagaagggaaaatgaaccctcgtctgagcctagaacaagttttaatagggcatgtctgacatttcaaattgtttttctcttgctgacagtctgcccccaggtgcatctagggccttggtcagcttctctgttaccagtggctcactttataaaacagcccacagggataagggctgaaaatatagccacttggctacatcattgactaattaagtaagttaactgtggatttatagcatcttttcaggatgttagtgttttgtgagccagtggaaaaaataagcttctatttcttcatttgtaaaaccagagagttggattagatgaatctctaacgtcctgtccagctcaaatgtgctttcctctatactagggtatagatttttgaagagcctagctgacttcagcatcacctcaccctttggtctccagtattacttctttacattttacttcattagctatttcttaatattaaatgtctgaagagtgtggcactgtatcaggagttggggcattgaaaggttgaagacatcatgaaatatctgggaaactctgctcttaaggaaattgcaccgatgttggaactcattgtccagttaaagagctctttggggactcaagcatattattcaacatgttgttttgggattatcttcaaatgatagtcacctacctctttcatttctaatttttattcacaggtaaaattgtttttgtccatagggattttataggacataagcactgtagtagatactagtagcattttgaagtgtattatgctctccattttccatataaactagatttcaagcagatattgataaggacattttttattagacttttctctgaggaaagtcagcatgatctgtattcatcttacatattgataggtcatgaagactcctttttggctggaggtgaaactgagctttgttttctttgttcctgttttatgggcagtctttaggtactttcatgctgcttaataggcagtgcctcatttggtgagagctctggagtgcctgccgagacgctccctgtttgtgaacaaagattatgaaggggtctttgtgagaattcagcagcaacactgaacagcagttctttttacactggattatcttgatctgatgagagtttacaaatcattttgaacatttttattatgtatacattgtgaaagctttaaaaataagtactatggagcacctttgagaaacgtaggtgcaaaatcatatgttgcctattcccccatattttcttgaggcagggaaagataccactactaattctcactgcttacaggcataatcagaaatggttttttgtttgcctgtttttccttctggctagtaagaagcgtaaaagagataatgaaatatttgtggtcaaaagaaagatgcaagggaaattccaaatagtatggagtaacattatttaaactttaatacatgtttaagcatccccaagggagcttgttaacagtacagattcctgggcctccagagggtctgtggttgagcccaggaatgtgcatttttattttattgagcactctgcctgactctggctcaggtagtccctgggaaactcttcaggaaacattcctgtagaaaatatatctatttaaatatcatctgttttatcccacaatgtttgtttcgtgttgcaagccattatcttctaggcatgggtaatccacattgagaggaaaatccacacaacattgtgcctgatttgctgccacctgtgtttgtgctggatcttgccagtgttagctttattttctttcaactggcaaaattctgataaagcatatagcttcacagtagagcaaaatgggtgacttaattgaaagtcatgactttcagcagtctaattatgctcatattttattttcttatagagagctgtctttattgtgtgtaattcccggaagaatgtaaagatttatctaattcctattgctctgccagttgtgttcaatgcaagcattgaagtaaaataaaaataacctttttaatatgtgtatttctgttgcccacaaagatatttaatttttttcttgatctttgtttttgtttatgtgaaaatatttacatatgtatcatttctgtatatatcacagaaaagttttcacttgcttgacattttattctacaatgatttttagtttaagtttaaagaatggctacattcagatttattttcacaactatagtcctgctaaactgccttcattgaaaactcagtttttatgataaaaaatatcaaagcacaagtttgttattggaggtaaattatacatttcttagatatctattggtactagacctttgtaattaaaattaatttattttacaatagtaactgacctgtatggaaaaaaaaacaaccttgaattatgggttctaatatttaaatatcgaaaaatatggttatttgtgcatattcttattacaaccaagaaaagaactcctgataagaaaataaataaatatttaacatttc

SEQ ID NO: 395 - DNA, 5803 bp, Homo sapiens
gtgaggctcgggatccccggcccgcgatccccggcccgcgggacaggcaaaaggactcttgtggaagatggaactcattgtccattttccagaatgtatttccaagcccatcaatgggacctgatactgctgttctgtgttgaaatgcttgaagaactcctgcatctctgcttgcatcttccatcctactgaaaccatggtcttctcggcagtgttgactgcgttccataccgggacatccaacacaacatttgtcgtgtatgaaaacacctacatgaatattacactccctccaccattccagcatcctgacctcagtccattgcttagatatagttttgaaaccatggctcccactggtttgagttccttgaccgtgaatagtacagctgtgcccacaacaccagcagcatttaagagcctaaacttgcctcttcagatcaccctttctgctataatgatattcattctgtttgtgtcttttcttgggaacttggttgtttgcctcatggtttaccaaaaagctgccatgaggtctgcaattaacatcctccttgccagcctagcttttgcagacatgttgcttgcagtgctgaacatgccctttgccctggtaactattcttactacccgatggatttttgggaaattcttctgtagggtatctgctatgtttttctggttatttgtgatagaaggagtagccatcctgctcatcattagcatagataggttccttattatagtccagaggcaggataagctaaacccatatagagctaaggttctgattgcagtttcttgggcaacttccttttgtgtagcttttcctttagccgtaggaaaccccgacctgcagataccttcccgagctccccagtgtgtgtttgggtacacaaccaatccaggctaccaggcttatgtgattttgatttctctcatttctttcttcatacccttcctggtaatactgtactcatttatgggcatactcaacacccttcggcacaatgccttgaggatccatagctaccctgaaggtatatgcctcagccaggccagcaaactgggtctcatgagtctgcagagacctttccagatgagcattgacatgggctttaaaacacgtgccttcaccactattttgattctctttgctgtcttcattgtctgctgggccccattcaccacttacagccttgtggcaacattcagtaagcacttttactatcagcacaacttttttgagattagcacctggctactgtggctctgctacctcaagtctgcattgaatccgctgatctactactggaggattaagaaattccatgatgcttgcctggacatgatgcctaagtccttcaagtttttgccgcagctccctggtcacacaaagcgacggatacgtcctagtgctgtctatgtgtgtggggaacatcggacggtggtgtgaatattggaactggctgacattttgggtgatgcttgttctttattgacattgaattctctttctcatagcctctccactttatttttttttatagggtttgtgtatgtatgtgtgtgagcagtgtaaagaaagaatggtaattatagttctgttaccaagaataaataataggaaagtgattacaaatattacctccagggttcaatagaaatcctcaatttagggtgaggagacttttttttggttttggggtttttccttgattgattttgttttcatagtgggaatcaggattgtgctttattgagcctgcagttacattgaattgtaggtgtttcgtgtgctgctaaggtatgcttatttgagtttatcaagactttttttttctggaagacactgctgcttttaccatcacattggagccaaacatctcaatcaatatatatttagttttattttaaaaactaacccaggaaggttagcgacattttaagggtcattactatttactttggtgcactttaagagataatgtacaaattaattcagtcttatttttcagaattgtttttatacatgatatgtgctttaggaaatgtgcattatcatttatgggaagatagttttaagaaatgttttatctgcatgtacagttgtaaaagagaacataaaatgtagatacttttctaagcacaatagcaactcttcaagcaatagcgcaaaatctaggagacaggatccttgcaaatttaaaaggtgaatgtagtgagggggatggcaagtggctggtacaggctgtggtgattccttttactcaagggtttttgtggagtatagggagaaggggttgatatttatggacacctatgtgtcaggcactgtgcatcattttatccttacaggatgttgtgaggtaggtattattgttttcatttttacaggtgaagaaagcaggtctcagagggactaaaatcctgcccaaggttagtggtagagctgggatccaaaaatctgtcagaatcctgagactgcgctgttccactgtgccacgcagacagttcattcagtttagatgtcacatagtcaagagggaactctatgcatcctttaattttttagactatgatattctttttaaaaattagcctttattttctaactaccaaaagaaatatgaaagcattacagaaacactggaaaatagaaaagaaaaaataaaatcacttacaaccactttttgttttttggagtctcgctttgccacccaggctggagtgcagtggtgtgatcatggctcattgtagcctcaacctcccaggctcaggtaatcctcctgtctcagcctcctgaatagctggaaccacacacacacacgcacacacaggtgtgtgccaccacacccagctatttttttgtattttcttttgtaaagacaaggtttcaccatgttgcccaggctggtctcagagtcctgagctcaaacgatctgcctgccttggcctcccaaaatgttgggattacaggcatgagccaccacatctgacctacaaccactttttaatgtgagacttaaaaatcttagataaataaggctgtgaagcaaaaccagtgatttttttttttgtttttgatttgcaaaacaagtgactgacaattattgagaaattaaagatagctatgtgtaggtcttgcccctgcgggtttggaggtttccagttgtccatctgtgttagttgtaagtgttctgggcagaatagtattgttgccccaatgcttgccctagcagagctggagtttgtgaacgtgctcagatgtgtgtctcctacaaagaagggaaaatgaaccctcgtctgagcctagaacaagttttaatagggcatgtctgacatttcaaattgtttttctcttgctgacagtctgcccccaggtgcatctagggccttggtcagcttctctgttaccagtggctcactttataaaacagcccacagggataagggctgaaaatatagccacttggctacatcattgactaattaagtaagttaactgtggatttatagcatcttttcaggatgttagtgttttgtgagccagtggaaaaaataagcttctatttcttcatttgtaaaaccagagagttggattagatgaatctctaacgtcctgtccagctcaaatgtgctttcctctatactagggtatagatttttgaagagcctagctgacttcagcatcacctcaccctttggtctccagtattacttctttacattttacttcattagctatttcttaatattaaatgtctgaagagtgtggcactgtatcaggagttggggcattgaaaggttgaagacatcatgaaatatctgggaaactctgctcttaaggaaattgcaccgatgttggaactcattgtccagttaaagagctctttggggactcaagcatattattcaacatgttgttttgggattatcttcaaatgatagtcacctacctctttcatttctaatttttattcacaggtaaaattgtttttgtccatagggattttataggacataagcactgtagtagatactagtagcattttgaagtgtattatgctctccattttccatataaactagatttcaagcagatattgataaggacattttttattagacttttctctgaggaaagtcagcatgatctgtattcatcttacatattgataggtcatgaagactcctttttggctggaggtgaaactgagctttgttttctttgttcctgttttatgggcagtctttaggtactttcatgctgcttaataggcagtgcctcatttggtgagagctctggagtgcctgccgagacgctccctgtttgtgaacaaagattatgaaggggtctttgtgagaattcagcagcaacactgaacagcagttctttttacactggattatcttgatctgatgagagtttacaaatcattttgaacatttttattatgtatacattgtgaaagctttaaaaataagtactatggagcacctttgagaaacgtaggtgcaaaatcatatgttgcctattcccccatattttcttgaggcagggaaagataccactactaattctcactgcttacaggcataatcagaaatggttttttgtttgcctgtttttccttctggctagtaagaagcgtaaaagagataatgaaatatttgtggtcaaaagaaagatgcaagggaaattccaaatagtatggagtaacattatttaaactttaatacatgtttaagcatccccaagggagcttgttaacagtacagattcctgggcctccagagggtctgtggttgagcccaggaatgtgcatttttattttattgagcactctgcctgactctggctcaggtagtccctgggaaactcttcaggaaacattcctgtagaaaatatatctatttaaatatcatctgttttatcccacaatgtttgtttcgtgttgcaagccattatcttctaggcatgggtaatccacattgagaggaaaatccacacaacattgtgcctgatttgctgccacctgtgtttgtgctggatcttgccagtgttagctttattttctttcaactggcaaaattctgataaagcatatagcttcacagtagagcaaaatgggtgacttaattgaaagtcatgactttcagcagtctaattatgctcatattttattttcttatagagagctgtctttattgtgtgtaattcccggaagaatgtaaagatttatctaattcctattgctctgccagttgtgttcaatgcaagcattgaagtaaaataaaaataacctttttaatatgtgtatttctgttgcccacaaagatatttaatttttttcttgatctttgtttttgtttatgtgaaaatatttacatatgtatcatttctgtatatatcacagaaaagttttcacttgcttgacattttattctacaatgatttttagtttaagtttaaagaatggctacattcagatttattttcacaactatagtcctgctaaactgccttcattgaaaactcagtttttatgataaaaaatatcaaagcacaagtttgttattggaggtaaattatacatttcttagatatctattggtactagacctttgtaattaaaattaatttattttacaatagtaactgacctgtatggaaaaaaaaacaaccttgaattatgggttctaatatttaaatatcgaaaaatatggttatttgtgcatattcttattacaaccaagaaaagaactcctgataagaaaataaataaatatttaacatttc

SEQ ID NO: 396 - DNA, 5972 bp, Homo sapiens
actttcagctccagctcccgccaccgccgcctgtatcgccgccgccgccaccacctcctcttcgttgtcctccttcctcctccgcctggcagcgttgttctctgcagcggaggagagaagtgctatgtcaggaaagttccgggagggactacatggagccatgctccctgggctcttccgcgggcgcccgcgcgctgcccttcgcttgaggtgaggcaaaaggactcttgtggaagatggaactcattgtccattttccagaatgtatttccaagcccatcaatgggacctgatactgctgttctgtgttgaaatgcttgaagaactcctgcatctctgcttgcatcttccatcctactgaaaccatggtcttctcggcagtgttgactgcgttccataccgggacatccaacacaacatttgtcgtgtatgaaaacacctacatgaatattacactccctccaccattccagcatcctgacctcagtccattgcttagatatagttttgaaaccatggctcccactggtttgagttccttgaccgtgaatagtacagctgtgcccacaacaccagcagcatttaagagcctaaacttgcctcttcagatcaccctttctgctataatgatattcattctgtttgtgtcttttcttgggaacttggttgtttgcctcatggtttaccaaaaagctgccatgaggtctgcaattaacatcctccttgccagcctagcttttgcagacatgttgcttgcagtgctgaacatgccctttgccctggtaactattcttactacccgatggatttttgggaaattcttctgtagggtatctgctatgtttttctggttatttgtgatagaaggagtagccatcctgctcatcattagcatagataggttccttattatagtccagaggcaggataagctaaacccatatagagctaaggttctgattgcagtttcttgggcaacttccttttgtgtagcttttcctttagccgtaggaaaccccgacctgcagataccttcccgagctccccagtgtgtgtttgggtacacaaccaatccaggctaccaggcttatgtgattttgatttctctcatttctttcttcatacccttcctggtaatactgtactcatttatgggcatactcaacacccttcggcacaatgccttgaggatccatagctaccctgaaggtatatgcctcagccaggccagcaaactgggtctcatgagtctgcagagacctttccagatgagcattgacatgggctttaaaacacgtgccttcaccactattttgattctctttgctgtcttcattgtctgctgggccccattcaccacttacagccttgtggcaacattcagtaagcacttttactatcagcacaacttttttgagattagcacctggctactgtggctctgctacctcaagtctgcattgaatccgctgatctactactggaggattaagaaattccatgatgcttgcctggacatgatgcctaagtccttcaagtttttgccgcagctccctggtcacacaaagcgacggatacgtcctagtgctgtctatgtgtgtggggaacatcggacggtggtgtgaatattggaactggctgacattttgggtgatgcttgttctttattgacattgaattctctttctcatagcctctccactttatttttttttatagggtttgtgtatgtatgtgtgtgagcagtgtaaagaaagaatggtaattatagttctgttaccaagaataaataataggaaagtgattacaaatattacctccagggttcaatagaaatcctcaatttagggtgaggagacttttttttggttttggggtttttccttgattgattttgttttcatagtgggaatcaggattgtgctttattgagcctgcagttacattgaattgtaggtgtttcgtgtgctgctaaggtatgcttatttgagtttatcaagactttttttttctggaagacactgctgcttttaccatcacattggagccaaacatctcaatcaatatatatttagttttattttaaaaactaacccaggaaggttagcgacattttaagggtcattactatttactttggtgcactttaagagataatgtacaaattaattcagtcttatttttcagaattgtttttatacatgatatgtgctttaggaaatgtgcattatcatttatgggaagatagttttaagaaatgttttatctgcatgtacagttgtaaaagagaacataaaatgtagatacttttctaagcacaatagcaactcttcaagcaatagcgcaaaatctaggagacaggatccttgcaaatttaaaaggtgaatgtagtgagggggatggcaagtggctggtacaggctgtggtgattccttttactcaagggtttttgtggagtatagggagaaggggttgatatttatggacacctatgtgtcaggcactgtgcatcattttatccttacaggatgttgtgaggtaggtattattgttttcatttttacaggtgaagaaagcaggtctcagagggactaaaatcctgcccaaggttagtggtagagctgggatccaaaaatctgtcagaatcctgagactgcgctgttccactgtgccacgcagacagttcattcagtttagatgtcacatagtcaagagggaactctatgcatcctttaattttttagactatgatattctttttaaaaattagcctttattttctaactaccaaaagaaatatgaaagcattacagaaacactggaaaatagaaaagaaaaaataaaatcacttacaaccactttttgttttttggagtctcgctttgccacccaggctggagtgcagtggtgtgatcatggctcattgtagcctcaacctcccaggctcaggtaatcctcctgtctcagcctcctgaatagctggaaccacacacacacacgcacacacaggtgtgtgccaccacacccagctatttttttgtattttcttttgtaaagacaaggtttcaccatgttgcccaggctggtctcagagtcctgagctcaaacgatctgcctgccttggcctcccaaaatgttgggattacaggcatgagccaccacatctgacctacaaccactttttaatgtgagacttaaaaatcttagataaataaggctgtgaagcaaaaccagtgatttttttttttgtttttgatttgcaaaacaagtgactgacaattattgagaaattaaagatagctatgtgtaggtcttgcccctgcgggtttggaggtttccagttgtccatctgtgttagttgtaagtgttctgggcagaatagtattgttgccccaatgcttgccctagcagagctggagtttgtgaacgtgctcagatgtgtgtctcctacaaagaagggaaaatgaaccctcgtctgagcctagaacaagttttaatagggcatgtctgacatttcaaattgtttttctcttgctgacagtctgcccccaggtgcatctagggccttggtcagcttctctgttaccagtggctcactttataaaacagcccacagggataagggctgaaaatatagccacttggctacatcattgactaattaagtaagttaactgtggatttatagcatcttttcaggatgttagtgttttgtgagccagtggaaaaaataagcttctatttcttcatttgtaaaaccagagagttggattagatgaatctctaacgtcctgtccagctcaaatgtgctttcctctatactagggtatagatttttgaagagcctagctgacttcagcatcacctcaccctttggtctccagtattacttctttacattttacttcattagctatttcttaatattaaatgtctgaagagtgtggcactgtatcaggagttggggcattgaaaggttgaagacatcatgaaatatctgggaaactctgctcttaaggaaattgcaccgatgttggaactcattgtccagttaaagagctctttggggactcaagcatattattcaacatgttgttttgggattatcttcaaatgatagtcacctacctctttcatttctaatttttattcacaggtaaaattgtttttgtccatagggattttataggacataagcactgtagtagatactagtagcattttgaagtgtattatgctctccattttccatataaactagatttcaagcagatattgataaggacattttttattagacttttctctgaggaaagtcagcatgatctgtattcatcttacatattgataggtcatgaagactcctttttggctggaggtgaaactgagctttgttttctttgttcctgttttatgggcagtctttaggtactttcatgctgcttaataggcagtgcctcatttggtgagagctctggagtgcctgccgagacgctccctgtttgtgaacaaagattatgaaggggtctttgtgagaattcagcagcaacactgaacagcagttctttttacactggattatcttgatctgatgagagtttacaaatcattttgaacatttttattatgtatacattgtgaaagctttaaaaataagtactatggagcacctttgagaaacgtaggtgcaaaatcatatgttgcctattcccccatattttcttgaggcagggaaagataccactactaattctcactgcttacaggcataatcagaaatggttttttgtttgcctgtttttccttctggctagtaagaagcgtaaaagagataatgaaatatttgtggtcaaaagaaagatgcaagggaaattccaaatagtatggagtaacattatttaaactttaatacatgtttaagcatccccaagggagcttgttaacagtacagattcctgggcctccagagggtctgtggttgagcccaggaatgtgcatttttattttattgagcactctgcctgactctggctcaggtagtccctgggaaactcttcaggaaacattcctgtagaaaatatatctatttaaatatcatctgttttatcccacaatgtttgtttcgtgttgcaagccattatcttctaggcatgggtaatccacattgagaggaaaatccacacaacattgtgcctgatttgctgccacctgtgtttgtgctggatcttgccagtgttagctttattttctttcaactggcaaaattctgataaagcatatagcttcacagtagagcaaaatgggtgacttaattgaaagtcatgactttcagcagtctaattatgctcatattttattttcttatagagagctgtctttattgtgtgtaattcccggaagaatgtaaagatttatctaattcctattgctctgccagttgtgttcaatgcaagcattgaagtaaaataaaaataacctttttaatatgtgtatttctgttgcccacaaagatatttaatttttttcttgatctttgtttttgtttatgtgaaaatatttacatatgtatcatttctgtatatatcacagaaaagttttcacttgcttgacattttattctacaatgatttttagtttaagtttaaagaatggctacattcagatttattttcacaactatagtcctgctaaactgccttcattgaaaactcagtttttatgataaaaaatatcaaagcacaagtttgttattggaggtaaattatacatttcttagatatctattggtactagacctttgtaattaaaattaatttattttacaatagtaactgacctgtatggaaaaaaaaacaaccttgaattatgggttctaatatttaaatatcgaaaaatatggttatttgtgcatattcttattacaaccaagaaaagaactcctgataagaaaataaataaatatttaacatttc

SEQ ID NO: 397 - DNA, 6037 bp, Homo sapiens
gactctgtctggaaaaaaaaaaaaaaaatcaatgactgattctaagtcgaaataatgagtaaactgcagtttgttttaaactgctgtacatgtatgttttcccagtctcttaagagcttattaaaggaatctagccagaaattcagagacttctttctaactataaagaggttacctctccagtaaagacctacggaaggaaaaacccataccacaaaatgtgtaagacagcagataaagaaagtcccttacagaaaactctggagttacagaaatctgggcaaaaggactcttgtggaagatggaactcattgtccattttccagaatgtatttccaagcccatcaatgggacctgatactgctgttctgtgttgaaatgcttgaagaactcctgcatctctgcttgcatcttccatcctactgaaaccatggtcttctcggcagtgttgactgcgttccataccgggacatccaacacaacatttgtcgtgtatgaaaacacctacatgaatattacactccctccaccattccagcatcctgacctcagtccattgcttagatatagttttgaaaccatggctcccactggtttgagttccttgaccgtgaatagtacagctgtgcccacaacaccagcagcatttaagagcctaaacttgcctcttcagatcaccctttctgctataatgatattcattctgtttgtgtcttttcttgggaacttggttgtttgcctcatggtttaccaaaaagctgccatgaggtctgcaattaacatcctccttgccagcctagcttttgcagacatgttgcttgcagtgctgaacatgccctttgccctggtaactattcttactacccgatggatttttgggaaattcttctgtagggtatctgctatgtttttctggttatttgtgatagaaggagtagccatcctgctcatcattagcatagataggttccttattatagtccagaggcaggataagctaaacccatatagagctaaggttctgattgcagtttcttgggcaacttccttttgtgtagcttttcctttagccgtaggaaaccccgacctgcagataccttcccgagctccccagtgtgtgtttgggtacacaaccaatccaggctaccaggcttatgtgattttgatttctctcatttctttcttcatacccttcctggtaatactgtactcatttatgggcatactcaacacccttcggcacaatgccttgaggatccatagctaccctgaaggtatatgcctcagccaggccagcaaactgggtctcatgagtctgcagagacctttccagatgagcattgacatgggctttaaaacacgtgccttcaccactattttgattctctttgctgtcttcattgtctgctgggccccattcaccacttacagccttgtggcaacattcagtaagcacttttactatcagcacaacttttttgagattagcacctggctactgtggctctgctacctcaagtctgcattgaatccgctgatctactactggaggattaagaaattccatgatgcttgcctggacatgatgcctaagtccttcaagtttttgccgcagctccctggtcacacaaagcgacggatacgtcctagtgctgtctatgtgtgtggggaacatcggacggtggtgtgaatattggaactggctgacattttgggtgatgcttgttctttattgacattgaattctctttctcatagcctctccactttatttttttttatagggtttgtgtatgtatgtgtgtgagcagtgtaaagaaagaatggtaattatagttctgttaccaagaataaataataggaaagtgattacaaatattacctccagggttcaatagaaatcctcaatttagggtgaggagacttttttttggttttggggtttttccttgattgattttgttttcatagtgggaatcaggattgtgctttattgagcctgcagttacattgaattgtaggtgtttcgtgtgctgctaaggtatgcttatttgagtttatcaagactttttttttctggaagacactgctgcttttaccatcacattggagccaaacatctcaatcaatatatatttagttttattttaaaaactaacccaggaaggttagcgacattttaagggtcattactatttactttggtgcactttaagagataatgtacaaattaattcagtcttatttttcagaattgtttttatacatgatatgtgctttaggaaatgtgcattatcatttatgggaagatagttttaagaaatgttttatctgcatgtacagttgtaaaagagaacataaaatgtagatacttttctaagcacaatagcaactcttcaagcaatagcgcaaaatctaggagacaggatccttgcaaatttaaaaggtgaatgtagtgagggggatggcaagtggctggtacaggctgtggtgattccttttactcaagggtttttgtggagtatagggagaaggggttgatatttatggacacctatgtgtcaggcactgtgcatcattttatccttacaggatgttgtgaggtaggtattattgttttcatttttacaggtgaagaaagcaggtctcagagggactaaaatcctgcccaaggttagtggtagagctgggatccaaaaatctgtcagaatcctgagactgcgctgttccactgtgccacgcagacagttcattcagtttagatgtcacatagtcaagagggaactctatgcatcctttaattttttagactatgatattctttttaaaaattagcctttattttctaactaccaaaagaaatatgaaagcattacagaaacactggaaaatagaaaagaaaaaataaaatcacttacaaccactttttgttttttggagtctcgctttgccacccaggctggagtgcagtggtgtgatcatggctcattgtagcctcaacctcccaggctcaggtaatcctcctgtctcagcctcctgaatagctggaaccacacacacacacgcacacacaggtgtgtgccaccacacccagctatttttttgtattttcttttgtaaagacaaggtttcaccatgttgcccaggctggtctcagagtcctgagctcaaacgatctgcctgccttggcctcccaaaatgttgggattacaggcatgagccaccacatctgacctacaaccactttttaatgtgagacttaaaaatcttagataaataaggctgtgaagcaaaaccagtgatttttttttttgtttttgatttgcaaaacaagtgactgacaattattgagaaattaaagatagctatgtgtaggtcttgcccctgcgggtttggaggtttccagttgtccatctgtgttagttgtaagtgttctgggcagaatagtattgttgccccaatgcttgccctagcagagctggagtttgtgaacgtgctcagatgtgtgtctcctacaaagaagggaaaatgaaccctcgtctgagcctagaacaagttttaatagggcatgtctgacatttcaaattgtttttctcttgctgacagtctgcccccaggtgcatctagggccttggtcagcttctctgttaccagtggctcactttataaaacagcccacagggataagggctgaaaatatagccacttggctacatcattgactaattaagtaagttaactgtggatttatagcatcttttcaggatgttagtgttttgtgagccagtggaaaaaataagcttctatttcttcatttgtaaaaccagagagttggattagatgaatctctaacgtcctgtccagctcaaatgtgctttcctctatactagggtatagatttttgaagagcctagctgacttcagcatcacctcaccctttggtctccagtattacttctttacattttacttcattagctatttcttaatattaaatgtctgaagagtgtggcactgtatcaggagttggggcattgaaaggttgaagacatcatgaaatatctgggaaactctgctcttaaggaaattgcaccgatgttggaactcattgtccagttaaagagctctttggggactcaagcatattattcaacatgttgttttgggattatcttcaaatgatagtcacctacctctttcatttctaatttttattcacaggtaaaattgtttttgtccatagggattttataggacataagcactgtagtagatactagtagcattttgaagtgtattatgctctccattttccatataaactagatttcaagcagatattgataaggacattttttattagacttttctctgaggaaagtcagcatgatctgtattcatcttacatattgataggtcatgaagactcctttttggctggaggtgaaactgagctttgttttctttgttcctgttttatgggcagtctttaggtactttcatgctgcttaataggcagtgcctcatttggtgagagctctggagtgcctgccgagacgctccctgtttgtgaacaaagattatgaaggggtctttgtgagaattcagcagcaacactgaacagcagttctttttacactggattatcttgatctgatgagagtttacaaatcattttgaacatttttattatgtatacattgtgaaagctttaaaaataagtactatggagcacctttgagaaacgtaggtgcaaaatcatatgttgcctattcccccatattttcttgaggcagggaaagataccactactaattctcactgcttacaggcataatcagaaatggttttttgtttgcctgtttttccttctggctagtaagaagcgtaaaagagataatgaaatatttgtggtcaaaagaaagatgcaagggaaattccaaatagtatggagtaacattatttaaactttaatacatgtttaagcatccccaagggagcttgttaacagtacagattcctgggcctccagagggtctgtggttgagcccaggaatgtgcatttttattttattgagcactctgcctgactctggctcaggtagtccctgggaaactcttcaggaaacattcctgtagaaaatatatctatttaaatatcatctgttttatcccacaatgtttgtttcgtgttgcaagccattatcttctaggcatgggtaatccacattgagaggaaaatccacacaacattgtgcctgatttgctgccacctgtgtttgtgctggatcttgccagtgttagctttattttctttcaactggcaaaattctgataaagcatatagcttcacagtagagcaaaatgggtgacttaattgaaagtcatgactttcagcagtctaattatgctcatattttattttcttatagagagctgtctttattgtgtgtaattcccggaagaatgtaaagatttatctaattcctattgctctgccagttgtgttcaatgcaagcattgaagtaaaataaaaataacctttttaatatgtgtatttctgttgcccacaaagatatttaatttttttcttgatctttgtttttgtttatgtgaaaatatttacatatgtatcatttctgtatatatcacagaaaagttttcacttgcttgacattttattctacaatgatttttagtttaagtttaaagaatggctacattcagatttattttcacaactatagtcctgctaaactgccttcattgaaaactcagtttttatgataaaaaatatcaaagcacaagtttgttattggaggtaaattatacatttcttagatatctattggtactagacctttgtaattaaaattaatttattttacaatagtaactgacctgtatggaaaaaaaaacaaccttgaattatgggttctaatatttaaatatcgaaaaatatggttatttgtgcatattcttattacaaccaagaaaagaactcctgataagaaaataaataaatatttaacatttc

SEQ ID NO: 398 - DNA, 2207 bp, Homo sapiens
cacttcctccccagacaggggtagtgcgaggccgggcacagccttcctgtgtggttttaccgcccagagagcgtcatggacctggggaaaccaatgaaaagcgtgctggtggtggctctccttgtcattttccaggtatgcctgtgtcaagatgaggtcacggacgattacatcggagacaacaccacagtggactacactttgttcgagtctttgtgctccaagaaggacgtgcggaactttaaagcctggttcctccctatcatgtactccatcatttgtttcgtgggcctactgggcaatgggctggtcgtgttgacctatatctatttcaagaggctcaagaccatgaccgatacctacctgctcaacctggcggtggcagacatcctcttcctcctgacccttcccttctgggcctacagcgcggccaagtcctgggtcttcggtgtccacttttgcaagctcatctttgccatctacaagatgagcttcttcagtggcatgctcctacttctttgcatcagcattgaccgctacgtggccatcgtccaggctgtctcagctcaccgccaccgtgcccgcgtccttctcatcagcaagctgtcctgtgtgggcatctggatactagccacagtgctctccatcccagagctcctgtacagtgacctccagaggagcagcagtgagcaagcgatgcgatgctctctcatcacagagcatgtggaggcctttatcaccatccaggtggcccagatggtgatcggctttctggtccccctgctggccatgagcttctgttaccttgtcatcatccgcaccctgctccaggcacgcaactttgagcgcaacaaggccatcaaggtgatcatcgctgtggtcgtggtcttcatagtcttccagctgccctacaatggggtggtcctggcccagacggtggccaacttcaacatcaccagtagcacctgtgagctcagtaagcaactcaacatcgcctacgacgtcacctacagcctggcctgcgtccgctgctgcgtcaaccctttcttgtacgccttcatcggcgtcaagttccgcaacgatctcttcaagctcttcaaggacctgggctgcctcagccaggagcagctccggcagtggtcttcctgtcggcacatccggcgctcctccatgagtgtggaggccgagaccaccaccaccttctccccataggcgactcttctgcctggactagagggacctctcccagggtccctggggtggggatagggagcagatgcaatgactcaggacatccccccgccaaaagctgctcagggaaaagcagctctcccctcagagtgcaagcccctgctccagaagatagcttcaccccaatcccagctacctcaaccaatgccaaaaaaagacagggctgataagctaacaccagacagacaacactgggaaacagaggctattgtcccctaaaccaaaaactgaaagtgaaagtccagaaactgttcccacctgctggagtgaaggggccaaggagggtgagtgcaaggggcgtgggagtggcctgaagagtcctctgaatgaaccttctggcctcccacagactcaaatgctcagaccagctcttccgaaaaccaggccttatctccaagaccagagatagtggggagacttcttggcttggtgaggaaaagcggacatcagctggtcaaacaaactctctgaacccctccctccatcgttttcttcactgtcctccaagccagcgggaatggcagctgccacgccgccctaaaagcacactcatcccctcacttgccgcgtcgccctcccaggctctcaacaggggagagtgtggtgtttcctgcaggccaggccagctgcctccgcgtgatcaaagccacactctgggctccagagtggggatgacatgcactcagctcttggctccactgggatgggaggagaggacaagggaaatgtcaggggcggggagggtgacagtggccgcccaaggcccacgagcttgttctttgttctttgtcacagggactgaaaacctctcctcatgttctgctttcgattcgttaagagagcaacattttacccacacacagataaagttttcccttgaggaaacaacagctttaaaagaaaaagaaaaaaaaagtctttggtaaatggcaaaaaaaaaaaaaaaaaaaaaaaaa

SEQ ID NO: 399 - DNA, 2157 bp, Homo sapiens
cacttcctccccagacaggggtagtgcgaggccgggcacagccttcctgtgtggttttaccgcccagagagcgtcatggacctgggtatgcctgtgtcaagatgaggtcacggacgattacatcggagacaacaccacagtggactacactttgttcgagtctttgtgctccaagaaggacgtgcggaactttaaagcctggttcctccctatcatgtactccatcatttgtttcgtgggcctactgggcaatgggctggtcgtgttgacctatatctatttcaagaggctcaagaccatgaccgatacctacctgctcaacctggcggtggcagacatcctcttcctcctgacccttcccttctgggcctacagcgcggccaagtcctgggtcttcggtgtccacttttgcaagctcatctttgccatctacaagatgagcttcttcagtggcatgctcctacttctttgcatcagcattgaccgctacgtggccatcgtccaggctgtctcagctcaccgccaccgtgcccgcgtccttctcatcagcaagctgtcctgtgtgggcatctggatactagccacagtgctctccatcccagagctcctgtacagtgacctccagaggagcagcagtgagcaagcgatgcgatgctctctcatcacagagcatgtggaggcctttatcaccatccaggtggcccagatggtgatcggctttctggtccccctgctggccatgagcttctgttaccttgtcatcatccgcaccctgctccaggcacgcaactttgagcgcaacaaggccatcaaggtgatcatcgctgtggtcgtggtcttcatagtcttccagctgccctacaatggggtggtcctggcccagacggtggccaacttcaacatcaccagtagcacctgtgagctcagtaagcaactcaacatcgcctacgacgtcacctacagcctggcctgcgtccgctgctgcgtcaaccctttcttgtacgccttcatcggcgtcaagttccgcaacgatctcttcaagctcttcaaggacctgggctgcctcagccaggagcagctccggcagtggtcttcctgtcggcacatccggcgctcctccatgagtgtggaggccgagaccaccaccaccttctccccataggcgactcttctgcctggactagagggacctctcccagggtccctggggtggggatagggagcagatgcaatgactcaggacatccccccgccaaaagctgctcagggaaaagcagctctcccctcagagtgcaagcccctgctccagaagatagcttcaccccaatcccagctacctcaaccaatgccaaaaaaagacagggctgataagctaacaccagacagacaacactgggaaacagaggctattgtcccctaaaccaaaaactgaaagtgaaagtccagaaactgttcccacctgctggagtgaaggggccaaggagggtgagtgcaaggggcgtgggagtggcctgaagagtcctctgaatgaaccttctggcctcccacagactcaaatgctcagaccagctcttccgaaaaccaggccttatctccaagaccagagatagtggggagacttcttggcttggtgaggaaaagcggacatcagctggtcaaacaaactctctgaacccctccctccatcgttttcttcactgtcctccaagccagcgggaatggcagctgccacgccgccctaaaagcacactcatcccctcacttgccgcgtcgccctcccaggctctcaacaggggagagtgtggtgtttcctgcaggccaggccagctgcctccgcgtgatcaaagccacactctgggctccagagtggggatgacatgcactcagctcttggctccactgggatgggaggagaggacaagggaaatgtcaggggcggggagggtgacagtggccgcccaaggcccacgagcttgttctttgttctttgtcacagggactgaaaacctctcctcatgttctgctttcgattcgttaagagagcaacattttacccacacacagataaagttttcccttgaggaaacaacagctttaaaagaaaaagaaaaaaaaagtctttggtaaatggcaaaaaaaaaaaaaaaaaaaaaaaaa

SEQ ID NO: 400 - DNA, 2457 bp, Homo sapiens
ctctagatgagtcagtggagggcgggtggagcgttgaaccgtgaagagtgtggttgggcgtaaacgtggacttaaactcaggagctaaggggtaattcagtgaaaaaggggaatgagcggtggggagctctgttgcaacagggtccaatcgcagcaggactacaaatgcccgagcgcaggctgggaacgaggggacagcggctgcctgtccccagaatagaaaatgcagctaggaagccctctttgagtggacagcggaggactggactgccaggccaagcatcaggggcttcatcctcagggccggttagagcccctgaggatttaggaggaagggaaaccaatgaaaagcgtgctggtggtggctctccttgtcattttccaggtatgcctgtgtcaagatgaggtcacggacgattacatcggagacaacaccacagtggactacactttgttcgagtctttgtgctccaagaaggacgtgcggaactttaaagcctggttcctccctatcatgtactccatcatttgtttcgtgggcctactgggcaatgggctggtcgtgttgacctatatctatttcaagaggctcaagaccatgaccgatacctacctgctcaacctggcggtggcagacatcctcttcctcctgacccttcccttctgggcctacagcgcggccaagtcctgggtcttcggtgtccacttttgcaagctcatctttgccatctacaagatgagcttcttcagtggcatgctcctacttctttgcatcagcattgaccgctacgtggccatcgtccaggctgtctcagctcaccgccaccgtgcccgcgtccttctcatcagcaagctgtcctgtgtgggcatctggatactagccacagtgctctccatcccagagctcctgtacagtgacctccagaggagcagcagtgagcaagcgatgcgatgctctctcatcacagagcatgtggaggcctttatcaccatccaggtggcccagatggtgatcggctttctggtccccctgctggccatgagcttctgttaccttgtcatcatccgcaccctgctccaggcacgcaactttgagcgcaacaaggccatcaaggtgatcatcgctgtggtcgtggtcttcatagtcttccagctgccctacaatggggtggtcctggcccagacggtggccaacttcaacatcaccagtagcacctgtgagctcagtaagcaactcaacatcgcctacgacgtcacctacagcctggcctgcgtccgctgctgcgtcaaccctttcttgtacgccttcatcggcgtcaagttccgcaacgatctcttcaagctcttcaaggacctgggctgcctcagccaggagcagctccggcagtggtcttcctgtcggcacatccggcgctcctccatgagtgtggaggccgagaccaccaccaccttctccccataggcgactcttctgcctggactagagggacctctcccagggtccctggggtggggatagggagcagatgcaatgactcaggacatccccccgccaaaagctgctcagggaaaagcagctctcccctcagagtgcaagcccctgctccagaagatagcttcaccccaatcccagctacctcaaccaatgccaaaaaaagacagggctgataagctaacaccagacagacaacactgggaaacagaggctattgtcccctaaaccaaaaactgaaagtgaaagtccagaaactgttcccacctgctggagtgaaggggccaaggagggtgagtgcaaggggcgtgggagtggcctgaagagtcctctgaatgaaccttctggcctcccacagactcaaatgctcagaccagctcttccgaaaaccaggccttatctccaagaccagagatagtggggagacttcttggcttggtgaggaaaagcggacatcagctggtcaaacaaactctctgaacccctccctccatcgttttcttcactgtcctccaagccagcgggaatggcagctgccacgccgccctaaaagcacactcatcccctcacttgccgcgtcgccctcccaggctctcaacaggggagagtgtggtgtttcctgcaggccaggccagctgcctccgcgtgatcaaagccacactctgggctccagagtggggatgacatgcactcagctcttggctccactgggatgggaggagaggacaagggaaatgtcaggggcggggagggtgacagtggccgcccaaggcccacgagcttgttctttgttctttgtcacagggactgaaaacctctcctcatgttctgctttcgattcgttaagagagcaacattttacccacacacagataaagttttcccttgaggaaacaacagctttaaaagaaaaagaaaaaaaaagtctttggtaaatggcaaaaaaaaaaaaaaaaaaaaaaaaa

SEQ ID NO: 401 - DNA, 2213 bp, Homo sapiens
ctctagatgagtcagtggagggcgggtggagcgttgaaccgtgaagagtgtggttgggcgtaaacgtggacttaaactcaggagctaagggggaaaccaatgaaaagcgtgctggtggtggctctccttgtcattttccaggtatgcctgtgtcaagatgaggtcacggacgattacatcggagacaacaccacagtggactacactttgttcgagtctttgtgctccaagaaggacgtgcggaactttaaagcctggttcctccctatcatgtactccatcatttgtttcgtgggcctactgggcaatgggctggtcgtgttgacctatatctatttcaagaggctcaagaccatgaccgatacctacctgctcaacctggcggtggcagacatcctcttcctcctgacccttcccttctgggcctacagcgcggccaagtcctgggtcttcggtgtccacttttgcaagctcatctttgccatctacaagatgagcttcttcagtggcatgctcctacttctttgcatcagcattgaccgctacgtggccatcgtccaggctgtctcagctcaccgccaccgtgcccgcgtccttctcatcagcaagctgtcctgtgtgggcatctggatactagccacagtgctctccatcccagagctcctgtacagtgacctccagaggagcagcagtgagcaagcgatgcgatgctctctcatcacagagcatgtggaggcctttatcaccatccaggtggcccagatggtgatcggctttctggtccccctgctggccatgagcttctgttaccttgtcatcatccgcaccctgctccaggcacgcaactttgagcgcaacaaggccatcaaggtgatcatcgctgtggtcgtggtcttcatagtcttccagctgccctacaatggggtggtcctggcccagacggtggccaacttcaacatcaccagtagcacctgtgagctcagtaagcaactcaacatcgcctacgacgtcacctacagcctggcctgcgtccgctgctgcgtcaaccctttcttgtacgccttcatcggcgtcaagttccgcaacgatctcttcaagctcttcaaggacctgggctgcctcagccaggagcagctccggcagtggtcttcctgtcggcacatccggcgctcctccatgagtgtggaggccgagaccaccaccaccttctccccataggcgactcttctgcctggactagagggacctctcccagggtccctggggtggggatagggagcagatgcaatgactcaggacatccccccgccaaaagctgctcagggaaaagcagctctcccctcagagtgcaagcccctgctccagaagatagcttcaccccaatcccagctacctcaaccaatgccaaaaaaagacagggctgataagctaacaccagacagacaacactgggaaacagaggctattgtcccctaaaccaaaaactgaaagtgaaagtccagaaactgttcccacctgctggagtgaaggggccaaggagggtgagtgcaaggggcgtgggagtggcctgaagagtcctctgaatgaaccttctggcctcccacagactcaaatgctcagaccagctcttccgaaaaccaggccttatctccaagaccagagatagtggggagacttcttggcttggtgaggaaaagcggacatcagctggtcaaacaaactctctgaacccctccctccatcgttttcttcactgtcctccaagccagcgggaatggcagctgccacgccgccctaaaagcacactcatcccctcacttgccgcgtcgccctcccaggctctcaacaggggagagtgtggtgtttcctgcaggccaggccagctgcctccgcgtgatcaaagccacactctgggctccagagtggggatgacatgcactcagctcttggctccactgggatgggaggagaggacaagggaaatgtcaggggcggggagggtgacagtggccgcccaaggcccacgagcttgttctttgttctttgtcacagggactgaaaacctctcctcatgttctgctttcgattcgttaagagagcaacattttacccacacacagataaagttttcccttgaggaaacaacagctttaaaagaaaaagaaaaaaaaagtctttggtaaatggcaaaaaaaaaaaaaaaaaaaaaaaaa

SEQ ID NO: 402 - DNA, 2303 bp, Homo sapiens
aggagaaggtgccttaaacaggttcccacgcatttcctggcgctattgagcttggagctgccaagggcctgccttcacttgtggcatcgcagttactgactctccagtgggccaggccctacctagctgggacctgagggtcaggatacgggaagagggctactgccgccctgacttgtagggaaaccaatgaaaagcgtgctggtggtggctctccttgtcattttccaggtatgcctgtgtcaagatgaggtcacggacgattacatcggagacaacaccacagtggactacactttgttcgagtctttgtgctccaagaaggacgtgcggaactttaaagcctggttcctccctatcatgtactccatcatttgtttcgtgggcctactgggcaatgggctggtcgtgttgacctatatctatttcaagaggctcaagaccatgaccgatacctacctgctcaacctggcggtggcagacatcctcttcctcctgacccttcccttctgggcctacagcgcggccaagtcctgggtcttcggtgtccacttttgcaagctcatctttgccatctacaagatgagcttcttcagtggcatgctcctacttctttgcatcagcattgaccgctacgtggccatcgtccaggctgtctcagctcaccgccaccgtgcccgcgtccttctcatcagcaagctgtcctgtgtgggcatctggatactagccacagtgctctccatcccagagctcctgtacagtgacctccagaggagcagcagtgagcaagcgatgcgatgctctctcatcacagagcatgtggaggcctttatcaccatccaggtggcccagatggtgatcggctttctggtccccctgctggccatgagcttctgttaccttgtcatcatccgcaccctgctccaggcacgcaactttgagcgcaacaaggccatcaaggtgatcatcgctgtggtcgtggtcttcatagtcttccagctgccctacaatggggtggtcctggcccagacggtggccaacttcaacatcaccagtagcacctgtgagctcagtaagcaactcaacatcgcctacgacgtcacctacagcctggcctgcgtccgctgctgcgtcaaccctttcttgtacgccttcatcggcgtcaagttccgcaacgatctcttcaagctcttcaaggacctgggctgcctcagccaggagcagctccggcagtggtcttcctgtcggcacatccggcgctcctccatgagtgtggaggccgagaccaccaccaccttctccccataggcgactcttctgcctggactagagggacctctcccagggtccctggggtggggatagggagcagatgcaatgactcaggacatccccccgccaaaagctgctcagggaaaagcagctctcccctcagagtgcaagcccctgctccagaagatagcttcaccccaatcccagctacctcaaccaatgccaaaaaaagacagggctgataagctaacaccagacagacaacactgggaaacagaggctattgtcccctaaaccaaaaactgaaagtgaaagtccagaaactgttcccacctgctggagtgaaggggccaaggagggtgagtgcaaggggcgtgggagtggcctgaagagtcctctgaatgaaccttctggcctcccacagactcaaatgctcagaccagctcttccgaaaaccaggccttatctccaagaccagagatagtggggagacttcttggcttggtgaggaaaagcggacatcagctggtcaaacaaactctctgaacccctccctccatcgttttcttcactgtcctccaagccagcgggaatggcagctgccacgccgccctaaaagcacactcatcccctcacttgccgcgtcgccctcccaggctctcaacaggggagagtgtggtgtttcctgcaggccaggccagctgcctccgcgtgatcaaagccacactctgggctccagagtggggatgacatgcactcagctcttggctccactgggatgggaggagaggacaagggaaatgtcaggggcggggagggtgacagtggccgcccaaggcccacgagcttgttctttgttctttgtcacagggactgaaaacctctcctcatgttctgctttcgattcgttaagagagcaacattttacccacacacagataaagttttcccttgaggaaacaacagctttaaaagaaaaagaaaaaaaaagtctttggtaaatggcaaaaaaaaaaaaaaaaaaaaaaaaa

SEQ ID NO: 403 - DNA, 3840 bp, Homo sapiens
agctcagtgtcacagacctttgtggaagcaacaacagctcccatccttccaacctttctggagaagccgtggcctgatgtgcccccaggactctcctgggctgcgggtaggccctttgatccctgaacaggattatgagcggctggaggactgtgaccctgaggggtcccaagactcacccatccacggggaggagcagcaacccctgcttcatgtccctgaagggctccgaggctcctggcatcacatccagaacctggacagtttcttcaccaagatctacagctaccaccagcggaatggctttgcctgcatcttgctggaggatgtcttccagctgggacaatttattttcattgtcaccttcacaaccttcctccttcgatgcgtggattacaatgttctctttgccaaccaaccaagtaaccataccagacctgggccgttccacagcaaagtgaccctgtcagatgccatcctaccctcagcccagtgtgctgagaggatccgctccagcccgctgctggtcctcctcctggtcctggctgccggcttctggctggtccaactgcttcgctcagtctgcaacctcttcagctactgggacatccaggtgttttacagggaggccctgcacatccccccggtctttcattccggaagagcagtgccagggtcgtgcgccgcagctcctgctgcagacagccctggcccacatgcactacctcccggaggagcccggccccggcggcagggaccgcgcctaccggcagatggcgcagctgctgcagtaccgagcggtctccctcctggaggagctcctgtccccgctcctcaccccgctgtttctgcttttctggttccgccctcgtgccctggagattatcgacttttttcatcacttcactgtggatgtggctggggttggggacatctgttcctttgcccttatggatgtgaagcgccacggacaccctcagtggctctcggcgggacagactgaggcctcgctgtctcagcgtgcggaggacggcaagactgagctttctttgatgcggttctccctggcgcatccactctggcgccccccagggcacagctctaagtttcttgggcacctctggggccgagtacaacaagatgcagctgcctggggtgccacctcggctcgcggcccctccaccccgggggtgctcagcaactgcacctcgcccctgcctgaggccttcctggccaacctcttcgtgcaccctctcctgcctccgagagatctgagcccgacagccccctgtccagctgcggccacagccagcctccttgcctccatttcccgaattgcccaggaccccagctctgtgtccccaggaggcactgggggccagaagctggcccagctcccagaacttgcttctgccgagatgagtctccatgtcatctacctgcaccagcttcaccagcagcagcagcagcaggagccgtggggtgaggctgcagcctccatcctgtccaggccctgctccagcccctcacagccaccctcgcctgatgaggagaagccatcctggtcaagtgacggctccagtcctgcctctagccccagacaacagtggggaacccagaaggcccggaatctgttccccggagggtttcaggtgaccacagacacccagaaggagcctgaccgggcctcttgcactgactgagacgactcctcagggtaccctggcttcggcagccacaggagattggagggtggagtagaaaaacacaaggagtcattgttagaggccccatagatgacaggcccaggtgctttagttgggcaggacctgggagtcagtgaggaactcgccccgagaacagagaaaaggtaggcaaggagaggagatgctgatggcatctggaaacaagtcttagagatggtctgcacccagagggaataaggggagacatccccaactggaatgtgtcctggagcagctgcctgggaagaagtcctcgagtttcctcaaggtgggggacagaggtcaaggatgaggccgagctaaatggaagggcgacagtgaggcaggccccactcctggcagctgagtgctgcacctgccttctcgatcacgagcctgagaactgcacgggggagcagcccagactggctggaaaccatgttttcagagtgcagggtcaagtggcgtgtaggactctgtcaaaagaatgacccctttccccaccacatacccacaactgcacagcctctggacagatgtgagaaggcaccacctcaagaggggaggagcggggctgatcctggtcgggcggacctgagtcgggcagccgctctcccggaactggaagggaaagccaggcggctctcaggggctgttggtgtctgagccgggagggtcgaacgcccagggcactgcgccccgcaactgacgctcctgcaaggaaaagctctggcacgccgatgacgtcgccggcctcgtccagctccatgtcgccctccgtcgccaggatgcgctgcacggtctgcaggacgttggttgccatggtaacatcgccgcagacaaacatgtggccccgctcgaggcacagcacgcggtgcacctccgcagccagctccgtcctcaggatgtcctgcacgttaccattgcgccctcagggtctcacaccttggggttgtcaggttcccgggagaaggcggtgaggactcggccaaacaccccgcgctgctgggcgttctgcacctcgtcgcggtagagatggtcaagttgggagcatcggcagccgaacaccaaagtcatgggagtgggctgcagccctgcaagcaaccccgcgcttgggaaggctcttctccggggcacagtgctagtggggcctccccacaggccaccgtcgcccagcctggcagcccagcgttttgggctgaaaccaccattactttggctgtttcatctctaagagagtgtagaatgctttcacagagaccctgcacagccctgatttacagagggaagggaagcgcgggtgaggtggtggcccctggtggagctgcgctagaatgcgcggcttcggactcagaattccatgccctttgcattgtgtgacatcgcagtccccttccccgctcccacttcatattctcccatacttataactctcctcccagtcacagccctcttcttttgattgacagaccaccctgggcaccccatgctcaatatgaacaccttgtagcatccttaggtcttggacagacctcggtcagctctggcacagtcaagaatccaccttgggcagttcttctttgagtcttagccctaatccctttgaaaattctattttcctttgtcctcaatccagtcaacacctactatgtaccaggcaccaggaagccagaagctcagggcccagcccttgcctttggtacctgccctccccttggtctcatgagcgtcttttcagctttgtggactttgtttcctgccctctctttcctatttcctgccttccagccccacccctctgtccctagattgtgtgactcccttcaggcagtcctttagtccccagcctcacctttgctctcaatgtcatgcagccgctcctgccagaatccccggaagggggcaatgccagtgcctggacccaccaggatgcagggcaagctgggatcgggtggcagccggaaggagggagccctggcaggagagacactccatcaggtcccctttgcctttcctgctccaccattctcaccatgcagggtgggtggagcaaggaggacccaagttcttcccatctcaaaaaaaaattaaaaaaaaaacaaaaaacaaaaaacaa

SEQ ID NO: 404 - DNA, 3487 bp, Homo sapiens
agctcagtgtcacagacctttgtggaagcaacaacagctcccatccttccaacctttctggagaagccgtggcctgatggtgagccgaatgggctggggggggagaagaaggcggctggggcggtggggagatctggggcccggatcggtgcccctcctccccatgccactgccacctcctcctcctccttcatgccggggacctgggggagggaggatctccatcttctctctgtcccctgcccctcatacaagaagctccccctcctcattttcccctcccaccgcagggcccccttgctcagtgctacaggggacaggggcttctcagtcttgccacagtgctctccctatcccagccacccccccaacacaggctcaacctgcaatgacacctgcctctgcatctccctcctggggatcccactccaccccacccctggccccggcaacccccactccctcacagcagtgcccccaggactctcctgggctgcgggtaggccctttgatccctgaacaggattatgagcggctggaggactgtgaccctgaggggtcccaagactcacccatccacggggaggagcagcaacccctgcttcatgtccctgaagggctccgaggctcctggcatcacatccagaacctggacagtttcttcaccaagatctacagctaccaccagcggaatggctttgcctgcatcttgctggaggatgtcttccagctgggacaatttattttcattgtcaccttcacaaccttcctccttcgatgcgtggattacaatgttctctttgccaaccaaccaagtaaccataccagacctgggccgttccacagcaaagtgaccctgtcagatgccatcctaccctcagcccagtgtgctgagaggatccgctccagcccgctgctggtcctcctcctggtcctggctgccggcttctggctggtccaactgcttcgctcagtctgcaacctcttcagctactgggacatccaggtgttttacagggaggccctgcacatccccccggaggagctgagctcggttccctgggcagaggtgcagtcccgcctcttggcactgcagcggagcgggggcctgtgcgtgcagccgcggcccctgacggagctggacatccaccaccgcatcctgcgctacaccaactaccaggtggcgctggccaacaaaggcctgctgccggcccgctgcccgctgccctggggaggcagtgcggctttcctcagccgcggcctggcgctcaatgtcgacctgctgctcttccgcggtcccttctcgctcttccgcgggggctgggagctgccgcacgcctacaagcgcagcgaccagcggggcgccctagcagcgcgctgggggcgcacagtgctgctgctggccgccctgaacctggcgctgagcccgctggtgctggcctggcaggttctgcacgtcttctatagccacgtggagctgctgcggcgcgagcctggcgcgctgggggcgcgcggctggtcccgcctggcgcgcttgcagctgcgccacttcaacgagctgccgcacgagctgcgcgcgcgcctggcccgcgcctaccgccccgccgccgccttcctgcgcaccgctgcgccccccgcgcccctgcgcacgctgctggcccgccagctcgttttcttcgcgggtgcactcttcgccgcgctgcttgtgctcaccgtctacgacgaggacgtgctagccgtggagcacgtgctcaccgccatgaccgcgctcggggtcaccgccaccgtcgccaggtctttcattccggaagagcagtgccagggtcgtgcgccgcagctcctgctgcagacagccctggcccacatgcactacctcccggaggagcccggccccggcggcagggaccgcgcctaccggcagatggcgcagctgctgcagtaccgagcggtctccctcctggaggagctcctgtccccgctcctcaccccgctgtttctgcttttctggttccgccctcgtgccctggagattatcgacttttttcatcacttcactgtggatgtggctggggttggggacatctgttcctttgcccttatggatgtgaagcgccacggacaccctcagtggctctcggcgggacagactgaggcctcgctgtctcagcgtgcggaggacggcaagactgagctttctttgatgcggttctccctggcgcatccactctggcgccccccagggcacagctctaagtttcttgggcacctctggggccgagtacaacaagatgcagctgcctggggtgccacctcggctcgcggcccctccaccccgggggtgctcagcaactgcacctcgcccctgcctgaggccttcctggccaacctcttcgtgcaccctctcctgcctccgagagatctgagcccgacagccccctgtccagctgcggccacagccagcctccttgcctccatttcccgaattgcccaggaccccagctctgtgtccccaggaggcactgggggccagaagctggcccagctcccagaacttgcttctgccgagatgagtctccatgtcatctacctgcaccagcttcaccagcagcagcagcagcaggagccgtggggtgaggctgcagcctccatcctgtccaggccctgctccagcccctcacagccaccctcgcctgatgaggagaagccatcctggtcaagtgacggctccagtcctgcctctagccccagacaacagtggggaacccagaaggcccggaatctgttccccggagggtttcaggtgaccacagacacccagaaggagcctgaccgggcctcttgcactgactgagacgactcctcagggccccactcctggcagctgagtgctgcacctgccttctcgatcacgagcctgagaactgcacgggggagcagcccagactggctggaaaccatgttttcagagtgcagggtcaagtggcgtgtaggactctgtcaaaagaatgacccctttccccaccacatacccacaactgcacaggttaaaacagaaatcttgtcattttataattgtaatccacgccgggtgcagtagctcacacctgtaatcccagcactttgggaggctgaggcggttggatcacgaggtcaggagttcaagaccagcctggccaagatggtgaaaccccgtctttactaaaaatacaaaacctagccgggcgcggtggcaggcacctgtaatcccaactacttgggaggctgaggcaggagaatcacttgaacttgtggggtggaggttgcagtgagctgagatcacgccactgcactccagcccgggcggcagagggagactccgtttcaaaaaaaaaaaaacaaaaaaaaaaaactgtaatccacatgagctggggtaggcactttagtagttctcctaacatctggcacagtcccttatggtaaatcttcaataataaatacttgatttaga

SEQ ID NO: 405 - DNA, 3445 bp, Homo sapiens
agctcagtgtcacagacctttgtggaagcaacaacagctcccatccttccaacctttctggagaagccgtggcctgatggtgagccgaatgggctggggggggagaagaaggcggctggggcggtggggagatctggggcccggatcggtgcccctcctccccatgccactgccacctcctcctcctccttcatgccggggacctgggggagggaggatctccatcttctctctgtcccctgcccctcatacaagaagctccccctcctcattttcccctcccaccgcagggcccccttgctcagtgctacaggggacaggggcttctcagtcttgccacagtgctctccctatcccagccacccccccaacacaggctcaacctgcaatgacacctgcctctgcatctccctcctggggatcccactccaccccacccctggccccggcaacccccactccctcacagcagtgcccccaggactctcctgggctgcgggtaggccctttgatccctgaacaggattatgagcggctggaggactgtgaccctgaggggtcccaagactcacccatccacggggaggagcagcaacccctgcttcatgtccctgaagggctccgaggctcctggcatcacatccagaacctggacagtttcttcaccaagatctacagctaccaccagcggaatggctttgcctgcatcttgctggaggatgtcttccagctgggacaatttattttcattgtcaccttcacaaccttcctccttcgatgcgtggattacaatgttctctttgccaaccaaccaagtaaccataccagacctgggccgttccacagcaaagtgaccctgtcagatgccatcctaccctcagcccagtgtgctgagaggatccgctccagcccgctgctggtcctcctcctggtcctggctgccggcttctggctggtccaactgcttcgctcagtctgcaacctcttcagctactgggacatccaggtgttttacagggaggccctgcacatccccccggaggagctgagctcggttccctgggcagaggtgcagtcccgcctcttggcactgcagcggagcgggggcctgtgcgtgcagccgcggcccctgacggagctggacatccaccaccgcatcctgcgctacaccaactaccaggtggcgctggccaacaaaggcctgctgccggcccgctgcccgctgccctggggaggcagtgcggctttcctcagccgcggcctggcgctcaatgtcgacctgctgctcttccgcggtcccttctcgctcttccgcgggggctgggagctgccgcacgcctacaagcgcagcgaccagcggggcgccctagcagcgcgctgggggcgcacagtgctgctgctggccgccctgaacctggcgctgagcccgctggtgctggcctggcaggttctgcacgtcttctatagccacgtggagctgctgcggcgcgagcctggcgcgctgggggcgcgcggctggtcccgcctggcgcgcttgcagctgcgccacttcaacgagctgccgcacgagctgcgcgcgcgcctggcccgcgcctaccgccccgccgccgccttcctgcgcaccgctgcgccccccgcgcccctgcgcacgctgctggcccgccagctcgttttcttcgcgggtgcactcttcgccgcgctgcttgtgctcaccgtctacgacgaggacgtgctagccgtggagcacgtgctcaccgccatgaccgcgctcggggtcaccgccaccgtcgccaggtctttcattccggaagagcagtgccagggtcgtgcgccgcagctcctgctgcagacagccctggcccacatgcactacctcccggaggagcccggccccggcggcagggaccgcgcctaccggcagatggcgcagctgctgcagtaccgagcggtctccctcctggaggagctcctgtccccgctcctcaccccgctgtttctgcttttctggttccgccctcgtgccctggagattatcgacttttttcatcacttcactgtggatgtggctggggttggggacatctgttcctttgcccttatggatgtgaagcgccacggacaccctcagtggctctcggcgggacagactgaggcctcgctgtctcagcgtgcggaggacggcaagactgagctttctttgatgcggttctccctggcgcatccactctggcgccccccagggcacagctctaagtttcttgggcacctctggggccgagtacaacaagatgcagctgcctggggtgccacctcggctcgcggcccctccaccccgggggtgctcagcaactgcacctcgcccctgcctgaggccttcctggccaacctcttcgtgcaccctctcctgcctccgagagatctgagcccgacagccccctgtccagctgcggccacagccagcctccttgcctccatttcccgaattgcccaggaccccagctctgtgtccccaggaggcactgggggccagaagctggcccagctcccagaacttgcttctgccgagatgagtctccatgtcatctacctgcaccagcttcaccagcagcagcagcagcaggagccgtggggtgaggctgcagcctccatcctgtccaggccctgctccagcccctcacagccaccctcgcctgatgaggagaagccatcctggtcaagtgacggctccagtcctgcctctagccccagacaacagtggggaacccagaaggcccggaatctgttccccggagggtttcaggtgaccacagacacccagaaggagcctgaccgggcctcttgcactgactgagacgactcctcagggtaccctggcttcggcagccacaggagattggagggtggagtagaaaaacacaaggagtcattgttagaggccccatagatgacaggcccaggtgctttagttgggcaggacctgggagtcagtgaggaactcgccccgagaacagagaaaaggtaggcaaggagaggagatgctgatggcatctggaaacaagtcttagagatggtctgcacccagagggaataaggggagacatccccaactggaatgtgtcctggagcagctgcctgggaagaagtcctcgagtttcctcaaggtgggggacagaggtcaaggatgaggccgagctaaatggaagggcgacagtgaggcaggtgggctttaaggctgtggattcgtcatgctggcggctgccagcagcactttcaggttccttggggcttgtaggggatggggacttgtcagtggaaagacgggagggatgatgtttttggacttcagtacgggtgtgatgtcccaggaagtgggtgtggctccccatcctgtatgaaataagcagtaaagcttgctcatggctgttgcaaaaaaaaaaaaaaaaaa

SEQ ID NO: 406 - DNA, 4577 bp, Homo sapiens
agctcagtgtcacagacctttgtggaagcaacaacagctcccatccttccaacctttctggagaagccgtggcctgatggtgagccgaatgggctggggggggagaagaaggcggctggggcggtggggagatctggggcccggatcggtgcccctcctccccatgccactgccacctcctcctcctccttcatgccggggacctgggggagggaggatctccatcttctctctgtcccctgcccctcatacaagaagctccccctcctcattttcccctcccaccgcagggcccccttgctcagtgctacaggggacaggggcttctcagtcttgccacagtgctctccctatcccagccacccccccaacacaggctcaacctgcaatgacacctgcctctgcatctccctcctggggatcccactccaccccacccctggccccggcaacccccactccctcacagcagtgcccccaggactctcctgggctgcgggtaggccctttgatccctgaacaggattatgagcggctggaggactgtgaccctgaggggtcccaagactcacccatccacggggaggagcagcaacccctgcttcatgtccctgaagggctccgaggctcctggcatcacatccagaacctggacagtttcttcaccaagatctacagctaccaccagcggaatggctttgcctgcatcttgctggaggatgtcttccagctgggacaatttattttcattgtcaccttcacaaccttcctccttcgatgcgtggattacaatgttctctttgccaaccaaccaagtaaccataccagacctgggccgttccacagcaaagtgaccctgtcagatgccatcctaccctcagcccagtgtgctgagaggatccgctccagcccgctgctggtcctcctcctggtcctggctgccggcttctggctggtccaactgcttcgctcagtctgcaacctcttcagctactgggacatccaggtgttttacagggaggccctgcacatccccccggaggagctgagctcggttccctgggcagaggtgcagtcccgcctcttggcactgcagcggagcgggggcctgtgcgtgcagccgcggcccctgacggagctggacatccaccaccgcatcctgcgctacaccaactaccaggtggcgctggccaacaaaggcctgctgccggcccgctgcccgctgccctggggaggcagtgcggctttcctcagccgcggcctggcgctcaatgtcgacctgctgctcttccgcggtcccttctcgctcttccgcgggggctgggagctgccgcacgcctacaagcgcagcgaccagcggggcgccctagcagcgcgctgggggcgcacagtgctgctgctggccgccctgaacctggcgctgagcccgctggtgctggcctggcaggttctgcacgtcttctatagccacgtggagctgctgcggcgcgagcctggcgcgctgggggcgcgcggctggtcccgcctggcgcgcttgcagctgcgccacttcaacgagctgccgcacgagctgcgcgcgcgcctggcccgcgcctaccgccccgccgccgccttcctgcgcaccgctgcgccccccgcgcccctgcgcacgctgctggcccgccagctcgttttcttcgcgggtgcactcttcgccgcgctgcttgtgctcaccgtctacgacgaggacgtgctagccgtggagcacgtgctcaccgccatgaccgcgctcggggtcaccgccaccgtcgccaggtctttcattccggaagagcagtgccagggtcgtgcgccgcagctcctgctgcagacagccctggcccacatgcactacctcccggaggagcccggccccggcggcagggaccgcgcctaccggcagatggcgcagctgctgcagtaccgagcggtctccctcctggaggagctcctgtccccgctcctcaccccgctgtttctgcttttctggttccgccctcgtgccctggagattatcgacttttttcatcacttcactgtggatgtggctggggttggggacatctgttcctttgcccttatggatgtgaagcgccacggacaccctcagtggctctcggcgggacagactgaggcctcgctgtctcagcgtgcggaggacggcaagactgagctttctttgatgcggttctccctggcgcatccactctggcgccccccagggcacagctctaagtttcttgggcacctctggggccgagtacaacaagatgcagctgcctggggtgccacctcggctcgcggcccctccaccccgggggtgctcagcaactgcacctcgcccctgcctgaggccttcctggccaacctcttcgtgcaccctctcctgcctccgagagatctgagcccgacagccccctgtccagctgcggccacagccagcctccttgcctccatttcccgaattgcccaggaccccagctctgtgtccccaggaggcactgggggccagaagctggcccagctcccagaacttgcttctgccgagatgagtctccatgtcatctacctgcaccagcttcaccagcagcagcagcagcaggagccgtggggtgaggctgcagcctccatcctgtccaggccctgctccagcccctcacagccaccctcgcctgatgaggagaagccatcctggtcaagtgacggctccagtcctgcctctagccccagacaacagtggggaacccagaaggcccggaatctgttccccggagggtttcaggtgaccacagacacccagaaggagcctgaccgggcctcttgcactgactgagacgactcctcagggccccactcctggcagctgagtgctgcacctgccttctcgatcacgagcctgagaactgcacgggggagcagcccagactggctggaaaccatgttttcagagtgcagggtcaagtggcgtcctctggacagatgtgagaaggcaccacctcaagaggggaggagcggggctgatcctggtcgggcggacctgagtcgggcagccgctctcccggaactggaagggaaagccaggcggctctcaggggctgttggtgtctgagccgggagggtcgaacgcccagggcactgcgccccgcaactgacgctcctgcaaggaaaagctctggcacgccgatgacgtcgccggcctcgtccagctccatgtcgccctccgtcgccaggatgcgctgcacggtctgcaggacgttggttgccatggtaacatcgccgcagacaaacatgtggccccgctcgaggcacagcacgcggtgcacctccgcagccagctccgtcctcaggatgtcctgcacgttaccattgcgccctcagggtctcacaccttggggttgtcaggttcccgggagaaggcggtgaggactcggccaaacaccccgcgctgctgggcgttctgcacctcgtcgcggtagagatggtcaagttgggagcatcggcagccgaacaccaaagtcatgggagtgggctgcagccctgcaagcaaccccgcgcttgggaaggctcttctccggggcacagtgctagtggggcctccccacaggccaccgtcgcccagcctggcagcccagcgttttgggctgaaaccaccattactttggctgtttcatctctaagagagtgtagaatgctttcacagagaccctgcacagccctgatttacagagggaagggaagcgcgggtgaggtggtggcccctggtggagctgcgctagaatgcgcggcttcggactcagaattccatgccctttgcattgtgtgacatcgcagtccccttccccgctcccacttcatattctcccatacttataactctcctcccagtcacagccctcttcttttgattgacagaccaccctgggcaccccatgctcaatatgaacaccttgtagcatccttaggtcttggacagacctcggtcagctctggcacagtcaagaatccaccttgggcagttcttctttgagtcttagccctaatccctttgaaaattctattttcctttgtcctcaatccagtcaacacctactatgtaccaggcaccaggaagccagaagctcagggcccagcccttgcctttggtacctgccctccccttggtctcatgagcgtcttttcagctttgtggactttgtttcctgccctctctttcctatttcctgccttccagccccacccctctgtccctagattgtgtgactcccttcaggcagtcctttagtccccagcctcacctttgctctcaatgtcatgcagccgctcctgccagaatccccggaagggggcaatgccagtgcctggacccaccaggatgcagggcaagctgggatcgggtggcagccggaaggagggagccctggcaggagagacactccatcaggtcccctttgcctttcctgctccaccattctcaccatgcagggtgggtggagcaaggaggacccaagttcttcccatctcaaaaaaaaattaaaaaaaaaacaaaaaacaaaaaacaa

SEQ ID NO: 407 - DNA, 2948 bp, Homo sapiens
agctcagtgtcacagacctttgtggaagcaacaacagctcccatccttccaacctttctggagaagccgtggcctgatggtgagccgaatgggctggggggggagaagaaggcggctggggcggtggggagatctggggcccggatcggtgcccctcctccccatgccactgccacctcctcctcctccttcatgccggggacctgggggagggaggatctccatcttctctctgtcccctgcccctcatacaagaagctccccctcctcattttcccctcccaccgcagggcccccttgctcagtgctacaggggacaggggcttctcagtcttgccacagtgctctccctatcccagccacccccccaacacaggctcaacctgcaatgacacctgcctctgcatctccctcctggggatcccactccaccccacccctggccccggcaacccccactccctcacagcagtgcccccaggactctcctgggctgcgggtaggccctttgatccctgaacaggattatgagcggctggaggactgtgaccctgaggggtcccaagactcacccatccacggggaggagcagcaacccctgcttcatgtccctgaagggctccgaggctcctggcatcacatccagaacctggacagtttcttcaccaagatctacagctaccaccagcggaatggctttgcctgcatcttgctggaggatgtcttccagctgggacaatttattttcattgtcaccttcacaaccttcctccttcgatgcgtggattacaatgttctctttgccaaccaaccaagtaaccataccagacctgggccgttccacagcaaagtgaccctgtcagatgccatcctaccctcagcccagtgtgctgagaggatccgctccagcccgctgctggtcctcctcctggtcctggctgccggcttctggctggtccaactgcttcgctcagtctgcaacctcttcagctactgggacatccaggtgttttacagggaggccctgcacatccccccggaggagctgagctcggttccctgggcagaggtgcagtcccgcctcttggcactgcagcggagcgggggcctgtgcgtgcagccgcggcccctgacggagctggacatccaccaccgcatcctgcgctacaccaactaccaggtggcgctggccaacaaaggcctgctgccggcccgctgcccgctgccctggggaggcagtgcggctttcctcagccgcggcctggcgctcaatgtcgacctgctgctcttccgcggtcccttctcgctcttccgcgggggctgggagctgccgcacgcctacaagcgcagcgaccagcggggcgccctagcagcgcgctgggggcgcacagtgctgctgctggccgccctgaacctggcgctgagcccgctggtgctggcctggcaggttctgcacgtcttctatagccacgtggagctgctgcggcgcgagcctggcgcgctgggggcgcgcggctggtcccgcctggcgcgcttgcagctgcgccacttcaacgagctgccgcacgagctgcgcgcgcgcctggcccgcgcctaccgccccgccgccgccttcctgcgcaccgctgcgccccccgcgcccctgcgcacgctgctggcccgccagctcgttttcttcgcgggtgcactcttcgccgcgctgcttgtgctcaccgtctacgacgaggacgtgctagccgtggagcacgtgctcaccgccatgaccgcgctcggggtcaccgccaccgtcgccaggtctttcattccggaagagcagtgccagggtcgtgcgccgcagctcctgctgcagacagccctggcccacatgcactacctcccggaggagcccggccccggcggcagggaccgcgcctaccggcagatggcgcagctgctgcagtaccgagcggtctccctcctggaggagctcctgtccccgctcctcaccccgctgtttctgcttttctggttccgccctcgtgccctggagattatcgacttttttcatcacttcactgtggatgtggctggggttggggacatctgttcctttgcccttatggatgtgaagcgccacggacaccctcagtggctctcggcgggacagactgaggcctcgctgtctcagcgtgcggaggacggcaagactgagctttctttgatgcggttctccctggcgcatccactctggcgccccccagggcacagctctaagtttcttgggcacctctggggccgagtacaacaagatgcagctgcctggggtgccacctcggctcgcggcccctccaccccgggggtgctcagcaactgcacctcgcccctgcctgaggccttcctggccaacctcttcgtgcaccctctcctgcctccgagagatctgagcccgacagccccctgtccagctgcggccacagccagcctccttgcctccatttcccgaattgcccaggaccccagctctgtgtccccaggaggcactgggggccagaagctggcccagctcccagaacttgcttctgccgagatgagtctccatgtcatctacctgcaccagcttcaccagcagcagcagcagcaggagccgtggggtgaggctgcagcctccatcctgtccaggccctgctccagcccctcacagccaccctcgcctgatgaggagaagccatcctggtcaagtgacggctccagtcctgcctctagccccagacaacagtggggaacccagaaggcccggaatctgttccccggagggtttcaggtgaccacagacacccagaaggagcctgaccgggcctcttgcactgactgagacgactcctcaggcctctggacagatgtgagaaggcaccacctcaagaggggaggagcggggctgatcctggtcgggcggacctgagtcgggcagc

SEQ ID NO: 408 - DNA, 1879 bp, Homo sapiens
gccccgccccgcccctgcgcggaagtctatccgggctttcgcgtcaccaccctgcccacctgggtggcgcgtggcttacgcaacggtcactgggctcctgggccgctcccgggccagcgagggctgcgaaagaagttgtagcatgcataccacagaatcaaaaaatgaacatttggaggatgaaaacttccaaacatctacaactcctcagagtctcattgatcctaataatactgcacatgaagaaactaaaactgtcttatcagatacagaagaaataaaaccacagacaaaaaaggagacatacatttcttgtcctctaagaggagtattgaatgtaattattacaaatggagttatactgtttgtgatatggtgtatgacctggtcaatcttaggctctgaagctctccctggtggaaatttatttgggttgttcattattttttatagtgccattattgggggaaaaattttacaactcattagaatacctttagtgcctccacttccacctcttcttgggatgttactggctggttttacgattaggaatgttccattcatcaatgaacatgtccatgttcctaacacatggtcttcaattttaagaagcattgcccttaccattattctaataagagctgggcttggactcgatccacaggctttgaggcatttgaaggtcgtttgtttcagattggctgtaggtccatgccttatggaggcaagtgcagctgctgttttttcacacttcattatgaaatttccctggcaatgggcatttctattaggttttgttctaggtgctgtctctcctgctgttgttgtcccttacatgatggtgctgcaagaaaatggatatggtgttgaggaaggcattccaaccttattaatggctgctagcagtatggatgacattctggctatcactggattcaatacatgcttgagcatagtcttttcctcaggtggtatacttaataacgccatagcctctataaggaacgtatgtattagtctgctggcaggaattgttttgggattttttgttcgatattttccaagtgaagaccagaaaaaacttacattgaagagaggattccttgttttgactatgtgtgtttctgccgtcttaggcagccaacgtattggtttacatggatctggaggattatgcacactagtgttgagtttcattgcagggacaaaatggtcccaagaaaagatgaaagtccaaaagattattacgactgtatgggatatttttcaaccacttctttttggtttagttggagcagaagtatctgtttcatcgcttgaatcaaatattgttggcatatctgttgccactctaagtttggcattatgtgttcgaattttaaccacatatctattgatgtgctttgctggttttagttttaaggagaaaatatttattgctttagcatggatgcccaaagctacagtacaggctgtgttaggtcctctggctctagaaacagcaagagtctccgcaccccacttggaaccatatgcgaaggatgtgatgacagtagcatttttagccatcttgatcacagctccaaatggagctctacttatgggcattctggggcctaaaatgcttacacgccattatgatccaagcaaaataaaactgcagttgtcaacattagaacatcattaaaaagtttacctgtcatcatctgcctgcttcttttaatgaattatttcacatgacagaagaattttaaagtagaaatatgtggggactgtacagagaatccaggatttagtaaacatgtgatttcagtacagggcttttcttggactttttactccaaagttaatttaataaaaataatattaaatggaa

SEQ ID NO: 409 - DNA, 1755 bp, Homo sapiens
gccccgccccgcccctgcgcggaagtctatccgggctttcgcgtcaccaccctgcccacctgggtggcgcgtggcttacgcaacggtcactgggctcctgggccgctcccgggccagcgagggctgcgaaagaagttgtagcatgcataccacagaatcaaaaaatgaacatttggaggatgaaaacttccaaacatctacaactcctcagagtctcattgatcctaataatactgcacatgaagaaactaaaactgtcttatcagatacagaagaaataaaaccacagacaaaaaaggagacatacatttcttgtcctctaagaggagtattgaatgtaattattacaaatggagttatactgtttgtgatatggtgtatgacctggtcaatcttaggctctgaagctctccctggtggaaatttatttgggttgttcattattttttatagtgccattattgggggaaaaattttacaactcattagaatacctttagtgcctccacttccacctcttcttgggatgttactggctggttttacgattaggaatgttccattcatcaatgaacatgtccatgttcctaacacatggtcttcaattttaagaagcattgcccttaccattattctaataagagctgggcttggactcgatccacaggctttgaggcatttgaaggtcgtttgtttcagattggctgtaggtccatgccttatggaggcaagtgcagctgctgttttttcacacttcattatgaaatttccctggcaatgggcatttctattaggttttgttctaggtgctgtctctcctgctgttgttgtcccttacatgatggtgctgcaagaaaatggatatggtgttgaggaaggcattccaaccttattaatggctgctagcagtatggatgacattctggctatcactggattcaatacatgcttgagcatagtcttttcctcaggtggtatacttaataacgccatagcctctataaggaacgtatgtattagtctgctggcaggaattgttttgggattttttgttcgatattttccaagtgaagaccagaaaaaacttacattgaagagaggattccttgttttgactatgtgtgtttctgccgtcttaggcagccaacgtattggtttacatggatctggaggattatgcacactagtgttgagtttcattgcagggacaaaatggtcccaagaaaagatgaaagtccaaaagattattacgactgtatgggatatttttcaaccacttctttttggtttagttggagcagaagtatctgtttcatcgcttgaatcaaatattgttggcatatctgttgccactctaagtttggcattatgtgttcgaattttaaccacatatctattgatgtgctttgctggttttagttttaaggagaaaatatttattgctttagcatggatgcccaaagctacagtacagattaatcaagctatccttctgttgtttcttcttcgggaggaatggacgaactgcaaggtagccaagaagtgcgagtacaccaaggaaaggcaataaccgaagccattctgaaactaaacatgtagatgtgtcagaatctgcagtgctcttggaaaagaattcaaaatagcatgtctagtttcatccttgagcttattctttgttactttttacattaattcctttttaatggatccataaaactgtgaataaataacacaataaagccagctctaccaaag

SEQ ID NO: 410 - DNA, 1627 bp, Homo sapiens
gccccgccccgcccctgcgcggaagtctatccgggctttcgcgtcaccaccctgcccacctgggtggcgcgtggcttacgcaacggtcactgggctcctgggccgctcccgggccagcgagggctgcgaaagaagttgtagcatgcataccacagaatcaaaaaatgaacatttggaggatgaaaacttccaaacatctacaactcctcagagtctcattgatcctaataatactgcacatgaagaaactaaaactgtcttatcagatacagaagaaataaaaccacagacaaaaaaggagacatacatttcttgtcctctaagaggagtattgaatgtaattattacaaatggagttatactgtttgtgatatggtgtatgacctggtcaatcttaggctctgaagctctccctggtggaaatttatttgggttgttcattattttttatagtgccattattgggggaaaaattttacaactcattagaatacctttagtgcctccacttccacctcttcttgggatgttactggctggttttacgattaggaatgttccattcatcaatgaacatgtccatgttcctaacacatggtcttcaattttaagaagcattgcccttaccattattctaataagagctgggcttggactcgatccacagttttgttctaggtgctgtctctcctgctgttgttgtcccttacatgatggtgctgcaagaaaatggatatggtgttgaggaaggcattccaaccttattaatggctgctagcagtatggatgacattctggctatcactggattcaatacatgcttgagcatagtcttttcctcaggtggtatacttaataacgccatagcctctataaggaacgtatgtattagtctgctggcaggaattgttttgggattttttgttcgatattttccaagtgaagaccagaaaaaacttacattgaagagaggattccttgttttgactatgtgtgtttctgccgtcttaggcagccaacgtattggtttacatggatctggaggattatgcacactagtgttgagtttcattgcagggacaaaatggtcccaagaaaagatgaaagtccaaaagattattacgactgtatgggatatttttcaaccacttctttttggtttagttggagcagaagtatctgtttcatcgcttgaatcaaatattgttggcatatctgttgccactctaagtttggcattatgtgttcgaattttaaccacatatctattgatgtgctttgctggttttagttttaaggagaaaatatttattgctttagcatggatgcccaaagctacagtacagattaatcaagctatccttctgttgtttcttcttcgggaggaatggacgaactgcaaggtagccaagaagtgcgagtacaccaaggaaaggcaataaccgaagccattctgaaactaaacatgtagatgtgtcagaatctgcagtgctcttggaaaagaattcaaaatagcatgtctagtttcatccttgagcttattctttgttactttttacattaattcctttttaatggatccataaaactgtgaataaataacacaataaagccagctctaccaaag

SEQ ID NO: 411 - DNA, 1489 bp, Homo sapiens
gccccgccccgcccctgcgcggaagtctatccgggctttcgcgtcaccaccctgcccacctgggtggcgcgtggcttacgcaacggtcactgggctcctgggccgctcccgggccagcgagggctgcgaaagaagttgtagcatgcataccacagaatcaaaaaatgaacatttggaggatgaaaacttccaaacatctacaactcctcagagtctcattgatcctaataatactgcacatgaagaaactaaaactgtcttatcagatacagaagaaataaaaccacagacaaaaaaggagacatacatttcttgtcctctaagaggagtattgaatgtaattattacaaatgttttgttctaggtgctgtctctcctgctgttgttgtcccttacatgatggtgctgcaagaaaatggatatggtgttgaggaaggcattccaaccttattaatggctgctagcagtatggatgacattctggctatcactggattcaatacatgcttgagcatagtcttttcctcaggtgtggcctccgtctttcacccaggctggagtgtggtgtcacgatctcagctcactgcaaactctgcctcccgggttcaagtgattctcctccctcagcctcccgagtacctgggaccacaggtggtatacttaataacgccatagcctctataaggaacgtatgtattagtctgctggcaggaattgttttgggattttttgttcgatattttccaagtgaagaccagaaaaaacttacattgaagagaggattccttgttttgactatgtgtgtttctgccgtcttaggcagccaacgtattggtttacatggatctggaggattatgcacactagtgttgagtttcattgcagggacaaaatggtcccaagaaaagatgaaagtccaaaagattattacgactgtatgggatatttttcaaccacttctttttggtttagttggagcagaagtatctgtttcatcgcttgaatcaaatattgttggcatatctgttgccactctaagtttggcattatgtgttcgaattttaaccacatatctattgatgtgctttgctggttttagttttaaggagaaaatatttattgctttagcatggatgcccaaagctacagtacagagatgagatctcaccacgttgcccaagctggtatggtactcctgagatcaagtactccacccacctcagcctcccaaagtgctgagattacaggaatggacgaactgcaaggtagccaagaagtgcgagtacaccaaggaaaggcaataaccgaagccattctgaaactaaacatgtagatgtgtcagaatctgcagtgctcttggaaaagaattcaaaatagcatgtctagtttcatccttgagcttattctttgttactttttacattaattcctttttaatggatccataaaactgtgaataaataacacaataaagccagctctaccaaag

SEQ ID NO: 412 - DNA, 1801 bp, Homo sapiens
ggcttacgcaacggtcactgggctcctgggccgctcccgggccagcgagggctgcgaaagaagttgtagatgaggaaattgagactcagagaggttaagggtcttgacgaaggacatatacctacatgcataccacagaatcaaaaaatgaacatttggaggatgaaaacttccaaacatctacaactcctcagagtctcattgatcctaataatactgcacaggaagaaactaaaactgtcttatcagatacagaagaaataaaaccacagacaaaaaaggagacatacatttcttgtcctctaagaggagtattgaatgtaattattacaaatggagttatactgtttgtgatatggtgtatgacctggtcaatcttaggctctgaagctctccctggtggaaatttatttgggttgttcattattttttatagtgccattattgggggaaaaattttacaactcattagaatacctttagtgcctccacttccacctcttcttgggatgttactggctggttttacgattaggaatgttccattcatcaatgaacatgtccatgttcctaacacatggtcttcaattttaagaagcattgcccttaccattattctaataagagctgggcttggactcgatccacaggctttgaggcatttgaaggtcgtttgtttcagattggctgtaggtccatgccttatggaggcaagtgcagctgctgttttttcacacttcattatgaaatttccctggcaatgggcatttctattaggttttgttctaggtgctgtctctcctgctgttgttgtcccttacatgatggtgctgcaagaaaatggatatggtgttgaggaaggcattccaaccttattaatggctgctagcagtatggatgacattctggctatcactggattcaatacatgcttgagcatagtcttttcctcaggtggtatacttaataacgccatagcctctataaggaacgtatgtattagtctgctggcaggaattgttttgggattttttgttcgatattttccaagtgaagaccagaaaaaacttacattgaagagaggattccttgttttgactatgtgtgtttctgccgtcttaggcagccaacgtattggtttacatggatctggaggattatgcacactagtgttgagtttcattgcagggacaaaatggtcccaagaaaagatgaaagtccaaaagattattacgactgtatgggatatttttcaaccacttctttttggtttagttggagcagaagtatctgtttcatcgcttgaatcaaatattgttggcatatctgttgccactctaagtttggcattatgtgttcgaattttaaccacatatctattgatgtgctttgctggttttagttttaaggagaaaatatttattgctttagcatggatgcccaaagctacagtacaggctgtgttaggtcctctggctctagaaacagcaagagtctccgcaccccacttggaaccatatgcgaaggatgtgatgacagtagcatttttagccatcttgatcacagctccaaatggagctctacttatgggcattctggggcctaaaatgcttacacgccattatgatccaagcaaaataaaactgcagttgtcaacattagaacatcattaaaaagtttacctgtcatcatctgcctgcttcttttaatgaattatttcacatgacagaagaattttaaagtagaaatatgtggggactgtacagagaatccaggatttagtaaacatgtgatttcagta

SEQ ID NO: 413 - DNA, 1805 bp, Homo sapiens
aaaggaagtaaagaactgaagaaacaagatagtagatgaattatccaagtgtgtaagatgaaaagattacaaatatgggggtcaagcaccaacatctttggtgaataatggaaagggatcaaaataagcatgcataccacagaatcaaaaaatgaacatttggaggatgaaaacttccaaacatctacaactcctcagagtctcattgatcctaataatactgcacaggaagaaactaaaactgtcttatcagatacagaagaaataaaaccacagacaaaaaaggagacatacatttcttgtcctctaagaggagtattgaatgtaattattacaaatggagttatactgtttgtgatatggtgtatgacctggtcaatcttaggctctgaagctctccctggtggaaatttatttgggttgttcattattttttatagtgccattattgggggaaaaattttacaactcattagaatacctttagtgcctccacttccacctcttcttgggatgttactggctggttttacgattaggaatgttccattcatcaatgaacatgtccatgttcctaacacatggtcttcaattttaagaagcattgcccttaccattattctaataagagctgggcttggactcgatccacaggctttgaggcatttgaaggtcgtttgtttcagattggctgtaggtccatgccttatggaggcaagtgcagctgctgttttttcacacttcattatgaaatttccctggcaatgggcatttctattaggttttgttctaggtgctgtctctcctgctgttgttgtcccttacatgatggtgctgcaagaaaatggatatggtgttgaggaaggcattccaaccttattaatggctgctagcagtatggatgacattctggctatcactggattcaatacatgcttgagcatagtcttttcctcaggtggtatacttaataacgccatagcctctataaggaacgtatgtattagtctgctggcaggaattgttttgggattttttgttcgatattttccaagtgaagaccagaaaaaacttacattgaagagaggattccttgttttgactatgtgtgtttctgccgtcttaggcagccaacgtattggtttacatggatctggaggattatgcacactagtgttgagtttcattgcagggacaaaatggtcccaagaaaagatgaaagtccaaaagattattacgactgtatgggatatttttcaaccacttctttttggtttagttggagcagaagtatctgtttcatcgcttgaatcaaatattgttggcatatctgttgccactctaagtttggcattatgtgttcgaattttaaccacatatctattgatgtgctttgctggttttagttttaaggagaaaatatttattgctttagcatggatgcccaaagctacagtacaggctgtgttaggtcctctggctctagaaacagcaagagtctccgcaccccacttggaaccatatgcgaaggatgtgatgacagtagcatttttagccatcttgatcacagctccaaatggagctctacttatgggcattctggggcctaaaatgcttacacgccattatgatccaagcaaaataaaactgcagttgtcaacattagaacatcattaaaaagtttacctgtcatcatctgcctgcttcttttaatgaattatttcacatgacagaagaattttaaagtagaaatatgtggggactgtacagagaatccaggatttagtaaacatgtgatttcagta

SEQ ID NO: 414 - DNA, 1837 bp, Homo sapiens
ctatccgggctttcgcgtcaccaccctgcccacctgggtggcgcgtggcttacgcaacggtcactgggctcctgggccgctcccgggccagcgagggctgcgaaagaagttgtagcctggttaagaatcattgctgaggaacaactacattcatatggagcatgcataccacagaatcaaaaaatgaacatttggaggatgaaaacttccaaacatctacaactcctcagagtctcattgatcctaataatactgcacaggaagaaactaaaactgtcttatcagatacagaagaaataaaaccacagacaaaaaaggagacatacatttcttgtcctctaagaggagtattgaatgtaattattacaaatggagttatactgtttgtgatatggtgtatgacctggtcaatcttaggctctgaagctctccctggtggaaatttatttgggttgttcattattttttatagtgccattattgggggaaaaattttacaactcattagaatacctttagtgcctccacttccacctcttcttgggatgttactggctggttttacgattaggaatgttccattcatcaatgaacatgtccatgttcctaacacatggtcttcaattttaagaagcattgcccttaccattattctaataagagctgggcttggactcgatccacaggctttgaggcatttgaaggtcgtttgtttcagattggctgtaggtccatgccttatggaggcaagtgcagctgctgttttttcacacttcattatgaaatttccctggcaatgggcatttctattaggttttgttctaggtgctgtctctcctgctgttgttgtcccttacatgatggtgctgcaagaaaatggatatggtgttgaggaaggcattccaaccttattaatggctgctagcagtatggatgacattctggctatcactggattcaatacatgcttgagcatagtcttttcctcaggtggtatacttaataacgccatagcctctataaggaacgtatgtattagtctgctggcaggaattgttttgggattttttgttcgatattttccaagtgaagaccagaaaaaacttacattgaagagaggattccttgttttgactatgtgtgtttctgccgtcttaggcagccaacgtattggtttacatggatctggaggattatgcacactagtgttgagtttcattgcagggacaaaatggtcccaagaaaagatgaaagtccaaaagattattacgactgtatgggatatttttcaaccacttctttttggtttagttggagcagaagtatctgtttcatcgcttgaatcaaatattgttggcatatctgttgccactctaagtttggcattatgtgttcgaattttaaccacatatctattgatgtgctttgctggttttagttttaaggagaaaatatttattgctttagcatggatgcccaaagctacagtacaggctgtgttaggtcctctggctctagaaacagcaagagtctccgcaccccacttggaaccatatgcgaaggatgtgatgacagtagcatttttagccatcttgatcacagctccaaatggagctctacttatgggcattctggggcctaaaatgcttacacgccattatgatccaagcaaaataaaactgcagttgtcaacattagaacatcattaaaaagtttacctgtcatcatctgcctgcttcttttaatgaattatttcacatgacagaagaattttaaagtagaaatatgtggggactgtacagagaatccaggatttagtaaacatgtgatttcagta

SEQ ID NO: 415 - DNA, 1309 bp, Homo sapiens
accccctctgtctcctccccgggcccggcgttcccgccccttctgtgcgcgcgtggaggccggggcggggcgggcgcagccggcgctgagcttgcagggccgctcccctcacccgcccccttcgagtccccgggcttcgccccacccggcccgtgggggagtatctgtcctgccgccttcgcccacgccctgcactccgggaccgtccctgcgcgctctgggcgcaccatggcccgcggggctgcgctggcgctgctgctcttcggcctgctgggtgttctggtcgccgccccggatggtggtttcgatttatccgatgcccttcctgacaatgaaaacaagaaacccactgcaatccccaagaaacccagtgctggggatgactttgacttaggagatgctgttgttgatggagaaaatgacgacccacgaccaccgaacccacccaaaccgatgccaaatccaaaccccaaccaccctagttcctccggtagcttttcagatgctgaccttgcggatggcgtttcaggtggagaaggaaaaggaggcagtgatggtggaggcagccacaggaaagaaggggaagaggccgacgccccaggcgtgatccccgggattgtgggggctgtcgtggtcgccgtggctggagccatctctagcttcattgcttaccagaaaaagaagctatgcttcaaagaaaatgcagaacaaggggaggtggacatggagagccaccggaatgccaacgcagagccagctgttcagcgtactcttttagagaaatagaagattgtcggcagaaacagcccaggcgttggcagcagggttagaacagctgcctgaggctcctccctgaaggacacctgcctgagagcagagatggaggccttctgttcacggcggattctttgttttaatcttgcgatgtgctttgcttgttgctgggcggatgatgtttactaacgatgaattttacatccaaagggggataggcacttggacccccattctccaaggcccgggggggcggtttcccatgggatgtgaaaggctggccattattaagtccctgtaactcaaatgtcaaccccaccgaggcacccccccgtcccccagaatcttggctgtttacaaatcacgtgtccatcgagcacgtctgaaacccctggtagccccgacttctttttaattaaaataaggtaagcccttcaatttgtttcttcaatatttctttcatttgtagggatatttgtttttcatatcagactaataaaaagaaattagaaaccaaaaaaaaaaaaaaaaaaaa

SEQ ID NO: 416 - DNA, 1261 bp, Homo sapiens
accccctctgtctcctccccgggcccggcgttcccgccccttctgtgcgcgcgtggaggccggggcggggcgggcgcagccggcgctgagcttgcagggccgctcccctcacccgcccccttcgagtccccgggcttcgccccacccggcccgtgggggagtatctgtcctgccgccttcgcccacgccctgcactccgggaccgtccctgcgcgctctgggcgcaccatggcccgcggggctgcgctggcgctgctgctcttcggcctgctgggtgttctggtcgccgccccggatggtggtttcgatttatccgatgcccttcctggggatgactttgacttaggagatgctgttgttgatggagaaaatgacgacccacgaccaccgaacccacccaaaccgatgccaaatccaaaccccaaccaccctagttcctccggtagcttttcagatgctgaccttgcggatggcgtttcaggtggagaaggaaaaggaggcagtgatggtggaggcagccacaggaaagaaggggaagaggccgacgccccaggcgtgatccccgggattgtgggggctgtcgtggtcgccgtggctggagccatctctagcttcattgcttaccagaaaaagaagctatgcttcaaagaaaatgcagaacaaggggaggtggacatggagagccaccggaatgccaacgcagagccagctgttcagcgtactcttttagagaaatagaagattgtcggcagaaacagcccaggcgttggcagcagggttagaacagctgcctgaggctcctccctgaaggacacctgcctgagagcagagatggaggccttctgttcacggcggattctttgttttaatcttgcgatgtgctttgcttgttgctgggcggatgatgtttactaacgatgaattttacatccaaagggggataggcacttggacccccattctccaaggcccgggggggcggtttcccatgggatgtgaaaggctggccattattaagtccctgtaactcaaatgtcaaccccaccgaggcacccccccgtcccccagaatcttggctgtttacaaatcacgtgtccatcgagcacgtctgaaacccctggtagccccgacttctttttaattaaaataaggtaagcccttcaatttgtttcttcaatatttctttcatttgtagggatatttgtttttcatatcagactaataaaaagaaattagaaaccaaaaaaaaaaaaaaaaaaaa

SEQ ID NO: 417 - DNA, 3785 bp, Homo sapiens
accccctctgtctcctccccgggcccggcgttcccgccccttctgtgcgcgcgtggaggccggggcggggcgggcgcagccggcgctgagcttgcagggccgctcccctcacccgcccccttcgagtccccgggcttcgccccacccggcccgtgggggagtatctgtcctgccgccttcgcccacgccctgcactccgggaccgtccctgcgcgctctgggcgcaccatggcccgcggggctgcgctggcgctgctgctcttcggcctgctgggtgttctggtcgccgccccggatggtggtttcgatttatccgatgcccttcctgacaatgaaaacaagaaacccactgcaatccccaagaaacccagtgctggggatgactttgacttaggagatgctgttgttgatggagaaaatgacgacccacgaccaccgaacccacccaaaccgatgccaaatccaaaccccaaccaccctagttcctccggtagcttttcagatgctgaccttgcggatggcgtttcaggtggagaaggaaaaggaggcagtgatggtggaggcagccacaggaaagaaggggaagaggccgacgccccaggcgtgatccccgggattgtgggggctgtcgtggtcgccgtggctggagccatctctagcttcattgcttaccagaaaaagaagctatgcttcaaagaaaatgatggctgaagacctaggggtgagcagagaacccagcccaggcctgcggagcgtcctgaccgtaatcgttttatctgctaagacatagccttaaagcaaacccttccatctgccgctcccctcgccctgctggcaaattcccaccacgatgggattctcaatcacatggcggattctctgccttcagttccatatgcttttgcctttctggatgcacagaagctcattatagcaaatcatatttctgcataagagcttcagaaaatgaagagaaatgcagatattttcttttaaacatgaatctaacagaaacagggcagtgacttccatgttttaatgagttttgtccctaagtccatccctgccaagggaacaaactggggcccagggtggccaccctcttccctgcagtgtcctaggttaagctcactcacgtcctaaggatttgaccttccaggtcatgcatggatttttaaatcttcaacgtttttggccgttgacttgcatttctcactgcacttcctatgaagcagttcttaactctttctgtgatcagtgttccaaacaggtacacaccttggttcctagaaaaacaaaattcatacgttgaggaatcacctaaacatctcctgatcttcacactgtaaggcgtgttgggaattggtgggtggtcaggtccctattcacacatttgagcacggagcctctgcggccgtcttccttggattctctcatatccctgaaaaacacaaattgtacctggattttccttctgtttccaaagtccaccaacttgttcttcaatgtaattgattttaacttgttttctttcttttacttttcttatttttttctttcttttcatttttttcttatttcttttccttctatttattttacttttcttatttgttatatgttatttctttttcttttcttacttttcttcttttttcatttttcttttttaaattggagtctcactctgttgcccaggctggagtgcagtggtgcaatcttggctcactgcagcctccacctcctgggttcaagcgattctcctgcctcagcctcccgagtagctgggactacaggcacacaccaccacacccagctaatttttgtatttttagtagagacggggtttctccatgttggccaggctgatctcgaacttctgacttcaggtgatctgcctgcctcaaccttccaaagtgctgggattacaggtgtgagccactgtgcctggccctttttcttttttctttttttttttctcttatttcttttttcttatttgttttcctttttgctttttctttttatcttatttcttttacttatttttcttttttttacttttatttcttctccgtttttcctcattcttttcctcttatttctttgacttttctgatttctttttttttcttattttcctttttttttcatattccttttaattttttcttacttcttttacttttcttatttgccctcttgtggaaatgaggcacagcctcccttatggttgagccgtagttctagctgagcacggatggtttgatcctcctgtgttggggcactgtatggtgtgagggcacaaaaccttgacccacatgggtctggtcaccttctcacagaggtcacctttacagccccccaactctttgaaggatgtgtcccaaggtgtctcaagtctgatgcaatgaaagctgccccccattgaccacaggactgagtccagaatgtcctgcgtgtttcccagagtgtctgtcctaacaccgcttaaagattagccactgctagacagtgatcctcaggtatatggtctcaggattggccccaagcacacggtgtgtgtgtgtgtataaatatatcttcacaaagcataggtacccattaaagccatattgctttgctgaatggttctaatagctacagatgatttctagcctgaaagaaaagcaccacgaattgtttgaagttgacttgtcagatgtggcatgcttggtctaagttttgacaggaagggtatgtgggtaggggtgtacggagcatctcatgagaccagttctcctcctgagaggtccgtgatgttggaactgttgccccagatggactttgcccttgtgagactttatacttttcaatgcagtttttccctctttaaaactcgccagcttttatgtagtgttttataaaattacaggaataaaaagaatatcttttatgctttttaaccaatgaggggagagggagaaattatttgtcctctgaaatgaatgcaggttttcaatttctagccaggacagtttgctgcaaaatgcacccgtgttgacaacttgtgactggcagaacaaatgacatttgtggtgaacattttcggatcatttcgaatgttcttctcttcagggggttttcctctctttttcttaaatcaaagaatttggccctttatgtgggagtcatttagtggttagggagaacagttgaaactgtggagttcacgtagcgtaaactggcgaggctgtctctgctgctgtcattaaaagttacgctgctggcttggcacggtggttcacacctgtaatcccagcattttgggaggccgaggtgggcagatcacgaagtcaggagatcgagaccatcctggctaacatggtgaaaccccgtctctactaaaaatacaaaaaattagctgggcatggtggcgggcgcctgtagtcccagctactcgggaggctgaggcaagagaatggcgtgaaccctggaggcggaggttgcagtgagccgagatcgcgccactgcgttccagcctgggcgacagagcaagactctgtctcaaaaaaaaaaaaaaaagaaaagaaaaagaaaagttacgctgctgcaccatacaaacgtgttcctttatgaaggcatttgaaccacagatggggccgttttacaaatagcacggtctttgtgagggggaaacgcatggccacagattcgatgagcttctgctgcttccctttgtgttgaaaacgtgggtgttccttcacaccaacactggaaataaataaatacctattgatctgtgc

SEQ ID NO: 418 - DNA, 1304 bp, Homo sapiens
accccctctgtctcctccccgggcccggcgttcccgccccttctgtgcgcgcgtggaggccggggcggggcgggcgcagccggcgctgagcttgcagggccgctcccctcacccgcccccttcgagtccccgggcttcgccccacccggcccgtgggggagtatctgtcctgccgccttcgcccacgccctgcactccgggaccgtccctgcgcgctctgggcgcaccatggcccgcggggctgcgctggcgctgctgctcttcggcctgctgggtgttctggtcgccgccccggatggtggtttcgatttatccgatgcccttcctgacaatgaaaacaagaaacccactgcaatccccaagaaacccagtgctggggatgactttgacttaggagatgctgttgttgatggagaaaatgacgacccacgaccaccgaacccacccaaaccgatgccaaatccaaaccccaaccaccctagttcctccggtagcttttcagatgctgaccttgcggatggcgtttcaggtggagaaggaaaaggaggcagtgatggtggaggcagccacaggaaagaaggggaagaggccgacgccccaggcgtgatccccgggattgtgggggctgtcgtggtcgccgtggctggagccatctctagcttcattgcttaccagaaaaagaagctatgcttcaaagaaaatgaacaaggggaggtggacatggagagccaccggaatgccaacgcagagccagctgttcagcgtactcttttagagaaatagaagattgtcggcagaaacagcccaggcgttggcagcagggttagaacagctgcctgaggctcctccctgaaggacacctgcctgagagcagagatggaggccttctgttcacggcggattctttgttttaatcttgcgatgtgctttgcttgttgctgggcggatgatgtttactaacgatgaattttacatccaaagggggataggcacttggacccccattctccaaggcccgggggggcggtttcccatgggatgtgaaaggctggccattattaagtccctgtaactcaaatgtcaaccccaccgaggcacccccccgtcccccagaatcttggctgtttacaaatcacgtgtccatcgagcacgtctgaaacccctggtagccccgacttctttttaattaaaataaggtaagcccttcaatttgtttcttcaatatttctttcatttgtagggatatttgtttttcatatcagactaataaaaagaaattagaaaccaaaaaaaaaaaaaaaaaa

SEQ ID NO: 419 - DNA, 1256 bp, Homo sapiens
accccctctgtctcctccccgggcccggcgttcccgccccttctgtgcgcgcgtggaggccggggcggggcgggcgcagccggcgctgagcttgcagggccgctcccctcacccgcccccttcgagtccccgggcttcgccccacccggcccgtgggggagtatctgtcctgccgccttcgcccacgccctgcactccgggaccgtccctgcgcgctctgggcgcaccatggcccgcggggctgcgctggcgctgctgctcttcggcctgctgggtgttctggtcgccgccccggatggtggtttcgatttatccgatgcccttcctggggatgactttgacttaggagatgctgttgttgatggagaaaatgacgacccacgaccaccgaacccacccaaaccgatgccaaatccaaaccccaaccaccctagttcctccggtagcttttcagatgctgaccttgcggatggcgtttcaggtggagaaggaaaaggaggcagtgatggtggaggcagccacaggaaagaaggggaagaggccgacgccccaggcgtgatccccgggattgtgggggctgtcgtggtcgccgtggctggagccatctctagcttcattgcttaccagaaaaagaagctatgcttcaaagaaaatgaacaaggggaggtggacatggagagccaccggaatgccaacgcagagccagctgttcagcgtactcttttagagaaatagaagattgtcggcagaaacagcccaggcgttggcagcagggttagaacagctgcctgaggctcctccctgaaggacacctgcctgagagcagagatggaggccttctgttcacggcggattctttgttttaatcttgcgatgtgctttgcttgttgctgggcggatgatgtttactaacgatgaattttacatccaaagggggataggcacttggacccccattctccaaggcccgggggggcggtttcccatgggatgtgaaaggctggccattattaagtccctgtaactcaaatgtcaaccccaccgaggcacccccccgtcccccagaatcttggctgtttacaaatcacgtgtccatcgagcacgtctgaaacccctggtagccccgacttctttttaattaaaataaggtaagcccttcaatttgtttcttcaatatttctttcatttgtagggatatttgtttttcatatcagactaataaaaagaaattagaaaccaaaaaaaaaaaaaaaaaa

SEQ ID NO: 420 - DNA, 1240 bp, Homo sapiens
accccctctgtctcctccccgggcccggcgttcccgccccttctgtgcgcgcgtggaggccggggcggggcgggcgcagccggcgctgagcttgcagggccgctcccctcacccgcccccttcgagtccccgggcttcgccccacccggcccgtgggggagtatctgtcctgccgccttcgcccacgccctgcactccgggaccgtccctgcgcgctctgggcgcaccatggcccgcggggctgcgctggcgctgctgctcttcggcctgctgggtgttctggtcgccgccccggatggtggtttcgatttatccgatgcccttcctgacaatgaaaacaagaaacccactgcaatccccaagaaacccagtgctggggatgactttgacttaggagatgctgttgttgatggagaaaatgacgacccacgaccaccgaacccacccaaaccgatgccaaatccaaaccccaaccaccctagttcctccggtagcttttcagatgctgaccttgcggatggcgtttcaggtggagaagccgacgccccaggcgtgatccccgggattgtgggggctgtcgtggtcgccgtggctggagccatctctagcttcattgcttaccagaaaaagaagctatgcttcaaagaaaatgcagaacaaggggaggtggacatggagagccaccggaatgccaacgcagagccagctgttcagcgtactcttttagagaaatagaagattgtcggcagaaacagcccaggcgttggcagcagggttagaacagctgcctgaggctcctccctgaaggacacctgcctgagagcagagatggaggccttctgttcacggcggattctttgttttaatcttgcgatgtgctttgcttgttgctgggcggatgatgtttactaacgatgaattttacatccaaagggggataggcacttggacccccattctccaaggcccgggggggcggtttcccatgggatgtgaaaggctggccattattaagtccctgtaactcaaatgtcaaccccaccgaggcacccccccgtcccccagaatcttggctgtttacaaatcacgtgtccatcgagcacgtctgaaacccctggtagccccgacttctttttaattaaaataaggtaagcccttcaatttgtttcttcaatatttctttcatttgtagggatatttgtttttcatatcagactaataaaaagaaattagaaaccaa

SEQ ID NO: 421 - DNA, 1324 bp, Homo sapiens
accccctctgtctcctccccgggcccggcgttcccgccccttctgtgcgcgcgtggaggccggggcggggcgggcgcagccggcgctgagcttgcagggccgctcccctcacccgcccccttcgagtccccgggcttcgccccacccggcccgtgggggagtatctgtcctgccgccttcgcccacgccctgcactccgggaccgtccctgcgcgctctgggcgcaccatggcccgcggggctgcgctggcgctgctgctcttcggcctgctgggtgttctggtcgccgccccggatggtggtttcgatttatccgatgcccttcctgacaatgaaaacaagaaacccactgcaatccccaagaaacccagtgctggggatgactttgacttaggagatgctgttgttgatggagaaaatgacgacccacgaccaccgaacccacccaaaccgatgccaaatccaaaccccaaccaccctagttcctccggtagcttttcagatgctgaccttgcggatggcgtttcaggtggagaaggaaaaggaggcagtgatggtggaggcagccacaggaaagaaggggaagaggccgacgccccaggcgtgatccccgggattgtgggggctgtcgtggtcgccgtggctggagccatctctagcttcattgcttaccagaaaaagaagctatgcttcaaagaaaatgatggctgaagacctagggaacaaggggaggtggacatggagagccaccggaatgccaacgcagagccagctgttcagcgtactcttttagagaaatagaagattgtcggcagaaacagcccaggcgttggcagcagggttagaacagctgcctgaggctcctccctgaaggacacctgcctgagagcagagatggaggccttctgttcacggcggattctttgttttaatcttgcgatgtgctttgcttgttgctgggcggatgatgtttactaacgatgaattttacatccaaagggggataggcacttggacccccattctccaaggcccgggggggcggtttcccatgggatgtgaaaggctggccattattaagtccctgtaactcaaatgtcaaccccaccgaggcacccccccgtcccccagaatcttggctgtttacaaatcacgtgtccatcgagcacgtctgaaacccctggtagccccgacttctttttaattaaaataaggtaagcccttcaatttgtttcttcaatatttctttcatttgtagggatatttgtttttcatatcagactaataaaaagaaattagaaaccaaaaaaaaaaaaaaaaaaaa

SEQ ID NO: 422 - DNA, 14905 bp, Homo sapiens
cagcggtgcgagctccaggcccatgcactgaggaggcggaaacaaggggagcccccagagctccatcaagccccctccaaaggctcccctacccggtccacgccccccaccccccctccccgcctcctcccaattgtgcatttttgcagccggaggcggctccgagatggggctgtgagcttcgcccggggagggggaaagagcagcgaggagtgaagcgggggggtggggtgaagggtttggatttcggggcagggggcgcacccccgtcagcaggccctccccaaggggctcggaactctacctcttcacccacgcccctggtgcgctttgccgaaggaaagaataagaacagagaaggaggagggggaaaggaggaaaagggggaccccccaactggggggggtgaaggagagaagtagcaggaccagaggggaaggggctgctgcttgcatcagcccacaccatgctgaccccgccgttgctcctgctgctgcccctgctctcagctctggtcgcggcggctatcgacgcccctaagacttgcagccccaagcagtttgcctgcagagatcaaataacctgtatctcaaagggctggcggtgcgacggtgagagggactgcccagacggatctgacgaggcccctgagatttgtccacagagtaaggcccagcgatgccagccaaacgagcataactgcctgggtactgagctgtgtgttcccatgtcccgcctctgcaatggggtccaggactgcatggacggctcagatgaggggccccactgccgagagctccaaggcaactgctctcgcctgggctgccagcaccattgtgtccccacactcgatgggcccacctgctactgcaacagcagctttcagcttcaggcagatggcaagacctgcaaagattttgatgagtgctcagtgtacggcacctgcagccagctatgcaccaacacagacggctccttcatatgtggctgtgttgaaggatacctcctgcagccggataaccgctcctgcaaggccaagaacgagccagtagaccggccccctgtgctgttgatagccaactcccagaacatcttggccacgtacctgagtggggcccaggtgtctaccatcacacctacgagcacgcggcagaccacagccatggacttcagctatgccaacgagaccgtatgctgggtgcatgttggggacagtgctgctcagacgcagctcaagtgtgcccgcatgcctggcctaaagggcttcgtggatgagcacaccatcaacatctccctcagtctgcaccacgtggaacagatggccatcgactggctgacaggcaacttctactttgtggatgacatcgatgataggatctttgtctgcaacagaaatggggacacatgtgtcacattgctagacctggaactctacaaccccaagggcattgccctggaccctgccatggggaaggtgtttttcactgactatgggcagatcccaaaggtggaacgctgtgacatggatgggcagaaccgcaccaagctcgtcgacagcaagattgtgtttcctcatggcatcacgctggacctggtcagccgccttgtctactgggcagatgcctatctggactatattgaagtggtggactatgagggcaagggccgccagaccatcatccagggcatcctgattgagcacctgtacggcctgactgtgtttgagaattatctctatgccaccaactcggacaatgccaatgcccagcagaagacgagtgtgatccgtgtgaaccgctttaacagcaccgagtaccaggttgtcacccgggtggacaagggtggtgccctccacatctaccaccagaggcgtcagccccgagtgaggagccatgcctgtgaaaacgaccagtatgggaagccgggtggctgctctgacatctgcctgctggccaacagccacaaggcgcggacctgccgctgccgttccggcttcagcctgggcagtgacgggaagtcatgcaagaagccggagcatgagctgttcctcgtgtatggcaagggccggccaggcatcatccggggcatggatatgggggccaaggtcccggatgagcacatgatccccattgaaaacctcatgaacccccgagccctggacttccacgctgagaccggcttcatctactttgccgacaccaccagctacctcattggccgccagaagattgatggcactgagcgggagaccatcctgaaggacggcatccacaatgtggagggtgtggccgtggactggatgggagacaatctgtactggacggacgatgggcccaaaaagacaatcagcgtggccaggctggagaaagctgctcagacccgcaagactttaatcgagggcaaaatgacacaccccagggctattgtggtggatccactcaatgggtggatgtactggacagactgggaggaggaccccaaggacagtcggcgtgggcggctggagagggcgtggatggatggctcacaccgagacatctttgtcacctccaagacagtgctttggcccaatgggctaagcctggacatcccggctgggcgcctctactgggtggatgccttctacgaccgcatcgagacgatactgctcaatggcacagaccggaagattgtgtatgaaggtcctgagctgaaccacgcctttggcctgtgtcaccatggcaactacctcttctggactgagtatcggagtggcagtgtctaccgcttggaacggggtgtaggaggcgcaccccccactgtgacccttctgcgcagtgagcggccccccatctttgagatccgaatgtatgatgcccagcagcagcaagttggcaccaacaaatgccgggtgaacaatggcggctgcagcagcctgtgcttggccacccctgggagccgccagtgcgcctgtgctgaggaccaggtgttggacgcagacggcgtcacttgcttggcgaacccatcctacgtgcctccaccccagtgccagccaggcgagtttgcctgtgccaacagccgctgcatccaggagcgctggaagtgtgacggagacaacgattgcctggacaacagtgatgaggccccagccctctgccatcagcacacctgcccctcggaccgattcaagtgcgagaacaaccggtgcatccccaaccgctggctctgcgacggggacaatgactgtgggaacagtgaagatgagtccaatgccacttgttcagcccgcacctgcccccccaaccagttctcctgtgccagtggccgctgcatccccatctcctggacgtgtgatctggatgacgactgtggggaccgctctgatgagtctgcttcgtgtgcctatcccacctgcttccccctgactcagtttacctgcaacaatggcagatgtatcaacatcaactggagatgcgacaatgacaatgactgtggggacaacagtgacgaagccggctgcagccactcctgttctagcacccagttcaagtgcaacagcgggcgttgcatccccgagcactggacctgcgatggggacaatgactgcggagactacagtgatgagacacacgccaactgcaccaaccaggccacgaggccccctggtggctgccacactgatgagttccagtgccggctggatggactatgcatccccctgcggtggcgctgcgatggggacactgactgcatggactccagcgatgagaagagctgtgagggagtgacccacgtctgcgatcccagtgtcaagtttggctgcaaggactcagctcggtgcatcagcaaagcgtgggtgtgtgatggcgacaatgactgtgaggataactcggacgaggagaactgcgagtccctggcctgcaggccaccctcgcacccttgtgccaacaacacctcagtctgcctgccccctgacaagctgtgtgatggcaacgacgactgtggcgacggctcagatgagggcgagctctgcgaccagtgctctctgaataacggtggctgcagccacaactgctcagtggcacctggcgaaggcattgtgtgttcctgccctctgggcatggagctggggcccgacaaccacacctgccagatccagagctactgtgccaagcatctcaaatgcagccaaaagtgcgaccagaacaagttcagcgtgaagtgctcctgctacgagggctgggtcctggaacctgacggcgagagctgccgcagcctggaccccttcaagccgttcatcattttctccaaccgccatgaaatccggcgcatcgatcttcacaaaggagactacagcgtcctggtgcccggcctgcgcaacaccatcgccctggacttccacctcagccagagcgccctctactggaccgacgtggtggaggacaagatctaccgcgggaagctgctggacaacggagccctgactagtttcgaggtggtgattcagtatggcctggccacacccgagggcctggctgtagactggattgcaggcaacatctactgggtggagagtaacctggatcagatcgaggtggccaagctggatgggaccctccggaccaccctgctggccggtgacattgagcacccaagggcaatcgcactggatccccgggatgggatcctgttttggacagactgggatgccagcctgccccgcattgaggcagcctccatgagtggggctgggcgccgcaccgtgcaccgggagaccggctctgggggctggcccaacgggctcaccgtggactacctggagaagcgcatcctttggattgacgccaggtcagatgccatttactcagcccgttacgacggctctggccacatggaggtgcttcggggacacgagttcctgtcgcacccgtttgcagtgacgctgtacgggggggaggtctactggactgactggcgaacaaacacactggctaaggccaacaagtggaccggccacaatgtcaccgtggtacagaggaccaacacccagccctttgacctgcaggtgtaccacccctcccgccagcccatggctcccaatccctgtgaggccaatgggggccagggcccctgctcccacctgtgtctcatcaactacaaccggaccgtgtcctgcgcctgcccccacctcatgaagctccacaaggacaacaccacctgctatgagtttaagaagttcctgctgtacgcacgtcagatggagatccgaggtgtggacctggatgctccctactacaactacatcatctccttcacggtgcccgacatcgacaacgtcacagtgctagactacgatgcccgcgagcagcgtgtgtactggtctgacgtgcggacacaggccatcaagcgggccttcatcaacggcacaggcgtggagacagtcgtctctgcagacttgccaaatgcccacgggctggctgtggactgggtctcccgaaacctgttctggacaagctatgacaccaataagaagcagatcaatgtggcccggctggatggctccttcaagaacgcagtggtgcagggcctggagcagccccatggccttgtcgtccaccctctgcgtgggaagctctactggaccgatggtgacaacatcagcatggccaacatggatggcagcaatcgcaccctgctcttcagtggccagaagggccccgtgggcctggctattgacttccctgaaagcaaactctactggatcagctccgggaaccataccatcaaccgctgcaacctggatgggagtgggctggaggtcatcgatgccatgcggagccagctgggcaaggccaccgccctggccatcatgggggacaagctgtggtgggctgatcaggtgtcggaaaagatgggcacatgcagcaaggctgacggctcgggctccgtggtccttcggaacagcaccaccctggtgatgcacatgaaggtctatgacgagagcatccagctggaccataagggcaccaacccctgcagtgtcaacaacggtgactgctcccagctctgcctgcccacgtcagagacgacccgctcctgcatgtgcacagccggctatagcctccggagtggccagcaggcctgcgagggcgtaggttcctttctcctgtactctgtgcatgagggaatcaggggaattcccctggatcccaatgacaagtcagatgccctggtcccagtgtccgggacctcgctggctgtcggcatcgacttccacgctgaaaatgacaccatctactgggtggacatgggcctgagcacgatcagccgggccaagcgggaccagacgtggcgtgaagacgtggtgaccaatggcattggccgtgtggagggcattgcagtggactggatcgcaggcaacatctactggacagaccagggctttgatgtcatcgaggtcgcccggctcaatggctccttccgctacgtggtgatctcccagggtctagacaagccccgggccatcaccgtccacccggagaaagggtacttgttctggactgagtggggtcagtatccgcgtattgagcggtctcggctagatggcacggagcgtgtggtgctggtcaacgtcagcatcagctggcccaacggcatctcagtggactaccaggatgggaagctgtactggtgcgatgcacggacagacaagattgaacggatcgacctggagacaggtgagaaccgcgaggtggttctgtccagcaacaacatggacatgttttcagtgtctgtgtttgaggatttcatctactggagtgacaggactcatgccaacggctctatcaagcgcgggagcaaagacaatgccacagactccgtgcccctgcgaaccggcatcggcgtccagcttaaagacatcaaagtcttcaaccgggaccggcagaaaggcaccaacgtgtgcgcggtggccaatggcgggtgccagcagctgtgcctgtaccggggccgtgggcagcgggcctgcgcctgtgcccacgggatgctggctgaagacggagcatcgtgccgcgagtatgccggctacctgctctactcagagcgcaccattctcaagagtatccacctgtcggatgagcgcaacctcaatgcgcccgtgcagcccttcgaggaccctgagcacatgaagaacgtcatcgccctggcctttgactaccgggcaggcacctctccgggcacccccaatcgcatcttcttcagcgacatccactttgggaacatccaacagatcaacgacgatggctccaggaggatcaccattgtggaaaacgtgggctccgtggaaggcctggcctatcaccgtggctgggacactctctattggacaagctacacgacatccaccatcacgcgccacacagtggaccagacccgcccaggggccttcgagcgtgagaccgtcatcactatgtctggagatgaccacccacgggccttcgttttggacgagtgccagaacctcatgttctggaccaactggaatgagcagcatcccagcatcatgcgggcggcgctctcgggagccaatgtcctgacccttatcgagaaggacatccgtacccccaatggcctggccatcgaccaccgtgccgagaagctctacttctctgacgccaccctggacaagatcgagcggtgcgagtatgacggctcccaccgctatgtgatcctaaagtcagagcctgtccaccccttcgggctggccgtgtatggggagcacattttctggactgactgggtgcggcgggcagtgcagcgggccaacaagcacgtgggcagcaacatgaagctgctgcgcgtggacatcccccagcagcccatgggcatcatcgccgtggccaacgacaccaacagctgtgaactctctccatgccgaatcaacaacggtggctgccaggacctgtgtctgctcactcaccagggccatgtcaactgctcatgccgagggggccgaatcctccaggatgacctcacctgccgagcggtgaattcctcttgccgagcacaagatgagtttgagtgtgccaatggcgagtgcatcaacttcagcctgacctgcgacggcgtcccccactgcaaggacaagtccgatgagaagccatcctactgcaactcccgccgctgcaagaagactttccggcagtgcagcaatgggcgctgtgtgtccaacatgctgtggtgcaacggggccgacgactgtggggatggctctgacgagatcccttgcaacaagacagcctgtggtgtgggcgagttccgctgccgggacgggacctgcatcgggaactccagccgctgcaaccagtttgtggattgtgaggacgcctcagatgagatgaactgcagtgccaccgactgcagcagctacttccgcctgggcgtgaagggcgtgctcttccagccctgcgagcggacctcactctgctacgcacccagctgggtgtgtgatggcgccaatgactgtggggactacagtgatgagcgcgactgcccaggtgtgaaacgccccagatgccctctgaattacttcgcctgccctagtgggcgctgcatccccatgagctggacgtgtgacaaagaggatgactgtgaacatggcgaggacgagacccactgcaacaagttctgctcagaggcccagtttgagtgccagaaccatcgctgcatctccaagcagtggctgtgtgacggcagcgatgactgtggggatggctcagacgaggctgctcactgtgaaggcaagacgtgcggcccctcctccttctcctgccctggcacccacgtgtgcgtccccgagcgctggctctgtgacggtgacaaagactgtgctgatggtgcagacgagagcatcgcagctggttgcttgtacaacagcacttgtgacgaccgtgagttcatgtgccagaaccgccagtgcatccccaagcacttcgtgtgtgaccacgaccgtgactgtgcagatggctctgatgagtcccccgagtgtgagtacccgacctgcggccccagtgagttccgctgtgccaatgggcgctgtctgagctcccgccagtgggagtgtgatggcgagaatgactgccacgaccagagtgacgaggctcccaagaacccacactgcaccagccaagagcacaagtgcaatgcctcgtcacagttcctgtgcagcagtgggcgctgtgtggctgaggcactgctctgcaacggccaggatgactgtggcgacagctcggacgagcgtggctgccacatcaatgagtgtctcagccgcaagctcagtggctgcagccaggactgtgaggacctcaagatcggcttcaagtgccgctgtcgccctggcttccggctgaaggacgacggccggacgtgtgctgatgtggacgagtgcagcaccaccttcccctgcagccagcgctgcatcaacactcatggcagctataagtgtctgtgtgtggagggctatgcaccccgcggcggcgacccccacagctgcaaggctgtgactgacgaggaaccgtttctgatcttcgccaaccggtactacctgcgcaagctcaacctggacgggtccaactacacgttacttaagcagggcctgaacaacgccgttgccttggattttgactaccgagagcagatgatctactggacagatgtgaccacccagggcagcatgatccgaaggatgcaccttaacgggagcaatgtgcaggtcctacaccgtacaggcctcagcaaccccgatgggctggctgtggactgggtgggtggcaacctgtactggtgcgacaaaggccgggacaccatcgaggtgtccaagctcaatggggcctatcggacggtgctggtcagctctggcctccgtgagcccagggctctggtggtggatgtgcagaatgggtacctgtactggacagactggggtgaccattcactgatcggccgcatcggcatggatgggtccagccgcagcgtcatcgtggacaccaagatcacatggcccaatggcctgacgctggactatgtcactgagcgcatctactgggccgacgcccgcgaggactacattgaatttgccagcctggatggctccaatcgccacgttgtgctgagccaggacatcccgcacatctttgcactgaccctgtttgaggactacgtctactggaccgactgggaaacaaagtccattaaccgagcccacaagaccacgggcaccaacaaaacgctcctcatcagcacgctgcaccggcccatggacctgcatgtcttccatgccctgcgccagccagacgtgcccaatcacccctgcaaggtcaacaatggtggctgcagcaacctgtgcctgctgtcccccgggggagggcacaaatgtgcctgccccaccaacttctacctgggcagcgatgggcgcacctgtgtgtccaactgcacggctagccagtttgtatgcaagaacgacaagtgcatccccttctggtggaagtgtgacaccgaggacgactgcggggaccactcagacgagcccccggactgccctgagttcaagtgccggcccggacagttccagtgctccacaggtatctgcacaaaccctgccttcatctgcgatggcgacaatgactgccaggacaacagtgacgaggccaactgtgacatccacgtctgcttgcccagtcagttcaaatgcaccaacaccaaccgctgtattcccggcatcttccgctgcaatgggcaggacaactgcggagatggggaggatgagagggactgccccgaggtgacctgcgcccccaaccagttccagtgctccattaccaaacggtgcatcccccgggtctgggtctgcgaccgggacaatgactgtgtggatggcagtgatgagcccgccaactgcacccagatgacctgtggtgtggacgagttccgctgcaaggattcgggccgctgcatcccagcgcgttggaagtgtgacggagaggatgactgtggggatggctcggatgagcccaaggaagagtgtgatgaacgcacctgtgagccataccagttccgctgcaagaacaaccgctgcgtgcccggccgctggcagtgcgactacgacaacgattgcggtgacaactccgatgaagagagctgcacccctcggccctgctccgagagtgagttctcctgtgccaacggccgctgcatcgcggggcgctggaaatgcgatggagaccacgactgcgcggacggctcggacgagaaagactgcaccccccgctgtgacatggaccagttccagtgcaagagcggccactgcatccccctgcgctggcgctgtgacgcagacgccgactgcatggacggcagcgacgaggaggcctgcggcactggcgtgcggacctgccccctggacgagttccagtgcaacaacaccttgtgcaagccgctggcctggaagtgcgatggcgaggatgactgtggggacaactcagatgagaaccccgaggagtgtgcccggttcgtgtgccctcccaaccggcccttccgttgcaagaatgaccgcgtctgtctgtggatcgggcgccaatgcgatggcacggacaactgtggggatgggactgatgaagaggactgtgagccccccacagcccacaccacccactgcaaagacaagaaggagtttctgtgccggaaccagcgctgcctctcctcctccctgcgctgcaacatgttcgatgactgcggggacggctctgacgaggaggactgcagcatcgaccccaagctgaccagctgcgccaccaatgccagcatctgtggggacgaggcacgctgcgtgcgcaccgagaaagcggcctactgtgcctgccgctcgggcttccacaccgtgcccggccagcccggatgccaagacatcaacgagtgcctgcgcttcggcacctgctcccagctctgcaacaacaccaagggcggccacctctgcagctgcgctcggaacttcatgaagacgcacaacacctgcaaggccgaaggctctgagtaccaggtcctgtacatcgctgatgacaatgagatccgcagcctgttccccggccacccccattcggcttacgagcaggcattccagggtgacgagagtgtccgcattgatgctatggatgtccatgtcaaggctggccgtgtctattggaccaactggcacacgggcaccatctcctaccgcagcctgccacctgctgcgcctcctaccacttccaaccgccaccggcgacagattgaccggggtgtcacccacctcaacatttcagggctgaagatgcccagaggcatcgccatcgactgggtggccggaaacgtgtactggaccgactcgggccgagatgtgattgaggtggcgcagatgaagggcgagaaccgcaagacgctcatctcgggcatgattgacgagccccacgccattgtggtggacccactgagggggaccatgtactggtcagactggggcaaccaccccaagattgagacggcagcgatggatgggacgcttcgggagacactggtgcaggacaacattcagtggcccacaggcctggccgtggattatcacaatgagcggctgtactgggcagacgccaagctttcagtcatcggcagcatccggctcaatggcacggaccccattgtggctgctgacagcaaacgaggcctaagtcaccccttcagcatcgacgtctttgaggattacatctatggtgtcacctacatcaataatcgtgtcttcaagatccataagtttggccacagccccttggtcaacctgacagggggcctgagccacgcctctgacgtggtcctttaccatcagcacaagcagcccgaagtgaccaacccatgtgaccgcaagaaatgcgagtggctctgcctgctgagccccagtgggcctgtctgcacctgtcccaatgggaagcggctggacaacggcacatgcgtgcctgtgccctctccaacgccccccccagatgctccccggcctggaacctgtaacctgcagtgcttcaacggtggcagctgtttcctcaatgcacggaggcagcccaagtgccgctgccaaccccgctacacgggtgacaagtgtgaactggaccagtgctgggagcactgtcgcaatgggggcacctgtgctgcctccccctctggcatgcccacgtgccggtgccccacgggcttcacgggccccaaatgcacccagcaggtgtgtgcgggctactgtgccaacaacagcacctgcactgtcaaccagggcaaccagccccagtgccgatgcctacccggcttcctgggcgaccgctgccagtaccggcagtgctctggctactgtgagaactttggcacatgccagatggctgctgatggctcccgacaatgccgctgcactgcctactttgagggatcgaggtgtgaggtgaacaagtgcagccgctgtctcgaaggggcctgtgtggtcaacaagcagagtggggatgtcacctgcaactgcacggatggccgggtggcccccagctgtctgacctgcgtcggccactgcagcaatggcggctcctgtaccatgaacagcaaaatgatgcctgagtgccagtgcccaccccacatgacagggccccggtgtgaggagcacgtcttcagccagcagcagccaggacatatagcctccatcctaatccctctgctgttgctgctgctgctggttctggtggccggagtggtattctggtataagcggcgagtccaaggggctaagggcttccagcaccaacggatgaccaacggggccatgaacgtggagattggaaaccccacctacaagatgtacgaaggcggagagcctgatgatgtgggaggcctactggacgctgactttgccctggaccctgacaagcccaccaacttcaccaaccccgtgtatgccacactctacatggggggccatggcagtcgccactccctggccagcacggacgagaagcgagaactcctgggccggggccctgaggacgagataggggaccccttggcatagggccctgccccgtcggactgcccccagaaagcctcctgccccctgccggtgaagtccttcagtgagcccctccccagccagcccttccctggccccgccggatgtataaatgtaaaaatgaaggaattacattttatatgtgagcgagcaagccggcaagcgagcacagtattatttctccatcccctccctgcctgctccttggcacccccatgctgccttcagggagacaggcagggagggcttggggctgcacctcctaccctcccaccagaacgcaccccactgggagagctggtggtgcagccttcccctccctgtataagacactttgccaaggctctcccctctcgccccatccctgcttgcccgctcccacagcttcctgagggctaattctgggaagggagagttctttgctgcccctgtctggaagacgtggctctgggtgaggtaggcgggaaaggatggagtgttttagttcttgggggaggccaccccaaaccccagccccaactccaggggcacctatgagatggccatgctcaacccccctcccagacaggccctccctgtctccagggcccccaccgaggttcccagggctggagacttcctctggtaaacattcctccagcctcccctcccctggggacgccaaggaggtgggccacacccaggaagggaaagcgggcagccccgttttggggacgtgaacgttttaataatttttgctgaattcctttacaactaaataacacagatattgttataaataaaattgtaaaaaaaaaaaaaaaaaaa

SEQ ID NO: 423 - DNA, 15072 bp, Homo sapiens
aaccttttttctttccccgccccttccctccctccctcctcaacccgtcccctccctctcccccatcagcccccccctcggcacttcagtccggggaacagcggtgcgagctccaggcccatgcactgaggaggcggaaacaaggggagcccccagagctccatcaagccccctccaaaggctcccctacccggtccacgccccccaccccccctccccgcctcctcccaattgtgcatttttgcagccggaggcggctccgagatggggctgtgagcttcgcccggggagggggaaagagcagcgaggagtgaagcgggggggtggggtgaagggtttggatttcggggcagggggcgcacccccgtcagcaggccctccccaaggggctcggaactctacctcttcacccacgcccctggtgcgctttgccgaaggaaagaataagaacagagaaggaggagggggaaaggaggaaaagggggaccccccaactggggggggtgaaggagagaagtagcaggaccagaggggaaggggctgctgcttgcatcagcccacaccatgctgaccccgccgttgctcctgctgctgcccctgctctcagctctggtcgcggcggctatcgacgcccctaagacttgcagccccaagcagtttgcctgcagagatcaaataacctgtatctcaaagggctggcggtgcgacggtgagagggactgcccagacggatctgacgaggcccctgagatttgtccacagagtaaggcccagcgatgccagccaaacgagcataactgcctgggtactgagctgtgtgttcccatgtcccgcctctgcaatggggtccaggactgcatggacggctcagatgaggggccccactgccgagagctccaaggcaactgctctcgcctgggctgccagcaccattgtgtccccacactcgatgggcccacctgctactgcaacagcagctttcagcttcaggcagatggcaagacctgcaaagattttgatgagtgctcagtgtacggcacctgcagccagctatgcaccaacacagacggctccttcatatgtggctgtgttgaaggatacctcctgcagccggataaccgctcctgcaaggccaagaacgagccagtagaccggccccctgtgctgttgatagccaactcccagaacatcttggccacgtacctgagtggggcccaggtgtctaccatcacacctacgagcacgcggcagaccacagccatggacttcagctatgccaacgagaccgtatgctgggtgcatgttggggacagtgctgctcagacgcagctcaagtgtgcccgcatgcctggcctaaagggcttcgtggatgagcacaccatcaacatctccctcagtctgcaccacgtggaacagatggccatcgactggctgacaggcaacttctactttgtggatgacatcgatgataggatctttgtctgcaacagaaatggggacacatgtgtcacattgctagacctggaactctacaaccccaagggcattgccctggaccctgccatggggaaggtgtttttcactgactatgggcagatcccaaaggtggaacgctgtgacatggatgggcagaaccgcaccaagctcgtcgacagcaagattgtgtttcctcatggcatcacgctggacctggtcagccgccttgtctactgggcagatgcctatctggactatattgaagtggtggactatgagggcaagggccgccagaccatcatccagggcatcctgattgagcacctgtacggcctgactgtgtttgagaattatctctatgccaccaactcggacaatgccaatgcccagcagaagacgagtgtgatccgtgtgaaccgctttaacagcaccgagtaccaggttgtcacccgggtggacaagggtggtgccctccacatctaccaccagaggcgtcagccccgagtgaggagccatgcctgtgaaaacgaccagtatgggaagccgggtggctgctctgacatctgcctgctggccaacagccacaaggcgcggacctgccgctgccgttccggcttcagcctgggcagtgacgggaagtcatgcaagaagccggagcatgagctgttcctcgtgtatggcaagggccggccaggcatcatccggggcatggatatgggggccaaggtcccggatgagcacatgatccccattgaaaacctcatgaacccccgagccctggacttccacgctgagaccggcttcatctactttgccgacaccaccagctacctcattggccgccagaagattgatggcactgagcgggagaccatcctgaaggacggcatccacaatgtggagggtgtggccgtggactggatgggagacaatctgtactggacggacgatgggcccaaaaagacaatcagcgtggccaggctggagaaagctgctcagacccgcaagactttaatcgagggcaaaatgacacaccccagggctattgtggtggatccactcaatgggtggatgtactggacagactgggaggaggaccccaaggacagtcggcgtgggcggctggagagggcgtggatggatggctcacaccgagacatctttgtcacctccaagacagtgctttggcccaatgggctaagcctggacatcccggctgggcgcctctactgggtggatgccttctacgaccgcatcgagacgatactgctcaatggcacagaccggaagattgtgtatgaaggtcctgagctgaaccacgcctttggcctgtgtcaccatggcaactacctcttctggactgagtatcggagtggcagtgtctaccgcttggaacggggtgtaggaggcgcaccccccactgtgacccttctgcgcagtgagcggccccccatctttgagatccgaatgtatgatgcccagcagcagcaagttggcaccaacaaatgccgggtgaacaatggcggctgcagcagcctgtgcttggccacccctgggagccgccagtgcgcctgtgctgaggaccaggtgttggacgcagacggcgtcacttgcttggcgaacccatcctacgtgcctccaccccagtgccagccaggcgagtttgcctgtgccaacagccgctgcatccaggagcgctggaagtgtgacggagacaacgattgcctggacaacagtgatgaggccccagccctctgccatcagcacacctgcccctcggaccgattcaagtgcgagaacaaccggtgcatccccaaccgctggctctgcgacggggacaatgactgtgggaacagtgaagatgagtccaatgccacttgttcagcccgcacctgcccccccaaccagttctcctgtgccagtggccgctgcatccccatctcctggacgtgtgatctggatgacgactgtggggaccgctctgatgagtctgcttcgtgtgcctatcccacctgcttccccctgactcagtttacctgcaacaatggcagatgtatcaacatcaactggagatgcgacaatgagaaggattgtggggacggctctgacgaacagacctgtcctgagcctgccgacaatgactgtggggacaacagtgacgaagccggctgcagccactcctgttctagcacccagttcaagtgcaacagcgggcgttgcatccccgagcactggacctgcgatggggacaatgactgcggagactacagtgatgagacacacgccaactgcaccaaccaggccacgaggccccctggtggctgccacactgatgagttccagtgccggctggatggactatgcatccccctgcggtggcgctgcgatggggacactgactgcatggactccagcgatgagaagagctgtgagggagtgacccacgtctgcgatcccagtgtcaagtttggctgcaaggactcagctcggtgcatcagcaaagcgtgggtgtgtgatggcgacaatgactgtgaggataactcggacgaggagaactgcgagtccctggcctgcaggccaccctcgcacccttgtgccaacaacacctcagtctgcctgccccctgacaagctgtgtgatggcaacgacgactgtggcgacggctcagatgagggcgagctctgcgaccagtgctctctgaataacggtggctgcagccacaactgctcagtggcacctggcgaaggcattgtgtgttcctgccctctgggcatggagctggggcccgacaaccacacctgccagatccagagctactgtgccaagcatctcaaatgcagccaaaagtgcgaccagaacaagttcagcgtgaagtgctcctgctacgagggctgggtcctggaacctgacggcgagagctgccgcagcctggaccccttcaagccgttcatcattttctccaaccgccatgaaatccggcgcatcgatcttcacaaaggagactacagcgtcctggtgcccggcctgcgcaacaccatcgccctggacttccacctcagccagagcgccctctactggaccgacgtggtggaggacaagatctaccgcgggaagctgctggacaacggagccctgactagtttcgaggtggtgattcagtatggcctggccacacccgagggcctggctgtagactggattgcaggcaacatctactgggtggagagtaacctggatcagatcgaggtggccaagctggatgggaccctccggaccaccctgctggccggtgacattgagcacccaagggcaatcgcactggatccccgggatgggatcctgttttggacagactgggatgccagcctgccccgcattgaggcagcctccatgagtggggctgggcgccgcaccgtgcaccgggagaccggctctgggggctggcccaacgggctcaccgtggactacctggagaagcgcatcctttggattgacgccaggtcagatgccatttactcagcccgttacgacggctctggccacatggaggtgcttcggggacacgagttcctgtcgcacccgtttgcagtgacgctgtacgggggggaggtctactggactgactggcgaacaaacacactggctaaggccaacaagtggaccggccacaatgtcaccgtggtacagaggaccaacacccagccctttgacctgcaggtgtaccacccctcccgccagcccatggctcccaatccctgtgaggccaatgggggccagggcccctgctcccacctgtgtctcatcaactacaaccggaccgtgtcctgcgcctgcccccacctcatgaagctccacaaggacaacaccacctgctatgagtttaagaagttcctgctgtacgcacgtcagatggagatccgaggtgtggacctggatgctccctactacaactacatcatctccttcacggtgcccgacatcgacaacgtcacagtgctagactacgatgcccgcgagcagcgtgtgtactggtctgacgtgcggacacaggccatcaagcgggccttcatcaacggcacaggcgtggagacagtcgtctctgcagacttgccaaatgcccacgggctggctgtggactgggtctcccgaaacctgttctggacaagctatgacaccaataagaagcagatcaatgtggcccggctggatggctccttcaagaacgcagtggtgcagggcctggagcagccccatggccttgtcgtccaccctctgcgtgggaagctctactggaccgatggtgacaacatcagcatggccaacatggatggcagcaatcgcaccctgctcttcagtggccagaagggccccgtgggcctggctattgacttccctgaaagcaaactctactggatcagctccgggaaccataccatcaaccgctgcaacctggatgggagtgggctggaggtcatcgatgccatgcggagccagctgggcaaggccaccgccctggccatcatgggggacaagctgtggtgggctgatcaggtgtcggaaaagatgggcacatgcagcaaggctgacggctcgggctccgtggtccttcggaacagcaccaccctggtgatgcacatgaaggtctatgacgagagcatccagctggaccataagggcaccaacccctgcagtgtcaacaacggtgactgctcccagctctgcctgcccacgtcagagacgacccgctcctgcatgtgcacagccggctatagcctccggagtggccagcaggcctgcgagggcgtaggttcctttctcctgtactctgtgcatgagggaatcaggggaattcccctggatcccaatgacaagtcagatgccctggtcccagtgtccgggacctcgctggctgtcggcatcgacttccacgctgaaaatgacaccatctactgggtggacatgggcctgagcacgatcagccgggccaagcgggaccagacgtggcgtgaagacgtggtgaccaatggcattggccgtgtggagggcattgcagtggactggatcgcaggcaacatctactggacagaccagggctttgatgtcatcgaggtcgcccggctcaatggctccttccgctacgtggtgatctcccagggtctagacaagccccgggccatcaccgtccacccggagaaagggtacttgttctggactgagtggggtcagtatccgcgtattgagcggtctcggctagatggcacggagcgtgtggtgctggtcaacgtcagcatcagctggcccaacggcatctcagtggactaccaggatgggaagctgtactggtgcgatgcacggacagacaagattgaacggatcgacctggagacaggtgagaaccgcgaggtggttctgtccagcaacaacatggacatgttttcagtgtctgtgtttgaggatttcatctactggagtgacaggactcatgccaacggctctatcaagcgcgggagcaaagacaatgccacagactccgtgcccctgcgaaccggcatcggcgtccagcttaaagacatcaaagtcttcaaccgggaccggcagaaaggcaccaacgtgtgcgcggtggccaatggcgggtgccagcagctgtgcctgtaccggggccgtgggcagcgggcctgcgcctgtgcccacgggatgctggctgaagacggagcatcgtgccgcgagtatgccggctacctgctctactcagagcgcaccattctcaagagtatccacctgtcggatgagcgcaacctcaatgcgcccgtgcagcccttcgaggaccctgagcacatgaagaacgtcatcgccctggcctttgactaccgggcaggcacctctccgggcacccccaatcgcatcttcttcagcgacatccactttgggaacatccaacagatcaacgacgatggctccaggaggatcaccattgtggaaaacgtgggctccgtggaaggcctggcctatcaccgtggctgggacactctctattggacaagctacacgacatccaccatcacgcgccacacagtggaccagacccgcccaggggccttcgagcgtgagaccgtcatcactatgtctggagatgaccacccacgggccttcgttttggacgagtgccagaacctcatgttctggaccaactggaatgagcagcatcccagcatcatgcgggcggcgctctcgggagccaatgtcctgacccttatcgagaaggacatccgtacccccaatggcctggccatcgaccaccgtgccgagaagctctacttctctgacgccaccctggacaagatcgagcggtgcgagtatgacggctcccaccgctatgtgatcctaaagtcagagcctgtccaccccttcgggctggccgtgtatggggagcacattttctggactgactgggtgcggcgggcagtgcagcgggccaacaagcacgtgggcagcaacatgaagctgctgcgcgtggacatcccccagcagcccatgggcatcatcgccgtggccaacgacaccaacagctgtgaactctctccatgccgaatcaacaacggtggctgccaggacctgtgtctgctcactcaccagggccatgtcaactgctcatgccgagggggccgaatcctccaggatgacctcacctgccgagcggtgaattcctcttgccgagcacaagatgagtttgagtgtgccaatggcgagtgcatcaacttcagcctgacctgcgacggcgtcccccactgcaaggacaagtccgatgagaagccatcctactgcaactcccgccgctgcaagaagactttccggcagtgcagcaatgggcgctgtgtgtccaacatgctgtggtgcaacggggccgacgactgtggggatggctctgacgagatcccttgcaacaagacagcctgtggtgtgggcgagttccgctgccgggacgggacctgcatcgggaactccagccgctgcaaccagtttgtggattgtgaggacgcctcagatgagatgaactgcagtgccaccgactgcagcagctacttccgcctgggcgtgaagggcgtgctcttccagccctgcgagcggacctcactctgctacgcacccagctgggtgtgtgatggcgccaatgactgtggggactacagtgatgagcgcgactgcccaggtgtgaaacgccccagatgccctctgaattacttcgcctgccctagtgggcgctgcatccccatgagctggacgtgtgacaaagaggatgactgtgaacatggcgaggacgagacccactgcaacaagttctgctcagaggcccagtttgagtgccagaaccatcgctgcatctccaagcagtggctgtgtgacggcagcgatgactgtggggatggctcagacgaggctgctcactgtgaaggcaagacgtgcggcccctcctccttctcctgccctggcacccacgtgtgcgtccccgagcgctggctctgtgacggtgacaaagactgtgctgatggtgcagacgagagcatcgcagctggttgcttgtacaacagcacttgtgacgaccgtgagttcatgtgccagaaccgccagtgcatccccaagcacttcgtgtgtgaccacgaccgtgactgtgcagatggctctgatgagtcccccgagtgtgagtacccgacctgcggccccagtgagttccgctgtgccaatgggcgctgtctgagctcccgccagtgggagtgtgatggcgagaatgactgccacgaccagagtgacgaggctcccaagaacccacactgcaccagccaagagcacaagtgcaatgcctcgtcacagttcctgtgcagcagtgggcgctgtgtggctgaggcactgctctgcaacggccaggatgactgtggcgacagctcggacgagcgtggctgccacatcaatgagtgtctcagccgcaagctcagtggctgcagccaggactgtgaggacctcaagatcggcttcaagtgccgctgtcgccctggcttccggctgaaggacgacggccggacgtgtgctgatgtggacgagtgcagcaccaccttcccctgcagccagcgctgcatcaacactcatggcagctataagtgtctgtgtgtggagggctatgcaccccgcggcggcgacccccacagctgcaaggctgtgactgacgaggaaccgtttctgatcttcgccaaccggtactacctgcgcaagctcaacctggacgggtccaactacacgttacttaagcagggcctgaacaacgccgttgccttggattttgactaccgagagcagatgatctactggacagatgtgaccacccagggcagcatgatccgaaggatgcaccttaacgggagcaatgtgcaggtcctacaccgtacaggcctcagcaaccccgatgggctggctgtggactgggtgggtggcaacctgtactggtgcgacaaaggccgggacaccatcgaggtgtccaagctcaatggggcctatcggacggtgctggtcagctctggcctccgtgagcccagggctctggtggtggatgtgcagaatgggtacctgtactggacagactggggtgaccattcactgatcggccgcatcggcatggatgggtccagccgcagcgtcatcgtggacaccaagatcacatggcccaatggcctgacgctggactatgtcactgagcgcatctactgggccgacgcccgcgaggactacattgaatttgccagcctggatggctccaatcgccacgttgtgctgagccaggacatcccgcacatctttgcactgaccctgtttgaggactacgtctactggaccgactgggaaacaaagtccattaaccgagcccacaagaccacgggcaccaacaaaacgctcctcatcagcacgctgcaccggcccatggacctgcatgtcttccatgccctgcgccagccagacgtgcccaatcacccctgcaaggtcaacaatggtggctgcagcaacctgtgcctgctgtcccccgggggagggcacaaatgtgcctgccccaccaacttctacctgggcagcgatgggcgcacctgtgtgtccaactgcacggctagccagtttgtatgcaagaacgacaagtgcatccccttctggtggaagtgtgacaccgaggacgactgcggggaccactcagacgagcccccggactgccctgagttcaagtgccggcccggacagttccagtgctccacaggtatctgcacaaaccctgccttcatctgcgatggcgacaatgactgccaggacaacagtgacgaggccaactgtgacatccacgtctgcttgcccagtcagttcaaatgcaccaacaccaaccgctgtattcccggcatcttccgctgcaatgggcaggacaactgcggagatggggaggatgagagggactgccccgaggtgacctgcgcccccaaccagttccagtgctccattaccaaacggtgcatcccccgggtctgggtctgcgaccgggacaatgactgtgtggatggcagtgatgagcccgccaactgcacccagatgacctgtggtgtggacgagttccgctgcaaggattcgggccgctgcatcccagcgcgttggaagtgtgacggagaggatgactgtggggatggctcggatgagcccaaggaagagtgtgatgaacgcacctgtgagccataccagttccgctgcaagaacaaccgctgcgtgcccggccgctggcagtgcgactacgacaacgattgcggtgacaactccgatgaagagagctgcacccctcggccctgctccgagagtgagttctcctgtgccaacggccgctgcatcgcggggcgctggaaatgcgatggagaccacgactgcgcggacggctcggacgagaaagactgcaccccccgctgtgacatggaccagttccagtgcaagagcggccactgcatccccctgcgctggcgctgtgacgcagacgccgactgcatggacggcagcgacgaggaggcctgcggcactggcgtgcggacctgccccctggacgagttccagtgcaacaacaccttgtgcaagccgctggcctggaagtgcgatggcgaggatgactgtggggacaactcagatgagaaccccgaggagtgtgcccggttcgtgtgccctcccaaccggcccttccgttgcaagaatgaccgcgtctgtctgtggatcgggcgccaatgcgatggcacggacaactgtggggatgggactgatgaagaggactgtgagccccccacagcccacaccacccactgcaaagacaagaaggagtttctgtgccggaaccagcgctgcctctcctcctccctgcgctgcaacatgttcgatgactgcggggacggctctgacgaggaggactgcagcatcgaccccaagctgaccagctgcgccaccaatgccagcatctgtggggacgaggcacgctgcgtgcgcaccgagaaagcggcctactgtgcctgccgctcgggcttccacaccgtgcccggccagcccggatgccaagacatcaacgagtgcctgcgcttcggcacctgctcccagctctgcaacaacaccaagggcggccacctctgcagctgcgctcggaacttcatgaagacgcacaacacctgcaaggccgaaggctctgagtaccaggtcctgtacatcgctgatgacaatgagatccgcagcctgttccccggccacccccattcggcttacgagcaggcattccagggtgacgagagtgtccgcattgatgctatggatgtccatgtcaaggctggccgtgtctattggaccaactggcacacgggcaccatctcctaccgcagcctgccacctgctgcgcctcctaccacttccaaccgccaccggcgacagattgaccggggtgtcacccacctcaacatttcagggctgaagatgcccagaggcatcgccatcgactgggtggccggaaacgtgtactggaccgactcgggccgagatgtgattgaggtggcgcagatgaagggcgagaaccgcaagacgctcatctcgggcatgattgacgagccccacgccattgtggtggacccactgagggggaccatgtactggtcagactggggcaaccaccccaagattgagacggcagcgatggatgggacgcttcgggagacactggtgcaggacaacattcagtggcccacaggcctggccgtggattatcacaatgagcggctgtactgggcagacgccaagctttcagtcatcggcagcatccggctcaatggcacggaccccattgtggctgctgacagcaaacgaggcctaagtcaccccttcagcatcgacgtctttgaggattacatctatggtgtcacctacatcaataatcgtgtcttcaagatccataagtttggccacagccccttggtcaacctgacagggggcctgagccacgcctctgacgtggtcctttaccatcagcacaagcagcccgaagtgaccaacccatgtgaccgcaagaaatgcgagtggctctgcctgctgagccccagtgggcctgtctgcacctgtcccaatgggaagcggctggacaacggcacatgcgtgcctgtgccctctccaacgccccccccagatgctccccggcctggaacctgtaacctgcagtgcttcaacggtggcagctgtttcctcaatgcacggaggcagcccaagtgccgctgccaaccccgctacacgggtgacaagtgtgaactggaccagtgctgggagcactgtcgcaatgggggcacctgtgctgcctccccctctggcatgcccacgtgccggtgccccacgggcttcacgggccccaaatgcacccagcaggtgtgtgcgggctactgtgccaacaacagcacctgcactgtcaaccagggcaaccagccccagtgccgatgcctacccggcttcctgggcgaccgctgccagtaccggcagtgctctggctactgtgagaactttggcacatgccagatggctgctgatggctcccgacaatgccgctgcactgcctactttgagggatcgaggtgtgaggtgaacaagtgcagccgctgtctcgaaggggcctgtgtggtcaacaagcagagtggggatgtcacctgcaactgcacggatggccgggtggcccccagctgtctgacctgcgtcggccactgcagcaatggcggctcctgtaccatgaacagcaaaatgatgcctgagtgccagtgcccaccccacatgacagggccccggtgtgaggagcacgtcttcagccagcagcagccaggacatatagcctccatcctaatccctctgctgttgctgctgctgctggttctggtggccggagtggtattctggtataagcggcgagtccaaggggctaagggcttccagcaccaacggatgaccaacggggccatgaacgtggagattggaaaccccacctacaagatgtacgaaggcggagagcctgatgatgtgggaggcctactggacgctgactttgccctggaccctgacaagcccaccaacttcaccaaccccgtgtatgccacactctacatggggggccatggcagtcgccactccctggccagcacggacgagaagcgagaactcctgggccggggccctgaggacgagataggggaccccttggcatagggccctgccccgtcggactgcccccagaaagcctcctgccccctgccagtgaagtccttcagtgagcccctccccagccagcccttccctggccccgccggatgtataaatgtaaaaatgaaggaattacattttatatgtgagcgagcaagccggcaagcgagcacagtattatttctccatcccctccctgcctgctccttggcacccccatgctgccttcagggagacaggcagggagggcttggggctgcacctcctaccctcccaccagaacgcaccccactgggagagctggtggtgcagccttcccctccctgtataagacactttgccaaggctctcccctctcgccccatccctgcttgcccgctcccacagcttcctgagggctaattctgggaagggagagttctttgctgcccctgtctggaagacgtggctctgggtgaggtaggcgggaaaggatggagtgttttagttcttgggggaggccaccccaaaccccagccccaactccaggggcacctatgagatggccatgctcaacccccctcccagacaggccctccctgtctccagggcccccaccgaggttcccagggctggagacttcctctggtaaacattcctccagcctcccctcccctggggacgccaaggaggtgggccacacccaggaagggaaagcgggcagccccgttttggggacgtgaacgttttaataatttttgctgaattcctttacaactaaataacacagatattgttataaataaaattgtaaaaaaaaaaaaaaaaaaaaaggccaaaaaaaaaaaa

SEQ ID NO: 424 - DNA, 15882 bp, Homo sapiens
gaagatggcgacgagcggcggcgaagaggcggcggcagcggctccggcgccggggaccccggcaacgggggcggacacgaccccgggctgggaggtggctgtgcggcccctgctgtccgcgtcctactccgccttcgagatgaaggagttgccgcagctggtggcctcagtcatcgagagtgaatcagaaatcctgcaccatgagaagcagtacgagccattctactcatcttttgttgcactttccacacactatattacaacagtttgcagtctcattccccggaaccaacttcagtcagtggcagcagcctgtaaagttctaattgagttttctctcctgcgtctggagaatccagatgaggcttgtgctgtgtcccagaaacacttgattctcctaatcaagggcctgtgcactggctgtagccgactagatagaactgaaattatcacatttacagcaatgatgaaatccgccaagctgccccaaacagtgaagacactttcagacgtggaagatcagaaagagctggcctcaccagtaagccctgagttgaggcaaaaggaggtacagatgaattttttgaaccagctgacctcagtttttaaccctagaactgtagcatcacaacctatcagtacacagactctggtggaaggagaaaatgatgagcagtcatctacagatcaagcctcagctatcaaaaccaagaatgtgttcatagctcagaacgtggctagtcttcaagagcttggtggctcggagaagctactgcgtgtatgtttgaacctgccatatttcctacgctatatcaatcggttccaagatgcagttttagctaattccttcttcataatgcctgcaacagtagcagatgccactgctgttcgtaatggctttcattcattggtgattgatgtaactatggcattggataccctttctctacctgtgttggaacctctcaatccttctcgtctacaagatgtgacagtcctcagcctaagttgtctgtatgcaggtgtgagtgtggcaacgtgcatggccatcctccatgtgggtagtgcccagcaagtgcggacagggtccacgagctccaaagaagatgactatgaaagtgacgcagctacaattgtccagaaatgtctcgaaatctatgacatgattggacaagcaatcagcagttctcgccgggctggtggtgagcactatcagaatttccaattgctgggtgcttggtgcttgttaaacagccttttcctcatactgaacctcagtcctactgcgttggctgataaggggaaagagaaggacccactggctgccctccgagtcagagacatcctttctcgtactaaagagggagtgggctcccctaaactggggcctggaaaagggcatcagggatttggggtactctcagtaatattggcaaaccatgccatcaaactgctaacgtctctctttcaagacctacaagtggaggcccttcacaagggttgggagacagatggcccccctgcagccttgagcattatggcccagagcacctccatacagaggattcaacggctgattgactctgtcccactgatgaacctgctcttgacgttactttcaacttcctacagaaaggcatgtgtcctgcagcggcagaggaagggctccatgagcagcgatgccagcgcctccaccgactccaatacttactatgaggacgatttcagtagcacggaggaggacagcagccaagacgatgacagtgagcctattttggggcaatggtttgaggagactatttctcccagtaaagagaaagcagcacctccgcctcctcccccacctcctccactggaaagctctcctcgggttaaaagccccagtaagcaggcccctggtgagaagggcaacattctggcgagtcgcaaagatcctgagttgttcttaggtctggcttccaacattttgaacttcatcacctcttccatgctgaactctcggaacaattttatccgaaactatctgagtgtatctctttcagaacaccatatggccaccctagccagtatcatcaaggaggtggacaaagatggactcaagggttcatcagatgaagagtttgctgcagctctctatcacttcaaccactcactggtaacctctgaccttcagtcacctaacctgcagaacacactgttgcagcagctaggagtggctcctttttctgagggcccttggcccttgtacattcaccctcaaagcctctctgtgctttcacgcctcctgctcatctggcaacataaagccagtgctcaaggtgaccctgacgtcccagaatgccttaaagtttgggacaggtttttgtctacaatgaagcagaatgccctgcaaggtgtggtgcccagtgagacagaggatctgaatgtagaacacctgcagatgctcctcctcattttccacaatttcaccgagacaggccggcgggccatattgtcgctttttgtccagatcatccaggagttgagcgtcaacatggatgctcagatgcgcttcgtgccgcttatcttggctcgcctccttctcatctttgattatctgcttcatcagtactccaaagcccctgtgtatctatttgagcaggtacagcataacctgctaagtcctccctttgggtgggcaagtggatcccaggacagcaacagccgccgggcaaccactcctctctatcatggattcaaagaagtagaagaaaactggtctaagcatttctcatcagatgctgtcccacaccccagattctactgtgtcctgtccccagaagcctcagaggatgatttgaaccgacttgattctgtggcatgtgacgtccttttctccaagcttgtcaagtatgatgagctttatgctgcactgacagccctgcttgcagctgggtcccagcttgatacagttaggagaaaggaaaacaagaatgtaacagccttggaggcctgtgcccttcaatattacttcttgatactgtggaggatcctaggaattttaccaccatcaaagacttacattaaccagctatccatgaactcacctgagatgagcgaatgtgacatcttgcacactctgcgatggtcttctcggctccggatcagctcctatgtcaactggataaaggatcaccttatcaaacagggaatgaaggctgagcatgctagctcgcttctagaactggcatccaccactaagtgtagctcagtgaaatatgatgttgaaatagtagaggaatacttcgctcgacagatctcatccttctgtagtatcgactgtaccaccatcttgcagctgcatgaaattcccagtctgcagtccatctacacccttgatgccgcgatctcaaaggtccaggtctctttggatgagcatttttctaagatggctgctgagactgatcctcataagtcgtctgagattaccaagaacctacttccagccacgctgcaactcattgacacctatgcatcgttcaccagagcctatttgctgcaaaactttaatgaagagggaacaactgagaaaccttccaaggagaaactgcaaggctttgctgctgttttggctattggctctagcaggtgcaaggcaaatactctgggtccgacactggttcagaatttgccatcgtcagtgcagactgtgtgtgagtcctggaacaacatcaataccaatgaatttcccaatattggatcctggcgcaatgcctttgccaatgacaccatcccttcagagagttatattagtgcagtgcaggctgcacacctggggactctctgtagccaaagtctgcccctggctgcttccctgaagcataccctcctctcactggtcaggttgactggagatcttattgtttggtcagatgagatgaacccaccacaggtaattcggacactgctacctcttcttttggaatcaagcactgagagtgttgccgagatcagtagcaactccctggaacgcatcttgggccctgctgagtctgatgagttcttggctcgtgtttatgagaagctgatcactggttgttacaacattctggccaatcatgcagatcctaacagtggactggatgaatccatcctggaggaatgtctccagtacttggaaaagcagctggaaagtagccaggctcgtaaagctatggaggagtttttctctgacagtggagaacttgtacagatcatgatggcaacagccaatgagaacctctctgctaaattctgtaaccgagttttgaaattcttcaccaaactcttccagctgactgagaagagccctaacccgagcctgttgcatctctgtggctccctggcacaactggcctgtgtggaacctgtgcgcctgcaggcctggctcacccgcatgactacatcgcccccaaaagattctgatcagctggatgtaattcaggagaaccggcagctgctgcagttactgaccacatacattgttcgggaaaacagccaagttggggaaggtgtgtgtgctgttcttctgggcaccctgactcccatggcaacagagatgctggccaacggtgatgggactggcttccctgaacttatggttgtgatggccactctggccagtgcaggtcaaggtgctggtcaccttcagcttcataatgctgctgtggattggctgagcagatgcaagaaatacctgtcacagaagaatgtagttgaaaaactgaatgccaatgtaatgcatggaaagcatgtgatgatcttggagtgcacatgccatatcatgtcttacttggctgatgtcacgaatgccctgagccagagtaatggtcaaggcccaagtcatctctcagtggatggggaagagcgggccattgaagtagactcagactgggtggaggagttggcggtggaagaggaagattcccaggctgaggattcagatgaagattctctttgcaataaactctgcacttttacgatcacacagaaagaattcatgaaccagcattggtaccactgtcacacctgtaaaatggtggatggcgtgggtgtctgcacagtgtgtgctaaggtgtgccacaaggatcatgagatttcctatgccaagtatggatccttcttctgtgactgtggagccaaggaagatggcagctgtttggctctggtgaagagaactcctagcagtggcatgagctctaccatgaaggagtcggcatttcagagtgaacccaggatttcagagagtctagtgcgtcatgccagcacctcctcgccagctgacaaagccaaggttaccatcagtgatggaaaggttgctgacgaagagaagcccaagaagagcagcctctgccgcacagtagagggctgccgggaggaattacagaaccaggccaatttctccttcgctcctctcgtgttagacatgcttaatttccttatggatgccattcagaccaacttccagcaagcttcagccgtcgggagcagcagccgtgctcagcaagccctcagtgagctacacactgtggagaaggcagtggagatgacagaccagctgatggttcccaccttagggtcccaggaaggtgcctttgagaatgtgcggatgaattacagtggagaccagggccagaccatccggcagctgatcagtgctcatgtgctcaggcgggtggctatgtgtgtgctctcctctccccatgggcgccgccaacatttggctgtcagccatgagaagggcaagatcaccgttctgcagctctctgcactcctgaagcaagcagattccagcaaaaggaagttaactctgacccgcttggcttctgccccagttccttttactgtgttgagcctcacaggaaatccctgcaaggaagactacttggcggtttgtgggctaaaggactgtcatgtgctcacctttagtagctcaggctctgtttcggatcacttggttttgcaccctcagttggcaacggggaacttcatcatcaaagccgtgtggttacctggttcacagaccgagttagcaattgtcaccgcagactttgttaagatttatgacctgtgtgttgatgccttgagtccaaccttctattttctcctgccaagctcaaagataagagatgttaccttccttttcaatgaggagggaaagaacatcattgttataatgtcttcggctgggtacatctatactcagcttatggaagaggccagcagtgcccagcagggacccttctatgtcactaatgtgttggaaatcaatcatgaggacctgaaggacagtaacagccaggtggcgggcggtggtgtgtccgtgtactactcccacgtgttgcagatgttgttcttcagctattgtcaaggcaaatcattcgcagccaccatcagcaggacaaccctggaggtgttgcaactcttccccatcaacatcaaaagttccaatggtggcagtaagacttctcctgctctttgccagtggtctgaggtgatgaaccaccctggcttggtgtgctgtgtccagcaaactacaggggtgccgctggtagttatggtgaaaccagacacttttcttatccaggagattaagactcttcctgctaaagcgaagatccaagacatggttgctattaggcacacggcctgcaatgagcagcagcggacaacaatgattctgctgtgtgaggatggcagcctgcgcatttacatggccaacgtggagaacacctcctactggctgcagccatccctgcagcccagcagtgtcatcagcatcatgaagcctgttcgaaagcgcaaaacagctacaatcacaacccgcacgtctagccaggtgactttccccattgacttttttgaacacaaccagcagctgacagatgtggagtttggtggtaacgacctcctacaggtctataatgcacaacagataaaacaccggctgaattccactggcatgtatgtggccaacaccaagcccggaggcttcaccattgagattagtaacaacaatagcactatggtgatgacaggcatgcggatccagattgggactcaagcaatagaacgggccccgtcatatatcgagatcttcggcagaactatgcagctcaacctgagtcgctcacgctggtttgacttccccttcaccagagaagaagccctgcaggctgataagaagctgaacctcttcattggggcctcggtggatccagcaggtgtcaccatgatagatgctgtaaaaatttatggcaagactaaggagcagtttggctggcctgatgagcccccagaagaattcccttctgcctctgtcagcaacatctgcccttcaaatctgaaccagagcaacggcactggagatagcgactcagctgcccccactacgaccagtggaactgtcctggagaggctggttgtgagttctttagaagccctggaaagctgctttgccgttggcccaatcatcgagaaggagagaaacaagaatgctgctcaggagctggccactttgctgttgtccctgccagcacctgccagtgtccagcagcagtccaagagccttctggccagcctgcacaccagccgctcggcctaccacagccacaaggatcaggccttgctgagcaaagctgtgcagtgtctcaacacatctagcaaagagggcaaggatttggaccctgaggtgttccagaggctagtgatcacagctcgctccattgccatcatgcgccccaacaaccttgtccactttacggagtcaaagctgccccagatggaaacagaaggaatggatgaagggaaggaaccgcagaagcagttggaaggagattgctgtagtttcatcacccagcttgtgaaccacttctggaaactccatgcatccaaacccaagaatgccttcttggcacctgcctgccttccaggactaactcatattgaagctactgtcaatgctctggtggacatcatccatggctactgtacctgtgagctggattgtattaacacagcatccaagatctacatgcagatgctcttgtgtcctgatcctgctgtgagcttctcttgtaaacaagctctaattcgagtcctaaggcccaggaacaaacggagacatgtgactttaccctcttcccctcgaagcaacactccaatgggagacaaggatgatgatgacgatgatgatgcagatgagaaaatgcagtcatcagggatcccgaatggtggtcacatccgtcaggaaagccaggaacagagtgaggtggaccatggagattttgagatggtgtctgagtcgatggtcctggagacagctgaaaatgtcaacaatggcaacccctctcccctggaggccctgctggcaggcgcagagggcttcccccccatgctggacatcccacctgatgcagatgacgagaccatggttgaactagccattgccctgagcctgcagcaggaccaacaaggcagcagcagcagtgccctgggcctgcagagcctgggactgtccggccaggcacccagctcttcctctctggacgcaggaaccctctctgacaccacagcatcagctccagcctcagacgacgagggcagtacagcagcgacagatggttctacccttcggacctctcctgctgaccacggtggtagtgtgggctcggagagcgggggcagtgcagtggactcagtggctggcgagcacagtgtatctggccggagcagtgcttatggcgatgctacagctgaggggcatccggctggaccaggaagtgtcagctcaagcactggagccatcagcaccaccactgggcaccaggagggagatggctccgagggagaaggagaaggagaaactgaaggagatgtccacactagcaacaggctgcacatggtccgtctaatgctgttggagagattactgcagaccctgcctcaattacgaaacgttggcggtgtccgggccatcccatacatgcaggtcattctaatgctcactacagatctggatggagaagatgagaaagacaagggggccctagacaacctgctctcccagcttattgctgagttgggtatggataaaaaggatgtctccaagaagaatgagcgcagcgccctgaatgaagtccatctggtagtaatgagactcctgagtgtcttcatgtcccgcaccaaatctggatccaagtcttccatatgtgagtcatcttccctcatctccagtgccacagcagcagctctactgagctctggggctgtggactactgcctgcacgtgctcaaatcactgctggaatattggaagagccaacagaatgacgaggagcctgtggctaccagccagttgctgaaaccacatactacctcctccccacctgacatgagcccattctttctccgccagtatgtgaagggtcatgctgctgatgtgtttgaggcctatactcagcttctaacagaaatggtactgaggcttccttaccaaatcaaaaagattactgacaccaattctcgaatcccacctcctgtctttgaccactcgtggttttactttctctccgagtacctcatgatccagcagactccatttgtgcgccgtcaagtccgcaaacttctgctcttcatctgtggatccaaagagaagtaccgccagctccgggatttgcacaccctggactctcacgtgcgtgggatcaagaagctgctagaagagcaggggatattcctccgggcaagtgtggttacagccagctcaggctccgccttgcaatatgacacactcatcagcctgatggagcacctgaaagcctgtgcagagattgccgcccagcgaaccatcaactggcagaaattctgcatcaaagatgactccgtcctgtacttcctcctccaagtcagtttccttgtggatgagggcgtgtccccagtgctgctgcaactgctctcctgtgctctgtgcggcagcaaggtgctcgctgcactggcagcctcttcgggatcctccagtgcttcttcctcctcagcccctgtggctgccagttctggacaagccacaacacagtccaagtcttccactaaaaagagcaagaaagaagaaaaagaaaaggagaaagatggtgagacctctggcagccaggaggaccagctgtgcacagctctggtgaaccagctgaacaaatttgccgataaggaaaccctgatccagttcctgcgttgtttcctgttagagtccaattcttcctcggtgcgctggcaggcccactgtctgacactgcacatctacagaaattccagcaaatctcaacaggagctcctgctagatctgatgtggtccatctggccagaactcccagcctatggtcgtaaggctgcccagtttgtggacctactaggatatttctccctgaaaactccacaaacagagaagaagttgaaggagtattcacagaaggctgtggagattctgcggactcaaaaccatattcttaccaaccaccccaactcgaacatttataacactttgtctggcttagtggagtttgatggctattacctggagagcgatccctgcctggtgtgtaataacccggaagtaccgttctgttatatcaagctgtcttccattaaagtggacacgcggtacaccaccacccagcaggttgtgaagctcattggcagtcacaccatcagcaaagtgacagtgaaaatcggggatctgaaacggaccaagatggtgcggaccatcaacctgtattataacaaccgaaccgtgcaggccatcgtggagttgaaaaacaagccagctcgctggcacaaagccaagaaggttcagctgacccctggacagacagaggtgaagattgacctgccgttgcccattgtggcctccaatctgatgattgagtttgcagacttctatgaaaactaccaggcctccacagagaccctgcagtgccctcgctgtagtgcctcggtccctgccaacccaggagtctgtggcaactgtggagagaatgtgtaccagtgtcacaaatgcagatccatcaactacgatgaaaaggatcccttcctctgcaatgcctgtggcttctgtaaatatgcccgcttcgacttcatgctctatgccaagccttgctgtgcagtggatcccattgagaatgaagaagaccggaagaaggctgtatccaacatcaatacacttttggacaaagctgatcgagtgtatcatcagctgatgggacaccggccacagctggagaacctgctctgcaaagtgaatgaggcagctccagaaaagccacaggatgactcaggaacagcagggggcatcagctccacttctgccagtgtgaatcgttacatcctgcagttggctcaggagtattgtggagactgcaagaactcttttgatgaactctccaaaatcatccagaaagtctttgcttcgcgcaaagagttgttggaatatgacctacagcagagggaagcagccactaaatcatcccggacctccgtgcagcccacattcactgccagccagtaccgtgccttatccgtcctgggctgtggccacacatcctccaccaagtgctatggctgcgcctcggctgtcacagaacattgtatcacactacttcgggccctggccaccaacccagccttgaggcacatccttgtctcccagggccttatccgggagctctttgattataatcttcgccgaggggctgcggccatgcgggaggaggtccgccagctcatgtgcctcctaactcgagacaacccagaagccacccaacagatgaatgacctgattattggcaaggtctccacagccctgaagggccactgggccaaccccgatctggcaagtagcctgcagtatgaaatgctgctgctgacggattctatctccaaggaggacagctgctgggagctccggttacgctgtgctctcagccttttcctcatggctgtgaacattaagactcctgtggtggttgaaaacattaccctcatgtgcctgaggatcttgcagaagctgataaaaccacctgctcccactagcaagaagaacaaggatgtccccgttgaggccctcaccacggtgaagccatactgcaatgagatccatgcccaggctcaactgtggctcaagagagaccccaaggcatcctatgatgcctggaagaagtgtcttcctatcagagggatagatggcaatgggaaagcccccagcaaatcagagctccgccatctctatttgactgagaagtatgtgtggaggtggaaacagttcctgagtcgtcgggggaagaggacctcccccttggatctcaaactggggcataacaactggctgcgacaagtgcttttcactccagcaacgcaggccgcacggcaggcagcctgtaccattgtggaagctctagccaccattcccagccgcaagcagcaggtcctggacctgcttaccagttacctggatgagctgagcatagctggggagtgtgcagctgagtacctggctctctaccagaagctcatcacttctgcgcactggaaagtctacttggcagctcggggagtcctaccctatgtgggcaacctcatcaccaaggaaatagctcgtctgctggccctggaggaggctaccctgagtaccgatctgcagcagggttatgcccttaaaagtctcacaggccttctctcctcctttgttgaggtggaatccatcaaaagacattttaaaagtcgcttggtgggtactgtgctgaatggatacctgtgcttgcggaagctggtggtgcagaggaccaagctgatcgatgagacgcaggacatgctgctggagatgctggaggacatgaccacaggtacagaatcagaaaccaaggccttcatggctgtgtgcattgagacagccaagcgctacaatctggatgactaccggaccccggtgttcatcttcgagaggctctgcagcatcatttatcctgaggagaatgaagtcactgagttctttgtgaccctggagaaggatccccaacaagaagacttcttacagggcaggatgcctgggaacccgtatagcagcaatgagccaggcatcgggccgctgatgagggatataaagaacaagatttgccaggactgtgacttagtggccctcctggaagatgacagtggcatggagcttctagtgaacaataaaatcattagtttggaccttcctgtggctgaagtttacaagaaagtctggtgtaccacgaatgagggagagcccatgaggattgtttatcgtatgcgggggctgctgggcgatgccacagaggagttcattgagtccctggactctactacagatgaagaagaagatgaagaagaagtgtataaaatggctggtgtgatggcccagtgtgggggcctggaatgcatgcttaacagactcgcagggatcagagatttcaagcagggacgccaccttctaacagtgctactgaaattgttcagttactgcgtgaaggtgaaagtcaaccggcagcaactggtcaaactggaaatgaacaccttgaacgtcatgctggggaccctaaacctggcccttgtagctgaacaagaaagcaaggacagtgggggtgcagctgtggctgagcaggtgcttagcatcatggagatcattctagatgagtccaatgctgagcccctgagtgaggacaagggcaacctcctcctgacaggtgacaaggatcaactggtgatgctcttggaccagatcaacagcacctttgttcgctccaaccccagtgtgctccagggcctgcttcgcatcatcccgtacctttcctttggagaggtggagaaaatgcagatcttggtggagcgattcaaaccatactgcaactttgataaatatgatgaagatcacagtggtgatgataaagtcttcctggactgcttctgtaaaatagctgctggcatcaagaacaacagcaatgggcaccagctgaaggatctgattctccagaaggggatcacccagaatgcacttgactacatgaaaaagcacatccctagcgccaagaatttggatgccgacatctggaaaaagtttttgtctcgcccagccttgccatttatcctaaggctgcttcggggcctggccatccagcaccctggcacccaggttctgattggaactgattccatcccgaacctgcataagctggagcaggtgtccagtgatgagggcattgggaccttggcagagaacctgctggaagccctgcgggaacaccctgacgtaaacaagaagattgacgcagcccgcagggagacccgggcagagaagaagcgcatggccatggcaatgaggcagaaggccctgggcaccctgggcatgacgacaaatgaaaagggccaggtcgtgaccaagacagcactcctgaagcagatggaagagctgatcgaggagcctggcctcacgtgctgcatctgcagggagggatacaagttccagcccacaaaggtcctgggcatttataccttcacgaagcgggtagccttggaggagatggagaataagccccggaaacagcagggctacagcaccgtgtcccacttcaacattgtgcactacgactgccatctggctgccgtcaggttggctcgaggccgggaagagtgggagagtgccgccctgcagaatgccaacaccaagtgcaacgggctccttccggtctggggacctcatgtccctgaatcagcttttgccacttgcttggcaagacacaacacttacctccaggaatgtacaggccagcgggagcccacgtatcagctcaacatccatgacatcaaactgctcttcctgcgcttcgccatggagcagtcgttcagcgcagacactggcgggggcggccgggagagcaacatccacctgatcccgtacatcattcacactgtgctttacgtcctgaacacaacccgagcaacttcccgagaagagaagaacctccaaggctttctggaacagcccaaggagaagtgggtggagagtgcctttgaagtggacgggccctactatttcacagtcttggcccttcacatcctgccccctgagcagtggagagccacacgtgtggaaatcttgcggaggctgttggtgacctcgcaggctcgggcagtggctccaggtggagccaccaggctgacagataaggcagtgaaggactattccgcttaccgttcttcccttctcttttgggccctcgtcgatctcatttacaacatgtttaagaaggtgcctaccagtaacacagagggaggctggtcctgctctctcgctgagtacatccgccacaacgacatgcccatctacgaagctgccgacaaagccctgaaaaccttccaggaggagttcatgccagtggagaccttctcagagttcctcgatgtggccggtcttttatcagaaatcaccgatccagagagcttcctgaaggacctgttgaactcagtcccctgaccaccacacagcagctgcggcggcgaagacgaagctggcttgccttccaccctctgttctccctccttgtgcattaagttccctccgcgggatgctgcattgttaccccgccctcccctctctcatttttcttggtgtggcttggggtttttaggcttcctgttttatctcgtgtgtgtggtgcaccagctatgaggttgtctgtaacccaagccatcaaagggcctgtacatacctaggagccatgagttgtcccggccagcttcatacttgagtgtgcacatcttgagaaataaacaagtgacttaacacacattgaaaaggaa

SEQ ID NO: 425 - DNA, 16115 bp, Homo sapiens
agattgcgtcacttccgccccctcctgggaggcggcgctgggccggtggcaagcccccggagggagccgcagtagtacgacggaagatggcgacgagcggcggcgaagaggcggcggcagcggctccggcgccggggaccccggcaacgggggcggacacgaccccgggctgggaggtggctgtgcggcccctgctgtccgcgtcctactccgccttcgagatgaaggagttgccgcagctggtggcctcagtcatcgagagtgaatcagaaatcctgcaccatgagaagcagtacgagccattctactcatcttttgttgcactttccacacactatattacaacagtttgcagtctcattccccggaaccaacttcagtcagtggcagcagcctgtaaagttctaattgagttttctctcctgcgtctggagaatccagatgaggcttgtgctgtgtcccagaaacacttgattctcctaatcaagggcctgtgcactggctgtagccgactagatagaactgaaattatcacatttacagcaatgatgaaatccgccaagctgccccaaacagtgaagacactttcagacgtggaagatcagaaagagctggcctcaccagtaagccctgagttgaggcaaaaggaggtacagatgaattttttgaaccagctgacctcagtttttaaccctagaactgtagcatcacaacctatcagtacacagactctggtggaaggagaaaatgatgagcagtcatctacagatcaagcctcagctatcaaaaccaagaatgtgttcatagctcagaacgtggctagtcttcaagagcttggtggctcggagaagctactgcgtgtatgtttgaacctgccatatttcctacgctatatcaatcggttccaagatgcagttttagctaattccttcttcataatgcctgcaacagtagcagatgccactgctgttcgtaatggctttcattcattggtgattgatgtaactatggcattggataccctttctctacctgtgttggaacctctcaatccttctcgtctacaagatgtgacagtcctcagcctaagttgtctgtatgcaggtgtgagtgtggcaacgtgcatggccatcctccatgtgggtagtgcccagcaagtgcggacagggtccacgagctccaaagaagatgactatgaaagtgacgcagctacaattgtccagaaatgtctcgaaatctatgacatgattggacaagcaatcagcagttctcgccgggctggtggtgagcactatcagaatttccaattgctgggtgcttggtgcttgttaaacagccttttcctcatactgaacctcagtcctactgcgttggctgataaggggaaagagaaggacccactggctgccctccgagtcagagacatcctttctcgtactaaagagggagtgggctcccctaaactggggcctggaaaagggcatcagggatttggggtactctcagtaatattggcaaaccatgccatcaaactgctaacgtctctctttcaagacctacaagtggaggcccttcacaagggttgggagacagatggcccccctgcagccttgagcattatggcccagagcacctccatacagaggattcaacggctgattgactctgtcccactgatgaacctgctcttgacgttactttcaacttcctacagaaaggcatgtgtcctgcagcggcagaggaagggctccatgagcagcgatgccagcgcctccaccgactccaatacttactatgaggacgatttcagtagcacggaggaggacagcagccaagacgatgacagtgagcctattttggggcaatggtttgaggagactatttctcccagtaaagagaaagcagcacctccgcctcctcccccacctcctccactggaaagctctcctcgggttaaaagccccagtaagcaggcccctggtgagaagggcaacattctggcgagtcgcaaagatcctgagttgttcttaggtctggcttccaacattttgaacttcatcacctcttccatgctgaactctcggaacaattttatccgaaactatctgagtgtatctctttcagaacaccatatggccaccctagccagtatcatcaaggaggtggacaaagatggactcaagggttcatcagatgaagagtttgctgcagctctctatcacttcaaccactcactggtaacctctgaccttcagtcacctaacctgcagaacacactgttgcagcagctaggagtggctcctttttctgagggcccttggcccttgtacattcaccctcaaagcctctctgtgctttcacgcctcctgctcatctggcaacataaagccagtgctcaaggtgaccctgacgtcccagaatgccttaaagtttgggacaggtttttgtctacaatgaagcagaatgccctgcaaggtgtggtgcccagtgagacagaggatctgaatgtagaacacctgcagatgctcctcctcattttccacaatttcaccgagacaggccggcgggccatattgtcgctttttgtccagatcatccaggagttgagcgtcaacatggatgctcagatgcgcttcgtgccgcttatcttggctcgcctccttctcatctttgattatctgcttcatcagtactccaaagcccctgtgtatctatttgagcaggtacagcataacctgctaagtcctccctttgggtgggcaagtggatcccaggacagcaacagccgccgggcaaccactcctctctatcatggattcaaagaagtagaagaaaactggtctaagcatttctcatcagatgctgtcccacaccccagattctactgtgtcctgtccccagaagcctcagaggatgatttgaaccgacttgattctgtggcatgtgacgtccttttctccaagcttgtcaagtatgatgagctttatgctgcactgacagccctgcttgcagctgggtcccagcttgatacagttaggagaaaggaaaacaagaatgtaacagccttggaggcctgtgcccttcaatattacttcttgatactgtggaggatcctaggaattttaccaccatcaaagacttacattaaccagctatccatgaactcacctgagatgagcgaatgtgacatcttgcacactctgcgatggtcttctcggctccggatcagctcctatgtcaactggataaaggatcaccttatcaaacagggaatgaaggctgagcatgctagctcgcttctagaactggcatccaccactaagtgtagctcagtgaaatatgatgttgaaatagtagaggaatacttcgctcgacagatctcatccttctgtagtatcgactgtaccaccatcttgcagctgcatgaaattcccagtctgcagtccatctacacccttgatgccgcgatctcaaaggtccaggtctctttggatgagcatttttctaagatggctgctgagactgatcctcataagtcgtctgagattaccaagaacctacttccagccacgctgcaactcattgacacctatgcatcgttcaccagagcctatttgctgcaaaactttaatgaagagggaacaactgagaaaccttccaaggagaaactgcaaggctttgctgctgttttggctattggctctagcaggtgcaaggcaaatactctgggtccgacactggttcagaatttgccatcgtcagtgcagactgtgtgtgagtcctggaacaacatcaataccaatgaatttcccaatattggatcctggcgcaatgcctttgccaatgacaccatcccttcagagagttatattagtgcagtgcaggctgcacacctggggactctctgtagccaaagtctgcccctggctgcttccctgaagcataccctcctctcactggtcaggttgactggagatcttattgtttggtcagatgagatgaacccaccacaggtaattcggacactgctacctcttcttttggaatcaagcactgagagtgttgccgagatcagtagcaactccctggaacgcatcttgggccctgctgagtctgatgagttcttggctcgtgtttatgagaagctgatcactggttgttacaacattctggccaatcatgcagatcctaacagtggactggatgaatccatcctggaggaatgtctccagtacttggaaaagcagctggaaagtagccaggctcgtaaagctatggaggagtttttctctgacagtggagaacttgtacagatcatgatggcaacagccaatgagaacctctctgctaaattctgtaaccgagttttgaaattcttcaccaaactcttccagctgactgagaagagccctaacccgagcctgttgcatctctgtggctccctggcacaactggcctgtgtggaacctgtgcgcctgcaggcctggctcacccgcatgactacatcgcccccaaaagattctgatcagctggatgtaattcaggagaaccggcagctgctgcagttactgaccacatacattgttcgggaaaacagccaagttggggaaggtgtgtgtgctgttcttctgggcaccctgactcccatggcaacagagatgctggccaacggtgatgggactggcttccctgaacttatggttgtgatggccactctggccagtgcaggtcaaggtgctggtcaccttcagcttcataatgctgctgtggattggctgagcagatgcaagaaatacctgtcacagaagaatgtagttgaaaaactgaatgccaatgtaatgcatggaaagcatgtgatgatcttggagtgcacatgccatatcatgtcttacttggctgatgtcacgaatgccctgagccagagtaatggtcaaggcccaagtcatctctcagtggatggggaagagcgggccattgaagtagactcagactgggtggaggagttggcggtggaagaggaagattcccaggctgaggattcagatgaagattctctttgcaataaactctgcacttttacgatcacacagaaagaattcatgaaccagcattggtaccactgtcacacctgtaaaatggtggatggcgtgggtgtctgcacagtgtgtgctaaggtgtgccacaaggatcatgagatttcctatgccaagtatggatccttcttctgtgactgtggagccaaggaagatggcagctgtttggctctggtgaagagaactcctagcagtggcatgagctctaccatgaaggagtcggcatttcagagtgaacccaggatttcagagagtctagtgcgtcatgccagcacctcctcgccagctgacaaagccaaggttaccatcagtgatggaaaggttgctgacgaagagaagcccaagaagagcagcctctgccgcacagtagagggctgccgggaggaattacagaaccaggccaatttctccttcgctcctctcgtgttagacatgcttaatttccttatggatgccattcagaccaacttccagcaagcttcagccgtcgggagcagcagccgtgctcagcaagccctcagtgagctacacactgtggagaaggcagtggagatgacagaccagctgatggttcccaccttagggtcccaggaaggtgcctttgagaatgtgcggatgaattacagtggagaccagggccagaccatccggcagctgatcagtgctcatgtgctcaggcgggtggctatgtgtgtgctctcctctccccatgggcgccgccaacatttggctgtcagccatgagaagggcaagatcaccgttctgcagctctctgcactcctgaagcaagcagattccagcaaaaggaagttaactctgacccgcttggcttctgccccagttccttttactgtgttgagcctcacaggaaatccctgcaaggaagactacttggcggtttgtgggctaaaggactgtcatgtgctcacctttagtagctcaggctctgtttcggatcacttggttttgcaccctcagttggcaacggggaacttcatcatcaaagccgtgtggttacctggttcacagaccgagttagcaattgtcaccgcagactttgttaagatttatgacctgtgtgttgatgccttgagtccaaccttctattttctcctgccaagctcaaagataagagatgttaccttccttttcaatgaggagggaaagaacatcattgttataatgtcttcggctgggtacatctatactcagcttatggaagaggccagcagtgcccagcagggacccttctatgtcactaatgtgttggaaatcaatcatgaggacctgaagcaggacagtaacagccaggtggcgggcggtggtgtgtccgtgtactactcccacgtgttgcagatgttgttcttcagctattgtcaaggcaaatcattcgcagccaccatcagcaggacaaccctggaggtgttgcaactcttccccatcaacatcaaaagttttgttgtctgcagttccaatggtggcagtaagacttctcctgctctttgccagtggtctgaggtgatgaaccaccctggcttggtgtgctgtgtccagcaaactacaggggtgccgctggtagttatggtgaaaccagacacttttcttatccaggagattaagactcttcctgctaaagcgaagatccaagacatggttgctattaggcacacggcctgcaatgagcagcagcggacaacaatgattctgctgtgtgaggatggcagcctgcgcatttacatggccaacgtggagaacacctcctactggctgcagccatccctgcagcccagcagtgtcatcagcatcatgaagcctgttcgaaagcgcaaaacagctacaatcacaacccgcacgtctagccaggtgactttccccattgacttttttgaacacaaccagcagctgacagatgtggagtttggtggtaacgacctcctacaggtctataatgcacaacagataaaacaccggctgaattccactggcatgtatgtggccaacaccaagcccggaggcttcaccattgagattagtaacaacaatagcactatggtgatgacaggcatgcggatccagattgggactcaagcaatagaacgggccccgtcatatatcgagatcttcggcagaactatgcagctcaacctgagtcgctcacgctggtttgacttccccttcaccagagaagaagccctgcaggctgataagaagctgaacctcttcattggggcctcggtggatccagcaggtgtcaccatgatagatgctgtaaaaatttatggcaagactaaggagcagtttggctggcctgatgagcccccagaagaattcccttctgcctctgtcagcaacatctgcccttcaaatctgaaccagagcaacggcactggagatagcgactcagctgcccccactacgaccagtggaactgtcctggagagttctgaaactgagtccctaaccaagctggaccggctggttgtgagttctttagaagccctggaaagctgctttgccgttggcccaatcatcgagaaggagagaaacaagaatgctgctcaggagctggccactttgctgttgtccctgccagcacctgccagtgtccagcagcagtccaagagccttctggccagcctgcacaccagccgctcggcctaccacagccacaaggatcaggccttgctgagcaaagctgtgcagtgtctcaacacatctagcaaagagggcaaggatttggaccctgaggtgttccagaggctagtgatcacagctcgctccattgccatcatgcgccccaacaaccttgtccactttacggagtcaaagctgccccagatggaaacagactgtttttttcctagatgtgcctgctggagtctagggatagttggcatattgattggggccccacttgaaactccctccccagaaggaatggatgaagggaaggaaccgcagaagcagttggaaggagattgctgtagtttcatcacccagcttgtgaaccacttctggaaactccatgcatccaaacccaagaatgccttcttggcacctgcctgccttccaggactaactcatattgaagctactgtcaatgctctggtggacatcatccatggctactgtacctgtgagctggattgtattaacacagcatccaagatctacatgcagatgctcttgtgtcctgatcctgctgtgagcttctcttgtaaacaagctctaattcgagtcctaaggcccaggaacaaacggagacatgtgactttaccctcttcccctcgaagcaacactccaatgggagacaaggatgatgatgacgatgatgatgcagatgagaaaatgcagtcatcagggatcccgaatggtggtcacatccgtcaggaaagccaggaacagagtgaggtggaccatggagattttgagatggtgtctgagtcgatggtcctggagacagctgaaaatgtcaacaatggcaacccctctcccctggaggccctgctggcaggcgcagagggcttcccccccatgctggacatcccacctgatgcagatgacgagaccatggttgaactagccattgccctgagcctgcagcaggaccaacaaggcagcagcagcagtgccctgggcctgcagagcctgggactgtccggccaggcacccagctcttcctctctggacgcaggaaccctctctgacaccacagcatcagctctcgttactctctcagctccagcctcagacgacgagggcagtacagcagcgacagatggttctacccttcggacctctcctgctgaccacggtggtagtgtgggctcggagagcgggggcagtgcagtggactcagtggctggcgagcacagtgtatctggccggagcagtgcttatggcgatgctacagctgaggggcatccggctggaccaggaagtgtcagctcaagcactggagccatcagcaccaccactgggcaccaggagggagatggctccgagggagaaggagaaggagaaactgaaggagatgtccacactagcaacaggctgcacatggtccgtctaatgctgttggagagattactgcagaccctgcctcaattacgaaacgttggcggtgtccgggccatcccatacatgcaggtcattctaatgctcactacagatctggatggagaagatgagaaagacaagggggccctagacaacctgctctcccagcttattgctgagttgggtatggataaaaaggatgtctccaagaagaatgagcgcagcgccctgaatgaagtccatctggtagtaatgagactcctgagtgtcttcatgtcccgcaccaaatctggatccaagtcttccatatgtgagtcatcttccctcatctccagtgccacagcagcagctctactgagctctggggctgtggactactgcctgcacgtgctcaaatcactgctggaatattggaagagccaacagaatgacgaggagcctgtggctaccagccagttgctgaaaccacatactacctcctccccacctgacatgagcccattctttctccgccagtatgtgaagggtcatgctgctgatgtgtttgaggcctatactcagcttctaacagaaatggtactgaggcttccttaccaaatcaaaaagattactgacaccaattctcgaatcccacctcctgtctttgaccactcgtggttttactttctctccgagtacctcatgatccagcagactccatttgtgcgccgtcaagtccgcaaacttctgctcttcatctgtggatccaaagagaagtaccgccagctccgggatttgcacaccctggactctcacgtgcgtgggatcaagaagctgctagaagagcaggggatattcctccgggcaagtgtggttacagccagctcaggctccgccttgcaatatgacacactcatcagcctgatggagcacctgaaagcctgtgcagagattgccgcccagcgaaccatcaactggcagaaattctgcatcaaagatgactccgtcctgtacttcctcctccaagtcagtttccttgtggatgagggcgtgtccccagtgctgctgcaactgctctcctgtgctctgtgcggcagcaaggtgctcgctgcactggcagcctcttcgggatcctccagtgcttcttcctcctcagcccctgtggctgccagttctggacaagccacaacacagtccaagtcttccactaaaaagagcaagaaagaagaaaaagaaaaggagaaagatggtgagacctctggcagccaggaggaccagctgtgcacagctctggtgaaccagctgaacaaatttgccgataaggaaaccctgatccagttcctgcgttgtttcctgttagagtccaattcttcctcggtgcgctggcaggcccactgtctgacactgcacatctacagaaattccagcaaatctcaacaggagctcctgctagatctgatgtggtccatctggccagaactcccagcctatggtcgtaaggctgcccagtttgtggacctactaggatatttctccctgaaaactccacaaacagagaagaagttgaaggagtattcacagaaggctgtggagattctgcggactcaaaaccatattcttaccaaccaccccaactcgaacatttataacactttgtctggcttagtggagtttgatggctattacctggagagcgatccctgcctggtgtgtaataacccggaagtaccgttctgttatatcaagctgtcttccattaaagtggacacgcggtacaccaccacccagcaggttgtgaagctcattggcagtcacaccatcagcaaagtgacagtgaaaatcggggatctgaaacggaccaagatggtgcggaccatcaacctgtattataacaaccgaaccgtgcaggccatcgtggagttgaaaaacaagccagctcgctggcacaaagccaagaaggttcagctgacccctggacagacagaggtgaagattgacctgccgttgcccattgtggcctccaatctgatgattgagtttgcagacttctatgaaaactaccaggcctccacagagaccctgcagtgccctcgctgtagtgcctcggtccctgccaacccaggagtctgtggcaactgtggagagaatgtgtaccagtgtcacaaatgcagatccatcaactacgatgaaaaggatcccttcctctgcaatgcctgtggcttctgtaaatatgcccgcttcgacttcatgctctatgccaagccttgctgtgcagtggatcccattgagaatgaagaagaccggaagaaggctgtatccaacatcaatacacttttggacaaagctgatcgagtgtatcatcagctgatgggacaccggccacagctggagaacctgctctgcaaagtgaatgaggcagctccagaaaagccacaggatgactcaggaacagcagggggcatcagctccacttctgccagtgtgaatcgttacatcctgcagttggctcaggagtattgtggagactgcaagaactcttttgatgaactctccaaaatcatccagaaagtctttgcttcgcgcaaagagttgttggaatatgacctacagcagagggaagcagccactaaatcatcccggacctccgtgcagcccacattcactgccagccagtaccgtgccttatccgtcctgggctgtggccacacatcctccaccaagtgctatggctgcgcctcggctgtcacagaacattgtatcacactacttcgggccctggccaccaacccagccttgaggcacatccttgtctcccagggccttatccgggagctctttgattataatcttcgccgaggggctgcggccatgcgggaggaggtccgccagctcatgtgcctcctaactcgagacaacccagaagccacccaacagatgaatgacctgattattggcaaggtctccacagccctgaagggccactgggccaaccccgatctggcaagtagcctgcagtatgaaatgctgctgctgacggattctatctccaaggaggacagctgctgggagctccggttacgctgtgctctcagccttttcctcatggctgtgaacattaagactcctgtggtggttgaaaacattaccctcatgtgcctgaggatcttgcagaagctgataaaaccacctgctcccactagcaagaagaacaaggatgtccccgttgaggccctcaccacggtgaagccatactgcaatgagatccatgcccaggctcaactgtggctcaagagagaccccaaggcatcctatgatgcctggaagaagtgtcttcctatcagagggatagatggcaatgggaaagcccccagcaaatcagagctccgccatctctatttgactgagaagtatgtgtggaggtggaaacagttcctgagtcgtcgggggaagaggacctcccccttggatctcaaactggggcataacaactggctgcgacaagtgcttttcactccagcaacgcaggccgcacggcaggcagcctgtaccattgtggaagctctagccaccattcccagccgcaagcagcaggtcctggacctgcttaccagttacctggatgagctgagcatagctggggagtgtgcagctgagtacctggctctctaccagaagctcatcacttctgcgcactggaaagtctacttggcagctcggggagtcctaccctatgtgggcaacctcatcaccaaggaaatagctcgtctgctggccctggaggaggctaccctgagtaccgatctgcagcagggttatgcccttaaaagtctcacaggccttctctcctcctttgttgaggtggaatccatcaaaagacattttaaaagtcgcttggtgggtactgtgctgaatggatacctgtgcttgcggaagctggtggtgcagaggaccaagctgatcgatgagacgcaggacatgctgctggagatgctggaggacatgaccacaggtacagaatcagaaaccaaggccttcatggctgtgtgcattgagacagccaagcgctacaatctggatgactaccggaccccggtgttcatcttcgagaggctctgcagcatcatttatcctgaggagaatgaagtcactgagttctttgtgaccctggagaaggatccccaacaagaagacttcttacagggcaggatgcctgggaacccgtatagcagcaatgagccaggcatcgggccgctgatgagggatataaagaacaagatttgccaggactgtgacttagtggccctcctggaagatgacagtggcatggagcttctagtgaacaataaaatcattagtttggaccttcctgtggctgaagtttacaagaaagtctggtgtaccacgaatgagggagagcccatgaggattgtttatcgtatgcgggggctgctgggcgatgccacagaggagttcattgagtccctggactctactacagatgaagaagaagatgaagaagaagtgtataaaatggctggtgtgatggcccagtgtgggggcctggaatgcatgcttaacagactcgcagggatcagagatttcaagcagggacgccaccttctaacagtgctactgaaattgttcagttactgcgtgaaggtgaaagtcaaccggcagcaactggtcaaactggaaatgaacaccttgaacgtcatgctggggaccctaaacctggcccttgtagctgaacaagaaagcaaggacagtgggggtgcagctgtggctgagcaggtgcttagcatcatggagatcattctagatgagtccaatgctgagcccctgagtgaggacaagggcaacctcctcctgacaggtgacaaggatcaactggtgatgctcttggaccagatcaacagcacctttgttcgctccaaccccagtgtgctccagggcctgcttcgcatcatcccgtacctttcctttggagaggtggagaaaatgcagatcttggtggagcgattcaaaccatactgcaactttgataaatatgatgaagatcacagtggtgatgataaagtcttcctggactgcttctgtaaaatagctgctggcatcaagaacaacagcaatgggcaccagctgaaggatctgattctccagaaggggatcacccagaatgcacttgactacatgaaaaagcacatccctagcgccaagaatttggatgccgacatctggaaaaagtttttgtctcgcccagccttgccatttatcctaaggctgcttcggggcctggccatccagcaccctggcacccaggttctgattggaactgattccatcccgaacctgcataagctggagcaggtgtccagtgatgagggcattgggaccttggcagagaacctgctggaagccctgcgggaacaccctgacgtaaacaagaagattgacgcagcccgcagggagacccgggcagagaagaagcgcatggccatggcaatgaggcagaaggccctgggcaccctgggcatgacgacaaatgaaaagggccaggtcgtgaccaagacagcactcctgaagcagatggaagagctgatcgaggagcctggcctcacgtgctgcatctgcagggagggatacaagttccagcccacaaaggtcctgggcatttataccttcacgaagcgggtagccttggaggagatggagaataagccccggaaacagcagggctacagcaccgtgtcccacttcaacattgtgcactacgactgccatctggctgccgtcaggttggctcgaggccgggaagagtgggagagtgccgccctgcagaatgccaacaccaagtgcaacgggctccttccggtctggggacctcatgtccctgaatcagcttttgccacttgcttggcaagacacaacacttacctccaggaatgtacaggccagcgggagcccacgtatcagctcaacatccatgacatcaaactgctcttcctgcgcttcgccatggagcagtcgttcagcgcagacactggcgggggcggccgggagagcaacatccacctgatcccgtacatcattcacactgtgctttacgtcctgaacacaacccgagcaacttcccgagaagagaagaacctccaaggctttctggaacagcccaaggagaagtgggtggagagtgcctttgaagtggacgggccctactatttcacagtcttggcccttcacatcctgccccctgagcagtggagagccacacgtgtggaaatcttgcggaggctgttggtgacctcgcaggctcgggcagtggctccaggtggagccaccaggctgacagataaggcagtgaaggactattccgcttaccgttcttcccttctcttttgggccctcgtcgatctcatttacaacatgtttaagaaggtgcctaccagtaacacagagggaggctggtcctgctctctcgctgagtacatccgccacaacgacatgcccatctacgaagctgccgacaaagccctgaaaaccttccaggaggagttcatgccagtggagaccttctcagagttcctcgatgtggccggtcttttatcagaaatcaccgatccagagagcttcctgaaggacctgttgaactcagtcccctgaccaccacacagcagctgcggcggcgaagacgaagctggcttgccttccaccctctgttctccctccttgtgcattaagttccctccgcgggatgctgcattgttaccccgccctcccctctctcatttttcttggtgtggcttggggtttttaggcttcctgttttatctcgtgtgtgtggtgcaccagctatgaggttgtctgtaacccaagccatcaaagggcctgtacatacctaggagccatgagttgtcccggccagcttcatacttgagtgtgcacatcttgagaaataaacaagtgacttaacacacattgaaaagg

SEQ ID NO: 426 - DNA, 16112 bp, Homo sapiens
agattgcgtcacttccgccccctcctgggaggcggcgctgggccggtggcaagcccccggagggagccgcagtagtacgacggaagatggcgacgagcggcggcgaagaggcggcggcagcggctccggcgccggggaccccggcaacgggggcggacacgaccccgggctgggaggtggctgtgcggcccctgctgtccgcgtcctactccgccttcgagatgaaggagttgccgcagctggtggcctcagtcatcgagagtgaatcagaaatcctgcaccatgagaagcagtacgagccattctactcatcttttgttgcactttccacacactatattacaacagtttgcagtctcattccccggaaccaacttcagtcagtggcagcagcctgtaaagttctaattgagttttctctcctgcgtctggagaatccagatgaggcttgtgctgtgtcccagaaacacttgattctcctaatcaagggcctgtgcactggctgtagccgactagatagaactgaaattatcacatttacagcaatgatgaaatccgccaagctgccccaaacagtgaagacactttcagacgtggaagatcagaaagagctggcctcaccagtaagccctgagttgaggcaaaaggaggtacagatgaattttttgaaccagctgacctcagtttttaaccctagaactgtagcatcacaacctatcagtacacagactctggtggaaggagaaaatgatgagcagtcatctacagatcaagcctcagctatcaaaaccaagaatgtgttcatagctcagaacgtggctagtcttcaagagcttggtggctcggagaagctactgcgtgtatgtttgaacctgccatatttcctacgctatatcaatcggttccaagatgcagttttagctaattccttcttcataatgcctgcaacagtagcagatgccactgctgttcgtaatggctttcattcattggtgattgatgtaactatggcattggataccctttctctacctgtgttggaacctctcaatccttctcgtctacaagatgtgacagtcctcagcctaagttgtctgtatgcaggtgtgagtgtggcaacgtgcatggccatcctccatgtgggtagtgcccagcaagtgcggacagggtccacgagctccaaagaagatgactatgaaagtgacgcagctacaattgtccagaaatgtctcgaaatctatgacatgattggacaagcaatcagcagttctcgccgggctggtggtgagcactatcagaatttccaattgctgggtgcttggtgcttgttaaacagccttttcctcatactgaacctcagtcctactgcgttggctgataaggggaaagagaaggacccactggctgccctccgagtcagagacatcctttctcgtactaaagagggagtgggctcccctaaactggggcctggaaaagggcatcagggatttggggtactctcagtaatattggcaaaccatgccatcaaactgctaacgtctctctttcaagacctacaagtggaggcccttcacaagggttgggagacagatggcccccctgcagccttgagcattatggcccagagcacctccatacagaggattcaacggctgattgactctgtcccactgatgaacctgctcttgacgttactttcaacttcctacagaaaggcatgtgtcctgcagcggcagaggaagggctccatgagcagcgatgccagcgcctccaccgactccaatacttactatgaggacgatttcagtagcacggaggaggacagcagccaagacgatgacagtgagcctattttggggcaatggtttgaggagactatttctcccagtaaagagaaagcagcacctccgcctcctcccccacctcctccactggaaagctctcctcgggttaaaagccccagtaagcaggcccctggtgagaagggcaacattctggcgagtcgcaaagatcctgagttgttcttaggtctggcttccaacattttgaacttcatcacctcttccatgctgaactctcggaacaattttatccgaaactatctgagtgtatctctttcagaacaccatatggccaccctagccagtatcatcaaggaggtggacaaagatggactcaagggttcatcagatgaagagtttgctgcagctctctatcacttcaaccactcactggtaacctctgaccttcagtcacctaacctgcagaacacactgttgcagcagctaggagtggctcctttttctgagggcccttggcccttgtacattcaccctcaaagcctctctgtgctttcacgcctcctgctcatctggcaacataaagccagtgctcaaggtgaccctgacgtcccagaatgccttaaagtttgggacaggtttttgtctacaatgaagcagaatgccctgcaaggtgtggtgcccagtgagacagaggatctgaatgtagaacacctgcagatgctcctcctcattttccacaatttcaccgagacaggccggcgggccatattgtcgctttttgtccagatcatccaggagttgagcgtcaacatggatgctcagatgcgcttcgtgccgcttatcttggctcgcctccttctcatctttgattatctgcttcatcagtactccaaagcccctgtgtatctatttgagcaggtacagcataacctgctaagtcctccctttgggtgggcaagtggatcccaggacagcaacagccgccgggcaaccactcctctctatcatggattcaaagaagtagaagaaaactggtctaagcatttctcatcagatgctgtcccacaccccagattctactgtgtcctgtccccagaagcctcagaggatgatttgaaccgacttgattctgtggcatgtgacgtccttttctccaagcttgtcaagtatgatgagctttatgctgcactgacagccctgcttgcagctgggtcccagcttgatacagttaggagaaaggaaaacaagaatgtaacagccttggaggcctgtgcccttcaatattacttcttgatactgtggaggatcctaggaattttaccaccatcaaagacttacattaaccagctatccatgaactcacctgagatgagcgaatgtgacatcttgcacactctgcgatggtcttctcggctccggatcagctcctatgtcaactggataaaggatcaccttatcaaacagggaatgaaggctgagcatgctagctcgcttctagaactggcatccaccactaagtgtagctcagtgaaatatgatgttgaaatagtagaggaatacttcgctcgacagatctcatccttctgtagtatcgactgtaccaccatcttgcagctgcatgaaattcccagtctgcagtccatctacacccttgatgccgcgatctcaaaggtccaggtctctttggatgagcatttttctaagatggctgctgagactgatcctcataagtcgtctgagattaccaagaacctacttccagccacgctgcaactcattgacacctatgcatcgttcaccagagcctatttgctgcaaaactttaatgaagagggaacaactgagaaaccttccaaggagaaactgcaaggctttgctgctgttttggctattggctctagcaggtgcaaggcaaatactctgggtccgacactggttcagaatttgccatcgtcagtgcagactgtgtgtgagtcctggaacaacatcaataccaatgaatttcccaatattggatcctggcgcaatgcctttgccaatgacaccatcccttcagagagttatattagtgcagtgcaggctgcacacctggggactctctgtagccaaagtctgcccctggctgcttccctgaagcataccctcctctcactggtcaggttgactggagatcttattgtttggtcagatgagatgaacccaccacaggtaattcggacactgctacctcttcttttggaatcaagcactgagagtgttgccgagatcagtagcaactccctggaacgcatcttgggccctgctgagtctgatgagttcttggctcgtgtttatgagaagctgatcactggttgttacaacattctggccaatcatgcagatcctaacagtggactggatgaatccatcctggaggaatgtctccagtacttggaaaagcagctggaaagtagccaggctcgtaaagctatggaggagtttttctctgacagtggagaacttgtacagatcatgatggcaacagccaatgagaacctctctgctaaattctgtaaccgagttttgaaattcttcaccaaactcttccagctgactgagaagagccctaacccgagcctgttgcatctctgtggctccctggcacaactggcctgtgtggaacctgtgcgcctgcaggcctggctcacccgcatgactacatcgcccccaaaagattctgatcagctggatgtaattcaggagaaccggcagctgctgcagttactgaccacatacattgttcgggaaaacagccaagttggggaaggtgtgtgtgctgttcttctgggcaccctgactcccatggcaacagagatgctggccaacggtgatgggactggcttccctgaacttatggttgtgatggccactctggccagtgcaggtcaaggtgctggtcaccttcagcttcataatgctgctgtggattggctgagcagatgcaagaaatacctgtcacagaagaatgtagttgaaaaactgaatgccaatgtaatgcatggaaagcatgtgatgatcttggagtgcacatgccatatcatgtcttacttggctgatgtcacgaatgccctgagccagagtaatggtcaaggcccaagtcatctctcagtggatggggaagagcgggccattgaagtagactcagactgggtggaggagttggcggtggaagaggaagattcccaggctgaggattcagatgaagattctctttgcaataaactctgcacttttacgatcacacagaaagaattcatgaaccagcattggtaccactgtcacacctgtaaaatggtggatggcgtgggtgtctgcacagtgtgtgctaaggtgtgccacaaggatcatgagatttcctatgccaagtatggatccttcttctgtgactgtggagccaaggaagatggcagctgtttggctctggtgaagagaactcctagcagtggcatgagctctaccatgaaggagtcggcatttcagagtgaacccaggatttcagagagtctagtgcgtcatgccagcacctcctcgccagctgacaaagccaaggttaccatcagtgatggaaaggttgctgacgaagagaagcccaagaagagcagcctctgccgcacagtagagggctgccgggaggaattacagaaccaggccaatttctccttcgctcctctcgtgttagacatgcttaatttccttatggatgccattcagaccaacttccagcaagcttcagccgtcgggagcagcagccgtgctcagcaagccctcagtgagctacacactgtggagaaggcagtggagatgacagaccagctgatggttcccaccttagggtcccaggaaggtgcctttgagaatgtgcggatgaattacagtggagaccagggccagaccatccggcagctgatcagtgctcatgtgctcaggcgggtggctatgtgtgtgctctcctctccccatgggcgccgccaacatttggctgtcagccatgagaagggcaagatcaccgttctgcagctctctgcactcctgaagcaagcagattccagcaaaaggaagttaactctgacccgcttggcttctgccccagttccttttactgtgttgagcctcacaggaaatccctgcaaggaagactacttggcggtttgtgggctaaaggactgtcatgtgctcacctttagtagctcaggctctgtttcggatcacttggttttgcaccctcagttggcaacggggaacttcatcatcaaagccgtgtggttacctggttcacagaccgagttagcaattgtcaccgcagactttgttaagatttatgacctgtgtgttgatgccttgagtccaaccttctattttctcctgccaagctcaaagataagagatgttaccttccttttcaatgaggagggaaagaacatcattgttataatgtcttcggctgggtacatctatactcagcttatggaagaggccagcagtgcccagcagggacccttctatgtcactaatgtgttggaaatcaatcatgaggacctgaaggacagtaacagccaggtggcgggcggtggtgtgtccgtgtactactcccacgtgttgcagatgttgttcttcagctattgtcaaggcaaatcattcgcagccaccatcagcaggacaaccctggaggtgttgcaactcttccccatcaacatcaaaagttttgttgtctgcagttccaatggtggcagtaagacttctcctgctctttgccagtggtctgaggtgatgaaccaccctggcttggtgtgctgtgtccagcaaactacaggggtgccgctggtagttatggtgaaaccagacacttttcttatccaggagattaagactcttcctgctaaagcgaagatccaagacatggttgctattaggcacacggcctgcaatgagcagcagcggacaacaatgattctgctgtgtgaggatggcagcctgcgcatttacatggccaacgtggagaacacctcctactggctgcagccatccctgcagcccagcagtgtcatcagcatcatgaagcctgttcgaaagcgcaaaacagctacaatcacaacccgcacgtctagccaggtgactttccccattgacttttttgaacacaaccagcagctgacagatgtggagtttggtggtaacgacctcctacaggtctataatgcacaacagataaaacaccggctgaattccactggcatgtatgtggccaacaccaagcccggaggcttcaccattgagattagtaacaacaatagcactatggtgatgacaggcatgcggatccagattgggactcaagcaatagaacgggccccgtcatatatcgagatcttcggcagaactatgcagctcaacctgagtcgctcacgctggtttgacttccccttcaccagagaagaagccctgcaggctgataagaagctgaacctcttcattggggcctcggtggatccagcaggtgtcaccatgatagatgctgtaaaaatttatggcaagactaaggagcagtttggctggcctgatgagcccccagaagaattcccttctgcctctgtcagcaacatctgcccttcaaatctgaaccagagcaacggcactggagatagcgactcagctgcccccactacgaccagtggaactgtcctggagagttctgaaactgagtccctaaccaagctggaccggctggttgtgagttctttagaagccctggaaagctgctttgccgttggcccaatcatcgagaaggagagaaacaagaatgctgctcaggagctggccactttgctgttgtccctgccagcacctgccagtgtccagcagcagtccaagagccttctggccagcctgcacaccagccgctcggcctaccacagccacaaggatcaggccttgctgagcaaagctgtgcagtgtctcaacacatctagcaaagagggcaaggatttggaccctgaggtgttccagaggctagtgatcacagctcgctccattgccatcatgcgccccaacaaccttgtccactttacggagtcaaagctgccccagatggaaacagactgtttttttcctagatgtgcctgctggagtctagggatagttggcatattgattggggccccacttgaaactccctccccagaaggaatggatgaagggaaggaaccgcagaagcagttggaaggagattgctgtagtttcatcacccagcttgtgaaccacttctggaaactccatgcatccaaacccaagaatgccttcttggcacctgcctgccttccaggactaactcatattgaagctactgtcaatgctctggtggacatcatccatggctactgtacctgtgagctggattgtattaacacagcatccaagatctacatgcagatgctcttgtgtcctgatcctgctgtgagcttctcttgtaaacaagctctaattcgagtcctaaggcccaggaacaaacggagacatgtgactttaccctcttcccctcgaagcaacactccaatgggagacaaggatgatgatgacgatgatgatgcagatgagaaaatgcagtcatcagggatcccgaatggtggtcacatccgtcaggaaagccaggaacagagtgaggtggaccatggagattttgagatggtgtctgagtcgatggtcctggagacagctgaaaatgtcaacaatggcaacccctctcccctggaggccctgctggcaggcgcagagggcttcccccccatgctggacatcccacctgatgcagatgacgagaccatggttgaactagccattgccctgagcctgcagcaggaccaacaaggcagcagcagcagtgccctgggcctgcagagcctgggactgtccggccaggcacccagctcttcctctctggacgcaggaaccctctctgacaccacagcatcagctctcgttactctctcagctccagcctcagacgacgagggcagtacagcagcgacagatggttctacccttcggacctctcctgctgaccacggtggtagtgtgggctcggagagcgggggcagtgcagtggactcagtggctggcgagcacagtgtatctggccggagcagtgcttatggcgatgctacagctgaggggcatccggctggaccaggaagtgtcagctcaagcactggagccatcagcaccaccactgggcaccaggagggagatggctccgagggagaaggagaaggagaaactgaaggagatgtccacactagcaacaggctgcacatggtccgtctaatgctgttggagagattactgcagaccctgcctcaattacgaaacgttggcggtgtccgggccatcccatacatgcaggtcattctaatgctcactacagatctggatggagaagatgagaaagacaagggggccctagacaacctgctctcccagcttattgctgagttgggtatggataaaaaggatgtctccaagaagaatgagcgcagcgccctgaatgaagtccatctggtagtaatgagactcctgagtgtcttcatgtcccgcaccaaatctggatccaagtcttccatatgtgagtcatcttccctcatctccagtgccacagcagcagctctactgagctctggggctgtggactactgcctgcacgtgctcaaatcactgctggaatattggaagagccaacagaatgacgaggagcctgtggctaccagccagttgctgaaaccacatactacctcctccccacctgacatgagcccattctttctccgccagtatgtgaagggtcatgctgctgatgtgtttgaggcctatactcagcttctaacagaaatggtactgaggcttccttaccaaatcaaaaagattactgacaccaattctcgaatcccacctcctgtctttgaccactcgtggttttactttctctccgagtacctcatgatccagcagactccatttgtgcgccgtcaagtccgcaaacttctgctcttcatctgtggatccaaagagaagtaccgccagctccgggatttgcacaccctggactctcacgtgcgtgggatcaagaagctgctagaagagcaggggatattcctccgggcaagtgtggttacagccagctcaggctccgccttgcaatatgacacactcatcagcctgatggagcacctgaaagcctgtgcagagattgccgcccagcgaaccatcaactggcagaaattctgcatcaaagatgactccgtcctgtacttcctcctccaagtcagtttccttgtggatgagggcgtgtccccagtgctgctgcaactgctctcctgtgctctgtgcggcagcaaggtgctcgctgcactggcagcctcttcgggatcctccagtgcttcttcctcctcagcccctgtggctgccagttctggacaagccacaacacagtccaagtcttccactaaaaagagcaagaaagaagaaaaagaaaaggagaaagatggtgagacctctggcagccaggaggaccagctgtgcacagctctggtgaaccagctgaacaaatttgccgataaggaaaccctgatccagttcctgcgttgtttcctgttagagtccaattcttcctcggtgcgctggcaggcccactgtctgacactgcacatctacagaaattccagcaaatctcaacaggagctcctgctagatctgatgtggtccatctggccagaactcccagcctatggtcgtaaggctgcccagtttgtggacctactaggatatttctccctgaaaactccacaaacagagaagaagttgaaggagtattcacagaaggctgtggagattctgcggactcaaaaccatattcttaccaaccaccccaactcgaacatttataacactttgtctggcttagtggagtttgatggctattacctggagagcgatccctgcctggtgtgtaataacccggaagtaccgttctgttatatcaagctgtcttccattaaagtggacacgcggtacaccaccacccagcaggttgtgaagctcattggcagtcacaccatcagcaaagtgacagtgaaaatcggggatctgaaacggaccaagatggtgcggaccatcaacctgtattataacaaccgaaccgtgcaggccatcgtggagttgaaaaacaagccagctcgctggcacaaagccaagaaggttcagctgacccctggacagacagaggtgaagattgacctgccgttgcccattgtggcctccaatctgatgattgagtttgcagacttctatgaaaactaccaggcctccacagagaccctgcagtgccctcgctgtagtgcctcggtccctgccaacccaggagtctgtggcaactgtggagagaatgtgtaccagtgtcacaaatgcagatccatcaactacgatgaaaaggatcccttcctctgcaatgcctgtggcttctgtaaatatgcccgcttcgacttcatgctctatgccaagccttgctgtgcagtggatcccattgagaatgaagaagaccggaagaaggctgtatccaacatcaatacacttttggacaaagctgatcgagtgtatcatcagctgatgggacaccggccacagctggagaacctgctctgcaaagtgaatgaggcagctccagaaaagccacaggatgactcaggaacagcagggggcatcagctccacttctgccagtgtgaatcgttacatcctgcagttggctcaggagtattgtggagactgcaagaactcttttgatgaactctccaaaatcatccagaaagtctttgcttcgcgcaaagagttgttggaatatgacctacagcagagggaagcagccactaaatcatcccggacctccgtgcagcccacattcactgccagccagtaccgtgccttatccgtcctgggctgtggccacacatcctccaccaagtgctatggctgcgcctcggctgtcacagaacattgtatcacactacttcgggccctggccaccaacccagccttgaggcacatccttgtctcccagggccttatccgggagctctttgattataatcttcgccgaggggctgcggccatgcgggaggaggtccgccagctcatgtgcctcctaactcgagacaacccagaagccacccaacagatgaatgacctgattattggcaaggtctccacagccctgaagggccactgggccaaccccgatctggcaagtagcctgcagtatgaaatgctgctgctgacggattctatctccaaggaggacagctgctgggagctccggttacgctgtgctctcagccttttcctcatggctgtgaacattaagactcctgtggtggttgaaaacattaccctcatgtgcctgaggatcttgcagaagctgataaaaccacctgctcccactagcaagaagaacaaggatgtccccgttgaggccctcaccacggtgaagccatactgcaatgagatccatgcccaggctcaactgtggctcaagagagaccccaaggcatcctatgatgcctggaagaagtgtcttcctatcagagggatagatggcaatgggaaagcccccagcaaatcagagctccgccatctctatttgactgagaagtatgtgtggaggtggaaacagttcctgagtcgtcgggggaagaggacctcccccttggatctcaaactggggcataacaactggctgcgacaagtgcttttcactccagcaacgcaggccgcacggcaggcagcctgtaccattgtggaagctctagccaccattcccagccgcaagcagcaggtcctggacctgcttaccagttacctggatgagctgagcatagctggggagtgtgcagctgagtacctggctctctaccagaagctcatcacttctgcgcactggaaagtctacttggcagctcggggagtcctaccctatgtgggcaacctcatcaccaaggaaatagctcgtctgctggccctggaggaggctaccctgagtaccgatctgcagcagggttatgcccttaaaagtctcacaggccttctctcctcctttgttgaggtggaatccatcaaaagacattttaaaagtcgcttggtgggtactgtgctgaatggatacctgtgcttgcggaagctggtggtgcagaggaccaagctgatcgatgagacgcaggacatgctgctggagatgctggaggacatgaccacaggtacagaatcagaaaccaaggccttcatggctgtgtgcattgagacagccaagcgctacaatctggatgactaccggaccccggtgttcatcttcgagaggctctgcagcatcatttatcctgaggagaatgaagtcactgagttctttgtgaccctggagaaggatccccaacaagaagacttcttacagggcaggatgcctgggaacccgtatagcagcaatgagccaggcatcgggccgctgatgagggatataaagaacaagatttgccaggactgtgacttagtggccctcctggaagatgacagtggcatggagcttctagtgaacaataaaatcattagtttggaccttcctgtggctgaagtttacaagaaagtctggtgtaccacgaatgagggagagcccatgaggattgtttatcgtatgcgggggctgctgggcgatgccacagaggagttcattgagtccctggactctactacagatgaagaagaagatgaagaagaagtgtataaaatggctggtgtgatggcccagtgtgggggcctggaatgcatgcttaacagactcgcagggatcagagatttcaagcagggacgccaccttctaacagtgctactgaaattgttcagttactgcgtgaaggtgaaagtcaaccggcagcaactggtcaaactggaaatgaacaccttgaacgtcatgctggggaccctaaacctggcccttgtagctgaacaagaaagcaaggacagtgggggtgcagctgtggctgagcaggtgcttagcatcatggagatcattctagatgagtccaatgctgagcccctgagtgaggacaagggcaacctcctcctgacaggtgacaaggatcaactggtgatgctcttggaccagatcaacagcacctttgttcgctccaaccccagtgtgctccagggcctgcttcgcatcatcccgtacctttcctttggagaggtggagaaaatgcagatcttggtggagcgattcaaaccatactgcaactttgataaatatgatgaagatcacagtggtgatgataaagtcttcctggactgcttctgtaaaatagctgctggcatcaagaacaacagcaatgggcaccagctgaaggatctgattctccagaaggggatcacccagaatgcacttgactacatgaaaaagcacatccctagcgccaagaatttggatgccgacatctggaaaaagtttttgtctcgcccagccttgccatttatcctaaggctgcttcggggcctggccatccagcaccctggcacccaggttctgattggaactgattccatcccgaacctgcataagctggagcaggtgtccagtgatgagggcattgggaccttggcagagaacctgctggaagccctgcgggaacaccctgacgtaaacaagaagattgacgcagcccgcagggagacccgggcagagaagaagcgcatggccatggcaatgaggcagaaggccctgggcaccctgggcatgacgacaaatgaaaagggccaggtcgtgaccaagacagcactcctgaagcagatggaagagctgatcgaggagcctggcctcacgtgctgcatctgcagggagggatacaagttccagcccacaaaggtcctgggcatttataccttcacgaagcgggtagccttggaggagatggagaataagccccggaaacagcagggctacagcaccgtgtcccacttcaacattgtgcactacgactgccatctggctgccgtcaggttggctcgaggccgggaagagtgggagagtgccgccctgcagaatgccaacaccaagtgcaacgggctccttccggtctggggacctcatgtccctgaatcagcttttgccacttgcttggcaagacacaacacttacctccaggaatgtacaggccagcgggagcccacgtatcagctcaacatccatgacatcaaactgctcttcctgcgcttcgccatggagcagtcgttcagcgcagacactggcgggggcggccgggagagcaacatccacctgatcccgtacatcattcacactgtgctttacgtcctgaacacaacccgagcaacttcccgagaagagaagaacctccaaggctttctggaacagcccaaggagaagtgggtggagagtgcctttgaagtggacgggccctactatttcacagtcttggcccttcacatcctgccccctgagcagtggagagccacacgtgtggaaatcttgcggaggctgttggtgacctcgcaggctcgggcagtggctccaggtggagccaccaggctgacagataaggcagtgaaggactattccgcttaccgttcttcccttctcttttgggccctcgtcgatctcatttacaacatgtttaagaaggtgcctaccagtaacacagagggaggctggtcctgctctctcgctgagtacatccgccacaacgacatgcccatctacgaagctgccgacaaagccctgaaaaccttccaggaggagttcatgccagtggagaccttctcagagttcctcgatgtggccggtcttttatcagaaatcaccgatccagagagcttcctgaaggacctgttgaactcagtcccctgaccaccacacagcagctgcggcggcgaagacgaagctggcttgccttccaccctctgttctccctccttgtgcattaagttccctccgcgggatgctgcattgttaccccgccctcccctctctcatttttcttggtgtggcttggggtttttaggcttcctgttttatctcgtgtgtgtggtgcaccagctatgaggttgtctgtaacccaagccatcaaagggcctgtacatacctaggagccatgagttgtcccggccagcttcatacttgagtgtgcacatcttgagaaataaacaagtgacttaacacacattgaaaagg

SEQ ID NO: 427 - DNA, 16112 bp, Homo sapiens
agattgcgtcacttccgccccctcctgggaggcggcgctgggccggtggcaagcccccggagggagccgcagtagtacgacggaagatggcgacgagcggcggcgaagaggcggcggcagcggctccggcgccggggaccccggcaacgggggcggacacgaccccgggctgggaggtggctgtgcggcccctgctgtccgcgtcctactccgccttcgagatgaaggagttgccgcagctggtggcctcagtcatcgagagtgaatcagaaatcctgcaccatgagaagcagtacgagccattctactcatcttttgttgcactttccacacactatattacaacagtttgcagtctcattccccggaaccaacttcagtcagtggcagcagcctgtaaagttctaattgagttttctctcctgcgtctggagaatccagatgaggcttgtgctgtgtcccagaaacacttgattctcctaatcaagggcctgtgcactggctgtagccgactagatagaactgaaattatcacatttacagcaatgatgaaatccgccaagctgccccaaacagtgaagacactttcagacgtggaagatcagaaagagctggcctcaccagtaagccctgagttgaggcaaaaggaggtacagatgaattttttgaaccagctgacctcagtttttaaccctagaactgtagcatcacaacctatcagtacacagactctggtggaaggagaaaatgatgagcagtcatctacagatcaagcctcagctatcaaaaccaagaatgtgttcatagctcagaacgtggctagtcttcaagagcttggtggctcggagaagctactgcgtgtatgtttgaacctgccatatttcctacgctatatcaatcggttccaagatgcagttttagctaattccttcttcataatgcctgcaacagtagcagatgccactgctgttcgtaatggctttcattcattggtgattgatgtaactatggcattggataccctttctctacctgtgttggaacctctcaatccttctcgtctacaagatgtgacagtcctcagcctaagttgtctgtatgcaggtgtgagtgtggcaacgtgcatggccatcctccatgtgggtagtgcccagcaagtgcggacagggtccacgagctccaaagaagatgactatgaaagtgacgcagctacaattgtccagaaatgtctcgaaatctatgacatgattggacaagcaatcagcagttctcgccgggctggtggtgagcactatcagaatttccaattgctgggtgcttggtgcttgttaaacagccttttcctcatactgaacctcagtcctactgcgttggctgataaggggaaagagaaggacccactggctgccctccgagtcagagacatcctttctcgtactaaagagggagtgggctcccctaaactggggcctggaaaagggcatcagggatttggggtactctcagtaatattggcaaaccatgccatcaaactgctaacgtctctctttcaagacctacaagtggaggcccttcacaagggttgggagacagatggcccccctgcagccttgagcattatggcccagagcacctccatacagaggattcaacggctgattgactctgtcccactgatgaacctgctcttgacgttactttcaacttcctacagaaaggcatgtgtcctgcagcggcagaggaagggctccatgagcagcgatgccagcgcctccaccgactccaatacttactatgaggacgatttcagtagcacggaggaggacagcagccaagacgatgacagtgagcctattttggggcaatggtttgaggagactatttctcccagtaaagagaaagcagcacctccgcctcctcccccacctcctccactggaaagctctcctcgggttaaaagccccagtaagcaggcccctggtgagaagggcaacattctggcgagtcgcaaagatcctgagttgttcttaggtctggcttccaacattttgaacttcatcacctcttccatgctgaactctcggaacaattttatccgaaactatctgagtgtatctctttcagaacaccatatggccaccctagccagtatcatcaaggaggtggacaaagatggactcaagggttcatcagatgaagagtttgctgcagctctctatcacttcaaccactcactggtaacctctgaccttcagtcacctaacctgcagaacacactgttgcagcagctaggagtggctcctttttctgagggcccttggcccttgtacattcaccctcaaagcctctctgtgctttcacgcctcctgctcatctggcaacataaagccagtgctcaaggtgaccctgacgtcccagaatgccttaaagtttgggacaggtttttgtctacaatgaagcagaatgccctgcaaggtgtggtgcccagtgagacagaggatctgaatgtagaacacctgcagatgctcctcctcattttccacaatttcaccgagacaggccggcgggccatattgtcgctttttgtccagatcatccaggagttgagcgtcaacatggatgctcagatgcgcttcgtgccgcttatcttggctcgcctccttctcatctttgattatctgcttcatcagtactccaaagcccctgtgtatctatttgagcaggtacagcataacctgctaagtcctccctttgggtgggcaagtggatcccaggacagcaacagccgccgggcaaccactcctctctatcatggattcaaagaagtagaagaaaactggtctaagcatttctcatcagatgctgtcccacaccccagattctactgtgtcctgtccccagaagcctcagaggatgatttgaaccgacttgattctgtggcatgtgacgtccttttctccaagcttgtcaagtatgatgagctttatgctgcactgacagccctgcttgcagctgggtcccagcttgatacagttaggagaaaggaaaacaagaatgtaacagccttggaggcctgtgcccttcaatattacttcttgatactgtggaggatcctaggaattttaccaccatcaaagacttacattaaccagctatccatgaactcacctgagatgagcgaatgtgacatcttgcacactctgcgatggtcttctcggctccggatcagctcctatgtcaactggataaaggatcaccttatcaaacagggaatgaaggctgagcatgctagctcgcttctagaactggcatccaccactaagtgtagctcagtgaaatatgatgttgaaatagtagaggaatacttcgctcgacagatctcatccttctgtagtatcgactgtaccaccatcttgcagctgcatgaaattcccagtctgcagtccatctacacccttgatgccgcgatctcaaaggtccaggtctctttggatgagcatttttctaagatggctgctgagactgatcctcataagtcgtctgagattaccaagaacctacttccagccacgctgcaactcattgacacctatgcatcgttcaccagagcctatttgctgcaaaactttaatgaagagggaacaactgagaaaccttccaaggagaaactgcaaggctttgctgctgttttggctattggctctagcaggtgcaaggcaaatactctgggtccgacactggttcagaatttgccatcgtcagtgcagactgtgtgtgagtcctggaacaacatcaataccaatgaatttcccaatattggatcctggcgcaatgcctttgccaatgacaccatcccttcagagagttatattagtgcagtgcaggctgcacacctggggactctctgtagccaaagtctgcccctggctgcttccctgaagcataccctcctctcactggtcaggttgactggagatcttattgtttggtcagatgagatgaacccaccacaggtaattcggacactgctacctcttcttttggaatcaagcactgagagtgttgccgagatcagtagcaactccctggaacgcatcttgggccctgctgagtctgatgagttcttggctcgtgtttatgagaagctgatcactggttgttacaacattctggccaatcatgcagatcctaacagtggactggatgaatccatcctggaggaatgtctccagtacttggaaaagcagctggaaagtagccaggctcgtaaagctatggaggagtttttctctgacagtggagaacttgtacagatcatgatggcaacagccaatgagaacctctctgctaaattctgtaaccgagttttgaaattcttcaccaaactcttccagctgactgagaagagccctaacccgagcctgttgcatctctgtggctccctggcacaactggcctgtgtggaacctgtgcgcctgcaggcctggctcacccgcatgactacatcgcccccaaaagattctgatcagctggatgtaattcaggagaaccggcagctgctgcagttactgaccacatacattgttcgggaaaacagccaagttggggaaggtgtgtgtgctgttcttctgggcaccctgactcccatggcaacagagatgctggccaacggtgatgggactggcttccctgaacttatggttgtgatggccactctggccagtgcaggtcaaggtgctggtcaccttcagcttcataatgctgctgtggattggctgagcagatgcaagaaatacctgtcacagaagaatgtagttgaaaaactgaatgccaatgtaatgcatggaaagcatgtgatgatcttggagtgcacatgccatatcatgtcttacttggctgatgtcacgaatgccctgagccagagtaatggtcaaggcccaagtcatctctcagtggatggggaagagcgggccattgaagtagactcagactgggtggaggagttggcggtggaagaggaagattcccaggctgaggattcagatgaagattctctttgcaataaactctgcacttttacgatcacacagaaagaattcatgaaccagcattggtaccactgtcacacctgtaaaatggtggatggcgtgggtgtctgcacagtgtgtgctaaggtgtgccacaaggatcatgagatttcctatgccaagtatggatccttcttctgtgactgtggagccaaggaagatggcagctgtttggctctggtgaagagaactcctagcagtggcatgagctctaccatgaaggagtcggcatttcagagtgaacccaggatttcagagagtctagtgcgtcatgccagcacctcctcgccagctgacaaagccaaggttaccatcagtgatggaaaggttgctgacgaagagaagcccaagaagagcagcctctgccgcacagtagagggctgccgggaggaattacagaaccaggccaatttctccttcgctcctctcgtgttagacatgcttaatttccttatggatgccattcagaccaacttccagcaagcttcagccgtcgggagcagcagccgtgctcagcaagccctcagtgagctacacactgtggagaaggcagtggagatgacagaccagctgatggttcccaccttagggtcccaggaaggtgcctttgagaatgtgcggatgaattacagtggagaccagggccagaccatccggcagctgatcagtgctcatgtgctcaggcgggtggctatgtgtgtgctctcctctccccatgggcgccgccaacatttggctgtcagccatgagaagggcaagatcaccgttctgcagctctctgcactcctgaagcaagcagattccagcaaaaggaagttaactctgacccgcttggcttctgccccagttccttttactgtgttgagcctcacaggaaatccctgcaaggaagactacttggcggtttgtgggctaaaggactgtcatgtgctcacctttagtagctcaggctctgtttcggatcacttggttttgcaccctcagttggcaacggggaacttcatcatcaaagccgtgtggttacctggttcacagaccgagttagcaattgtcaccgcagactttgttaagatttatgacctgtgtgttgatgccttgagtccaaccttctattttctcctgccaagctcaaagataagagatgttaccttccttttcaatgaggagggaaagaacatcattgttataatgtcttcggctgggtacatctatactcagcttatggaagaggccagcagtgcccagcagggacccttctatgtcactaatgtgttggaaatcaatcatgaggacctgaagcaggacagtaacagccaggtggcgggcggtggtgtgtccgtgtactactcccacgtgttgcagatgttgttcttcagctattgtcaaggcaaatcattcgcagccaccatcagcaggacaaccctggaggtgttgcaactcttccccatcaacatcaaaagttttgttgtctgcagttccaatggtggcagtaagacttctcctgctctttgccagtggtctgaggtgatgaaccaccctggcttggtgtgctgtgtccagcaaactacaggggtgccgctggtagttatggtgaaaccagacacttttcttatccaggagattaagactcttcctgctaaagcgaagatccaagacatggttgctattaggcacacggcctgcaatgagcagcagcggacaacaatgattctgctgtgtgaggatggcagcctgcgcatttacatggccaacgtggagaacacctcctactggctgcagccatccctgcagcccagcagtgtcatcagcatcatgaagcctgttcgaaagcgcaaaacagctacaatcacaacccgcacgtctagccaggtgactttccccattgacttttttgaacacaaccagcagctgacagatgtggagtttggtggtaacgacctcctacaggtctataatgcacaacagataaaacaccggctgaattccactggcatgtatgtggccaacaccaagcccggaggcttcaccattgagattagtaacaacaatagcactatggtgatgacaggcatgcggatccagattgggactcaagcaatagaacgggccccgtcatatatcgagatcttcggcagaactatgcagctcaacctgagtcgctcacgctggtttgacttccccttcaccagagaagaagccctgcaggctgataagaagctgaacctcttcattggggcctcggtggatccagcaggtgtcaccatgatagatgctgtaaaaatttatggcaagactaaggagcagtttggctggcctgatgagcccccagaagaattcccttctgcctctgtcagcaacatctgcccttcaaatctgaaccagagcaacggcactggagatagcgactcagctgcccccactacgaccagtggaactgtcctggagagttctgaaactgagtccctaaccaagctggaccggctggttgtgagttctttagaagccctggaaagctgctttgccgttggcccaatcatcgagaaggagagaaacaagaatgctgctcaggagctggccactttgctgttgtccctgccagcacctgccagtgtccagcagcagtccaagagccttctggccagcctgcacaccagccgctcggcctaccacagccacaaggatcaggccttgctgagcaaagctgtgcagtgtctcaacacatctagcaaagagggcaaggatttggaccctgaggtgttccagaggctagtgatcacagctcgctccattgccatcatgcgccccaacaaccttgtccactttacggagtcaaagctgccccagatggaaacagactgtttttttcctagatgtgcctgctggagtctagggatagttggcatattgattggggccccacttgaaactccctccccaggaatggatgaagggaaggaaccgcagaagcagttggaaggagattgctgtagtttcatcacccagcttgtgaaccacttctggaaactccatgcatccaaacccaagaatgccttcttggcacctgcctgccttccaggactaactcatattgaagctactgtcaatgctctggtggacatcatccatggctactgtacctgtgagctggattgtattaacacagcatccaagatctacatgcagatgctcttgtgtcctgatcctgctgtgagcttctcttgtaaacaagctctaattcgagtcctaaggcccaggaacaaacggagacatgtgactttaccctcttcccctcgaagcaacactccaatgggagacaaggatgatgatgacgatgatgatgcagatgagaaaatgcagtcatcagggatcccgaatggtggtcacatccgtcaggaaagccaggaacagagtgaggtggaccatggagattttgagatggtgtctgagtcgatggtcctggagacagctgaaaatgtcaacaatggcaacccctctcccctggaggccctgctggcaggcgcagagggcttcccccccatgctggacatcccacctgatgcagatgacgagaccatggttgaactagccattgccctgagcctgcagcaggaccaacaaggcagcagcagcagtgccctgggcctgcagagcctgggactgtccggccaggcacccagctcttcctctctggacgcaggaaccctctctgacaccacagcatcagctctcgttactctctcagctccagcctcagacgacgagggcagtacagcagcgacagatggttctacccttcggacctctcctgctgaccacggtggtagtgtgggctcggagagcgggggcagtgcagtggactcagtggctggcgagcacagtgtatctggccggagcagtgcttatggcgatgctacagctgaggggcatccggctggaccaggaagtgtcagctcaagcactggagccatcagcaccaccactgggcaccaggagggagatggctccgagggagaaggagaaggagaaactgaaggagatgtccacactagcaacaggctgcacatggtccgtctaatgctgttggagagattactgcagaccctgcctcaattacgaaacgttggcggtgtccgggccatcccatacatgcaggtcattctaatgctcactacagatctggatggagaagatgagaaagacaagggggccctagacaacctgctctcccagcttattgctgagttgggtatggataaaaaggatgtctccaagaagaatgagcgcagcgccctgaatgaagtccatctggtagtaatgagactcctgagtgtcttcatgtcccgcaccaaatctggatccaagtcttccatatgtgagtcatcttccctcatctccagtgccacagcagcagctctactgagctctggggctgtggactactgcctgcacgtgctcaaatcactgctggaatattggaagagccaacagaatgacgaggagcctgtggctaccagccagttgctgaaaccacatactacctcctccccacctgacatgagcccattctttctccgccagtatgtgaagggtcatgctgctgatgtgtttgaggcctatactcagcttctaacagaaatggtactgaggcttccttaccaaatcaaaaagattactgacaccaattctcgaatcccacctcctgtctttgaccactcgtggttttactttctctccgagtacctcatgatccagcagactccatttgtgcgccgtcaagtccgcaaacttctgctcttcatctgtggatccaaagagaagtaccgccagctccgggatttgcacaccctggactctcacgtgcgtgggatcaagaagctgctagaagagcaggggatattcctccgggcaagtgtggttacagccagctcaggctccgccttgcaatatgacacactcatcagcctgatggagcacctgaaagcctgtgcagagattgccgcccagcgaaccatcaactggcagaaattctgcatcaaagatgactccgtcctgtacttcctcctccaagtcagtttccttgtggatgagggcgtgtccccagtgctgctgcaactgctctcctgtgctctgtgcggcagcaaggtgctcgctgcactggcagcctcttcgggatcctccagtgcttcttcctcctcagcccctgtggctgccagttctggacaagccacaacacagtccaagtcttccactaaaaagagcaagaaagaagaaaaagaaaaggagaaagatggtgagacctctggcagccaggaggaccagctgtgcacagctctggtgaaccagctgaacaaatttgccgataaggaaaccctgatccagttcctgcgttgtttcctgttagagtccaattcttcctcggtgcgctggcaggcccactgtctgacactgcacatctacagaaattccagcaaatctcaacaggagctcctgctagatctgatgtggtccatctggccagaactcccagcctatggtcgtaaggctgcccagtttgtggacctactaggatatttctccctgaaaactccacaaacagagaagaagttgaaggagtattcacagaaggctgtggagattctgcggactcaaaaccatattcttaccaaccaccccaactcgaacatttataacactttgtctggcttagtggagtttgatggctattacctggagagcgatccctgcctggtgtgtaataacccggaagtaccgttctgttatatcaagctgtcttccattaaagtggacacgcggtacaccaccacccagcaggttgtgaagctcattggcagtcacaccatcagcaaagtgacagtgaaaatcggggatctgaaacggaccaagatggtgcggaccatcaacctgtattataacaaccgaaccgtgcaggccatcgtggagttgaaaaacaagccagctcgctggcacaaagccaagaaggttcagctgacccctggacagacagaggtgaagattgacctgccgttgcccattgtggcctccaatctgatgattgagtttgcagacttctatgaaaactaccaggcctccacagagaccctgcagtgccctcgctgtagtgcctcggtccctgccaacccaggagtctgtggcaactgtggagagaatgtgtaccagtgtcacaaatgcagatccatcaactacgatgaaaaggatcccttcctctgcaatgcctgtggcttctgtaaatatgcccgcttcgacttcatgctctatgccaagccttgctgtgcagtggatcccattgagaatgaagaagaccggaagaaggctgtatccaacatcaatacacttttggacaaagctgatcgagtgtatcatcagctgatgggacaccggccacagctggagaacctgctctgcaaagtgaatgaggcagctccagaaaagccacaggatgactcaggaacagcagggggcatcagctccacttctgccagtgtgaatcgttacatcctgcagttggctcaggagtattgtggagactgcaagaactcttttgatgaactctccaaaatcatccagaaagtctttgcttcgcgcaaagagttgttggaatatgacctacagcagagggaagcagccactaaatcatcccggacctccgtgcagcccacattcactgccagccagtaccgtgccttatccgtcctgggctgtggccacacatcctccaccaagtgctatggctgcgcctcggctgtcacagaacattgtatcacactacttcgggccctggccaccaacccagccttgaggcacatccttgtctcccagggccttatccgggagctctttgattataatcttcgccgaggggctgcggccatgcgggaggaggtccgccagctcatgtgcctcctaactcgagacaacccagaagccacccaacagatgaatgacctgattattggcaaggtctccacagccctgaagggccactgggccaaccccgatctggcaagtagcctgcagtatgaaatgctgctgctgacggattctatctccaaggaggacagctgctgggagctccggttacgctgtgctctcagccttttcctcatggctgtgaacattaagactcctgtggtggttgaaaacattaccctcatgtgcctgaggatcttgcagaagctgataaaaccacctgctcccactagcaagaagaacaaggatgtccccgttgaggccctcaccacggtgaagccatactgcaatgagatccatgcccaggctcaactgtggctcaagagagaccccaaggcatcctatgatgcctggaagaagtgtcttcctatcagagggatagatggcaatgggaaagcccccagcaaatcagagctccgccatctctatttgactgagaagtatgtgtggaggtggaaacagttcctgagtcgtcgggggaagaggacctcccccttggatctcaaactggggcataacaactggctgcgacaagtgcttttcactccagcaacgcaggccgcacggcaggcagcctgtaccattgtggaagctctagccaccattcccagccgcaagcagcaggtcctggacctgcttaccagttacctggatgagctgagcatagctggggagtgtgcagctgagtacctggctctctaccagaagctcatcacttctgcgcactggaaagtctacttggcagctcggggagtcctaccctatgtgggcaacctcatcaccaaggaaatagctcgtctgctggccctggaggaggctaccctgagtaccgatctgcagcagggttatgcccttaaaagtctcacaggccttctctcctcctttgttgaggtggaatccatcaaaagacattttaaaagtcgcttggtgggtactgtgctgaatggatacctgtgcttgcggaagctggtggtgcagaggaccaagctgatcgatgagacgcaggacatgctgctggagatgctggaggacatgaccacaggtacagaatcagaaaccaaggccttcatggctgtgtgcattgagacagccaagcgctacaatctggatgactaccggaccccggtgttcatcttcgagaggctctgcagcatcatttatcctgaggagaatgaagtcactgagttctttgtgaccctggagaaggatccccaacaagaagacttcttacagggcaggatgcctgggaacccgtatagcagcaatgagccaggcatcgggccgctgatgagggatataaagaacaagatttgccaggactgtgacttagtggccctcctggaagatgacagtggcatggagcttctagtgaacaataaaatcattagtttggaccttcctgtggctgaagtttacaagaaagtctggtgtaccacgaatgagggagagcccatgaggattgtttatcgtatgcgggggctgctgggcgatgccacagaggagttcattgagtccctggactctactacagatgaagaagaagatgaagaagaagtgtataaaatggctggtgtgatggcccagtgtgggggcctggaatgcatgcttaacagactcgcagggatcagagatttcaagcagggacgccaccttctaacagtgctactgaaattgttcagttactgcgtgaaggtgaaagtcaaccggcagcaactggtcaaactggaaatgaacaccttgaacgtcatgctggggaccctaaacctggcccttgtagctgaacaagaaagcaaggacagtgggggtgcagctgtggctgagcaggtgcttagcatcatggagatcattctagatgagtccaatgctgagcccctgagtgaggacaagggcaacctcctcctgacaggtgacaaggatcaactggtgatgctcttggaccagatcaacagcacctttgttcgctccaaccccagtgtgctccagggcctgcttcgcatcatcccgtacctttcctttggagaggtggagaaaatgcagatcttggtggagcgattcaaaccatactgcaactttgataaatatgatgaagatcacagtggtgatgataaagtcttcctggactgcttctgtaaaatagctgctggcatcaagaacaacagcaatgggcaccagctgaaggatctgattctccagaaggggatcacccagaatgcacttgactacatgaaaaagcacatccctagcgccaagaatttggatgccgacatctggaaaaagtttttgtctcgcccagccttgccatttatcctaaggctgcttcggggcctggccatccagcaccctggcacccaggttctgattggaactgattccatcccgaacctgcataagctggagcaggtgtccagtgatgagggcattgggaccttggcagagaacctgctggaagccctgcgggaacaccctgacgtaaacaagaagattgacgcagcccgcagggagacccgggcagagaagaagcgcatggccatggcaatgaggcagaaggccctgggcaccctgggcatgacgacaaatgaaaagggccaggtcgtgaccaagacagcactcctgaagcagatggaagagctgatcgaggagcctggcctcacgtgctgcatctgcagggagggatacaagttccagcccacaaaggtcctgggcatttataccttcacgaagcgggtagccttggaggagatggagaataagccccggaaacagcagggctacagcaccgtgtcccacttcaacattgtgcactacgactgccatctggctgccgtcaggttggctcgaggccgggaagagtgggagagtgccgccctgcagaatgccaacaccaagtgcaacgggctccttccggtctggggacctcatgtccctgaatcagcttttgccacttgcttggcaagacacaacacttacctccaggaatgtacaggccagcgggagcccacgtatcagctcaacatccatgacatcaaactgctcttcctgcgcttcgccatggagcagtcgttcagcgcagacactggcgggggcggccgggagagcaacatccacctgatcccgtacatcattcacactgtgctttacgtcctgaacacaacccgagcaacttcccgagaagagaagaacctccaaggctttctggaacagcccaaggagaagtgggtggagagtgcctttgaagtggacgggccctactatttcacagtcttggcccttcacatcctgccccctgagcagtggagagccacacgtgtggaaatcttgcggaggctgttggtgacctcgcaggctcgggcagtggctccaggtggagccaccaggctgacagataaggcagtgaaggactattccgcttaccgttcttcccttctcttttgggccctcgtcgatctcatttacaacatgtttaagaaggtgcctaccagtaacacagagggaggctggtcctgctctctcgctgagtacatccgccacaacgacatgcccatctacgaagctgccgacaaagccctgaaaaccttccaggaggagttcatgccagtggagaccttctcagagttcctcgatgtggccggtcttttatcagaaatcaccgatccagagagcttcctgaaggacctgttgaactcagtcccctgaccaccacacagcagctgcggcggcgaagacgaagctggcttgccttccaccctctgttctccctccttgtgcattaagttccctccgcgggatgctgcattgttaccccgccctcccctctctcatttttcttggtgtggcttggggtttttaggcttcctgttttatctcgtgtgtgtggtgcaccagctatgaggttgtctgtaacccaagccatcaaagggcctgtacatacctaggagccatgagttgtcccggccagcttcatacttgagtgtgcacatcttgagaaataaacaagtgacttaacacacattgaaaagg

SEQ ID NO: 428 - DNA, 16112 bp, Homo sapiens
agattgcgtcacttccgccccctcctgggaggcggcgctgggccggtggcaagcccccggagggagccgcagtagtacgacggaagatggcgacgagcggcggcgaagaggcggcggcagcggctccggcgccggggaccccggcaacgggggcggacacgaccccgggctgggaggtggctgtgcggcccctgctgtccgcgtcctactccgccttcgagatgaaggagttgccgcagctggtggcctcagtcatcgagagtgaatcagaaatcctgcaccatgagaagcagtacgagccattctactcatcttttgttgcactttccacacactatattacaacagtttgcagtctcattccccggaaccaacttcagtcagtggcagcagcctgtaaagttctaattgagttttctctcctgcgtctggagaatccagatgaggcttgtgctgtgtcccagaaacacttgattctcctaatcaagggcctgtgcactggctgtagccgactagatagaactgaaattatcacatttacagcaatgatgaaatccgccaagctgccccaaacagtgaagacactttcagacgtggaagatcagaaagagctggcctcaccagtaagccctgagttgaggcaaaaggaggtacagatgaattttttgaaccagctgacctcagtttttaaccctagaactgtagcatcacaacctatcagtacacagactctggtggaaggagaaaatgatgagcagtcatctacagatcaagcctcagctatcaaaaccaagaatgtgttcatagctcagaacgtggctagtcttcaagagcttggtggctcggagaagctactgcgtgtatgtttgaacctgccatatttcctacgctatatcaatcggttccaagatgcagttttagctaattccttcttcataatgcctgcaacagtagcagatgccactgctgttcgtaatggctttcattcattggtgattgatgtaactatggcattggataccctttctctacctgtgttggaacctctcaatccttctcgtctacaagatgtgacagtcctcagcctaagttgtctgtatgcaggtgtgagtgtggcaacgtgcatggccatcctccatgtgggtagtgcccagcaagtgcggacagggtccacgagctccaaagaagatgactatgaaagtgacgcagctacaattgtccagaaatgtctcgaaatctatgacatgattggacaagcaatcagcagttctcgccgggctggtggtgagcactatcagaatttccaattgctgggtgcttggtgcttgttaaacagccttttcctcatactgaacctcagtcctactgcgttggctgataaggggaaagagaaggacccactggctgccctccgagtcagagacatcctttctcgtactaaagagggagtgggctcccctaaactggggcctggaaaagggcatcagggatttggggtactctcagtaatattggcaaaccatgccatcaaactgctaacgtctctctttcaagacctacaagtggaggcccttcacaagggttgggagacagatggcccccctgcagccttgagcattatggcccagagcacctccatacagaggattcaacggctgattgactctgtcccactgatgaacctgctcttgacgttactttcaacttcctacagaaaggcatgtgtcctgcagcggcagaggaagggctccatgagcagcgatgccagcgcctccaccgactccaatacttactatgaggacgatttcagtagcacggaggaggacagcagccaagacgatgacagtgagcctattttggggcaatggtttgaggagactatttctcccagtaaagagaaagcagcacctccgcctcctcccccacctcctccactggaaagctctcctcgggttaaaagccccagtaagcaggcccctggtgagaagggcaacattctggcgagtcgcaaagatcctgagttgttcttaggtctggcttccaacattttgaacttcatcacctcttccatgctgaactctcggaacaattttatccgaaactatctgagtgtatctctttcagaacaccatatggccaccctagccagtatcatcaaggaggtggacaaagatggactcaagggttcatcagatgaagagtttgctgcagctctctatcacttcaaccactcactggtaacctctgaccttcagtcacctaacctgcagaacacactgttgcagcagctaggagtggctcctttttctgagggcccttggcccttgtacattcaccctcaaagcctctctgtgctttcacgcctcctgctcatctggcaacataaagccagtgctcaaggtgaccctgacgtcccagaatgccttaaagtttgggacaggtttttgtctacaatgaagcagaatgccctgcaaggtgtggtgcccagtgagacagaggatctgaatgtagaacacctgcagatgctcctcctcattttccacaatttcaccgagacaggccggcgggccatattgtcgctttttgtccagatcatccaggagttgagcgtcaacatggatgctcagatgcgcttcgtgccgcttatcttggctcgcctccttctcatctttgattatctgcttcatcagtactccaaagcccctgtgtatctatttgagcaggtacagcataacctgctaagtcctccctttgggtgggcaagtggatcccaggacagcaacagccgccgggcaaccactcctctctatcatggattcaaagaagtagaagaaaactggtctaagcatttctcatcagatgctgtcccacaccccagattctactgtgtcctgtccccagaagcctcagaggatgatttgaaccgacttgattctgtggcatgtgacgtccttttctccaagcttgtcaagtatgatgagctttatgctgcactgacagccctgcttgcagctgggtcccagcttgatacagttaggagaaaggaaaacaagaatgtaacagccttggaggcctgtgcccttcaatattacttcttgatactgtggaggatcctaggaattttaccaccatcaaagacttacattaaccagctatccatgaactcacctgagatgagcgaatgtgacatcttgcacactctgcgatggtcttctcggctccggatcagctcctatgtcaactggataaaggatcaccttatcaaacagggaatgaaggctgagcatgctagctcgcttctagaactggcatccaccactaagtgtagctcagtgaaatatgatgttgaaatagtagaggaatacttcgctcgacagatctcatccttctgtagtatcgactgtaccaccatcttgcagctgcatgaaattcccagtctgcagtccatctacacccttgatgccgcgatctcaaaggtccaggtctctttggatgagcatttttctaagatggctgctgagactgatcctcataagtcgtctgagattaccaagaacctacttccagccacgctgcaactcattgacacctatgcatcgttcaccagagcctatttgctgcaaaactttaatgaagagggaacaactgagaaaccttccaaggagaaactgcaaggctttgctgctgttttggctattggctctagcaggtgcaaggcaaatactctgggtccgacactggttcagaatttgccatcgtcagtgcagactgtgtgtgagtcctggaacaacatcaataccaatgaatttcccaatattggatcctggcgcaatgcctttgccaatgacaccatcccttcagagagttatattagtgcagtgcaggctgcacacctggggactctctgtagccaaagtctgcccctggctgcttccctgaagcataccctcctctcactggtcaggttgactggagatcttattgtttggtcagatgagatgaacccaccacaggtaattcggacactgctacctcttcttttggaatcaagcactgagagtgttgccgagatcagtagcaactccctggaacgcatcttgggccctgctgagtctgatgagttcttggctcgtgtttatgagaagctgatcactggttgttacaacattctggccaatcatgcagatcctaacagtggactggatgaatccatcctggaggaatgtctccagtacttggaaaagcagctggaaagtagccaggctcgtaaagctatggaggagtttttctctgacagtggagaacttgtacagatcatgatggcaacagccaatgagaacctctctgctaaattctgtaaccgagttttgaaattcttcaccaaactcttccagctgactgagaagagccctaacccgagcctgttgcatctctgtggctccctggcacaactggcctgtgtggaacctgtgcgcctgcaggcctggctcacccgcatgactacatcgcccccaaaagattctgatcagctggatgtaattcaggagaaccggcagctgctgcagttactgaccacatacattgttcgggaaaacagccaagttggggaaggtgtgtgtgctgttcttctgggcaccctgactcccatggcaacagagatgctggccaacggtgatgggactggcttccctgaacttatggttgtgatggccactctggccagtgcaggtcaaggtgctggtcaccttcagcttcataatgctgctgtggattggctgagcagatgcaagaaatacctgtcacagaagaatgtagttgaaaaactgaatgccaatgtaatgcatggaaagcatgtgatgatcttggagtgcacatgccatatcatgtcttacttggctgatgtcacgaatgccctgagccagagtaatggtcaaggcccaagtcatctctcagtggatggggaagagcgggccattgaagtagactcagactgggtggaggagttggcggtggaagaggaagattcccaggctgaggattcagatgaagattctctttgcaataaactctgcacttttacgatcacacagaaagaattcatgaaccagcattggtaccactgtcacacctgtaaaatggtggatggcgtgggtgtctgcacagtgtgtgctaaggtgtgccacaaggatcatgagatttcctatgccaagtatggatccttcttctgtgactgtggagccaaggaagatggcagctgtttggctctggtgaagagaactcctagcagtggcatgagctctaccatgaaggagtcggcatttcagagtgaacccaggatttcagagagtctagtgcgtcatgccagcacctcctcgccagctgacaaagccaaggttaccatcagtgatggaaaggttgctgacgaagagaagcccaagaagagcagcctctgccgcacagtagagggctgccgggaggaattacagaaccaggccaatttctccttcgctcctctcgtgttagacatgcttaatttccttatggatgccattcagaccaacttccagcaagcttcagccgtcgggagcagcagccgtgctcagcaagccctcagtgagctacacactgtggagaaggcagtggagatgacagaccagctgatggttcccaccttagggtcccaggaaggtgcctttgagaatgtgcggatgaattacagtggagaccagggccagaccatccggcagctgatcagtgctcatgtgctcaggcgggtggctatgtgtgtgctctcctctccccatgggcgccgccaacatttggctgtcagccatgagaagggcaagatcaccgttctgcagctctctgcactcctgaagcaagcagattccagcaaaaggaagttaactctgacccgcttggcttctgccccagttccttttactgtgttgagcctcacaggaaatccctgcaaggaagactacttggcggtttgtgggctaaaggactgtcatgtgctcacctttagtagctcaggctctgtttcggatcacttggttttgcaccctcagttggcaacggggaacttcatcatcaaagccgtgtggttacctggttcacagaccgagttagcaattgtcaccgcagactttgttaagatttatgacctgtgtgttgatgccttgagtccaaccttctattttctcctgccaagctcaaagataagagatgttaccttccttttcaatgaggagggaaagaacatcattgttataatgtcttcggctgggtacatctatactcagcttatggaagaggccagcagtgcccagcagggacccttctatgtcactaatgtgttggaaatcaatcatgaggacctgaagcaggacagtaacagccaggtggcgggcggtggtgtgtccgtgtactactcccacgtgttgcagatgttgttcttcagctattgtcaaggcaaatcattcgcagccaccatcagcaggacaaccctggaggtgttgcaactcttccccatcaacatcaaaagttttgttgtctgcagttccaatggtggcagtaagacttctcctgctctttgccagtggtctgaggtgatgaaccaccctggcttggtgtgctgtgtccagcaaactacaggggtgccgctggtagttatggtgaaaccagacacttttcttatccaggagattaagactcttcctgctaaagcgaagatccaagacatggttgctattaggcacacggcctgcaatgagcagcagcggacaacaatgattctgctgtgtgaggatggcagcctgcgcatttacatggccaacgtggagaacacctcctactggctgcagccatccctgcagcccagcagtgtcatcagcatcatgaagcctgttcgaaagcgcaaaacagctacaatcacaacccgcacgtctagccaggtgactttccccattgacttttttgaacacaaccagcagctgacagatgtggagtttggtggtaacgacctcctacaggtctataatgcacaacagataaaacaccggctgaattccactggcatgtatgtggccaacaccaagcccggaggcttcaccattgagattagtaacaacaatagcactatggtgatgacaggcatgcggatccagattgggactcaagcaatagaacgggccccgtcatatatcgagatcttcggcagaactatgcagctcaacctgagtcgctcacgctggtttgacttccccttcaccagagaagaagccctgcaggctgataagaagctgaacctcttcattggggcctcggtggatccagcaggtgtcaccatgatagatgctgtaaaaatttatggcaagactaaggagcagtttggctggcctgatgagcccccagaagaattcccttctgcctctgtcagcaacatctgcccttcaaatctgaaccagagcaacggcactggagatagcgactcagctgcccccactacgaccagtggaactgtcctggagagttctgaaactgagtccctaaccaagctggaccggctggttgtgagttctttagaagccctggaaagctgctttgccgttggcccaatcatcgagaaggagagaaacaagaatgctgctcaggagctggccactttgctgttgtccctgccagcacctgccagtgtccagcagcagtccaagagccttctggccagcctgcacaccagccgctcggcctaccacagccacaaggatcaggccttgctgagcaaagctgtgcagtgtctcaacacatctagcaaagagggcaaggatttggaccctgaggtgttccagaggctagtgatcacagctcgctccattgccatcatgcgccccaacaaccttgtccactttacggagtcaaagctgccccagatggaaacagactgtttttttcctagatgtgcctgctggagtctagggatagttggcatattgattggggccccacttgaaactccctccccagaaggaatggatgaagggaaggaaccgcagaagcagttggaaggagattgctgtagtttcatcacccagcttgtgaaccacttctggaaactccatgcatccaaacccaagaatgccttcttggcacctgcctgccttccaggactaactcatattgaagctactgtcaatgctctggtggacatcatccatggctactgtacctgtgagctggattgtattaacacagcatccaagatctacatgcagatgctcttgtgtcctgatcctgctgtgagcttctcttgtaaacaagctctaattcgagtcctaaggcccaggaacaaacggagacatgtgactttaccctcttcccctcgaagcaacactccaatggacaaggatgatgatgacgatgatgatgcagatgagaaaatgcagtcatcagggatcccgaatggtggtcacatccgtcaggaaagccaggaacagagtgaggtggaccatggagattttgagatggtgtctgagtcgatggtcctggagacagctgaaaatgtcaacaatggcaacccctctcccctggaggccctgctggcaggcgcagagggcttcccccccatgctggacatcccacctgatgcagatgacgagaccatggttgaactagccattgccctgagcctgcagcaggaccaacaaggcagcagcagcagtgccctgggcctgcagagcctgggactgtccggccaggcacccagctcttcctctctggacgcaggaaccctctctgacaccacagcatcagctctcgttactctctcagctccagcctcagacgacgagggcagtacagcagcgacagatggttctacccttcggacctctcctgctgaccacggtggtagtgtgggctcggagagcgggggcagtgcagtggactcagtggctggcgagcacagtgtatctggccggagcagtgcttatggcgatgctacagctgaggggcatccggctggaccaggaagtgtcagctcaagcactggagccatcagcaccaccactgggcaccaggagggagatggctccgagggagaaggagaaggagaaactgaaggagatgtccacactagcaacaggctgcacatggtccgtctaatgctgttggagagattactgcagaccctgcctcaattacgaaacgttggcggtgtccgggccatcccatacatgcaggtcattctaatgctcactacagatctggatggagaagatgagaaagacaagggggccctagacaacctgctctcccagcttattgctgagttgggtatggataaaaaggatgtctccaagaagaatgagcgcagcgccctgaatgaagtccatctggtagtaatgagactcctgagtgtcttcatgtcccgcaccaaatctggatccaagtcttccatatgtgagtcatcttccctcatctccagtgccacagcagcagctctactgagctctggggctgtggactactgcctgcacgtgctcaaatcactgctggaatattggaagagccaacagaatgacgaggagcctgtggctaccagccagttgctgaaaccacatactacctcctccccacctgacatgagcccattctttctccgccagtatgtgaagggtcatgctgctgatgtgtttgaggcctatactcagcttctaacagaaatggtactgaggcttccttaccaaatcaaaaagattactgacaccaattctcgaatcccacctcctgtctttgaccactcgtggttttactttctctccgagtacctcatgatccagcagactccatttgtgcgccgtcaagtccgcaaacttctgctcttcatctgtggatccaaagagaagtaccgccagctccgggatttgcacaccctggactctcacgtgcgtgggatcaagaagctgctagaagagcaggggatattcctccgggcaagtgtggttacagccagctcaggctccgccttgcaatatgacacactcatcagcctgatggagcacctgaaagcctgtgcagagattgccgcccagcgaaccatcaactggcagaaattctgcatcaaagatgactccgtcctgtacttcctcctccaagtcagtttccttgtggatgagggcgtgtccccagtgctgctgcaactgctctcctgtgctctgtgcggcagcaaggtgctcgctgcactggcagcctcttcgggatcctccagtgcttcttcctcctcagcccctgtggctgccagttctggacaagccacaacacagtccaagtcttccactaaaaagagcaagaaagaagaaaaagaaaaggagaaagatggtgagacctctggcagccaggaggaccagctgtgcacagctctggtgaaccagctgaacaaatttgccgataaggaaaccctgatccagttcctgcgttgtttcctgttagagtccaattcttcctcggtgcgctggcaggcccactgtctgacactgcacatctacagaaattccagcaaatctcaacaggagctcctgctagatctgatgtggtccatctggccagaactcccagcctatggtcgtaaggctgcccagtttgtggacctactaggatatttctccctgaaaactccacaaacagagaagaagttgaaggagtattcacagaaggctgtggagattctgcggactcaaaaccatattcttaccaaccaccccaactcgaacatttataacactttgtctggcttagtggagtttgatggctattacctggagagcgatccctgcctggtgtgtaataacccggaagtaccgttctgttatatcaagctgtcttccattaaagtggacacgcggtacaccaccacccagcaggttgtgaagctcattggcagtcacaccatcagcaaagtgacagtgaaaatcggggatctgaaacggaccaagatggtgcggaccatcaacctgtattataacaaccgaaccgtgcaggccatcgtggagttgaaaaacaagccagctcgctggcacaaagccaagaaggttcagctgacccctggacagacagaggtgaagattgacctgccgttgcccattgtggcctccaatctgatgattgagtttgcagacttctatgaaaactaccaggcctccacagagaccctgcagtgccctcgctgtagtgcctcggtccctgccaacccaggagtctgtggcaactgtggagagaatgtgtaccagtgtcacaaatgcagatccatcaactacgatgaaaaggatcccttcctctgcaatgcctgtggcttctgtaaatatgcccgcttcgacttcatgctctatgccaagccttgctgtgcagtggatcccattgagaatgaagaagaccggaagaaggctgtatccaacatcaatacacttttggacaaagctgatcgagtgtatcatcagctgatgggacaccggccacagctggagaacctgctctgcaaagtgaatgaggcagctccagaaaagccacaggatgactcaggaacagcagggggcatcagctccacttctgccagtgtgaatcgttacatcctgcagttggctcaggagtattgtggagactgcaagaactcttttgatgaactctccaaaatcatccagaaagtctttgcttcgcgcaaagagttgttggaatatgacctacagcagagggaagcagccactaaatcatcccggacctccgtgcagcccacattcactgccagccagtaccgtgccttatccgtcctgggctgtggccacacatcctccaccaagtgctatggctgcgcctcggctgtcacagaacattgtatcacactacttcgggccctggccaccaacccagccttgaggcacatccttgtctcccagggccttatccgggagctctttgattataatcttcgccgaggggctgcggccatgcgggaggaggtccgccagctcatgtgcctcctaactcgagacaacccagaagccacccaacagatgaatgacctgattattggcaaggtctccacagccctgaagggccactgggccaaccccgatctggcaagtagcctgcagtatgaaatgctgctgctgacggattctatctccaaggaggacagctgctgggagctccggttacgctgtgctctcagccttttcctcatggctgtgaacattaagactcctgtggtggttgaaaacattaccctcatgtgcctgaggatcttgcagaagctgataaaaccacctgctcccactagcaagaagaacaaggatgtccccgttgaggccctcaccacggtgaagccatactgcaatgagatccatgcccaggctcaactgtggctcaagagagaccccaaggcatcctatgatgcctggaagaagtgtcttcctatcagagggatagatggcaatgggaaagcccccagcaaatcagagctccgccatctctatttgactgagaagtatgtgtggaggtggaaacagttcctgagtcgtcgggggaagaggacctcccccttggatctcaaactggggcataacaactggctgcgacaagtgcttttcactccagcaacgcaggccgcacggcaggcagcctgtaccattgtggaagctctagccaccattcccagccgcaagcagcaggtcctggacctgcttaccagttacctggatgagctgagcatagctggggagtgtgcagctgagtacctggctctctaccagaagctcatcacttctgcgcactggaaagtctacttggcagctcggggagtcctaccctatgtgggcaacctcatcaccaaggaaatagctcgtctgctggccctggaggaggctaccctgagtaccgatctgcagcagggttatgcccttaaaagtctcacaggccttctctcctcctttgttgaggtggaatccatcaaaagacattttaaaagtcgcttggtgggtactgtgctgaatggatacctgtgcttgcggaagctggtggtgcagaggaccaagctgatcgatgagacgcaggacatgctgctggagatgctggaggacatgaccacaggtacagaatcagaaaccaaggccttcatggctgtgtgcattgagacagccaagcgctacaatctggatgactaccggaccccggtgttcatcttcgagaggctctgcagcatcatttatcctgaggagaatgaagtcactgagttctttgtgaccctggagaaggatccccaacaagaagacttcttacagggcaggatgcctgggaacccgtatagcagcaatgagccaggcatcgggccgctgatgagggatataaagaacaagatttgccaggactgtgacttagtggccctcctggaagatgacagtggcatggagcttctagtgaacaataaaatcattagtttggaccttcctgtggctgaagtttacaagaaagtctggtgtaccacgaatgagggagagcccatgaggattgtttatcgtatgcgggggctgctgggcgatgccacagaggagttcattgagtccctggactctactacagatgaagaagaagatgaagaagaagtgtataaaatggctggtgtgatggcccagtgtgggggcctggaatgcatgcttaacagactcgcagggatcagagatttcaagcagggacgccaccttctaacagtgctactgaaattgttcagttactgcgtgaaggtgaaagtcaaccggcagcaactggtcaaactggaaatgaacaccttgaacgtcatgctggggaccctaaacctggcccttgtagctgaacaagaaagcaaggacagtgggggtgcagctgtggctgagcaggtgcttagcatcatggagatcattctagatgagtccaatgctgagcccctgagtgaggacaagggcaacctcctcctgacaggtgacaaggatcaactggtgatgctcttggaccagatcaacagcacctttgttcgctccaaccccagtgtgctccagggcctgcttcgcatcatcccgtacctttcctttggagaggtggagaaaatgcagatcttggtggagcgattcaaaccatactgcaactttgataaatatgatgaagatcacagtggtgatgataaagtcttcctggactgcttctgtaaaatagctgctggcatcaagaacaacagcaatgggcaccagctgaaggatctgattctccagaaggggatcacccagaatgcacttgactacatgaaaaagcacatccctagcgccaagaatttggatgccgacatctggaaaaagtttttgtctcgcccagccttgccatttatcctaaggctgcttcggggcctggccatccagcaccctggcacccaggttctgattggaactgattccatcccgaacctgcataagctggagcaggtgtccagtgatgagggcattgggaccttggcagagaacctgctggaagccctgcgggaacaccctgacgtaaacaagaagattgacgcagcccgcagggagacccgggcagagaagaagcgcatggccatggcaatgaggcagaaggccctgggcaccctgggcatgacgacaaatgaaaagggccaggtcgtgaccaagacagcactcctgaagcagatggaagagctgatcgaggagcctggcctcacgtgctgcatctgcagggagggatacaagttccagcccacaaaggtcctgggcatttataccttcacgaagcgggtagccttggaggagatggagaataagccccggaaacagcagggctacagcaccgtgtcccacttcaacattgtgcactacgactgccatctggctgccgtcaggttggctcgaggccgggaagagtgggagagtgccgccctgcagaatgccaacaccaagtgcaacgggctccttccggtctggggacctcatgtccctgaatcagcttttgccacttgcttggcaagacacaacacttacctccaggaatgtacaggccagcgggagcccacgtatcagctcaacatccatgacatcaaactgctcttcctgcgcttcgccatggagcagtcgttcagcgcagacactggcgggggcggccgggagagcaacatccacctgatcccgtacatcattcacactgtgctttacgtcctgaacacaacccgagcaacttcccgagaagagaagaacctccaaggctttctggaacagcccaaggagaagtgggtggagagtgcctttgaagtggacgggccctactatttcacagtcttggcccttcacatcctgccccctgagcagtggagagccacacgtgtggaaatcttgcggaggctgttggtgacctcgcaggctcgggcagtggctccaggtggagccaccaggctgacagataaggcagtgaaggactattccgcttaccgttcttcccttctcttttgggccctcgtcgatctcatttacaacatgtttaagaaggtgcctaccagtaacacagagggaggctggtcctgctctctcgctgagtacatccgccacaacgacatgcccatctacgaagctgccgacaaagccctgaaaaccttccaggaggagttcatgccagtggagaccttctcagagttcctcgatgtggccggtcttttatcagaaatcaccgatccagagagcttcctgaaggacctgttgaactcagtcccctgaccaccacacagcagctgcggcggcgaagacgaagctggcttgccttccaccctctgttctccctccttgtgcattaagttccctccgcgggatgctgcattgttaccccgccctcccctctctcatttttcttggtgtggcttggggtttttaggcttcctgttttatctcgtgtgtgtggtgcaccagctatgaggttgtctgtaacccaagccatcaaagggcctgtacatacctaggagccatgagttgtcccggccagcttcatacttgagtgtgcacatcttgagaaataaacaagtgacttaacacacattgaaaagg

SEQ ID NO: 429 - DNA, 16100 bp, Homo sapiens
agattgcgtcacttccgccccctcctgggaggcggcgctgggccggtggcaagcccccggagggagccgcagtagtacgacggaagatggcgacgagcggcggcgaagaggcggcggcagcggctccggcgccggggaccccggcaacgggggcggacacgaccccgggctgggaggtggctgtgcggcccctgctgtccgcgtcctactccgccttcgagatgaaggagttgccgcagctggtggcctcagtcatcgagagtgaatcagaaatcctgcaccatgagaagcagtacgagccattctactcatcttttgttgcactttccacacactatattacaacagtttgcagtctcattccccggaaccaacttcagtcagtggcagcagcctgtaaagttctaattgagttttctctcctgcgtctggagaatccagatgaggcttgtgctgtgtcccagaaacacttgattctcctaatcaagggcctgtgcactggctgtagccgactagatagaactgaaattatcacatttacagcaatgatgaaatccgccaagctgccccaaacagtgaagacactttcagacgtggaagatcagaaagagctggcctcaccagtaagccctgagttgaggcaaaaggaggtacagatgaattttttgaaccagctgacctcagtttttaaccctagaactgtagcatcacaacctatcagtacacagactctggtggaaggagaaaatgatgagcagtcatctacagatcaagcctcagctatcaaaaccaagaatgtgttcatagctcagaacgtggctagtcttcaagagcttggtggctcggagaagctactgcgtgtatgtttgaacctgccatatttcctacgctatatcaatcggttccaagatgcagttttagctaattccttcttcataatgcctgcaacagtagcagatgccactgctgttcgtaatggctttcattcattggtgattgatgtaactatggcattggataccctttctctacctgtgttggaacctctcaatccttctcgtctacaagatgtgacagtcctcagcctaagttgtctgtatgcaggtgtgagtgtggcaacgtgcatggccatcctccatgtgggtagtgcccagcaagtgcggacagggtccacgagctccaaagaagatgactatgaaagtgacgcagctacaattgtccagaaatgtctcgaaatctatgacatgattggacaagcaatcagcagttctcgccgggctggtggtgagcactatcagaatttccaattgctgggtgcttggtgcttgttaaacagccttttcctcatactgaacctcagtcctactgcgttggctgataaggggaaagagaaggacccactggctgccctccgagtcagagacatcctttctcgtactaaagagggagtgggctcccctaaactggggcctggaaaagggcatcagggatttggggtactctcagtaatattggcaaaccatgccatcaaactgctaacgtctctctttcaagacctacaagtggaggcccttcacaagggttgggagacagatggcccccctgcagccttgagcattatggcccagagcacctccatacagaggattcaacggctgattgactctgtcccactgatgaacctgctcttgacgttactttcaacttcctacagaaaggcatgtgtcctgcagcggcagaggaagggctccatgagcagcgatgccagcgcctccaccgactccaatacttactatgaggacgatttcagtagcacggaggaggacagcagccaagacgatgacagtgagcctattttggggcaatggtttgaggagactatttctcccagtaaagagaaagcagcacctccgcctcctcccccacctcctccactggaaagctctcctcgggttaaaagccccagtaagcaggcccctggtgagaagggcaacattctggcgagtcgcaaagatcctgagttgttcttaggtctggcttccaacattttgaacttcatcacctcttccatgctgaactctcggaacaattttatccgaaactatctgagtgtatctctttcagaacaccatatggccaccctagccagtatcatcaaggaggtggacaaagatggactcaagggttcatcagatgaagagtttgctgcagctctctatcacttcaaccactcactggtaacctctgaccttcagtcacctaacctgcagaacacactgttgcagcagctaggagtggctcctttttctgagggcccttggcccttgtacattcaccctcaaagcctctctgtgctttcacgcctcctgctcatctggcaacataaagccagtgctcaaggtgaccctgacgtcccagaatgccttaaagtttgggacaggtttttgtctacaatgaagcagaatgccctgcaaggtgtggtgcccagtgagacagaggatctgaatgtagaacacctgcagatgctcctcctcattttccacaatttcaccgagacaggccggcgggccatattgtcgctttttgtccagatcatccaggagttgagcgtcaacatggatgctcagatgcgcttcgtgccgcttatcttggctcgcctccttctcatctttgattatctgcttcatcagtactccaaagcccctgtgtatctatttgagcaggtacagcataacctgctaagtcctccctttgggtgggcaagtggatcccaggacagcaacagccgccgggcaaccactcctctctatcatggattcaaagaagtagaagaaaactggtctaagcatttctcatcagatgctgtcccacaccccagattctactgtgtcctgtccccagaagcctcagaggatgatttgaaccgacttgattctgtggcatgtgacgtccttttctccaagcttgtcaagtatgatgagctttatgctgcactgacagccctgcttgcagctgggtcccagcttgatacagttaggagaaaggaaaacaagaatgtaacagccttggaggcctgtgcccttcaatattacttcttgatactgtggaggatcctaggaattttaccaccatcaaagacttacattaaccagctatccatgaactcacctgagatgagcgaatgtgacatcttgcacactctgcgatggtcttctcggctccggatcagctcctatgtcaactggataaaggatcaccttatcaaacagggaatgaaggctgagcatgctagctcgcttctagaactggcatccaccactaagtgtagctcagtgaaatatgatgttgaaatagtagaggaatacttcgctcgacagatctcatccttctgtagtatcgactgtaccaccatcttgcagctgcatgaaattcccagtctgcagtccatctacacccttgatgccgcgatctcaaaggtccaggtctctttggatgagcatttttctaagatggctgctgagactgatcctcataagtcgtctgagattaccaagaacctacttccagccacgctgcaactcattgacacctatgcatcgttcaccagagcctatttgctgcaaaactttaatgaagagggaacaactgagaaaccttccaaggagaaactgcaaggctttgctgctgttttggctattggctctagcaggtgcaaggcaaatactctgggtccgacactggttcagaatttgccatcgtcagtgcagactgtgtgtgagtcctggaacaacatcaataccaatgaatttcccaatattggatcctggcgcaatgcctttgccaatgacaccatcccttcagagagttatattagtgcagtgcaggctgcacacctggggactctctgtagccaaagtctgcccctggctgcttccctgaagcataccctcctctcactggtcaggttgactggagatcttattgtttggtcagatgagatgaacccaccacaggtaattcggacactgctacctcttcttttggaatcaagcactgagagtgttgccgagatcagtagcaactccctggaacgcatcttgggccctgctgagtctgatgagttcttggctcgtgtttatgagaagctgatcactggttgttacaacattctggccaatcatgcagatcctaacagtggactggatgaatccatcctggaggaatgtctccagtacttggaaaagcagctggaaagtagccaggctcgtaaagctatggaggagtttttctctgacagtggagaacttgtacagatcatgatggcaacagccaatgagaacctctctgctaaattctgtaaccgagttttgaaattcttcaccaaactcttccagctgactgagaagagccctaacccgagcctgttgcatctctgtggctccctggcacaactggcctgtgtggaacctgtgcgcctgcaggcctggctcacccgcatgactacatcgcccccaaaagattctgatcagctggatgtaattcaggagaaccggcagctgctgcagttactgaccacatacattgttcgggaaaacagccaagttggggaaggtgtgtgtgctgttcttctgggcaccctgactcccatggcaacagagatgctggccaacggtgatgggactggcttccctgaacttatggttgtgatggccactctggccagtgcaggtcaaggtgctggtcaccttcagcttcataatgctgctgtggattggctgagcagatgcaagaaatacctgtcacagaagaatgtagttgaaaaactgaatgccaatgtaatgcatggaaagcatgtgatgatcttggagtgcacatgccatatcatgtcttacttggctgatgtcacgaatgccctgagccagagtaatggtcaaggcccaagtcatctctcagtggatggggaagagcgggccattgaagtagactcagactgggtggaggagttggcggtggaagaggaagattcccaggctgaggattcagatgaagattctctttgcaataaactctgcacttttacgatcacacagaaagaattcatgaaccagcattggtaccactgtcacacctgtaaaatggtggatggcgtgggtgtctgcacagtgtgtgctaaggtgtgccacaaggatcatgagatttcctatgccaagtatggatccttcttctgtgactgtggagccaaggaagatggcagctgtttggctctggtgaagagaactcctagcagtggcatgagctctaccatgaaggagtcggcatttcagagtgaacccaggatttcagagagtctagtgcgtcatgccagcacctcctcgccagctgacaaagccaaggttaccatcagtgatggaaaggttgctgacgaagagaagcccaagaagagcagcctctgccgcacagtagagggctgccgggaggaattacagaaccaggccaatttctccttcgctcctctcgtgttagacatgcttaatttccttatggatgccattcagaccaacttccagcaagcttcagccgtcgggagcagcagccgtgctcagcaagccctcagtgagctacacactgtggagaaggcagtggagatgacagaccagctgatggttcccaccttagggtcccaggaaggtgcctttgagaatgtgcggatgaattacagtggagaccagggccagaccatccggcagctgatcagtgctcatgtgctcaggcgggtggctatgtgtgtgctctcctctccccatgggcgccgccaacatttggctgtcagccatgagaagggcaagatcaccgttctgcagctctctgcactcctgaagcaagcagattccagcaaaaggaagttaactctgacccgcttggcttctgccccagttccttttactgtgttgagcctcacaggaaatccctgcaaggaagactacttggcggtttgtgggctaaaggactgtcatgtgctcacctttagtagctcaggctctgtttcggatcacttggttttgcaccctcagttggcaacggggaacttcatcatcaaagccgtgtggttacctggttcacagaccgagttagcaattgtcaccgcagactttgttaagatttatgacctgtgtgttgatgccttgagtccaaccttctattttctcctgccaagctcaaagataagagatgttaccttccttttcaatgaggagggaaagaacatcattgttataatgtcttcggctgggtacatctatactcagcttatggaagaggccagcagtgcccagcagggacccttctatgtcactaatgtgttggaaatcaatcatgaggacctgaagcaggacagtaacagccaggtggcgggcggtggtgtgtccgtgtactactcccacgtgttgcagatgttgttcttcagctattgtcaaggcaaatcattcgcagccaccatcagcaggacaaccctggaggtgttgcaactcttccccatcaacatcaaaagttccaatggtggcagtaagacttctcctgctctttgccagtggtctgaggtgatgaaccaccctggcttggtgtgctgtgtccagcaaactacaggggtgccgctggtagttatggtgaaaccagacacttttcttatccaggagattaagactcttcctgctaaagcgaagatccaagacatggttgctattaggcacacggcctgcaatgagcagcagcggacaacaatgattctgctgtgtgaggatggcagcctgcgcatttacatggccaacgtggagaacacctcctactggctgcagccatccctgcagcccagcagtgtcatcagcatcatgaagcctgttcgaaagcgcaaaacagctacaatcacaacccgcacgtctagccaggtgactttccccattgacttttttgaacacaaccagcagctgacagatgtggagtttggtggtaacgacctcctacaggtctataatgcacaacagataaaacaccggctgaattccactggcatgtatgtggccaacaccaagcccggaggcttcaccattgagattagtaacaacaatagcactatggtgatgacaggcatgcggatccagattgggactcaagcaatagaacgggccccgtcatatatcgagatcttcggcagaactatgcagctcaacctgagtcgctcacgctggtttgacttccccttcaccagagaagaagccctgcaggctgataagaagctgaacctcttcattggggcctcggtggatccagcaggtgtcaccatgatagatgctgtaaaaatttatggcaagactaaggagcagtttggctggcctgatgagcccccagaagaattcccttctgcctctgtcagcaacatctgcccttcaaatctgaaccagagcaacggcactggagatagcgactcagctgcccccactacgaccagtggaactgtcctggagagttctgaaactgagtccctaaccaagctggaccggctggttgtgagttctttagaagccctggaaagctgctttgccgttggcccaatcatcgagaaggagagaaacaagaatgctgctcaggagctggccactttgctgttgtccctgccagcacctgccagtgtccagcagcagtccaagagccttctggccagcctgcacaccagccgctcggcctaccacagccacaaggatcaggccttgctgagcaaagctgtgcagtgtctcaacacatctagcaaagagggcaaggatttggaccctgaggtgttccagaggctagtgatcacagctcgctccattgccatcatgcgccccaacaaccttgtccactttacggagtcaaagctgccccagatggaaacagactgtttttttcctagatgtgcctgctggagtctagggatagttggcatattgattggggccccacttgaaactccctccccagaaggaatggatgaagggaaggaaccgcagaagcagttggaaggagattgctgtagtttcatcacccagcttgtgaaccacttctggaaactccatgcatccaaacccaagaatgccttcttggcacctgcctgccttccaggactaactcatattgaagctactgtcaatgctctggtggacatcatccatggctactgtacctgtgagctggattgtattaacacagcatccaagatctacatgcagatgctcttgtgtcctgatcctgctgtgagcttctcttgtaaacaagctctaattcgagtcctaaggcccaggaacaaacggagacatgtgactttaccctcttcccctcgaagcaacactccaatgggagacaaggatgatgatgacgatgatgatgcagatgagaaaatgcagtcatcagggatcccgaatggtggtcacatccgtcaggaaagccaggaacagagtgaggtggaccatggagattttgagatggtgtctgagtcgatggtcctggagacagctgaaaatgtcaacaatggcaacccctctcccctggaggccctgctggcaggcgcagagggcttcccccccatgctggacatcccacctgatgcagatgacgagaccatggttgaactagccattgccctgagcctgcagcaggaccaacaaggcagcagcagcagtgccctgggcctgcagagcctgggactgtccggccaggcacccagctcttcctctctggacgcaggaaccctctctgacaccacagcatcagctctcgttactctctcagctccagcctcagacgacgagggcagtacagcagcgacagatggttctacccttcggacctctcctgctgaccacggtggtagtgtgggctcggagagcgggggcagtgcagtggactcagtggctggcgagcacagtgtatctggccggagcagtgcttatggcgatgctacagctgaggggcatccggctggaccaggaagtgtcagctcaagcactggagccatcagcaccaccactgggcaccaggagggagatggctccgagggagaaggagaaggagaaactgaaggagatgtccacactagcaacaggctgcacatggtccgtctaatgctgttggagagattactgcagaccctgcctcaattacgaaacgttggcggtgtccgggccatcccatacatgcaggtcattctaatgctcactacagatctggatggagaagatgagaaagacaagggggccctagacaacctgctctcccagcttattgctgagttgggtatggataaaaaggatgtctccaagaagaatgagcgcagcgccctgaatgaagtccatctggtagtaatgagactcctgagtgtcttcatgtcccgcaccaaatctggatccaagtcttccatatgtgagtcatcttccctcatctccagtgccacagcagcagctctactgagctctggggctgtggactactgcctgcacgtgctcaaatcactgctggaatattggaagagccaacagaatgacgaggagcctgtggctaccagccagttgctgaaaccacatactacctcctccccacctgacatgagcccattctttctccgccagtatgtgaagggtcatgctgctgatgtgtttgaggcctatactcagcttctaacagaaatggtactgaggcttccttaccaaatcaaaaagattactgacaccaattctcgaatcccacctcctgtctttgaccactcgtggttttactttctctccgagtacctcatgatccagcagactccatttgtgcgccgtcaagtccgcaaacttctgctcttcatctgtggatccaaagagaagtaccgccagctccgggatttgcacaccctggactctcacgtgcgtgggatcaagaagctgctagaagagcaggggatattcctccgggcaagtgtggttacagccagctcaggctccgccttgcaatatgacacactcatcagcctgatggagcacctgaaagcctgtgcagagattgccgcccagcgaaccatcaactggcagaaattctgcatcaaagatgactccgtcctgtacttcctcctccaagtcagtttccttgtggatgagggcgtgtccccagtgctgctgcaactgctctcctgtgctctgtgcggcagcaaggtgctcgctgcactggcagcctcttcgggatcctccagtgcttcttcctcctcagcccctgtggctgccagttctggacaagccacaacacagtccaagtcttccactaaaaagagcaagaaagaagaaaaagaaaaggagaaagatggtgagacctctggcagccaggaggaccagctgtgcacagctctggtgaaccagctgaacaaatttgccgataaggaaaccctgatccagttcctgcgttgtttcctgttagagtccaattcttcctcggtgcgctggcaggcccactgtctgacactgcacatctacagaaattccagcaaatctcaacaggagctcctgctagatctgatgtggtccatctggccagaactcccagcctatggtcgtaaggctgcccagtttgtggacctactaggatatttctccctgaaaactccacaaacagagaagaagttgaaggagtattcacagaaggctgtggagattctgcggactcaaaaccatattcttaccaaccaccccaactcgaacatttataacactttgtctggcttagtggagtttgatggctattacctggagagcgatccctgcctggtgtgtaataacccggaagtaccgttctgttatatcaagctgtcttccattaaagtggacacgcggtacaccaccacccagcaggttgtgaagctcattggcagtcacaccatcagcaaagtgacagtgaaaatcggggatctgaaacggaccaagatggtgcggaccatcaacctgtattataacaaccgaaccgtgcaggccatcgtggagttgaaaaacaagccagctcgctggcacaaagccaagaaggttcagctgacccctggacagacagaggtgaagattgacctgccgttgcccattgtggcctccaatctgatgattgagtttgcagacttctatgaaaactaccaggcctccacagagaccctgcagtgccctcgctgtagtgcctcggtccctgccaacccaggagtctgtggcaactgtggagagaatgtgtaccagtgtcacaaatgcagatccatcaactacgatgaaaaggatcccttcctctgcaatgcctgtggcttctgtaaatatgcccgcttcgacttcatgctctatgccaagccttgctgtgcagtggatcccattgagaatgaagaagaccggaagaaggctgtatccaacatcaatacacttttggacaaagctgatcgagtgtatcatcagctgatgggacaccggccacagctggagaacctgctctgcaaagtgaatgaggcagctccagaaaagccacaggatgactcaggaacagcagggggcatcagctccacttctgccagtgtgaatcgttacatcctgcagttggctcaggagtattgtggagactgcaagaactcttttgatgaactctccaaaatcatccagaaagtctttgcttcgcgcaaagagttgttggaatatgacctacagcagagggaagcagccactaaatcatcccggacctccgtgcagcccacattcactgccagccagtaccgtgccttatccgtcctgggctgtggccacacatcctccaccaagtgctatggctgcgcctcggctgtcacagaacattgtatcacactacttcgggccctggccaccaacccagccttgaggcacatccttgtctcccagggccttatccgggagctctttgattataatcttcgccgaggggctgcggccatgcgggaggaggtccgccagctcatgtgcctcctaactcgagacaacccagaagccacccaacagatgaatgacctgattattggcaaggtctccacagccctgaagggccactgggccaaccccgatctggcaagtagcctgcagtatgaaatgctgctgctgacggattctatctccaaggaggacagctgctgggagctccggttacgctgtgctctcagccttttcctcatggctgtgaacattaagactcctgtggtggttgaaaacattaccctcatgtgcctgaggatcttgcagaagctgataaaaccacctgctcccactagcaagaagaacaaggatgtccccgttgaggccctcaccacggtgaagccatactgcaatgagatccatgcccaggctcaactgtggctcaagagagaccccaaggcatcctatgatgcctggaagaagtgtcttcctatcagagggatagatggcaatgggaaagcccccagcaaatcagagctccgccatctctatttgactgagaagtatgtgtggaggtggaaacagttcctgagtcgtcgggggaagaggacctcccccttggatctcaaactggggcataacaactggctgcgacaagtgcttttcactccagcaacgcaggccgcacggcaggcagcctgtaccattgtggaagctctagccaccattcccagccgcaagcagcaggtcctggacctgcttaccagttacctggatgagctgagcatagctggggagtgtgcagctgagtacctggctctctaccagaagctcatcacttctgcgcactggaaagtctacttggcagctcggggagtcctaccctatgtgggcaacctcatcaccaaggaaatagctcgtctgctggccctggaggaggctaccctgagtaccgatctgcagcagggttatgcccttaaaagtctcacaggccttctctcctcctttgttgaggtggaatccatcaaaagacattttaaaagtcgcttggtgggtactgtgctgaatggatacctgtgcttgcggaagctggtggtgcagaggaccaagctgatcgatgagacgcaggacatgctgctggagatgctggaggacatgaccacaggtacagaatcagaaaccaaggccttcatggctgtgtgcattgagacagccaagcgctacaatctggatgactaccggaccccggtgttcatcttcgagaggctctgcagcatcatttatcctgaggagaatgaagtcactgagttctttgtgaccctggagaaggatccccaacaagaagacttcttacagggcaggatgcctgggaacccgtatagcagcaatgagccaggcatcgggccgctgatgagggatataaagaacaagatttgccaggactgtgacttagtggccctcctggaagatgacagtggcatggagcttctagtgaacaataaaatcattagtttggaccttcctgtggctgaagtttacaagaaagtctggtgtaccacgaatgagggagagcccatgaggattgtttatcgtatgcgggggctgctgggcgatgccacagaggagttcattgagtccctggactctactacagatgaagaagaagatgaagaagaagtgtataaaatggctggtgtgatggcccagtgtgggggcctggaatgcatgcttaacagactcgcagggatcagagatttcaagcagggacgccaccttctaacagtgctactgaaattgttcagttactgcgtgaaggtgaaagtcaaccggcagcaactggtcaaactggaaatgaacaccttgaacgtcatgctggggaccctaaacctggcccttgtagctgaacaagaaagcaaggacagtgggggtgcagctgtggctgagcaggtgcttagcatcatggagatcattctagatgagtccaatgctgagcccctgagtgaggacaagggcaacctcctcctgacaggtgacaaggatcaactggtgatgctcttggaccagatcaacagcacctttgttcgctccaaccccagtgtgctccagggcctgcttcgcatcatcccgtacctttcctttggagaggtggagaaaatgcagatcttggtggagcgattcaaaccatactgcaactttgataaatatgatgaagatcacagtggtgatgataaagtcttcctggactgcttctgtaaaatagctgctggcatcaagaacaacagcaatgggcaccagctgaaggatctgattctccagaaggggatcacccagaatgcacttgactacatgaaaaagcacatccctagcgccaagaatttggatgccgacatctggaaaaagtttttgtctcgcccagccttgccatttatcctaaggctgcttcggggcctggccatccagcaccctggcacccaggttctgattggaactgattccatcccgaacctgcataagctggagcaggtgtccagtgatgagggcattgggaccttggcagagaacctgctggaagccctgcgggaacaccctgacgtaaacaagaagattgacgcagcccgcagggagacccgggcagagaagaagcgcatggccatggcaatgaggcagaaggccctgggcaccctgggcatgacgacaaatgaaaagggccaggtcgtgaccaagacagcactcctgaagcagatggaagagctgatcgaggagcctggcctcacgtgctgcatctgcagggagggatacaagttccagcccacaaaggtcctgggcatttataccttcacgaagcgggtagccttggaggagatggagaataagccccggaaacagcagggctacagcaccgtgtcccacttcaacattgtgcactacgactgccatctggctgccgtcaggttggctcgaggccgggaagagtgggagagtgccgccctgcagaatgccaacaccaagtgcaacgggctccttccggtctggggacctcatgtccctgaatcagcttttgccacttgcttggcaagacacaacacttacctccaggaatgtacaggccagcgggagcccacgtatcagctcaacatccatgacatcaaactgctcttcctgcgcttcgccatggagcagtcgttcagcgcagacactggcgggggcggccgggagagcaacatccacctgatcccgtacatcattcacactgtgctttacgtcctgaacacaacccgagcaacttcccgagaagagaagaacctccaaggctttctggaacagcccaaggagaagtgggtggagagtgcctttgaagtggacgggccctactatttcacagtcttggcccttcacatcctgccccctgagcagtggagagccacacgtgtggaaatcttgcggaggctgttggtgacctcgcaggctcgggcagtggctccaggtggagccaccaggctgacagataaggcagtgaaggactattccgcttaccgttcttcccttctcttttgggccctcgtcgatctcatttacaacatgtttaagaaggtgcctaccagtaacacagagggaggctggtcctgctctctcgctgagtacatccgccacaacgacatgcccatctacgaagctgccgacaaagccctgaaaaccttccaggaggagttcatgccagtggagaccttctcagagttcctcgatgtggccggtcttttatcagaaatcaccgatccagagagcttcctgaaggacctgttgaactcagtcccctgaccaccacacagcagctgcggcggcgaagacgaagctggcttgccttccaccctctgttctccctccttgtgcattaagttccctccgcgggatgctgcattgttaccccgccctcccctctctcatttttcttggtgtggcttggggtttttaggcttcctgttttatctcgtgtgtgtggtgcaccagctatgaggttgtctgtaacccaagccatcaaagggcctgtacatacctaggagccatgagttgtcccggccagcttcatacttgagtgtgcacatcttgagaaataaacaagtgacttaacacacattgaaaagg

SEQ ID NO: 430 - DNA, 16097 bp, Homo sapiens
agattgcgtcacttccgccccctcctgggaggcggcgctgggccggtggcaagcccccggagggagccgcagtagtacgacggaagatggcgacgagcggcggcgaagaggcggcggcagcggctccggcgccggggaccccggcaacgggggcggacacgaccccgggctgggaggtggctgtgcggcccctgctgtccgcgtcctactccgccttcgagatgaaggagttgccgcagctggtggcctcagtcatcgagagtgaatcagaaatcctgcaccatgagaagcagtacgagccattctactcatcttttgttgcactttccacacactatattacaacagtttgcagtctcattccccggaaccaacttcagtcagtggcagcagcctgtaaagttctaattgagttttctctcctgcgtctggagaatccagatgaggcttgtgctgtgtcccagaaacacttgattctcctaatcaagggcctgtgcactggctgtagccgactagatagaactgaaattatcacatttacagcaatgatgaaatccgccaagctgccccaaacagtgaagacactttcagacgtggaagatcagaaagagctggcctcaccagtaagccctgagttgaggcaaaaggaggtacagatgaattttttgaaccagctgacctcagtttttaaccctagaactgtagcatcacaacctatcagtacacagactctggtggaaggagaaaatgatgagcagtcatctacagatcaagcctcagctatcaaaaccaagaatgtgttcatagctcagaacgtggctagtcttcaagagcttggtggctcggagaagctactgcgtgtatgtttgaacctgccatatttcctacgctatatcaatcggttccaagatgcagttttagctaattccttcttcataatgcctgcaacagtagcagatgccactgctgttcgtaatggctttcattcattggtgattgatgtaactatggcattggataccctttctctacctgtgttggaacctctcaatccttctcgtctacaagatgtgacagtcctcagcctaagttgtctgtatgcaggtgtgagtgtggcaacgtgcatggccatcctccatgtgggtagtgcccagcaagtgcggacagggtccacgagctccaaagaagatgactatgaaagtgacgcagctacaattgtccagaaatgtctcgaaatctatgacatgattggacaagcaatcagcagttctcgccgggctggtggtgagcactatcagaatttccaattgctgggtgcttggtgcttgttaaacagccttttcctcatactgaacctcagtcctactgcgttggctgataaggggaaagagaaggacccactggctgccctccgagtcagagacatcctttctcgtactaaagagggagtgggctcccctaaactggggcctggaaaagggcatcagggatttggggtactctcagtaatattggcaaaccatgccatcaaactgctaacgtctctctttcaagacctacaagtggaggcccttcacaagggttgggagacagatggcccccctgcagccttgagcattatggcccagagcacctccatacagaggattcaacggctgattgactctgtcccactgatgaacctgctcttgacgttactttcaacttcctacagaaaggcatgtgtcctgcagcggcagaggaagggctccatgagcagcgatgccagcgcctccaccgactccaatacttactatgaggacgatttcagtagcacggaggaggacagcagccaagacgatgacagtgagcctattttggggcaatggtttgaggagactatttctcccagtaaagagaaagcagcacctccgcctcctcccccacctcctccactggaaagctctcctcgggttaaaagccccagtaagcaggcccctggtgagaagggcaacattctggcgagtcgcaaagatcctgagttgttcttaggtctggcttccaacattttgaacttcatcacctcttccatgctgaactctcggaacaattttatccgaaactatctgagtgtatctctttcagaacaccatatggccaccctagccagtatcatcaaggaggtggacaaagatggactcaagggttcatcagatgaagagtttgctgcagctctctatcacttcaaccactcactggtaacctctgaccttcagtcacctaacctgcagaacacactgttgcagcagctaggagtggctcctttttctgagggcccttggcccttgtacattcaccctcaaagcctctctgtgctttcacgcctcctgctcatctggcaacataaagccagtgctcaaggtgaccctgacgtcccagaatgccttaaagtttgggacaggtttttgtctacaatgaagcagaatgccctgcaaggtgtggtgcccagtgagacagaggatctgaatgtagaacacctgcagatgctcctcctcattttccacaatttcaccgagacaggccggcgggccatattgtcgctttttgtccagatcatccaggagttgagcgtcaacatggatgctcagatgcgcttcgtgccgcttatcttggctcgcctccttctcatctttgattatctgcttcatcagtactccaaagcccctgtgtatctatttgagcaggtacagcataacctgctaagtcctccctttgggtgggcaagtggatcccaggacagcaacagccgccgggcaaccactcctctctatcatggattcaaagaagtagaagaaaactggtctaagcatttctcatcagatgctgtcccacaccccagattctactgtgtcctgtccccagaagcctcagaggatgatttgaaccgacttgattctgtggcatgtgacgtccttttctccaagcttgtcaagtatgatgagctttatgctgcactgacagccctgcttgcagctgggtcccagcttgatacagttaggagaaaggaaaacaagaatgtaacagccttggaggcctgtgcccttcaatattacttcttgatactgtggaggatcctaggaattttaccaccatcaaagacttacattaaccagctatccatgaactcacctgagatgagcgaatgtgacatcttgcacactctgcgatggtcttctcggctccggatcagctcctatgtcaactggataaaggatcaccttatcaaacagggaatgaaggctgagcatgctagctcgcttctagaactggcatccaccactaagtgtagctcagtgaaatatgatgttgaaatagtagaggaatacttcgctcgacagatctcatccttctgtagtatcgactgtaccaccatcttgcagctgcatgaaattcccagtctgcagtccatctacacccttgatgccgcgatctcaaaggtccaggtctctttggatgagcatttttctaagatggctgctgagactgatcctcataagtcgtctgagattaccaagaacctacttccagccacgctgcaactcattgacacctatgcatcgttcaccagagcctatttgctgcaaaactttaatgaagagggaacaactgagaaaccttccaaggagaaactgcaaggctttgctgctgttttggctattggctctagcaggtgcaaggcaaatactctgggtccgacactggttcagaatttgccatcgtcagtgcagactgtgtgtgagtcctggaacaacatcaataccaatgaatttcccaatattggatcctggcgcaatgcctttgccaatgacaccatcccttcagagagttatattagtgcagtgcaggctgcacacctggggactctctgtagccaaagtctgcccctggctgcttccctgaagcataccctcctctcactggtcaggttgactggagatcttattgtttggtcagatgagatgaacccaccacaggtaattcggacactgctacctcttcttttggaatcaagcactgagagtgttgccgagatcagtagcaactccctggaacgcatcttgggccctgctgagtctgatgagttcttggctcgtgtttatgagaagctgatcactggttgttacaacattctggccaatcatgcagatcctaacagtggactggatgaatccatcctggaggaatgtctccagtacttggaaaagcagctggaaagtagccaggctcgtaaagctatggaggagtttttctctgacagtggagaacttgtacagatcatgatggcaacagccaatgagaacctctctgctaaattctgtaaccgagttttgaaattcttcaccaaactcttccagctgactgagaagagccctaacccgagcctgttgcatctctgtggctccctggcacaactggcctgtgtggaacctgtgcgcctgcaggcctggctcacccgcatgactacatcgcccccaaaagattctgatcagctggatgtaattcaggagaaccggcagctgctgcagttactgaccacatacattgttcgggaaaacagccaagttggggaaggtgtgtgtgctgttcttctgggcaccctgactcccatggcaacagagatgctggccaacggtgatgggactggcttccctgaacttatggttgtgatggccactctggccagtgcaggtcaaggtgctggtcaccttcagcttcataatgctgctgtggattggctgagcagatgcaagaaatacctgtcacagaagaatgtagttgaaaaactgaatgccaatgtaatgcatggaaagcatgtgatgatcttggagtgcacatgccatatcatgtcttacttggctgatgtcacgaatgccctgagccagagtaatggtcaaggcccaagtcatctctcagtggatggggaagagcgggccattgaagtagactcagactgggtggaggagttggcggtggaagaggaagattcccaggctgaggattcagatgaagattctctttgcaataaactctgcacttttacgatcacacagaaagaattcatgaaccagcattggtaccactgtcacacctgtaaaatggtggatggcgtgggtgtctgcacagtgtgtgctaaggtgtgccacaaggatcatgagatttcctatgccaagtatggatccttcttctgtgactgtggagccaaggaagatggcagctgtttggctctggtgaagagaactcctagcagtggcatgagctctaccatgaaggagtcggcatttcagagtgaacccaggatttcagagagtctagtgcgtcatgccagcacctcctcgccagctgacaaagccaaggttaccatcagtgatggaaaggttgctgacgaagagaagcccaagaagagcagcctctgccgcacagtagagggctgccgggaggaattacagaaccaggccaatttctccttcgctcctctcgtgttagacatgcttaatttccttatggatgccattcagaccaacttccagcaagcttcagccgtcgggagcagcagccgtgctcagcaagccctcagtgagctacacactgtggagaaggcagtggagatgacagaccagctgatggttcccaccttagggtcccaggaaggtgcctttgagaatgtgcggatgaattacagtggagaccagggccagaccatccggcagctgatcagtgctcatgtgctcaggcgggtggctatgtgtgtgctctcctctccccatgggcgccgccaacatttggctgtcagccatgagaagggcaagatcaccgttctgcagctctctgcactcctgaagcaagcagattccagcaaaaggaagttaactctgacccgcttggcttctgccccagttccttttactgtgttgagcctcacaggaaatccctgcaaggaagactacttggcggtttgtgggctaaaggactgtcatgtgctcacctttagtagctcaggctctgtttcggatcacttggttttgcaccctcagttggcaacggggaacttcatcatcaaagccgtgtggttacctggttcacagaccgagttagcaattgtcaccgcagactttgttaagatttatgacctgtgtgttgatgccttgagtccaaccttctattttctcctgccaagctcaaagataagagatgttaccttccttttcaatgaggagggaaagaacatcattgttataatgtcttcggctgggtacatctatactcagcttatggaagaggccagcagtgcccagcagggacccttctatgtcactaatgtgttggaaatcaatcatgaggacctgaaggacagtaacagccaggtggcgggcggtggtgtgtccgtgtactactcccacgtgttgcagatgttgttcttcagctattgtcaaggcaaatcattcgcagccaccatcagcaggacaaccctggaggtgttgcaactcttccccatcaacatcaaaagttccaatggtggcagtaagacttctcctgctctttgccagtggtctgaggtgatgaaccaccctggcttggtgtgctgtgtccagcaaactacaggggtgccgctggtagttatggtgaaaccagacacttttcttatccaggagattaagactcttcctgctaaagcgaagatccaagacatggttgctattaggcacacggcctgcaatgagcagcagcggacaacaatgattctgctgtgtgaggatggcagcctgcgcatttacatggccaacgtggagaacacctcctactggctgcagccatccctgcagcccagcagtgtcatcagcatcatgaagcctgttcgaaagcgcaaaacagctacaatcacaacccgcacgtctagccaggtgactttccccattgacttttttgaacacaaccagcagctgacagatgtggagtttggtggtaacgacctcctacaggtctataatgcacaacagataaaacaccggctgaattccactggcatgtatgtggccaacaccaagcccggaggcttcaccattgagattagtaacaacaatagcactatggtgatgacaggcatgcggatccagattgggactcaagcaatagaacgggccccgtcatatatcgagatcttcggcagaactatgcagctcaacctgagtcgctcacgctggtttgacttccccttcaccagagaagaagccctgcaggctgataagaagctgaacctcttcattggggcctcggtggatccagcaggtgtcaccatgatagatgctgtaaaaatttatggcaagactaaggagcagtttggctggcctgatgagcccccagaagaattcccttctgcctctgtcagcaacatctgcccttcaaatctgaaccagagcaacggcactggagatagcgactcagctgcccccactacgaccagtggaactgtcctggagagttctgaaactgagtccctaaccaagctggaccggctggttgtgagttctttagaagccctggaaagctgctttgccgttggcccaatcatcgagaaggagagaaacaagaatgctgctcaggagctggccactttgctgttgtccctgccagcacctgccagtgtccagcagcagtccaagagccttctggccagcctgcacaccagccgctcggcctaccacagccacaaggatcaggccttgctgagcaaagctgtgcagtgtctcaacacatctagcaaagagggcaaggatttggaccctgaggtgttccagaggctagtgatcacagctcgctccattgccatcatgcgccccaacaaccttgtccactttacggagtcaaagctgccccagatggaaacagactgtttttttcctagatgtgcctgctggagtctagggatagttggcatattgattggggccccacttgaaactccctccccagaaggaatggatgaagggaaggaaccgcagaagcagttggaaggagattgctgtagtttcatcacccagcttgtgaaccacttctggaaactccatgcatccaaacccaagaatgccttcttggcacctgcctgccttccaggactaactcatattgaagctactgtcaatgctctggtggacatcatccatggctactgtacctgtgagctggattgtattaacacagcatccaagatctacatgcagatgctcttgtgtcctgatcctgctgtgagcttctcttgtaaacaagctctaattcgagtcctaaggcccaggaacaaacggagacatgtgactttaccctcttcccctcgaagcaacactccaatgggagacaaggatgatgatgacgatgatgatgcagatgagaaaatgcagtcatcagggatcccgaatggtggtcacatccgtcaggaaagccaggaacagagtgaggtggaccatggagattttgagatggtgtctgagtcgatggtcctggagacagctgaaaatgtcaacaatggcaacccctctcccctggaggccctgctggcaggcgcagagggcttcccccccatgctggacatcccacctgatgcagatgacgagaccatggttgaactagccattgccctgagcctgcagcaggaccaacaaggcagcagcagcagtgccctgggcctgcagagcctgggactgtccggccaggcacccagctcttcctctctggacgcaggaaccctctctgacaccacagcatcagctctcgttactctctcagctccagcctcagacgacgagggcagtacagcagcgacagatggttctacccttcggacctctcctgctgaccacggtggtagtgtgggctcggagagcgggggcagtgcagtggactcagtggctggcgagcacagtgtatctggccggagcagtgcttatggcgatgctacagctgaggggcatccggctggaccaggaagtgtcagctcaagcactggagccatcagcaccaccactgggcaccaggagggagatggctccgagggagaaggagaaggagaaactgaaggagatgtccacactagcaacaggctgcacatggtccgtctaatgctgttggagagattactgcagaccctgcctcaattacgaaacgttggcggtgtccgggccatcccatacatgcaggtcattctaatgctcactacagatctggatggagaagatgagaaagacaagggggccctagacaacctgctctcccagcttattgctgagttgggtatggataaaaaggatgtctccaagaagaatgagcgcagcgccctgaatgaagtccatctggtagtaatgagactcctgagtgtcttcatgtcccgcaccaaatctggatccaagtcttccatatgtgagtcatcttccctcatctccagtgccacagcagcagctctactgagctctggggctgtggactactgcctgcacgtgctcaaatcactgctggaatattggaagagccaacagaatgacgaggagcctgtggctaccagccagttgctgaaaccacatactacctcctccccacctgacatgagcccattctttctccgccagtatgtgaagggtcatgctgctgatgtgtttgaggcctatactcagcttctaacagaaatggtactgaggcttccttaccaaatcaaaaagattactgacaccaattctcgaatcccacctcctgtctttgaccactcgtggttttactttctctccgagtacctcatgatccagcagactccatttgtgcgccgtcaagtccgcaaacttctgctcttcatctgtggatccaaagagaagtaccgccagctccgggatttgcacaccctggactctcacgtgcgtgggatcaagaagctgctagaagagcaggggatattcctccgggcaagtgtggttacagccagctcaggctccgccttgcaatatgacacactcatcagcctgatggagcacctgaaagcctgtgcagagattgccgcccagcgaaccatcaactggcagaaattctgcatcaaagatgactccgtcctgtacttcctcctccaagtcagtttccttgtggatgagggcgtgtccccagtgctgctgcaactgctctcctgtgctctgtgcggcagcaaggtgctcgctgcactggcagcctcttcgggatcctccagtgcttcttcctcctcagcccctgtggctgccagttctggacaagccacaacacagtccaagtcttccactaaaaagagcaagaaagaagaaaaagaaaaggagaaagatggtgagacctctggcagccaggaggaccagctgtgcacagctctggtgaaccagctgaacaaatttgccgataaggaaaccctgatccagttcctgcgttgtttcctgttagagtccaattcttcctcggtgcgctggcaggcccactgtctgacactgcacatctacagaaattccagcaaatctcaacaggagctcctgctagatctgatgtggtccatctggccagaactcccagcctatggtcgtaaggctgcccagtttgtggacctactaggatatttctccctgaaaactccacaaacagagaagaagttgaaggagtattcacagaaggctgtggagattctgcggactcaaaaccatattcttaccaaccaccccaactcgaacatttataacactttgtctggcttagtggagtttgatggctattacctggagagcgatccctgcctggtgtgtaataacccggaagtaccgttctgttatatcaagctgtcttccattaaagtggacacgcggtacaccaccacccagcaggttgtgaagctcattggcagtcacaccatcagcaaagtgacagtgaaaatcggggatctgaaacggaccaagatggtgcggaccatcaacctgtattataacaaccgaaccgtgcaggccatcgtggagttgaaaaacaagccagctcgctggcacaaagccaagaaggttcagctgacccctggacagacagaggtgaagattgacctgccgttgcccattgtggcctccaatctgatgattgagtttgcagacttctatgaaaactaccaggcctccacagagaccctgcagtgccctcgctgtagtgcctcggtccctgccaacccaggagtctgtggcaactgtggagagaatgtgtaccagtgtcacaaatgcagatccatcaactacgatgaaaaggatcccttcctctgcaatgcctgtggcttctgtaaatatgcccgcttcgacttcatgctctatgccaagccttgctgtgcagtggatcccattgagaatgaagaagaccggaagaaggctgtatccaacatcaatacacttttggacaaagctgatcgagtgtatcatcagctgatgggacaccggccacagctggagaacctgctctgcaaagtgaatgaggcagctccagaaaagccacaggatgactcaggaacagcagggggcatcagctccacttctgccagtgtgaatcgttacatcctgcagttggctcaggagtattgtggagactgcaagaactcttttgatgaactctccaaaatcatccagaaagtctttgcttcgcgcaaagagttgttggaatatgacctacagcagagggaagcagccactaaatcatcccggacctccgtgcagcccacattcactgccagccagtaccgtgccttatccgtcctgggctgtggccacacatcctccaccaagtgctatggctgcgcctcggctgtcacagaacattgtatcacactacttcgggccctggccaccaacccagccttgaggcacatccttgtctcccagggccttatccgggagctctttgattataatcttcgccgaggggctgcggccatgcgggaggaggtccgccagctcatgtgcctcctaactcgagacaacccagaagccacccaacagatgaatgacctgattattggcaaggtctccacagccctgaagggccactgggccaaccccgatctggcaagtagcctgcagtatgaaatgctgctgctgacggattctatctccaaggaggacagctgctgggagctccggttacgctgtgctctcagccttttcctcatggctgtgaacattaagactcctgtggtggttgaaaacattaccctcatgtgcctgaggatcttgcagaagctgataaaaccacctgctcccactagcaagaagaacaaggatgtccccgttgaggccctcaccacggtgaagccatactgcaatgagatccatgcccaggctcaactgtggctcaagagagaccccaaggcatcctatgatgcctggaagaagtgtcttcctatcagagggatagatggcaatgggaaagcccccagcaaatcagagctccgccatctctatttgactgagaagtatgtgtggaggtggaaacagttcctgagtcgtcgggggaagaggacctcccccttggatctcaaactggggcataacaactggctgcgacaagtgcttttcactccagcaacgcaggccgcacggcaggcagcctgtaccattgtggaagctctagccaccattcccagccgcaagcagcaggtcctggacctgcttaccagttacctggatgagctgagcatagctggggagtgtgcagctgagtacctggctctctaccagaagctcatcacttctgcgcactggaaagtctacttggcagctcggggagtcctaccctatgtgggcaacctcatcaccaaggaaatagctcgtctgctggccctggaggaggctaccctgagtaccgatctgcagcagggttatgcccttaaaagtctcacaggccttctctcctcctttgttgaggtggaatccatcaaaagacattttaaaagtcgcttggtgggtactgtgctgaatggatacctgtgcttgcggaagctggtggtgcagaggaccaagctgatcgatgagacgcaggacatgctgctggagatgctggaggacatgaccacaggtacagaatcagaaaccaaggccttcatggctgtgtgcattgagacagccaagcgctacaatctggatgactaccggaccccggtgttcatcttcgagaggctctgcagcatcatttatcctgaggagaatgaagtcactgagttctttgtgaccctggagaaggatccccaacaagaagacttcttacagggcaggatgcctgggaacccgtatagcagcaatgagccaggcatcgggccgctgatgagggatataaagaacaagatttgccaggactgtgacttagtggccctcctggaagatgacagtggcatggagcttctagtgaacaataaaatcattagtttggaccttcctgtggctgaagtttacaagaaagtctggtgtaccacgaatgagggagagcccatgaggattgtttatcgtatgcgggggctgctgggcgatgccacagaggagttcattgagtccctggactctactacagatgaagaagaagatgaagaagaagtgtataaaatggctggtgtgatggcccagtgtgggggcctggaatgcatgcttaacagactcgcagggatcagagatttcaagcagggacgccaccttctaacagtgctactgaaattgttcagttactgcgtgaaggtgaaagtcaaccggcagcaactggtcaaactggaaatgaacaccttgaacgtcatgctggggaccctaaacctggcccttgtagctgaacaagaaagcaaggacagtgggggtgcagctgtggctgagcaggtgcttagcatcatggagatcattctagatgagtccaatgctgagcccctgagtgaggacaagggcaacctcctcctgacaggtgacaaggatcaactggtgatgctcttggaccagatcaacagcacctttgttcgctccaaccccagtgtgctccagggcctgcttcgcatcatcccgtacctttcctttggagaggtggagaaaatgcagatcttggtggagcgattcaaaccatactgcaactttgataaatatgatgaagatcacagtggtgatgataaagtcttcctggactgcttctgtaaaatagctgctggcatcaagaacaacagcaatgggcaccagctgaaggatctgattctccagaaggggatcacccagaatgcacttgactacatgaaaaagcacatccctagcgccaagaatttggatgccgacatctggaaaaagtttttgtctcgcccagccttgccatttatcctaaggctgcttcggggcctggccatccagcaccctggcacccaggttctgattggaactgattccatcccgaacctgcataagctggagcaggtgtccagtgatgagggcattgggaccttggcagagaacctgctggaagccctgcgggaacaccctgacgtaaacaagaagattgacgcagcccgcagggagacccgggcagagaagaagcgcatggccatggcaatgaggcagaaggccctgggcaccctgggcatgacgacaaatgaaaagggccaggtcgtgaccaagacagcactcctgaagcagatggaagagctgatcgaggagcctggcctcacgtgctgcatctgcagggagggatacaagttccagcccacaaaggtcctgggcatttataccttcacgaagcgggtagccttggaggagatggagaataagccccggaaacagcagggctacagcaccgtgtcccacttcaacattgtgcactacgactgccatctggctgccgtcaggttggctcgaggccgggaagagtgggagagtgccgccctgcagaatgccaacaccaagtgcaacgggctccttccggtctggggacctcatgtccctgaatcagcttttgccacttgcttggcaagacacaacacttacctccaggaatgtacaggccagcgggagcccacgtatcagctcaacatccatgacatcaaactgctcttcctgcgcttcgccatggagcagtcgttcagcgcagacactggcgggggcggccgggagagcaacatccacctgatcccgtacatcattcacactgtgctttacgtcctgaacacaacccgagcaacttcccgagaagagaagaacctccaaggctttctggaacagcccaaggagaagtgggtggagagtgcctttgaagtggacgggccctactatttcacagtcttggcccttcacatcctgccccctgagcagtggagagccacacgtgtggaaatcttgcggaggctgttggtgacctcgcaggctcgggcagtggctccaggtggagccaccaggctgacagataaggcagtgaaggactattccgcttaccgttcttcccttctcttttgggccctcgtcgatctcatttacaacatgtttaagaaggtgcctaccagtaacacagagggaggctggtcctgctctctcgctgagtacatccgccacaacgacatgcccatctacgaagctgccgacaaagccctgaaaaccttccaggaggagttcatgccagtggagaccttctcagagttcctcgatgtggccggtcttttatcagaaatcaccgatccagagagcttcctgaaggacctgttgaactcagtcccctgaccaccacacagcagctgcggcggcgaagacgaagctggcttgccttccaccctctgttctccctccttgtgcattaagttccctccgcgggatgctgcattgttaccccgccctcccctctctcatttttcttggtgtggcttggggtttttaggcttcctgttttatctcgtgtgtgtggtgcaccagctatgaggttgtctgtaacccaagccatcaaagggcctgtacatacctaggagccatgagttgtcccggccagcttcatacttgagtgtgcacatcttgagaaataaacaagtgacttaacacacattgaaaagg

SEQ ID NO: 431 - DNA, 16097 bp, Homo sapiens
agattgcgtcacttccgccccctcctgggaggcggcgctgggccggtggcaagcccccggagggagccgcagtagtacgacggaagatggcgacgagcggcggcgaagaggcggcggcagcggctccggcgccggggaccccggcaacgggggcggacacgaccccgggctgggaggtggctgtgcggcccctgctgtccgcgtcctactccgccttcgagatgaaggagttgccgcagctggtggcctcagtcatcgagagtgaatcagaaatcctgcaccatgagaagcagtacgagccattctactcatcttttgttgcactttccacacactatattacaacagtttgcagtctcattccccggaaccaacttcagtcagtggcagcagcctgtaaagttctaattgagttttctctcctgcgtctggagaatccagatgaggcttgtgctgtgtcccagaaacacttgattctcctaatcaagggcctgtgcactggctgtagccgactagatagaactgaaattatcacatttacagcaatgatgaaatccgccaagctgccccaaacagtgaagacactttcagacgtggaagatcagaaagagctggcctcaccagtaagccctgagttgaggcaaaaggaggtacagatgaattttttgaaccagctgacctcagtttttaaccctagaactgtagcatcacaacctatcagtacacagactctggtggaaggagaaaatgatgagcagtcatctacagatcaagcctcagctatcaaaaccaagaatgtgttcatagctcagaacgtggctagtcttcaagagcttggtggctcggagaagctactgcgtgtatgtttgaacctgccatatttcctacgctatatcaatcggttccaagatgcagttttagctaattccttcttcataatgcctgcaacagtagcagatgccactgctgttcgtaatggctttcattcattggtgattgatgtaactatggcattggataccctttctctacctgtgttggaacctctcaatccttctcgtctacaagatgtgacagtcctcagcctaagttgtctgtatgcaggtgtgagtgtggcaacgtgcatggccatcctccatgtgggtagtgcccagcaagtgcggacagggtccacgagctccaaagaagatgactatgaaagtgacgcagctacaattgtccagaaatgtctcgaaatctatgacatgattggacaagcaatcagcagttctcgccgggctggtggtgagcactatcagaatttccaattgctgggtgcttggtgcttgttaaacagccttttcctcatactgaacctcagtcctactgcgttggctgataaggggaaagagaaggacccactggctgccctccgagtcagagacatcctttctcgtactaaagagggagtgggctcccctaaactggggcctggaaaagggcatcagggatttggggtactctcagtaatattggcaaaccatgccatcaaactgctaacgtctctctttcaagacctacaagtggaggcccttcacaagggttgggagacagatggcccccctgcagccttgagcattatggcccagagcacctccatacagaggattcaacggctgattgactctgtcccactgatgaacctgctcttgacgttactttcaacttcctacagaaaggcatgtgtcctgcagcggcagaggaagggctccatgagcagcgatgccagcgcctccaccgactccaatacttactatgaggacgatttcagtagcacggaggaggacagcagccaagacgatgacagtgagcctattttggggcaatggtttgaggagactatttctcccagtaaagagaaagcagcacctccgcctcctcccccacctcctccactggaaagctctcctcgggttaaaagccccagtaagcaggcccctggtgagaagggcaacattctggcgagtcgcaaagatcctgagttgttcttaggtctggcttccaacattttgaacttcatcacctcttccatgctgaactctcggaacaattttatccgaaactatctgagtgtatctctttcagaacaccatatggccaccctagccagtatcatcaaggaggtggacaaagatggactcaagggttcatcagatgaagagtttgctgcagctctctatcacttcaaccactcactggtaacctctgaccttcagtcacctaacctgcagaacacactgttgcagcagctaggagtggctcctttttctgagggcccttggcccttgtacattcaccctcaaagcctctctgtgctttcacgcctcctgctcatctggcaacataaagccagtgctcaaggtgaccctgacgtcccagaatgccttaaagtttgggacaggtttttgtctacaatgaagcagaatgccctgcaaggtgtggtgcccagtgagacagaggatctgaatgtagaacacctgcagatgctcctcctcattttccacaatttcaccgagacaggccggcgggccatattgtcgctttttgtccagatcatccaggagttgagcgtcaacatggatgctcagatgcgcttcgtgccgcttatcttggctcgcctccttctcatctttgattatctgcttcatcagtactccaaagcccctgtgtatctatttgagcaggtacagcataacctgctaagtcctccctttgggtgggcaagtggatcccaggacagcaacagccgccgggcaaccactcctctctatcatggattcaaagaagtagaagaaaactggtctaagcatttctcatcagatgctgtcccacaccccagattctactgtgtcctgtccccagaagcctcagaggatgatttgaaccgacttgattctgtggcatgtgacgtccttttctccaagcttgtcaagtatgatgagctttatgctgcactgacagccctgcttgcagctgggtcccagcttgatacagttaggagaaaggaaaacaagaatgtaacagccttggaggcctgtgcccttcaatattacttcttgatactgtggaggatcctaggaattttaccaccatcaaagacttacattaaccagctatccatgaactcacctgagatgagcgaatgtgacatcttgcacactctgcgatggtcttctcggctccggatcagctcctatgtcaactggataaaggatcaccttatcaaacagggaatgaaggctgagcatgctagctcgcttctagaactggcatccaccactaagtgtagctcagtgaaatatgatgttgaaatagtagaggaatacttcgctcgacagatctcatccttctgtagtatcgactgtaccaccatcttgcagctgcatgaaattcccagtctgcagtccatctacacccttgatgccgcgatctcaaaggtccaggtctctttggatgagcatttttctaagatggctgctgagactgatcctcataagtcgtctgagattaccaagaacctacttccagccacgctgcaactcattgacacctatgcatcgttcaccagagcctatttgctgcaaaactttaatgaagagggaacaactgagaaaccttccaaggagaaactgcaaggctttgctgctgttttggctattggctctagcaggtgcaaggcaaatactctgggtccgacactggttcagaatttgccatcgtcagtgcagactgtgtgtgagtcctggaacaacatcaataccaatgaatttcccaatattggatcctggcgcaatgcctttgccaatgacaccatcccttcagagagttatattagtgcagtgcaggctgcacacctggggactctctgtagccaaagtctgcccctggctgcttccctgaagcataccctcctctcactggtcaggttgactggagatcttattgtttggtcagatgagatgaacccaccacaggtaattcggacactgctacctcttcttttggaatcaagcactgagagtgttgccgagatcagtagcaactccctggaacgcatcttgggccctgctgagtctgatgagttcttggctcgtgtttatgagaagctgatcactggttgttacaacattctggccaatcatgcagatcctaacagtggactggatgaatccatcctggaggaatgtctccagtacttggaaaagcagctggaaagtagccaggctcgtaaagctatggaggagtttttctctgacagtggagaacttgtacagatcatgatggcaacagccaatgagaacctctctgctaaattctgtaaccgagttttgaaattcttcaccaaactcttccagctgactgagaagagccctaacccgagcctgttgcatctctgtggctccctggcacaactggcctgtgtggaacctgtgcgcctgcaggcctggctcacccgcatgactacatcgcccccaaaagattctgatcagctggatgtaattcaggagaaccggcagctgctgcagttactgaccacatacattgttcgggaaaacagccaagttggggaaggtgtgtgtgctgttcttctgggcaccctgactcccatggcaacagagatgctggccaacggtgatgggactggcttccctgaacttatggttgtgatggccactctggccagtgcaggtcaaggtgctggtcaccttcagcttcataatgctgctgtggattggctgagcagatgcaagaaatacctgtcacagaagaatgtagttgaaaaactgaatgccaatgtaatgcatggaaagcatgtgatgatcttggagtgcacatgccatatcatgtcttacttggctgatgtcacgaatgccctgagccagagtaatggtcaaggcccaagtcatctctcagtggatggggaagagcgggccattgaagtagactcagactgggtggaggagttggcggtggaagaggaagattcccaggctgaggattcagatgaagattctctttgcaataaactctgcacttttacgatcacacagaaagaattcatgaaccagcattggtaccactgtcacacctgtaaaatggtggatggcgtgggtgtctgcacagtgtgtgctaaggtgtgccacaaggatcatgagatttcctatgccaagtatggatccttcttctgtgactgtggagccaaggaagatggcagctgtttggctctggtgaagagaactcctagcagtggcatgagctctaccatgaaggagtcggcatttcagagtgaacccaggatttcagagagtctagtgcgtcatgccagcacctcctcgccagctgacaaagccaaggttaccatcagtgatggaaaggttgctgacgaagagaagcccaagaagagcagcctctgccgcacagtagagggctgccgggaggaattacagaaccaggccaatttctccttcgctcctctcgtgttagacatgcttaatttccttatggatgccattcagaccaacttccagcaagcttcagccgtcgggagcagcagccgtgctcagcaagccctcagtgagctacacactgtggagaaggcagtggagatgacagaccagctgatggttcccaccttagggtcccaggaaggtgcctttgagaatgtgcggatgaattacagtggagaccagggccagaccatccggcagctgatcagtgctcatgtgctcaggcgggtggctatgtgtgtgctctcctctccccatgggcgccgccaacatttggctgtcagccatgagaagggcaagatcaccgttctgcagctctctgcactcctgaagcaagcagattccagcaaaaggaagttaactctgacccgcttggcttctgccccagttccttttactgtgttgagcctcacaggaaatccctgcaaggaagactacttggcggtttgtgggctaaaggactgtcatgtgctcacctttagtagctcaggctctgtttcggatcacttggttttgcaccctcagttggcaacggggaacttcatcatcaaagccgtgtggttacctggttcacagaccgagttagcaattgtcaccgcagactttgttaagatttatgacctgtgtgttgatgccttgagtccaaccttctattttctcctgccaagctcaaagataagagatgttaccttccttttcaatgaggagggaaagaacatcattgttataatgtcttcggctgggtacatctatactcagcttatggaagaggccagcagtgcccagcagggacccttctatgtcactaatgtgttggaaatcaatcatgaggacctgaagcaggacagtaacagccaggtggcgggcggtggtgtgtccgtgtactactcccacgtgttgcagatgttgttcttcagctattgtcaaggcaaatcattcgcagccaccatcagcaggacaaccctggaggtgttgcaactcttccccatcaacatcaaaagttttgttgtctgcagttccaatggtggcagtaagacttctcctgctctttgccagtggtctgaggtgatgaaccaccctggcttggtgtgctgtgtccagcaaactacaggggtgccgctggtagttatggtgaaaccagacacttttcttatccaggagattaagactcttcctgctaaagcgaagatccaagacatggttgctattaggcacacggcctgcaatgagcagcagcggacaacaatgattctgctgtgtgaggatggcagcctgcgcatttacatggccaacgtggagaacacctcctactggctgcagccatccctgcagcccagcagtgtcatcagcatcatgaagcctgttcgaaagcgcaaaacagctacaatcacaacccgcacgtctagccaggtgactttccccattgacttttttgaacacaaccagcagctgacagatgtggagtttggtggtaacgacctcctacaggtctataatgcacaacagataaaacaccggctgaattccactggcatgtatgtggccaacaccaagcccggaggcttcaccattgagattagtaacaacaatagcactatggtgatgacaggcatgcggatccagattgggactcaagcaatagaacgggccccgtcatatatcgagatcttcggcagaactatgcagctcaacctgagtcgctcacgctggtttgacttccccttcaccagagaagaagccctgcaggctgataagaagctgaacctcttcattggggcctcggtggatccagcaggtgtcaccatgatagatgctgtaaaaatttatggcaagactaaggagcagtttggctggcctgatgagcccccagaagaattcccttctgcctctgtcagcaacatctgcccttcaaatctgaaccagagcaacggcactggagatagcgactcagctgcccccactacgaccagtggaactgtcctggagagttctgaaactgagtccctaaccaagctggaccggctggttgtgagttctttagaagccctggaaagctgctttgccgttggcccaatcatcgagaaggagagaaacaagaatgctgctcaggagctggccactttgctgttgtccctgccagcacctgccagtgtccagcagcagtccaagagccttctggccagcctgcacaccagccgctcggcctaccacagccacaaggatcaggccttgctgagcaaagctgtgcagtgtctcaacacatctagcaaagagggcaaggatttggaccctgaggtgttccagaggctagtgatcacagctcgctccattgccatcatgcgccccaacaaccttgtccactttacggagtcaaagctgccccagatggaaacagactgtttttttcctagatgtgcctgctggagtctagggatagttggcatattgattggggccccacttgaaactccctccccagaaggaatggatgaagggaaggaaccgcagaagcagttggaaggagattgctgtagtttcatcacccagcttgtgaaccacttctggaaactccatgcatccaaacccaagaatgccttcttggcacctgcctgccttccaggactaactcatattgaagctactgtcaatgctctggtggacatcatccatggctactgtacctgtgagctggattgtattaacacagcatccaagatctacatgcagatgctcttgtgtcctgatcctgctgtgagcttctcttgtaaacaagctctaattcgagtcctaaggcccaggaacaaacggagacatgtgactttaccctcttcccctcgaagcaacactccaatgggagacaaggatgatgatgacgatgatgatgcagatgagaaaatgcagtcatcagggatcccgaatggtggtcacatccgtcaggaaagccaggaacagagtgaggtggaccatggagattttgagatggtgtctgagtcgatggtcctggagacagctgaaaatgtcaacaatggcaacccctctcccctggaggccctgctggcaggcgcagagggcttcccccccatgctggacatcccacctgatgcagatgacgagaccatggttgaactagccattgccctgagcctgcagcaggaccaacaaggcagcagcagcagtgccctgggcctgcagagcctgggactgtccggccaggcacccagctcttcctctctggacgcaggaaccctctctgacaccacagcatcagctccagcctcagacgacgagggcagtacagcagcgacagatggttctacccttcggacctctcctgctgaccacggtggtagtgtgggctcggagagcgggggcagtgcagtggactcagtggctggcgagcacagtgtatctggccggagcagtgcttatggcgatgctacagctgaggggcatccggctggaccaggaagtgtcagctcaagcactggagccatcagcaccaccactgggcaccaggagggagatggctccgagggagaaggagaaggagaaactgaaggagatgtccacactagcaacaggctgcacatggtccgtctaatgctgttggagagattactgcagaccctgcctcaattacgaaacgttggcggtgtccgggccatcccatacatgcaggtcattctaatgctcactacagatctggatggagaagatgagaaagacaagggggccctagacaacctgctctcccagcttattgctgagttgggtatggataaaaaggatgtctccaagaagaatgagcgcagcgccctgaatgaagtccatctggtagtaatgagactcctgagtgtcttcatgtcccgcaccaaatctggatccaagtcttccatatgtgagtcatcttccctcatctccagtgccacagcagcagctctactgagctctggggctgtggactactgcctgcacgtgctcaaatcactgctggaatattggaagagccaacagaatgacgaggagcctgtggctaccagccagttgctgaaaccacatactacctcctccccacctgacatgagcccattctttctccgccagtatgtgaagggtcatgctgctgatgtgtttgaggcctatactcagcttctaacagaaatggtactgaggcttccttaccaaatcaaaaagattactgacaccaattctcgaatcccacctcctgtctttgaccactcgtggttttactttctctccgagtacctcatgatccagcagactccatttgtgcgccgtcaagtccgcaaacttctgctcttcatctgtggatccaaagagaagtaccgccagctccgggatttgcacaccctggactctcacgtgcgtgggatcaagaagctgctagaagagcaggggatattcctccgggcaagtgtggttacagccagctcaggctccgccttgcaatatgacacactcatcagcctgatggagcacctgaaagcctgtgcagagattgccgcccagcgaaccatcaactggcagaaattctgcatcaaagatgactccgtcctgtacttcctcctccaagtcagtttccttgtggatgagggcgtgtccccagtgctgctgcaactgctctcctgtgctctgtgcggcagcaaggtgctcgctgcactggcagcctcttcgggatcctccagtgcttcttcctcctcagcccctgtggctgccagttctggacaagccacaacacagtccaagtcttccactaaaaagagcaagaaagaagaaaaagaaaaggagaaagatggtgagacctctggcagccaggaggaccagctgtgcacagctctggtgaaccagctgaacaaatttgccgataaggaaaccctgatccagttcctgcgttgtttcctgttagagtccaattcttcctcggtgcgctggcaggcccactgtctgacactgcacatctacagaaattccagcaaatctcaacaggagctcctgctagatctgatgtggtccatctggccagaactcccagcctatggtcgtaaggctgcccagtttgtggacctactaggatatttctccctgaaaactccacaaacagagaagaagttgaaggagtattcacagaaggctgtggagattctgcggactcaaaaccatattcttaccaaccaccccaactcgaacatttataacactttgtctggcttagtggagtttgatggctattacctggagagcgatccctgcctggtgtgtaataacccggaagtaccgttctgttatatcaagctgtcttccattaaagtggacacgcggtacaccaccacccagcaggttgtgaagctcattggcagtcacaccatcagcaaagtgacagtgaaaatcggggatctgaaacggaccaagatggtgcggaccatcaacctgtattataacaaccgaaccgtgcaggccatcgtggagttgaaaaacaagccagctcgctggcacaaagccaagaaggttcagctgacccctggacagacagaggtgaagattgacctgccgttgcccattgtggcctccaatctgatgattgagtttgcagacttctatgaaaactaccaggcctccacagagaccctgcagtgccctcgctgtagtgcctcggtccctgccaacccaggagtctgtggcaactgtggagagaatgtgtaccagtgtcacaaatgcagatccatcaactacgatgaaaaggatcccttcctctgcaatgcctgtggcttctgtaaatatgcccgcttcgacttcatgctctatgccaagccttgctgtgcagtggatcccattgagaatgaagaagaccggaagaaggctgtatccaacatcaatacacttttggacaaagctgatcgagtgtatcatcagctgatgggacaccggccacagctggagaacctgctctgcaaagtgaatgaggcagctccagaaaagccacaggatgactcaggaacagcagggggcatcagctccacttctgccagtgtgaatcgttacatcctgcagttggctcaggagtattgtggagactgcaagaactcttttgatgaactctccaaaatcatccagaaagtctttgcttcgcgcaaagagttgttggaatatgacctacagcagagggaagcagccactaaatcatcccggacctccgtgcagcccacattcactgccagccagtaccgtgccttatccgtcctgggctgtggccacacatcctccaccaagtgctatggctgcgcctcggctgtcacagaacattgtatcacactacttcgggccctggccaccaacccagccttgaggcacatccttgtctcccagggccttatccgggagctctttgattataatcttcgccgaggggctgcggccatgcgggaggaggtccgccagctcatgtgcctcctaactcgagacaacccagaagccacccaacagatgaatgacctgattattggcaaggtctccacagccctgaagggccactgggccaaccccgatctggcaagtagcctgcagtatgaaatgctgctgctgacggattctatctccaaggaggacagctgctgggagctccggttacgctgtgctctcagccttttcctcatggctgtgaacattaagactcctgtggtggttgaaaacattaccctcatgtgcctgaggatcttgcagaagctgataaaaccacctgctcccactagcaagaagaacaaggatgtccccgttgaggccctcaccacggtgaagccatactgcaatgagatccatgcccaggctcaactgtggctcaagagagaccccaaggcatcctatgatgcctggaagaagtgtcttcctatcagagggatagatggcaatgggaaagcccccagcaaatcagagctccgccatctctatttgactgagaagtatgtgtggaggtggaaacagttcctgagtcgtcgggggaagaggacctcccccttggatctcaaactggggcataacaactggctgcgacaagtgcttttcactccagcaacgcaggccgcacggcaggcagcctgtaccattgtggaagctctagccaccattcccagccgcaagcagcaggtcctggacctgcttaccagttacctggatgagctgagcatagctggggagtgtgcagctgagtacctggctctctaccagaagctcatcacttctgcgcactggaaagtctacttggcagctcggggagtcctaccctatgtgggcaacctcatcaccaaggaaatagctcgtctgctggccctggaggaggctaccctgagtaccgatctgcagcagggttatgcccttaaaagtctcacaggccttctctcctcctttgttgaggtggaatccatcaaaagacattttaaaagtcgcttggtgggtactgtgctgaatggatacctgtgcttgcggaagctggtggtgcagaggaccaagctgatcgatgagacgcaggacatgctgctggagatgctggaggacatgaccacaggtacagaatcagaaaccaaggccttcatggctgtgtgcattgagacagccaagcgctacaatctggatgactaccggaccccggtgttcatcttcgagaggctctgcagcatcatttatcctgaggagaatgaagtcactgagttctttgtgaccctggagaaggatccccaacaagaagacttcttacagggcaggatgcctgggaacccgtatagcagcaatgagccaggcatcgggccgctgatgagggatataaagaacaagatttgccaggactgtgacttagtggccctcctggaagatgacagtggcatggagcttctagtgaacaataaaatcattagtttggaccttcctgtggctgaagtttacaagaaagtctggtgtaccacgaatgagggagagcccatgaggattgtttatcgtatgcgggggctgctgggcgatgccacagaggagttcattgagtccctggactctactacagatgaagaagaagatgaagaagaagtgtataaaatggctggtgtgatggcccagtgtgggggcctggaatgcatgcttaacagactcgcagggatcagagatttcaagcagggacgccaccttctaacagtgctactgaaattgttcagttactgcgtgaaggtgaaagtcaaccggcagcaactggtcaaactggaaatgaacaccttgaacgtcatgctggggaccctaaacctggcccttgtagctgaacaagaaagcaaggacagtgggggtgcagctgtggctgagcaggtgcttagcatcatggagatcattctagatgagtccaatgctgagcccctgagtgaggacaagggcaacctcctcctgacaggtgacaaggatcaactggtgatgctcttggaccagatcaacagcacctttgttcgctccaaccccagtgtgctccagggcctgcttcgcatcatcccgtacctttcctttggagaggtggagaaaatgcagatcttggtggagcgattcaaaccatactgcaactttgataaatatgatgaagatcacagtggtgatgataaagtcttcctggactgcttctgtaaaatagctgctggcatcaagaacaacagcaatgggcaccagctgaaggatctgattctccagaaggggatcacccagaatgcacttgactacatgaaaaagcacatccctagcgccaagaatttggatgccgacatctggaaaaagtttttgtctcgcccagccttgccatttatcctaaggctgcttcggggcctggccatccagcaccctggcacccaggttctgattggaactgattccatcccgaacctgcataagctggagcaggtgtccagtgatgagggcattgggaccttggcagagaacctgctggaagccctgcgggaacaccctgacgtaaacaagaagattgacgcagcccgcagggagacccgggcagagaagaagcgcatggccatggcaatgaggcagaaggccctgggcaccctgggcatgacgacaaatgaaaagggccaggtcgtgaccaagacagcactcctgaagcagatggaagagctgatcgaggagcctggcctcacgtgctgcatctgcagggagggatacaagttccagcccacaaaggtcctgggcatttataccttcacgaagcgggtagccttggaggagatggagaataagccccggaaacagcagggctacagcaccgtgtcccacttcaacattgtgcactacgactgccatctggctgccgtcaggttggctcgaggccgggaagagtgggagagtgccgccctgcagaatgccaacaccaagtgcaacgggctccttccggtctggggacctcatgtccctgaatcagcttttgccacttgcttggcaagacacaacacttacctccaggaatgtacaggccagcgggagcccacgtatcagctcaacatccatgacatcaaactgctcttcctgcgcttcgccatggagcagtcgttcagcgcagacactggcgggggcggccgggagagcaacatccacctgatcccgtacatcattcacactgtgctttacgtcctgaacacaacccgagcaacttcccgagaagagaagaacctccaaggctttctggaacagcccaaggagaagtgggtggagagtgcctttgaagtggacgggccctactatttcacagtcttggcccttcacatcctgccccctgagcagtggagagccacacgtgtggaaatcttgcggaggctgttggtgacctcgcaggctcgggcagtggctccaggtggagccaccaggctgacagataaggcagtgaaggactattccgcttaccgttcttcccttctcttttgggccctcgtcgatctcatttacaacatgtttaagaaggtgcctaccagtaacacagagggaggctggtcctgctctctcgctgagtacatccgccacaacgacatgcccatctacgaagctgccgacaaagccctgaaaaccttccaggaggagttcatgccagtggagaccttctcagagttcctcgatgtggccggtcttttatcagaaatcaccgatccagagagcttcctgaaggacctgttgaactcagtcccctgaccaccacacagcagctgcggcggcgaagacgaagctggcttgccttccaccctctgttctccctccttgtgcattaagttccctccgcgggatgctgcattgttaccccgccctcccctctctcatttttcttggtgtggcttggggtttttaggcttcctgttttatctcgtgtgtgtggtgcaccagctatgaggttgtctgtaacccaagccatcaaagggcctgtacatacctaggagccatgagttgtcccggccagcttcatacttgagtgtgcacatcttgagaaataaacaagtgacttaacacacattgaaaagg

SEQ ID NO: 432 - DNA, 16094 bp, Homo sapiens
agattgcgtcacttccgccccctcctgggaggcggcgctgggccggtggcaagcccccggagggagccgcagtagtacgacggaagatggcgacgagcggcggcgaagaggcggcggcagcggctccggcgccggggaccccggcaacgggggcggacacgaccccgggctgggaggtggctgtgcggcccctgctgtccgcgtcctactccgccttcgagatgaaggagttgccgcagctggtggcctcagtcatcgagagtgaatcagaaatcctgcaccatgagaagcagtacgagccattctactcatcttttgttgcactttccacacactatattacaacagtttgcagtctcattccccggaaccaacttcagtcagtggcagcagcctgtaaagttctaattgagttttctctcctgcgtctggagaatccagatgaggcttgtgctgtgtcccagaaacacttgattctcctaatcaagggcctgtgcactggctgtagccgactagatagaactgaaattatcacatttacagcaatgatgaaatccgccaagctgccccaaacagtgaagacactttcagacgtggaagatcagaaagagctggcctcaccagtaagccctgagttgaggcaaaaggaggtacagatgaattttttgaaccagctgacctcagtttttaaccctagaactgtagcatcacaacctatcagtacacagactctggtggaaggagaaaatgatgagcagtcatctacagatcaagcctcagctatcaaaaccaagaatgtgttcatagctcagaacgtggctagtcttcaagagcttggtggctcggagaagctactgcgtgtatgtttgaacctgccatatttcctacgctatatcaatcggttccaagatgcagttttagctaattccttcttcataatgcctgcaacagtagcagatgccactgctgttcgtaatggctttcattcattggtgattgatgtaactatggcattggataccctttctctacctgtgttggaacctctcaatccttctcgtctacaagatgtgacagtcctcagcctaagttgtctgtatgcaggtgtgagtgtggcaacgtgcatggccatcctccatgtgggtagtgcccagcaagtgcggacagggtccacgagctccaaagaagatgactatgaaagtgacgcagctacaattgtccagaaatgtctcgaaatctatgacatgattggacaagcaatcagcagttctcgccgggctggtggtgagcactatcagaatttccaattgctgggtgcttggtgcttgttaaacagccttttcctcatactgaacctcagtcctactgcgttggctgataaggggaaagagaaggacccactggctgccctccgagtcagagacatcctttctcgtactaaagagggagtgggctcccctaaactggggcctggaaaagggcatcagggatttggggtactctcagtaatattggcaaaccatgccatcaaactgctaacgtctctctttcaagacctacaagtggaggcccttcacaagggttgggagacagatggcccccctgcagccttgagcattatggcccagagcacctccatacagaggattcaacggctgattgactctgtcccactgatgaacctgctcttgacgttactttcaacttcctacagaaaggcatgtgtcctgcagcggcagaggaagggctccatgagcagcgatgccagcgcctccaccgactccaatacttactatgaggacgatttcagtagcacggaggaggacagcagccaagacgatgacagtgagcctattttggggcaatggtttgaggagactatttctcccagtaaagagaaagcagcacctccgcctcctcccccacctcctccactggaaagctctcctcgggttaaaagccccagtaagcaggcccctggtgagaagggcaacattctggcgagtcgcaaagatcctgagttgttcttaggtctggcttccaacattttgaacttcatcacctcttccatgctgaactctcggaacaattttatccgaaactatctgagtgtatctctttcagaacaccatatggccaccctagccagtatcatcaaggaggtggacaaagatggactcaagggttcatcagatgaagagtttgctgcagctctctatcacttcaaccactcactggtaacctctgaccttcagtcacctaacctgcagaacacactgttgcagcagctaggagtggctcctttttctgagggcccttggcccttgtacattcaccctcaaagcctctctgtgctttcacgcctcctgctcatctggcaacataaagccagtgctcaaggtgaccctgacgtcccagaatgccttaaagtttgggacaggtttttgtctacaatgaagcagaatgccctgcaaggtgtggtgcccagtgagacagaggatctgaatgtagaacacctgcagatgctcctcctcattttccacaatttcaccgagacaggccggcgggccatattgtcgctttttgtccagatcatccaggagttgagcgtcaacatggatgctcagatgcgcttcgtgccgcttatcttggctcgcctccttctcatctttgattatctgcttcatcagtactccaaagcccctgtgtatctatttgagcaggtacagcataacctgctaagtcctccctttgggtgggcaagtggatcccaggacagcaacagccgccgggcaaccactcctctctatcatggattcaaagaagtagaagaaaactggtctaagcatttctcatcagatgctgtcccacaccccagattctactgtgtcctgtccccagaagcctcagaggatgatttgaaccgacttgattctgtggcatgtgacgtccttttctccaagcttgtcaagtatgatgagctttatgctgcactgacagccctgcttgcagctgggtcccagcttgatacagttaggagaaaggaaaacaagaatgtaacagccttggaggcctgtgcccttcaatattacttcttgatactgtggaggatcctaggaattttaccaccatcaaagacttacattaaccagctatccatgaactcacctgagatgagcgaatgtgacatcttgcacactctgcgatggtcttctcggctccggatcagctcctatgtcaactggataaaggatcaccttatcaaacagggaatgaaggctgagcatgctagctcgcttctagaactggcatccaccactaagtgtagctcagtgaaatatgatgttgaaatagtagaggaatacttcgctcgacagatctcatccttctgtagtatcgactgtaccaccatcttgcagctgcatgaaattcccagtctgcagtccatctacacccttgatgccgcgatctcaaaggtccaggtctctttggatgagcatttttctaagatggctgctgagactgatcctcataagtcgtctgagattaccaagaacctacttccagccacgctgcaactcattgacacctatgcatcgttcaccagagcctatttgctgcaaaactttaatgaagagggaacaactgagaaaccttccaaggagaaactgcaaggctttgctgctgttttggctattggctctagcaggtgcaaggcaaatactctgggtccgacactggttcagaatttgccatcgtcagtgcagactgtgtgtgagtcctggaacaacatcaataccaatgaatttcccaatattggatcctggcgcaatgcctttgccaatgacaccatcccttcagagagttatattagtgcagtgcaggctgcacacctggggactctctgtagccaaagtctgcccctggctgcttccctgaagcataccctcctctcactggtcaggttgactggagatcttattgtttggtcagatgagatgaacccaccacaggtaattcggacactgctacctcttcttttggaatcaagcactgagagtgttgccgagatcagtagcaactccctggaacgcatcttgggccctgctgagtctgatgagttcttggctcgtgtttatgagaagctgatcactggttgttacaacattctggccaatcatgcagatcctaacagtggactggatgaatccatcctggaggaatgtctccagtacttggaaaagcagctggaaagtagccaggctcgtaaagctatggaggagtttttctctgacagtggagaacttgtacagatcatgatggcaacagccaatgagaacctctctgctaaattctgtaaccgagttttgaaattcttcaccaaactcttccagctgactgagaagagccctaacccgagcctgttgcatctctgtggctccctggcacaactggcctgtgtggaacctgtgcgcctgcaggcctggctcacccgcatgactacatcgcccccaaaagattctgatcagctggatgtaattcaggagaaccggcagctgctgcagttactgaccacatacattgttcgggaaaacagccaagttggggaaggtgtgtgtgctgttcttctgggcaccctgactcccatggcaacagagatgctggccaacggtgatgggactggcttccctgaacttatggttgtgatggccactctggccagtgcaggtcaaggtgctggtcaccttcagcttcataatgctgctgtggattggctgagcagatgcaagaaatacctgtcacagaagaatgtagttgaaaaactgaatgccaatgtaatgcatggaaagcatgtgatgatcttggagtgcacatgccatatcatgtcttacttggctgatgtcacgaatgccctgagccagagtaatggtcaaggcccaagtcatctctcagtggatggggaagagcgggccattgaagtagactcagactgggtggaggagttggcggtggaagaggaagattcccaggctgaggattcagatgaagattctctttgcaataaactctgcacttttacgatcacacagaaagaattcatgaaccagcattggtaccactgtcacacctgtaaaatggtggatggcgtgggtgtctgcacagtgtgtgctaaggtgtgccacaaggatcatgagatttcctatgccaagtatggatccttcttctgtgactgtggagccaaggaagatggcagctgtttggctctggtgaagagaactcctagcagtggcatgagctctaccatgaaggagtcggcatttcagagtgaacccaggatttcagagagtctagtgcgtcatgccagcacctcctcgccagctgacaaagccaaggttaccatcagtgatggaaaggttgctgacgaagagaagcccaagaagagcagcctctgccgcacagtagagggctgccgggaggaattacagaaccaggccaatttctccttcgctcctctcgtgttagacatgcttaatttccttatggatgccattcagaccaacttccagcaagcttcagccgtcgggagcagcagccgtgctcagcaagccctcagtgagctacacactgtggagaaggcagtggagatgacagaccagctgatggttcccaccttagggtcccaggaaggtgcctttgagaatgtgcggatgaattacagtggagaccagggccagaccatccggcagctgatcagtgctcatgtgctcaggcgggtggctatgtgtgtgctctcctctccccatgggcgccgccaacatttggctgtcagccatgagaagggcaagatcaccgttctgcagctctctgcactcctgaagcaagcagattccagcaaaaggaagttaactctgacccgcttggcttctgccccagttccttttactgtgttgagcctcacaggaaatccctgcaaggaagactacttggcggtttgtgggctaaaggactgtcatgtgctcacctttagtagctcaggctctgtttcggatcacttggttttgcaccctcagttggcaacggggaacttcatcatcaaagccgtgtggttacctggttcacagaccgagttagcaattgtcaccgcagactttgttaagatttatgacctgtgtgttgatgccttgagtccaaccttctattttctcctgccaagctcaaagataagagatgttaccttccttttcaatgaggagggaaagaacatcattgttataatgtcttcggctgggtacatctatactcagcttatggaagaggccagcagtgcccagcagggacccttctatgtcactaatgtgttggaaatcaatcatgaggacctgaagcaggacagtaacagccaggtggcgggcggtggtgtgtccgtgtactactcccacgtgttgcagatgttgttcttcagctattgtcaaggcaaatcattcgcagccaccatcagcaggacaaccctggaggtgttgcaactcttccccatcaacatcaaaagttttgttgtctgcagttccaatggtggcagtaagacttctcctgctctttgccagtggtctgaggtgatgaaccaccctggcttggtgtgctgtgtccagcaaactacaggggtgccgctggtagttatggtgaaaccagacacttttcttatccaggagattaagactcttcctgctaaagcgaagatccaagacatggttgctattaggcacacggcctgcaatgagcagcagcggacaacaatgattctgctgtgtgaggatggcagcctgcgcatttacatggccaacgtggagaacacctcctactggctgcagccatccctgcagcccagcagtgtcatcagcatcatgaagcctgttcgaaagcgcaaaacagctacaatcacaacccgcacgtctagccaggtgactttccccattgacttttttgaacacaaccagcagctgacagatgtggagtttggtggtaacgacctcctacaggtctataatgcacaacagataaaacaccggctgaattccactggcatgtatgtggccaacaccaagcccggaggcttcaccattgagattagtaacaacaatagcactatggtgatgacaggcatgcggatccagattgggactcaagcaatagaacgggccccgtcatatatcgagatcttcggcagaactatgcagctcaacctgagtcgctcacgctggtttgacttccccttcaccagagaagaagccctgcaggctgataagaagctgaacctcttcattggggcctcggtggatccagcaggtgtcaccatgatagatgctgtaaaaatttatggcaagactaaggagcagtttggctggcctgatgagcccccagaagaattcccttctgcctctgtcagcaacatctgcccttcaaatctgaaccagagcaacggcactggagatagcgactcagctgcccccactacgaccagtggaactgtcctggagagttctgaaactgagtccctaaccaagctggaccggctggttgtgagttctttagaagccctggaaagctgctttgccgttggcccaatcatcgagaaggagagaaacaagaatgctgctcaggagctggccactttgctgttgtccctgccagcacctgccagtgtccagcagcagtccaagagccttctggccagcctgcacaccagccgctcggcctaccacagccacaaggatcaggccttgctgagcaaagctgtgcagtgtctcaacacatctagcaaagagggcaaggatttggaccctgaggtgttccagaggctagtgatcacagctcgctccattgccatcatgcgccccaacaaccttgtccactttacggagtcaaagctgccccagatggaaacagactgtttttttcctagatgtgcctgctggagtctagggatagttggcatattgattggggccccacttgaaactccctccccagaaggaatggatgaagggaaggaaccgcagaagcagttggaaggagattgctgtagtttcatcacccagcttgtgaaccacttctggaaactccatgcatccaaacccaagaatgccttcttggcacctgcctgccttccaggactaactcatattgaagctactgtcaatgctctggtggacatcatccatggctactgtacctgtgagctggattgtattaacacagcatccaagatctacatgcagatgctcttgtgtcctgatcctgctgtgagcttctcttgtaaacaagctctaattcgagtcctaaggcccaggaacaaacggagacatgtgactttaccctcttcccctcgaagcaacactccaatggacaaggatgatgatgacgatgatgatgcagatgagaaaatgcagtcatcagggatcccgaatggtggtcacatccgtcaggaaagccaggaacagagtgaggtggaccatggagattttgagatggtgtctgagtcgatggtcctggagacagctgaaaatgtcaacaatggcaacccctctcccctggaggccctgctggcaggcgcagagggcttcccccccatgctggacatcccacctgatgcagatgacgagaccatggttgaactagccattgccctgagcctgcagcaggaccaacaaggcagcagcagcagtgccctgggcctgcagagcctgggactgtccggccaggcacccagctcttcctctctggacgcaggaaccctctctgacaccacagcatcagctccagcctcagacgacgagggcagtacagcagcgacagatggttctacccttcggacctctcctgctgaccacggtggtagtgtgggctcggagagcgggggcagtgcagtggactcagtggctggcgagcacagtgtatctggccggagcagtgcttatggcgatgctacagctgaggggcatccggctggaccaggaagtgtcagctcaagcactggagccatcagcaccaccactgggcaccaggagggagatggctccgagggagaaggagaaggagaaactgaaggagatgtccacactagcaacaggctgcacatggtccgtctaatgctgttggagagattactgcagaccctgcctcaattacgaaacgttggcggtgtccgggccatcccatacatgcaggtcattctaatgctcactacagatctggatggagaagatgagaaagacaagggggccctagacaacctgctctcccagcttattgctgagttgggtatggataaaaaggatgtctccaagaagaatgagcgcagcgccctgaatgaagtccatctggtagtaatgagactcctgagtgtcttcatgtcccgcaccaaatctggatccaagtcttccatatgtgagtcatcttccctcatctccagtgccacagcagcagctctactgagctctggggctgtggactactgcctgcacgtgctcaaatcactgctggaatattggaagagccaacagaatgacgaggagcctgtggctaccagccagttgctgaaaccacatactacctcctccccacctgacatgagcccattctttctccgccagtatgtgaagggtcatgctgctgatgtgtttgaggcctatactcagcttctaacagaaatggtactgaggcttccttaccaaatcaaaaagattactgacaccaattctcgaatcccacctcctgtctttgaccactcgtggttttactttctctccgagtacctcatgatccagcagactccatttgtgcgccgtcaagtccgcaaacttctgctcttcatctgtggatccaaagagaagtaccgccagctccgggatttgcacaccctggactctcacgtgcgtgggatcaagaagctgctagaagagcaggggatattcctccgggcaagtgtggttacagccagctcaggctccgccttgcaatatgacacactcatcagcctgatggagcacctgaaagcctgtgcagagattgccgcccagcgaaccatcaactggcagaaattctgcatcaaagatgactccgtcctgtacttcctcctccaagtcagtttccttgtggatgagggcgtgtccccagtgctgctgcaactgctctcctgtgctctgtgcggcagcaaggtgctcgctgcactggcagcctcttcgggatcctccagtgcttcttcctcctcagcccctgtggctgccagttctggacaagccacaacacagtccaagtcttccactaaaaagagcaagaaagaagaaaaagaaaaggagaaagatggtgagacctctggcagccaggaggaccagctgtgcacagctctggtgaaccagctgaacaaatttgccgataaggaaaccctgatccagttcctgcgttgtttcctgttagagtccaattcttcctcggtgcgctggcaggcccactgtctgacactgcacatctacagaaattccagcaaatctcaacaggagctcctgctagatctgatgtggtccatctggccagaactcccagcctatggtcgtaaggctgcccagtttgtggacctactaggatatttctccctgaaaactccacaaacagagaagaagttgaaggagtattcacagaaggctgtggagattctgcggactcaaaaccatattcttaccaaccaccccaactcgaacatttataacactttgtctggcttagtggagtttgatggctattacctggagagcgatccctgcctggtgtgtaataacccggaagtaccgttctgttatatcaagctgtcttccattaaagtggacacgcggtacaccaccacccagcaggttgtgaagctcattggcagtcacaccatcagcaaagtgacagtgaaaatcggggatctgaaacggaccaagatggtgcggaccatcaacctgtattataacaaccgaaccgtgcaggccatcgtggagttgaaaaacaagccagctcgctggcacaaagccaagaaggttcagctgacccctggacagacagaggtgaagattgacctgccgttgcccattgtggcctccaatctgatgattgagtttgcagacttctatgaaaactaccaggcctccacagagaccctgcagtgccctcgctgtagtgcctcggtccctgccaacccaggagtctgtggcaactgtggagagaatgtgtaccagtgtcacaaatgcagatccatcaactacgatgaaaaggatcccttcctctgcaatgcctgtggcttctgtaaatatgcccgcttcgacttcatgctctatgccaagccttgctgtgcagtggatcccattgagaatgaagaagaccggaagaaggctgtatccaacatcaatacacttttggacaaagctgatcgagtgtatcatcagctgatgggacaccggccacagctggagaacctgctctgcaaagtgaatgaggcagctccagaaaagccacaggatgactcaggaacagcagggggcatcagctccacttctgccagtgtgaatcgttacatcctgcagttggctcaggagtattgtggagactgcaagaactcttttgatgaactctccaaaatcatccagaaagtctttgcttcgcgcaaagagttgttggaatatgacctacagcagagggaagcagccactaaatcatcccggacctccgtgcagcccacattcactgccagccagtaccgtgccttatccgtcctgggctgtggccacacatcctccaccaagtgctatggctgcgcctcggctgtcacagaacattgtatcacactacttcgggccctggccaccaacccagccttgaggcacatccttgtctcccagggccttatccgggagctctttgattataatcttcgccgaggggctgcggccatgcgggaggaggtccgccagctcatgtgcctcctaactcgagacaacccagaagccacccaacagatgaatgacctgattattggcaaggtctccacagccctgaagggccactgggccaaccccgatctggcaagtagcctgcagtatgaaatgctgctgctgacggattctatctccaaggaggacagctgctgggagctccggttacgctgtgctctcagccttttcctcatggctgtgaacattaagactcctgtggtggttgaaaacattaccctcatgtgcctgaggatcttgcagaagctgataaaaccacctgctcccactagcaagaagaacaaggatgtccccgttgaggccctcaccacggtgaagccatactgcaatgagatccatgcccaggctcaactgtggctcaagagagaccccaaggcatcctatgatgcctggaagaagtgtcttcctatcagagggatagatggcaatgggaaagcccccagcaaatcagagctccgccatctctatttgactgagaagtatgtgtggaggtggaaacagttcctgagtcgtcgggggaagaggacctcccccttggatctcaaactggggcataacaactggctgcgacaagtgcttttcactccagcaacgcaggccgcacggcaggcagcctgtaccattgtggaagctctagccaccattcccagccgcaagcagcaggtcctggacctgcttaccagttacctggatgagctgagcatagctggggagtgtgcagctgagtacctggctctctaccagaagctcatcacttctgcgcactggaaagtctacttggcagctcggggagtcctaccctatgtgggcaacctcatcaccaaggaaatagctcgtctgctggccctggaggaggctaccctgagtaccgatctgcagcagggttatgcccttaaaagtctcacaggccttctctcctcctttgttgaggtggaatccatcaaaagacattttaaaagtcgcttggtgggtactgtgctgaatggatacctgtgcttgcggaagctggtggtgcagaggaccaagctgatcgatgagacgcaggacatgctgctggagatgctggaggacatgaccacaggtacagaatcagaaaccaaggccttcatggctgtgtgcattgagacagccaagcgctacaatctggatgactaccggaccccggtgttcatcttcgagaggctctgcagcatcatttatcctgaggagaatgaagtcactgagttctttgtgaccctggagaaggatccccaacaagaagacttcttacagggcaggatgcctgggaacccgtatagcagcaatgagccaggcatcgggccgctgatgagggatataaagaacaagatttgccaggactgtgacttagtggccctcctggaagatgacagtggcatggagcttctagtgaacaataaaatcattagtttggaccttcctgtggctgaagtttacaagaaagtctggtgtaccacgaatgagggagagcccatgaggattgtttatcgtatgcgggggctgctgggcgatgccacagaggagttcattgagtccctggactctactacagatgaagaagaagatgaagaagaagtgtataaaatggctggtgtgatggcccagtgtgggggcctggaatgcatgcttaacagactcgcagggatcagagatttcaagcagggacgccaccttctaacagtgctactgaaattgttcagttactgcgtgaaggtgaaagtcaaccggcagcaactggtcaaactggaaatgaacaccttgaacgtcatgctggggaccctaaacctggcccttgtagctgaacaagaaagcaaggacagtgggggtgcagctgtggctgagcaggtgcttagcatcatggagatcattctagatgagtccaatgctgagcccctgagtgaggacaagggcaacctcctcctgacaggtgacaaggatcaactggtgatgctcttggaccagatcaacagcacctttgttcgctccaaccccagtgtgctccagggcctgcttcgcatcatcccgtacctttcctttggagaggtggagaaaatgcagatcttggtggagcgattcaaaccatactgcaactttgataaatatgatgaagatcacagtggtgatgataaagtcttcctggactgcttctgtaaaatagctgctggcatcaagaacaacagcaatgggcaccagctgaaggatctgattctccagaaggggatcacccagaatgcacttgactacatgaaaaagcacatccctagcgccaagaatttggatgccgacatctggaaaaagtttttgtctcgcccagccttgccatttatcctaaggctgcttcggggcctggccatccagcaccctggcacccaggttctgattggaactgattccatcccgaacctgcataagctggagcaggtgtccagtgatgagggcattgggaccttggcagagaacctgctggaagccctgcgggaacaccctgacgtaaacaagaagattgacgcagcccgcagggagacccgggcagagaagaagcgcatggccatggcaatgaggcagaaggccctgggcaccctgggcatgacgacaaatgaaaagggccaggtcgtgaccaagacagcactcctgaagcagatggaagagctgatcgaggagcctggcctcacgtgctgcatctgcagggagggatacaagttccagcccacaaaggtcctgggcatttataccttcacgaagcgggtagccttggaggagatggagaataagccccggaaacagcagggctacagcaccgtgtcccacttcaacattgtgcactacgactgccatctggctgccgtcaggttggctcgaggccgggaagagtgggagagtgccgccctgcagaatgccaacaccaagtgcaacgggctccttccggtctggggacctcatgtccctgaatcagcttttgccacttgcttggcaagacacaacacttacctccaggaatgtacaggccagcgggagcccacgtatcagctcaacatccatgacatcaaactgctcttcctgcgcttcgccatggagcagtcgttcagcgcagacactggcgggggcggccgggagagcaacatccacctgatcccgtacatcattcacactgtgctttacgtcctgaacacaacccgagcaacttcccgagaagagaagaacctccaaggctttctggaacagcccaaggagaagtgggtggagagtgcctttgaagtggacgggccctactatttcacagtcttggcccttcacatcctgccccctgagcagtggagagccacacgtgtggaaatcttgcggaggctgttggtgacctcgcaggctcgggcagtggctccaggtggagccaccaggctgacagataaggcagtgaaggactattccgcttaccgttcttcccttctcttttgggccctcgtcgatctcatttacaacatgtttaagaaggtgcctaccagtaacacagagggaggctggtcctgctctctcgctgagtacatccgccacaacgacatgcccatctacgaagctgccgacaaagccctgaaaaccttccaggaggagttcatgccagtggagaccttctcagagttcctcgatgtggccggtcttttatcagaaatcaccgatccagagagcttcctgaaggacctgttgaactcagtcccctgaccaccacacagcagctgcggcggcgaagacgaagctggcttgccttccaccctctgttctccctccttgtgcattaagttccctccgcgggatgctgcattgttaccccgccctcccctctctcatttttcttggtgtggcttggggtttttaggcttcctgttttatctcgtgtgtgtggtgcaccagctatgaggttgtctgtaacccaagccatcaaagggcctgtacatacctaggagccatgagttgtcccggccagcttcatacttgagtgtgcacatcttgagaaataaacaagtgacttaacacacattgaaaagg

SEQ ID NO: 433 - DNA, 16091 bp, Homo sapiens
agattgcgtcacttccgccccctcctgggaggcggcgctgggccggtggcaagcccccggagggagccgcagtagtacgacggaagatggcgacgagcggcggcgaagaggcggcggcagcggctccggcgccggggaccccggcaacgggggcggacacgaccccgggctgggaggtggctgtgcggcccctgctgtccgcgtcctactccgccttcgagatgaaggagttgccgcagctggtggcctcagtcatcgagagtgaatcagaaatcctgcaccatgagaagcagtacgagccattctactcatcttttgttgcactttccacacactatattacaacagtttgcagtctcattccccggaaccaacttcagtcagtggcagcagcctgtaaagttctaattgagttttctctcctgcgtctggagaatccagatgaggcttgtgctgtgtcccagaaacacttgattctcctaatcaagggcctgtgcactggctgtagccgactagatagaactgaaattatcacatttacagcaatgatgaaatccgccaagctgccccaaacagtgaagacactttcagacgtggaagatcagaaagagctggcctcaccagtaagccctgagttgaggcaaaaggaggtacagatgaattttttgaaccagctgacctcagtttttaaccctagaactgtagcatcacaacctatcagtacacagactctggtggaaggagaaaatgatgagcagtcatctacagatcaagcctcagctatcaaaaccaagaatgtgttcatagctcagaacgtggctagtcttcaagagcttggtggctcggagaagctactgcgtgtatgtttgaacctgccatatttcctacgctatatcaatcggttccaagatgcagttttagctaattccttcttcataatgcctgcaacagtagcagatgccactgctgttcgtaatggctttcattcattggtgattgatgtaactatggcattggataccctttctctacctgtgttggaacctctcaatccttctcgtctacaagatgtgacagtcctcagcctaagttgtctgtatgcaggtgtgagtgtggcaacgtgcatggccatcctccatgtgggtagtgcccagcaagtgcggacagggtccacgagctccaaagaagatgactatgaaagtgacgcagctacaattgtccagaaatgtctcgaaatctatgacatgattggacaagcaatcagcagttctcgccgggctggtggtgagcactatcagaatttccaattgctgggtgcttggtgcttgttaaacagccttttcctcatactgaacctcagtcctactgcgttggctgataaggggaaagagaaggacccactggctgccctccgagtcagagacatcctttctcgtactaaagagggagtgggctcccctaaactggggcctggaaaagggcatcagggatttggggtactctcagtaatattggcaaaccatgccatcaaactgctaacgtctctctttcaagacctacaagtggaggcccttcacaagggttgggagacagatggcccccctgcagccttgagcattatggcccagagcacctccatacagaggattcaacggctgattgactctgtcccactgatgaacctgctcttgacgttactttcaacttcctacagaaaggcatgtgtcctgcagcggcagaggaagggctccatgagcagcgatgccagcgcctccaccgactccaatacttactatgaggacgatttcagtagcacggaggaggacagcagccaagacgatgacagtgagcctattttggggcaatggtttgaggagactatttctcccagtaaagagaaagcagcacctccgcctcctcccccacctcctccactggaaagctctcctcgggttaaaagccccagtaagcaggcccctggtgagaagggcaacattctggcgagtcgcaaagatcctgagttgttcttaggtctggcttccaacattttgaacttcatcacctcttccatgctgaactctcggaacaattttatccgaaactatctgagtgtatctctttcagaacaccatatggccaccctagccagtatcatcaaggaggtggacaaagatggactcaagggttcatcagatgaagagtttgctgcagctctctatcacttcaaccactcactggtaacctctgaccttcagtcacctaacctgcagaacacactgttgcagcagctaggagtggctcctttttctgagggcccttggcccttgtacattcaccctcaaagcctctctgtgctttcacgcctcctgctcatctggcaacataaagccagtgctcaaggtgaccctgacgtcccagaatgccttaaagtttgggacaggtttttgtctacaatgaagcagaatgccctgcaaggtgtggtgcccagtgagacagaggatctgaatgtagaacacctgcagatgctcctcctcattttccacaatttcaccgagacaggccggcgggccatattgtcgctttttgtccagatcatccaggagttgagcgtcaacatggatgctcagatgcgcttcgtgccgcttatcttggctcgcctccttctcatctttgattatctgcttcatcagtactccaaagcccctgtgtatctatttgagcaggtacagcataacctgctaagtcctccctttgggtgggcaagtggatcccaggacagcaacagccgccgggcaaccactcctctctatcatggattcaaagaagtagaagaaaactggtctaagcatttctcatcagatgctgtcccacaccccagattctactgtgtcctgtccccagaagcctcagaggatgatttgaaccgacttgattctgtggcatgtgacgtccttttctccaagcttgtcaagtatgatgagctttatgctgcactgacagccctgcttgcagctgggtcccagcttgatacagttaggagaaaggaaaacaagaatgtaacagccttggaggcctgtgcccttcaatattacttcttgatactgtggaggatcctaggaattttaccaccatcaaagacttacattaaccagctatccatgaactcacctgagatgagcgaatgtgacatcttgcacactctgcgatggtcttctcggctccggatcagctcctatgtcaactggataaaggatcaccttatcaaacagggaatgaaggctgagcatgctagctcgcttctagaactggcatccaccactaagtgtagctcagtgaaatatgatgttgaaatagtagaggaatacttcgctcgacagatctcatccttctgtagtatcgactgtaccaccatcttgcagctgcatgaaattcccagtctgcagtccatctacacccttgatgccgcgatctcaaaggtccaggtctctttggatgagcatttttctaagatggctgctgagactgatcctcataagtcgtctgagattaccaagaacctacttccagccacgctgcaactcattgacacctatgcatcgttcaccagagcctatttgctgcaaaactttaatgaagagggaacaactgagaaaccttccaaggagaaactgcaaggctttgctgctgttttggctattggctctagcaggtgcaaggcaaatactctgggtccgacactggttcagaatttgccatcgtcagtgcagactgtgtgtgagtcctggaacaacatcaataccaatgaatttcccaatattggatcctggcgcaatgcctttgccaatgacaccatcccttcagagagttatattagtgcagtgcaggctgcacacctggggactctctgtagccaaagtctgcccctggctgcttccctgaagcataccctcctctcactggtcaggttgactggagatcttattgtttggtcagatgagatgaacccaccacaggtaattcggacactgctacctcttcttttggaatcaagcactgagagtgttgccgagatcagtagcaactccctggaacgcatcttgggccctgctgagtctgatgagttcttggctcgtgtttatgagaagctgatcactggttgttacaacattctggccaatcatgcagatcctaacagtggactggatgaatccatcctggaggaatgtctccagtacttggaaaagcagctggaaagtagccaggctcgtaaagctatggaggagtttttctctgacagtggagaacttgtacagatcatgatggcaacagccaatgagaacctctctgctaaattctgtaaccgagttttgaaattcttcaccaaactcttccagctgactgagaagagccctaacccgagcctgttgcatctctgtggctccctggcacaactggcctgtgtggaacctgtgcgcctgcaggcctggctcacccgcatgactacatcgcccccaaaagattctgatcagctggatgtaattcaggagaaccggcagctgctgcagttactgaccacatacattgttcgggaaaacagccaagttggggaaggtgtgtgtgctgttcttctgggcaccctgactcccatggcaacagagatgctggccaacggtgatgggactggcttccctgaacttatggttgtgatggccactctggccagtgcaggtcaaggtgctggtcaccttcagcttcataatgctgctgtggattggctgagcagatgcaagaaatacctgtcacagaagaatgtagttgaaaaactgaatgccaatgtaatgcatggaaagcatgtgatgatcttggagtgcacatgccatatcatgtcttacttggctgatgtcacgaatgccctgagccagagtaatggtcaaggcccaagtcatctctcagtggatggggaagagcgggccattgaagtagactcagactgggtggaggagttggcggtggaagaggaagattcccaggctgaggattcagatgaagattctctttgcaataaactctgcacttttacgatcacacagaaagaattcatgaaccagcattggtaccactgtcacacctgtaaaatggtggatggcgtgggtgtctgcacagtgtgtgctaaggtgtgccacaaggatcatgagatttcctatgccaagtatggatccttcttctgtgactgtggagccaaggaagatggcagctgtttggctctggtgaagagaactcctagcagtggcatgagctctaccatgaaggagtcggcatttcagagtgaacccaggatttcagagagtctagtgcgtcatgccagcacctcctcgccagctgacaaagccaaggttaccatcagtgatggaaaggttgctgacgaagagaagcccaagaagagcagcctctgccgcacagtagagggctgccgggaggaattacagaaccaggccaatttctccttcgctcctctcgtgttagacatgcttaatttccttatggatgccattcagaccaacttccagcaagcttcagccgtcgggagcagcagccgtgctcagcaagccctcagtgagctacacactgtggagaaggcagtggagatgacagaccagctgatggttcccaccttagggtcccaggaaggtgcctttgagaatgtgcggatgaattacagtggagaccagggccagaccatccggcagctgatcagtgctcatgtgctcaggcgggtggctatgtgtgtgctctcctctccccatgggcgccgccaacatttggctgtcagccatgagaagggcaagatcaccgttctgcagctctctgcactcctgaagcaagcagattccagcaaaaggaagttaactctgacccgcttggcttctgccccagttccttttactgtgttgagcctcacaggaaatccctgcaaggaagactacttggcggtttgtgggctaaaggactgtcatgtgctcacctttagtagctcaggctctgtttcggatcacttggttttgcaccctcagttggcaacggggaacttcatcatcaaagccgtgtggttacctggttcacagaccgagttagcaattgtcaccgcagactttgttaagatttatgacctgtgtgttgatgccttgagtccaaccttctattttctcctgccaagctcaaagataagagatgttaccttccttttcaatgaggagggaaagaacatcattgttataatgtcttcggctgggtacatctatactcagcttatggaagaggccagcagtgcccagcagggacccttctatgtcactaatgtgttggaaatcaatcatgaggacctgaagcaggacagtaacagccaggtggcgggcggtggtgtgtccgtgtactactcccacgtgttgcagatgttgttcttcagctattgtcaaggcaaatcattcgcagccaccatcagcaggacaaccctggaggtgttgcaactcttccccatcaacatcaaaagttttgttgtctgcagttccaatggtggcagtaagacttctcctgctctttgccagtggtctgaggtgatgaaccaccctggcttggtgtgctgtgtccagcaaactacaggggtgccgctggtagttatggtgaaaccagacacttttcttatccaggagattaagactcttcctgctaaagcgaagatccaagacatggttgctattaggcacacggcctgcaatgagcagcagcggacaacaatgattctgctgtgtgaggatggcagcctgcgcatttacatggccaacgtggagaacacctcctactggctgcagccatccctgcagcccagcagtgtcatcagcatcatgaagcctgttcgaaagcgcaaaacagctacaatcacaacccgcacgtctagccaggtgactttccccattgacttttttgaacacaaccagcagctgacagatgtggagtttggtggtaacgacctcctacaggtctataatgcacaacagataaaacaccggctgaattccactggcatgtatgtggccaacaccaagcccggaggcttcaccattgagattagtaacaacaatagcactatggtgatgacaggcatgcggatccagattgggactcaagcaatagaacgggccccgtcatatatcgagatcttcggcagaactatgcagctcaacctgagtcgctcacgctggtttgacttccccttcaccagagaagaagccctgcaggctgataagaagctgaacctcttcattggggcctcggtggatccagcaggtgtcaccatgatagatgctgtaaaaatttatggcaagactaaggagcagtttggctggcctgatgagcccccagaagaattcccttctgcctctgtcagcaacatctgcccttcaaatctgaaccagagcaacggcactggagatagcgactcagctgcccccactacgaccagtggaactgtcctggagagttctgaaactgagtccctaaccaagctggaccggctggttgtgagttctttagaagccctggaaagctgctttgccgttggcccaatcatcgagaaggagagaaacaagaatgctgctcaggagctggccactttgctgttgtccctgccagcacctgccagtgtccagcagcagtccaagagccttctggccagcctgcacaccagccgctcggcctaccacagccacaaggatcaggccttgctgagcaaagctgtgcagtgtctcaacacatctagcaaagagggcaaggatttggaccctgaggtgttccagaggctagtgatcacagctcgctccattgccatcatgcgccccaacaaccttgtccactttacggagtcaaagctgccccagatggaaacagactgtttttttcctagatgtgcctgctggagtctagggatagttggcatattgattggggccccacttgaaactccctccccagaaggaatggatgaagggaaggaaccgcagaagcagttggaaggagattgctgtagtttcatcacccagcttgtgaaccacttctggaaactccatgcatccaaacccaagaatgccttcttggcacctgcctgccttccaggactaactcatattgaagctactgtcaatgctctggtggacatcatccatggctactgtacctgtgagctggattgtattaacacagcatccaagatctacatgcagatgctcttgtgtcctgatcctgctgtgagcttctcttgtaaacaagctctaattcgagtcctaaggcccaggaacaaacggagacatgtgactttaccctcttcccctcgaagcaacactccaatgggagacaaggatgatgatgacgatgatgatgcagatgagaaaatgcagtcatcagggatcccgaatggtggtcacatccgtcaggaaagccaggaacagagtgaggtggaccatggagattttgagatggtgtctgagtcgatggtcctggagacagctgaaaatgtcaacaatggcaacccctctcccctggaggccctgctggcaggcgcagagggcttcccccccatgctggacatcccacctgatgcagatgacgagaccatggttgaactagccattgccctgagcctgcagcaggaccaacaaggcagcagcagcagtgccctgggcctgcagagcctgggactgtccggccaggcacccagctcttcctctctggacgcaggaaccctctctgacaccacagcatcagcctcagacgacgagggcagtacagcagcgacagatggttctacccttcggacctctcctgctgaccacggtggtagtgtgggctcggagagcgggggcagtgcagtggactcagtggctggcgagcacagtgtatctggccggagcagtgcttatggcgatgctacagctgaggggcatccggctggaccaggaagtgtcagctcaagcactggagccatcagcaccaccactgggcaccaggagggagatggctccgagggagaaggagaaggagaaactgaaggagatgtccacactagcaacaggctgcacatggtccgtctaatgctgttggagagattactgcagaccctgcctcaattacgaaacgttggcggtgtccgggccatcccatacatgcaggtcattctaatgctcactacagatctggatggagaagatgagaaagacaagggggccctagacaacctgctctcccagcttattgctgagttgggtatggataaaaaggatgtctccaagaagaatgagcgcagcgccctgaatgaagtccatctggtagtaatgagactcctgagtgtcttcatgtcccgcaccaaatctggatccaagtcttccatatgtgagtcatcttccctcatctccagtgccacagcagcagctctactgagctctggggctgtggactactgcctgcacgtgctcaaatcactgctggaatattggaagagccaacagaatgacgaggagcctgtggctaccagccagttgctgaaaccacatactacctcctccccacctgacatgagcccattctttctccgccagtatgtgaagggtcatgctgctgatgtgtttgaggcctatactcagcttctaacagaaatggtactgaggcttccttaccaaatcaaaaagattactgacaccaattctcgaatcccacctcctgtctttgaccactcgtggttttactttctctccgagtacctcatgatccagcagactccatttgtgcgccgtcaagtccgcaaacttctgctcttcatctgtggatccaaagagaagtaccgccagctccgggatttgcacaccctggactctcacgtgcgtgggatcaagaagctgctagaagagcaggggatattcctccgggcaagtgtggttacagccagctcaggctccgccttgcaatatgacacactcatcagcctgatggagcacctgaaagcctgtgcagagattgccgcccagcgaaccatcaactggcagaaattctgcatcaaagatgactccgtcctgtacttcctcctccaagtcagtttccttgtggatgagggcgtgtccccagtgctgctgcaactgctctcctgtgctctgtgcggcagcaaggtgctcgctgcactggcagcctcttcgggatcctccagtgcttcttcctcctcagcccctgtggctgccagttctggacaagccacaacacagtccaagtcttccactaaaaagagcaagaaagaagaaaaagaaaaggagaaagatggtgagacctctggcagccaggaggaccagctgtgcacagctctggtgaaccagctgaacaaatttgccgataaggaaaccctgatccagttcctgcgttgtttcctgttagagtccaattcttcctcggtgcgctggcaggcccactgtctgacactgcacatctacagaaattccagcaaatctcaacaggagctcctgctagatctgatgtggtccatctggccagaactcccagcctatggtcgtaaggctgcccagtttgtggacctactaggatatttctccctgaaaactccacaaacagagaagaagttgaaggagtattcacagaaggctgtggagattctgcggactcaaaaccatattcttaccaaccaccccaactcgaacatttataacactttgtctggcttagtggagtttgatggctattacctggagagcgatccctgcctggtgtgtaataacccggaagtaccgttctgttatatcaagctgtcttccattaaagtggacacgcggtacaccaccacccagcaggttgtgaagctcattggcagtcacaccatcagcaaagtgacagtgaaaatcggggatctgaaacggaccaagatggtgcggaccatcaacctgtattataacaaccgaaccgtgcaggccatcgtggagttgaaaaacaagccagctcgctggcacaaagccaagaaggttcagctgacccctggacagacagaggtgaagattgacctgccgttgcccattgtggcctccaatctgatgattgagtttgcagacttctatgaaaactaccaggcctccacagagaccctgcagtgccctcgctgtagtgcctcggtccctgccaacccaggagtctgtggcaactgtggagagaatgtgtaccagtgtcacaaatgcagatccatcaactacgatgaaaaggatcccttcctctgcaatgcctgtggcttctgtaaatatgcccgcttcgacttcatgctctatgccaagccttgctgtgcagtggatcccattgagaatgaagaagaccggaagaaggctgtatccaacatcaatacacttttggacaaagctgatcgagtgtatcatcagctgatgggacaccggccacagctggagaacctgctctgcaaagtgaatgaggcagctccagaaaagccacaggatgactcaggaacagcagggggcatcagctccacttctgccagtgtgaatcgttacatcctgcagttggctcaggagtattgtggagactgcaagaactcttttgatgaactctccaaaatcatccagaaagtctttgcttcgcgcaaagagttgttggaatatgacctacagcagagggaagcagccactaaatcatcccggacctccgtgcagcccacattcactgccagccagtaccgtgccttatccgtcctgggctgtggccacacatcctccaccaagtgctatggctgcgcctcggctgtcacagaacattgtatcacactacttcgggccctggccaccaacccagccttgaggcacatccttgtctcccagggccttatccgggagctctttgattataatcttcgccgaggggctgcggccatgcgggaggaggtccgccagctcatgtgcctcctaactcgagacaacccagaagccacccaacagatgaatgacctgattattggcaaggtctccacagccctgaagggccactgggccaaccccgatctggcaagtagcctgcagtatgaaatgctgctgctgacggattctatctccaaggaggacagctgctgggagctccggttacgctgtgctctcagccttttcctcatggctgtgaacattaagactcctgtggtggttgaaaacattaccctcatgtgcctgaggatcttgcagaagctgataaaaccacctgctcccactagcaagaagaacaaggatgtccccgttgaggccctcaccacggtgaagccatactgcaatgagatccatgcccaggctcaactgtggctcaagagagaccccaaggcatcctatgatgcctggaagaagtgtcttcctatcagagggatagatggcaatgggaaagcccccagcaaatcagagctccgccatctctatttgactgagaagtatgtgtggaggtggaaacagttcctgagtcgtcgggggaagaggacctcccccttggatctcaaactggggcataacaactggctgcgacaagtgcttttcactccagcaacgcaggccgcacggcaggcagcctgtaccattgtggaagctctagccaccattcccagccgcaagcagcaggtcctggacctgcttaccagttacctggatgagctgagcatagctggggagtgtgcagctgagtacctggctctctaccagaagctcatcacttctgcgcactggaaagtctacttggcagctcggggagtcctaccctatgtgggcaacctcatcaccaaggaaatagctcgtctgctggccctggaggaggctaccctgagtaccgatctgcagcagggttatgcccttaaaagtctcacaggccttctctcctcctttgttgaggtggaatccatcaaaagacattttaaaagtcgcttggtgggtactgtgctgaatggatacctgtgcttgcggaagctggtggtgcagaggaccaagctgatcgatgagacgcaggacatgctgctggagatgctggaggacatgaccacaggtacagaatcagaaaccaaggccttcatggctgtgtgcattgagacagccaagcgctacaatctggatgactaccggaccccggtgttcatcttcgagaggctctgcagcatcatttatcctgaggagaatgaagtcactgagttctttgtgaccctggagaaggatccccaacaagaagacttcttacagggcaggatgcctgggaacccgtatagcagcaatgagccaggcatcgggccgctgatgagggatataaagaacaagatttgccaggactgtgacttagtggccctcctggaagatgacagtggcatggagcttctagtgaacaataaaatcattagtttggaccttcctgtggctgaagtttacaagaaagtctggtgtaccacgaatgagggagagcccatgaggattgtttatcgtatgcgggggctgctgggcgatgccacagaggagttcattgagtccctggactctactacagatgaagaagaagatgaagaagaagtgtataaaatggctggtgtgatggcccagtgtgggggcctggaatgcatgcttaacagactcgcagggatcagagatttcaagcagggacgccaccttctaacagtgctactgaaattgttcagttactgcgtgaaggtgaaagtcaaccggcagcaactggtcaaactggaaatgaacaccttgaacgtcatgctggggaccctaaacctggcccttgtagctgaacaagaaagcaaggacagtgggggtgcagctgtggctgagcaggtgcttagcatcatggagatcattctagatgagtccaatgctgagcccctgagtgaggacaagggcaacctcctcctgacaggtgacaaggatcaactggtgatgctcttggaccagatcaacagcacctttgttcgctccaaccccagtgtgctccagggcctgcttcgcatcatcccgtacctttcctttggagaggtggagaaaatgcagatcttggtggagcgattcaaaccatactgcaactttgataaatatgatgaagatcacagtggtgatgataaagtcttcctggactgcttctgtaaaatagctgctggcatcaagaacaacagcaatgggcaccagctgaaggatctgattctccagaaggggatcacccagaatgcacttgactacatgaaaaagcacatccctagcgccaagaatttggatgccgacatctggaaaaagtttttgtctcgcccagccttgccatttatcctaaggctgcttcggggcctggccatccagcaccctggcacccaggttctgattggaactgattccatcccgaacctgcataagctggagcaggtgtccagtgatgagggcattgggaccttggcagagaacctgctggaagccctgcgggaacaccctgacgtaaacaagaagattgacgcagcccgcagggagacccgggcagagaagaagcgcatggccatggcaatgaggcagaaggccctgggcaccctgggcatgacgacaaatgaaaagggccaggtcgtgaccaagacagcactcctgaagcagatggaagagctgatcgaggagcctggcctcacgtgctgcatctgcagggagggatacaagttccagcccacaaaggtcctgggcatttataccttcacgaagcgggtagccttggaggagatggagaataagccccggaaacagcagggctacagcaccgtgtcccacttcaacattgtgcactacgactgccatctggctgccgtcaggttggctcgaggccgggaagagtgggagagtgccgccctgcagaatgccaacaccaagtgcaacgggctccttccggtctggggacctcatgtccctgaatcagcttttgccacttgcttggcaagacacaacacttacctccaggaatgtacaggccagcgggagcccacgtatcagctcaacatccatgacatcaaactgctcttcctgcgcttcgccatggagcagtcgttcagcgcagacactggcgggggcggccgggagagcaacatccacctgatcccgtacatcattcacactgtgctttacgtcctgaacacaacccgagcaacttcccgagaagagaagaacctccaaggctttctggaacagcccaaggagaagtgggtggagagtgcctttgaagtggacgggccctactatttcacagtcttggcccttcacatcctgccccctgagcagtggagagccacacgtgtggaaatcttgcggaggctgttggtgacctcgcaggctcgggcagtggctccaggtggagccaccaggctgacagataaggcagtgaaggactattccgcttaccgttcttcccttctcttttgggccctcgtcgatctcatttacaacatgtttaagaaggtgcctaccagtaacacagagggaggctggtcctgctctctcgctgagtacatccgccacaacgacatgcccatctacgaagctgccgacaaagccctgaaaaccttccaggaggagttcatgccagtggagaccttctcagagttcctcgatgtggccggtcttttatcagaaatcaccgatccagagagcttcctgaaggacctgttgaactcagtcccctgaccaccacacagcagctgcggcggcgaagacgaagctggcttgccttccaccctctgttctccctccttgtgcattaagttccctccgcgggatgctgcattgttaccccgccctcccctctctcatttttcttggtgtggcttggggtttttaggcttcctgttttatctcgtgtgtgtggtgcaccagctatgaggttgtctgtaacccaagccatcaaagggcctgtacatacctaggagccatgagttgtcccggccagcttcatacttgagtgtgcacatcttgagaaataaacaagtgacttaacacacattgaaaagg

SEQ ID NO: 434 - DNA, 16082 bp, Homo sapiens
agattgcgtcacttccgccccctcctgggaggcggcgctgggccggtggcaagcccccggagggagccgcagtagtacgacggaagatggcgacgagcggcggcgaagaggcggcggcagcggctccggcgccggggaccccggcaacgggggcggacacgaccccgggctgggaggtggctgtgcggcccctgctgtccgcgtcctactccgccttcgagatgaaggagttgccgcagctggtggcctcagtcatcgagagtgaatcagaaatcctgcaccatgagaagcagtacgagccattctactcatcttttgttgcactttccacacactatattacaacagtttgcagtctcattccccggaaccaacttcagtcagtggcagcagcctgtaaagttctaattgagttttctctcctgcgtctggagaatccagatgaggcttgtgctgtgtcccagaaacacttgattctcctaatcaagggcctgtgcactggctgtagccgactagatagaactgaaattatcacatttacagcaatgatgaaatccgccaagctgccccaaacagtgaagacactttcagacgtggaagatcagaaagagctggcctcaccagtaagccctgagttgaggcaaaaggaggtacagatgaattttttgaaccagctgacctcagtttttaaccctagaactgtagcatcacaacctatcagtacacagactctggtggaaggagaaaatgatgagcagtcatctacagatcaagcctcagctatcaaaaccaagaatgtgttcatagctcagaacgtggctagtcttcaagagcttggtggctcggagaagctactgcgtgtatgtttgaacctgccatatttcctacgctatatcaatcggttccaagatgcagttttagctaattccttcttcataatgcctgcaacagtagcagatgccactgctgttcgtaatggctttcattcattggtgattgatgtaactatggcattggataccctttctctacctgtgttggaacctctcaatccttctcgtctacaagatgtgacagtcctcagcctaagttgtctgtatgcaggtgtgagtgtggcaacgtgcatggccatcctccatgtgggtagtgcccagcaagtgcggacagggtccacgagctccaaagaagatgactatgaaagtgacgcagctacaattgtccagaaatgtctcgaaatctatgacatgattggacaagcaatcagcagttctcgccgggctggtggtgagcactatcagaatttccaattgctgggtgcttggtgcttgttaaacagccttttcctcatactgaacctcagtcctactgcgttggctgataaggggaaagagaaggacccactggctgccctccgagtcagagacatcctttctcgtactaaagagggagtgggctcccctaaactggggcctggaaaagggcatcagggatttggggtactctcagtaatattggcaaaccatgccatcaaactgctaacgtctctctttcaagacctacaagtggaggcccttcacaagggttgggagacagatggcccccctgcagccttgagcattatggcccagagcacctccatacagaggattcaacggctgattgactctgtcccactgatgaacctgctcttgacgttactttcaacttcctacagaaaggcatgtgtcctgcagcggcagaggaagggctccatgagcagcgatgccagcgcctccaccgactccaatacttactatgaggacgatttcagtagcacggaggaggacagcagccaagacgatgacagtgagcctattttggggcaatggtttgaggagactatttctcccagtaaagagaaagcagcacctccgcctcctcccccacctcctccactggaaagctctcctcgggttaaaagccccagtaagcaggcccctggtgagaagggcaacattctggcgagtcgcaaagatcctgagttgttcttaggtctggcttccaacattttgaacttcatcacctcttccatgctgaactctcggaacaattttatccgaaactatctgagtgtatctctttcagaacaccatatggccaccctagccagtatcatcaaggaggtggacaaagatggactcaagggttcatcagatgaagagtttgctgcagctctctatcacttcaaccactcactggtaacctctgaccttcagtcacctaacctgcagaacacactgttgcagcagctaggagtggctcctttttctgagggcccttggcccttgtacattcaccctcaaagcctctctgtgctttcacgcctcctgctcatctggcaacataaagccagtgctcaaggtgaccctgacgtcccagaatgccttaaagtttgggacaggtttttgtctacaatgaagcagaatgccctgcaaggtgtggtgcccagtgagacagaggatctgaatgtagaacacctgcagatgctcctcctcattttccacaatttcaccgagacaggccggcgggccatattgtcgctttttgtccagatcatccaggagttgagcgtcaacatggatgctcagatgcgcttcgtgccgcttatcttggctcgcctccttctcatctttgattatctgcttcatcagtactccaaagcccctgtgtatctatttgagcaggtacagcataacctgctaagtcctccctttgggtgggcaagtggatcccaggacagcaacagccgccgggcaaccactcctctctatcatggattcaaagaagtagaagaaaactggtctaagcatttctcatcagatgctgtcccacaccccagattctactgtgtcctgtccccagaagcctcagaggatgatttgaaccgacttgattctgtggcatgtgacgtccttttctccaagcttgtcaagtatgatgagctttatgctgcactgacagccctgcttgcagctgggtcccagcttgatacagttaggagaaaggaaaacaagaatgtaacagccttggaggcctgtgcccttcaatattacttcttgatactgtggaggatcctaggaattttaccaccatcaaagacttacattaaccagctatccatgaactcacctgagatgagcgaatgtgacatcttgcacactctgcgatggtcttctcggctccggatcagctcctatgtcaactggataaaggatcaccttatcaaacagggaatgaaggctgagcatgctagctcgcttctagaactggcatccaccactaagtgtagctcagtgaaatatgatgttgaaatagtagaggaatacttcgctcgacagatctcatccttctgtagtatcgactgtaccaccatcttgcagctgcatgaaattcccagtctgcagtccatctacacccttgatgccgcgatctcaaaggtccaggtctctttggatgagcatttttctaagatggctgctgagactgatcctcataagtcgtctgagattaccaagaacctacttccagccacgctgcaactcattgacacctatgcatcgttcaccagagcctatttgctgcaaaactttaatgaagagggaacaactgagaaaccttccaaggagaaactgcaaggctttgctgctgttttggctattggctctagcaggtgcaaggcaaatactctgggtccgacactggttcagaatttgccatcgtcagtgcagactgtgtgtgagtcctggaacaacatcaataccaatgaatttcccaatattggatcctggcgcaatgcctttgccaatgacaccatcccttcagagagttatattagtgcagtgcaggctgcacacctggggactctctgtagccaaagtctgcccctggctgcttccctgaagcataccctcctctcactggtcaggttgactggagatcttattgtttggtcagatgagatgaacccaccacaggtaattcggacactgctacctcttcttttggaatcaagcactgagagtgttgccgagatcagtagcaactccctggaacgcatcttgggccctgctgagtctgatgagttcttggctcgtgtttatgagaagctgatcactggttgttacaacattctggccaatcatgcagatcctaacagtggactggatgaatccatcctggaggaatgtctccagtacttggaaaagcagctggaaagtagccaggctcgtaaagctatggaggagtttttctctgacagtggagaacttgtacagatcatgatggcaacagccaatgagaacctctctgctaaattctgtaaccgagttttgaaattcttcaccaaactcttccagctgactgagaagagccctaacccgagcctgttgcatctctgtggctccctggcacaactggcctgtgtggaacctgtgcgcctgcaggcctggctcacccgcatgactacatcgcccccaaaagattctgatcagctggatgtaattcaggagaaccggcagctgctgcagttactgaccacatacattgttcgggaaaacagccaagttggggaaggtgtgtgtgctgttcttctgggcaccctgactcccatggcaacagagatgctggccaacggtgatgggactggcttccctgaacttatggttgtgatggccactctggccagtgcaggtcaaggtgctggtcaccttcagcttcataatgctgctgtggattggctgagcagatgcaagaaatacctgtcacagaagaatgtagttgaaaaactgaatgccaatgtaatgcatggaaagcatgtgatgatcttggagtgcacatgccatatcatgtcttacttggctgatgtcacgaatgccctgagccagagtaatggtcaaggcccaagtcatctctcagtggatggggaagagcgggccattgaagtagactcagactgggtggaggagttggcggtggaagaggaagattcccaggctgaggattcagatgaagattctctttgcaataaactctgcacttttacgatcacacagaaagaattcatgaaccagcattggtaccactgtcacacctgtaaaatggtggatggcgtgggtgtctgcacagtgtgtgctaaggtgtgccacaaggatcatgagatttcctatgccaagtatggatccttcttctgtgactgtggagccaaggaagatggcagctgtttggctctggtgaagagaactcctagcagtggcatgagctctaccatgaaggagtcggcatttcagagtgaacccaggatttcagagagtctagtgcgtcatgccagcacctcctcgccagctgacaaagccaaggttaccatcagtgatggaaaggttgctgacgaagagaagcccaagaagagcagcctctgccgcacagtagagggctgccgggaggaattacagaaccaggccaatttctccttcgctcctctcgtgttagacatgcttaatttccttatggatgccattcagaccaacttccagcaagcttcagccgtcgggagcagcagccgtgctcagcaagccctcagtgagctacacactgtggagaaggcagtggagatgacagaccagctgatggttcccaccttagggtcccaggaaggtgcctttgagaatgtgcggatgaattacagtggagaccagggccagaccatccggcagctgatcagtgctcatgtgctcaggcgggtggctatgtgtgtgctctcctctccccatgggcgccgccaacatttggctgtcagccatgagaagggcaagatcaccgttctgcagctctctgcactcctgaagcaagcagattccagcaaaaggaagttaactctgacccgcttggcttctgccccagttccttttactgtgttgagcctcacaggaaatccctgcaaggaagactacttggcggtttgtgggctaaaggactgtcatgtgctcacctttagtagctcaggctctgtttcggatcacttggttttgcaccctcagttggcaacggggaacttcatcatcaaagccgtgtggttacctggttcacagaccgagttagcaattgtcaccgcagactttgttaagatttatgacctgtgtgttgatgccttgagtccaaccttctattttctcctgccaagctcaaagataagagatgttaccttccttttcaatgaggagggaaagaacatcattgttataatgtcttcggctgggtacatctatactcagcttatggaagaggccagcagtgcccagcagggacccttctatgtcactaatgtgttggaaatcaatcatgaggacctgaagcaggacagtaacagccaggtggcgggcggtggtgtgtccgtgtactactcccacgtgttgcagatgttgttcttcagctattgtcaaggcaaatcattcgcagccaccatcagcaggacaaccctggaggtgttgcaactcttccccatcaacatcaaaagttttgttgtctgcagttccaatggtggcagtaagacttctcctgctctttgccagtggtctgaggtgatgaaccaccctggcttggtgtgctgtgtccagcaaactacaggggtgccgctggtagttatggtgaaaccagacacttttcttatccaggagattaagactcttcctgctaaagcgaagatccaagacatggttgctattaggcacacggcctgcaatgagcagcagcggacaacaatgattctgctgtgtgaggatggcagcctgcgcatttacatggccaacgtggagaacacctcctactggctgcagccatccctgcagcccagcagtgtcatcagcatcatgaagcctgttcgaaagcgcaaaacagctacaatcacaacccgcacgtctagccaggtgactttccccattgacttttttgaacacaaccagcagctgacagatgtggagtttggtggtaacgacctcctacaggtctataatgcacaacagataaaacaccggctgaattccactggcatgtatgtggccaacaccaagcccggaggcttcaccattgagattagtaacaacaatagcactatggtgatgacaggcatgcggatccagattgggactcaagcaatagaacgggccccgtcatatatcgagatcttcggcagaactatgcagctcaacctgagtcgctcacgctggtttgacttccccttcaccagagaagaagccctgcaggctgataagaagctgaacctcttcattggggcctcggtggatccagcaggtgtcaccatgatagatgctgtaaaaatttatggcaagactaaggagcagtttggctggcctgatgagcccccagaagaattcccttctgcctctgtcagcaacatctgcccttcaaatctgaaccagagcaacggcactggagatagcgactcagctgcccccactacgaccagtggaactgtcctggagaggctggttgtgagttctttagaagccctggaaagctgctttgccgttggcccaatcatcgagaaggagagaaacaagaatgctgctcaggagctggccactttgctgttgtccctgccagcacctgccagtgtccagcagcagtccaagagccttctggccagcctgcacaccagccgctcggcctaccacagccacaaggatcaggccttgctgagcaaagctgtgcagtgtctcaacacatctagcaaagagggcaaggatttggaccctgaggtgttccagaggctagtgatcacagctcgctccattgccatcatgcgccccaacaaccttgtccactttacggagtcaaagctgccccagatggaaacagactgtttttttcctagatgtgcctgctggagtctagggatagttggcatattgattggggccccacttgaaactccctccccagaaggaatggatgaagggaaggaaccgcagaagcagttggaaggagattgctgtagtttcatcacccagcttgtgaaccacttctggaaactccatgcatccaaacccaagaatgccttcttggcacctgcctgccttccaggactaactcatattgaagctactgtcaatgctctggtggacatcatccatggctactgtacctgtgagctggattgtattaacacagcatccaagatctacatgcagatgctcttgtgtcctgatcctgctgtgagcttctcttgtaaacaagctctaattcgagtcctaaggcccaggaacaaacggagacatgtgactttaccctcttcccctcgaagcaacactccaatgggagacaaggatgatgatgacgatgatgatgcagatgagaaaatgcagtcatcagggatcccgaatggtggtcacatccgtcaggaaagccaggaacagagtgaggtggaccatggagattttgagatggtgtctgagtcgatggtcctggagacagctgaaaatgtcaacaatggcaacccctctcccctggaggccctgctggcaggcgcagagggcttcccccccatgctggacatcccacctgatgcagatgacgagaccatggttgaactagccattgccctgagcctgcagcaggaccaacaaggcagcagcagcagtgccctgggcctgcagagcctgggactgtccggccaggcacccagctcttcctctctggacgcaggaaccctctctgacaccacagcatcagctctcgttactctctcagctccagcctcagacgacgagggcagtacagcagcgacagatggttctacccttcggacctctcctgctgaccacggtggtagtgtgggctcggagagcgggggcagtgcagtggactcagtggctggcgagcacagtgtatctggccggagcagtgcttatggcgatgctacagctgaggggcatccggctggaccaggaagtgtcagctcaagcactggagccatcagcaccaccactgggcaccaggagggagatggctccgagggagaaggagaaggagaaactgaaggagatgtccacactagcaacaggctgcacatggtccgtctaatgctgttggagagattactgcagaccctgcctcaattacgaaacgttggcggtgtccgggccatcccatacatgcaggtcattctaatgctcactacagatctggatggagaagatgagaaagacaagggggccctagacaacctgctctcccagcttattgctgagttgggtatggataaaaaggatgtctccaagaagaatgagcgcagcgccctgaatgaagtccatctggtagtaatgagactcctgagtgtcttcatgtcccgcaccaaatctggatccaagtcttccatatgtgagtcatcttccctcatctccagtgccacagcagcagctctactgagctctggggctgtggactactgcctgcacgtgctcaaatcactgctggaatattggaagagccaacagaatgacgaggagcctgtggctaccagccagttgctgaaaccacatactacctcctccccacctgacatgagcccattctttctccgccagtatgtgaagggtcatgctgctgatgtgtttgaggcctatactcagcttctaacagaaatggtactgaggcttccttaccaaatcaaaaagattactgacaccaattctcgaatcccacctcctgtctttgaccactcgtggttttactttctctccgagtacctcatgatccagcagactccatttgtgcgccgtcaagtccgcaaacttctgctcttcatctgtggatccaaagagaagtaccgccagctccgggatttgcacaccctggactctcacgtgcgtgggatcaagaagctgctagaagagcaggggatattcctccgggcaagtgtggttacagccagctcaggctccgccttgcaatatgacacactcatcagcctgatggagcacctgaaagcctgtgcagagattgccgcccagcgaaccatcaactggcagaaattctgcatcaaagatgactccgtcctgtacttcctcctccaagtcagtttccttgtggatgagggcgtgtccccagtgctgctgcaactgctctcctgtgctctgtgcggcagcaaggtgctcgctgcactggcagcctcttcgggatcctccagtgcttcttcctcctcagcccctgtggctgccagttctggacaagccacaacacagtccaagtcttccactaaaaagagcaagaaagaagaaaaagaaaaggagaaagatggtgagacctctggcagccaggaggaccagctgtgcacagctctggtgaaccagctgaacaaatttgccgataaggaaaccctgatccagttcctgcgttgtttcctgttagagtccaattcttcctcggtgcgctggcaggcccactgtctgacactgcacatctacagaaattccagcaaatctcaacaggagctcctgctagatctgatgtggtccatctggccagaactcccagcctatggtcgtaaggctgcccagtttgtggacctactaggatatttctccctgaaaactccacaaacagagaagaagttgaaggagtattcacagaaggctgtggagattctgcggactcaaaaccatattcttaccaaccaccccaactcgaacatttataacactttgtctggcttagtggagtttgatggctattacctggagagcgatccctgcctggtgtgtaataacccggaagtaccgttctgttatatcaagctgtcttccattaaagtggacacgcggtacaccaccacccagcaggttgtgaagctcattggcagtcacaccatcagcaaagtgacagtgaaaatcggggatctgaaacggaccaagatggtgcggaccatcaacctgtattataacaaccgaaccgtgcaggccatcgtggagttgaaaaacaagccagctcgctggcacaaagccaagaaggttcagctgacccctggacagacagaggtgaagattgacctgccgttgcccattgtggcctccaatctgatgattgagtttgcagacttctatgaaaactaccaggcctccacagagaccctgcagtgccctcgctgtagtgcctcggtccctgccaacccaggagtctgtggcaactgtggagagaatgtgtaccagtgtcacaaatgcagatccatcaactacgatgaaaaggatcccttcctctgcaatgcctgtggcttctgtaaatatgcccgcttcgacttcatgctctatgccaagccttgctgtgcagtggatcccattgagaatgaagaagaccggaagaaggctgtatccaacatcaatacacttttggacaaagctgatcgagtgtatcatcagctgatgggacaccggccacagctggagaacctgctctgcaaagtgaatgaggcagctccagaaaagccacaggatgactcaggaacagcagggggcatcagctccacttctgccagtgtgaatcgttacatcctgcagttggctcaggagtattgtggagactgcaagaactcttttgatgaactctccaaaatcatccagaaagtctttgcttcgcgcaaagagttgttggaatatgacctacagcagagggaagcagccactaaatcatcccggacctccgtgcagcccacattcactgccagccagtaccgtgccttatccgtcctgggctgtggccacacatcctccaccaagtgctatggctgcgcctcggctgtcacagaacattgtatcacactacttcgggccctggccaccaacccagccttgaggcacatccttgtctcccagggccttatccgggagctctttgattataatcttcgccgaggggctgcggccatgcgggaggaggtccgccagctcatgtgcctcctaactcgagacaacccagaagccacccaacagatgaatgacctgattattggcaaggtctccacagccctgaagggccactgggccaaccccgatctggcaagtagcctgcagtatgaaatgctgctgctgacggattctatctccaaggaggacagctgctgggagctccggttacgctgtgctctcagccttttcctcatggctgtgaacattaagactcctgtggtggttgaaaacattaccctcatgtgcctgaggatcttgcagaagctgataaaaccacctgctcccactagcaagaagaacaaggatgtccccgttgaggccctcaccacggtgaagccatactgcaatgagatccatgcccaggctcaactgtggctcaagagagaccccaaggcatcctatgatgcctggaagaagtgtcttcctatcagagggatagatggcaatgggaaagcccccagcaaatcagagctccgccatctctatttgactgagaagtatgtgtggaggtggaaacagttcctgagtcgtcgggggaagaggacctcccccttggatctcaaactggggcataacaactggctgcgacaagtgcttttcactccagcaacgcaggccgcacggcaggcagcctgtaccattgtggaagctctagccaccattcccagccgcaagcagcaggtcctggacctgcttaccagttacctggatgagctgagcatagctggggagtgtgcagctgagtacctggctctctaccagaagctcatcacttctgcgcactggaaagtctacttggcagctcggggagtcctaccctatgtgggcaacctcatcaccaaggaaatagctcgtctgctggccctggaggaggctaccctgagtaccgatctgcagcagggttatgcccttaaaagtctcacaggccttctctcctcctttgttgaggtggaatccatcaaaagacattttaaaagtcgcttggtgggtactgtgctgaatggatacctgtgcttgcggaagctggtggtgcagaggaccaagctgatcgatgagacgcaggacatgctgctggagatgctggaggacatgaccacaggtacagaatcagaaaccaaggccttcatggctgtgtgcattgagacagccaagcgctacaatctggatgactaccggaccccggtgttcatcttcgagaggctctgcagcatcatttatcctgaggagaatgaagtcactgagttctttgtgaccctggagaaggatccccaacaagaagacttcttacagggcaggatgcctgggaacccgtatagcagcaatgagccaggcatcgggccgctgatgagggatataaagaacaagatttgccaggactgtgacttagtggccctcctggaagatgacagtggcatggagcttctagtgaacaataaaatcattagtttggaccttcctgtggctgaagtttacaagaaagtctggtgtaccacgaatgagggagagcccatgaggattgtttatcgtatgcgggggctgctgggcgatgccacagaggagttcattgagtccctggactctactacagatgaagaagaagatgaagaagaagtgtataaaatggctggtgtgatggcccagtgtgggggcctggaatgcatgcttaacagactcgcagggatcagagatttcaagcagggacgccaccttctaacagtgctactgaaattgttcagttactgcgtgaaggtgaaagtcaaccggcagcaactggtcaaactggaaatgaacaccttgaacgtcatgctggggaccctaaacctggcccttgtagctgaacaagaaagcaaggacagtgggggtgcagctgtggctgagcaggtgcttagcatcatggagatcattctagatgagtccaatgctgagcccctgagtgaggacaagggcaacctcctcctgacaggtgacaaggatcaactggtgatgctcttggaccagatcaacagcacctttgttcgctccaaccccagtgtgctccagggcctgcttcgcatcatcccgtacctttcctttggagaggtggagaaaatgcagatcttggtggagcgattcaaaccatactgcaactttgataaatatgatgaagatcacagtggtgatgataaagtcttcctggactgcttctgtaaaatagctgctggcatcaagaacaacagcaatgggcaccagctgaaggatctgattctccagaaggggatcacccagaatgcacttgactacatgaaaaagcacatccctagcgccaagaatttggatgccgacatctggaaaaagtttttgtctcgcccagccttgccatttatcctaaggctgcttcggggcctggccatccagcaccctggcacccaggttctgattggaactgattccatcccgaacctgcataagctggagcaggtgtccagtgatgagggcattgggaccttggcagagaacctgctggaagccctgcgggaacaccctgacgtaaacaagaagattgacgcagcccgcagggagacccgggcagagaagaagcgcatggccatggcaatgaggcagaaggccctgggcaccctgggcatgacgacaaatgaaaagggccaggtcgtgaccaagacagcactcctgaagcagatggaagagctgatcgaggagcctggcctcacgtgctgcatctgcagggagggatacaagttccagcccacaaaggtcctgggcatttataccttcacgaagcgggtagccttggaggagatggagaataagccccggaaacagcagggctacagcaccgtgtcccacttcaacattgtgcactacgactgccatctggctgccgtcaggttggctcgaggccgggaagagtgggagagtgccgccctgcagaatgccaacaccaagtgcaacgggctccttccggtctggggacctcatgtccctgaatcagcttttgccacttgcttggcaagacacaacacttacctccaggaatgtacaggccagcgggagcccacgtatcagctcaacatccatgacatcaaactgctcttcctgcgcttcgccatggagcagtcgttcagcgcagacactggcgggggcggccgggagagcaacatccacctgatcccgtacatcattcacactgtgctttacgtcctgaacacaacccgagcaacttcccgagaagagaagaacctccaaggctttctggaacagcccaaggagaagtgggtggagagtgcctttgaagtggacgggccctactatttcacagtcttggcccttcacatcctgccccctgagcagtggagagccacacgtgtggaaatcttgcggaggctgttggtgacctcgcaggctcgggcagtggctccaggtggagccaccaggctgacagataaggcagtgaaggactattccgcttaccgttcttcccttctcttttgggccctcgtcgatctcatttacaacatgtttaagaaggtgcctaccagtaacacagagggaggctggtcctgctctctcgctgagtacatccgccacaacgacatgcccatctacgaagctgccgacaaagccctgaaaaccttccaggaggagttcatgccagtggagaccttctcagagttcctcgatgtggccggtcttttatcagaaatcaccgatccagagagcttcctgaaggacctgttgaactcagtcccctgaccaccacacagcagctgcggcggcgaagacgaagctggcttgccttccaccctctgttctccctccttgtgcattaagttccctccgcgggatgctgcattgttaccccgccctcccctctctcatttttcttggtgtggcttggggtttttaggcttcctgttttatctcgtgtgtgtggtgcaccagctatgaggttgtctgtaacccaagccatcaaagggcctgtacatacctaggagccatgagttgtcccggccagcttcatacttgagtgtgcacatcttgagaaataaacaagtgacttaacacacattgaaaagg

SEQ ID NO: 435 - DNA, 16067 bp, Homo sapiens
agattgcgtcacttccgccccctcctgggaggcggcgctgggccggtggcaagcccccggagggagccgcagtagtacgacggaagatggcgacgagcggcggcgaagaggcggcggcagcggctccggcgccggggaccccggcaacgggggcggacacgaccccgggctgggaggtggctgtgcggcccctgctgtccgcgtcctactccgccttcgagatgaaggagttgccgcagctggtggcctcagtcatcgagagtgaatcagaaatcctgcaccatgagaagcagtacgagccattctactcatcttttgttgcactttccacacactatattacaacagtttgcagtctcattccccggaaccaacttcagtcagtggcagcagcctgtaaagttctaattgagttttctctcctgcgtctggagaatccagatgaggcttgtgctgtgtcccagaaacacttgattctcctaatcaagggcctgtgcactggctgtagccgactagatagaactgaaattatcacatttacagcaatgatgaaatccgccaagctgccccaaacagtgaagacactttcagacgtggaagatcagaaagagctggcctcaccagtaagccctgagttgaggcaaaaggaggtacagatgaattttttgaaccagctgacctcagtttttaaccctagaactgtagcatcacaacctatcagtacacagactctggtggaaggagaaaatgatgagcagtcatctacagatcaagcctcagctatcaaaaccaagaatgtgttcatagctcagaacgtggctagtcttcaagagcttggtggctcggagaagctactgcgtgtatgtttgaacctgccatatttcctacgctatatcaatcggttccaagatgcagttttagctaattccttcttcataatgcctgcaacagtagcagatgccactgctgttcgtaatggctttcattcattggtgattgatgtaactatggcattggataccctttctctacctgtgttggaacctctcaatccttctcgtctacaagatgtgacagtcctcagcctaagttgtctgtatgcaggtgtgagtgtggcaacgtgcatggccatcctccatgtgggtagtgcccagcaagtgcggacagggtccacgagctccaaagaagatgactatgaaagtgacgcagctacaattgtccagaaatgtctcgaaatctatgacatgattggacaagcaatcagcagttctcgccgggctggtggtgagcactatcagaatttccaattgctgggtgcttggtgcttgttaaacagccttttcctcatactgaacctcagtcctactgcgttggctgataaggggaaagagaaggacccactggctgccctccgagtcagagacatcctttctcgtactaaagagggagtgggctcccctaaactggggcctggaaaagggcatcagggatttggggtactctcagtaatattggcaaaccatgccatcaaactgctaacgtctctctttcaagacctacaagtggaggcccttcacaagggttgggagacagatggcccccctgcagccttgagcattatggcccagagcacctccatacagaggattcaacggctgattgactctgtcccactgatgaacctgctcttgacgttactttcaacttcctacagaaaggcatgtgtcctgcagcggcagaggaagggctccatgagcagcgatgccagcgcctccaccgactccaatacttactatgaggacgatttcagtagcacggaggaggacagcagccaagacgatgacagtgagcctattttggggcaatggtttgaggagactatttctcccagtaaagagaaagcagcacctccgcctcctcccccacctcctccactggaaagctctcctcgggttaaaagccccagtaagcaggcccctggtgagaagggcaacattctggcgagtcgcaaagatcctgagttgttcttaggtctggcttccaacattttgaacttcatcacctcttccatgctgaactctcggaacaattttatccgaaactatctgagtgtatctctttcagaacaccatatggccaccctagccagtatcatcaaggaggtggacaaagatggactcaagggttcatcagatgaagagtttgctgcagctctctatcacttcaaccactcactggtaacctctgaccttcagtcacctaacctgcagaacacactgttgcagcagctaggagtggctcctttttctgagggcccttggcccttgtacattcaccctcaaagcctctctgtgctttcacgcctcctgctcatctggcaacataaagccagtgctcaaggtgaccctgacgtcccagaatgccttaaagtttgggacaggtttttgtctacaatgaagcagaatgccctgcaaggtgtggtgcccagtgagacagaggatctgaatgtagaacacctgcagatgctcctcctcattttccacaatttcaccgagacaggccggcgggccatattgtcgctttttgtccagatcatccaggagttgagcgtcaacatggatgctcagatgcgcttcgtgccgcttatcttggctcgcctccttctcatctttgattatctgcttcatcagtactccaaagcccctgtgtatctatttgagcaggtacagcataacctgctaagtcctccctttgggtgggcaagtggatcccaggacagcaacagccgccgggcaaccactcctctctatcatggattcaaagaagtagaagaaaactggtctaagcatttctcatcagatgctgtcccacaccccagattctactgtgtcctgtccccagaagcctcagaggatgatttgaaccgacttgattctgtggcatgtgacgtccttttctccaagcttgtcaagtatgatgagctttatgctgcactgacagccctgcttgcagctgggtcccagcttgatacagttaggagaaaggaaaacaagaatgtaacagccttggaggcctgtgcccttcaatattacttcttgatactgtggaggatcctaggaattttaccaccatcaaagacttacattaaccagctatccatgaactcacctgagatgagcgaatgtgacatcttgcacactctgcgatggtcttctcggctccggatcagctcctatgtcaactggataaaggatcaccttatcaaacagggaatgaaggctgagcatgctagctcgcttctagaactggcatccaccactaagtgtagctcagtgaaatatgatgttgaaatagtagaggaatacttcgctcgacagatctcatccttctgtagtatcgactgtaccaccatcttgcagctgcatgaaattcccagtctgcagtccatctacacccttgatgccgcgatctcaaaggtccaggtctctttggatgagcatttttctaagatggctgctgagactgatcctcataagtcgtctgagattaccaagaacctacttccagccacgctgcaactcattgacacctatgcatcgttcaccagagcctatttgctgcaaaactttaatgaagagggaacaactgagaaaccttccaaggagaaactgcaaggctttgctgctgttttggctattggctctagcaggtgcaaggcaaatactctgggtccgacactggttcagaatttgccatcgtcagtgcagactgtgtgtgagtcctggaacaacatcaataccaatgaatttcccaatattggatcctggcgcaatgcctttgccaatgacaccatcccttcagagagttatattagtgcagtgcaggctgcacacctggggactctctgtagccaaagtctgcccctggctgcttccctgaagcataccctcctctcactggtcaggttgactggagatcttattgtttggtcagatgagatgaacccaccacaggtaattcggacactgctacctcttcttttggaatcaagcactgagagtgttgccgagatcagtagcaactccctggaacgcatcttgggccctgctgagtctgatgagttcttggctcgtgtttatgagaagctgatcactggttgttacaacattctggccaatcatgcagatcctaacagtggactggatgaatccatcctggaggaatgtctccagtacttggaaaagcagctggaaagtagccaggctcgtaaagctatggaggagtttttctctgacagtggagaacttgtacagatcatgatggcaacagccaatgagaacctctctgctaaattctgtaaccgagttttgaaattcttcaccaaactcttccagctgactgagaagagccctaacccgagcctgttgcatctctgtggctccctggcacaactggcctgtgtggaacctgtgcgcctgcaggcctggctcacccgcatgactacatcgcccccaaaagattctgatcagctggatgtaattcaggagaaccggcagctgctgcagttactgaccacatacattgttcgggaaaacagccaagttggggaaggtgtgtgtgctgttcttctgggcaccctgactcccatggcaacagagatgctggccaacggtgatgggactggcttccctgaacttatggttgtgatggccactctggccagtgcaggtcaaggtgctggtcaccttcagcttcataatgctgctgtggattggctgagcagatgcaagaaatacctgtcacagaagaatgtagttgaaaaactgaatgccaatgtaatgcatggaaagcatgtgatgatcttggagtgcacatgccatatcatgtcttacttggctgatgtcacgaatgccctgagccagagtaatggtcaaggcccaagtcatctctcagtggatggggaagagcgggccattgaagtagactcagactgggtggaggagttggcggtggaagaggaagattcccaggctgaggattcagatgaagattctctttgcaataaactctgcacttttacgatcacacagaaagaattcatgaaccagcattggtaccactgtcacacctgtaaaatggtggatggcgtgggtgtctgcacagtgtgtgctaaggtgtgccacaaggatcatgagatttcctatgccaagtatggatccttcttctgtgactgtggagccaaggaagatggcagctgtttggctctggtgaagagaactcctagcagtggcatgagctctaccatgaaggagtcggcatttcagagtgaacccaggatttcagagagtctagtgcgtcatgccagcacctcctcgccagctgacaaagccaaggttaccatcagtgatggaaaggttgctgacgaagagaagcccaagaagagcagcctctgccgcacagtagagggctgccgggaggaattacagaaccaggccaatttctccttcgctcctctcgtgttagacatgcttaatttccttatggatgccattcagaccaacttccagcaagcttcagccgtcgggagcagcagccgtgctcagcaagccctcagtgagctacacactgtggagaaggcagtggagatgacagaccagctgatggttcccaccttagggtcccaggaaggtgcctttgagaatgtgcggatgaattacagtggagaccagggccagaccatccggcagctgatcagtgctcatgtgctcaggcgggtggctatgtgtgtgctctcctctccccatgggcgccgccaacatttggctgtcagccatgagaagggcaagatcaccgttctgcagctctctgcactcctgaagcaagcagattccagcaaaaggaagttaactctgacccgcttggcttctgccccagttccttttactgtgttgagcctcacaggaaatccctgcaaggaagactacttggcggtttgtgggctaaaggactgtcatgtgctcacctttagtagctcaggctctgtttcggatcacttggttttgcaccctcagttggcaacggggaacttcatcatcaaagccgtgtggttacctggttcacagaccgagttagcaattgtcaccgcagactttgttaagatttatgacctgtgtgttgatgccttgagtccaaccttctattttctcctgccaagctcaaagataagagatgttaccttccttttcaatgaggagggaaagaacatcattgttataatgtcttcggctgggtacatctatactcagcttatggaagaggccagcagtgcccagcagggacccttctatgtcactaatgtgttggaaatcaatcatgaggacctgaagcaggacagtaacagccaggtggcgggcggtggtgtgtccgtgtactactcccacgtgttgcagatgttgttcttcagctattgtcaaggcaaatcattcgcagccaccatcagcaggacaaccctggaggtgttgcaactcttccccatcaacatcaaaagttccaatggtggcagtaagacttctcctgctctttgccagtggtctgaggtgatgaaccaccctggcttggtgtgctgtgtccagcaaactacaggggtgccgctggtagttatggtgaaaccagacacttttcttatccaggagattaagactcttcctgctaaagcgaagatccaagacatggttgctattaggcacacggcctgcaatgagcagcagcggacaacaatgattctgctgtgtgaggatggcagcctgcgcatttacatggccaacgtggagaacacctcctactggctgcagccatccctgcagcccagcagtgtcatcagcatcatgaagcctgttcgaaagcgcaaaacagctacaatcacaacccgcacgtctagccaggtgactttccccattgacttttttgaacacaaccagcagctgacagatgtggagtttggtggtaacgacctcctacaggtctataatgcacaacagataaaacaccggctgaattccactggcatgtatgtggccaacaccaagcccggaggcttcaccattgagattagtaacaacaatagcactatggtgatgacaggcatgcggatccagattgggactcaagcaatagaacgggccccgtcatatatcgagatcttcggcagaactatgcagctcaacctgagtcgctcacgctggtttgacttccccttcaccagagaagaagccctgcaggctgataagaagctgaacctcttcattggggcctcggtggatccagcaggtgtcaccatgatagatgctgtaaaaatttatggcaagactaaggagcagtttggctggcctgatgagcccccagaagaattcccttctgcctctgtcagcaacatctgcccttcaaatctgaaccagagcaacggcactggagatagcgactcagctgcccccactacgaccagtggaactgtcctggagaggctggttgtgagttctttagaagccctggaaagctgctttgccgttggcccaatcatcgagaaggagagaaacaagaatgctgctcaggagctggccactttgctgttgtccctgccagcacctgccagtgtccagcagcagtccaagagccttctggccagcctgcacaccagccgctcggcctaccacagccacaaggatcaggccttgctgagcaaagctgtgcagtgtctcaacacatctagcaaagagggcaaggatttggaccctgaggtgttccagaggctagtgatcacagctcgctccattgccatcatgcgccccaacaaccttgtccactttacggagtcaaagctgccccagatggaaacagactgtttttttcctagatgtgcctgctggagtctagggatagttggcatattgattggggccccacttgaaactccctccccagaaggaatggatgaagggaaggaaccgcagaagcagttggaaggagattgctgtagtttcatcacccagcttgtgaaccacttctggaaactccatgcatccaaacccaagaatgccttcttggcacctgcctgccttccaggactaactcatattgaagctactgtcaatgctctggtggacatcatccatggctactgtacctgtgagctggattgtattaacacagcatccaagatctacatgcagatgctcttgtgtcctgatcctgctgtgagcttctcttgtaaacaagctctaattcgagtcctaaggcccaggaacaaacggagacatgtgactttaccctcttcccctcgaagcaacactccaatgggagacaaggatgatgatgacgatgatgatgcagatgagaaaatgcagtcatcagggatcccgaatggtggtcacatccgtcaggaaagccaggaacagagtgaggtggaccatggagattttgagatggtgtctgagtcgatggtcctggagacagctgaaaatgtcaacaatggcaacccctctcccctggaggccctgctggcaggcgcagagggcttcccccccatgctggacatcccacctgatgcagatgacgagaccatggttgaactagccattgccctgagcctgcagcaggaccaacaaggcagcagcagcagtgccctgggcctgcagagcctgggactgtccggccaggcacccagctcttcctctctggacgcaggaaccctctctgacaccacagcatcagctctcgttactctctcagctccagcctcagacgacgagggcagtacagcagcgacagatggttctacccttcggacctctcctgctgaccacggtggtagtgtgggctcggagagcgggggcagtgcagtggactcagtggctggcgagcacagtgtatctggccggagcagtgcttatggcgatgctacagctgaggggcatccggctggaccaggaagtgtcagctcaagcactggagccatcagcaccaccactgggcaccaggagggagatggctccgagggagaaggagaaggagaaactgaaggagatgtccacactagcaacaggctgcacatggtccgtctaatgctgttggagagattactgcagaccctgcctcaattacgaaacgttggcggtgtccgggccatcccatacatgcaggtcattctaatgctcactacagatctggatggagaagatgagaaagacaagggggccctagacaacctgctctcccagcttattgctgagttgggtatggataaaaaggatgtctccaagaagaatgagcgcagcgccctgaatgaagtccatctggtagtaatgagactcctgagtgtcttcatgtcccgcaccaaatctggatccaagtcttccatatgtgagtcatcttccctcatctccagtgccacagcagcagctctactgagctctggggctgtggactactgcctgcacgtgctcaaatcactgctggaatattggaagagccaacagaatgacgaggagcctgtggctaccagccagttgctgaaaccacatactacctcctccccacctgacatgagcccattctttctccgccagtatgtgaagggtcatgctgctgatgtgtttgaggcctatactcagcttctaacagaaatggtactgaggcttccttaccaaatcaaaaagattactgacaccaattctcgaatcccacctcctgtctttgaccactcgtggttttactttctctccgagtacctcatgatccagcagactccatttgtgcgccgtcaagtccgcaaacttctgctcttcatctgtggatccaaagagaagtaccgccagctccgggatttgcacaccctggactctcacgtgcgtgggatcaagaagctgctagaagagcaggggatattcctccgggcaagtgtggttacagccagctcaggctccgccttgcaatatgacacactcatcagcctgatggagcacctgaaagcctgtgcagagattgccgcccagcgaaccatcaactggcagaaattctgcatcaaagatgactccgtcctgtacttcctcctccaagtcagtttccttgtggatgagggcgtgtccccagtgctgctgcaactgctctcctgtgctctgtgcggcagcaaggtgctcgctgcactggcagcctcttcgggatcctccagtgcttcttcctcctcagcccctgtggctgccagttctggacaagccacaacacagtccaagtcttccactaaaaagagcaagaaagaagaaaaagaaaaggagaaagatggtgagacctctggcagccaggaggaccagctgtgcacagctctggtgaaccagctgaacaaatttgccgataaggaaaccctgatccagttcctgcgttgtttcctgttagagtccaattcttcctcggtgcgctggcaggcccactgtctgacactgcacatctacagaaattccagcaaatctcaacaggagctcctgctagatctgatgtggtccatctggccagaactcccagcctatggtcgtaaggctgcccagtttgtggacctactaggatatttctccctgaaaactccacaaacagagaagaagttgaaggagtattcacagaaggctgtggagattctgcggactcaaaaccatattcttaccaaccaccccaactcgaacatttataacactttgtctggcttagtggagtttgatggctattacctggagagcgatccctgcctggtgtgtaataacccggaagtaccgttctgttatatcaagctgtcttccattaaagtggacacgcggtacaccaccacccagcaggttgtgaagctcattggcagtcacaccatcagcaaagtgacagtgaaaatcggggatctgaaacggaccaagatggtgcggaccatcaacctgtattataacaaccgaaccgtgcaggccatcgtggagttgaaaaacaagccagctcgctggcacaaagccaagaaggttcagctgacccctggacagacagaggtgaagattgacctgccgttgcccattgtggcctccaatctgatgattgagtttgcagacttctatgaaaactaccaggcctccacagagaccctgcagtgccctcgctgtagtgcctcggtccctgccaacccaggagtctgtggcaactgtggagagaatgtgtaccagtgtcacaaatgcagatccatcaactacgatgaaaaggatcccttcctctgcaatgcctgtggcttctgtaaatatgcccgcttcgacttcatgctctatgccaagccttgctgtgcagtggatcccattgagaatgaagaagaccggaagaaggctgtatccaacatcaatacacttttggacaaagctgatcgagtgtatcatcagctgatgggacaccggccacagctggagaacctgctctgcaaagtgaatgaggcagctccagaaaagccacaggatgactcaggaacagcagggggcatcagctccacttctgccagtgtgaatcgttacatcctgcagttggctcaggagtattgtggagactgcaagaactcttttgatgaactctccaaaatcatccagaaagtctttgcttcgcgcaaagagttgttggaatatgacctacagcagagggaagcagccactaaatcatcccggacctccgtgcagcccacattcactgccagccagtaccgtgccttatccgtcctgggctgtggccacacatcctccaccaagtgctatggctgcgcctcggctgtcacagaacattgtatcacactacttcgggccctggccaccaacccagccttgaggcacatccttgtctcccagggccttatccgggagctctttgattataatcttcgccgaggggctgcggccatgcgggaggaggtccgccagctcatgtgcctcctaactcgagacaacccagaagccacccaacagatgaatgacctgattattggcaaggtctccacagccctgaagggccactgggccaaccccgatctggcaagtagcctgcagtatgaaatgctgctgctgacggattctatctccaaggaggacagctgctgggagctccggttacgctgtgctctcagccttttcctcatggctgtgaacattaagactcctgtggtggttgaaaacattaccctcatgtgcctgaggatcttgcagaagctgataaaaccacctgctcccactagcaagaagaacaaggatgtccccgttgaggccctcaccacggtgaagccatactgcaatgagatccatgcccaggctcaactgtggctcaagagagaccccaaggcatcctatgatgcctggaagaagtgtcttcctatcagagggatagatggcaatgggaaagcccccagcaaatcagagctccgccatctctatttgactgagaagtatgtgtggaggtggaaacagttcctgagtcgtcgggggaagaggacctcccccttggatctcaaactggggcataacaactggctgcgacaagtgcttttcactccagcaacgcaggccgcacggcaggcagcctgtaccattgtggaagctctagccaccattcccagccgcaagcagcaggtcctggacctgcttaccagttacctggatgagctgagcatagctggggagtgtgcagctgagtacctggctctctaccagaagctcatcacttctgcgcactggaaagtctacttggcagctcggggagtcctaccctatgtgggcaacctcatcaccaaggaaatagctcgtctgctggccctggaggaggctaccctgagtaccgatctgcagcagggttatgcccttaaaagtctcacaggccttctctcctcctttgttgaggtggaatccatcaaaagacattttaaaagtcgcttggtgggtactgtgctgaatggatacctgtgcttgcggaagctggtggtgcagaggaccaagctgatcgatgagacgcaggacatgctgctggagatgctggaggacatgaccacaggtacagaatcagaaaccaaggccttcatggctgtgtgcattgagacagccaagcgctacaatctggatgactaccggaccccggtgttcatcttcgagaggctctgcagcatcatttatcctgaggagaatgaagtcactgagttctttgtgaccctggagaaggatccccaacaagaagacttcttacagggcaggatgcctgggaacccgtatagcagcaatgagccaggcatcgggccgctgatgagggatataaagaacaagatttgccaggactgtgacttagtggccctcctggaagatgacagtggcatggagcttctagtgaacaataaaatcattagtttggaccttcctgtggctgaagtttacaagaaagtctggtgtaccacgaatgagggagagcccatgaggattgtttatcgtatgcgggggctgctgggcgatgccacagaggagttcattgagtccctggactctactacagatgaagaagaagatgaagaagaagtgtataaaatggctggtgtgatggcccagtgtgggggcctggaatgcatgcttaacagactcgcagggatcagagatttcaagcagggacgccaccttctaacagtgctactgaaattgttcagttactgcgtgaaggtgaaagtcaaccggcagcaactggtcaaactggaaatgaacaccttgaacgtcatgctggggaccctaaacctggcccttgtagctgaacaagaaagcaaggacagtgggggtgcagctgtggctgagcaggtgcttagcatcatggagatcattctagatgagtccaatgctgagcccctgagtgaggacaagggcaacctcctcctgacaggtgacaaggatcaactggtgatgctcttggaccagatcaacagcacctttgttcgctccaaccccagtgtgctccagggcctgcttcgcatcatcccgtacctttcctttggagaggtggagaaaatgcagatcttggtggagcgattcaaaccatactgcaactttgataaatatgatgaagatcacagtggtgatgataaagtcttcctggactgcttctgtaaaatagctgctggcatcaagaacaacagcaatgggcaccagctgaaggatctgattctccagaaggggatcacccagaatgcacttgactacatgaaaaagcacatccctagcgccaagaatttggatgccgacatctggaaaaagtttttgtctcgcccagccttgccatttatcctaaggctgcttcggggcctggccatccagcaccctggcacccaggttctgattggaactgattccatcccgaacctgcataagctggagcaggtgtccagtgatgagggcattgggaccttggcagagaacctgctggaagccctgcgggaacaccctgacgtaaacaagaagattgacgcagcccgcagggagacccgggcagagaagaagcgcatggccatggcaatgaggcagaaggccctgggcaccctgggcatgacgacaaatgaaaagggccaggtcgtgaccaagacagcactcctgaagcagatggaagagctgatcgaggagcctggcctcacgtgctgcatctgcagggagggatacaagttccagcccacaaaggtcctgggcatttataccttcacgaagcgggtagccttggaggagatggagaataagccccggaaacagcagggctacagcaccgtgtcccacttcaacattgtgcactacgactgccatctggctgccgtcaggttggctcgaggccgggaagagtgggagagtgccgccctgcagaatgccaacaccaagtgcaacgggctccttccggtctggggacctcatgtccctgaatcagcttttgccacttgcttggcaagacacaacacttacctccaggaatgtacaggccagcgggagcccacgtatcagctcaacatccatgacatcaaactgctcttcctgcgcttcgccatggagcagtcgttcagcgcagacactggcgggggcggccgggagagcaacatccacctgatcccgtacatcattcacactgtgctttacgtcctgaacacaacccgagcaacttcccgagaagagaagaacctccaaggctttctggaacagcccaaggagaagtgggtggagagtgcctttgaagtggacgggccctactatttcacagtcttggcccttcacatcctgccccctgagcagtggagagccacacgtgtggaaatcttgcggaggctgttggtgacctcgcaggctcgggcagtggctccaggtggagccaccaggctgacagataaggcagtgaaggactattccgcttaccgttcttcccttctcttttgggccctcgtcgatctcatttacaacatgtttaagaaggtgcctaccagtaacacagagggaggctggtcctgctctctcgctgagtacatccgccacaacgacatgcccatctacgaagctgccgacaaagccctgaaaaccttccaggaggagttcatgccagtggagaccttctcagagttcctcgatgtggccggtcttttatcagaaatcaccgatccagagagcttcctgaaggacctgttgaactcagtcccctgaccaccacacagcagctgcggcggcgaagacgaagctggcttgccttccaccctctgttctccctccttgtgcattaagttccctccgcgggatgctgcattgttaccccgccctcccctctctcatttttcttggtgtggcttggggtttttaggcttcctgttttatctcgtgtgtgtggtgcaccagctatgaggttgtctgtaacccaagccatcaaagggcctgtacatacctaggagccatgagttgtcccggccagcttcatacttgagtgtgcacatcttgagaaataaacaagtgacttaacacacattgaaaagg

SEQ ID NO: 436 - DNA, 16031 bp, Homo sapiens
agattgcgtcacttccgccccctcctgggaggcggcgctgggccggtggcaagcccccggagggagccgcagtagtacgacggaagatggcgacgagcggcggcgaagaggcggcggcagcggctccggcgccggggaccccggcaacgggggcggacacgaccccgggctgggaggtggctgtgcggcccctgctgtccgcgtcctactccgccttcgagatgaaggagttgccgcagctggtggcctcagtcatcgagagtgaatcagaaatcctgcaccatgagaagcagtacgagccattctactcatcttttgttgcactttccacacactatattacaacagtttgcagtctcattccccggaaccaacttcagtcagtggcagcagcctgtaaagttctaattgagttttctctcctgcgtctggagaatccagatgaggcttgtgctgtgtcccagaaacacttgattctcctaatcaagggcctgtgcactggctgtagccgactagatagaactgaaattatcacatttacagcaatgatgaaatccgccaagctgccccaaacagtgaagacactttcagacgtggaagatcagaaagagctggcctcaccagtaagccctgagttgaggcaaaaggaggtacagatgaattttttgaaccagctgacctcagtttttaaccctagaactgtagcatcacaacctatcagtacacagactctggtggaaggagaaaatgatgagcagtcatctacagatcaagcctcagctatcaaaaccaagaatgtgttcatagctcagaacgtggctagtcttcaagagcttggtggctcggagaagctactgcgtgtatgtttgaacctgccatatttcctacgctatatcaatcggttccaagatgcagttttagctaattccttcttcataatgcctgcaacagtagcagatgccactgctgttcgtaatggctttcattcattggtgattgatgtaactatggcattggataccctttctctacctgtgttggaacctctcaatccttctcgtctacaagatgtgacagtcctcagcctaagttgtctgtatgcaggtgtgagtgtggcaacgtgcatggccatcctccatgtgggtagtgcccagcaagtgcggacagggtccacgagctccaaagaagatgactatgaaagtgacgcagctacaattgtccagaaatgtctcgaaatctatgacatgattggacaagcaatcagcagttctcgccgggctggtggtgagcactatcagaatttccaattgctgggtgcttggtgcttgttaaacagccttttcctcatactgaacctcagtcctactgcgttggctgataaggggaaagagaaggacccactggctgccctccgagtcagagacatcctttctcgtactaaagagggagtgggctcccctaaactggggcctggaaaagggcatcagggatttggggtactctcagtaatattggcaaaccatgccatcaaactgctaacgtctctctttcaagacctacaagtggaggcccttcacaagggttgggagacagatggcccccctgcagccttgagcattatggcccagagcacctccatacagaggattcaacggctgattgactctgtcccactgatgaacctgctcttgacgttactttcaacttcctacagaaaggcatgtgtcctgcagcggcagaggaagggctccatgagcagcgatgccagcgcctccaccgactccaatacttactatgaggacgatttcagtagcacggaggaggacagcagccaagacgatgacagtgagcctattttggggcaatggtttgaggagactatttctcccagtaaagagaaagcagcacctccgcctcctcccccacctcctccactggaaagctctcctcgggttaaaagccccagtaagcaggcccctggtgagaagggcaacattctggcgagtcgcaaagatcctgagttgttcttaggtctggcttccaacattttgaacttcatcacctcttccatgctgaactctcggaacaattttatccgaaactatctgagtgtatctctttcagaacaccatatggccaccctagccagtatcatcaaggaggtggacaaagatggactcaagggttcatcagatgaagagtttgctgcagctctctatcacttcaaccactcactggtaacctctgaccttcagtcacctaacctgcagaacacactgttgcagcagctaggagtggctcctttttctgagggcccttggcccttgtacattcaccctcaaagcctctctgtgctttcacgcctcctgctcatctggcaacataaagccagtgctcaaggtgaccctgacgtcccagaatgccttaaagtttgggacaggtttttgtctacaatgaagcagaatgccctgcaaggtgtggtgcccagtgagacagaggatctgaatgtagaacacctgcagatgctcctcctcattttccacaatttcaccgagacaggccggcgggccatattgtcgctttttgtccagatcatccaggagttgagcgtcaacatggatgctcagatgcgcttcgtgccgcttatcttggctcgcctccttctcatctttgattatctgcttcatcagtactccaaagcccctgtgtatctatttgagcaggtacagcataacctgctaagtcctccctttgggtgggcaagtggatcccaggacagcaacagccgccgggcaaccactcctctctatcatggattcaaagaagtagaagaaaactggtctaagcatttctcatcagatgctgtcccacaccccagattctactgtgtcctgtccccagaagcctcagaggatgatttgaaccgacttgattctgtggcatgtgacgtccttttctccaagcttgtcaagtatgatgagctttatgctgcactgacagccctgcttgcagctgggtcccagcttgatacagttaggagaaaggaaaacaagaatgtaacagccttggaggcctgtgcccttcaatattacttcttgatactgtggaggatcctaggaattttaccaccatcaaagacttacattaaccagctatccatgaactcacctgagatgagcgaatgtgacatcttgcacactctgcgatggtcttctcggctccggatcagctcctatgtcaactggataaaggatcaccttatcaaacagggaatgaaggctgagcatgctagctcgcttctagaactggcatccaccactaagtgtagctcagtgaaatatgatgttgaaatagtagaggaatacttcgctcgacagatctcatccttctgtagtatcgactgtaccaccatcttgcagctgcatgaaattcccagtctgcagtccatctacacccttgatgccgcgatctcaaaggtccaggtctctttggatgagcatttttctaagatggctgctgagactgatcctcataagtcgtctgagattaccaagaacctacttccagccacgctgcaactcattgacacctatgcatcgttcaccagagcctatttgctgcaaaactttaatgaagagggaacaactgagaaaccttccaaggagaaactgcaaggctttgctgctgttttggctattggctctagcaggtgcaaggcaaatactctgggtccgacactggttcagaatttgccatcgtcagtgcagactgtgtgtgagtcctggaacaacatcaataccaatgaatttcccaatattggatcctggcgcaatgcctttgccaatgacaccatcccttcagagagttatattagtgcagtgcaggctgcacacctggggactctctgtagccaaagtctgcccctggctgcttccctgaagcataccctcctctcactggtcaggttgactggagatcttattgtttggtcagatgagatgaacccaccacaggtaattcggacactgctacctcttcttttggaatcaagcactgagagtgttgccgagatcagtagcaactccctggaacgcatcttgggccctgctgagtctgatgagttcttggctcgtgtttatgagaagctgatcactggttgttacaacattctggccaatcatgcagatcctaacagtggactggatgaatccatcctggaggaatgtctccagtacttggaaaagcagctggaaagtagccaggctcgtaaagctatggaggagtttttctctgacagtggagaacttgtacagatcatgatggcaacagccaatgagaacctctctgctaaattctgtaaccgagttttgaaattcttcaccaaactcttccagctgactgagaagagccctaacccgagcctgttgcatctctgtggctccctggcacaactggcctgtgtggaacctgtgcgcctgcaggcctggctcacccgcatgactacatcgcccccaaaagattctgatcagctggatgtaattcaggagaaccggcagctgctgcagttactgaccacatacattgttcgggaaaacagccaagttggggaaggtgtgtgtgctgttcttctgggcaccctgactcccatggcaacagagatgctggccaacggtgatgggactggcttccctgaacttatggttgtgatggccactctggccagtgcaggtcaaggtgctggtcaccttcagcttcataatgctgctgtggattggctgagcagatgcaagaaatacctgtcacagaagaatgtagttgaaaaactgaatgccaatgtaatgcatggaaagcatgtgatgatcttggagtgcacatgccatatcatgtcttacttggctgatgtcacgaatgccctgagccagagtaatggtcaaggcccaagtcatctctcagtggatggggaagagcgggccattgaagtagactcagactgggtggaggagttggcggtggaagaggaagattcccaggctgaggattcagatgaagattctctttgcaataaactctgcacttttacgatcacacagaaagaattcatgaaccagcattggtaccactgtcacacctgtaaaatggtggatggcgtgggtgtctgcacagtgtgtgctaaggtgtgccacaaggatcatgagatttcctatgccaagtatggatccttcttctgtgactgtggagccaaggaagatggcagctgtttggctctggtgaagagaactcctagcagtggcatgagctctaccatgaaggagtcggcatttcagagtgaacccaggatttcagagagtctagtgcgtcatgccagcacctcctcgccagctgacaaagccaaggttaccatcagtgatggaaaggttgctgacgaagagaagcccaagaagagcagcctctgccgcacagtagagggctgccgggaggaattacagaaccaggccaatttctccttcgctcctctcgtgttagacatgcttaatttccttatggatgccattcagaccaacttccagcaagcttcagccgtcgggagcagcagccgtgctcagcaagccctcagtgagctacacactgtggagaaggcagtggagatgacagaccagctgatggttcccaccttagggtcccaggaaggtgcctttgagaatgtgcggatgaattacagtggagaccagggccagaccatccggcagctgatcagtgctcatgtgctcaggcgggtggctatgtgtgtgctctcctctccccatgggcgccgccaacatttggctgtcagccatgagaagggcaagatcaccgttctgcagctctctgcactcctgaagcaagcagattccagcaaaaggaagttaactctgacccgcttggcttctgccccagttccttttactgtgttgagcctcacaggaaatccctgcaaggaagactacttggcggtttgtgggctaaaggactgtcatgtgctcacctttagtagctcaggctctgtttcggatcacttggttttgcaccctcagttggcaacggggaacttcatcatcaaagccgtgtggttacctggttcacagaccgagttagcaattgtcaccgcagactttgttaagatttatgacctgtgtgttgatgccttgagtccaaccttctattttctcctgccaagctcaaagataagagatgttaccttccttttcaatgaggagggaaagaacatcattgttataatgtcttcggctgggtacatctatactcagcttatggaagaggccagcagtgcccagcagggacccttctatgtcactaatgtgttggaaatcaatcatgaggacctgaagcaggacagtaacagccaggtggcgggcggtggtgtgtccgtgtactactcccacgtgttgcagatgttgttcttcagctattgtcaaggcaaatcattcgcagccaccatcagcaggacaaccctggaggtgttgcaactcttccccatcaacatcaaaagttttgttgtctgcagttccaatggtggcagtaagacttctcctgctctttgccagtggtctgaggtgatgaaccaccctggcttggtgtgctgtgtccagcaaactacaggggtgccgctggtagttatggtgaaaccagacacttttcttatccaggagattaagactcttcctgctaaagcgaagatccaagacatggttgctattaggcacacggcctgcaatgagcagcagcggacaacaatgattctgctgtgtgaggatggcagcctgcgcatttacatggccaacgtggagaacacctcctactggctgcagccatccctgcagcccagcagtgtcatcagcatcatgaagcctgttcgaaagcgcaaaacagctacaatcacaacccgcacgtctagccaggtgactttccccattgacttttttgaacacaaccagcagctgacagatgtggagtttggtggtaacgacctcctacaggtctataatgcacaacagataaaacaccggctgaattccactggcatgtatgtggccaacaccaagcccggaggcttcaccattgagattagtaacaacaatagcactatggtgatgacaggcatgcggatccagattgggactcaagcaatagaacgggccccgtcatatatcgagatcttcggcagaactatgcagctcaacctgagtcgctcacgctggtttgacttccccttcaccagagaagaagccctgcaggctgataagaagctgaacctcttcattggggcctcggtggatccagcaggtgtcaccatgatagatgctgtaaaaatttatggcaagactaaggagcagtttggctggcctgatgagcccccagaagaattcccttctgcctctgtcagcaacatctgcccttcaaatctgaaccagagcaacggcactggagatagcgactcagctgcccccactacgaccagtggaactgtcctggagagttctgaaactgagtccctaaccaagctggaccggctggttgtgagttctttagaagccctggaaagctgctttgccgttggcccaatcatcgagaaggagagaaacaagaatgctgctcaggagctggccactttgctgttgtccctgccagcacctgccagtgtccagcagcagtccaagagccttctggccagcctgcacaccagccgctcggcctaccacagccacaaggatcaggccttgctgagcaaagctgtgcagtgtctcaacacatctagcaaagagggcaaggatttggaccctgaggtgttccagaggctagtgatcacagctcgctccattgccatcatgcgccccaacaaccttgtccactttacggagtcaaagctgccccagatggaaacagaaggaatggatgaagggaaggaaccgcagaagcagttggaaggagattgctgtagtttcatcacccagcttgtgaaccacttctggaaactccatgcatccaaacccaagaatgccttcttggcacctgcctgccttccaggactaactcatattgaagctactgtcaatgctctggtggacatcatccatggctactgtacctgtgagctggattgtattaacacagcatccaagatctacatgcagatgctcttgtgtcctgatcctgctgtgagcttctcttgtaaacaagctctaattcgagtcctaaggcccaggaacaaacggagacatgtgactttaccctcttcccctcgaagcaacactccaatgggagacaaggatgatgatgacgatgatgatgcagatgagaaaatgcagtcatcagggatcccgaatggtggtcacatccgtcaggaaagccaggaacagagtgaggtggaccatggagattttgagatggtgtctgagtcgatggtcctggagacagctgaaaatgtcaacaatggcaacccctctcccctggaggccctgctggcaggcgcagagggcttcccccccatgctggacatcccacctgatgcagatgacgagaccatggttgaactagccattgccctgagcctgcagcaggaccaacaaggcagcagcagcagtgccctgggcctgcagagcctgggactgtccggccaggcacccagctcttcctctctggacgcaggaaccctctctgacaccacagcatcagctctcgttactctctcagctccagcctcagacgacgagggcagtacagcagcgacagatggttctacccttcggacctctcctgctgaccacggtggtagtgtgggctcggagagcgggggcagtgcagtggactcagtggctggcgagcacagtgtatctggccggagcagtgcttatggcgatgctacagctgaggggcatccggctggaccaggaagtgtcagctcaagcactggagccatcagcaccaccactgggcaccaggagggagatggctccgagggagaaggagaaggagaaactgaaggagatgtccacactagcaacaggctgcacatggtccgtctaatgctgttggagagattactgcagaccctgcctcaattacgaaacgttggcggtgtccgggccatcccatacatgcaggtcattctaatgctcactacagatctggatggagaagatgagaaagacaagggggccctagacaacctgctctcccagcttattgctgagttgggtatggataaaaaggatgtctccaagaagaatgagcgcagcgccctgaatgaagtccatctggtagtaatgagactcctgagtgtcttcatgtcccgcaccaaatctggatccaagtcttccatatgtgagtcatcttccctcatctccagtgccacagcagcagctctactgagctctggggctgtggactactgcctgcacgtgctcaaatcactgctggaatattggaagagccaacagaatgacgaggagcctgtggctaccagccagttgctgaaaccacatactacctcctccccacctgacatgagcccattctttctccgccagtatgtgaagggtcatgctgctgatgtgtttgaggcctatactcagcttctaacagaaatggtactgaggcttccttaccaaatcaaaaagattactgacaccaattctcgaatcccacctcctgtctttgaccactcgtggttttactttctctccgagtacctcatgatccagcagactccatttgtgcgccgtcaagtccgcaaacttctgctcttcatctgtggatccaaagagaagtaccgccagctccgggatttgcacaccctggactctcacgtgcgtgggatcaagaagctgctagaagagcaggggatattcctccgggcaagtgtggttacagccagctcaggctccgccttgcaatatgacacactcatcagcctgatggagcacctgaaagcctgtgcagagattgccgcccagcgaaccatcaactggcagaaattctgcatcaaagatgactccgtcctgtacttcctcctccaagtcagtttccttgtggatgagggcgtgtccccagtgctgctgcaactgctctcctgtgctctgtgcggcagcaaggtgctcgctgcactggcagcctcttcgggatcctccagtgcttcttcctcctcagcccctgtggctgccagttctggacaagccacaacacagtccaagtcttccactaaaaagagcaagaaagaagaaaaagaaaaggagaaagatggtgagacctctggcagccaggaggaccagctgtgcacagctctggtgaaccagctgaacaaatttgccgataaggaaaccctgatccagttcctgcgttgtttcctgttagagtccaattcttcctcggtgcgctggcaggcccactgtctgacactgcacatctacagaaattccagcaaatctcaacaggagctcctgctagatctgatgtggtccatctggccagaactcccagcctatggtcgtaaggctgcccagtttgtggacctactaggatatttctccctgaaaactccacaaacagagaagaagttgaaggagtattcacagaaggctgtggagattctgcggactcaaaaccatattcttaccaaccaccccaactcgaacatttataacactttgtctggcttagtggagtttgatggctattacctggagagcgatccctgcctggtgtgtaataacccggaagtaccgttctgttatatcaagctgtcttccattaaagtggacacgcggtacaccaccacccagcaggttgtgaagctcattggcagtcacaccatcagcaaagtgacagtgaaaatcggggatctgaaacggaccaagatggtgcggaccatcaacctgtattataacaaccgaaccgtgcaggccatcgtggagttgaaaaacaagccagctcgctggcacaaagccaagaaggttcagctgacccctggacagacagaggtgaagattgacctgccgttgcccattgtggcctccaatctgatgattgagtttgcagacttctatgaaaactaccaggcctccacagagaccctgcagtgccctcgctgtagtgcctcggtccctgccaacccaggagtctgtggcaactgtggagagaatgtgtaccagtgtcacaaatgcagatccatcaactacgatgaaaaggatcccttcctctgcaatgcctgtggcttctgtaaatatgcccgcttcgacttcatgctctatgccaagccttgctgtgcagtggatcccattgagaatgaagaagaccggaagaaggctgtatccaacatcaatacacttttggacaaagctgatcgagtgtatcatcagctgatgggacaccggccacagctggagaacctgctctgcaaagtgaatgaggcagctccagaaaagccacaggatgactcaggaacagcagggggcatcagctccacttctgccagtgtgaatcgttacatcctgcagttggctcaggagtattgtggagactgcaagaactcttttgatgaactctccaaaatcatccagaaagtctttgcttcgcgcaaagagttgttggaatatgacctacagcagagggaagcagccactaaatcatcccggacctccgtgcagcccacattcactgccagccagtaccgtgccttatccgtcctgggctgtggccacacatcctccaccaagtgctatggctgcgcctcggctgtcacagaacattgtatcacactacttcgggccctggccaccaacccagccttgaggcacatccttgtctcccagggccttatccgggagctctttgattataatcttcgccgaggggctgcggccatgcgggaggaggtccgccagctcatgtgcctcctaactcgagacaacccagaagccacccaacagatgaatgacctgattattggcaaggtctccacagccctgaagggccactgggccaaccccgatctggcaagtagcctgcagtatgaaatgctgctgctgacggattctatctccaaggaggacagctgctgggagctccggttacgctgtgctctcagccttttcctcatggctgtgaacattaagactcctgtggtggttgaaaacattaccctcatgtgcctgaggatcttgcagaagctgataaaaccacctgctcccactagcaagaagaacaaggatgtccccgttgaggccctcaccacggtgaagccatactgcaatgagatccatgcccaggctcaactgtggctcaagagagaccccaaggcatcctatgatgcctggaagaagtgtcttcctatcagagggatagatggcaatgggaaagcccccagcaaatcagagctccgccatctctatttgactgagaagtatgtgtggaggtggaaacagttcctgagtcgtcgggggaagaggacctcccccttggatctcaaactggggcataacaactggctgcgacaagtgcttttcactccagcaacgcaggccgcacggcaggcagcctgtaccattgtggaagctctagccaccattcccagccgcaagcagcaggtcctggacctgcttaccagttacctggatgagctgagcatagctggggagtgtgcagctgagtacctggctctctaccagaagctcatcacttctgcgcactggaaagtctacttggcagctcggggagtcctaccctatgtgggcaacctcatcaccaaggaaatagctcgtctgctggccctggaggaggctaccctgagtaccgatctgcagcagggttatgcccttaaaagtctcacaggccttctctcctcctttgttgaggtggaatccatcaaaagacattttaaaagtcgcttggtgggtactgtgctgaatggatacctgtgcttgcggaagctggtggtgcagaggaccaagctgatcgatgagacgcaggacatgctgctggagatgctggaggacatgaccacaggtacagaatcagaaaccaaggccttcatggctgtgtgcattgagacagccaagcgctacaatctggatgactaccggaccccggtgttcatcttcgagaggctctgcagcatcatttatcctgaggagaatgaagtcactgagttctttgtgaccctggagaaggatccccaacaagaagacttcttacagggcaggatgcctgggaacccgtatagcagcaatgagccaggcatcgggccgctgatgagggatataaagaacaagatttgccaggactgtgacttagtggccctcctggaagatgacagtggcatggagcttctagtgaacaataaaatcattagtttggaccttcctgtggctgaagtttacaagaaagtctggtgtaccacgaatgagggagagcccatgaggattgtttatcgtatgcgggggctgctgggcgatgccacagaggagttcattgagtccctggactctactacagatgaagaagaagatgaagaagaagtgtataaaatggctggtgtgatggcccagtgtgggggcctggaatgcatgcttaacagactcgcagggatcagagatttcaagcagggacgccaccttctaacagtgctactgaaattgttcagttactgcgtgaaggtgaaagtcaaccggcagcaactggtcaaactggaaatgaacaccttgaacgtcatgctggggaccctaaacctggcccttgtagctgaacaagaaagcaaggacagtgggggtgcagctgtggctgagcaggtgcttagcatcatggagatcattctagatgagtccaatgctgagcccctgagtgaggacaagggcaacctcctcctgacaggtgacaaggatcaactggtgatgctcttggaccagatcaacagcacctttgttcgctccaaccccagtgtgctccagggcctgcttcgcatcatcccgtacctttcctttggagaggtggagaaaatgcagatcttggtggagcgattcaaaccatactgcaactttgataaatatgatgaagatcacagtggtgatgataaagtcttcctggactgcttctgtaaaatagctgctggcatcaagaacaacagcaatgggcaccagctgaaggatctgattctccagaaggggatcacccagaatgcacttgactacatgaaaaagcacatccctagcgccaagaatttggatgccgacatctggaaaaagtttttgtctcgcccagccttgccatttatcctaaggctgcttcggggcctggccatccagcaccctggcacccaggttctgattggaactgattccatcccgaacctgcataagctggagcaggtgtccagtgatgagggcattgggaccttggcagagaacctgctggaagccctgcgggaacaccctgacgtaaacaagaagattgacgcagcccgcagggagacccgggcagagaagaagcgcatggccatggcaatgaggcagaaggccctgggcaccctgggcatgacgacaaatgaaaagggccaggtcgtgaccaagacagcactcctgaagcagatggaagagctgatcgaggagcctggcctcacgtgctgcatctgcagggagggatacaagttccagcccacaaaggtcctgggcatttataccttcacgaagcgggtagccttggaggagatggagaataagccccggaaacagcagggctacagcaccgtgtcccacttcaacattgtgcactacgactgccatctggctgccgtcaggttggctcgaggccgggaagagtgggagagtgccgccctgcagaatgccaacaccaagtgcaacgggctccttccggtctggggacctcatgtccctgaatcagcttttgccacttgcttggcaagacacaacacttacctccaggaatgtacaggccagcgggagcccacgtatcagctcaacatccatgacatcaaactgctcttcctgcgcttcgccatggagcagtcgttcagcgcagacactggcgggggcggccgggagagcaacatccacctgatcccgtacatcattcacactgtgctttacgtcctgaacacaacccgagcaacttcccgagaagagaagaacctccaaggctttctggaacagcccaaggagaagtgggtggagagtgcctttgaagtggacgggccctactatttcacagtcttggcccttcacatcctgccccctgagcagtggagagccacacgtgtggaaatcttgcggaggctgttggtgacctcgcaggctcgggcagtggctccaggtggagccaccaggctgacagataaggcagtgaaggactattccgcttaccgttcttcccttctcttttgggccctcgtcgatctcatttacaacatgtttaagaaggtgcctaccagtaacacagagggaggctggtcctgctctctcgctgagtacatccgccacaacgacatgcccatctacgaagctgccgacaaagccctgaaaaccttccaggaggagttcatgccagtggagaccttctcagagttcctcgatgtggccggtcttttatcagaaatcaccgatccagagagcttcctgaaggacctgttgaactcagtcccctgaccaccacacagcagctgcggcggcgaagacgaagctggcttgccttccaccctctgttctccctccttgtgcattaagttccctccgcgggatgctgcattgttaccccgccctcccctctctcatttttcttggtgtggcttggggtttttaggcttcctgttttatctcgtgtgtgtggtgcaccagctatgaggttgtctgtaacccaagccatcaaagggcctgtacatacctaggagccatgagttgtcccggccagcttcatacttgagtgtgcacatcttgagaaataaacaagtgacttaacacacattgaaaagg

SEQ ID NO: 437 - DNA, 16028 bp, Homo sapiens
agattgcgtcacttccgccccctcctgggaggcggcgctgggccggtggcaagcccccggagggagccgcagtagtacgacggaagatggcgacgagcggcggcgaagaggcggcggcagcggctccggcgccggggaccccggcaacgggggcggacacgaccccgggctgggaggtggctgtgcggcccctgctgtccgcgtcctactccgccttcgagatgaaggagttgccgcagctggtggcctcagtcatcgagagtgaatcagaaatcctgcaccatgagaagcagtacgagccattctactcatcttttgttgcactttccacacactatattacaacagtttgcagtctcattccccggaaccaacttcagtcagtggcagcagcctgtaaagttctaattgagttttctctcctgcgtctggagaatccagatgaggcttgtgctgtgtcccagaaacacttgattctcctaatcaagggcctgtgcactggctgtagccgactagatagaactgaaattatcacatttacagcaatgatgaaatccgccaagctgccccaaacagtgaagacactttcagacgtggaagatcagaaagagctggcctcaccagtaagccctgagttgaggcaaaaggaggtacagatgaattttttgaaccagctgacctcagtttttaaccctagaactgtagcatcacaacctatcagtacacagactctggtggaaggagaaaatgatgagcagtcatctacagatcaagcctcagctatcaaaaccaagaatgtgttcatagctcagaacgtggctagtcttcaagagcttggtggctcggagaagctactgcgtgtatgtttgaacctgccatatttcctacgctatatcaatcggttccaagatgcagttttagctaattccttcttcataatgcctgcaacagtagcagatgccactgctgttcgtaatggctttcattcattggtgattgatgtaactatggcattggataccctttctctacctgtgttggaacctctcaatccttctcgtctacaagatgtgacagtcctcagcctaagttgtctgtatgcaggtgtgagtgtggcaacgtgcatggccatcctccatgtgggtagtgcccagcaagtgcggacagggtccacgagctccaaagaagatgactatgaaagtgacgcagctacaattgtccagaaatgtctcgaaatctatgacatgattggacaagcaatcagcagttctcgccgggctggtggtgagcactatcagaatttccaattgctgggtgcttggtgcttgttaaacagccttttcctcatactgaacctcagtcctactgcgttggctgataaggggaaagagaaggacccactggctgccctccgagtcagagacatcctttctcgtactaaagagggagtgggctcccctaaactggggcctggaaaagggcatcagggatttggggtactctcagtaatattggcaaaccatgccatcaaactgctaacgtctctctttcaagacctacaagtggaggcccttcacaagggttgggagacagatggcccccctgcagccttgagcattatggcccagagcacctccatacagaggattcaacggctgattgactctgtcccactgatgaacctgctcttgacgttactttcaacttcctacagaaaggcatgtgtcctgcagcggcagaggaagggctccatgagcagcgatgccagcgcctccaccgactccaatacttactatgaggacgatttcagtagcacggaggaggacagcagccaagacgatgacagtgagcctattttggggcaatggtttgaggagactatttctcccagtaaagagaaagcagcacctccgcctcctcccccacctcctccactggaaagctctcctcgggttaaaagccccagtaagcaggcccctggtgagaagggcaacattctggcgagtcgcaaagatcctgagttgttcttaggtctggcttccaacattttgaacttcatcacctcttccatgctgaactctcggaacaattttatccgaaactatctgagtgtatctctttcagaacaccatatggccaccctagccagtatcatcaaggaggtggacaaagatggactcaagggttcatcagatgaagagtttgctgcagctctctatcacttcaaccactcactggtaacctctgaccttcagtcacctaacctgcagaacacactgttgcagcagctaggagtggctcctttttctgagggcccttggcccttgtacattcaccctcaaagcctctctgtgctttcacgcctcctgctcatctggcaacataaagccagtgctcaaggtgaccctgacgtcccagaatgccttaaagtttgggacaggtttttgtctacaatgaagcagaatgccctgcaaggtgtggtgcccagtgagacagaggatctgaatgtagaacacctgcagatgctcctcctcattttccacaatttcaccgagacaggccggcgggccatattgtcgctttttgtccagatcatccaggagttgagcgtcaacatggatgctcagatgcgcttcgtgccgcttatcttggctcgcctccttctcatctttgattatctgcttcatcagtactccaaagcccctgtgtatctatttgagcaggtacagcataacctgctaagtcctccctttgggtgggcaagtggatcccaggacagcaacagccgccgggcaaccactcctctctatcatggattcaaagaagtagaagaaaactggtctaagcatttctcatcagatgctgtcccacaccccagattctactgtgtcctgtccccagaagcctcagaggatgatttgaaccgacttgattctgtggcatgtgacgtccttttctccaagcttgtcaagtatgatgagctttatgctgcactgacagccctgcttgcagctgggtcccagcttgatacagttaggagaaaggaaaacaagaatgtaacagccttggaggcctgtgcccttcaatattacttcttgatactgtggaggatcctaggaattttaccaccatcaaagacttacattaaccagctatccatgaactcacctgagatgagcgaatgtgacatcttgcacactctgcgatggtcttctcggctccggatcagctcctatgtcaactggataaaggatcaccttatcaaacagggaatgaaggctgagcatgctagctcgcttctagaactggcatccaccactaagtgtagctcagtgaaatatgatgttgaaatagtagaggaatacttcgctcgacagatctcatccttctgtagtatcgactgtaccaccatcttgcagctgcatgaaattcccagtctgcagtccatctacacccttgatgccgcgatctcaaaggtccaggtctctttggatgagcatttttctaagatggctgctgagactgatcctcataagtcgtctgagattaccaagaacctacttccagccacgctgcaactcattgacacctatgcatcgttcaccagagcctatttgctgcaaaactttaatgaagagggaacaactgagaaaccttccaaggagaaactgcaaggctttgctgctgttttggctattggctctagcaggtgcaaggcaaatactctgggtccgacactggttcagaatttgccatcgtcagtgcagactgtgtgtgagtcctggaacaacatcaataccaatgaatttcccaatattggatcctggcgcaatgcctttgccaatgacaccatcccttcagagagttatattagtgcagtgcaggctgcacacctggggactctctgtagccaaagtctgcccctggctgcttccctgaagcataccctcctctcactggtcaggttgactggagatcttattgtttggtcagatgagatgaacccaccacaggtaattcggacactgctacctcttcttttggaatcaagcactgagagtgttgccgagatcagtagcaactccctggaacgcatcttgggccctgctgagtctgatgagttcttggctcgtgtttatgagaagctgatcactggttgttacaacattctggccaatcatgcagatcctaacagtggactggatgaatccatcctggaggaatgtctccagtacttggaaaagcagctggaaagtagccaggctcgtaaagctatggaggagtttttctctgacagtggagaacttgtacagatcatgatggcaacagccaatgagaacctctctgctaaattctgtaaccgagttttgaaattcttcaccaaactcttccagctgactgagaagagccctaacccgagcctgttgcatctctgtggctccctggcacaactggcctgtgtggaacctgtgcgcctgcaggcctggctcacccgcatgactacatcgcccccaaaagattctgatcagctggatgtaattcaggagaaccggcagctgctgcagttactgaccacatacattgttcgggaaaacagccaagttggggaaggtgtgtgtgctgttcttctgggcaccctgactcccatggcaacagagatgctggccaacggtgatgggactggcttccctgaacttatggttgtgatggccactctggccagtgcaggtcaaggtgctggtcaccttcagcttcataatgctgctgtggattggctgagcagatgcaagaaatacctgtcacagaagaatgtagttgaaaaactgaatgccaatgtaatgcatggaaagcatgtgatgatcttggagtgcacatgccatatcatgtcttacttggctgatgtcacgaatgccctgagccagagtaatggtcaaggcccaagtcatctctcagtggatggggaagagcgggccattgaagtagactcagactgggtggaggagttggcggtggaagaggaagattcccaggctgaggattcagatgaagattctctttgcaataaactctgcacttttacgatcacacagaaagaattcatgaaccagcattggtaccactgtcacacctgtaaaatggtggatggcgtgggtgtctgcacagtgtgtgctaaggtgtgccacaaggatcatgagatttcctatgccaagtatggatccttcttctgtgactgtggagccaaggaagatggcagctgtttggctctggtgaagagaactcctagcagtggcatgagctctaccatgaaggagtcggcatttcagagtgaacccaggatttcagagagtctagtgcgtcatgccagcacctcctcgccagctgacaaagccaaggttaccatcagtgatggaaaggttgctgacgaagagaagcccaagaagagcagcctctgccgcacagtagagggctgccgggaggaattacagaaccaggccaatttctccttcgctcctctcgtgttagacatgcttaatttccttatggatgccattcagaccaacttccagcaagcttcagccgtcgggagcagcagccgtgctcagcaagccctcagtgagctacacactgtggagaaggcagtggagatgacagaccagctgatggttcccaccttagggtcccaggaaggtgcctttgagaatgtgcggatgaattacagtggagaccagggccagaccatccggcagctgatcagtgctcatgtgctcaggcgggtggctatgtgtgtgctctcctctccccatgggcgccgccaacatttggctgtcagccatgagaagggcaagatcaccgttctgcagctctctgcactcctgaagcaagcagattccagcaaaaggaagttaactctgacccgcttggcttctgccccagttccttttactgtgttgagcctcacaggaaatccctgcaaggaagactacttggcggtttgtgggctaaaggactgtcatgtgctcacctttagtagctcaggctctgtttcggatcacttggttttgcaccctcagttggcaacggggaacttcatcatcaaagccgtgtggttacctggttcacagaccgagttagcaattgtcaccgcagactttgttaagatttatgacctgtgtgttgatgccttgagtccaaccttctattttctcctgccaagctcaaagataagagatgttaccttccttttcaatgaggagggaaagaacatcattgttataatgtcttcggctgggtacatctatactcagcttatggaagaggccagcagtgcccagcagggacccttctatgtcactaatgtgttggaaatcaatcatgaggacctgaagcaggacagtaacagccaggtggcgggcggtggtgtgtccgtgtactactcccacgtgttgcagatgttgttcttcagctattgtcaaggcaaatcattcgcagccaccatcagcaggacaaccctggaggtgttgcaactcttccccatcaacatcaaaagttttgttgtctgcagttccaatggtggcagtaagacttctcctgctctttgccagtggtctgaggtgatgaaccaccctggcttggtgtgctgtgtccagcaaactacaggggtgccgctggtagttatggtgaaaccagacacttttcttatccaggagattaagactcttcctgctaaagcgaagatccaagacatggttgctattaggcacacggcctgcaatgagcagcagcggacaacaatgattctgctgtgtgaggatggcagcctgcgcatttacatggccaacgtggagaacacctcctactggctgcagccatccctgcagcccagcagtgtcatcagcatcatgaagcctgttcgaaagcgcaaaacagctacaatcacaacccgcacgtctagccaggtgactttccccattgacttttttgaacacaaccagcagctgacagatgtggagtttggtggtaacgacctcctacaggtctataatgcacaacagataaaacaccggctgaattccactggcatgtatgtggccaacaccaagcccggaggcttcaccattgagattagtaacaacaatagcactatggtgatgacaggcatgcggatccagattgggactcaagcaatagaacgggccccgtcatatatcgagatcttcggcagaactatgcagctcaacctgagtcgctcacgctggtttgacttccccttcaccagagaagaagccctgcaggctgataagaagctgaacctcttcattggggcctcggtggatccagcaggtgtcaccatgatagatgctgtaaaaatttatggcaagactaaggagcagtttggctggcctgatgagcccccagaagaattcccttctgcctctgtcagcaacatctgcccttcaaatctgaaccagagcaacggcactggagatagcgactcagctgcccccactacgaccagtggaactgtcctggagagttctgaaactgagtccctaaccaagctggaccggctggttgtgagttctttagaagccctggaaagctgctttgccgttggcccaatcatcgagaaggagagaaacaagaatgctgctcaggagctggccactttgctgttgtccctgccagcacctgccagtgtccagcagcagtccaagagccttctggccagcctgcacaccagccgctcggcctaccacagccacaaggatcaggccttgctgagcaaagctgtgcagtgtctcaacacatctagcaaagagggcaaggatttggaccctgaggtgttccagaggctagtgatcacagctcgctccattgccatcatgcgccccaacaaccttgtccactttacggagtcaaagctgccccagatggaaacaggaatggatgaagggaaggaaccgcagaagcagttggaaggagattgctgtagtttcatcacccagcttgtgaaccacttctggaaactccatgcatccaaacccaagaatgccttcttggcacctgcctgccttccaggactaactcatattgaagctactgtcaatgctctggtggacatcatccatggctactgtacctgtgagctggattgtattaacacagcatccaagatctacatgcagatgctcttgtgtcctgatcctgctgtgagcttctcttgtaaacaagctctaattcgagtcctaaggcccaggaacaaacggagacatgtgactttaccctcttcccctcgaagcaacactccaatgggagacaaggatgatgatgacgatgatgatgcagatgagaaaatgcagtcatcagggatcccgaatggtggtcacatccgtcaggaaagccaggaacagagtgaggtggaccatggagattttgagatggtgtctgagtcgatggtcctggagacagctgaaaatgtcaacaatggcaacccctctcccctggaggccctgctggcaggcgcagagggcttcccccccatgctggacatcccacctgatgcagatgacgagaccatggttgaactagccattgccctgagcctgcagcaggaccaacaaggcagcagcagcagtgccctgggcctgcagagcctgggactgtccggccaggcacccagctcttcctctctggacgcaggaaccctctctgacaccacagcatcagctctcgttactctctcagctccagcctcagacgacgagggcagtacagcagcgacagatggttctacccttcggacctctcctgctgaccacggtggtagtgtgggctcggagagcgggggcagtgcagtggactcagtggctggcgagcacagtgtatctggccggagcagtgcttatggcgatgctacagctgaggggcatccggctggaccaggaagtgtcagctcaagcactggagccatcagcaccaccactgggcaccaggagggagatggctccgagggagaaggagaaggagaaactgaaggagatgtccacactagcaacaggctgcacatggtccgtctaatgctgttggagagattactgcagaccctgcctcaattacgaaacgttggcggtgtccgggccatcccatacatgcaggtcattctaatgctcactacagatctggatggagaagatgagaaagacaagggggccctagacaacctgctctcccagcttattgctgagttgggtatggataaaaaggatgtctccaagaagaatgagcgcagcgccctgaatgaagtccatctggtagtaatgagactcctgagtgtcttcatgtcccgcaccaaatctggatccaagtcttccatatgtgagtcatcttccctcatctccagtgccacagcagcagctctactgagctctggggctgtggactactgcctgcacgtgctcaaatcactgctggaatattggaagagccaacagaatgacgaggagcctgtggctaccagccagttgctgaaaccacatactacctcctccccacctgacatgagcccattctttctccgccagtatgtgaagggtcatgctgctgatgtgtttgaggcctatactcagcttctaacagaaatggtactgaggcttccttaccaaatcaaaaagattactgacaccaattctcgaatcccacctcctgtctttgaccactcgtggttttactttctctccgagtacctcatgatccagcagactccatttgtgcgccgtcaagtccgcaaacttctgctcttcatctgtggatccaaagagaagtaccgccagctccgggatttgcacaccctggactctcacgtgcgtgggatcaagaagctgctagaagagcaggggatattcctccgggcaagtgtggttacagccagctcaggctccgccttgcaatatgacacactcatcagcctgatggagcacctgaaagcctgtgcagagattgccgcccagcgaaccatcaactggcagaaattctgcatcaaagatgactccgtcctgtacttcctcctccaagtcagtttccttgtggatgagggcgtgtccccagtgctgctgcaactgctctcctgtgctctgtgcggcagcaaggtgctcgctgcactggcagcctcttcgggatcctccagtgcttcttcctcctcagcccctgtggctgccagttctggacaagccacaacacagtccaagtcttccactaaaaagagcaagaaagaagaaaaagaaaaggagaaagatggtgagacctctggcagccaggaggaccagctgtgcacagctctggtgaaccagctgaacaaatttgccgataaggaaaccctgatccagttcctgcgttgtttcctgttagagtccaattcttcctcggtgcgctggcaggcccactgtctgacactgcacatctacagaaattccagcaaatctcaacaggagctcctgctagatctgatgtggtccatctggccagaactcccagcctatggtcgtaaggctgcccagtttgtggacctactaggatatttctccctgaaaactccacaaacagagaagaagttgaaggagtattcacagaaggctgtggagattctgcggactcaaaaccatattcttaccaaccaccccaactcgaacatttataacactttgtctggcttagtggagtttgatggctattacctggagagcgatccctgcctggtgtgtaataacccggaagtaccgttctgttatatcaagctgtcttccattaaagtggacacgcggtacaccaccacccagcaggttgtgaagctcattggcagtcacaccatcagcaaagtgacagtgaaaatcggggatctgaaacggaccaagatggtgcggaccatcaacctgtattataacaaccgaaccgtgcaggccatcgtggagttgaaaaacaagccagctcgctggcacaaagccaagaaggttcagctgacccctggacagacagaggtgaagattgacctgccgttgcccattgtggcctccaatctgatgattgagtttgcagacttctatgaaaactaccaggcctccacagagaccctgcagtgccctcgctgtagtgcctcggtccctgccaacccaggagtctgtggcaactgtggagagaatgtgtaccagtgtcacaaatgcagatccatcaactacgatgaaaaggatcccttcctctgcaatgcctgtggcttctgtaaatatgcccgcttcgacttcatgctctatgccaagccttgctgtgcagtggatcccattgagaatgaagaagaccggaagaaggctgtatccaacatcaatacacttttggacaaagctgatcgagtgtatcatcagctgatgggacaccggccacagctggagaacctgctctgcaaagtgaatgaggcagctccagaaaagccacaggatgactcaggaacagcagggggcatcagctccacttctgccagtgtgaatcgttacatcctgcagttggctcaggagtattgtggagactgcaagaactcttttgatgaactctccaaaatcatccagaaagtctttgcttcgcgcaaagagttgttggaatatgacctacagcagagggaagcagccactaaatcatcccggacctccgtgcagcccacattcactgccagccagtaccgtgccttatccgtcctgggctgtggccacacatcctccaccaagtgctatggctgcgcctcggctgtcacagaacattgtatcacactacttcgggccctggccaccaacccagccttgaggcacatccttgtctcccagggccttatccgggagctctttgattataatcttcgccgaggggctgcggccatgcgggaggaggtccgccagctcatgtgcctcctaactcgagacaacccagaagccacccaacagatgaatgacctgattattggcaaggtctccacagccctgaagggccactgggccaaccccgatctggcaagtagcctgcagtatgaaatgctgctgctgacggattctatctccaaggaggacagctgctgggagctccggttacgctgtgctctcagccttttcctcatggctgtgaacattaagactcctgtggtggttgaaaacattaccctcatgtgcctgaggatcttgcagaagctgataaaaccacctgctcccactagcaagaagaacaaggatgtccccgttgaggccctcaccacggtgaagccatactgcaatgagatccatgcccaggctcaactgtggctcaagagagaccccaaggcatcctatgatgcctggaagaagtgtcttcctatcagagggatagatggcaatgggaaagcccccagcaaatcagagctccgccatctctatttgactgagaagtatgtgtggaggtggaaacagttcctgagtcgtcgggggaagaggacctcccccttggatctcaaactggggcataacaactggctgcgacaagtgcttttcactccagcaacgcaggccgcacggcaggcagcctgtaccattgtggaagctctagccaccattcccagccgcaagcagcaggtcctggacctgcttaccagttacctggatgagctgagcatagctggggagtgtgcagctgagtacctggctctctaccagaagctcatcacttctgcgcactggaaagtctacttggcagctcggggagtcctaccctatgtgggcaacctcatcaccaaggaaatagctcgtctgctggccctggaggaggctaccctgagtaccgatctgcagcagggttatgcccttaaaagtctcacaggccttctctcctcctttgttgaggtggaatccatcaaaagacattttaaaagtcgcttggtgggtactgtgctgaatggatacctgtgcttgcggaagctggtggtgcagaggaccaagctgatcgatgagacgcaggacatgctgctggagatgctggaggacatgaccacaggtacagaatcagaaaccaaggccttcatggctgtgtgcattgagacagccaagcgctacaatctggatgactaccggaccccggtgttcatcttcgagaggctctgcagcatcatttatcctgaggagaatgaagtcactgagttctttgtgaccctggagaaggatccccaacaagaagacttcttacagggcaggatgcctgggaacccgtatagcagcaatgagccaggcatcgggccgctgatgagggatataaagaacaagatttgccaggactgtgacttagtggccctcctggaagatgacagtggcatggagcttctagtgaacaataaaatcattagtttggaccttcctgtggctgaagtttacaagaaagtctggtgtaccacgaatgagggagagcccatgaggattgtttatcgtatgcgggggctgctgggcgatgccacagaggagttcattgagtccctggactctactacagatgaagaagaagatgaagaagaagtgtataaaatggctggtgtgatggcccagtgtgggggcctggaatgcatgcttaacagactcgcagggatcagagatttcaagcagggacgccaccttctaacagtgctactgaaattgttcagttactgcgtgaaggtgaaagtcaaccggcagcaactggtcaaactggaaatgaacaccttgaacgtcatgctggggaccctaaacctggcccttgtagctgaacaagaaagcaaggacagtgggggtgcagctgtggctgagcaggtgcttagcatcatggagatcattctagatgagtccaatgctgagcccctgagtgaggacaagggcaacctcctcctgacaggtgacaaggatcaactggtgatgctcttggaccagatcaacagcacctttgttcgctccaaccccagtgtgctccagggcctgcttcgcatcatcccgtacctttcctttggagaggtggagaaaatgcagatcttggtggagcgattcaaaccatactgcaactttgataaatatgatgaagatcacagtggtgatgataaagtcttcctggactgcttctgtaaaatagctgctggcatcaagaacaacagcaatgggcaccagctgaaggatctgattctccagaaggggatcacccagaatgcacttgactacatgaaaaagcacatccctagcgccaagaatttggatgccgacatctggaaaaagtttttgtctcgcccagccttgccatttatcctaaggctgcttcggggcctggccatccagcaccctggcacccaggttctgattggaactgattccatcccgaacctgcataagctggagcaggtgtccagtgatgagggcattgggaccttggcagagaacctgctggaagccctgcgggaacaccctgacgtaaacaagaagattgacgcagcccgcagggagacccgggcagagaagaagcgcatggccatggcaatgaggcagaaggccctgggcaccctgggcatgacgacaaatgaaaagggccaggtcgtgaccaagacagcactcctgaagcagatggaagagctgatcgaggagcctggcctcacgtgctgcatctgcagggagggatacaagttccagcccacaaaggtcctgggcatttataccttcacgaagcgggtagccttggaggagatggagaataagccccggaaacagcagggctacagcaccgtgtcccacttcaacattgtgcactacgactgccatctggctgccgtcaggttggctcgaggccgggaagagtgggagagtgccgccctgcagaatgccaacaccaagtgcaacgggctccttccggtctggggacctcatgtccctgaatcagcttttgccacttgcttggcaagacacaacacttacctccaggaatgtacaggccagcgggagcccacgtatcagctcaacatccatgacatcaaactgctcttcctgcgcttcgccatggagcagtcgttcagcgcagacactggcgggggcggccgggagagcaacatccacctgatcccgtacatcattcacactgtgctttacgtcctgaacacaacccgagcaacttcccgagaagagaagaacctccaaggctttctggaacagcccaaggagaagtgggtggagagtgcctttgaagtggacgggccctactatttcacagtcttggcccttcacatcctgccccctgagcagtggagagccacacgtgtggaaatcttgcggaggctgttggtgacctcgcaggctcgggcagtggctccaggtggagccaccaggctgacagataaggcagtgaaggactattccgcttaccgttcttcccttctcttttgggccctcgtcgatctcatttacaacatgtttaagaaggtgcctaccagtaacacagagggaggctggtcctgctctctcgctgagtacatccgccacaacgacatgcccatctacgaagctgccgacaaagccctgaaaaccttccaggaggagttcatgccagtggagaccttctcagagttcctcgatgtggccggtcttttatcagaaatcaccgatccagagagcttcctgaaggacctgttgaactcagtcccctgaccaccacacagcagctgcggcggcgaagacgaagctggcttgccttccaccctctgttctccctccttgtgcattaagttccctccgcgggatgctgcattgttaccccgccctcccctctctcatttttcttggtgtggcttggggtttttaggcttcctgttttatctcgtgtgtgtggtgcaccagctatgaggttgtctgtaacccaagccatcaaagggcctgtacatacctaggagccatgagttgtcccggccagcttcatacttgagtgtgcacatcttgagaaataaacaagtgacttaacacacattgaaaagg

SEQ ID NO: 438 - DNA, 16013 bp, Homo sapiens
agattgcgtcacttccgccccctcctgggaggcggcgctgggccggtggcaagcccccggagggagccgcagtagtacgacggaagatggcgacgagcggcggcgaagaggcggcggcagcggctccggcgccggggaccccggcaacgggggcggacacgaccccgggctgggaggtggctgtgcggcccctgctgtccgcgtcctactccgccttcgagatgaaggagttgccgcagctggtggcctcagtcatcgagagtgaatcagaaatcctgcaccatgagaagcagtacgagccattctactcatcttttgttgcactttccacacactatattacaacagtttgcagtctcattccccggaaccaacttcagtcagtggcagcagcctgtaaagttctaattgagttttctctcctgcgtctggagaatccagatgaggcttgtgctgtgtcccagaaacacttgattctcctaatcaagggcctgtgcactggctgtagccgactagatagaactgaaattatcacatttacagcaatgatgaaatccgccaagctgccccaaacagtgaagacactttcagacgtggaagatcagaaagagctggcctcaccagtaagccctgagttgaggcaaaaggaggtacagatgaattttttgaaccagctgacctcagtttttaaccctagaactgtagcatcacaacctatcagtacacagactctggtggaaggagaaaatgatgagcagtcatctacagatcaagcctcagctatcaaaaccaagaatgtgttcatagctcagaacgtggctagtcttcaagagcttggtggctcggagaagctactgcgtgtatgtttgaacctgccatatttcctacgctatatcaatcggttccaagatgcagttttagctaattccttcttcataatgcctgcaacagtagcagatgccactgctgttcgtaatggctttcattcattggtgattgatgtaactatggcattggataccctttctctacctgtgttggaacctctcaatccttctcgtctacaagatgtgacagtcctcagcctaagttgtctgtatgcaggtgtgagtgtggcaacgtgcatggccatcctccatgtgggtagtgcccagcaagtgcggacagggtccacgagctccaaagaagatgactatgaaagtgacgcagctacaattgtccagaaatgtctcgaaatctatgacatgattggacaagcaatcagcagttctcgccgggctggtggtgagcactatcagaatttccaattgctgggtgcttggtgcttgttaaacagccttttcctcatactgaacctcagtcctactgcgttggctgataaggggaaagagaaggacccactggctgccctccgagtcagagacatcctttctcgtactaaagagggagtgggctcccctaaactggggcctggaaaagggcatcagggatttggggtactctcagtaatattggcaaaccatgccatcaaactgctaacgtctctctttcaagacctacaagtggaggcccttcacaagggttgggagacagatggcccccctgcagccttgagcattatggcccagagcacctccatacagaggattcaacggctgattgactctgtcccactgatgaacctgctcttgacgttactttcaacttcctacagaaaggcatgtgtcctgcagcggcagaggaagggctccatgagcagcgatgccagcgcctccaccgactccaatacttactatgaggacgatttcagtagcacggaggaggacagcagccaagacgatgacagtgagcctattttggggcaatggtttgaggagactatttctcccagtaaagagaaagcagcacctccgcctcctcccccacctcctccactggaaagctctcctcgggttaaaagccccagtaagcaggcccctggtgagaagggcaacattctggcgagtcgcaaagatcctgagttgttcttaggtctggcttccaacattttgaacttcatcacctcttccatgctgaactctcggaacaattttatccgaaactatctgagtgtatctctttcagaacaccatatggccaccctagccagtatcatcaaggaggtggacaaagatggactcaagggttcatcagatgaagagtttgctgcagctctctatcacttcaaccactcactggtaacctctgaccttcagtcacctaacctgcagaacacactgttgcagcagctaggagtggctcctttttctgagggcccttggcccttgtacattcaccctcaaagcctctctgtgctttcacgcctcctgctcatctggcaacataaagccagtgctcaaggtgaccctgacgtcccagaatgccttaaagtttgggacaggtttttgtctacaatgaagcagaatgccctgcaaggtgtggtgcccagtgagacagaggatctgaatgtagaacacctgcagatgctcctcctcattttccacaatttcaccgagacaggccggcgggccatattgtcgctttttgtccagatcatccaggagttgagcgtcaacatggatgctcagatgcgcttcgtgccgcttatcttggctcgcctccttctcatctttgattatctgcttcatcagtactccaaagcccctgtgtatctatttgagcaggtacagcataacctgctaagtcctccctttgggtgggcaagtggatcccaggacagcaacagccgccgggcaaccactcctctctatcatggattcaaagaagtagaagaaaactggtctaagcatttctcatcagatgctgtcccacaccccagattctactgtgtcctgtccccagaagcctcagaggatgatttgaaccgacttgattctgtggcatgtgacgtccttttctccaagcttgtcaagtatgatgagctttatgctgcactgacagccctgcttgcagctgggtcccagcttgatacagttaggagaaaggaaaacaagaatgtaacagccttggaggcctgtgcccttcaatattacttcttgatactgtggaggatcctaggaattttaccaccatcaaagacttacattaaccagctatccatgaactcacctgagatgagcgaatgtgacatcttgcacactctgcgatggtcttctcggctccggatcagctcctatgtcaactggataaaggatcaccttatcaaacagggaatgaaggctgagcatgctagctcgcttctagaactggcatccaccactaagtgtagctcagtgaaatatgatgttgaaatagtagaggaatacttcgctcgacagatctcatccttctgtagtatcgactgtaccaccatcttgcagctgcatgaaattcccagtctgcagtccatctacacccttgatgccgcgatctcaaaggtccaggtctctttggatgagcatttttctaagatggctgctgagactgatcctcataagtcgtctgagattaccaagaacctacttccagccacgctgcaactcattgacacctatgcatcgttcaccagagcctatttgctgcaaaactttaatgaagagggaacaactgagaaaccttccaaggagaaactgcaaggctttgctgctgttttggctattggctctagcaggtgcaaggcaaatactctgggtccgacactggttcagaatttgccatcgtcagtgcagactgtgtgtgagtcctggaacaacatcaataccaatgaatttcccaatattggatcctggcgcaatgcctttgccaatgacaccatcccttcagagagttatattagtgcagtgcaggctgcacacctggggactctctgtagccaaagtctgcccctggctgcttccctgaagcataccctcctctcactggtcaggttgactggagatcttattgtttggtcagatgagatgaacccaccacaggtaattcggacactgctacctcttcttttggaatcaagcactgagagtgttgccgagatcagtagcaactccctggaacgcatcttgggccctgctgagtctgatgagttcttggctcgtgtttatgagaagctgatcactggttgttacaacattctggccaatcatgcagatcctaacagtggactggatgaatccatcctggaggaatgtctccagtacttggaaaagcagctggaaagtagccaggctcgtaaagctatggaggagtttttctctgacagtggagaacttgtacagatcatgatggcaacagccaatgagaacctctctgctaaattctgtaaccgagttttgaaattcttcaccaaactcttccagctgactgagaagagccctaacccgagcctgttgcatctctgtggctccctggcacaactggcctgtgtggaacctgtgcgcctgcaggcctggctcacccgcatgactacatcgcccccaaaagattctgatcagctggatgtaattcaggagaaccggcagctgctgcagttactgaccacatacattgttcgggaaaacagccaagttggggaaggtgtgtgtgctgttcttctgggcaccctgactcccatggcaacagagatgctggccaacggtgatgggactggcttccctgaacttatggttgtgatggccactctggccagtgcaggtcaaggtgctggtcaccttcagcttcataatgctgctgtggattggctgagcagatgcaagaaatacctgtcacagaagaatgtagttgaaaaactgaatgccaatgtaatgcatggaaagcatgtgatgatcttggagtgcacatgccatatcatgtcttacttggctgatgtcacgaatgccctgagccagagtaatggtcaaggcccaagtcatctctcagtggatggggaagagcgggccattgaagtagactcagactgggtggaggagttggcggtggaagaggaagattcccaggctgaggattcagatgaagattctctttgcaataaactctgcacttttacgatcacacagaaagaattcatgaaccagcattggtaccactgtcacacctgtaaaatggtggatggcgtgggtgtctgcacagtgtgtgctaaggtgtgccacaaggatcatgagatttcctatgccaagtatggatccttcttctgtgactgtggagccaaggaagatggcagctgtttggctctggtgaagagaactcctagcagtggcatgagctctaccatgaaggagtcggcatttcagagtgaacccaggatttcagagagtctagtgcgtcatgccagcacctcctcgccagctgacaaagccaaggttaccatcagtgatggaaaggttgctgacgaagagaagcccaagaagagcagcctctgccgcacagtagagggctgccgggaggaattacagaaccaggccaatttctccttcgctcctctcgtgttagacatgcttaatttccttatggatgccattcagaccaacttccagcaagcttcagccgtcgggagcagcagccgtgctcagcaagccctcagtgagctacacactgtggagaaggcagtggagatgacagaccagctgatggttcccaccttagggtcccaggaaggtgcctttgagaatgtgcggatgaattacagtggagaccagggccagaccatccggcagctgatcagtgctcatgtgctcaggcgggtggctatgtgtgtgctctcctctccccatgggcgccgccaacatttggctgtcagccatgagaagggcaagatcaccgttctgcagctctctgcactcctgaagcaagcagattccagcaaaaggaagttaactctgacccgcttggcttctgccccagttccttttactgtgttgagcctcacaggaaatccctgcaaggaagactacttggcggtttgtgggctaaaggactgtcatgtgctcacctttagtagctcaggctctgtttcggatcacttggttttgcaccctcagttggcaacggggaacttcatcatcaaagccgtgtggttacctggttcacagaccgagttagcaattgtcaccgcagactttgttaagatttatgacctgtgtgttgatgccttgagtccaaccttctattttctcctgccaagctcaaagataagagatgttaccttccttttcaatgaggagggaaagaacatcattgttataatgtcttcggctgggtacatctatactcagcttatggaagaggccagcagtgcccagcagggacccttctatgtcactaatgtgttggaaatcaatcatgaggacctgaagcaggacagtaacagccaggtggcgggcggtggtgtgtccgtgtactactcccacgtgttgcagatgttgttcttcagctattgtcaaggcaaatcattcgcagccaccatcagcaggacaaccctggaggtgttgcaactcttccccatcaacatcaaaagttttgttgtctgcagttccaatggtggcagtaagacttctcctgctctttgccagtggtctgaggtgatgaaccaccctggcttggtgtgctgtgtccagcaaactacaggggtgccgctggtagttatggtgaaaccagacacttttcttatccaggagattaagactcttcctgctaaagcgaagatccaagacatggttgctattaggcacacggcctgcaatgagcagcagcggacaacaatgattctgctgtgtgaggatggcagcctgcgcatttacatggccaacgtggagaacacctcctactggctgcagccatccctgcagcccagcagtgtcatcagcatcatgaagcctgttcgaaagcgcaaaacagctacaatcacaacccgcacgtctagccaggtgactttccccattgacttttttgaacacaaccagcagctgacagatgtggagtttggtggtaacgacctcctacaggtctataatgcacaacagataaaacaccggctgaattccactggcatgtatgtggccaacaccaagcccggaggcttcaccattgagattagtaacaacaatagcactatggtgatgacaggcatgcggatccagattgggactcaagcaatagaacgggccccgtcatatatcgagatcttcggcagaactatgcagctcaacctgagtcgctcacgctggtttgacttccccttcaccagagaagaagccctgcaggctgataagaagctgaacctcttcattggggcctcggtggatccagcaggtgtcaccatgatagatgctgtaaaaatttatggcaagactaaggagcagtttggctggcctgatgagcccccagaagaattcccttctgcctctgtcagcaacatctgcccttcaaatctgaaccagagcaacggcactggagatagcgactcagctgcccccactacgaccagtggaactgtcctggagagttctgaaactgagtccctaaccaagctggaccggctggttgtgagttctttagaagccctggaaagctgctttgccgttggcccaatcatcgagaaggagagaaacaagaatgctgctcaggagctggccactttgctgttgtccctgccagcacctgccagtgtccagcagcagtccaagagccttctggccagcctgcacaccagccgctcggcctaccacagccacaaggatcaggccttgctgagcaaagctgtgcagtgtctcaacacatctagcaaagagggcaaggatttggaccctgaggtgttccagaggctagtgatcacagctcgctccattgccatcatgcgccccaacaaccttgtccactttacggagtcaaagctgccccagatggaaacagaaggaatggatgaagggaaggaaccgcagaagcagttggaaggagattgctgtagtttcatcacccagcttgtgaaccacttctggaaactccatgcatccaaacccaagaatgccttcttggcacctgcctgccttccaggactaactcatattgaagctactgtcaatgctctggtggacatcatccatggctactgtacctgtgagctggattgtattaacacagcatccaagatctacatgcagatgctcttgtgtcctgatcctgctgtgagcttctcttgtaaacaagctctaattcgagtcctaaggcccaggaacaaacggagacatgtgactttaccctcttcccctcgaagcaacactccaatgggagacaaggatgatgatgacgatgatgatgcagatgagaaaatgcagtcatcagggatcccgaatggtggtcacatccgtcaggaaagccaggaacagagtgaggtggaccatggagattttgagatggtgtctgagtcgatggtcctggagacagctgaaaatgtcaacaatggcaacccctctcccctggaggccctgctggcaggcgcagagggcttcccccccatgctggacatcccacctgatgcagatgacgagaccatggttgaactagccattgccctgagcctgcagcaggaccaacaaggcagcagcagcagtgccctgggcctgcagagcctgggactgtccggccaggcacccagctcttcctctctggacgcaggaaccctctctgacaccacagcatcagctccagcctcagacgacgagggcagtacagcagcgacagatggttctacccttcggacctctcctgctgaccacggtggtagtgtgggctcggagagcgggggcagtgcagtggactcagtggctggcgagcacagtgtatctggccggagcagtgcttatggcgatgctacagctgaggggcatccggctggaccaggaagtgtcagctcaagcactggagccatcagcaccaccactgggcaccaggagggagatggctccgagggagaaggagaaggagaaactgaaggagatgtccacactagcaacaggctgcacatggtccgtctaatgctgttggagagattactgcagaccctgcctcaattacgaaacgttggcggtgtccgggccatcccatacatgcaggtcattctaatgctcactacagatctggatggagaagatgagaaagacaagggggccctagacaacctgctctcccagcttattgctgagttgggtatggataaaaaggatgtctccaagaagaatgagcgcagcgccctgaatgaagtccatctggtagtaatgagactcctgagtgtcttcatgtcccgcaccaaatctggatccaagtcttccatatgtgagtcatcttccctcatctccagtgccacagcagcagctctactgagctctggggctgtggactactgcctgcacgtgctcaaatcactgctggaatattggaagagccaacagaatgacgaggagcctgtggctaccagccagttgctgaaaccacatactacctcctccccacctgacatgagcccattctttctccgccagtatgtgaagggtcatgctgctgatgtgtttgaggcctatactcagcttctaacagaaatggtactgaggcttccttaccaaatcaaaaagattactgacaccaattctcgaatcccacctcctgtctttgaccactcgtggttttactttctctccgagtacctcatgatccagcagactccatttgtgcgccgtcaagtccgcaaacttctgctcttcatctgtggatccaaagagaagtaccgccagctccgggatttgcacaccctggactctcacgtgcgtgggatcaagaagctgctagaagagcaggggatattcctccgggcaagtgtggttacagccagctcaggctccgccttgcaatatgacacactcatcagcctgatggagcacctgaaagcctgtgcagagattgccgcccagcgaaccatcaactggcagaaattctgcatcaaagatgactccgtcctgtacttcctcctccaagtcagtttccttgtggatgagggcgtgtccccagtgctgctgcaactgctctcctgtgctctgtgcggcagcaaggtgctcgctgcactggcagcctcttcgggatcctccagtgcttcttcctcctcagcccctgtggctgccagttctggacaagccacaacacagtccaagtcttccactaaaaagagcaagaaagaagaaaaagaaaaggagaaagatggtgagacctctggcagccaggaggaccagctgtgcacagctctggtgaaccagctgaacaaatttgccgataaggaaaccctgatccagttcctgcgttgtttcctgttagagtccaattcttcctcggtgcgctggcaggcccactgtctgacactgcacatctacagaaattccagcaaatctcaacaggagctcctgctagatctgatgtggtccatctggccagaactcccagcctatggtcgtaaggctgcccagtttgtggacctactaggatatttctccctgaaaactccacaaacagagaagaagttgaaggagtattcacagaaggctgtggagattctgcggactcaaaaccatattcttaccaaccaccccaactcgaacatttataacactttgtctggcttagtggagtttgatggctattacctggagagcgatccctgcctggtgtgtaataacccggaagtaccgttctgttatatcaagctgtcttccattaaagtggacacgcggtacaccaccacccagcaggttgtgaagctcattggcagtcacaccatcagcaaagtgacagtgaaaatcggggatctgaaacggaccaagatggtgcggaccatcaacctgtattataacaaccgaaccgtgcaggccatcgtggagttgaaaaacaagccagctcgctggcacaaagccaagaaggttcagctgacccctggacagacagaggtgaagattgacctgccgttgcccattgtggcctccaatctgatgattgagtttgcagacttctatgaaaactaccaggcctccacagagaccctgcagtgccctcgctgtagtgcctcggtccctgccaacccaggagtctgtggcaactgtggagagaatgtgtaccagtgtcacaaatgcagatccatcaactacgatgaaaaggatcccttcctctgcaatgcctgtggcttctgtaaatatgcccgcttcgacttcatgctctatgccaagccttgctgtgcagtggatcccattgagaatgaagaagaccggaagaaggctgtatccaacatcaatacacttttggacaaagctgatcgagtgtatcatcagctgatgggacaccggccacagctggagaacctgctctgcaaagtgaatgaggcagctccagaaaagccacaggatgactcaggaacagcagggggcatcagctccacttctgccagtgtgaatcgttacatcctgcagttggctcaggagtattgtggagactgcaagaactcttttgatgaactctccaaaatcatccagaaagtctttgcttcgcgcaaagagttgttggaatatgacctacagcagagggaagcagccactaaatcatcccggacctccgtgcagcccacattcactgccagccagtaccgtgccttatccgtcctgggctgtggccacacatcctccaccaagtgctatggctgcgcctcggctgtcacagaacattgtatcacactacttcgggccctggccaccaacccagccttgaggcacatccttgtctcccagggccttatccgggagctctttgattataatcttcgccgaggggctgcggccatgcgggaggaggtccgccagctcatgtgcctcctaactcgagacaacccagaagccacccaacagatgaatgacctgattattggcaaggtctccacagccctgaagggccactgggccaaccccgatctggcaagtagcctgcagtatgaaatgctgctgctgacggattctatctccaaggaggacagctgctgggagctccggttacgctgtgctctcagccttttcctcatggctgtgaacattaagactcctgtggtggttgaaaacattaccctcatgtgcctgaggatcttgcagaagctgataaaaccacctgctcccactagcaagaagaacaaggatgtccccgttgaggccctcaccacggtgaagccatactgcaatgagatccatgcccaggctcaactgtggctcaagagagaccccaaggcatcctatgatgcctggaagaagtgtcttcctatcagagggatagatggcaatgggaaagcccccagcaaatcagagctccgccatctctatttgactgagaagtatgtgtggaggtggaaacagttcctgagtcgtcgggggaagaggacctcccccttggatctcaaactggggcataacaactggctgcgacaagtgcttttcactccagcaacgcaggccgcacggcaggcagcctgtaccattgtggaagctctagccaccattcccagccgcaagcagcaggtcctggacctgcttaccagttacctggatgagctgagcatagctggggagtgtgcagctgagtacctggctctctaccagaagctcatcacttctgcgcactggaaagtctacttggcagctcggggagtcctaccctatgtgggcaacctcatcaccaaggaaatagctcgtctgctggccctggaggaggctaccctgagtaccgatctgcagcagggttatgcccttaaaagtctcacaggccttctctcctcctttgttgaggtggaatccatcaaaagacattttaaaagtcgcttggtgggtactgtgctgaatggatacctgtgcttgcggaagctggtggtgcagaggaccaagctgatcgatgagacgcaggacatgctgctggagatgctggaggacatgaccacaggtacagaatcagaaaccaaggccttcatggctgtgtgcattgagacagccaagcgctacaatctggatgactaccggaccccggtgttcatcttcgagaggctctgcagcatcatttatcctgaggagaatgaagtcactgagttctttgtgaccctggagaaggatccccaacaagaagacttcttacagggcaggatgcctgggaacccgtatagcagcaatgagccaggcatcgggccgctgatgagggatataaagaacaagatttgccaggactgtgacttagtggccctcctggaagatgacagtggcatggagcttctagtgaacaataaaatcattagtttggaccttcctgtggctgaagtttacaagaaagtctggtgtaccacgaatgagggagagcccatgaggattgtttatcgtatgcgggggctgctgggcgatgccacagaggagttcattgagtccctggactctactacagatgaagaagaagatgaagaagaagtgtataaaatggctggtgtgatggcccagtgtgggggcctggaatgcatgcttaacagactcgcagggatcagagatttcaagcagggacgccaccttctaacagtgctactgaaattgttcagttactgcgtgaaggtgaaagtcaaccggcagcaactggtcaaactggaaatgaacaccttgaacgtcatgctggggaccctaaacctggcccttgtagctgaacaagaaagcaaggacagtgggggtgcagctgtggctgagcaggtgcttagcatcatggagatcattctagatgagtccaatgctgagcccctgagtgaggacaagggcaacctcctcctgacaggtgacaaggatcaactggtgatgctcttggaccagatcaacagcacctttgttcgctccaaccccagtgtgctccagggcctgcttcgcatcatcccgtacctttcctttggagaggtggagaaaatgcagatcttggtggagcgattcaaaccatactgcaactttgataaatatgatgaagatcacagtggtgatgataaagtcttcctggactgcttctgtaaaatagctgctggcatcaagaacaacagcaatgggcaccagctgaaggatctgattctccagaaggggatcacccagaatgcacttgactacatgaaaaagcacatccctagcgccaagaatttggatgccgacatctggaaaaagtttttgtctcgcccagccttgccatttatcctaaggctgcttcggggcctggccatccagcaccctggcacccaggttctgattggaactgattccatcccgaacctgcataagctggagcaggtgtccagtgatgagggcattgggaccttggcagagaacctgctggaagccctgcgggaacaccctgacgtaaacaagaagattgacgcagcccgcagggagacccgggcagagaagaagcgcatggccatggcaatgaggcagaaggccctgggcaccctgggcatgacgacaaatgaaaagggccaggtcgtgaccaagacagcactcctgaagcagatggaagagctgatcgaggagcctggcctcacgtgctgcatctgcagggagggatacaagttccagcccacaaaggtcctgggcatttataccttcacgaagcgggtagccttggaggagatggagaataagccccggaaacagcagggctacagcaccgtgtcccacttcaacattgtgcactacgactgccatctggctgccgtcaggttggctcgaggccgggaagagtgggagagtgccgccctgcagaatgccaacaccaagtgcaacgggctccttccggtctggggacctcatgtccctgaatcagcttttgccacttgcttggcaagacacaacacttacctccaggaatgtacaggccagcgggagcccacgtatcagctcaacatccatgacatcaaactgctcttcctgcgcttcgccatggagcagtcgttcagcgcagacactggcgggggcggccgggagagcaacatccacctgatcccgtacatcattcacactgtgctttacgtcctgaacacaacccgagcaacttcccgagaagagaagaacctccaaggctttctggaacagcccaaggagaagtgggtggagagtgcctttgaagtggacgggccctactatttcacagtcttggcccttcacatcctgccccctgagcagtggagagccacacgtgtggaaatcttgcggaggctgttggtgacctcgcaggctcgggcagtggctccaggtggagccaccaggctgacagataaggcagtgaaggactattccgcttaccgttcttcccttctcttttgggccctcgtcgatctcatttacaacatgtttaagaaggtgcctaccagtaacacagagggaggctggtcctgctctctcgctgagtacatccgccacaacgacatgcccatctacgaagctgccgacaaagccctgaaaaccttccaggaggagttcatgccagtggagaccttctcagagttcctcgatgtggccggtcttttatcagaaatcaccgatccagagagcttcctgaaggacctgttgaactcagtcccctgaccaccacacagcagctgcggcggcgaagacgaagctggcttgccttccaccctctgttctccctccttgtgcattaagttccctccgcgggatgctgcattgttaccccgccctcccctctctcatttttcttggtgtggcttggggtttttaggcttcctgttttatctcgtgtgtgtggtgcaccagctatgaggttgtctgtaacccaagccatcaaagggcctgtacatacctaggagccatgagttgtcccggccagcttcatacttgagtgtgcacatcttgagaaataaacaagtgacttaacacacattgaaaagg

SEQ ID NO: 439 - DNA, 15998 bp, Homo sapiens
agattgcgtcacttccgccccctcctgggaggcggcgctgggccggtggcaagcccccggagggagccgcagtagtacgacggaagatggcgacgagcggcggcgaagaggcggcggcagcggctccggcgccggggaccccggcaacgggggcggacacgaccccgggctgggaggtggctgtgcggcccctgctgtccgcgtcctactccgccttcgagatgaaggagttgccgcagctggtggcctcagtcatcgagagtgaatcagaaatcctgcaccatgagaagcagtacgagccattctactcatcttttgttgcactttccacacactatattacaacagtttgcagtctcattccccggaaccaacttcagtcagtggcagcagcctgtaaagttctaattgagttttctctcctgcgtctggagaatccagatgaggcttgtgctgtgtcccagaaacacttgattctcctaatcaagggcctgtgcactggctgtagccgactagatagaactgaaattatcacatttacagcaatgatgaaatccgccaagctgccccaaacagtgaagacactttcagacgtggaagatcagaaagagctggcctcaccagtaagccctgagttgaggcaaaaggaggtacagatgaattttttgaaccagctgacctcagtttttaaccctagaactgtagcatcacaacctatcagtacacagactctggtggaaggagaaaatgatgagcagtcatctacagatcaagcctcagctatcaaaaccaagaatgtgttcatagctcagaacgtggctagtcttcaagagcttggtggctcggagaagctactgcgtgtatgtttgaacctgccatatttcctacgctatatcaatcggttccaagatgcagttttagctaattccttcttcataatgcctgcaacagtagcagatgccactgctgttcgtaatggctttcattcattggtgattgatgtaactatggcattggataccctttctctacctgtgttggaacctctcaatccttctcgtctacaagatgtgacagtcctcagcctaagttgtctgtatgcaggtgtgagtgtggcaacgtgcatggccatcctccatgtgggtagtgcccagcaagtgcggacagggtccacgagctccaaagaagatgactatgaaagtgacgcagctacaattgtccagaaatgtctcgaaatctatgacatgattggacaagcaatcagcagttctcgccgggctggtggtgagcactatcagaatttccaattgctgggtgcttggtgcttgttaaacagccttttcctcatactgaacctcagtcctactgcgttggctgataaggggaaagagaaggacccactggctgccctccgagtcagagacatcctttctcgtactaaagagggagtgggctcccctaaactggggcctggaaaagggcatcagggatttggggtactctcagtaatattggcaaaccatgccatcaaactgctaacgtctctctttcaagacctacaagtggaggcccttcacaagggttgggagacagatggcccccctgcagccttgagcattatggcccagagcacctccatacagaggattcaacggctgattgactctgtcccactgatgaacctgctcttgacgttactttcaacttcctacagaaaggcatgtgtcctgcagcggcagaggaagggctccatgagcagcgatgccagcgcctccaccgactccaatacttactatgaggacgatttcagtagcacggaggaggacagcagccaagacgatgacagtgagcctattttggggcaatggtttgaggagactatttctcccagtaaagagaaagcagcacctccgcctcctcccccacctcctccactggaaagctctcctcgggttaaaagccccagtaagcaggcccctggtgagaagggcaacattctggcgagtcgcaaagatcctgagttgttcttaggtctggcttccaacattttgaacttcatcacctcttccatgctgaactctcggaacaattttatccgaaactatctgagtgtatctctttcagaacaccatatggccaccctagccagtatcatcaaggaggtggacaaagatggactcaagggttcatcagatgaagagtttgctgcagctctctatcacttcaaccactcactggtaacctctgaccttcagtcacctaacctgcagaacacactgttgcagcagctaggagtggctcctttttctgagggcccttggcccttgtacattcaccctcaaagcctctctgtgctttcacgcctcctgctcatctggcaacataaagccagtgctcaaggtgaccctgacgtcccagaatgccttaaagtttgggacaggtttttgtctacaatgaagcagaatgccctgcaaggtgtggtgcccagtgagacagaggatctgaatgtagaacacctgcagatgctcctcctcattttccacaatttcaccgagacaggccggcgggccatattgtcgctttttgtccagatcatccaggagttgagcgtcaacatggatgctcagatgcgcttcgtgccgcttatcttggctcgcctccttctcatctttgattatctgcttcatcagtactccaaagcccctgtgtatctatttgagcaggtacagcataacctgctaagtcctccctttgggtgggcaagtggatcccaggacagcaacagccgccgggcaaccactcctctctatcatggattcaaagaagtagaagaaaactggtctaagcatttctcatcagatgctgtcccacaccccagattctactgtgtcctgtccccagaagcctcagaggatgatttgaaccgacttgattctgtggcatgtgacgtccttttctccaagcttgtcaagtatgatgagctttatgctgcactgacagccctgcttgcagctgggtcccagcttgatacagttaggagaaaggaaaacaagaatgtaacagccttggaggcctgtgcccttcaatattacttcttgatactgtggaggatcctaggaattttaccaccatcaaagacttacattaaccagctatccatgaactcacctgagatgagcgaatgtgacatcttgcacactctgcgatggtcttctcggctccggatcagctcctatgtcaactggataaaggatcaccttatcaaacagggaatgaaggctgagcatgctagctcgcttctagaactggcatccaccactaagtgtagctcagtgaaatatgatgttgaaatagtagaggaatacttcgctcgacagatctcatccttctgtagtatcgactgtaccaccatcttgcagctgcatgaaattcccagtctgcagtccatctacacccttgatgccgcgatctcaaaggtccaggtctctttggatgagcatttttctaagatggctgctgagactgatcctcataagtcgtctgagattaccaagaacctacttccagccacgctgcaactcattgacacctatgcatcgttcaccagagcctatttgctgcaaaactttaatgaagagggaacaactgagaaaccttccaaggagaaactgcaaggctttgctgctgttttggctattggctctagcaggtgcaaggcaaatactctgggtccgacactggttcagaatttgccatcgtcagtgcagactgtgtgtgagtcctggaacaacatcaataccaatgaatttcccaatattggatcctggcgcaatgcctttgccaatgacaccatcccttcagagagttatattagtgcagtgcaggctgcacacctggggactctctgtagccaaagtctgcccctggctgcttccctgaagcataccctcctctcactggtcaggttgactggagatcttattgtttggtcagatgagatgaacccaccacaggtaattcggacactgctacctcttcttttggaatcaagcactgagagtgttgccgagatcagtagcaactccctggaacgcatcttgggccctgctgagtctgatgagttcttggctcgtgtttatgagaagctgatcactggttgttacaacattctggccaatcatgcagatcctaacagtggactggatgaatccatcctggaggaatgtctccagtacttggaaaagcagctggaaagtagccaggctcgtaaagctatggaggagtttttctctgacagtggagaacttgtacagatcatgatggcaacagccaatgagaacctctctgctaaattctgtaaccgagttttgaaattcttcaccaaactcttccagctgactgagaagagccctaacccgagcctgttgcatctctgtggctccctggcacaactggcctgtgtggaacctgtgcgcctgcaggcctggctcacccgcatgactacatcgcccccaaaagattctgatcagctggatgtaattcaggagaaccggcagctgctgcagttactgaccacatacattgttcgggaaaacagccaagttggggaaggtgtgtgtgctgttcttctgggcaccctgactcccatggcaacagagatgctggccaacggtgatgggactggcttccctgaacttatggttgtgatggccactctggccagtgcaggtcaaggtgctggtcaccttcagcttcataatgctgctgtggattggctgagcagatgcaagaaatacctgtcacagaagaatgtagttgaaaaactgaatgccaatgtaatgcatggaaagcatgtgatgatcttggagtgcacatgccatatcatgtcttacttggctgatgtcacgaatgccctgagccagagtaatggtcaaggcccaagtcatctctcagtggatggggaagagcgggccattgaagtagactcagactgggtggaggagttggcggtggaagaggaagattcccaggctgaggattcagatgaagattctctttgcaataaactctgcacttttacgatcacacagaaagaattcatgaaccagcattggtaccactgtcacacctgtaaaatggtggatggcgtgggtgtctgcacagtgtgtgctaaggtgtgccacaaggatcatgagatttcctatgccaagtatggatccttcttctgtgactgtggagccaaggaagatggcagctgtttggctctggtgaagagaactcctagcagtggcatgagctctaccatgaaggagtcggcatttcagagtgaacccaggatttcagagagtctagtgcgtcatgccagcacctcctcgccagctgacaaagccaaggttaccatcagtgatggaaaggttgctgacgaagagaagcccaagaagagcagcctctgccgcacagtagagggctgccgggaggaattacagaaccaggccaatttctccttcgctcctctcgtgttagacatgcttaatttccttatggatgccattcagaccaacttccagcaagcttcagccgtcgggagcagcagccgtgctcagcaagccctcagtgagctacacactgtggagaaggcagtggagatgacagaccagctgatggttcccaccttagggtcccaggaaggtgcctttgagaatgtgcggatgaattacagtggagaccagggccagaccatccggcagctgatcagtgctcatgtgctcaggcgggtggctatgtgtgtgctctcctctccccatgggcgccgccaacatttggctgtcagccatgagaagggcaagatcaccgttctgcagctctctgcactcctgaagcaagcagattccagcaaaaggaagttaactctgacccgcttggcttctgccccagttccttttactgtgttgagcctcacaggaaatccctgcaaggaagactacttggcggtttgtgggctaaaggactgtcatgtgctcacctttagtagctcaggctctgtttcggatcacttggttttgcaccctcagttggcaacggggaacttcatcatcaaagccgtgtggttacctggttcacagaccgagttagcaattgtcaccgcagactttgttaagatttatgacctgtgtgttgatgccttgagtccaaccttctattttctcctgccaagctcaaagataagagatgttaccttccttttcaatgaggagggaaagaacatcattgttataatgtcttcggctgggtacatctatactcagcttatggaagaggccagcagtgcccagcagggacccttctatgtcactaatgtgttggaaatcaatcatgaggacctgaagcaggacagtaacagccaggtggcgggcggtggtgtgtccgtgtactactcccacgtgttgcagatgttgttcttcagctattgtcaaggcaaatcattcgcagccaccatcagcaggacaaccctggaggtgttgcaactcttccccatcaacatcaaaagttttgttgtctgcagttccaatggtggcagtaagacttctcctgctctttgccagtggtctgaggtgatgaaccaccctggcttggtgtgctgtgtccagcaaactacaggggtgccgctggtagttatggtgaaaccagacacttttcttatccaggagattaagactcttcctgctaaagcgaagatccaagacatggttgctattaggcacacggcctgcaatgagcagcagcggacaacaatgattctgctgtgtgaggatggcagcctgcgcatttacatggccaacgtggagaacacctcctactggctgcagccatccctgcagcccagcagtgtcatcagcatcatgaagcctgttcgaaagcgcaaaacagctacaatcacaacccgcacgtctagccaggtgactttccccattgacttttttgaacacaaccagcagctgacagatgtggagtttggtggtaacgacctcctacaggtctataatgcacaacagataaaacaccggctgaattccactggcatgtatgtggccaacaccaagcccggaggcttcaccattgagattagtaacaacaatagcactatggtgatgacaggcatgcggatccagattgggactcaagcaatagaacgggccccgtcatatatcgagatcttcggcagaactatgcagctcaacctgagtcgctcacgctggtttgacttccccttcaccagagaagaagccctgcaggctgataagaagctgaacctcttcattggggcctcggtggatccagcaggtgtcaccatgatagatgctgtaaaaatttatggcaagactaaggagcagtttggctggcctgatgagcccccagaagaattcccttctgcctctgtcagcaacatctgcccttcaaatctgaaccagagcaacggcactggagatagcgactcagctgcccccactacgaccagtggaactgtcctggagaggctggttgtgagttctttagaagccctggaaagctgctttgccgttggcccaatcatcgagaaggagagaaacaagaatgctgctcaggagctggccactttgctgttgtccctgccagcacctgccagtgtccagcagcagtccaagagccttctggccagcctgcacaccagccgctcggcctaccacagccacaaggatcaggccttgctgagcaaagctgtgcagtgtctcaacacatctagcaaagagggcaaggatttggaccctgaggtgttccagaggctagtgatcacagctcgctccattgccatcatgcgccccaacaaccttgtccactttacggagtcaaagctgccccagatggaaacagaaggaatggatgaagggaaggaaccgcagaagcagttggaaggagattgctgtagtttcatcacccagcttgtgaaccacttctggaaactccatgcatccaaacccaagaatgccttcttggcacctgcctgccttccaggactaactcatattgaagctactgtcaatgctctggtggacatcatccatggctactgtacctgtgagctggattgtattaacacagcatccaagatctacatgcagatgctcttgtgtcctgatcctgctgtgagcttctcttgtaaacaagctctaattcgagtcctaaggcccaggaacaaacggagacatgtgactttaccctcttcccctcgaagcaacactccaatgggagacaaggatgatgatgacgatgatgatgcagatgagaaaatgcagtcatcagggatcccgaatggtggtcacatccgtcaggaaagccaggaacagagtgaggtggaccatggagattttgagatggtgtctgagtcgatggtcctggagacagctgaaaatgtcaacaatggcaacccctctcccctggaggccctgctggcaggcgcagagggcttcccccccatgctggacatcccacctgatgcagatgacgagaccatggttgaactagccattgccctgagcctgcagcaggaccaacaaggcagcagcagcagtgccctgggcctgcagagcctgggactgtccggccaggcacccagctcttcctctctggacgcaggaaccctctctgacaccacagcatcagctctcgttactctctcagctccagcctcagacgacgagggcagtacagcagcgacagatggttctacccttcggacctctcctgctgaccacggtggtagtgtgggctcggagagcgggggcagtgcagtggactcagtggctggcgagcacagtgtatctggccggagcagtgcttatggcgatgctacagctgaggggcatccggctggaccaggaagtgtcagctcaagcactggagccatcagcaccaccactgggcaccaggagggagatggctccgagggagaaggagaaggagaaactgaaggagatgtccacactagcaacaggctgcacatggtccgtctaatgctgttggagagattactgcagaccctgcctcaattacgaaacgttggcggtgtccgggccatcccatacatgcaggtcattctaatgctcactacagatctggatggagaagatgagaaagacaagggggccctagacaacctgctctcccagcttattgctgagttgggtatggataaaaaggatgtctccaagaagaatgagcgcagcgccctgaatgaagtccatctggtagtaatgagactcctgagtgtcttcatgtcccgcaccaaatctggatccaagtcttccatatgtgagtcatcttccctcatctccagtgccacagcagcagctctactgagctctggggctgtggactactgcctgcacgtgctcaaatcactgctggaatattggaagagccaacagaatgacgaggagcctgtggctaccagccagttgctgaaaccacatactacctcctccccacctgacatgagcccattctttctccgccagtatgtgaagggtcatgctgctgatgtgtttgaggcctatactcagcttctaacagaaatggtactgaggcttccttaccaaatcaaaaagattactgacaccaattctcgaatcccacctcctgtctttgaccactcgtggttttactttctctccgagtacctcatgatccagcagactccatttgtgcgccgtcaagtccgcaaacttctgctcttcatctgtggatccaaagagaagtaccgccagctccgggatttgcacaccctggactctcacgtgcgtgggatcaagaagctgctagaagagcaggggatattcctccgggcaagtgtggttacagccagctcaggctccgccttgcaatatgacacactcatcagcctgatggagcacctgaaagcctgtgcagagattgccgcccagcgaaccatcaactggcagaaattctgcatcaaagatgactccgtcctgtacttcctcctccaagtcagtttccttgtggatgagggcgtgtccccagtgctgctgcaactgctctcctgtgctctgtgcggcagcaaggtgctcgctgcactggcagcctcttcgggatcctccagtgcttcttcctcctcagcccctgtggctgccagttctggacaagccacaacacagtccaagtcttccactaaaaagagcaagaaagaagaaaaagaaaaggagaaagatggtgagacctctggcagccaggaggaccagctgtgcacagctctggtgaaccagctgaacaaatttgccgataaggaaaccctgatccagttcctgcgttgtttcctgttagagtccaattcttcctcggtgcgctggcaggcccactgtctgacactgcacatctacagaaattccagcaaatctcaacaggagctcctgctagatctgatgtggtccatctggccagaactcccagcctatggtcgtaaggctgcccagtttgtggacctactaggatatttctccctgaaaactccacaaacagagaagaagttgaaggagtattcacagaaggctgtggagattctgcggactcaaaaccatattcttaccaaccaccccaactcgaacatttataacactttgtctggcttagtggagtttgatggctattacctggagagcgatccctgcctggtgtgtaataacccggaagtaccgttctgttatatcaagctgtcttccattaaagtggacacgcggtacaccaccacccagcaggttgtgaagctcattggcagtcacaccatcagcaaagtgacagtgaaaatcggggatctgaaacggaccaagatggtgcggaccatcaacctgtattataacaaccgaaccgtgcaggccatcgtggagttgaaaaacaagccagctcgctggcacaaagccaagaaggttcagctgacccctggacagacagaggtgaagattgacctgccgttgcccattgtggcctccaatctgatgattgagtttgcagacttctatgaaaactaccaggcctccacagagaccctgcagtgccctcgctgtagtgcctcggtccctgccaacccaggagtctgtggcaactgtggagagaatgtgtaccagtgtcacaaatgcagatccatcaactacgatgaaaaggatcccttcctctgcaatgcctgtggcttctgtaaatatgcccgcttcgacttcatgctctatgccaagccttgctgtgcagtggatcccattgagaatgaagaagaccggaagaaggctgtatccaacatcaatacacttttggacaaagctgatcgagtgtatcatcagctgatgggacaccggccacagctggagaacctgctctgcaaagtgaatgaggcagctccagaaaagccacaggatgactcaggaacagcagggggcatcagctccacttctgccagtgtgaatcgttacatcctgcagttggctcaggagtattgtggagactgcaagaactcttttgatgaactctccaaaatcatccagaaagtctttgcttcgcgcaaagagttgttggaatatgacctacagcagagggaagcagccactaaatcatcccggacctccgtgcagcccacattcactgccagccagtaccgtgccttatccgtcctgggctgtggccacacatcctccaccaagtgctatggctgcgcctcggctgtcacagaacattgtatcacactacttcgggccctggccaccaacccagccttgaggcacatccttgtctcccagggccttatccgggagctctttgattataatcttcgccgaggggctgcggccatgcgggaggaggtccgccagctcatgtgcctcctaactcgagacaacccagaagccacccaacagatgaatgacctgattattggcaaggtctccacagccctgaagggccactgggccaaccccgatctggcaagtagcctgcagtatgaaatgctgctgctgacggattctatctccaaggaggacagctgctgggagctccggttacgctgtgctctcagccttttcctcatggctgtgaacattaagactcctgtggtggttgaaaacattaccctcatgtgcctgaggatcttgcagaagctgataaaaccacctgctcccactagcaagaagaacaaggatgtccccgttgaggccctcaccacggtgaagccatactgcaatgagatccatgcccaggctcaactgtggctcaagagagaccccaaggcatcctatgatgcctggaagaagtgtcttcctatcagagggatagatggcaatgggaaagcccccagcaaatcagagctccgccatctctatttgactgagaagtatgtgtggaggtggaaacagttcctgagtcgtcgggggaagaggacctcccccttggatctcaaactggggcataacaactggctgcgacaagtgcttttcactccagcaacgcaggccgcacggcaggcagcctgtaccattgtggaagctctagccaccattcccagccgcaagcagcaggtcctggacctgcttaccagttacctggatgagctgagcatagctggggagtgtgcagctgagtacctggctctctaccagaagctcatcacttctgcgcactggaaagtctacttggcagctcggggagtcctaccctatgtgggcaacctcatcaccaaggaaatagctcgtctgctggccctggaggaggctaccctgagtaccgatctgcagcagggttatgcccttaaaagtctcacaggccttctctcctcctttgttgaggtggaatccatcaaaagacattttaaaagtcgcttggtgggtactgtgctgaatggatacctgtgcttgcggaagctggtggtgcagaggaccaagctgatcgatgagacgcaggacatgctgctggagatgctggaggacatgaccacaggtacagaatcagaaaccaaggccttcatggctgtgtgcattgagacagccaagcgctacaatctggatgactaccggaccccggtgttcatcttcgagaggctctgcagcatcatttatcctgaggagaatgaagtcactgagttctttgtgaccctggagaaggatccccaacaagaagacttcttacagggcaggatgcctgggaacccgtatagcagcaatgagccaggcatcgggccgctgatgagggatataaagaacaagatttgccaggactgtgacttagtggccctcctggaagatgacagtggcatggagcttctagtgaacaataaaatcattagtttggaccttcctgtggctgaagtttacaagaaagtctggtgtaccacgaatgagggagagcccatgaggattgtttatcgtatgcgggggctgctgggcgatgccacagaggagttcattgagtccctggactctactacagatgaagaagaagatgaagaagaagtgtataaaatggctggtgtgatggcccagtgtgggggcctggaatgcatgcttaacagactcgcagggatcagagatttcaagcagggacgccaccttctaacagtgctactgaaattgttcagttactgcgtgaaggtgaaagtcaaccggcagcaactggtcaaactggaaatgaacaccttgaacgtcatgctggggaccctaaacctggcccttgtagctgaacaagaaagcaaggacagtgggggtgcagctgtggctgagcaggtgcttagcatcatggagatcattctagatgagtccaatgctgagcccctgagtgaggacaagggcaacctcctcctgacaggtgacaaggatcaactggtgatgctcttggaccagatcaacagcacctttgttcgctccaaccccagtgtgctccagggcctgcttcgcatcatcccgtacctttcctttggagaggtggagaaaatgcagatcttggtggagcgattcaaaccatactgcaactttgataaatatgatgaagatcacagtggtgatgataaagtcttcctggactgcttctgtaaaatagctgctggcatcaagaacaacagcaatgggcaccagctgaaggatctgattctccagaaggggatcacccagaatgcacttgactacatgaaaaagcacatccctagcgccaagaatttggatgccgacatctggaaaaagtttttgtctcgcccagccttgccatttatcctaaggctgcttcggggcctggccatccagcaccctggcacccaggttctgattggaactgattccatcccgaacctgcataagctggagcaggtgtccagtgatgagggcattgggaccttggcagagaacctgctggaagccctgcgggaacaccctgacgtaaacaagaagattgacgcagcccgcagggagacccgggcagagaagaagcgcatggccatggcaatgaggcagaaggccctgggcaccctgggcatgacgacaaatgaaaagggccaggtcgtgaccaagacagcactcctgaagcagatggaagagctgatcgaggagcctggcctcacgtgctgcatctgcagggagggatacaagttccagcccacaaaggtcctgggcatttataccttcacgaagcgggtagccttggaggagatggagaataagccccggaaacagcagggctacagcaccgtgtcccacttcaacattgtgcactacgactgccatctggctgccgtcaggttggctcgaggccgggaagagtgggagagtgccgccctgcagaatgccaacaccaagtgcaacgggctccttccggtctggggacctcatgtccctgaatcagcttttgccacttgcttggcaagacacaacacttacctccaggaatgtacaggccagcgggagcccacgtatcagctcaacatccatgacatcaaactgctcttcctgcgcttcgccatggagcagtcgttcagcgcagacactggcgggggcggccgggagagcaacatccacctgatcccgtacatcattcacactgtgctttacgtcctgaacacaacccgagcaacttcccgagaagagaagaacctccaaggctttctggaacagcccaaggagaagtgggtggagagtgcctttgaagtggacgggccctactatttcacagtcttggcccttcacatcctgccccctgagcagtggagagccacacgtgtggaaatcttgcggaggctgttggtgacctcgcaggctcgggcagtggctccaggtggagccaccaggctgacagataaggcagtgaaggactattccgcttaccgttcttcccttctcttttgggccctcgtcgatctcatttacaacatgtttaagaaggtgcctaccagtaacacagagggaggctggtcctgctctctcgctgagtacatccgccacaacgacatgcccatctacgaagctgccgacaaagccctgaaaaccttccaggaggagttcatgccagtggagaccttctcagagttcctcgatgtggccggtcttttatcagaaatcaccgatccagagagcttcctgaaggacctgttgaactcagtcccctgaccaccacacagcagctgcggcggcgaagacgaagctggcttgccttccaccctctgttctccctccttgtgcattaagttccctccgcgggatgctgcattgttaccccgccctcccctctctcatttttcttggtgtggcttggggtttttaggcttcctgttttatctcgtgtgtgtggtgcaccagctatgaggttgtctgtaacccaagccatcaaagggcctgtacatacctaggagccatgagttgtcccggccagcttcatacttgagtgtgcacatcttgagaaataaacaagtgacttaacacacattgaaaagg

SEQ ID NO: 440 - DNA, 15995 bp, Homo sapiens
agattgcgtcacttccgccccctcctgggaggcggcgctgggccggtggcaagcccccggagggagccgcagtagtacgacggaagatggcgacgagcggcggcgaagaggcggcggcagcggctccggcgccggggaccccggcaacgggggcggacacgaccccgggctgggaggtggctgtgcggcccctgctgtccgcgtcctactccgccttcgagatgaaggagttgccgcagctggtggcctcagtcatcgagagtgaatcagaaatcctgcaccatgagaagcagtacgagccattctactcatcttttgttgcactttccacacactatattacaacagtttgcagtctcattccccggaaccaacttcagtcagtggcagcagcctgtaaagttctaattgagttttctctcctgcgtctggagaatccagatgaggcttgtgctgtgtcccagaaacacttgattctcctaatcaagggcctgtgcactggctgtagccgactagatagaactgaaattatcacatttacagcaatgatgaaatccgccaagctgccccaaacagtgaagacactttcagacgtggaagatcagaaagagctggcctcaccagtaagccctgagttgaggcaaaaggaggtacagatgaattttttgaaccagctgacctcagtttttaaccctagaactgtagcatcacaacctatcagtacacagactctggtggaaggagaaaatgatgagcagtcatctacagatcaagcctcagctatcaaaaccaagaatgtgttcatagctcagaacgtggctagtcttcaagagcttggtggctcggagaagctactgcgtgtatgtttgaacctgccatatttcctacgctatatcaatcggttccaagatgcagttttagctaattccttcttcataatgcctgcaacagtagcagatgccactgctgttcgtaatggctttcattcattggtgattgatgtaactatggcattggataccctttctctacctgtgttggaacctctcaatccttctcgtctacaagatgtgacagtcctcagcctaagttgtctgtatgcaggtgtgagtgtggcaacgtgcatggccatcctccatgtgggtagtgcccagcaagtgcggacagggtccacgagctccaaagaagatgactatgaaagtgacgcagctacaattgtccagaaatgtctcgaaatctatgacatgattggacaagcaatcagcagttctcgccgggctggtggtgagcactatcagaatttccaattgctgggtgcttggtgcttgttaaacagccttttcctcatactgaacctcagtcctactgcgttggctgataaggggaaagagaaggacccactggctgccctccgagtcagagacatcctttctcgtactaaagagggagtgggctcccctaaactggggcctggaaaagggcatcagggatttggggtactctcagtaatattggcaaaccatgccatcaaactgctaacgtctctctttcaagacctacaagtggaggcccttcacaagggttgggagacagatggcccccctgcagccttgagcattatggcccagagcacctccatacagaggattcaacggctgattgactctgtcccactgatgaacctgctcttgacgttactttcaacttcctacagaaaggcatgtgtcctgcagcggcagaggaagggctccatgagcagcgatgccagcgcctccaccgactccaatacttactatgaggacgatttcagtagcacggaggaggacagcagccaagacgatgacagtgagcctattttggggcaatggtttgaggagactatttctcccagtaaagagaaagcagcacctccgcctcctcccccacctcctccactggaaagctctcctcgggttaaaagccccagtaagcaggcccctggtgagaagggcaacattctggcgagtcgcaaagatcctgagttgttcttaggtctggcttccaacattttgaacttcatcacctcttccatgctgaactctcggaacaattttatccgaaactatctgagtgtatctctttcagaacaccatatggccaccctagccagtatcatcaaggaggtggacaaagatggactcaagggttcatcagatgaagagtttgctgcagctctctatcacttcaaccactcactggtaacctctgaccttcagtcacctaacctgcagaacacactgttgcagcagctaggagtggctcctttttctgagggcccttggcccttgtacattcaccctcaaagcctctctgtgctttcacgcctcctgctcatctggcaacataaagccagtgctcaaggtgaccctgacgtcccagaatgccttaaagtttgggacaggtttttgtctacaatgaagcagaatgccctgcaaggtgtggtgcccagtgagacagaggatctgaatgtagaacacctgcagatgctcctcctcattttccacaatttcaccgagacaggccggcgggccatattgtcgctttttgtccagatcatccaggagttgagcgtcaacatggatgctcagatgcgcttcgtgccgcttatcttggctcgcctccttctcatctttgattatctgcttcatcagtactccaaagcccctgtgtatctatttgagcaggtacagcataacctgctaagtcctccctttgggtgggcaagtggatcccaggacagcaacagccgccgggcaaccactcctctctatcatggattcaaagaagtagaagaaaactggtctaagcatttctcatcagatgctgtcccacaccccagattctactgtgtcctgtccccagaagcctcagaggatgatttgaaccgacttgattctgtggcatgtgacgtccttttctccaagcttgtcaagtatgatgagctttatgctgcactgacagccctgcttgcagctgggtcccagcttgatacagttaggagaaaggaaaacaagaatgtaacagccttggaggcctgtgcccttcaatattacttcttgatactgtggaggatcctaggaattttaccaccatcaaagacttacattaaccagctatccatgaactcacctgagatgagcgaatgtgacatcttgcacactctgcgatggtcttctcggctccggatcagctcctatgtcaactggataaaggatcaccttatcaaacagggaatgaaggctgagcatgctagctcgcttctagaactggcatccaccactaagtgtagctcagtgaaatatgatgttgaaatagtagaggaatacttcgctcgacagatctcatccttctgtagtatcgactgtaccaccatcttgcagctgcatgaaattcccagtctgcagtccatctacacccttgatgccgcgatctcaaaggtccaggtctctttggatgagcatttttctaagatggctgctgagactgatcctcataagtcgtctgagattaccaagaacctacttccagccacgctgcaactcattgacacctatgcatcgttcaccagagcctatttgctgcaaaactttaatgaagagggaacaactgagaaaccttccaaggagaaactgcaaggctttgctgctgttttggctattggctctagcaggtgcaaggcaaatactctgggtccgacactggttcagaatttgccatcgtcagtgcagactgtgtgtgagtcctggaacaacatcaataccaatgaatttcccaatattggatcctggcgcaatgcctttgccaatgacaccatcccttcagagagttatattagtgcagtgcaggctgcacacctggggactctctgtagccaaagtctgcccctggctgcttccctgaagcataccctcctctcactggtcaggttgactggagatcttattgtttggtcagatgagatgaacccaccacaggtaattcggacactgctacctcttcttttggaatcaagcactgagagtgttgccgagatcagtagcaactccctggaacgcatcttgggccctgctgagtctgatgagttcttggctcgtgtttatgagaagctgatcactggttgttacaacattctggccaatcatgcagatcctaacagtggactggatgaatccatcctggaggaatgtctccagtacttggaaaagcagctggaaagtagccaggctcgtaaagctatggaggagtttttctctgacagtggagaacttgtacagatcatgatggcaacagccaatgagaacctctctgctaaattctgtaaccgagttttgaaattcttcaccaaactcttccagctgactgagaagagccctaacccgagcctgttgcatctctgtggctccctggcacaactggcctgtgtggaacctgtgcgcctgcaggcctggctcacccgcatgactacatcgcccccaaaagattctgatcagctggatgtaattcaggagaaccggcagctgctgcagttactgaccacatacattgttcgggaaaacagccaagttggggaaggtgtgtgtgctgttcttctgggcaccctgactcccatggcaacagagatgctggccaacggtgatgggactggcttccctgaacttatggttgtgatggccactctggccagtgcaggtcaaggtgctggtcaccttcagcttcataatgctgctgtggattggctgagcagatgcaagaaatacctgtcacagaagaatgtagttgaaaaactgaatgccaatgtaatgcatggaaagcatgtgatgatcttggagtgcacatgccatatcatgtcttacttggctgatgtcacgaatgccctgagccagagtaatggtcaaggcccaagtcatctctcagtggatggggaagagcgggccattgaagtagactcagactgggtggaggagttggcggtggaagaggaagattcccaggctgaggattcagatgaagattctctttgcaataaactctgcacttttacgatcacacagaaagaattcatgaaccagcattggtaccactgtcacacctgtaaaatggtggatggcgtgggtgtctgcacagtgtgtgctaaggtgtgccacaaggatcatgagatttcctatgccaagtatggatccttcttctgtgactgtggagccaaggaagatggcagctgtttggctctggtgaagagaactcctagcagtggcatgagctctaccatgaaggagtcggcatttcagagtgaacccaggatttcagagagtctagtgcgtcatgccagcacctcctcgccagctgacaaagccaaggttaccatcagtgatggaaaggttgctgacgaagagaagcccaagaagagcagcctctgccgcacagtagagggctgccgggaggaattacagaaccaggccaatttctccttcgctcctctcgtgttagacatgcttaatttccttatggatgccattcagaccaacttccagcaagcttcagccgtcgggagcagcagccgtgctcagcaagccctcagtgagctacacactgtggagaaggcagtggagatgacagaccagctgatggttcccaccttagggtcccaggaaggtgcctttgagaatgtgcggatgaattacagtggagaccagggccagaccatccggcagctgatcagtgctcatgtgctcaggcgggtggctatgtgtgtgctctcctctccccatgggcgccgccaacatttggctgtcagccatgagaagggcaagatcaccgttctgcagctctctgcactcctgaagcaagcagattccagcaaaaggaagttaactctgacccgcttggcttctgccccagttccttttactgtgttgagcctcacaggaaatccctgcaaggaagactacttggcggtttgtgggctaaaggactgtcatgtgctcacctttagtagctcaggctctgtttcggatcacttggttttgcaccctcagttggcaacggggaacttcatcatcaaagccgtgtggttacctggttcacagaccgagttagcaattgtcaccgcagactttgttaagatttatgacctgtgtgttgatgccttgagtccaaccttctattttctcctgccaagctcaaagataagagatgttaccttccttttcaatgaggagggaaagaacatcattgttataatgtcttcggctgggtacatctatactcagcttatggaagaggccagcagtgcccagcagggacccttctatgtcactaatgtgttggaaatcaatcatgaggacctgaaggacagtaacagccaggtggcgggcggtggtgtgtccgtgtactactcccacgtgttgcagatgttgttcttcagctattgtcaaggcaaatcattcgcagccaccatcagcaggacaaccctggaggtgttgcaactcttccccatcaacatcaaaagttccaatggtggcagtaagacttctcctgctctttgccagtggtctgaggtgatgaaccaccctggcttggtgtgctgtgtccagcaaactacaggggtgccgctggtagttatggtgaaaccagacacttttcttatccaggagattaagactcttcctgctaaagcgaagatccaagacatggttgctattaggcacacggcctgcaatgagcagcagcggacaacaatgattctgctgtgtgaggatggcagcctgcgcatttacatggccaacgtggagaacacctcctactggctgcagccatccctgcagcccagcagtgtcatcagcatcatgaagcctgttcgaaagcgcaaaacagctacaatcacaacccgcacgtctagccaggtgactttccccattgacttttttgaacacaaccagcagctgacagatgtggagtttggtggtaacgacctcctacaggtctataatgcacaacagataaaacaccggctgaattccactggcatgtatgtggccaacaccaagcccggaggcttcaccattgagattagtaacaacaatagcactatggtgatgacaggcatgcggatccagattgggactcaagcaatagaacgggccccgtcatatatcgagatcttcggcagaactatgcagctcaacctgagtcgctcacgctggtttgacttccccttcaccagagaagaagccctgcaggctgataagaagctgaacctcttcattggggcctcggtggatccagcaggtgtcaccatgatagatgctgtaaaaatttatggcaagactaaggagcagtttggctggcctgatgagcccccagaagaattcccttctgcctctgtcagcaacatctgcccttcaaatctgaaccagagcaacggcactggagatagcgactcagctgcccccactacgaccagtggaactgtcctggagagttctgaaactgagtccctaaccaagctggaccggctggttgtgagttctttagaagccctggaaagctgctttgccgttggcccaatcatcgagaaggagagaaacaagaatgctgctcaggagctggccactttgctgttgtccctgccagcacctgccagtgtccagcagcagtccaagagccttctggccagcctgcacaccagccgctcggcctaccacagccacaaggatcaggccttgctgagcaaagctgtgcagtgtctcaacacatctagcaaagagggcaaggatttggaccctgaggtgttccagaggctagtgatcacagctcgctccattgccatcatgcgccccaacaaccttgtccactttacggagtcaaagctgccccagatggaaacagaaggaatggatgaagggaaggaaccgcagaagcagttggaaggagattgctgtagtttcatcacccagcttgtgaaccacttctggaaactccatgcatccaaacccaagaatgccttcttggcacctgcctgccttccaggactaactcatattgaagctactgtcaatgctctggtggacatcatccatggctactgtacctgtgagctggattgtattaacacagcatccaagatctacatgcagatgctcttgtgtcctgatcctgctgtgagcttctcttgtaaacaagctctaattcgagtcctaaggcccaggaacaaacggagacatgtgactttaccctcttcccctcgaagcaacactccaatgggagacaaggatgatgatgacgatgatgatgcagatgagaaaatgcagtcatcagggatcccgaatggtggtcacatccgtcaggaaagccaggaacagagtgaggtggaccatggagattttgagatggtgtctgagtcgatggtcctggagacagctgaaaatgtcaacaatggcaacccctctcccctggaggccctgctggcaggcgcagagggcttcccccccatgctggacatcccacctgatgcagatgacgagaccatggttgaactagccattgccctgagcctgcagcaggaccaacaaggcagcagcagcagtgccctgggcctgcagagcctgggactgtccggccaggcacccagctcttcctctctggacgcaggaaccctctctgacaccacagcatcagctccagcctcagacgacgagggcagtacagcagcgacagatggttctacccttcggacctctcctgctgaccacggtggtagtgtgggctcggagagcgggggcagtgcagtggactcagtggctggcgagcacagtgtatctggccggagcagtgcttatggcgatgctacagctgaggggcatccggctggaccaggaagtgtcagctcaagcactggagccatcagcaccaccactgggcaccaggagggagatggctccgagggagaaggagaaggagaaactgaaggagatgtccacactagcaacaggctgcacatggtccgtctaatgctgttggagagattactgcagaccctgcctcaattacgaaacgttggcggtgtccgggccatcccatacatgcaggtcattctaatgctcactacagatctggatggagaagatgagaaagacaagggggccctagacaacctgctctcccagcttattgctgagttgggtatggataaaaaggatgtctccaagaagaatgagcgcagcgccctgaatgaagtccatctggtagtaatgagactcctgagtgtcttcatgtcccgcaccaaatctggatccaagtcttccatatgtgagtcatcttccctcatctccagtgccacagcagcagctctactgagctctggggctgtggactactgcctgcacgtgctcaaatcactgctggaatattggaagagccaacagaatgacgaggagcctgtggctaccagccagttgctgaaaccacatactacctcctccccacctgacatgagcccattctttctccgccagtatgtgaagggtcatgctgctgatgtgtttgaggcctatactcagcttctaacagaaatggtactgaggcttccttaccaaatcaaaaagattactgacaccaattctcgaatcccacctcctgtctttgaccactcgtggttttactttctctccgagtacctcatgatccagcagactccatttgtgcgccgtcaagtccgcaaacttctgctcttcatctgtggatccaaagagaagtaccgccagctccgggatttgcacaccctggactctcacgtgcgtgggatcaagaagctgctagaagagcaggggatattcctccgggcaagtgtggttacagccagctcaggctccgccttgcaatatgacacactcatcagcctgatggagcacctgaaagcctgtgcagagattgccgcccagcgaaccatcaactggcagaaattctgcatcaaagatgactccgtcctgtacttcctcctccaagtcagtttccttgtggatgagggcgtgtccccagtgctgctgcaactgctctcctgtgctctgtgcggcagcaaggtgctcgctgcactggcagcctcttcgggatcctccagtgcttcttcctcctcagcccctgtggctgccagttctggacaagccacaacacagtccaagtcttccactaaaaagagcaagaaagaagaaaaagaaaaggagaaagatggtgagacctctggcagccaggaggaccagctgtgcacagctctggtgaaccagctgaacaaatttgccgataaggaaaccctgatccagttcctgcgttgtttcctgttagagtccaattcttcctcggtgcgctggcaggcccactgtctgacactgcacatctacagaaattccagcaaatctcaacaggagctcctgctagatctgatgtggtccatctggccagaactcccagcctatggtcgtaaggctgcccagtttgtggacctactaggatatttctccctgaaaactccacaaacagagaagaagttgaaggagtattcacagaaggctgtggagattctgcggactcaaaaccatattcttaccaaccaccccaactcgaacatttataacactttgtctggcttagtggagtttgatggctattacctggagagcgatccctgcctggtgtgtaataacccggaagtaccgttctgttatatcaagctgtcttccattaaagtggacacgcggtacaccaccacccagcaggttgtgaagctcattggcagtcacaccatcagcaaagtgacagtgaaaatcggggatctgaaacggaccaagatggtgcggaccatcaacctgtattataacaaccgaaccgtgcaggccatcgtggagttgaaaaacaagccagctcgctggcacaaagccaagaaggttcagctgacccctggacagacagaggtgaagattgacctgccgttgcccattgtggcctccaatctgatgattgagtttgcagacttctatgaaaactaccaggcctccacagagaccctgcagtgccctcgctgtagtgcctcggtccctgccaacccaggagtctgtggcaactgtggagagaatgtgtaccagtgtcacaaatgcagatccatcaactacgatgaaaaggatcccttcctctgcaatgcctgtggcttctgtaaatatgcccgcttcgacttcatgctctatgccaagccttgctgtgcagtggatcccattgagaatgaagaagaccggaagaaggctgtatccaacatcaatacacttttggacaaagctgatcgagtgtatcatcagctgatgggacaccggccacagctggagaacctgctctgcaaagtgaatgaggcagctccagaaaagccacaggatgactcaggaacagcagggggcatcagctccacttctgccagtgtgaatcgttacatcctgcagttggctcaggagtattgtggagactgcaagaactcttttgatgaactctccaaaatcatccagaaagtctttgcttcgcgcaaagagttgttggaatatgacctacagcagagggaagcagccactaaatcatcccggacctccgtgcagcccacattcactgccagccagtaccgtgccttatccgtcctgggctgtggccacacatcctccaccaagtgctatggctgcgcctcggctgtcacagaacattgtatcacactacttcgggccctggccaccaacccagccttgaggcacatccttgtctcccagggccttatccgggagctctttgattataatcttcgccgaggggctgcggccatgcgggaggaggtccgccagctcatgtgcctcctaactcgagacaacccagaagccacccaacagatgaatgacctgattattggcaaggtctccacagccctgaagggccactgggccaaccccgatctggcaagtagcctgcagtatgaaatgctgctgctgacggattctatctccaaggaggacagctgctgggagctccggttacgctgtgctctcagccttttcctcatggctgtgaacattaagactcctgtggtggttgaaaacattaccctcatgtgcctgaggatcttgcagaagctgataaaaccacctgctcccactagcaagaagaacaaggatgtccccgttgaggccctcaccacggtgaagccatactgcaatgagatccatgcccaggctcaactgtggctcaagagagaccccaaggcatcctatgatgcctggaagaagtgtcttcctatcagagggatagatggcaatgggaaagcccccagcaaatcagagctccgccatctctatttgactgagaagtatgtgtggaggtggaaacagttcctgagtcgtcgggggaagaggacctcccccttggatctcaaactggggcataacaactggctgcgacaagtgcttttcactccagcaacgcaggccgcacggcaggcagcctgtaccattgtggaagctctagccaccattcccagccgcaagcagcaggtcctggacctgcttaccagttacctggatgagctgagcatagctggggagtgtgcagctgagtacctggctctctaccagaagctcatcacttctgcgcactggaaagtctacttggcagctcggggagtcctaccctatgtgggcaacctcatcaccaaggaaatagctcgtctgctggccctggaggaggctaccctgagtaccgatctgcagcagggttatgcccttaaaagtctcacaggccttctctcctcctttgttgaggtggaatccatcaaaagacattttaaaagtcgcttggtgggtactgtgctgaatggatacctgtgcttgcggaagctggtggtgcagaggaccaagctgatcgatgagacgcaggacatgctgctggagatgctggaggacatgaccacaggtacagaatcagaaaccaaggccttcatggctgtgtgcattgagacagccaagcgctacaatctggatgactaccggaccccggtgttcatcttcgagaggctctgcagcatcatttatcctgaggagaatgaagtcactgagttctttgtgaccctggagaaggatccccaacaagaagacttcttacagggcaggatgcctgggaacccgtatagcagcaatgagccaggcatcgggccgctgatgagggatataaagaacaagatttgccaggactgtgacttagtggccctcctggaagatgacagtggcatggagcttctagtgaacaataaaatcattagtttggaccttcctgtggctgaagtttacaagaaagtctggtgtaccacgaatgagggagagcccatgaggattgtttatcgtatgcgggggctgctgggcgatgccacagaggagttcattgagtccctggactctactacagatgaagaagaagatgaagaagaagtgtataaaatggctggtgtgatggcccagtgtgggggcctggaatgcatgcttaacagactcgcagggatcagagatttcaagcagggacgccaccttctaacagtgctactgaaattgttcagttactgcgtgaaggtgaaagtcaaccggcagcaactggtcaaactggaaatgaacaccttgaacgtcatgctggggaccctaaacctggcccttgtagctgaacaagaaagcaaggacagtgggggtgcagctgtggctgagcaggtgcttagcatcatggagatcattctagatgagtccaatgctgagcccctgagtgaggacaagggcaacctcctcctgacaggtgacaaggatcaactggtgatgctcttggaccagatcaacagcacctttgttcgctccaaccccagtgtgctccagggcctgcttcgcatcatcccgtacctttcctttggagaggtggagaaaatgcagatcttggtggagcgattcaaaccatactgcaactttgataaatatgatgaagatcacagtggtgatgataaagtcttcctggactgcttctgtaaaatagctgctggcatcaagaacaacagcaatgggcaccagctgaaggatctgattctccagaaggggatcacccagaatgcacttgactacatgaaaaagcacatccctagcgccaagaatttggatgccgacatctggaaaaagtttttgtctcgcccagccttgccatttatcctaaggctgcttcggggcctggccatccagcaccctggcacccaggttctgattggaactgattccatcccgaacctgcataagctggagcaggtgtccagtgatgagggcattgggaccttggcagagaacctgctggaagccctgcgggaacaccctgacgtaaacaagaagattgacgcagcccgcagggagacccgggcagagaagaagcgcatggccatggcaatgaggcagaaggccctgggcaccctgggcatgacgacaaatgaaaagggccaggtcgtgaccaagacagcactcctgaagcagatggaagagctgatcgaggagcctggcctcacgtgctgcatctgcagggagggatacaagttccagcccacaaaggtcctgggcatttataccttcacgaagcgggtagccttggaggagatggagaataagccccggaaacagcagggctacagcaccgtgtcccacttcaacattgtgcactacgactgccatctggctgccgtcaggttggctcgaggccgggaagagtgggagagtgccgccctgcagaatgccaacaccaagtgcaacgggctccttccggtctggggacctcatgtccctgaatcagcttttgccacttgcttggcaagacacaacacttacctccaggaatgtacaggccagcgggagcccacgtatcagctcaacatccatgacatcaaactgctcttcctgcgcttcgccatggagcagtcgttcagcgcagacactggcgggggcggccgggagagcaacatccacctgatcccgtacatcattcacactgtgctttacgtcctgaacacaacccgagcaacttcccgagaagagaagaacctccaaggctttctggaacagcccaaggagaagtgggtggagagtgcctttgaagtggacgggccctactatttcacagtcttggcccttcacatcctgccccctgagcagtggagagccacacgtgtggaaatcttgcggaggctgttggtgacctcgcaggctcgggcagtggctccaggtggagccaccaggctgacagataaggcagtgaaggactattccgcttaccgttcttcccttctcttttgggccctcgtcgatctcatttacaacatgtttaagaaggtgcctaccagtaacacagagggaggctggtcctgctctctcgctgagtacatccgccacaacgacatgcccatctacgaagctgccgacaaagccctgaaaaccttccaggaggagttcatgccagtggagaccttctcagagttcctcgatgtggccggtcttttatcagaaatcaccgatccagagagcttcctgaaggacctgttgaactcagtcccctgaccaccacacagcagctgcggcggcgaagacgaagctggcttgccttccaccctctgttctccctccttgtgcattaagttccctccgcgggatgctgcattgttaccccgccctcccctctctcatttttcttggtgtggcttggggtttttaggcttcctgttttatctcgtgtgtgtggtgcaccagctatgaggttgtctgtaacccaagccatcaaagggcctgtacatacctaggagccatgagttgtcccggccagcttcatacttgagtgtgcacatcttgagaaataaacaagtgacttaacacacattgaaaagg

SEQ ID NO: 441 - DNA, 15994 bp, Homo sapiens
agattgcgtcacttccgccccctcctgggaggcggcgctgggccggtggcaagcccccggagggagccgcagtagtacgacggaagatggcgacgagcggcggcgaagaggcggcggcagcggctccggcgccggggaccccggcaacgggggcggacacgaccccgggctgggaggtggctgtgcggcccctgctgtccgcgtcctactccgccttcgagatgaaggagttgccgcagctggtggcctcagtcatcgagagtgaatcagaaatcctgcaccatgagaagcagtacgagccattctactcatcttttgttgcactttccacacactatattacaacagtttgcagtctcattccccggaaccaacttcagtcagtggcagcagcctgtaaagttctaattgagttttctctcctgcgtctggagaatccagatgaggcttgtgctgtgtcccagaaacacttgattctcctaatcaagggcctgtgcactggctgtagccgactagatagaactgaaattatcacatttacagcaatgatgaaatccgccaagctgccccaaacagtgaagacactttcagacgtggaagatcagaaagagctggcctcaccagtaagccctgagttgaggcaaaaggaggtacagatgaattttttgaaccagctgacctcagtttttaaccctagaactgtagcatcacaacctatcagtacacagactctggtggaaggagaaaatgatgagcagtcatctacagatcaagcctcagctatcaaaaccaagaatgtgttcatagctcagaacgtggctagtcttcaagagcttggtggctcggagaagctactgcgtgtatgtttgaacctgccatatttcctacgctatatcaatcggttccaagatgcagttttagctaattccttcttcataatgcctgcaacagtagcagatgccactgctgttcgtaatggctttcattcattggtgattgatgtaactatggcattggataccctttctctacctgtgttggaacctctcaatccttctcgtctacaagatgtgacagtcctcagcctaagttgtctgtatgcaggtgtgagtgtggcaacgtgcatggccatcctccatgtgggtagtgcccagcaagtgcggacagggtccacgagctccaaagaagatgactatgaaagtgacgcagctacaattgtccagaaatgtctcgaaatctatgacatgattggacaagcaatcagcagttctcgccgggctggtggtgagcactatcagaatttccaattgctgggtgcttggtgcttgttaaacagccttttcctcatactgaacctcagtcctactgcgttggctgataaggggaaagagaaggacccactggctgccctccgagtcagagacatcctttctcgtactaaagagggagtgggctcccctaaactggggcctggaaaagggcatcagggatttggggtactctcagtaatattggcaaaccatgccatcaaactgctaacgtctctctttcaagacctacaagtggaggcccttcacaagggttgggagacagatggcccccctgcagccttgagcattatggcccagagcacctccatacagaggattcaacggctgattgactctgtcccactgatgaacctgctcttgacgttactttcaacttcctacagaaaggcatgtgtcctgcagcggcagaggaagggctccatgagcagcgatgccagcgcctccaccgactccaatacttactatgaggacgatttcagtagcacggaggaggacagcagccaagacgatgacagtgagcctattttggggcaatggtttgaggagactatttctcccagtaaagagaaagcagcacctccgcctcctcccccacctcctccactggaaagctctcctcgggttaaaagccccagtaagcaggcccctggtgagaagggcaacattctggcgagtcgcaaagatcctgagttgttcttaggtctggcttccaacattttgaacttcatcacctcttccatgctgaactctcggaacaattttatccgaaactatctgagtgtatctctttcagaacaccatatggccaccctagccagtatcatcaaggaggtggacaaagatggactcaagggttcatcagatgaagagtttgctgcagctctctatcacttcaaccactcactggtaacctctgaccttcagtcacctaacctgcagaacacactgttgcagcagctaggagtggctcctttttctgagggcccttggcccttgtacattcaccctcaaagcctctctgtgctttcacgcctcctgctcatctggcaacataaagccagtgctcaaggtgaccctgacgtcccagaatgccttaaagtttgggacaggtttttgtctacaatgaagcagaatgccctgcaaggtgtggtgcccagtgagacagaggatctgaatgtagaacacctgcagatgctcctcctcattttccacaatttcaccgagacaggccggcgggccatattgtcgctttttgtccagatcatccaggagttgagcgtcaacatggatgctcagatgcgcttcgtgccgcttatcttggctcgcctccttctcatctttgattatctgcttcatcagtactccaaagcccctgtgtatctatttgagcaggtacagcataacctgctaagtcctccctttgggtgggcaagtggatcccaggacagcaacagccgccgggcaaccactcctctctatcatggattcaaagaagtagaagaaaactggtctaagcatttctcatcagatgctgtcccacaccccagattctactgtgtcctgtccccagaagcctcagaggatgatttgaaccgacttgattctgtggcatgtgacgtccttttctccaagcttgtcaagtatgatgagctttatgctgcactgacagccctgcttgcagctgggtcccagcttgatacagttaggagaaaggaaaacaagaatgtaacagccttggaggcctgtgcccttcaatattacttcttgatactgtggaggatcctaggaattttaccaccatcaaagacttacattaaccagctatccatgaactcacctgagatgagcgaatgtgacatcttgcacactctgcgatggtcttctcggctccggatcagctcctatgtcaactggataaaggatcaccttatcaaacagggaatgaaggctgagcatgctagctcgcttctagaactggcatccaccactaagtgtagctcagtgaaatatgatgttgaaatagtagaggaatacttcgctcgacagatctcatccttctgtagtatcgactgtaccaccatcttgcagctgcatgaaattcccagtctgcagtccatctacacccttgatgccgcgatctcaaaggtccaggtctctttggatgagcatttttctaagatggctgctgagactgatcctcataagtcgtctgagattaccaagaacctacttccagccacgctgcaactcattgacacctatgcatcgttcaccagagcctatttgctgcaaaactttaatgaagagggaacaactgagaaaccttccaaggagaaactgcaaggctttgctgctgttttggctattggctctagcaggtgcaaggcaaatactctgggtccgacactggttcagaatttgccatcgtcagtgcagactgtgtgtgagtcctggaacaacatcaataccaatgaatttcccaatattggatcctggcgcaatgcctttgccaatgacaccatcccttcagagagttatattagtgcagtgcaggctgcacacctggggactctctgtagccaaagtctgcccctggctgcttccctgaagcataccctcctctcactggtcaggttgactggagatcttattgtttggtcagatgagatgaacccaccacaggtaattcggacactgctacctcttcttttggaatcaagcactgagagtgttgccgagatcagtagcaactccctggaacgcatcttgggccctgctgagtctgatgagttcttggctcgtgtttatgagaagctgatcactggttgttacaacattctggccaatcatgcagatcctaacagtggactggatgaatccatcctggaggaatgtctccagtacttggaaaagcagctggaaagtagccaggctcgtaaagctatggaggagtttttctctgacagtggagaacttgtacagatcatgatggcaacagccaatgagaacctctctgctaaattctgtaaccgagttttgaaattcttcaccaaactcttccagctgactgagaagagccctaacccgagcctgttgcatctctgtggctccctggcacaactggcctgtgtggaacctgtgcgcctgcaggcctggctcacccgcatgactacatcgcccccaaaagattctgatcagctggatgtaattcaggagaaccggcagctgctgcagttactgaccacatacattgttcgggaaaacagccaagttggggaaggtgtgtgtgctgttcttctgggcaccctgactcccatggcaacagagatgctggccaacggtgatgggactggcttccctgaacttatggttgtgatggccactctggccagtgcaggtcaaggtgctggtcaccttcagcttcataatgctgctgtggattggctgagcagatgcaagaaatacctgtcacagaagaatgtagttgaaaaactgaatgccaatgtaatgcatggaaagcatgtgatgatcttggagtgcacatgccatatcatgtcttacttggctgatgtcacgaatgccctgagccagagtaatggtcaaggcccaagtcatctctcagtggatggggaagagcgggccattgaagtagactcagactgggtggaggagttggcggtggaagaggaagattcccaggctgaggattcagatgaagattctctttgcaataaactctgcacttttacgatcacacagaaagaattcatgaaccagcattggtaccactgtcacacctgtaaaatggtggatggcgtgggtgtctgcacagtgtgtgctaaggtgtgccacaaggatcatgagatttcctatgccaagtatggatccttcttctgtgactgtggagccaaggaagatggcagctgtttggctctggtgaagagaactcctagcagtggcatgagctctaccatgaaggagtcggcatttcagagtgaacccaggatttcagagagtctagtgcgtcatgccagcacctcctcgccagctgacaaagccaaggttaccatcagtgatggaaaggttgctgacgaagagaagcccaagaagagcagcctctgccgcacagtagagggctgccgggaggaattacagaaccaggccaatttctccttcgctcctctcgtgttagacatgcttaatttccttatggatgccattcagaccaacttccagcaagcttcagccgtcgggagcagcagccgtgctcagcaagccctcagtgagctacacactgtggagaaggcagtggagatgacagaccagctgatggttcccaccttagggtcccaggaaggtgcctttgagaatgtgcggatgaattacagtggagaccagggccagaccatccggcagctgatcagtgctcatgtgctcaggcgggtggctatgtgtgtgctctcctctccccatgggcgccgccaacatttggctgtcagccatgagaagggcaagatcaccgttctgcagctctctgcactcctgaagcaagcagattccagcaaaaggaagttaactctgacccgcttggcttctgccccagttccttttactgtgttgagcctcacaggaaatccctgcaaggaagactacttggcggtttgtgggctaaaggactgtcatgtgctcacctttagtagctcaggctctgtttcggatcacttggttttgcaccctcagttggcaacggggaacttcatcatcaaagccgtgtggttacctggttcacagaccgagttagcaattgtcaccgcagactttgttaagatttatgacctgtgtgttgatgccttgagtccaaccttctattttctcctgccaagctcaaagataagagatgttaccttccttttcaatgaggagggaaagaacatcattgttataatgtcttcggctgggtacatctatactcagcttatggaagaggccagcagtgcccagcagggacccttctatgtcactaatgtgttggaaatcaatcatgaggacctgaagcaggacagtaacagccaggtggcgggcggtggtgtgtccgtgtactactcccacgtgttgcagatgttgttcttcagctattgtcaaggcaaatcattcgcagccaccatcagcaggacaaccctggaggtgttgcaactcttccccatcaacatcaaaagttttgttgtctgcagttccaatggtggcagtaagacttctcctgctctttgccagtggtctgaggtgatgaaccaccctggcttggtgtgctgtgtccagcaaactacaggggtgccgctggtagttatggtgaaaccagacacttttcttatccaggagattaagactcttcctgctaaagcgaagatccaagacatggttgctattaggcacacggcctgcaatgagcagcagcggacaacaatgattctgctgtgtgaggatggcagcctgcgcatttacatggccaacgtggagaacacctcctactggctgcagccatccctgcagcccagcagtgtcatcagcatcatgaagcctgttcgaaagcgcaaaacagctacaatcacaacccgcacgtctagccaggtgactttccccattgacttttttgaacacaaccagcagctgacagatgtggagtttggtggtaacgacctcctacaggtctataatgcacaacagataaaacaccggctgaattccactggcatgtatgtggccaacaccaagcccggaggcttcaccattgagattagtaacaacaatagcactatggtgatgacaggcatgcggatccagattgggactcaagcaatagaacgggccccgtcatatatcgagatcttcggcagaactatgcagctcaacctgagtcgctcacgctggtttgacttccccttcaccagagaagaagccctgcaggctgataagaagctgaacctcttcattggggcctcggtggatccagcaggtgtcaccatgatagatgctgtaaaaatttatggcaagactaaggagcagtttggctggcctgatgagcccccagaagaattcccttctgcctctgtcagcaacatctgcccttcaaatctgaaccagagcaacggcactggagatagcgactcagctgcccccactacgaccagtggaactgtcctggagagttctgaaactgagtccctaaccaagctggaccggctggttgtgagttctttagaagccctggaaagctgctttgccgttggcccaatcatcgagaaggagagaaacaagaatgctgctcaggagctggccactttgctgttgtccctgccagcacctgccagtgtccagcagcagtccaagagccttctggccagcctgcacaccagccgctcggcctaccacagccacaaggatcaggccttgctgagcaaagctgtgcagtgtctcaacacatctagcaaagagggcaaggatttggaccctgaggtgttccagaggctagtgatcacagctcgctccattgccatcatgcgccccaacaaccttgtccactttacggagtcaaagctgccccagatggaaacagactgtttttttcctagatgtgcctgctggagtctagggatagttggcatattgattggggccccacttgaaactccctccccagaaggaatggatgaagggaaggaaccgcagaagcagttggaaggagattgctgtagtttcatcacccagcttgtgaaccacttctggaaactccatgcatccaaacccaagaatgccttcttggcacctgcctgccttccaggactaactcatattgaagctactgtcaatgctctggtggacatcatccatggctactgtacctgtgagctggattgtattaacacagcatccaagatctacatgcagatgctcttgtgtcctgatcctgctgtgagcttctcttgtaaacaagctctaattcgagtcctaaggcccaggaacaaacggagacatgtgactttaccctcttcccctcgaagcaacactccaatgggagacaaggatgatgatgacgatgatgatgcagatgagaaaatgcagtcatcagggatcccgaatggtggtcacatccgtcaggaaagccaggaacagagtgaggtggaccatggagattttgagatggtgtctgagtcgatggtcctggagacagctgaaaatgtcaacaatggcaacccctctcccctggaggccctgctggcaggcgcagagggcttcccccccatgctggacatcccacctgatgcagatgacgagaccatggttgaactagccattgccctgagcctgcagcaggaccaacaaggcagcagcagcagtgccctgggcctgcagagcctgggactgtccggccaggcacccagctcttcctctctggacgcaggaaccctctctgacaccacagcatcagctctcgttactctctcagctccagcctcagacgacgagggcagtacagcagcgacagatggttctacccttcggacctctcctgctgaccacggtggtagtgtgggctcggagagcgggggcagtgcagtggactcagtggctggcgagcacagtgtatctggccggagcagtgcttatggcgatgctacagctgaggggcatccggctggaccaggaagtgtcagctcaagcactggagccatcagcaccaccactgggcaccaggagggagatggctccgagggagaaggagaaggagaaactgaaggagatgtccacactagcaacaggctgcacatggtccgtctaatgctgttggagagattactgcagaccctgcctcaattacgaaacgttggcggtgtccgggccatcccatacatgcaggtcattctaatgctcactacagatctggatggagaagatgagaaagacaagggggccctagacaacctgctctcccagcttattgctgagttgggtatggataaaaaggatgtctccaagaagaatgagcgcagcgccctgaatgaagtccatctggtagtaatgagactcctgagtgtcttcatgtcccgcaccaaatctggatccaagtcttccatatgtgagtcatcttccctcatctccagtgccacagcagcagctctactgagctctggggctgtggactactgcctgcacgtgctcaaatcactgctggaatattggaagagccaacagaatgacgaggagcctgtggctaccagccagttgctgaaaccacatactacctcctccccacctgacatgagcccattctttctccgccagtatgtgaagggtcatgctgctgatgtgtttgaggcctatactcagcttctaacagaaatggtactgaggcttccttaccaaatcaaaaagattactgacaccaattctcgaatcccacctcctgtctttgaccactcgtggttttactttctctccgagtacctcatgatccagcagactccatttgtgcgccgtcaagtccgcaaacttctgctcttcatctgtggatccaaagagaagtaccgccagctccgggatttgcacaccctggactctcacgtgcgtgggatcaagaagctgctagaagagcaggggatattcctccgggcaagtgtggttacagccagctcaggctccgccttgcaatatgacacactcatcagcctgatggagcacctgaaagcctgtgcagagattgccgcccagcgaaccatcaactggcagaaattctgcatcaaagatgactccgtcctgtacttcctcctccaagtcagtttccttgtggatgagggcgtgtccccagtgctgctgcaactgctctcctgtgctctgtgcggcagcaaggtgctcgctgcactggcagcctcttcgggatcctccagtgcttcttcctcctcagcccctgtggctgccagttctggacaagccacaacacagtccaagtcttccactaaaaagagcaagaaagaagaaaaagaaaaggagaaagatggtgagacctctggcagccaggaggaccagctgtgcacagctctggtgaaccagctgaacaaatttgccgataaggaaaccctgatccagttcctgcgttgtttcctgttagagtccaattcttcctcggtgcgctggcaggcccactgtctgacactgcacatctacagaaattccagcaaatctcaacaggagctcctgctagatctgatgtggtccatctggccagaactcccagcctatggtcgtaaggctgcccagtttgtggacctactaggatatttctccctgaaaactccacaaacagagaagaagttgaaggagtattcacagaaggctgtggagattctgcggactcaaaaccatattcttaccaaccaccccaactcgaacatttataacactttgtctggcttagtggagtttgatggctattacctggagagcgatccctgcctggtgtgtaataacccggaagtaccgttctgttatatcaagctgtcttccattaaagtggacacgcggtacaccaccacccagcaggttgtgaagctcattggcagtcacaccatcagcaaagtgacagtgaaaatcggggatctgaaacggaccaagatggtgcggaccatcaacctgtattataacaaccgaaccgtgcaggccatcgtggagttgaaaaacaagccagctcgctggcacaaagccaagaaggttcagctgacccctggacagacagaggtgaagattgacctgccgttgcccattgtggcctccaatctgatgattgagtttgcagacttctatgaaaactaccaggcctccacagagaccctgcagtgccctcgctgtagtgcctcggtccctgccaacccaggagtctgtggcaactgtggagagaatgtgtaccagtgtcacaaatgcagatccatcaactacgatgaaaaggatcccttcctctgcaatgcctgtggcttctgtaaatatgcccgcttcgacttcatgctctatgccaagccttgctgtgcagtggatcccattgagaatgaagaagaccggaagaaggctgtatccaacatcaatacacttttggacaaagctgatcgagtgtatcatcagctgatgggacaccggccacagctggagaacctgctctgcaaagtgaatgaggcagctccagaaaagccacaggatgactcaggaacagcagggggcatcagctccacttctgccagtgtgaatcgttacatcctgcagttggctcaggagtattgtggagactgcaagaactcttttgatgaactctccaaaatcatccagaaagtctttgcttcgcgcaaagagttgttggaatatgacctacagcagagggaagcagccactaaatcatcccggacctccgtgcagcccacattcactgccagccagtaccgtgccttatccgtcctgggctgtggccacacatcctccaccaagtgctatggctgcgcctcggctgtcacagaacattgtatcacactacttcgggccctggccaccaacccagccttgaggcacatccttgtctcccagggccttatccgggagctctttgattataatcttcgccgaggggctgcggccatgcgggaggaggtccgccagctcatgtgcctcctaactcgagacaacccagaagccacccaacagatgaatgacctgattattggcaaggtctccacagccctgaagggccactgggccaaccccgatctggcaagtagcctgcagtatgaaatgctgctgctgacggattctatctccaaggaggacagctgctgggagctccggttacgctgtgctctcagccttttcctcatggctgtgaacattaagactcctgtggtggttgaaaacattaccctcatgtgcctgaggatcttgcagaagctgataaaaccacctgctcccactagcaagaagaacaaggatgtccccgttgaggccctcaccacggtgaagccatactgcaatgagatccatgcccaggctcaactgtggctcaagagagaccccaaggcatcctatgatgcctggaagaagtgtcttcctatcagagggatagatggcaatgggaaagcccccagcaaatcagagctccgccatctctatttgactgagaagtatgtgtggaggtggaaacagttcctgagtcgtcgggggaagaggacctcccccttggatctcaaactggggcataacaactggctgcgacaagtgcttttcactccagcaacgcaggccgcacggcaggcagcctgtaccattgtggaagctctagccaccattcccagccgcaagcagcaggtcctggacctgcttaccagttacctggatgagctgagcatagctggggagtgtgcagctgagtacctggctctctaccagaagctcatcacttctgcgcactggaaagtctacttggcagctcggggagtcctaccctatgtgggcaacctcatcaccaaggaaatagctcgtctgctggccctggaggaggctaccctgagtaccgatctgcagcagggttatgcccttaaaagtctcacaggccttctctcctcctttgttgaggtggaatccatcaaaagacattttaaaagtcgcttggtgggtactgtgctgaatggatacctgtgcttgcggaagctggtggtgcagaggaccaagctgatcgatgagacgcaggacatgctgctggagatgctggaggacatgaccacaggtacagaatcagaaaccaaggccttcatggctgtgtgcattgagacagccaagcgctacaatctggatgactaccggaccccggtgttcatcttcgagaggctctgcagcatcatttatcctgaggagaatgaagtcactgagttctttgtgaccctggagaaggatccccaacaagaagacttcttacagggcaggatgcctgggaacccgtatagcagcaatgagccaggcatcgggccgctgatgagggatataaagaacaagatttgccaggactgtgacttagtggccctcctggaagatgacagtggcatggagcttctagtgaacaataaaatcattagtttggaccttcctgtggctgaagtttacaagaaagtctggtgtaccacgaatgagggagagcccatgaggattgtttatcgtatgcgggggctgctgggcgatgccacagaggagttcattgagtccctggactctactacagatgaagaagaagatgaagaagaagtgtataaaatggctggtgtgatggcccagtgtgggggcctggaatgcatgcttaacagactcgcagggatcagagatttcaagcagggacgccaccttctaacagtgctactgaaattgttcagttactgcgtgaaggtgaaagtcaaccggcagcaactggtcaaactggaaatgaacaccttgaacgtcatgctggggaccctaaacctgggcaacctcctcctgacaggtgacaaggatcaactggtgatgctcttggaccagatcaacagcacctttgttcgctccaaccccagtgtgctccagggcctgcttcgcatcatcccgtacctttcctttggagaggtggagaaaatgcagatcttggtggagcgattcaaaccatactgcaactttgataaatatgatgaagatcacagtggtgatgataaagtcttcctggactgcttctgtaaaatagctgctggcatcaagaacaacagcaatgggcaccagctgaaggatctgattctccagaaggggatcacccagaatgcacttgactacatgaaaaagcacatccctagcgccaagaatttggatgccgacatctggaaaaagtttttgtctcgcccagccttgccatttatcctaaggctgcttcggggcctggccatccagcaccctggcacccaggttctgattggaactgattccatcccgaacctgcataagctggagcaggtgtccagtgatgagggcattgggaccttggcagagaacctgctggaagccctgcgggaacaccctgacgtaaacaagaagattgacgcagcccgcagggagacccgggcagagaagaagcgcatggccatggcaatgaggcagaaggccctgggcaccctgggcatgacgacaaatgaaaagggccaggtcgtgaccaagacagcactcctgaagcagatggaagagctgatcgaggagcctggcctcacgtgctgcatctgcagggagggatacaagttccagcccacaaaggtcctgggcatttataccttcacgaagcgggtagccttggaggagatggagaataagccccggaaacagcagggctacagcaccgtgtcccacttcaacattgtgcactacgactgccatctggctgccgtcaggttggctcgaggccgggaagagtgggagagtgccgccctgcagaatgccaacaccaagtgcaacgggctccttccggtctggggacctcatgtccctgaatcagcttttgccacttgcttggcaagacacaacacttacctccaggaatgtacaggccagcgggagcccacgtatcagctcaacatccatgacatcaaactgctcttcctgcgcttcgccatggagcagtcgttcagcgcagacactggcgggggcggccgggagagcaacatccacctgatcccgtacatcattcacactgtgctttacgtcctgaacacaacccgagcaacttcccgagaagagaagaacctccaaggctttctggaacagcccaaggagaagtgggtggagagtgcctttgaagtggacgggccctactatttcacagtcttggcccttcacatcctgccccctgagcagtggagagccacacgtgtggaaatcttgcggaggctgttggtgacctcgcaggctcgggcagtggctccaggtggagccaccaggctgacagataaggcagtgaaggactattccgcttaccgttcttcccttctcttttgggccctcgtcgatctcatttacaacatgtttaagaaggtgcctaccagtaacacagagggaggctggtcctgctctctcgctgagtacatccgccacaacgacatgcccatctacgaagctgccgacaaagccctgaaaaccttccaggaggagttcatgccagtggagaccttctcagagttcctcgatgtggccggtcttttatcagaaatcaccgatccagagagcttcctgaaggacctgttgaactcagtcccctgaccaccacacagcagctgcggcggcgaagacgaagctggcttgccttccaccctctgttctccctccttgtgcattaagttccctccgcgggatgctgcattgttaccccgccctcccctctctcatttttcttggtgtggcttggggtttttaggcttcctgttttatctcgtgtgtgtggtgcaccagctatgaggttgtctgtaacccaagccatcaaagggcctgtacatacctaggagccatgagttgtcccggccagcttcatacttgagtgtgcacatcttgagaaataaacaagtgacttaacacacattgaaaag

SEQ ID NO: 442 - DNA, 15992 bp, Homo sapiens
agattgcgtcacttccgccccctcctgggaggcggcgctgggccggtggcaagcccccggagggagccgcagtagtacgacggaagatggcgacgagcggcggcgaagaggcggcggcagcggctccggcgccggggaccccggcaacgggggcggacacgaccccgggctgggaggtggctgtgcggcccctgctgtccgcgtcctactccgccttcgagatgaaggagttgccgcagctggtggcctcagtcatcgagagtgaatcagaaatcctgcaccatgagaagcagtacgagccattctactcatcttttgttgcactttccacacactatattacaacagtttgcagtctcattccccggaaccaacttcagtcagtggcagcagcctgtaaagttctaattgagttttctctcctgcgtctggagaatccagatgaggcttgtgctgtgtcccagaaacacttgattctcctaatcaagggcctgtgcactggctgtagccgactagatagaactgaaattatcacatttacagcaatgatgaaatccgccaagctgccccaaacagtgaagacactttcagacgtggaagatcagaaagagctggcctcaccagtaagccctgagttgaggcaaaaggaggtacagatgaattttttgaaccagctgacctcagtttttaaccctagaactgtagcatcacaacctatcagtacacagactctggtggaaggagaaaatgatgagcagtcatctacagatcaagcctcagctatcaaaaccaagaatgtgttcatagctcagaacgtggctagtcttcaagagcttggtggctcggagaagctactgcgtgtatgtttgaacctgccatatttcctacgctatatcaatcggttccaagatgcagttttagctaattccttcttcataatgcctgcaacagtagcagatgccactgctgttcgtaatggctttcattcattggtgattgatgtaactatggcattggataccctttctctacctgtgttggaacctctcaatccttctcgtctacaagatgtgacagtcctcagcctaagttgtctgtatgcaggtgtgagtgtggcaacgtgcatggccatcctccatgtgggtagtgcccagcaagtgcggacagggtccacgagctccaaagaagatgactatgaaagtgacgcagctacaattgtccagaaatgtctcgaaatctatgacatgattggacaagcaatcagcagttctcgccgggctggtggtgagcactatcagaatttccaattgctgggtgcttggtgcttgttaaacagccttttcctcatactgaacctcagtcctactgcgttggctgataaggggaaagagaaggacccactggctgccctccgagtcagagacatcctttctcgtactaaagagggagtgggctcccctaaactggggcctggaaaagggcatcagggatttggggtactctcagtaatattggcaaaccatgccatcaaactgctaacgtctctctttcaagacctacaagtggaggcccttcacaagggttgggagacagatggcccccctgcagccttgagcattatggcccagagcacctccatacagaggattcaacggctgattgactctgtcccactgatgaacctgctcttgacgttactttcaacttcctacagaaaggcatgtgtcctgcagcggcagaggaagggctccatgagcagcgatgccagcgcctccaccgactccaatacttactatgaggacgatttcagtagcacggaggaggacagcagccaagacgatgacagtgagcctattttggggcaatggtttgaggagactatttctcccagtaaagagaaagcagcacctccgcctcctcccccacctcctccactggaaagctctcctcgggttaaaagccccagtaagcaggcccctggtgagaagggcaacattctggcgagtcgcaaagatcctgagttgttcttaggtctggcttccaacattttgaacttcatcacctcttccatgctgaactctcggaacaattttatccgaaactatctgagtgtatctctttcagaacaccatatggccaccctagccagtatcatcaaggaggtggacaaagatggactcaagggttcatcagatgaagagtttgctgcagctctctatcacttcaaccactcactggtaacctctgaccttcagtcacctaacctgcagaacacactgttgcagcagctaggagtggctcctttttctgagggcccttggcccttgtacattcaccctcaaagcctctctgtgctttcacgcctcctgctcatctggcaacataaagccagtgctcaaggtgaccctgacgtcccagaatgccttaaagtttgggacaggtttttgtctacaatgaagcagaatgccctgcaaggtgtggtgcccagtgagacagaggatctgaatgtagaacacctgcagatgctcctcctcattttccacaatttcaccgagacaggccggcgggccatattgtcgctttttgtccagatcatccaggagttgagcgtcaacatggatgctcagatgcgcttcgtgccgcttatcttggctcgcctccttctcatctttgattatctgcttcatcagtactccaaagcccctgtgtatctatttgagcaggtacagcataacctgctaagtcctccctttgggtgggcaagtggatcccaggacagcaacagccgccgggcaaccactcctctctatcatggattcaaagaagtagaagaaaactggtctaagcatttctcatcagatgctgtcccacaccccagattctactgtgtcctgtccccagaagcctcagaggatgatttgaaccgacttgattctgtggcatgtgacgtccttttctccaagcttgtcaagtatgatgagctttatgctgcactgacagccctgcttgcagctgggtcccagcttgatacagttaggagaaaggaaaacaagaatgtaacagccttggaggcctgtgcccttcaatattacttcttgatactgtggaggatcctaggaattttaccaccatcaaagacttacattaaccagctatccatgaactcacctgagatgagcgaatgtgacatcttgcacactctgcgatggtcttctcggctccggatcagctcctatgtcaactggataaaggatcaccttatcaaacagggaatgaaggctgagcatgctagctcgcttctagaactggcatccaccactaagtgtagctcagtgaaatatgatgttgaaatagtagaggaatacttcgctcgacagatctcatccttctgtagtatcgactgtaccaccatcttgcagctgcatgaaattcccagtctgcagtccatctacacccttgatgccgcgatctcaaaggtccaggtctctttggatgagcatttttctaagatggctgctgagactgatcctcataagtcgtctgagattaccaagaacctacttccagccacgctgcaactcattgacacctatgcatcgttcaccagagcctatttgctgcaaaactttaatgaagagggaacaactgagaaaccttccaaggagaaactgcaaggctttgctgctgttttggctattggctctagcaggtgcaaggcaaatactctgggtccgacactggttcagaatttgccatcgtcagtgcagactgtgtgtgagtcctggaacaacatcaataccaatgaatttcccaatattggatcctggcgcaatgcctttgccaatgacaccatcccttcagagagttatattagtgcagtgcaggctgcacacctggggactctctgtagccaaagtctgcccctggctgcttccctgaagcataccctcctctcactggtcaggttgactggagatcttattgtttggtcagatgagatgaacccaccacaggtaattcggacactgctacctcttcttttggaatcaagcactgagagtgttgccgagatcagtagcaactccctggaacgcatcttgggccctgctgagtctgatgagttcttggctcgtgtttatgagaagctgatcactggttgttacaacattctggccaatcatgcagatcctaacagtggactggatgaatccatcctggaggaatgtctccagtacttggaaaagcagctggaaagtagccaggctcgtaaagctatggaggagtttttctctgacagtggagaacttgtacagatcatgatggcaacagccaatgagaacctctctgctaaattctgtaaccgagttttgaaattcttcaccaaactcttccagctgactgagaagagccctaacccgagcctgttgcatctctgtggctccctggcacaactggcctgtgtggaacctgtgcgcctgcaggcctggctcacccgcatgactacatcgcccccaaaagattctgatcagctggatgtaattcaggagaaccggcagctgctgcagttactgaccacatacattgttcgggaaaacagccaagttggggaaggtgtgtgtgctgttcttctgggcaccctgactcccatggcaacagagatgctggccaacggtgatgggactggcttccctgaacttatggttgtgatggccactctggccagtgcaggtcaaggtgctggtcaccttcagcttcataatgctgctgtggattggctgagcagatgcaagaaatacctgtcacagaagaatgtagttgaaaaactgaatgccaatgtaatgcatggaaagcatgtgatgatcttggagtgcacatgccatatcatgtcttacttggctgatgtcacgaatgccctgagccagagtaatggtcaaggcccaagtcatctctcagtggatggggaagagcgggccattgaagtagactcagactgggtggaggagttggcggtggaagaggaagattcccaggctgaggattcagatgaagattctctttgcaataaactctgcacttttacgatcacacagaaagaattcatgaaccagcattggtaccactgtcacacctgtaaaatggtggatggcgtgggtgtctgcacagtgtgtgctaaggtgtgccacaaggatcatgagatttcctatgccaagtatggatccttcttctgtgactgtggagccaaggaagatggcagctgtttggctctggtgaagagaactcctagcagtggcatgagctctaccatgaaggagtcggcatttcagagtgaacccaggatttcagagagtctagtgcgtcatgccagcacctcctcgccagctgacaaagccaaggttaccatcagtgatggaaaggttgctgacgaagagaagcccaagaagagcagcctctgccgcacagtagagggctgccgggaggaattacagaaccaggccaatttctccttcgctcctctcgtgttagacatgcttaatttccttatggatgccattcagaccaacttccagcaagcttcagccgtcgggagcagcagccgtgctcagcaagccctcagtgagctacacactgtggagaaggcagtggagatgacagaccagctgatggttcccaccttagggtcccaggaaggtgcctttgagaatgtgcggatgaattacagtggagaccagggccagaccatccggcagctgatcagtgctcatgtgctcaggcgggtggctatgtgtgtgctctcctctccccatgggcgccgccaacatttggctgtcagccatgagaagggcaagatcaccgttctgcagctctctgcactcctgaagcaagcagattccagcaaaaggaagttaactctgacccgcttggcttctgccccagttccttttactgtgttgagcctcacaggaaatccctgcaaggaagactacttggcggtttgtgggctaaaggactgtcatgtgctcacctttagtagctcaggctctgtttcggatcacttggttttgcaccctcagttggcaacggggaacttcatcatcaaagccgtgtggttacctggttcacagaccgagttagcaattgtcaccgcagactttgttaagatttatgacctgtgtgttgatgccttgagtccaaccttctattttctcctgccaagctcaaagataagagatgttaccttccttttcaatgaggagggaaagaacatcattgttataatgtcttcggctgggtacatctatactcagcttatggaagaggccagcagtgcccagcagggacccttctatgtcactaatgtgttggaaatcaatcatgaggacctgaagcaggacagtaacagccaggtggcgggcggtggtgtgtccgtgtactactcccacgtgttgcagatgttgttcttcagctattgtcaaggcaaatcattcgcagccaccatcagcaggacaaccctggaggtgttgcaactcttccccatcaacatcaaaagttttgttgtctgcagttccaatggtggcagtaagacttctcctgctctttgccagtggtctgaggtgatgaaccaccctggcttggtgtgctgtgtccagcaaactacaggggtgccgctggtagttatggtgaaaccagacacttttcttatccaggagattaagactcttcctgctaaagcgaagatccaagacatggttgctattaggcacacggcctgcaatgagcagcagcggacaacaatgattctgctgtgtgaggatggcagcctgcgcatttacatggccaacgtggagaacacctcctactggctgcagccatccctgcagcccagcagtgtcatcagcatcatgaagcctgttcgaaagcgcaaaacagctacaatcacaacccgcacgtctagccaggtgactttccccattgacttttttgaacacaaccagcagctgacagatgtggagtttggtggtaacgacctcctacaggtctataatgcacaacagataaaacaccggctgaattccactggcatgtatgtggccaacaccaagcccggaggcttcaccattgagattagtaacaacaatagcactatggtgatgacaggcatgcggatccagattgggactcaagcaatagaacgggccccgtcatatatcgagatcttcggcagaactatgcagctcaacctgagtcgctcacgctggtttgacttccccttcaccagagaagaagccctgcaggctgataagaagctgaacctcttcattggggcctcggtggatccagcaggtgtcaccatgatagatgctgtaaaaatttatggcaagactaaggagcagtttggctggcctgatgagcccccagaagaattcccttctgcctctgtcagcaacatctgcccttcaaatctgaaccagagcaacggcactggagatagcgactcagctgcccccactacgaccagtggaactgtcctggagagttctgaaactgagtccctaaccaagctggaccggctggttgtgagttctttagaagccctggaaagctgctttgccgttggcccaatcatcgagaaggagagaaacaagaatgctgctcaggagctggccactttgctgttgtccctgccagcacctgccagtgtccagcagcagtccaagagccttctggccagcctgcacaccagccgctcggcctaccacagccacaaggatcaggccttgctgagcaaagctgtgcagtgtctcaacacatctagcaaagagggcaaggatttggaccctgaggtgttccagaggctagtgatcacagctcgctccattgccatcatgcgccccaacaaccttgtccactttacggagtcaaagctgccccagatggaaacagactgtttttttcctagatgtgcctgctggagtctagggatagttggcatattgattggggccccacttgaaactccctccccagaaggaatggatgaagggaaggaaccgcagaagcagttggaaggagattgctgtagtttcatcacccagcttgtgaaccacttctggaaactccatgcatccaaacccaagaatgccttcttggcacctgcctgccttccaggactaactcatattgaagctactgtcaatgctctggtggacatcatccatggctactgtacctgtgagctggattgtattaacacagcatccaagatctacatgcagatgctcttgtgtcctgatcctgctgtgagcttctcttgtaaacaagctctaattcgagtcctaaggcccaggaacaaacggagacatgtgactttaccctcttcccctcgaagcaacactccaatgggagacaaggatgatgatgacgatgatgatgcagatgagaaaatgcagtcatcagggatcccgaatggtggtcacatccgtcaggaaagccaggaacagagtgaggtggaccatggagattttgagatggtgtctgagtcgatggtcctggagacagctgaaaatgtcaacaatggcaacccctctcccctggaggccctgctggcaggcgcagagggcttcccccccatgctggacatcccacctgatgcagatgacgagaccatggttgaactagccattgccctgagcctgcagcaggaccaacaagctccagcctcagacgacgagggcagtacagcagcgacagatggttctacccttcggacctctcctgctgaccacggtggtagtgtgggctcggagagcgggggcagtgcagtggactcagtggctggcgagcacagtgtatctggccggagcagtgcttatggcgatgctacagctgaggggcatccggctggaccaggaagtgtcagctcaagcactggagccatcagcaccaccactgggcaccaggagggagatggctccgagggagaaggagaaggagaaactgaaggagatgtccacactagcaacaggctgcacatggtccgtctaatgctgttggagagattactgcagaccctgcctcaattacgaaacgttggcggtgtccgggccatcccatacatgcaggtcattctaatgctcactacagatctggatggagaagatgagaaagacaagggggccctagacaacctgctctcccagcttattgctgagttgggtatggataaaaaggatgtctccaagaagaatgagcgcagcgccctgaatgaagtccatctggtagtaatgagactcctgagtgtcttcatgtcccgcaccaaatctggatccaagtcttccatatgtgagtcatcttccctcatctccagtgccacagcagcagctctactgagctctggggctgtggactactgcctgcacgtgctcaaatcactgctggaatattggaagagccaacagaatgacgaggagcctgtggctaccagccagttgctgaaaccacatactacctcctccccacctgacatgagcccattctttctccgccagtatgtgaagggtcatgctgctgatgtgtttgaggcctatactcagcttctaacagaaatggtactgaggcttccttaccaaatcaaaaagattactgacaccaattctcgaatcccacctcctgtctttgaccactcgtggttttactttctctccgagtacctcatgatccagcagactccatttgtgcgccgtcaagtccgcaaacttctgctcttcatctgtggatccaaagagaagtaccgccagctccgggatttgcacaccctggactctcacgtgcgtgggatcaagaagctgctagaagagcaggggatattcctccgggcaagtgtggttacagccagctcaggctccgccttgcaatatgacacactcatcagcctgatggagcacctgaaagcctgtgcagagattgccgcccagcgaaccatcaactggcagaaattctgcatcaaagatgactccgtcctgtacttcctcctccaagtcagtttccttgtggatgagggcgtgtccccagtgctgctgcaactgctctcctgtgctctgtgcggcagcaaggtgctcgctgcactggcagcctcttcgggatcctccagtgcttcttcctcctcagcccctgtggctgccagttctggacaagccacaacacagtccaagtcttccactaaaaagagcaagaaagaagaaaaagaaaaggagaaagatggtgagacctctggcagccaggaggaccagctgtgcacagctctggtgaaccagctgaacaaatttgccgataaggaaaccctgatccagttcctgcgttgtttcctgttagagtccaattcttcctcggtgcgctggcaggcccactgtctgacactgcacatctacagaaattccagcaaatctcaacaggagctcctgctagatctgatgtggtccatctggccagaactcccagcctatggtcgtaaggctgcccagtttgtggacctactaggatatttctccctgaaaactccacaaacagagaagaagttgaaggagtattcacagaaggctgtggagattctgcggactcaaaaccatattcttaccaaccaccccaactcgaacatttataacactttgtctggcttagtggagtttgatggctattacctggagagcgatccctgcctggtgtgtaataacccggaagtaccgttctgttatatcaagctgtcttccattaaagtggacacgcggtacaccaccacccagcaggttgtgaagctcattggcagtcacaccatcagcaaagtgacagtgaaaatcggggatctgaaacggaccaagatggtgcggaccatcaacctgtattataacaaccgaaccgtgcaggccatcgtggagttgaaaaacaagccagctcgctggcacaaagccaagaaggttcagctgacccctggacagacagaggtgaagattgacctgccgttgcccattgtggcctccaatctgatgattgagtttgcagacttctatgaaaactaccaggcctccacagagaccctgcagtgccctcgctgtagtgcctcggtccctgccaacccaggagtctgtggcaactgtggagagaatgtgtaccagtgtcacaaatgcagatccatcaactacgatgaaaaggatcccttcctctgcaatgcctgtggcttctgtaaatatgcccgcttcgacttcatgctctatgccaagccttgctgtgcagtggatcccattgagaatgaagaagaccggaagaaggctgtatccaacatcaatacacttttggacaaagctgatcgagtgtatcatcagctgatgggacaccggccacagctggagaacctgctctgcaaagtgaatgaggcagctccagaaaagccacaggatgactcaggaacagcagggggcatcagctccacttctgccagtgtgaatcgttacatcctgcagttggctcaggagtattgtggagactgcaagaactcttttgatgaactctccaaaatcatccagaaagtctttgcttcgcgcaaagagttgttggaatatgacctacagcagagggaagcagccactaaatcatcccggacctccgtgcagcccacattcactgccagccagtaccgtgccttatccgtcctgggctgtggccacacatcctccaccaagtgctatggctgcgcctcggctgtcacagaacattgtatcacactacttcgggccctggccaccaacccagccttgaggcacatccttgtctcccagggccttatccgggagctctttgattataatcttcgccgaggggctgcggccatgcgggaggaggtccgccagctcatgtgcctcctaactcgagacaacccagaagccacccaacagatgaatgacctgattattggcaaggtctccacagccctgaagggccactgggccaaccccgatctggcaagtagcctgcagtatgaaatgctgctgctgacggattctatctccaaggaggacagctgctgggagctccggttacgctgtgctctcagccttttcctcatggctgtgaacattaagactcctgtggtggttgaaaacattaccctcatgtgcctgaggatcttgcagaagctgataaaaccacctgctcccactagcaagaagaacaaggatgtccccgttgaggccctcaccacggtgaagccatactgcaatgagatccatgcccaggctcaactgtggctcaagagagaccccaaggcatcctatgatgcctggaagaagtgtcttcctatcagagggatagatggcaatgggaaagcccccagcaaatcagagctccgccatctctatttgactgagaagtatgtgtggaggtggaaacagttcctgagtcgtcgggggaagaggacctcccccttggatctcaaactggggcataacaactggctgcgacaagtgcttttcactccagcaacgcaggccgcacggcaggcagcctgtaccattgtggaagctctagccaccattcccagccgcaagcagcaggtcctggacctgcttaccagttacctggatgagctgagcatagctggggagtgtgcagctgagtacctggctctctaccagaagctcatcacttctgcgcactggaaagtctacttggcagctcggggagtcctaccctatgtgggcaacctcatcaccaaggaaatagctcgtctgctggccctggaggaggctaccctgagtaccgatctgcagcagggttatgcccttaaaagtctcacaggccttctctcctcctttgttgaggtggaatccatcaaaagacattttaaaagtcgcttggtgggtactgtgctgaatggatacctgtgcttgcggaagctggtggtgcagaggaccaagctgatcgatgagacgcaggacatgctgctggagatgctggaggacatgaccacaggtacagaatcagaaaccaaggccttcatggctgtgtgcattgagacagccaagcgctacaatctggatgactaccggaccccggtgttcatcttcgagaggctctgcagcatcatttatcctgaggagaatgaagtcactgagttctttgtgaccctggagaaggatccccaacaagaagacttcttacagggcaggatgcctgggaacccgtatagcagcaatgagccaggcatcgggccgctgatgagggatataaagaacaagatttgccaggactgtgacttagtggccctcctggaagatgacagtggcatggagcttctagtgaacaataaaatcattagtttggaccttcctgtggctgaagtttacaagaaagtctggtgtaccacgaatgagggagagcccatgaggattgtttatcgtatgcgggggctgctgggcgatgccacagaggagttcattgagtccctggactctactacagatgaagaagaagatgaagaagaagtgtataaaatggctggtgtgatggcccagtgtgggggcctggaatgcatgcttaacagactcgcagggatcagagatttcaagcagggacgccaccttctaacagtgctactgaaattgttcagttactgcgtgaaggtgaaagtcaaccggcagcaactggtcaaactggaaatgaacaccttgaacgtcatgctggggaccctaaacctggcccttgtagctgaacaagaaagcaaggacagtgggggtgcagctgtggctgagcaggtgcttagcatcatggagatcattctagatgagtccaatgctgagcccctgagtgaggacaagggcaacctcctcctgacaggtgacaaggatcaactggtgatgctcttggaccagatcaacagcacctttgttcgctccaaccccagtgtgctccagggcctgcttcgcatcatcccgtacctttcctttggagaggtggagaaaatgcagatcttggtggagcgattcaaaccatactgcaactttgataaatatgatgaagatcacagtggtgatgataaagtcttcctggactgcttctgtaaaatagctgctggcatcaagaacaacagcaatgggcaccagctgaaggatctgattctccagaaggggatcacccagaatgcacttgactacatgaaaaagcacatccctagcgccaagaatttggatgccgacatctggaaaaagtttttgtctcgcccagccttgccatttatcctaaggctgcttcggggcctggccatccagcaccctggcacccaggttctgattggaactgattccatcccgaacctgcataagctggagcaggtgtccagtgatgagggcattgggaccttggcagagaacctgctggaagccctgcgggaacaccctgacgtaaacaagaagattgacgcagcccgcagggagacccgggcagagaagaagcgcatggccatggcaatgaggcagaaggccctgggcaccctgggcatgacgacaaatgaaaagggccaggtcgtgaccaagacagcactcctgaagcagatggaagagctgatcgaggagcctggcctcacgtgctgcatctgcagggagggatacaagttccagcccacaaaggtcctgggcatttataccttcacgaagcgggtagccttggaggagatggagaataagccccggaaacagcagggctacagcaccgtgtcccacttcaacattgtgcactacgactgccatctggctgccgtcaggttggctcgaggccgggaagagtgggagagtgccgccctgcagaatgccaacaccaagtgcaacgggctccttccggtctggggacctcatgtccctgaatcagcttttgccacttgcttggcaagacacaacacttacctccaggaatgtacaggccagcgggagcccacgtatcagctcaacatccatgacatcaaactgctcttcctgcgcttcgccatggagcagtcgttcagcgcagacactggcgggggcggccgggagagcaacatccacctgatcccgtacatcattcacactgtgctttacgtcctgaacacaacccgagcaacttcccgagaagagaagaacctccaaggctttctggaacagcccaaggagaagtgggtggagagtgcctttgaagtggacgggccctactatttcacagtcttggcccttcacatcctgccccctgagcagtggagagccacacgtgtggaaatcttgcggaggctgttggtgacctcgcaggctcgggcagtggctccaggtggagccaccaggctgacagataaggcagtgaaggactattccgcttaccgttcttcccttctcttttgggccctcgtcgatctcatttacaacatgtttaagaaggtgcctaccagtaacacagagggaggctggtcctgctctctcgctgagtacatccgccacaacgacatgcccatctacgaagctgccgacaaagccctgaaaaccttccaggaggagttcatgccagtggagaccttctcagagttcctcgatgtggccggtcttttatcagaaatcaccgatccagagagcttcctgaaggacctgttgaactcagtcccctgaccaccacacagcagctgcggcggcgaagacgaagctggcttgccttccaccctctgttctccctccttgtgcattaagttccctccgcgggatgctgcattgttaccccgccctcccctctctcatttttcttggtgtggcttggggtttttaggcttcctgttttatctcgtgtgtgtggtgcaccagctatgaggttgtctgtaacccaagccatcaaagggcctgtacatacctaggagccatgagttgtcccggccagcttcatacttgagtgtgcacatcttgagaaataaacaagtgacttaacacacattgaaaagg

SEQ ID NO: 443 - DNA, 15980 bp, Homo sapiens
agattgcgtcacttccgccccctcctgggaggcggcgctgggccggtggcaagcccccggagggagccgcagtagtacgacggaagatggcgacgagcggcggcgaagaggcggcggcagcggctccggcgccggggaccccggcaacgggggcggacacgaccccgggctgggaggtggctgtgcggcccctgctgtccgcgtcctactccgccttcgagatgaaggagttgccgcagctggtggcctcagtcatcgagagtgaatcagaaatcctgcaccatgagaagcagtacgagccattctactcatcttttgttgcactttccacacactatattacaacagtttgcagtctcattccccggaaccaacttcagtcagtggcagcagcctgtaaagttctaattgagttttctctcctgcgtctggagaatccagatgaggcttgtgctgtgtcccagaaacacttgattctcctaatcaagggcctgtgcactggctgtagccgactagatagaactgaaattatcacatttacagcaatgatgaaatccgccaagctgccccaaacagtgaagacactttcagacgtggaagatcagaaagagctggcctcaccagtaagccctgagttgaggcaaaaggaggtacagatgaattttttgaaccagctgacctcagtttttaaccctagaactgtagcatcacaacctatcagtacacagactctggtggaaggagaaaatgatgagcagtcatctacagatcaagcctcagctatcaaaaccaagaatgtgttcatagctcagaacgtggctagtcttcaagagcttggtggctcggagaagctactgcgtgtatgtttgaacctgccatatttcctacgctatatcaatcggttccaagatgcagttttagctaattccttcttcataatgcctgcaacagtagcagatgccactgctgttcgtaatggctttcattcattggtgattgatgtaactatggcattggataccctttctctacctgtgttggaacctctcaatccttctcgtctacaagatgtgacagtcctcagcctaagttgtctgtatgcaggtgtgagtgtggcaacgtgcatggccatcctccatgtgggtagtgcccagcaagtgcggacagggtccacgagctccaaagaagatgactatgaaagtgacgcagctacaattgtccagaaatgtctcgaaatctatgacatgattggacaagcaatcagcagttctcgccgggctggtggtgagcactatcagaatttccaattgctgggtgcttggtgcttgttaaacagccttttcctcatactgaacctcagtcctactgcgttggctgataaggggaaagagaaggacccactggctgccctccgagtcagagacatcctttctcgtactaaagagggagtgggctcccctaaactggggcctggaaaagggcatcagggatttggggtactctcagtaatattggcaaaccatgccatcaaactgctaacgtctctctttcaagacctacaagtggaggcccttcacaagggttgggagacagatggcccccctgcagccttgagcattatggcccagagcacctccatacagaggattcaacggctgattgactctgtcccactgatgaacctgctcttgacgttactttcaacttcctacagaaaggcatgtgtcctgcagcggcagaggaagggctccatgagcagcgatgccagcgcctccaccgactccaatacttactatgaggacgatttcagtagcacggaggaggacagcagccaagacgatgacagtgagcctattttggggcaatggtttgaggagactatttctcccagtaaagagaaagcagcacctccgcctcctcccccacctcctccactggaaagctctcctcgggttaaaagccccagtaagcaggcccctggtgagaagggcaacattctggcgagtcgcaaagatcctgagttgttcttaggtctggcttccaacattttgaacttcatcacctcttccatgctgaactctcggaacaattttatccgaaactatctgagtgtatctctttcagaacaccatatggccaccctagccagtatcatcaaggaggtggacaaagatggactcaagggttcatcagatgaagagtttgctgcagctctctatcacttcaaccactcactggtaacctctgaccttcagtcacctaacctgcagaacacactgttgcagcagctaggagtggctcctttttctgagggcccttggcccttgtacattcaccctcaaagcctctctgtgctttcacgcctcctgctcatctggcaacataaagccagtgctcaaggtgaccctgacgtcccagaatgccttaaagtttgggacaggtttttgtctacaatgaagcagaatgccctgcaaggtgtggtgcccagtgagacagaggatctgaatgtagaacacctgcagatgctcctcctcattttccacaatttcaccgagacaggccggcgggccatattgtcgctttttgtccagatcatccaggagttgagcgtcaacatggatgctcagatgcgcttcgtgccgcttatcttggctcgcctccttctcatctttgattatctgcttcatcagtactccaaagcccctgtgtatctatttgagcaggtacagcataacctgctaagtcctccctttgggtgggcaagtggatcccaggacagcaacagccgccgggcaaccactcctctctatcatggattcaaagaagtagaagaaaactggtctaagcatttctcatcagatgctgtcccacaccccagattctactgtgtcctgtccccagaagcctcagaggatgatttgaaccgacttgattctgtggcatgtgacgtccttttctccaagcttgtcaagtatgatgagctttatgctgcactgacagccctgcttgcagctgggtcccagcttgatacagttaggagaaaggaaaacaagaatgtaacagccttggaggcctgtgcccttcaatattacttcttgatactgtggaggatcctaggaattttaccaccatcaaagacttacattaaccagctatccatgaactcacctgagatgagcgaatgtgacatcttgcacactctgcgatggtcttctcggctccggatcagctcctatgtcaactggataaaggatcaccttatcaaacagggaatgaaggctgagcatgctagctcgcttctagaactggcatccaccactaagtgtagctcagtgaaatatgatgttgaaatagtagaggaatacttcgctcgacagatctcatccttctgtagtatcgactgtaccaccatcttgcagctgcatgaaattcccagtctgcagtccatctacacccttgatgccgcgatctcaaaggtccaggtctctttggatgagcatttttctaagatggctgctgagactgatcctcataagtcgtctgagattaccaagaacctacttccagccacgctgcaactcattgacacctatgcatcgttcaccagagcctatttgctgcaaaactttaatgaagagggaacaactgagaaaccttccaaggagaaactgcaaggctttgctgctgttttggctattggctctagcaggtgcaaggcaaatactctgggtccgacactggttcagaatttgccatcgtcagtgcagactgtgtgtgagtcctggaacaacatcaataccaatgaatttcccaatattggatcctggcgcaatgcctttgccaatgacaccatcccttcagagagttatattagtgcagtgcaggctgcacacctggggactctctgtagccaaagtctgcccctggctgcttccctgaagcataccctcctctcactggtcaggttgactggagatcttattgtttggtcagatgagatgaacccaccacaggtaattcggacactgctacctcttcttttggaatcaagcactgagagtgttgccgagatcagtagcaactccctggaacgcatcttgggccctgctgagtctgatgagttcttggctcgtgtttatgagaagctgatcactggttgttacaacattctggccaatcatgcagatcctaacagtggactggatgaatccatcctggaggaatgtctccagtacttggaaaagcagctggaaagtagccaggctcgtaaagctatggaggagtttttctctgacagtggagaacttgtacagatcatgatggcaacagccaatgagaacctctctgctaaattctgtaaccgagttttgaaattcttcaccaaactcttccagctgactgagaagagccctaacccgagcctgttgcatctctgtggctccctggcacaactggcctgtgtggaacctgtgcgcctgcaggcctggctcacccgcatgactacatcgcccccaaaagattctgatcagctggatgtaattcaggagaaccggcagctgctgcagttactgaccacatacattgttcgggaaaacagccaagttggggaaggtgtgtgtgctgttcttctgggcaccctgactcccatggcaacagagatgctggccaacggtgatgggactggcttccctgaacttatggttgtgatggccactctggccagtgcaggtcaaggtgctggtcaccttcagcttcataatgctgctgtggattggctgagcagatgcaagaaatacctgtcacagaagaatgtagttgaaaaactgaatgccaatgtaatgcatggaaagcatgtgatgatcttggagtgcacatgccatatcatgtcttacttggctgatgtcacgaatgccctgagccagagtaatggtcaaggcccaagtcatctctcagtggatggggaagagcgggccattgaagtagactcagactgggtggaggagttggcggtggaagaggaagattcccaggctgaggattcagatgaagattctctttgcaataaactctgcacttttacgatcacacagaaagaattcatgaaccagcattggtaccactgtcacacctgtaaaatggtggatggcgtgggtgtctgcacagtgtgtgctaaggtgtgccacaaggatcatgagatttcctatgccaagtatggatccttcttctgtgactgtggagccaaggaagatggcagctgtttggctctggtgaagagaactcctagcagtggcatgagctctaccatgaaggagtcggcatttcagagtgaacccaggatttcagagagtctagtgcgtcatgccagcacctcctcgccagctgacaaagccaaggttaccatcagtgatggaaaggttgctgacgaagagaagcccaagaagagcagcctctgccgcacagtagagggctgccgggaggaattacagaaccaggccaatttctccttcgctcctctcgtgttagacatgcttaatttccttatggatgccattcagaccaacttccagcaagcttcagccgtcgggagcagcagccgtgctcagcaagccctcagtgagctacacactgtggagaaggcagtggagatgacagaccagctgatggttcccaccttagggtcccaggaaggtgcctttgagaatgtgcggatgaattacagtggagaccagggccagaccatccggcagctgatcagtgctcatgtgctcaggcgggtggctatgtgtgtgctctcctctccccatgggcgccgccaacatttggctgtcagccatgagaagggcaagatcaccgttctgcagctctctgcactcctgaagcaagcagattccagcaaaaggaagttaactctgacccgcttggcttctgccccagttccttttactgtgttgagcctcacaggaaatccctgcaaggaagactacttggcggtttgtgggctaaaggactgtcatgtgctcacctttagtagctcaggctctgtttcggatcacttggttttgcaccctcagttggcaacggggaacttcatcatcaaagccgtgtggttacctggttcacagaccgagttagcaattgtcaccgcagactttgttaagatttatgacctgtgtgttgatgccttgagtccaaccttctattttctcctgccaagctcaaagataagagatgttaccttccttttcaatgaggagggaaagaacatcattgttataatgtcttcggctgggtacatctatactcagcttatggaagaggccagcagtgcccagcagggacccttctatgtcactaatgtgttggaaatcaatcatgaggacctgaagcaggacagtaacagccaggtggcgggcggtggtgtgtccgtgtactactcccacgtgttgcagatgttgttcttcagctattgtcaaggcaaatcattcgcagccaccatcagcaggacaaccctggaggtgttgcaactcttccccatcaacatcaaaagttttgttgtctgcagttccaatggtggcagtaagacttctcctgctctttgccagtggtctgaggtgatgaaccaccctggcttggtgtgctgtgtccagcaaactacaggggtgccgctggtagttatggtgaaaccagacacttttcttatccaggagattaagactcttcctgctaaagcgaagatccaagacatggttgctattaggcacacggcctgcaatgagcagcagcggacaacaatgattctgctgtgtgaggatggcagcctgcgcatttacatggccaacgtggagaacacctcctactggctgcagccatccctgcagcccagcagtgtcatcagcatcatgaagcctgttcgaaagcgcaaaacagctacaatcacaacccgcacgtctagccaggtgactttccccattgacttttttgaacacaaccagcagctgacagatgtggagtttggtggtaacgacctcctacaggtctataatgcacaacagataaaacaccggctgaattccactggcatgtatgtggccaacaccaagcccggaggcttcaccattgagattagtaacaacaatagcactatggtgatgacaggcatgcggatccagattgggactcaagcaatagaacgggccccgtcatatatcgagatcttcggcagaactatgcagctcaacctgagtcgctcacgctggtttgacttccccttcaccagagaagaagccctgcaggctgataagaagctgaacctcttcattggggcctcggtggatccagcaggtgtcaccatgatagatgctgtaaaaatttatggcaagactaaggagcagtttggctggcctgatgagcccccagaagaattcccttctgcctctgtcagcaacatctgcccttcaaatctgaaccagagcaacggcactggagatagcgactcagctgcccccactacgaccagtggaactgtcctggagaggctggttgtgagttctttagaagccctggaaagctgctttgccgttggcccaatcatcgagaaggagagaaacaagaatgctgctcaggagctggccactttgctgttgtccctgccagcacctgccagtgtccagcagcagtccaagagccttctggccagcctgcacaccagccgctcggcctaccacagccacaaggatcaggccttgctgagcaaagctgtgcagtgtctcaacacatctagcaaagagggcaaggatttggaccctgaggtgttccagaggctagtgatcacagctcgctccattgccatcatgcgccccaacaaccttgtccactttacggagtcaaagctgccccagatggaaacagaaggaatggatgaagggaaggaaccgcagaagcagttggaaggagattgctgtagtttcatcacccagcttgtgaaccacttctggaaactccatgcatccaaacccaagaatgccttcttggcacctgcctgccttccaggactaactcatattgaagctactgtcaatgctctggtggacatcatccatggctactgtacctgtgagctggattgtattaacacagcatccaagatctacatgcagatgctcttgtgtcctgatcctgctgtgagcttctcttgtaaacaagctctaattcgagtcctaaggcccaggaacaaacggagacatgtgactttaccctcttcccctcgaagcaacactccaatgggagacaaggatgatgatgacgatgatgatgcagatgagaaaatgcagtcatcagggatcccgaatggtggtcacatccgtcaggaaagccaggaacagagtgaggtggaccatggagattttgagatggtgtctgagtcgatggtcctggagacagctgaaaatgtcaacaatggcaacccctctcccctggaggccctgctggcaggcgcagagggcttcccccccatgctggacatcccacctgatgcagatgacgagaccatggttgaactagccattgccctgagcctgcagcaggaccaacaaggcagcagcagcagtgccctgggcctgcagagcctgggactgtccggccaggcacccagctcttcctctctggacgcaggaaccctctctgacaccacagcatcagctccagcctcagacgacgagggcagtacagcagcgacagatggttctacccttcggacctctcctgctgaccacggtggtagtgtgggctcggagagcgggggcagtgcagtggactcagtggctggcgagcacagtgtatctggccggagcagtgcttatggcgatgctacagctgaggggcatccggctggaccaggaagtgtcagctcaagcactggagccatcagcaccaccactgggcaccaggagggagatggctccgagggagaaggagaaggagaaactgaaggagatgtccacactagcaacaggctgcacatggtccgtctaatgctgttggagagattactgcagaccctgcctcaattacgaaacgttggcggtgtccgggccatcccatacatgcaggtcattctaatgctcactacagatctggatggagaagatgagaaagacaagggggccctagacaacctgctctcccagcttattgctgagttgggtatggataaaaaggatgtctccaagaagaatgagcgcagcgccctgaatgaagtccatctggtagtaatgagactcctgagtgtcttcatgtcccgcaccaaatctggatccaagtcttccatatgtgagtcatcttccctcatctccagtgccacagcagcagctctactgagctctggggctgtggactactgcctgcacgtgctcaaatcactgctggaatattggaagagccaacagaatgacgaggagcctgtggctaccagccagttgctgaaaccacatactacctcctccccacctgacatgagcccattctttctccgccagtatgtgaagggtcatgctgctgatgtgtttgaggcctatactcagcttctaacagaaatggtactgaggcttccttaccaaatcaaaaagattactgacaccaattctcgaatcccacctcctgtctttgaccactcgtggttttactttctctccgagtacctcatgatccagcagactccatttgtgcgccgtcaagtccgcaaacttctgctcttcatctgtggatccaaagagaagtaccgccagctccgggatttgcacaccctggactctcacgtgcgtgggatcaagaagctgctagaagagcaggggatattcctccgggcaagtgtggttacagccagctcaggctccgccttgcaatatgacacactcatcagcctgatggagcacctgaaagcctgtgcagagattgccgcccagcgaaccatcaactggcagaaattctgcatcaaagatgactccgtcctgtacttcctcctccaagtcagtttccttgtggatgagggcgtgtccccagtgctgctgcaactgctctcctgtgctctgtgcggcagcaaggtgctcgctgcactggcagcctcttcgggatcctccagtgcttcttcctcctcagcccctgtggctgccagttctggacaagccacaacacagtccaagtcttccactaaaaagagcaagaaagaagaaaaagaaaaggagaaagatggtgagacctctggcagccaggaggaccagctgtgcacagctctggtgaaccagctgaacaaatttgccgataaggaaaccctgatccagttcctgcgttgtttcctgttagagtccaattcttcctcggtgcgctggcaggcccactgtctgacactgcacatctacagaaattccagcaaatctcaacaggagctcctgctagatctgatgtggtccatctggccagaactcccagcctatggtcgtaaggctgcccagtttgtggacctactaggatatttctccctgaaaactccacaaacagagaagaagttgaaggagtattcacagaaggctgtggagattctgcggactcaaaaccatattcttaccaaccaccccaactcgaacatttataacactttgtctggcttagtggagtttgatggctattacctggagagcgatccctgcctggtgtgtaataacccggaagtaccgttctgttatatcaagctgtcttccattaaagtggacacgcggtacaccaccacccagcaggttgtgaagctcattggcagtcacaccatcagcaaagtgacagtgaaaatcggggatctgaaacggaccaagatggtgcggaccatcaacctgtattataacaaccgaaccgtgcaggccatcgtggagttgaaaaacaagccagctcgctggcacaaagccaagaaggttcagctgacccctggacagacagaggtgaagattgacctgccgttgcccattgtggcctccaatctgatgattgagtttgcagacttctatgaaaactaccaggcctccacagagaccctgcagtgccctcgctgtagtgcctcggtccctgccaacccaggagtctgtggcaactgtggagagaatgtgtaccagtgtcacaaatgcagatccatcaactacgatgaaaaggatcccttcctctgcaatgcctgtggcttctgtaaatatgcccgcttcgacttcatgctctatgccaagccttgctgtgcagtggatcccattgagaatgaagaagaccggaagaaggctgtatccaacatcaatacacttttggacaaagctgatcgagtgtatcatcagctgatgggacaccggccacagctggagaacctgctctgcaaagtgaatgaggcagctccagaaaagccacaggatgactcaggaacagcagggggcatcagctccacttctgccagtgtgaatcgttacatcctgcagttggctcaggagtattgtggagactgcaagaactcttttgatgaactctccaaaatcatccagaaagtctttgcttcgcgcaaagagttgttggaatatgacctacagcagagggaagcagccactaaatcatcccggacctccgtgcagcccacattcactgccagccagtaccgtgccttatccgtcctgggctgtggccacacatcctccaccaagtgctatggctgcgcctcggctgtcacagaacattgtatcacactacttcgggccctggccaccaacccagccttgaggcacatccttgtctcccagggccttatccgggagctctttgattataatcttcgccgaggggctgcggccatgcgggaggaggtccgccagctcatgtgcctcctaactcgagacaacccagaagccacccaacagatgaatgacctgattattggcaaggtctccacagccctgaagggccactgggccaaccccgatctggcaagtagcctgcagtatgaaatgctgctgctgacggattctatctccaaggaggacagctgctgggagctccggttacgctgtgctctcagccttttcctcatggctgtgaacattaagactcctgtggtggttgaaaacattaccctcatgtgcctgaggatcttgcagaagctgataaaaccacctgctcccactagcaagaagaacaaggatgtccccgttgaggccctcaccacggtgaagccatactgcaatgagatccatgcccaggctcaactgtggctcaagagagaccccaaggcatcctatgatgcctggaagaagtgtcttcctatcagagggatagatggcaatgggaaagcccccagcaaatcagagctccgccatctctatttgactgagaagtatgtgtggaggtggaaacagttcctgagtcgtcgggggaagaggacctcccccttggatctcaaactggggcataacaactggctgcgacaagtgcttttcactccagcaacgcaggccgcacggcaggcagcctgtaccattgtggaagctctagccaccattcccagccgcaagcagcaggtcctggacctgcttaccagttacctggatgagctgagcatagctggggagtgtgcagctgagtacctggctctctaccagaagctcatcacttctgcgcactggaaagtctacttggcagctcggggagtcctaccctatgtgggcaacctcatcaccaaggaaatagctcgtctgctggccctggaggaggctaccctgagtaccgatctgcagcagggttatgcccttaaaagtctcacaggccttctctcctcctttgttgaggtggaatccatcaaaagacattttaaaagtcgcttggtgggtactgtgctgaatggatacctgtgcttgcggaagctggtggtgcagaggaccaagctgatcgatgagacgcaggacatgctgctggagatgctggaggacatgaccacaggtacagaatcagaaaccaaggccttcatggctgtgtgcattgagacagccaagcgctacaatctggatgactaccggaccccggtgttcatcttcgagaggctctgcagcatcatttatcctgaggagaatgaagtcactgagttctttgtgaccctggagaaggatccccaacaagaagacttcttacagggcaggatgcctgggaacccgtatagcagcaatgagccaggcatcgggccgctgatgagggatataaagaacaagatttgccaggactgtgacttagtggccctcctggaagatgacagtggcatggagcttctagtgaacaataaaatcattagtttggaccttcctgtggctgaagtttacaagaaagtctggtgtaccacgaatgagggagagcccatgaggattgtttatcgtatgcgggggctgctgggcgatgccacagaggagttcattgagtccctggactctactacagatgaagaagaagatgaagaagaagtgtataaaatggctggtgtgatggcccagtgtgggggcctggaatgcatgcttaacagactcgcagggatcagagatttcaagcagggacgccaccttctaacagtgctactgaaattgttcagttactgcgtgaaggtgaaagtcaaccggcagcaactggtcaaactggaaatgaacaccttgaacgtcatgctggggaccctaaacctggcccttgtagctgaacaagaaagcaaggacagtgggggtgcagctgtggctgagcaggtgcttagcatcatggagatcattctagatgagtccaatgctgagcccctgagtgaggacaagggcaacctcctcctgacaggtgacaaggatcaactggtgatgctcttggaccagatcaacagcacctttgttcgctccaaccccagtgtgctccagggcctgcttcgcatcatcccgtacctttcctttggagaggtggagaaaatgcagatcttggtggagcgattcaaaccatactgcaactttgataaatatgatgaagatcacagtggtgatgataaagtcttcctggactgcttctgtaaaatagctgctggcatcaagaacaacagcaatgggcaccagctgaaggatctgattctccagaaggggatcacccagaatgcacttgactacatgaaaaagcacatccctagcgccaagaatttggatgccgacatctggaaaaagtttttgtctcgcccagccttgccatttatcctaaggctgcttcggggcctggccatccagcaccctggcacccaggttctgattggaactgattccatcccgaacctgcataagctggagcaggtgtccagtgatgagggcattgggaccttggcagagaacctgctggaagccctgcgggaacaccctgacgtaaacaagaagattgacgcagcccgcagggagacccgggcagagaagaagcgcatggccatggcaatgaggcagaaggccctgggcaccctgggcatgacgacaaatgaaaagggccaggtcgtgaccaagacagcactcctgaagcagatggaagagctgatcgaggagcctggcctcacgtgctgcatctgcagggagggatacaagttccagcccacaaaggtcctgggcatttataccttcacgaagcgggtagccttggaggagatggagaataagccccggaaacagcagggctacagcaccgtgtcccacttcaacattgtgcactacgactgccatctggctgccgtcaggttggctcgaggccgggaagagtgggagagtgccgccctgcagaatgccaacaccaagtgcaacgggctccttccggtctggggacctcatgtccctgaatcagcttttgccacttgcttggcaagacacaacacttacctccaggaatgtacaggccagcgggagcccacgtatcagctcaacatccatgacatcaaactgctcttcctgcgcttcgccatggagcagtcgttcagcgcagacactggcgggggcggccgggagagcaacatccacctgatcccgtacatcattcacactgtgctttacgtcctgaacacaacccgagcaacttcccgagaagagaagaacctccaaggctttctggaacagcccaaggagaagtgggtggagagtgcctttgaagtggacgggccctactatttcacagtcttggcccttcacatcctgccccctgagcagtggagagccacacgtgtggaaatcttgcggaggctgttggtgacctcgcaggctcgggcagtggctccaggtggagccaccaggctgacagataaggcagtgaaggactattccgcttaccgttcttcccttctcttttgggccctcgtcgatctcatttacaacatgtttaagaaggtgcctaccagtaacacagagggaggctggtcctgctctctcgctgagtacatccgccacaacgacatgcccatctacgaagctgccgacaaagccctgaaaaccttccaggaggagttcatgccagtggagaccttctcagagttcctcgatgtggccggtcttttatcagaaatcaccgatccagagagcttcctgaaggacctgttgaactcagtcccctgaccaccacacagcagctgcggcggcgaagacgaagctggcttgccttccaccctctgttctccctccttgtgcattaagttccctccgcgggatgctgcattgttaccccgccctcccctctctcatttttcttggtgtggcttggggtttttaggcttcctgttttatctcgtgtgtgtggtgcaccagctatgaggttgtctgtaacccaagccatcaaagggcctgtacatacctaggagccatgagttgtcccggccagcttcatacttgagtgtgcacatcttgagaaataaacaagtgacttaacacacattgaaaagg

SEQ ID NO: 444 - DNA, 15959 bp, Homo sapiens
agattgcgtcacttccgccccctcctgggaggcggcgctgggccggtggcaagcccccggagggagccgcagtagtacgacggaagatggcgacgagcggcggcgaagaggcggcggcagcggctccggcgccggggaccccggcaacgggggcggacacgaccccgggctgggaggtggctgtgcggcccctgctgtccgcgtcctactccgccttcgagatgaaggagttgccgcagctggtggcctcagtcatcgagagtgaatcagaaatcctgcaccatgagaagcagtacgagccattctactcatcttttgttgcactttccacacactatattacaacagtttgcagtctcattccccggaaccaacttcagtcagtggcagcagcctgtaaagttctaattgagttttctctcctgcgtctggagaatccagatgaggcttgtgctgtgtcccagaaacacttgattctcctaatcaagggcctgtgcactggctgtagccgactagatagaactgaaattatcacatttacagcaatgatgaaatccgccaagctgccccaaacagtgaagacactttcagacgtggaagatcagaaagagctggcctcaccagtaagccctgagttgaggcaaaaggaggtacagatgaattttttgaaccagctgacctcagtttttaaccctagaactgtagcatcacaacctatcagtacacagactctggtggaaggagaaaatgatgagcagtcatctacagatcaagcctcagctatcaaaaccaagaatgtgttcatagctcagaacgtggctagtcttcaagagcttggtggctcggagaagctactgcgtgtatgtttgaacctgccatatttcctacgctatatcaatcggttccaagatgcagttttagctaattccttcttcataatgcctgcaacagtagcagatgccactgctgttcgtaatggctttcattcattggtgattgatgtaactatggcattggataccctttctctacctgtgttggaacctctcaatccttctcgtctacaagatgtgacagtcctcagcctaagttgtctgtatgcaggtgtgagtgtggcaacgtgcatggccatcctccatgtgggtagtgcccagcaagtgcggacagggtccacgagctccaaagaagatgactatgaaagtgacgcagctacaattgtccagaaatgtctcgaaatctatgacatgattggacaagcaatcagcagttctcgccgggctggtggtgagcactatcagaatttccaattgctgggtgcttggtgcttgttaaacagccttttcctcatactgaacctcagtcctactgcgttggctgataaggggaaagagaaggacccactggctgccctccgagtcagagacatcctttctcgtactaaagagggagtgggctcccctaaactggggcctggaaaagggcatcagggatttggggtactctcagtaatattggcaaaccatgccatcaaactgctaacgtctctctttcaagacctacaagtggaggcccttcacaagggttgggagacagatggcccccctgcagccttgagcattatggcccagagcacctccatacagaggattcaacggctgattgactctgtcccactgatgaacctgctcttgacgttactttcaacttcctacagaaaggcatgtgtcctgcagcggcagaggaagggctccatgagcagcgatgccagcgcctccaccgactccaatacttactatgaggacgatttcagtagcacggaggaggacagcagccaagacgatgacagtgagcctattttggggcaatggtttgaggagactatttctcccagtaaagagaaagcagcacctccgcctcctcccccacctcctccactggaaagctctcctcgggttaaaagccccagtaagcaggcccctggtgagaagggcaacattctggcgagtcgcaaagatcctgagttgttcttaggtctggcttccaacattttgaacttcatcacctcttccatgctgaactctcggaacaattttatccgaaactatctgagtgtatctctttcagaacaccatatggccaccctagccagtatcatcaaggaggtggacaaagatggactcaagggttcatcagatgaagagtttgctgcagctctctatcacttcaaccactcactggtaacctctgaccttcagtcacctaacctgcagaacacactgttgcagcagctaggagtggctcctttttctgagggcccttggcccttgtacattcaccctcaaagcctctctgtgctttcacgcctcctgctcatctggcaacataaagccagtgctcaaggtgaccctgacgtcccagaatgccttaaagtttgggacaggtttttgtctacaatgaagcagaatgccctgcaaggtgtggtgcccagtgagacagaggatctgaatgtagaacacctgcagatgctcctcctcattttccacaatttcaccgagacaggccggcgggccatattgtcgctttttgtccagatcatccaggagttgagcgtcaacatggatgctcagatgcgcttcgtgccgcttatcttggctcgcctccttctcatctttgattatctgcttcatcagtactccaaagcccctgtgtatctatttgagcaggtacagcataacctgctaagtcctccctttgggtgggcaagtggatcccaggacagcaacagccgccgggcaaccactcctctctatcatggattcaaagaagtagaagaaaactggtctaagcatttctcatcagatgctgtcccacaccccagattctactgtgtcctgtccccagaagcctcagaggatgatttgaaccgacttgattctgtggcatgtgacgtccttttctccaagcttgtcaagtatgatgagctttatgctgcactgacagccctgcttgcagctgggtcccagcttgatacagttaggagaaaggaaaacaagaatgtaacagccttggaggcctgtgcccttcaatattacttcttgatactgtggaggatcctaggaattttaccaccatcaaagacttacattaaccagctatccatgaactcacctgagatgagcgaatgtgacatcttgcacactctgcgatggtcttctcggctccggatcagctcctatgtcaactggataaaggatcaccttatcaaacagggaatgaaggctgagcatgctagctcgcttctagaactggcatccaccactaagtgtagctcagtgaaatatgatgttgaaatagtagaggaatacttcgctcgacagatctcatccttctgtagtatcgactgtaccaccatcttgcagctgcatgaaattcccagtctgcagtccatctacacccttgatgccgcgatctcaaaggtccaggtctctttggatgagcatttttctaagatggctgctgagactgatcctcataagtcgtctgagattaccaagaacctacttccagccacgctgcaactcattgacacctatgcatcgttcaccagagcctatttgctgcaaaactttaatgaagagggaacaactgagaaaccttccaaggagaaactgcaaggctttgctgctgttttggctattggctctagcaggtgcaaggcaaatactctgggtccgacactggttcagaatttgccatcgtcagtgcagactgtgtgtgagtcctggaacaacatcaataccaatgaatttcccaatattggatcctggcgcaatgcctttgccaatgacaccatcccttcagagagttatattagtgcagtgcaggctgcacacctggggactctctgtagccaaagtctgcccctggctgcttccctgaagcataccctcctctcactggtcaggttgactggagatcttattgtttggtcagatgagatgaacccaccacaggtaattcggacactgctacctcttcttttggaatcaagcactgagagtgttgccgagatcagtagcaactccctggaacgcatcttgggccctgctgagtctgatgagttcttggctcgtgtttatgagaagctgatcactggttgttacaacattctggccaatcatgcagatcctaacagtggactggatgaatccatcctggaggaatgtctccagtacttggaaaagcagctggaaagtagccaggctcgtaaagctatggaggagtttttctctgacagtggagaacttgtacagatcatgatggcaacagccaatgagaacctctctgctaaattctgtaaccgagttttgaaattcttcaccaaactcttccagctgactgagaagagccctaacccgagcctgttgcatctctgtggctccctggcacaactggcctgtgtggaacctgtgcgcctgcaggcctggctcacccgcatgactacatcgcccccaaaagattctgatcagctggatgtaattcaggagaaccggcagctgctgcagttactgaccacatacattgttcgggaaaacagccaagttggggaaggtgtgtgtgctgttcttctgggcaccctgactcccatggcaacagagatgctggccaacggtgatgggactggcttccctgaacttatggttgtgatggccactctggccagtgcaggtcaaggtgctggtcaccttcagcttcataatgctgctgtggattggctgagcagatgcaagaaatacctgtcacagaagaatgtagttgaaaaactgaatgccaatgtaatgcatggaaagcatgtgatgatcttggagtgcacatgccatatcatgtcttacttggctgatgtcacgaatgccctgagccagagtaatggtcaaggcccaagtcatctctcagtggatggggaagagcgggccattgaagtagactcagactgggtggaggagttggcggtggaagaggaagattcccaggctgaggattcagatgaagattctctttgcaataaactctgcacttttacgatcacacagaaagaattcatgaaccagcattggtaccactgtcacacctgtaaaatggtggatggcgtgggtgtctgcacagtgtgtgctaaggtgtgccacaaggatcatgagatttcctatgccaagtatggatccttcttctgtgactgtggagccaaggaagatggcagctgtttggctctggtgaagagaactcctagcagtggcatgagctctaccatgaaggagtcggcatttcagagtgaacccaggatttcagagagtctagtgcgtcatgccagcacctcctcgccagctgacaaagccaaggttaccatcagtgatggaaaggttgctgacgaagagaagcccaagaagagcagcctctgccgcacagtagagggctgccgggaggaattacagaaccaggccaatttctccttcgctcctctcgtgttagacatgcttaatttccttatggatgccattcagaccaacttccagcaagcttcagccgtcgggagcagcagccgtgctcagcaagccctcagtgagctacacactgtggagaaggcagtggagatgacagaccagctgatggttcccaccttagggtcccaggaaggtgcctttgagaatgtgcggatgaattacagtggagaccagggccagaccatccggcagctgatcagtgctcatgtgctcaggcgggtggctatgtgtgtgctctcctctccccatgggcgccgccaacatttggctgtcagccatgagaagggcaagatcaccgttctgcagctctctgcactcctgaagcaagcagattccagcaaaaggaagttaactctgacccgcttggcttctgccccagttccttttactgtgttgagcctcacaggaaatccctgcaaggaagactacttggcggtttgtgggctaaaggactgtcatgtgctcacctttagtagctcaggctctgtttcggatcacttggttttgcaccctcagttggcaacggggaacttcatcatcaaagccgtgtggttacctggttcacagaccgagttagcaattgtcaccgcagactttgttaagatttatgacctgtgtgttgatgccttgagtccaaccttctattttctcctgccaagctcaaagataagagatgttaccttccttttcaatgaggagggaaagaacatcattgttataatgtcttcggctgggtacatctatactcagcttatggaagaggccagcagtgcccagcagggacccttctatgtcactaatgtgttggaaatcaatcatgaggacctgaagcaggacagtaacagccaggtggcgggcggtggtgtgtccgtgtactactcccacgtgttgcagatgttgttcttcagctattgtcaaggcaaatcattcgcagccaccatcagcaggacaaccctggaggtgttgcaactcttccccatcaacatcaaaagttttgttgtctgcagttccaatggtggcagtaagacttctcctgctctttgccagtggtctgaggtgatgaaccaccctggcttggtgtgctgtgtccagcaaactacaggggtgccgctggtagttatggtgaaaccagacacttttcttatccaggagattaagactcttcctgctaaagcgaagatccaagacatggttgctattaggcacacggcctgcaatgagcagcagcggacaacaatgattctgctgtgtgaggatggcagcctgcgcatttacatggccaacgtggagaacacctcctactggctgcagccatccctgcagcccagcagtgtcatcagcatcatgaagcctgttcgaaagcgcaaaacagctacaatcacaacccgcacgtctagccaggtgactttccccattgacttttttgaacacaaccagcagctgacagatgtggagtttggtggtaacgacctcctacaggtctataatgcacaacagataaaacaccggctgaattccactggcatgtatgtggccaacaccaagcccggaggcttcaccattgagattagtaacaacaatagcactatggtgatgacaggcatgcggatccagattgggactcaagcaatagaacgggccccgtcatatatcgagatcttcggcagaactatgcagctcaacctgagtcgctcacgctggtttgacttccccttcaccagagaagaagccctgcaggctgataagaagctgaacctcttcattggggcctcggtggatccagcaggtgtcaccatgatagatgctgtaaaaatttatggcaagactaaggagcagtttggctggcctgatgagcccccagaagaattcccttctgcctctgtcagcaacatctgcccttcaaatctgaaccagagcaacggcactggagatagcgactcagctgcccccactacgaccagtggaactgtcctggagaggctggttgtgagttctttagaagccctggaaagctgctttgccgttggcccaatcatcgagaaggagagaaacaagaatgctgctcaggagctggccactttgctgttgtccctgccagcacctgccagtgtccagcagcagtccaagagccttctggccagcctgcacaccagccgctcggcctaccacagccacaaggatcaggccttgctgagcaaagctgtgcagtgtctcaacacatctagcaaagagggcaaggatttggaccctgaggtgttccagaggctagtgatcacagctcgctccattgccatcatgcgccccaacaaccttgtccactttacggagtcaaagctgccccagatggaaacagactgtttttttcctagatgtgcctgctggagtctagggatagttggcatattgattggggccccacttgaaactccctccccagaaggaatggatgaagggaaggaaccgcagaagcagttggaaggagattgctgtagtttcatcacccagcttgtgaaccacttctggaaactccatgcatccaaacccaagaatgccttcttggcacctgcctgccttccaggactaactcatattgaagctactgtcaatgctctggtggacatcatccatggctactgtacctgtgagctggattgtattaacacagcatccaagatctacatgcagatgctcttgtgtcctgatcctgctgtgagcttctcttgtaaacaagctctaattcgagtcctaaggcccaggaacaaacggagacatgtgactttaccctcttcccctcgaagcaacactccaatgggagacaaggatgatgatgacgatgatgatgcagatgagaaaatgcagtcatcagggatcccgaatggtggtcacatccgtcaggaaagccaggaacagagtgaggtggaccatggagattttgagatggtgtctgagtcgatggtcctggagacagctgaaaatgtcaacaatggcaacccctctcccctggaggccctgctggcaggcgcagagggcttcccccccatgctggacatcccacctgatgcagatgacgagaccatggttgaactagccattgccctgagcctgcagcaggaccaacaagctccagcctcagacgacgagggcagtacagcagcgacagatggttctacccttcggacctctcctgctgaccacggtggtagtgtgggctcggagagcgggggcagtgcagtggactcagtggctggcgagcacagtgtatctggccggagcagtgcttatggcgatgctacagctgaggggcatccggctggaccaggaagtgtcagctcaagcactggagccatcagcaccaccactgggcaccaggagggagatggctccgagggagaaggagaaggagaaactgaaggagatgtccacactagcaacaggctgcacatggtccgtctaatgctgttggagagattactgcagaccctgcctcaattacgaaacgttggcggtgtccgggccatcccatacatgcaggtcattctaatgctcactacagatctggatggagaagatgagaaagacaagggggccctagacaacctgctctcccagcttattgctgagttgggtatggataaaaaggatgtctccaagaagaatgagcgcagcgccctgaatgaagtccatctggtagtaatgagactcctgagtgtcttcatgtcccgcaccaaatctggatccaagtcttccatatgtgagtcatcttccctcatctccagtgccacagcagcagctctactgagctctggggctgtggactactgcctgcacgtgctcaaatcactgctggaatattggaagagccaacagaatgacgaggagcctgtggctaccagccagttgctgaaaccacatactacctcctccccacctgacatgagcccattctttctccgccagtatgtgaagggtcatgctgctgatgtgtttgaggcctatactcagcttctaacagaaatggtactgaggcttccttaccaaatcaaaaagattactgacaccaattctcgaatcccacctcctgtctttgaccactcgtggttttactttctctccgagtacctcatgatccagcagactccatttgtgcgccgtcaagtccgcaaacttctgctcttcatctgtggatccaaagagaagtaccgccagctccgggatttgcacaccctggactctcacgtgcgtgggatcaagaagctgctagaagagcaggggatattcctccgggcaagtgtggttacagccagctcaggctccgccttgcaatatgacacactcatcagcctgatggagcacctgaaagcctgtgcagagattgccgcccagcgaaccatcaactggcagaaattctgcatcaaagatgactccgtcctgtacttcctcctccaagtcagtttccttgtggatgagggcgtgtccccagtgctgctgcaactgctctcctgtgctctgtgcggcagcaaggtgctcgctgcactggcagcctcttcgggatcctccagtgcttcttcctcctcagcccctgtggctgccagttctggacaagccacaacacagtccaagtcttccactaaaaagagcaagaaagaagaaaaagaaaaggagaaagatggtgagacctctggcagccaggaggaccagctgtgcacagctctggtgaaccagctgaacaaatttgccgataaggaaaccctgatccagttcctgcgttgtttcctgttagagtccaattcttcctcggtgcgctggcaggcccactgtctgacactgcacatctacagaaattccagcaaatctcaacaggagctcctgctagatctgatgtggtccatctggccagaactcccagcctatggtcgtaaggctgcccagtttgtggacctactaggatatttctccctgaaaactccacaaacagagaagaagttgaaggagtattcacagaaggctgtggagattctgcggactcaaaaccatattcttaccaaccaccccaactcgaacatttataacactttgtctggcttagtggagtttgatggctattacctggagagcgatccctgcctggtgtgtaataacccggaagtaccgttctgttatatcaagctgtcttccattaaagtggacacgcggtacaccaccacccagcaggttgtgaagctcattggcagtcacaccatcagcaaagtgacagtgaaaatcggggatctgaaacggaccaagatggtgcggaccatcaacctgtattataacaaccgaaccgtgcaggccatcgtggagttgaaaaacaagccagctcgctggcacaaagccaagaaggttcagctgacccctggacagacagaggtgaagattgacctgccgttgcccattgtggcctccaatctgatgattgagtttgcagacttctatgaaaactaccaggcctccacagagaccctgcagtgccctcgctgtagtgcctcggtccctgccaacccaggagtctgtggcaactgtggagagaatgtgtaccagtgtcacaaatgcagatccatcaactacgatgaaaaggatcccttcctctgcaatgcctgtggcttctgtaaatatgcccgcttcgacttcatgctctatgccaagccttgctgtgcagtggatcccattgagaatgaagaagaccggaagaaggctgtatccaacatcaatacacttttggacaaagctgatcgagtgtatcatcagctgatgggacaccggccacagctggagaacctgctctgcaaagtgaatgaggcagctccagaaaagccacaggatgactcaggaacagcagggggcatcagctccacttctgccagtgtgaatcgttacatcctgcagttggctcaggagtattgtggagactgcaagaactcttttgatgaactctccaaaatcatccagaaagtctttgcttcgcgcaaagagttgttggaatatgacctacagcagagggaagcagccactaaatcatcccggacctccgtgcagcccacattcactgccagccagtaccgtgccttatccgtcctgggctgtggccacacatcctccaccaagtgctatggctgcgcctcggctgtcacagaacattgtatcacactacttcgggccctggccaccaacccagccttgaggcacatccttgtctcccagggccttatccgggagctctttgattataatcttcgccgaggggctgcggccatgcgggaggaggtccgccagctcatgtgcctcctaactcgagacaacccagaagccacccaacagatgaatgacctgattattggcaaggtctccacagccctgaagggccactgggccaaccccgatctggcaagtagcctgcagtatgaaatgctgctgctgacggattctatctccaaggaggacagctgctgggagctccggttacgctgtgctctcagccttttcctcatggctgtgaacattaagactcctgtggtggttgaaaacattaccctcatgtgcctgaggatcttgcagaagctgataaaaccacctgctcccactagcaagaagaacaaggatgtccccgttgaggccctcaccacggtgaagccatactgcaatgagatccatgcccaggctcaactgtggctcaagagagaccccaaggcatcctatgatgcctggaagaagtgtcttcctatcagagggatagatggcaatgggaaagcccccagcaaatcagagctccgccatctctatttgactgagaagtatgtgtggaggtggaaacagttcctgagtcgtcgggggaagaggacctcccccttggatctcaaactggggcataacaactggctgcgacaagtgcttttcactccagcaacgcaggccgcacggcaggcagcctgtaccattgtggaagctctagccaccattcccagccgcaagcagcaggtcctggacctgcttaccagttacctggatgagctgagcatagctggggagtgtgcagctgagtacctggctctctaccagaagctcatcacttctgcgcactggaaagtctacttggcagctcggggagtcctaccctatgtgggcaacctcatcaccaaggaaatagctcgtctgctggccctggaggaggctaccctgagtaccgatctgcagcagggttatgcccttaaaagtctcacaggccttctctcctcctttgttgaggtggaatccatcaaaagacattttaaaagtcgcttggtgggtactgtgctgaatggatacctgtgcttgcggaagctggtggtgcagaggaccaagctgatcgatgagacgcaggacatgctgctggagatgctggaggacatgaccacaggtacagaatcagaaaccaaggccttcatggctgtgtgcattgagacagccaagcgctacaatctggatgactaccggaccccggtgttcatcttcgagaggctctgcagcatcatttatcctgaggagaatgaagtcactgagttctttgtgaccctggagaaggatccccaacaagaagacttcttacagggcaggatgcctgggaacccgtatagcagcaatgagccaggcatcgggccgctgatgagggatataaagaacaagatttgccaggactgtgacttagtggccctcctggaagatgacagtggcatggagcttctagtgaacaataaaatcattagtttggaccttcctgtggctgaagtttacaagaaagtctggtgtaccacgaatgagggagagcccatgaggattgtttatcgtatgcgggggctgctgggcgatgccacagaggagttcattgagtccctggactctactacagatgaagaagaagatgaagaagaagtgtataaaatggctggtgtgatggcccagtgtgggggcctggaatgcatgcttaacagactcgcagggatcagagatttcaagcagggacgccaccttctaacagtgctactgaaattgttcagttactgcgtgaaggtgaaagtcaaccggcagcaactggtcaaactggaaatgaacaccttgaacgtcatgctggggaccctaaacctggcccttgtagctgaacaagaaagcaaggacagtgggggtgcagctgtggctgagcaggtgcttagcatcatggagatcattctagatgagtccaatgctgagcccctgagtgaggacaagggcaacctcctcctgacaggtgacaaggatcaactggtgatgctcttggaccagatcaacagcacctttgttcgctccaaccccagtgtgctccagggcctgcttcgcatcatcccgtacctttcctttggagaggtggagaaaatgcagatcttggtggagcgattcaaaccatactgcaactttgataaatatgatgaagatcacagtggtgatgataaagtcttcctggactgcttctgtaaaatagctgctggcatcaagaacaacagcaatgggcaccagctgaaggatctgattctccagaaggggatcacccagaatgcacttgactacatgaaaaagcacatccctagcgccaagaatttggatgccgacatctggaaaaagtttttgtctcgcccagccttgccatttatcctaaggctgcttcggggcctggccatccagcaccctggcacccaggttctgattggaactgattccatcccgaacctgcataagctggagcaggtgtccagtgatgagggcattgggaccttggcagagaacctgctggaagccctgcgggaacaccctgacgtaaacaagaagattgacgcagcccgcagggagacccgggcagagaagaagcgcatggccatggcaatgaggcagaaggccctgggcaccctgggcatgacgacaaatgaaaagggccaggtcgtgaccaagacagcactcctgaagcagatggaagagctgatcgaggagcctggcctcacgtgctgcatctgcagggagggatacaagttccagcccacaaaggtcctgggcatttataccttcacgaagcgggtagccttggaggagatggagaataagccccggaaacagcagggctacagcaccgtgtcccacttcaacattgtgcactacgactgccatctggctgccgtcaggttggctcgaggccgggaagagtgggagagtgccgccctgcagaatgccaacaccaagtgcaacgggctccttccggtctggggacctcatgtccctgaatcagcttttgccacttgcttggcaagacacaacacttacctccaggaatgtacaggccagcgggagcccacgtatcagctcaacatccatgacatcaaactgctcttcctgcgcttcgccatggagcagtcgttcagcgcagacactggcgggggcggccgggagagcaacatccacctgatcccgtacatcattcacactgtgctttacgtcctgaacacaacccgagcaacttcccgagaagagaagaacctccaaggctttctggaacagcccaaggagaagtgggtggagagtgcctttgaagtggacgggccctactatttcacagtcttggcccttcacatcctgccccctgagcagtggagagccacacgtgtggaaatcttgcggaggctgttggtgacctcgcaggctcgggcagtggctccaggtggagccaccaggctgacagataaggcagtgaaggactattccgcttaccgttcttcccttctcttttgggccctcgtcgatctcatttacaacatgtttaagaaggtgcctaccagtaacacagagggaggctggtcctgctctctcgctgagtacatccgccacaacgacatgcccatctacgaagctgccgacaaagccctgaaaaccttccaggaggagttcatgccagtggagaccttctcagagttcctcgatgtggccggtcttttatcagaaatcaccgatccagagagcttcctgaaggacctgttgaactcagtcccctgaccaccacacagcagctgcggcggcgaagacgaagctggcttgccttccaccctctgttctccctccttgtgcattaagttccctccgcgggatgctgcattgttaccccgccctcccctctctcatttttcttggtgtggcttggggtttttaggcttcctgttttatctcgtgtgtgtggtgcaccagctatgaggttgtctgtaacccaagccatcaaagggcctgtacatacctaggagccatgagttgtcccggccagcttcatacttgagtgtgcacatcttgagaaataaacaagtgacttaacacacattgaaaagg

SEQ ID NO: 445 - DNA, 15956 bp, Homo sapiens
agattgcgtcacttccgccccctcctgggaggcggcgctgggccggtggcaagcccccggagggagccgcagtagtacgacggaagatggcgacgagcggcggcgaagaggcggcggcagcggctccggcgccggggaccccggcaacgggggcggacacgaccccgggctgggaggtggctgtgcggcccctgctgtccgcgtcctactccgccttcgagatgaaggagttgccgcagctggtggcctcagtcatcgagagtgaatcagaaatcctgcaccatgagaagcagtacgagccattctactcatcttttgttgcactttccacacactatattacaacagtttgcagtctcattccccggaaccaacttcagtcagtggcagcagcctgtaaagttctaattgagttttctctcctgcgtctggagaatccagatgaggcttgtgctgtgtcccagaaacacttgattctcctaatcaagggcctgtgcactggctgtagccgactagatagaactgaaattatcacatttacagcaatgatgaaatccgccaagctgccccaaacagtgaagacactttcagacgtggaagatcagaaagagctggcctcaccagtaagccctgagttgaggcaaaaggaggtacagatgaattttttgaaccagctgacctcagtttttaaccctagaactgtagcatcacaacctatcagtacacagactctggtggaaggagaaaatgatgagcagtcatctacagatcaagcctcagctatcaaaaccaagaatgtgttcatagctcagaacgtggctagtcttcaagagcttggtggctcggagaagctactgcgtgtatgtttgaacctgccatatttcctacgctatatcaatcggttccaagatgcagttttagctaattccttcttcataatgcctgcaacagtagcagatgccactgctgttcgtaatggctttcattcattggtgattgatgtaactatggcattggataccctttctctacctgtgttggaacctctcaatccttctcgtctacaagatgtgacagtcctcagcctaagttgtctgtatgcaggtgtgagtgtggcaacgtgcatggccatcctccatgtgggtagtgcccagcaagtgcggacagggtccacgagctccaaagaagatgactatgaaagtgacgcagctacaattgtccagaaatgtctcgaaatctatgacatgattggacaagcaatcagcagttctcgccgggctggtggtgagcactatcagaatttccaattgctgggtgcttggtgcttgttaaacagccttttcctcatactgaacctcagtcctactgcgttggctgataaggggaaagagaaggacccactggctgccctccgagtcagagacatcctttctcgtactaaagagggagtgggctcccctaaactggggcctggaaaagggcatcagggatttggggtactctcagtaatattggcaaaccatgccatcaaactgctaacgtctctctttcaagacctacaagtggaggcccttcacaagggttgggagacagatggcccccctgcagccttgagcattatggcccagagcacctccatacagaggattcaacggctgattgactctgtcccactgatgaacctgctcttgacgttactttcaacttcctacagaaaggcatgtgtcctgcagcggcagaggaagggctccatgagcagcgatgccagcgcctccaccgactccaatacttactatgaggacgatttcagtagcacggaggaggacagcagccaagacgatgacagtgagcctattttggggcaatggtttgaggagactatttctcccagtaaagagaaagcagcacctccgcctcctcccccacctcctccactggaaagctctcctcgggttaaaagccccagtaagcaggcccctggtgagaagggcaacattctggcgagtcgcaaagatcctgagttgttcttaggtctggcttccaacattttgaacttcatcacctcttccatgctgaactctcggaacaattttatccgaaactatctgagtgtatctctttcagaacaccatatggccaccctagccagtatcatcaaggaggtggacaaagatggactcaagggttcatcagatgaagagtttgctgcagctctctatcacttcaaccactcactggtaacctctgaccttcagtcacctaacctgcagaacacactgttgcagcagctaggagtggctcctttttctgagggcccttggcccttgtacattcaccctcaaagcctctctgtgctttcacgcctcctgctcatctggcaacataaagccagtgctcaaggtgaccctgacgtcccagaatgccttaaagtttgggacaggtttttgtctacaatgaagcagaatgccctgcaaggtgtggtgcccagtgagacagaggatctgaatgtagaacacctgcagatgctcctcctcattttccacaatttcaccgagacaggccggcgggccatattgtcgctttttgtccagatcatccaggagttgagcgtcaacatggatgctcagatgcgcttcgtgccgcttatcttggctcgcctccttctcatctttgattatctgcttcatcagtactccaaagcccctgtgtatctatttgagcaggtacagcataacctgctaagtcctccctttgggtgggcaagtggatcccaggacagcaacagccgccgggcaaccactcctctctatcatggattcaaagaagtagaagaaaactggtctaagcatttctcatcagatgctgtcccacaccccagattctactgtgtcctgtccccagaagcctcagaggatgatttgaaccgacttgattctgtggcatgtgacgtccttttctccaagcttgtcaagtatgatgagctttatgctgcactgacagccctgcttgcagctgggtcccagcttgatacagttaggagaaaggaaaacaagaatgtaacagccttggaggcctgtgcccttcaatattacttcttgatactgtggaggatcctaggaattttaccaccatcaaagacttacattaaccagctatccatgaactcacctgagatgagcgaatgtgacatcttgcacactctgcgatggtcttctcggctccggatcagctcctatgtcaactggataaaggatcaccttatcaaacagggaatgaaggctgagcatgctagctcgcttctagaactggcatccaccactaagtgtagctcagtgaaatatgatgttgaaatagtagaggaatacttcgctcgacagatctcatccttctgtagtatcgactgtaccaccatcttgcagctgcatgaaattcccagtctgcagtccatctacacccttgatgccgcgatctcaaaggtccaggtctctttggatgagcatttttctaagatggctgctgagactgatcctcataagtcgtctgagattaccaagaacctacttccagccacgctgcaactcattgacacctatgcatcgttcaccagagcctatttgctgcaaaactttaatgaagagggaacaactgagaaaccttccaaggagaaactgcaaggctttgctgctgttttggctattggctctagcaggtgcaaggcaaatactctgggtccgacactggttcagaatttgccatcgtcagtgcagactgtgtgtgagtcctggaacaacatcaataccaatgaatttcccaatattggatcctggcgcaatgcctttgccaatgacaccatcccttcagagagttatattagtgcagtgcaggctgcacacctggggactctctgtagccaaagtctgcccctggctgcttccctgaagcataccctcctctcactggtcaggttgactggagatcttattgtttggtcagatgagatgaacccaccacaggtaattcggacactgctacctcttcttttggaatcaagcactgagagtgttgccgagatcagtagcaactccctggaacgcatcttgggccctgctgagtctgatgagttcttggctcgtgtttatgagaagctgatcactggttgttacaacattctggccaatcatgcagatcctaacagtggactggatgaatccatcctggaggaatgtctccagtacttggaaaagcagctggaaagtagccaggctcgtaaagctatggaggagtttttctctgacagtggagaacttgtacagatcatgatggcaacagccaatgagaacctctctgctaaattctgtaaccgagttttgaaattcttcaccaaactcttccagctgactgagaagagccctaacccgagcctgttgcatctctgtggctccctggcacaactggcctgtgtggaacctgtgcgcctgcaggcctggctcacccgcatgactacatcgcccccaaaagattctgatcagctggatgtaattcaggagaaccggcagctgctgcagttactgaccacatacattgttcgggaaaacagccaagttggggaaggtgtgtgtgctgttcttctgggcaccctgactcccatggcaacagagatgctggccaacggtgatgggactggcttccctgaacttatggttgtgatggccactctggccagtgcaggtcaaggtgctggtcaccttcagcttcataatgctgctgtggattggctgagcagatgcaagaaatacctgtcacagaagaatgtagttgaaaaactgaatgccaatgtaatgcatggaaagcatgtgatgatcttggagtgcacatgccatatcatgtcttacttggctgatgtcacgaatgccctgagccagagtaatggtcaaggcccaagtcatctctcagtggatggggaagagcgggccattgaagtagactcagactgggtggaggagttggcggtggaagaggaagattcccaggctgaggattcagatgaagattctctttgcaataaactctgcacttttacgatcacacagaaagaattcatgaaccagcattggtaccactgtcacacctgtaaaatggtggatggcgtgggtgtctgcacagtgtgtgctaaggtgtgccacaaggatcatgagatttcctatgccaagtatggatccttcttctgtgactgtggagccaaggaagatggcagctgtttggctctggtgaagagaactcctagcagtggcatgagctctaccatgaaggagtcggcatttcagagtgaacccaggatttcagagagtctagtgcgtcatgccagcacctcctcgccagctgacaaagccaaggttaccatcagtgatggaaaggttgctgacgaagagaagcccaagaagagcagcctctgccgcacagtagagggctgccgggaggaattacagaaccaggccaatttctccttcgctcctctcgtgttagacatgcttaatttccttatggatgccattcagaccaacttccagcaagcttcagccgtcgggagcagcagccgtgctcagcaagccctcagtgagctacacactgtggagaaggcagtggagatgacagaccagctgatggttcccaccttagggtcccaggaaggtgcctttgagaatgtgcggatgaattacagtggagaccagggccagaccatccggcagctgatcagtgctcatgtgctcaggcgggtggctatgtgtgtgctctcctctccccatgggcgccgccaacatttggctgtcagccatgagaagggcaagatcaccgttctgcagctctctgcactcctgaagcaagcagattccagcaaaaggaagttaactctgacccgcttggcttctgccccagttccttttactgtgttgagcctcacaggaaatccctgcaaggaagactacttggcggtttgtgggctaaaggactgtcatgtgctcacctttagtagctcaggctctgtttcggatcacttggttttgcaccctcagttggcaacggggaacttcatcatcaaagccgtgtggttacctggttcacagaccgagttagcaattgtcaccgcagactttgttaagatttatgacctgtgtgttgatgccttgagtccaaccttctattttctcctgccaagctcaaagataagagatgttaccttccttttcaatgaggagggaaagaacatcattgttataatgtcttcggctgggtacatctatactcagcttatggaagaggccagcagtgcccagcagggacccttctatgtcactaatgtgttggaaatcaatcatgaggacctgaaggacagtaacagccaggtggcgggcggtggtgtgtccgtgtactactcccacgtgttgcagatgttgttcttcagctattgtcaaggcaaatcattcgcagccaccatcagcaggacaaccctggaggtgttgcaactcttccccatcaacatcaaaagttccaatggtggcagtaagacttctcctgctctttgccagtggtctgaggtgatgaaccaccctggcttggtgtgctgtgtccagcaaactacaggggtgccgctggtagttatggtgaaaccagacacttttcttatccaggagattaagactcttcctgctaaagcgaagatccaagacatggttgctattaggcacacggcctgcaatgagcagcagcggacaacaatgattctgctgtgtgaggatggcagcctgcgcatttacatggccaacgtggagaacacctcctactggctgcagccatccctgcagcccagcagtgtcatcagcatcatgaagcctgttcgaaagcgcaaaacagctacaatcacaacccgcacgtctagccaggtgactttccccattgacttttttgaacacaaccagcagctgacagatgtggagtttggtggtaacgacctcctacaggtctataatgcacaacagataaaacaccggctgaattccactggcatgtatgtggccaacaccaagcccggaggcttcaccattgagattagtaacaacaatagcactatggtgatgacaggcatgcggatccagattgggactcaagcaatagaacgggccccgtcatatatcgagatcttcggcagaactatgcagctcaacctgagtcgctcacgctggtttgacttccccttcaccagagaagaagccctgcaggctgataagaagctgaacctcttcattggggcctcggtggatccagcaggtgtcaccatgatagatgctgtaaaaatttatggcaagactaaggagcagtttggctggcctgatgagcccccagaagaattcccttctgcctctgtcagcaacatctgcccttcaaatctgaaccagagcaacggcactggagatagcgactcagctgcccccactacgaccagtggaactgtcctggagaggctggttgtgagttctttagaagccctggaaagctgctttgccgttggcccaatcatcgagaaggagagaaacaagaatgctgctcaggagctggccactttgctgttgtccctgccagcacctgccagtgtccagcagcagtccaagagccttctggccagcctgcacaccagccgctcggcctaccacagccacaaggatcaggccttgctgagcaaagctgtgcagtgtctcaacacatctagcaaagagggcaaggatttggaccctgaggtgttccagaggctagtgatcacagctcgctccattgccatcatgcgccccaacaaccttgtccactttacggagtcaaagctgccccagatggaaacagaaggaatggatgaagggaaggaaccgcagaagcagttggaaggagattgctgtagtttcatcacccagcttgtgaaccacttctggaaactccatgcatccaaacccaagaatgccttcttggcacctgcctgccttccaggactaactcatattgaagctactgtcaatgctctggtggacatcatccatggctactgtacctgtgagctggattgtattaacacagcatccaagatctacatgcagatgctcttgtgtcctgatcctgctgtgagcttctcttgtaaacaagctctaattcgagtcctaaggcccaggaacaaacggagacatgtgactttaccctcttcccctcgaagcaacactccaatgggagacaaggatgatgatgacgatgatgatgcagatgagaaaatgcagtcatcagggatcccgaatggtggtcacatccgtcaggaaagccaggaacagagtgaggtggaccatggagattttgagatggtgtctgagtcgatggtcctggagacagctgaaaatgtcaacaatggcaacccctctcccctggaggccctgctggcaggcgcagagggcttcccccccatgctggacatcccacctgatgcagatgacgagaccatggttgaactagccattgccctgagcctgcagcaggaccaacaaggcagcagcagcagtgccctgggcctgcagagcctgggactgtccggccaggcacccagctcttcctctctggacgcaggaaccctctctgacaccacagcatcagcctcagacgacgagggcagtacagcagcgacagatggttctacccttcggacctctcctgctgaccacggtggtagtgtgggctcggagagcgggggcagtgcagtggactcagtggctggcgagcacagtgtatctggccggagcagtgcttatggcgatgctacagctgaggggcatccggctggaccaggaagtgtcagctcaagcactggagccatcagcaccaccactgggcaccaggagggagatggctccgagggagaaggagaaggagaaactgaaggagatgtccacactagcaacaggctgcacatggtccgtctaatgctgttggagagattactgcagaccctgcctcaattacgaaacgttggcggtgtccgggccatcccatacatgcaggtcattctaatgctcactacagatctggatggagaagatgagaaagacaagggggccctagacaacctgctctcccagcttattgctgagttgggtatggataaaaaggatgtctccaagaagaatgagcgcagcgccctgaatgaagtccatctggtagtaatgagactcctgagtgtcttcatgtcccgcaccaaatctggatccaagtcttccatatgtgagtcatcttccctcatctccagtgccacagcagcagctctactgagctctggggctgtggactactgcctgcacgtgctcaaatcactgctggaatattggaagagccaacagaatgacgaggagcctgtggctaccagccagttgctgaaaccacatactacctcctccccacctgacatgagcccattctttctccgccagtatgtgaagggtcatgctgctgatgtgtttgaggcctatactcagcttctaacagaaatggtactgaggcttccttaccaaatcaaaaagattactgacaccaattctcgaatcccacctcctgtctttgaccactcgtggttttactttctctccgagtacctcatgatccagcagactccatttgtgcgccgtcaagtccgcaaacttctgctcttcatctgtggatccaaagagaagtaccgccagctccgggatttgcacaccctggactctcacgtgcgtgggatcaagaagctgctagaagagcaggggatattcctccgggcaagtgtggttacagccagctcaggctccgccttgcaatatgacacactcatcagcctgatggagcacctgaaagcctgtgcagagattgccgcccagcgaaccatcaactggcagaaattctgcatcaaagatgactccgtcctgtacttcctcctccaagtcagtttccttgtggatgagggcgtgtccccagtgctgctgcaactgctctcctgtgctctgtgcggcagcaaggtgctcgctgcactggcagcctcttcgggatcctccagtgcttcttcctcctcagcccctgtggctgccagttctggacaagccacaacacagtccaagtcttccactaaaaagagcaagaaagaagaaaaagaaaaggagaaagatggtgagacctctggcagccaggaggaccagctgtgcacagctctggtgaaccagctgaacaaatttgccgataaggaaaccctgatccagttcctgcgttgtttcctgttagagtccaattcttcctcggtgcgctggcaggcccactgtctgacactgcacatctacagaaattccagcaaatctcaacaggagctcctgctagatctgatgtggtccatctggccagaactcccagcctatggtcgtaaggctgcccagtttgtggacctactaggatatttctccctgaaaactccacaaacagagaagaagttgaaggagtattcacagaaggctgtggagattctgcggactcaaaaccatattcttaccaaccaccccaactcgaacatttataacactttgtctggcttagtggagtttgatggctattacctggagagcgatccctgcctggtgtgtaataacccggaagtaccgttctgttatatcaagctgtcttccattaaagtggacacgcggtacaccaccacccagcaggttgtgaagctcattggcagtcacaccatcagcaaagtgacagtgaaaatcggggatctgaaacggaccaagatggtgcggaccatcaacctgtattataacaaccgaaccgtgcaggccatcgtggagttgaaaaacaagccagctcgctggcacaaagccaagaaggttcagctgacccctggacagacagaggtgaagattgacctgccgttgcccattgtggcctccaatctgatgattgagtttgcagacttctatgaaaactaccaggcctccacagagaccctgcagtgccctcgctgtagtgcctcggtccctgccaacccaggagtctgtggcaactgtggagagaatgtgtaccagtgtcacaaatgcagatccatcaactacgatgaaaaggatcccttcctctgcaatgcctgtggcttctgtaaatatgcccgcttcgacttcatgctctatgccaagccttgctgtgcagtggatcccattgagaatgaagaagaccggaagaaggctgtatccaacatcaatacacttttggacaaagctgatcgagtgtatcatcagctgatgggacaccggccacagctggagaacctgctctgcaaagtgaatgaggcagctccagaaaagccacaggatgactcaggaacagcagggggcatcagctccacttctgccagtgtgaatcgttacatcctgcagttggctcaggagtattgtggagactgcaagaactcttttgatgaactctccaaaatcatccagaaagtctttgcttcgcgcaaagagttgttggaatatgacctacagcagagggaagcagccactaaatcatcccggacctccgtgcagcccacattcactgccagccagtaccgtgccttatccgtcctgggctgtggccacacatcctccaccaagtgctatggctgcgcctcggctgtcacagaacattgtatcacactacttcgggccctggccaccaacccagccttgaggcacatccttgtctcccagggccttatccgggagctctttgattataatcttcgccgaggggctgcggccatgcgggaggaggtccgccagctcatgtgcctcctaactcgagacaacccagaagccacccaacagatgaatgacctgattattggcaaggtctccacagccctgaagggccactgggccaaccccgatctggcaagtagcctgcagtatgaaatgctgctgctgacggattctatctccaaggaggacagctgctgggagctccggttacgctgtgctctcagccttttcctcatggctgtgaacattaagactcctgtggtggttgaaaacattaccctcatgtgcctgaggatcttgcagaagctgataaaaccacctgctcccactagcaagaagaacaaggatgtccccgttgaggccctcaccacggtgaagccatactgcaatgagatccatgcccaggctcaactgtggctcaagagagaccccaaggcatcctatgatgcctggaagaagtgtcttcctatcagagggatagatggcaatgggaaagcccccagcaaatcagagctccgccatctctatttgactgagaagtatgtgtggaggtggaaacagttcctgagtcgtcgggggaagaggacctcccccttggatctcaaactggggcataacaactggctgcgacaagtgcttttcactccagcaacgcaggccgcacggcaggcagcctgtaccattgtggaagctctagccaccattcccagccgcaagcagcaggtcctggacctgcttaccagttacctggatgagctgagcatagctggggagtgtgcagctgagtacctggctctctaccagaagctcatcacttctgcgcactggaaagtctacttggcagctcggggagtcctaccctatgtgggcaacctcatcaccaaggaaatagctcgtctgctggccctggaggaggctaccctgagtaccgatctgcagcagggttatgcccttaaaagtctcacaggccttctctcctcctttgttgaggtggaatccatcaaaagacattttaaaagtcgcttggtgggtactgtgctgaatggatacctgtgcttgcggaagctggtggtgcagaggaccaagctgatcgatgagacgcaggacatgctgctggagatgctggaggacatgaccacaggtacagaatcagaaaccaaggccttcatggctgtgtgcattgagacagccaagcgctacaatctggatgactaccggaccccggtgttcatcttcgagaggctctgcagcatcatttatcctgaggagaatgaagtcactgagttctttgtgaccctggagaaggatccccaacaagaagacttcttacagggcaggatgcctgggaacccgtatagcagcaatgagccaggcatcgggccgctgatgagggatataaagaacaagatttgccaggactgtgacttagtggccctcctggaagatgacagtggcatggagcttctagtgaacaataaaatcattagtttggaccttcctgtggctgaagtttacaagaaagtctggtgtaccacgaatgagggagagcccatgaggattgtttatcgtatgcgggggctgctgggcgatgccacagaggagttcattgagtccctggactctactacagatgaagaagaagatgaagaagaagtgtataaaatggctggtgtgatggcccagtgtgggggcctggaatgcatgcttaacagactcgcagggatcagagatttcaagcagggacgccaccttctaacagtgctactgaaattgttcagttactgcgtgaaggtgaaagtcaaccggcagcaactggtcaaactggaaatgaacaccttgaacgtcatgctggggaccctaaacctggcccttgtagctgaacaagaaagcaaggacagtgggggtgcagctgtggctgagcaggtgcttagcatcatggagatcattctagatgagtccaatgctgagcccctgagtgaggacaagggcaacctcctcctgacaggtgacaaggatcaactggtgatgctcttggaccagatcaacagcacctttgttcgctccaaccccagtgtgctccagggcctgcttcgcatcatcccgtacctttcctttggagaggtggagaaaatgcagatcttggtggagcgattcaaaccatactgcaactttgataaatatgatgaagatcacagtggtgatgataaagtcttcctggactgcttctgtaaaatagctgctggcatcaagaacaacagcaatgggcaccagctgaaggatctgattctccagaaggggatcacccagaatgcacttgactacatgaaaaagcacatccctagcgccaagaatttggatgccgacatctggaaaaagtttttgtctcgcccagccttgccatttatcctaaggctgcttcggggcctggccatccagcaccctggcacccaggttctgattggaactgattccatcccgaacctgcataagctggagcaggtgtccagtgatgagggcattgggaccttggcagagaacctgctggaagccctgcgggaacaccctgacgtaaacaagaagattgacgcagcccgcagggagacccgggcagagaagaagcgcatggccatggcaatgaggcagaaggccctgggcaccctgggcatgacgacaaatgaaaagggccaggtcgtgaccaagacagcactcctgaagcagatggaagagctgatcgaggagcctggcctcacgtgctgcatctgcagggagggatacaagttccagcccacaaaggtcctgggcatttataccttcacgaagcgggtagccttggaggagatggagaataagccccggaaacagcagggctacagcaccgtgtcccacttcaacattgtgcactacgactgccatctggctgccgtcaggttggctcgaggccgggaagagtgggagagtgccgccctgcagaatgccaacaccaagtgcaacgggctccttccggtctggggacctcatgtccctgaatcagcttttgccacttgcttggcaagacacaacacttacctccaggaatgtacaggccagcgggagcccacgtatcagctcaacatccatgacatcaaactgctcttcctgcgcttcgccatggagcagtcgttcagcgcagacactggcgggggcggccgggagagcaacatccacctgatcccgtacatcattcacactgtgctttacgtcctgaacacaacccgagcaacttcccgagaagagaagaacctccaaggctttctggaacagcccaaggagaagtgggtggagagtgcctttgaagtggacgggccctactatttcacagtcttggcccttcacatcctgccccctgagcagtggagagccacacgtgtggaaatcttgcggaggctgttggtgacctcgcaggctcgggcagtggctccaggtggagccaccaggctgacagataaggcagtgaaggactattccgcttaccgttcttcccttctcttttgggccctcgtcgatctcatttacaacatgtttaagaaggtgcctaccagtaacacagagggaggctggtcctgctctctcgctgagtacatccgccacaacgacatgcccatctacgaagctgccgacaaagccctgaaaaccttccaggaggagttcatgccagtggagaccttctcagagttcctcgatgtggccggtcttttatcagaaatcaccgatccagagagcttcctgaaggacctgttgaactcagtcccctgaccaccacacagcagctgcggcggcgaagacgaagctggcttgccttccaccctctgttctccctccttgtgcattaagttccctccgcgggatgctgcattgttaccccgccctcccctctctcatttttcttggtgtggcttggggtttttaggcttcctgttttatctcgtgtgtgtggtgcaccagctatgaggttgtctgtaacccaagccatcaaagggcctgtacatacctaggagccatgagttgtcccggccagcttcatacttgagtgtgcacatcttgagaaataaacaagtgacttaacacacattgaaaagg

SEQ ID NO: 446 - DNA, 15908 bp, Homo sapiens
agattgcgtcacttccgccccctcctgggaggcggcgctgggccggtggcaagcccccggagggagccgcagtagtacgacggaagatggcgacgagcggcggcgaagaggcggcggcagcggctccggcgccggggaccccggcaacgggggcggacacgaccccgggctgggaggtggctgtgcggcccctgctgtccgcgtcctactccgccttcgagatgaaggagttgccgcagctggtggcctcagtcatcgagagtgaatcagaaatcctgcaccatgagaagcagtacgagccattctactcatcttttgttgcactttccacacactatattacaacagtttgcagtctcattccccggaaccaacttcagtcagtggcagcagcctgtaaagttctaattgagttttctctcctgcgtctggagaatccagatgaggcttgtgctgtgtcccagaaacacttgattctcctaatcaagggcctgtgcactggctgtagccgactagatagaactgaaattatcacatttacagcaatgatgaaatccgccaagctgccccaaacagtgaagacactttcagacgtggaagatcagaaagagctggcctcaccagtaagccctgagttgaggcaaaaggaggtacagatgaattttttgaaccagctgacctcagtttttaaccctagaactgtagcatcacaacctatcagtacacagactctggtggaaggagaaaatgatgagcagtcatctacagatcaagcctcagctatcaaaaccaagaatgtgttcatagctcagaacgtggctagtcttcaagagcttggtggctcggagaagctactgcgtgtatgtttgaacctgccatatttcctacgctatatcaatcggttccaagatgcagttttagctaattccttcttcataatgcctgcaacagtagcagatgccactgctgttcgtaatggctttcattcattggtgattgatgtaactatggcattggataccctttctctacctgtgttggaacctctcaatccttctcgtctacaagatgtgacagtcctcagcctaagttgtctgtatgcaggtgtgagtgtggcaacgtgcatggccatcctccatgtgggtagtgcccagcaagtgcggacagggtccacgagctccaaagaagatgactatgaaagtgacgcagctacaattgtccagaaatgtctcgaaatctatgacatgattggacaagcaatcagcagttctcgccgggctggtggtgagcactatcagaatttccaattgctgggtgcttggtgcttgttaaacagccttttcctcatactgaacctcagtcctactgcgttggctgataaggggaaagagaaggacccactggctgccctccgagtcagagacatcctttctcgtactaaagagggagtgggctcccctaaactggggcctggaaaagggcatcagggatttggggtactctcagtaatattggcaaaccatgccatcaaactgctaacgtctctctttcaagacctacaagtggaggcccttcacaagggttgggagacagatggcccccctgcagccttgagcattatggcccagagcacctccatacagaggattcaacggctgattgactctgtcccactgatgaacctgctcttgacgttactttcaacttcctacagaaaggcatgtgtcctgcagcggcagaggaagggctccatgagcagcgatgccagcgcctccaccgactccaatacttactatgaggacgatttcagtagcacggaggaggacagcagccaagacgatgacagtgagcctattttggggcaatggtttgaggagactatttctcccagtaaagagaaagcagcacctccgcctcctcccccacctcctccactggaaagctctcctcgggttaaaagccccagtaagcaggcccctggtgagaagggcaacattctggcgagtcgcaaagatcctgagttgttcttaggtctggcttccaacattttgaacttcatcacctcttccatgctgaactctcggaacaattttatccgaaactatctgagtgtatctctttcagaacaccatatggccaccctagccagtatcatcaaggaggtggacaaagatggactcaagggttcatcagatgaagagtttgctgcagctctctatcacttcaaccactcactggtaacctctgaccttcagtcacctaacctgcagaacacactgttgcagcagctaggagtggctcctttttctgagggcccttggcccttgtacattcaccctcaaagcctctctgtgctttcacgcctcctgctcatctggcaacataaagccagtgctcaaggtgaccctgacgtcccagaatgccttaaagtttgggacaggtttttgtctacaatgaagcagaatgccctgcaaggtgtggtgcccagtgagacagaggatctgaatgtagaacacctgcagatgctcctcctcattttccacaatttcaccgagacaggccggcgggccatattgtcgctttttgtccagatcatccaggagttgagcgtcaacatggatgctcagatgcgcttcgtgccgcttatcttggctcgcctccttctcatctttgattatctgcttcatcagtactccaaagcccctgtgtatctatttgagcaggtacagcataacctgctaagtcctccctttgggtgggcaagtggatcccaggacagcaacagccgccgggcaaccactcctctctatcatggattcaaagaagtagaagaaaactggtctaagcatttctcatcagatgctgtcccacaccccagattctactgtgtcctgtccccagaagcctcagaggatgatttgaaccgacttgattctgtggcatgtgacgtccttttctccaagcttgtcaagtatgatgagctttatgctgcactgacagccctgcttgcagctgggtcccagcttgatacagttaggagaaaggaaaacaagaatgtaacagccttggaggcctgtgcccttcaatattacttcttgatactgtggaggatcctaggaattttaccaccatcaaagacttacattaaccagctatccatgaactcacctgagatgagcgaatgtgacatcttgcacactctgcgatggtcttctcggctccggatcagctcctatgtcaactggataaaggatcaccttatcaaacagggaatgaaggctgagcatgctagctcgcttctagaactggcatccaccactaagtgtagctcagtgaaatatgatgttgaaatagtagaggaatacttcgctcgacagatctcatccttctgtagtatcgactgtaccaccatcttgcagctgcatgaaattcccagtctgcagtccatctacacccttgatgccgcgatctcaaaggtccaggtctctttggatgagcatttttctaagatggctgctgagactgatcctcataagtcgtctgagattaccaagaacctacttccagccacgctgcaactcattgacacctatgcatcgttcaccagagcctatttgctgcaaaactttaatgaagagggaacaactgagaaaccttccaaggagaaactgcaaggctttgctgctgttttggctattggctctagcaggtgcaaggcaaatactctgggtccgacactggttcagaatttgccatcgtcagtgcagactgtgtgtgagtcctggaacaacatcaataccaatgaatttcccaatattggatcctggcgcaatgcctttgccaatgacaccatcccttcagagagttatattagtgcagtgcaggctgcacacctggggactctctgtagccaaagtctgcccctggctgcttccctgaagcataccctcctctcactggtcaggttgactggagatcttattgtttggtcagatgagatgaacccaccacaggtaattcggacactgctacctcttcttttggaatcaagcactgagagtgttgccgagatcagtagcaactccctggaacgcatcttgggccctgctgagtctgatgagttcttggctcgtgtttatgagaagctgatcactggttgttacaacattctggccaatcatgcagatcctaacagtggactggatgaatccatcctggaggaatgtctccagtacttggaaaagcagctggaaagtagccaggctcgtaaagctatggaggagtttttctctgacagtggagaacttgtacagatcatgatggcaacagccaatgagaacctctctgctaaattctgtaaccgagttttgaaattcttcaccaaactcttccagctgactgagaagagccctaacccgagcctgttgcatctctgtggctccctggcacaactggcctgtgtggaacctgtgcgcctgcaggcctggctcacccgcatgactacatcgcccccaaaagattctgatcagctggatgtaattcaggagaaccggcagctgctgcagttactgaccacatacattgttcgggaaaacagccaagttggggaaggtgtgtgtgctgttcttctgggcaccctgactcccatggcaacagagatgctggccaacggtgatgggactggcttccctgaacttatggttgtgatggccactctggccagtgcaggtcaaggtgctggtcaccttcagcttcataatgctgctgtggattggctgagcagatgcaagaaatacctgtcacagaagaatgtagttgaaaaactgaatgccaatgtaatgcatggaaagcatgtgatgatcttggagtgcacatgccatatcatgtcttacttggctgatgtcacgaatgccctgagccagagtaatggtcaaggcccaagtcatctctcagtggatggggaagagcgggccattgaagtagactcagactgggtggaggagttggcggtggaagaggaagattcccaggctgaggattcagatgaagattctctttgcaataaactctgcacttttacgatcacacagaaagaattcatgaaccagcattggtaccactgtcacacctgtaaaatggtggatggcgtgggtgtctgcacagtgtgtgctaaggtgtgccacaaggatcatgagatttcctatgccaagtatggatccttcttctgtgactgtggagccaaggaagatggcagctgtttggctctggtgaagagaactcctagcagtggcatgagctctaccatgaaggagtcggcatttcagagtgaacccaggatttcagagagtctagtgcgtcatgccagcacctcctcgccagctgacaaagccaaggttaccatcagtgatggaaaggttgctgacgaagagaagcccaagaagagcagcctctgccgcacagtagagggctgccgggaggaattacagaaccaggccaatttctccttcgctcctctcgtgttagacatgcttaatttccttatggatgccattcagaccaacttccagcaagcttcagccgtcgggagcagcagccgtgctcagcaagccctcagtgagctacacactgtggagaaggcagtggagatgacagaccagctgatggttcccaccttagggtcccaggaaggtgcctttgagaatgtgcggatgaattacagtggagaccagggccagaccatccggcagctgatcagtgctcatgtgctcaggcgggtggctatgtgtgtgctctcctctccccatgggcgccgccaacatttggctgtcagccatgagaagggcaagatcaccgttctgcagctctctgcactcctgaagcaagcagattccagcaaaaggaagttaactctgacccgcttggcttctgccccagttccttttactgtgttgagcctcacaggaaatccctgcaaggaagactacttggcggtttgtgggctaaaggactgtcatgtgctcacctttagtagctcaggctctgtttcggatcacttggttttgcaccctcagttggcaacggggaacttcatcatcaaagccgtgtggttacctggttcacagaccgagttagcaattgtcaccgcagactttgttaagatttatgacctgtgtgttgatgccttgagtccaaccttctattttctcctgccaagctcaaagataagagatgttaccttccttttcaatgaggagggaaagaacatcattgttataatgtcttcggctgggtacatctatactcagcttatggaagaggccagcagtgcccagcagggacccttctatgtcactaatgtgttggaaatcaatcatgaggacctgaagcaggacagtaacagccaggtggcgggcggtggtgtgtccgtgtactactcccacgtgttgcagatgttgttcttcagctattgtcaaggcaaatcattcgcagccaccatcagcaggacaaccctggaggtgttgcaactcttccccatcaacatcaaaagttttgttgtctgcagttccaatggtggcagtaagacttctcctgctctttgccagtggtctgaggtgatgaaccaccctggcttggtgtgctgtgtccagcaaactacaggggtgccgctggtagttatggtgaaaccagacacttttcttatccaggagattaagactcttcctgctaaagcgaagatccaagacatggttgctattaggcacacggcctgcaatgagcagcagcggacaacaatgattctgctgtgtgaggatggcagcctgcgcatttacatggccaacgtggagaacacctcctactggctgcagccatccctgcagcccagcagtgtcatcagcatcatgaagcctgttcgaaagcgcaaaacagctacaatcacaacccgcacgtctagccaggtgactttccccattgacttttttgaacacaaccagcagctgacagatgtggagtttggtggtaacgacctcctacaggtctataatgcacaacagataaaacaccggctgaattccactggcatgtatgtggccaacaccaagcccggaggcttcaccattgagattagtaacaacaatagcactatggtgatgacaggcatgcggatccagattgggactcaagcaatagaacgggccccgtcatatatcgagatcttcggcagaactatgcagctcaacctgagtcgctcacgctggtttgacttccccttcaccagagaagaagccctgcaggctgataagaagctgaacctcttcattggggcctcggtggatccagcaggtgtcaccatgatagatgctgtaaaaatttatggcaagactaaggagcagtttggctggcctgatgagcccccagaagaattcccttctgcctctgtcagcaacatctgcccttcaaatctgaaccagagcaacggcactggagatagcgactcagctgcccccactacgaccagtggaactgtcctggagagttctgaaactgagtccctaaccaagctggaccggctggttgtgagttctttagaagccctggaaagctgctttgccgttggcccaatcatcgagaaggagagaaacaagaatgctgctcaggagctggccactttgctgttgtccctgccagcacctgccagtgtccagcagcagtccaagagccttctggccagcctgcacaccagccgctcggcctaccacagccacaaggatcaggccttgctgagcaaagctgtgcagtgtctcaacacatctagcaaagagggcaaggatttggaccctgaggtgttccagaggctagtgatcacagctcgctccattgccatcatgcgccccaacaaccttgtccactttacggagtcaaagctgccccagatggaaacagaaggaatggatgaagggaaggaaccgcagaagcagttggaaggagattgctgtagtttcatcacccagcttgtgaaccacttctggaaactccatgcatccaaacccaagaatgccttcttggcacctgcctgccttccaggactaactcatattgaagctactgtcaatgctctggtggacatcatccatggctactgtacctgtgagctggattgtattaacacagcatccaagatctacatgcagatgctcttgtgtcctgatcctgctgtgagcttctcttgtaaacaagctctaattcgagtcctaaggcccaggaacaaacggagacatgtgactttaccctcttcccctcgaagcaacactccaatgggagacaaggatgatgatgacgatgatgatgcagatgagaaaatgcagtcatcagggatcccgaatggtggtcacatccgtcaggaaagccaggaacagagtgaggtggaccatggagattttgagatggtgtctgagtcgatggtcctggagacagctgaaaatgtcaacaatggcaacccctctcccctggaggccctgctggcaggcgcagagggcttcccccccatgctggacatcccacctgatgcagatgacgagaccatggttgaactagccattgccctgagcctgcagcaggaccaacaagctccagcctcagacgacgagggcagtacagcagcgacagatggttctacccttcggacctctcctgctgaccacggtggtagtgtgggctcggagagcgggggcagtgcagtggactcagtggctggcgagcacagtgtatctggccggagcagtgcttatggcgatgctacagctgaggggcatccggctggaccaggaagtgtcagctcaagcactggagccatcagcaccaccactgggcaccaggagggagatggctccgagggagaaggagaaggagaaactgaaggagatgtccacactagcaacaggctgcacatggtccgtctaatgctgttggagagattactgcagaccctgcctcaattacgaaacgttggcggtgtccgggccatcccatacatgcaggtcattctaatgctcactacagatctggatggagaagatgagaaagacaagggggccctagacaacctgctctcccagcttattgctgagttgggtatggataaaaaggatgtctccaagaagaatgagcgcagcgccctgaatgaagtccatctggtagtaatgagactcctgagtgtcttcatgtcccgcaccaaatctggatccaagtcttccatatgtgagtcatcttccctcatctccagtgccacagcagcagctctactgagctctggggctgtggactactgcctgcacgtgctcaaatcactgctggaatattggaagagccaacagaatgacgaggagcctgtggctaccagccagttgctgaaaccacatactacctcctccccacctgacatgagcccattctttctccgccagtatgtgaagggtcatgctgctgatgtgtttgaggcctatactcagcttctaacagaaatggtactgaggcttccttaccaaatcaaaaagattactgacaccaattctcgaatcccacctcctgtctttgaccactcgtggttttactttctctccgagtacctcatgatccagcagactccatttgtgcgccgtcaagtccgcaaacttctgctcttcatctgtggatccaaagagaagtaccgccagctccgggatttgcacaccctggactctcacgtgcgtgggatcaagaagctgctagaagagcaggggatattcctccgggcaagtgtggttacagccagctcaggctccgccttgcaatatgacacactcatcagcctgatggagcacctgaaagcctgtgcagagattgccgcccagcgaaccatcaactggcagaaattctgcatcaaagatgactccgtcctgtacttcctcctccaagtcagtttccttgtggatgagggcgtgtccccagtgctgctgcaactgctctcctgtgctctgtgcggcagcaaggtgctcgctgcactggcagcctcttcgggatcctccagtgcttcttcctcctcagcccctgtggctgccagttctggacaagccacaacacagtccaagtcttccactaaaaagagcaagaaagaagaaaaagaaaaggagaaagatggtgagacctctggcagccaggaggaccagctgtgcacagctctggtgaaccagctgaacaaatttgccgataaggaaaccctgatccagttcctgcgttgtttcctgttagagtccaattcttcctcggtgcgctggcaggcccactgtctgacactgcacatctacagaaattccagcaaatctcaacaggagctcctgctagatctgatgtggtccatctggccagaactcccagcctatggtcgtaaggctgcccagtttgtggacctactaggatatttctccctgaaaactccacaaacagagaagaagttgaaggagtattcacagaaggctgtggagattctgcggactcaaaaccatattcttaccaaccaccccaactcgaacatttataacactttgtctggcttagtggagtttgatggctattacctggagagcgatccctgcctggtgtgtaataacccggaagtaccgttctgttatatcaagctgtcttccattaaagtggacacgcggtacaccaccacccagcaggttgtgaagctcattggcagtcacaccatcagcaaagtgacagtgaaaatcggggatctgaaacggaccaagatggtgcggaccatcaacctgtattataacaaccgaaccgtgcaggccatcgtggagttgaaaaacaagccagctcgctggcacaaagccaagaaggttcagctgacccctggacagacagaggtgaagattgacctgccgttgcccattgtggcctccaatctgatgattgagtttgcagacttctatgaaaactaccaggcctccacagagaccctgcagtgccctcgctgtagtgcctcggtccctgccaacccaggagtctgtggcaactgtggagagaatgtgtaccagtgtcacaaatgcagatccatcaactacgatgaaaaggatcccttcctctgcaatgcctgtggcttctgtaaatatgcccgcttcgacttcatgctctatgccaagccttgctgtgcagtggatcccattgagaatgaagaagaccggaagaaggctgtatccaacatcaatacacttttggacaaagctgatcgagtgtatcatcagctgatgggacaccggccacagctggagaacctgctctgcaaagtgaatgaggcagctccagaaaagccacaggatgactcaggaacagcagggggcatcagctccacttctgccagtgtgaatcgttacatcctgcagttggctcaggagtattgtggagactgcaagaactcttttgatgaactctccaaaatcatccagaaagtctttgcttcgcgcaaagagttgttggaatatgacctacagcagagggaagcagccactaaatcatcccggacctccgtgcagcccacattcactgccagccagtaccgtgccttatccgtcctgggctgtggccacacatcctccaccaagtgctatggctgcgcctcggctgtcacagaacattgtatcacactacttcgggccctggccaccaacccagccttgaggcacatccttgtctcccagggccttatccgggagctctttgattataatcttcgccgaggggctgcggccatgcgggaggaggtccgccagctcatgtgcctcctaactcgagacaacccagaagccacccaacagatgaatgacctgattattggcaaggtctccacagccctgaagggccactgggccaaccccgatctggcaagtagcctgcagtatgaaatgctgctgctgacggattctatctccaaggaggacagctgctgggagctccggttacgctgtgctctcagccttttcctcatggctgtgaacattaagactcctgtggtggttgaaaacattaccctcatgtgcctgaggatcttgcagaagctgataaaaccacctgctcccactagcaagaagaacaaggatgtccccgttgaggccctcaccacggtgaagccatactgcaatgagatccatgcccaggctcaactgtggctcaagagagaccccaaggcatcctatgatgcctggaagaagtgtcttcctatcagagggatagatggcaatgggaaagcccccagcaaatcagagctccgccatctctatttgactgagaagtatgtgtggaggtggaaacagttcctgagtcgtcgggggaagaggacctcccccttggatctcaaactggggcataacaactggctgcgacaagtgcttttcactccagcaacgcaggccgcacggcaggcagcctgtaccattgtggaagctctagccaccattcccagccgcaagcagcaggtcctggacctgcttaccagttacctggatgagctgagcatagctggggagtgtgcagctgagtacctggctctctaccagaagctcatcacttctgcgcactggaaagtctacttggcagctcggggagtcctaccctatgtgggcaacctcatcaccaaggaaatagctcgtctgctggccctggaggaggctaccctgagtaccgatctgcagcagggttatgcccttaaaagtctcacaggccttctctcctcctttgttgaggtggaatccatcaaaagacattttaaaagtcgcttggtgggtactgtgctgaatggatacctgtgcttgcggaagctggtggtgcagaggaccaagctgatcgatgagacgcaggacatgctgctggagatgctggaggacatgaccacaggtacagaatcagaaaccaaggccttcatggctgtgtgcattgagacagccaagcgctacaatctggatgactaccggaccccggtgttcatcttcgagaggctctgcagcatcatttatcctgaggagaatgaagtcactgagttctttgtgaccctggagaaggatccccaacaagaagacttcttacagggcaggatgcctgggaacccgtatagcagcaatgagccaggcatcgggccgctgatgagggatataaagaacaagatttgccaggactgtgacttagtggccctcctggaagatgacagtggcatggagcttctagtgaacaataaaatcattagtttggaccttcctgtggctgaagtttacaagaaagtctggtgtaccacgaatgagggagagcccatgaggattgtttatcgtatgcgggggctgctgggcgatgccacagaggagttcattgagtccctggactctactacagatgaagaagaagatgaagaagaagtgtataaaatggctggtgtgatggcccagtgtgggggcctggaatgcatgcttaacagactcgcagggatcagagatttcaagcagggacgccaccttctaacagtgctactgaaattgttcagttactgcgtgaaggtgaaagtcaaccggcagcaactggtcaaactggaaatgaacaccttgaacgtcatgctggggaccctaaacctggcccttgtagctgaacaagaaagcaaggacagtgggggtgcagctgtggctgagcaggtgcttagcatcatggagatcattctagatgagtccaatgctgagcccctgagtgaggacaagggcaacctcctcctgacaggtgacaaggatcaactggtgatgctcttggaccagatcaacagcacctttgttcgctccaaccccagtgtgctccagggcctgcttcgcatcatcccgtacctttcctttggagaggtggagaaaatgcagatcttggtggagcgattcaaaccatactgcaactttgataaatatgatgaagatcacagtggtgatgataaagtcttcctggactgcttctgtaaaatagctgctggcatcaagaacaacagcaatgggcaccagctgaaggatctgattctccagaaggggatcacccagaatgcacttgactacatgaaaaagcacatccctagcgccaagaatttggatgccgacatctggaaaaagtttttgtctcgcccagccttgccatttatcctaaggctgcttcggggcctggccatccagcaccctggcacccaggttctgattggaactgattccatcccgaacctgcataagctggagcaggtgtccagtgatgagggcattgggaccttggcagagaacctgctggaagccctgcgggaacaccctgacgtaaacaagaagattgacgcagcccgcagggagacccgggcagagaagaagcgcatggccatggcaatgaggcagaaggccctgggcaccctgggcatgacgacaaatgaaaagggccaggtcgtgaccaagacagcactcctgaagcagatggaagagctgatcgaggagcctggcctcacgtgctgcatctgcagggagggatacaagttccagcccacaaaggtcctgggcatttataccttcacgaagcgggtagccttggaggagatggagaataagccccggaaacagcagggctacagcaccgtgtcccacttcaacattgtgcactacgactgccatctggctgccgtcaggttggctcgaggccgggaagagtgggagagtgccgccctgcagaatgccaacaccaagtgcaacgggctccttccggtctggggacctcatgtccctgaatcagcttttgccacttgcttggcaagacacaacacttacctccaggaatgtacaggccagcgggagcccacgtatcagctcaacatccatgacatcaaactgctcttcctgcgcttcgccatggagcagtcgttcagcgcagacactggcgggggcggccgggagagcaacatccacctgatcccgtacatcattcacactgtgctttacgtcctgaacacaacccgagcaacttcccgagaagagaagaacctccaaggctttctggaacagcccaaggagaagtgggtggagagtgcctttgaagtggacgggccctactatttcacagtcttggcccttcacatcctgccccctgagcagtggagagccacacgtgtggaaatcttgcggaggctgttggtgacctcgcaggctcgggcagtggctccaggtggagccaccaggctgacagataaggcagtgaaggactattccgcttaccgttcttcccttctcttttgggccctcgtcgatctcatttacaacatgtttaagaaggtgcctaccagtaacacagagggaggctggtcctgctctctcgctgagtacatccgccacaacgacatgcccatctacgaagctgccgacaaagccctgaaaaccttccaggaggagttcatgccagtggagaccttctcagagttcctcgatgtggccggtcttttatcagaaatcaccgatccagagagcttcctgaaggacctgttgaactcagtcccctgaccaccacacagcagctgcggcggcgaagacgaagctggcttgccttccaccctctgttctccctccttgtgcattaagttccctccgcgggatgctgcattgttaccccgccctcccctctctcatttttcttggtgtggcttggggtttttaggcttcctgttttatctcgtgtgtgtggtgcaccagctatgaggttgtctgtaacccaagccatcaaagggcctgtacatacctaggagccatgagttgtcccggccagcttcatacttgagtgtgcacatcttgagaaataaacaagtgacttaacacacattgaaaagg

SEQ ID NO: 447 - DNA, 15857 bp, Homo sapiens
agattgcgtcacttccgccccctcctgggaggcggcgctgggccggtggcaagcccccggagggagccgcagtagtacgacggaagatggcgacgagcggcggcgaagaggcggcggcagcggctccggcgccggggaccccggcaacgggggcggacacgaccccgggctgggaggtggctgtgcggcccctgctgtccgcgtcctactccgccttcgagatgaaggagttgccgcagctggtggcctcagtcatcgagagtgaatcagaaatcctgcaccatgagaagcagtacgagccattctactcatcttttgttgcactttccacacactatattacaacagtttgcagtctcattccccggaaccaacttcagtcagtggcagcagcctgtaaagttctaattgagttttctctcctgcgtctggagaatccagatgaggcttgtgctgtgtcccagaaacacttgattctcctaatcaagggcctgtgcactggctgtagccgactagatagaactgaaattatcacatttacagcaatgatgaaatccgccaagctgccccaaacagtgaagacactttcagacgtggaagatcagaaagagctggcctcaccagtaagccctgagttgaggcaaaaggaggtacagatgaattttttgaaccagctgacctcagtttttaaccctagaactgtagcatcacaacctatcagtacacagactctggtggaaggagaaaatgatgagcagtcatctacagatcaagcctcagctatcaaaaccaagaatgtgttcatagctcagaacgtggctagtcttcaagagcttggtggctcggagaagctactgcgtgtatgtttgaacctgccatatttcctacgctatatcaatcggttccaagatgcagttttagctaattccttcttcataatgcctgcaacagtagcagatgccactgctgttcgtaatggctttcattcattggtgattgatgtaactatggcattggataccctttctctacctgtgttggaacctctcaatccttctcgtctacaagatgtgacagtcctcagcctaagttgtctgtatgcaggtgtgagtgtggcaacgtgcatggccatcctccatgtgggtagtgcccagcaagtgcggacagggtccacgagctccaaagaagatgactatgaaagtgacgcagctacaattgtccagaaatgtctcgaaatctatgacatgattggacaagcaatcagcagttctcgccgggctggtggtgagcactatcagaatttccaattgctgggtgcttggtgcttgttaaacagccttttcctcatactgaacctcagtcctactgcgttggctgataaggggaaagagaaggacccactggctgccctccgagtcagagacatcctttctcgtactaaagagggagtgggctcccctaaactggggcctggaaaagggcatcagggatttggggtactctcagtaatattggcaaaccatgccatcaaactgctaacgtctctctttcaagacctacaagtggaggcccttcacaagggttgggagacagatggcccccctgcagccttgagcattatggcccagagcacctccatacagaggattcaacggctgattgactctgtcccactgatgaacctgctcttgacgttactttcaacttcctacagaaaggcatgtgtcctgcagcggcagaggaagggctccatgagcagcgatgccagcgcctccaccgactccaatacttactatgaggacgatttcagtagcacggaggaggacagcagccaagacgatgacagtgagcctattttggggcaatggtttgaggagactatttctcccagtaaagagaaagcagcacctccgcctcctcccccacctcctccactggaaagctctcctcgggttaaaagccccagtaagcaggcccctggtgagaagggcaacattctggcgagtcgcaaagatcctgagttgttcttaggtctggcttccaacattttgaacttcatcacctcttccatgctgaactctcggaacaattttatccgaaactatctgagtgtatctctttcagaacaccatatggccaccctagccagtatcatcaaggaggtggacaaagatggactcaagggttcatcagatgaagagtttgctgcagctctctatcacttcaaccactcactggtaacctctgaccttcagtcacctaacctgcagaacacactgttgcagcagctaggagtggctcctttttctgagggcccttggcccttgtacattcaccctcaaagcctctctgtgctttcacgcctcctgctcatctggcaacataaagccagtgctcaaggtgaccctgacgtcccagaatgccttaaagtttgggacaggtttttgtctacaatgaagcagaatgccctgcaaggtgtggtgcccagtgagacagaggatctgaatgtagaacacctgcagatgctcctcctcattttccacaatttcaccgagacaggccggcgggccatattgtcgctttttgtccagatcatccaggagttgagcgtcaacatggatgctcagatgcgcttcgtgccgcttatcttggctcgcctccttctcatctttgattatctgcttcatcagtactccaaagcccctgtgtatctatttgagcaggtacagcataacctgctaagtcctccctttgggtgggcaagtggatcccaggacagcaacagccgccgggcaaccactcctctctatcatggattcaaagaagtagaagaaaactggtctaagcatttctcatcagatgctgtcccacaccccagattctactgtgtcctgtccccagaagcctcagaggatgatttgaaccgacttgattctgtggcatgtgacgtccttttctccaagcttgtcaagtatgatgagctttatgctgcactgacagccctgcttgcagctgggtcccagcttgatacagttaggagaaaggaaaacaagaatgtaacagccttggaggcctgtgcccttcaatattacttcttgatactgtggaggatcctaggaattttaccaccatcaaagacttacattaaccagctatccatgaactcacctgagatgagcgaatgtgacatcttgcacactctgcgatggtcttctcggctccggatcagctcctatgtcaactggataaaggatcaccttatcaaacagggaatgaaggctgagcatgctagctcgcttctagaactggcatccaccactaagtgtagctcagtgaaatatgatgttgaaatagtagaggaatacttcgctcgacagatctcatccttctgtagtatcgactgtaccaccatcttgcagctgcatgaaattcccagtctgcagtccatctacacccttgatgccgcgatctcaaaggtccaggtctctttggatgagcatttttctaagatggctgctgagactgatcctcataagtcgtctgagattaccaagaacctacttccagccacgctgcaactcattgacacctatgcatcgttcaccagagcctatttgctgcaaaactttaatgaagagggaacaactgagaaaccttccaaggagaaactgcaaggctttgctgctgttttggctattggctctagcaggtgcaaggcaaatactctgggtccgacactggttcagaatttgccatcgtcagtgcagactgtgtgtgagtcctggaacaacatcaataccaatgaatttcccaatattggatcctggcgcaatgcctttgccaatgacaccatcccttcagagagttatattagtgcagtgcaggctgcacacctggggactctctgtagccaaagtctgcccctggctgcttccctgaagcataccctcctctcactggtcaggttgactggagatcttattgtttggtcagatgagatgaacccaccacaggtaattcggacactgctacctcttcttttggaatcaagcactgagagtgttgccgagatcagtagcaactccctggaacgcatcttgggccctgctgagtctgatgagttcttggctcgtgtttatgagaagctgatcactggttgttacaacattctggccaatcatgcagatcctaacagtggactggatgaatccatcctggaggaatgtctccagtacttggaaaagcagctggaaagtagccaggctcgtaaagctatggaggagtttttctctgacagtggagaacttgtacagatcatgatggcaacagccaatgagaacctctctgctaaattctgtaaccgagttttgaaattcttcaccaaactcttccagctgactgagaagagccctaacccgagcctgttgcatctctgtggctccctggcacaactggcctgtgtggaacctgtgcgcctgcaggcctggctcacccgcatgactacatcgcccccaaaagattctgatcagctggatgtaattcaggagaaccggcagctgctgcagttactgaccacatacattgttcgggaaaacagccaagttggggaaggtgtgtgtgctgttcttctgggcaccctgactcccatggcaacagagatgctggccaacggtgatgggactggcttccctgaacttatggttgtgatggccactctggccagtgcaggtcaaggtgctggtcaccttcagcttcataatgctgctgtggattggctgagcagatgcaagaaatacctgtcacagaagaatgtagttgaaaaactgaatgccaatgtaatgcatggaaagcatgtgatgatcttggagtgcacatgccatatcatgtcttacttggctgatgtcacgaatgccctgagccagagtaatggtcaaggcccaagtcatctctcagtggatggggaagagcgggccattgaagtagactcagactgggtggaggagttggcggtggaagaggaagattcccaggctgaggattcagatgaagattctctttgcaataaactctgcacttttacgatcacacagaaagaattcatgaaccagcattggtaccactgtcacacctgtaaaatggtggatggcgtgggtgtctgcacagtgtgtgctaaggtgtgccacaaggatcatgagatttcctatgccaagtatggatccttcttctgtgactgtggagccaaggaagatggcagctgtttggctctggtgaagagaactcctagcagtggcatgagctctaccatgaaggagtcggcatttcagagtgaacccaggatttcagagagtctagtgcgtcatgccagcacctcctcgccagctgacaaagccaaggttaccatcagtgatggaaaggttgctgacgaagagaagcccaagaagagcagcctctgccgcacagtagagggctgccgggaggaattacagaaccaggccaatttctccttcgctcctctcgtgttagacatgcttaatttccttatggatgccattcagaccaacttccagcaagcttcagccgtcgggagcagcagccgtgctcagcaagccctcagtgagctacacactgtggagaaggcagtggagatgacagaccagctgatggttcccaccttagggtcccaggaaggtgcctttgagaatgtgcggatgaattacagtggagaccagggccagaccatccggcagctgatcagtgctcatgtgctcaggcgggtggctatgtgtgtgctctcctctccccatgggcgccgccaacatttggctgtcagccatgagaagggcaagatcaccgttctgcagctctctgcactcctgaagcaagcagattccagcaaaaggaagttaactctgacccgcttggcttctgccccagttccttttactgtgttgagcctcacaggaaatccctgcaaggaagactacttggcggtttgtgggctaaaggactgtcatgtgctcacctttagtagctcaggctctgtttcggatcacttggttttgcaccctcagttggcaacggggaacttcatcatcaaagccgtgtggttacctggttcacagaccgagttagcaattgtcaccgcagactttgttaagatttatgacctgtgtgttgatgccttgagtccaaccttctattttctcctgccaagctcaaagataagagatgttaccttccttttcaatgaggagggaaagaacatcattgttataatgtcttcggctgggtacatctatactcagcttatggaagaggccagcagtgcccagcagggacccttctatgtcactaatgtgttggaaatcaatcatgaggacctgaaggacagtaacagccaggtggcgggcggtggtgtgtccgtgtactactcccacgtgttgcagatgttgttcttcagctattgtcaaggcaaatcattcgcagccaccatcagcaggacaaccctggaggtgttgcaactcttccccatcaacatcaaaagttccaatggtggcagtaagacttctcctgctctttgccagtggtctgaggtgatgaaccaccctggcttggtgtgctgtgtccagcaaactacaggggtgccgctggtagttatggtgaaaccagacacttttcttatccaggagattaagactcttcctgctaaagcgaagatccaagacatggttgctattaggcacacggcctgcaatgagcagcagcggacaacaatgattctgctgtgtgaggatggcagcctgcgcatttacatggccaacgtggagaacacctcctactggctgcagccatccctgcagcccagcagtgtcatcagcatcatgaagcctgttcgaaagcgcaaaacagctacaatcacaacccgcacgtctagccaggtgactttccccattgacttttttgaacacaaccagcagctgacagatgtggagtttggtggtaacgacctcctacaggtctataatgcacaacagataaaacaccggctgaattccactggcatgtatgtggccaacaccaagcccggaggcttcaccattgagattagtaacaacaatagcactatggtgatgacaggcatgcggatccagattgggactcaagcaatagaacgggccccgtcatatatcgagatcttcggcagaactatgcagctcaacctgagtcgctcacgctggtttgacttccccttcaccagagaagaagccctgcaggctgataagaagctgaacctcttcattggggcctcggtggatccagcaggtgtcaccatgatagatgctgtaaaaatttatggcaagactaaggagcagtttggctggcctgatgagcccccagaagaattcccttctgcctctgtcagcaacatctgcccttcaaatctgaaccagagcaacggcactggagatagcgactcagctgcccccactacgaccagtggaactgtcctggagaggctggttgtgagttctttagaagccctggaaagctgctttgccgttggcccaatcatcgagaaggagagaaacaagaatgctgctcaggagctggccactttgctgttgtccctgccagcacctgccagtgtccagcagcagtccaagagccttctggccagcctgcacaccagccgctcggcctaccacagccacaaggatcaggccttgctgagcaaagctgtgcagtgtctcaacacatctagcaaagagggcaaggatttggaccctgaggtgttccagaggctagtgatcacagctcgctccattgccatcatgcgccccaacaaccttgtccactttacggagtcaaagctgccccagatggaaacagaaggaatggatgaagggaaggaaccgcagaagcagttggaaggagattgctgtagtttcatcacccagcttgtgaaccacttctggaaactccatgcatccaaacccaagaatgccttcttggcacctgcctgccttccaggactaactcatattgaagctactgtcaatgctctggtggacatcatccatggctactgtacctgtgagctggattgtattaacacagcatccaagatctacatgcagatgctcttgtgtcctgatcctgctgtgagcttctcttgtaaacaagctctaattcgagtcctaaggcccaggaacaaacggagacatgtgactttaccctcttcccctcgaagcaacactccaatgggagacaaggatgatgatgacgatgatgatgcagatgagaaaatgcagtcatcagggatcccgaatggtggtcacatccgtcaggaaagccaggaacagagtgaggtggaccatggagattttgagatggtgtctgagtcgatggtcctggagacagctgaaaatgtcaacaatggcaacccctctcccctggaggccctgctggcaggcgcagagggcttcccccccatgctggacatcccacctgatgcagatgacgagaccatggttgaactagccattgccctgagcctgcagcaggaccaacaagctccagcctcagacgacgagggcagtacagcagcgacagatggttctacccttcggacctctcctgctgaccacggtggtagtgtgggctcggagagcgggggcagtgcagtggactcagtggctggcgagcacagtgtatctggccggagcagtgcttatggcgatgctacagctgaggggcatccggctggaccaggaagtgtcagctcaagcactggagccatcagcaccaccactgggcaccaggagggagatggctccgagggagaaggagaaggagaaactgaaggagatgtccacactagcaacaggctgcacatggtccgtctaatgctgttggagagattactgcagaccctgcctcaattacgaaacgttggcggtgtccgggccatcccatacatgcaggtcattctaatgctcactacagatctggatggagaagatgagaaagacaagggggccctagacaacctgctctcccagcttattgctgagttgggtatggataaaaaggatgtctccaagaagaatgagcgcagcgccctgaatgaagtccatctggtagtaatgagactcctgagtgtcttcatgtcccgcaccaaatctggatccaagtcttccatatgtgagtcatcttccctcatctccagtgccacagcagcagctctactgagctctggggctgtggactactgcctgcacgtgctcaaatcactgctggaatattggaagagccaacagaatgacgaggagcctgtggctaccagccagttgctgaaaccacatactacctcctccccacctgacatgagcccattctttctccgccagtatgtgaagggtcatgctgctgatgtgtttgaggcctatactcagcttctaacagaaatggtactgaggcttccttaccaaatcaaaaagattactgacaccaattctcgaatcccacctcctgtctttgaccactcgtggttttactttctctccgagtacctcatgatccagcagactccatttgtgcgccgtcaagtccgcaaacttctgctcttcatctgtggatccaaagagaagtaccgccagctccgggatttgcacaccctggactctcacgtgcgtgggatcaagaagctgctagaagagcaggggatattcctccgggcaagtgtggttacagccagctcaggctccgccttgcaatatgacacactcatcagcctgatggagcacctgaaagcctgtgcagagattgccgcccagcgaaccatcaactggcagaaattctgcatcaaagatgactccgtcctgtacttcctcctccaagtcagtttccttgtggatgagggcgtgtccccagtgctgctgcaactgctctcctgtgctctgtgcggcagcaaggtgctcgctgcactggcagcctcttcgggatcctccagtgcttcttcctcctcagcccctgtggctgccagttctggacaagccacaacacagtccaagtcttccactaaaaagagcaagaaagaagaaaaagaaaaggagaaagatggtgagacctctggcagccaggaggaccagctgtgcacagctctggtgaaccagctgaacaaatttgccgataaggaaaccctgatccagttcctgcgttgtttcctgttagagtccaattcttcctcggtgcgctggcaggcccactgtctgacactgcacatctacagaaattccagcaaatctcaacaggagctcctgctagatctgatgtggtccatctggccagaactcccagcctatggtcgtaaggctgcccagtttgtggacctactaggatatttctccctgaaaactccacaaacagagaagaagttgaaggagtattcacagaaggctgtggagattctgcggactcaaaaccatattcttaccaaccaccccaactcgaacatttataacactttgtctggcttagtggagtttgatggctattacctggagagcgatccctgcctggtgtgtaataacccggaagtaccgttctgttatatcaagctgtcttccattaaagtggacacgcggtacaccaccacccagcaggttgtgaagctcattggcagtcacaccatcagcaaagtgacagtgaaaatcggggatctgaaacggaccaagatggtgcggaccatcaacctgtattataacaaccgaaccgtgcaggccatcgtggagttgaaaaacaagccagctcgctggcacaaagccaagaaggttcagctgacccctggacagacagaggtgaagattgacctgccgttgcccattgtggcctccaatctgatgattgagtttgcagacttctatgaaaactaccaggcctccacagagaccctgcagtgccctcgctgtagtgcctcggtccctgccaacccaggagtctgtggcaactgtggagagaatgtgtaccagtgtcacaaatgcagatccatcaactacgatgaaaaggatcccttcctctgcaatgcctgtggcttctgtaaatatgcccgcttcgacttcatgctctatgccaagccttgctgtgcagtggatcccattgagaatgaagaagaccggaagaaggctgtatccaacatcaatacacttttggacaaagctgatcgagtgtatcatcagctgatgggacaccggccacagctggagaacctgctctgcaaagtgaatgaggcagctccagaaaagccacaggatgactcaggaacagcagggggcatcagctccacttctgccagtgtgaatcgttacatcctgcagttggctcaggagtattgtggagactgcaagaactcttttgatgaactctccaaaatcatccagaaagtctttgcttcgcgcaaagagttgttggaatatgacctacagcagagggaagcagccactaaatcatcccggacctccgtgcagcccacattcactgccagccagtaccgtgccttatccgtcctgggctgtggccacacatcctccaccaagtgctatggctgcgcctcggctgtcacagaacattgtatcacactacttcgggccctggccaccaacccagccttgaggcacatccttgtctcccagggccttatccgggagctctttgattataatcttcgccgaggggctgcggccatgcgggaggaggtccgccagctcatgtgcctcctaactcgagacaacccagaagccacccaacagatgaatgacctgattattggcaaggtctccacagccctgaagggccactgggccaaccccgatctggcaagtagcctgcagtatgaaatgctgctgctgacggattctatctccaaggaggacagctgctgggagctccggttacgctgtgctctcagccttttcctcatggctgtgaacattaagactcctgtggtggttgaaaacattaccctcatgtgcctgaggatcttgcagaagctgataaaaccacctgctcccactagcaagaagaacaaggatgtccccgttgaggccctcaccacggtgaagccatactgcaatgagatccatgcccaggctcaactgtggctcaagagagaccccaaggcatcctatgatgcctggaagaagtgtcttcctatcagagggatagatggcaatgggaaagcccccagcaaatcagagctccgccatctctatttgactgagaagtatgtgtggaggtggaaacagttcctgagtcgtcgggggaagaggacctcccccttggatctcaaactggggcataacaactggctgcgacaagtgcttttcactccagcaacgcaggccgcacggcaggcagcctgtaccattgtggaagctctagccaccattcccagccgcaagcagcaggtcctggacctgcttaccagttacctggatgagctgagcatagctggggagtgtgcagctgagtacctggctctctaccagaagctcatcacttctgcgcactggaaagtctacttggcagctcggggagtcctaccctatgtgggcaacctcatcaccaaggaaatagctcgtctgctggccctggaggaggctaccctgagtaccgatctgcagcagggttatgcccttaaaagtctcacaggccttctctcctcctttgttgaggtggaatccatcaaaagacattttaaaagtcgcttggtgggtactgtgctgaatggatacctgtgcttgcggaagctggtggtgcagaggaccaagctgatcgatgagacgcaggacatgctgctggagatgctggaggacatgaccacaggtacagaatcagaaaccaaggccttcatggctgtgtgcattgagacagccaagcgctacaatctggatgactaccggaccccggtgttcatcttcgagaggctctgcagcatcatttatcctgaggagaatgaagtcactgagttctttgtgaccctggagaaggatccccaacaagaagacttcttacagggcaggatgcctgggaacccgtatagcagcaatgagccaggcatcgggccgctgatgagggatataaagaacaagatttgccaggactgtgacttagtggccctcctggaagatgacagtggcatggagcttctagtgaacaataaaatcattagtttggaccttcctgtggctgaagtttacaagaaagtctggtgtaccacgaatgagggagagcccatgaggattgtttatcgtatgcgggggctgctgggcgatgccacagaggagttcattgagtccctggactctactacagatgaagaagaagatgaagaagaagtgtataaaatggctggtgtgatggcccagtgtgggggcctggaatgcatgcttaacagactcgcagggatcagagatttcaagcagggacgccaccttctaacagtgctactgaaattgttcagttactgcgtgaaggtgaaagtcaaccggcagcaactggtcaaactggaaatgaacaccttgaacgtcatgctggggaccctaaacctggcccttgtagctgaacaagaaagcaaggacagtgggggtgcagctgtggctgagcaggtgcttagcatcatggagatcattctagatgagtccaatgctgagcccctgagtgaggacaagggcaacctcctcctgacaggtgacaaggatcaactggtgatgctcttggaccagatcaacagcacctttgttcgctccaaccccagtgtgctccagggcctgcttcgcatcatcccgtacctttcctttggagaggtggagaaaatgcagatcttggtggagcgattcaaaccatactgcaactttgataaatatgatgaagatcacagtggtgatgataaagtcttcctggactgcttctgtaaaatagctgctggcatcaagaacaacagcaatgggcaccagctgaaggatctgattctccagaaggggatcacccagaatgcacttgactacatgaaaaagcacatccctagcgccaagaatttggatgccgacatctggaaaaagtttttgtctcgcccagccttgccatttatcctaaggctgcttcggggcctggccatccagcaccctggcacccaggttctgattggaactgattccatcccgaacctgcataagctggagcaggtgtccagtgatgagggcattgggaccttggcagagaacctgctggaagccctgcgggaacaccctgacgtaaacaagaagattgacgcagcccgcagggagacccgggcagagaagaagcgcatggccatggcaatgaggcagaaggccctgggcaccctgggcatgacgacaaatgaaaagggccaggtcgtgaccaagacagcactcctgaagcagatggaagagctgatcgaggagcctggcctcacgtgctgcatctgcagggagggatacaagttccagcccacaaaggtcctgggcatttataccttcacgaagcgggtagccttggaggagatggagaataagccccggaaacagcagggctacagcaccgtgtcccacttcaacattgtgcactacgactgccatctggctgccgtcaggttggctcgaggccgggaagagtgggagagtgccgccctgcagaatgccaacaccaagtgcaacgggctccttccggtctggggacctcatgtccctgaatcagcttttgccacttgcttggcaagacacaacacttacctccaggaatgtacaggccagcgggagcccacgtatcagctcaacatccatgacatcaaactgctcttcctgcgcttcgccatggagcagtcgttcagcgcagacactggcgggggcggccgggagagcaacatccacctgatcccgtacatcattcacactgtgctttacgtcctgaacacaacccgagcaacttcccgagaagagaagaacctccaaggctttctggaacagcccaaggagaagtgggtggagagtgcctttgaagtggacgggccctactatttcacagtcttggcccttcacatcctgccccctgagcagtggagagccacacgtgtggaaatcttgcggaggctgttggtgacctcgcaggctcgggcagtggctccaggtggagccaccaggctgacagataaggcagtgaaggactattccgcttaccgttcttcccttctcttttgggccctcgtcgatctcatttacaacatgtttaagaaggtgcctaccagtaacacagagggaggctggtcctgctctctcgctgagtacatccgccacaacgacatgcccatctacgaagctgccgacaaagccctgaaaaccttccaggaggagttcatgccagtggagaccttctcagagttcctcgatgtggccggtcttttatcagaaatcaccgatccagagagcttcctgaaggacctgttgaactcagtcccctgaccaccacacagcagctgcggcggcgaagacgaagctggcttgccttccaccctctgttctccctccttgtgcattaagttccctccgcgggatgctgcattgttaccccgccctcccctctctcatttttcttggtgtggcttggggtttttaggcttcctgttttatctcgtgtgtgtggtgcaccagctatgaggttgtctgtaacccaagccatcaaagggcctgtacatacctaggagccatgagttgtcccggccagcttcatacttgagtgtgcacatcttgagaaataaacaagtgacttaacacacattgaaaagg

SEQ ID NO: 448 - DNA, 2044 bp, Homo sapiens
ctggacgagtccgagcgcgtcacctcctcacgctgcggctgtcgcccgtgtcccgccggcccgttccgtgtcgccccgcagtgctgcggccgccgcggcaccatggctgtgtttgtcgtgctcctggcgttggtggcgggtgttttggggaacgagtttagtatattaaaatcaccagggtctgttgttttccgaaatggaaattggcctataccaggagagcggatcccagacgtggctgcattgtccatgggcttctctgtgaaagaagacctttcttggccaggactcgcagtgggtaacctgtttcatcgtcctcgggctaccgtcatggtgatggtgaagggagtgaacaaactggctctacccccaggcagtgtcatttcgtaccctttggagaatgcagttccttttagtcttgacagtgttgcaaattccattcactccttattttctgaggaaactcctgttgttttgcagttggctcccagtgaggaaagagtgtatatggtagggaaggcaaactcagtgtttgaagacctttcagtcaccttgcgccagctccgtaatcgcctgtttcaagaaaactctgttctcagttcactccccctcaattctctgagtaggaacaatgaagttgacctgctctttctttctgaactgcaagtgctacatgatatttcaagcttgctgtctcgtcataagcatctagccaaggatcattctcctgatttatattcactggagctggcaggtttggatgaaattgggaagcgttatggggaagactctgaacaattcagagatgcttctaagatccttgttgacgctctgcaaaagtttgcagatgacatgtacagtctttatggtgggaatgcagtggtagagttagtcactgtcaagtcatttgacacctccctcattaggaagacaaggactatccttgaggcaaaacaagcgaagaacccagcaagtccctataaccttgcatataagtataattttgaatattccgtggttttcaacatggtactttggataatgatcgccttggccttggctgtgattatcacctcttacaatatttggaacatggatcctggatatgatagcatcatttataggatgacaaaccagaagattcgaatggattgaatgttacctgtgccagaattagaaaagggggttggaaattggctgttttgttaaaatatatcttttagtgtgctttaaagtagatagtatactttacatttataaaaaaaaatcaaattttgttctttattttgtgtgtgcctgtgatgtttttctagagtgaattatagtattgacgtgaatcccactgtggtatagattccataatatgcttgaatattatgatatagccatttaataacattgatttcattctgtttaatgaatttggaaatatgcactgaaagaaatgtaaaacatttagaatagctcgtgttatggaaaaaagtgcactgaatttattagacaaacttacgaatgcttaacttctttacacagcataggtgaaaatcatatttgggctattgtatactatgaacaatttgtaaatgtcttaatttgatgtaaataactctgaaacaagagaaaaggtttttaacttagagtagccctaaaatatggatgtgcttatataatcgcttagttttggaactgtatctgagtaacagaggacagctgttttttaaccctcttctgcaagtttgttgacctacatgggctaatatggatactaaaaatactacattgatctaagaagaaactagccttgtggagtatatagatgcttttcattatacacacaaaaatccctgagggacattttgaggcatgaatataaaacatttttatttcagtaacttttccccctgtgtaagttactatggtttgtggtacaacttcattctatagaatattaagtggaagtgggtgaattctactttttatgttggagtggaccaatgtctatcaagagtgacaaataaagttaatgatgattccaaaaaaaaaa

SEQ ID NO: 449 - DNA, 3129 bp, Homo sapiens
gcgatcacgtgagcacagcagggagggggaggggccctgatttccgggcggcggaaggagacgcggccgcgtgaggacgaggctatttgaaaacacgctccgggagctagagcctgaggtcggcggcgcacgctgttgccccgtgggcttctgctccctcgcttgtcttctcgggcttctcgccccggccgcggccgggtcctcagtagtcgagaatgactaaaaaaagaaaacgccaacatgattttcaaaaagtaaaattgaaagttggtaaaaagaagcccaagttacaaaatgctactcctacaaactttaaaacaaagactatacatctgcctgagcaactcaaagaggatggaacacttccaacaaacaatagaaaacttaacataaaggatttgctgtcacagatgcatcactacaatgctggggttaaacaaagtgctcttcttggacttaaagaccttttgtctcaatacccatttataattgatgcacacctttcaaacatattaagtgaagtgactgctgtgtttacagataaagatgctaatgtacgattagcagcagttcaacttcttcaattcctggcccccaaaatacgagctgaacaaatttctccattttttcctttggtaagtgcccatctctctagtgccatgactcacattactgaaggaattcaggaggactctttaaaagttttggacattctgctggaacagtacccagctctaattactggccgtagcagcatattgcttaagaattttgtagaacttatttctcatcagcagctgtccaaaggactgataaatagagacagatcccagtcctggatactttctgtaaatcctaatcggagactcacttctcagcaatggaggctgaaagtcttagtgagactcagtaaattccttcaggccttggcagatggatccagtaggttgagagaaagtgaaggacttcaggaacagaaagaaaatccccatgccactagcaactccatttttatcaactggaaggaacatgccaacgaccagcaacacatccaggtttatgaaaatgggggttcacagccaaatgtcagttcacagttcaggctacggtatctggttggaggactgagtggtgtggatgaaggcctgtcatctactgaaaacctgaaaggatttattgagataataattccattgctaattgaatgctgggttgaagctgtacctccacaactagctactcctgttgggaatggtatagaacgagaacctctacaggttatgcagcaagttcttaatattatttcccttctgtggaaactctctaaacaacaggatgaaacccataaattggagtcatggcttcgaaagaactaccttattgattttaaacaccattttatgagtcgttttccatatgtcttaaaagaaataaccaagcacaaaaggaaagagccaaataaaagcatcaagcattgcacagttctctccaataacatagatcatctcttactgaatttaacactgtctgatatcatggtctccctggcaaatgcgtcaactttgcagaaggattgcagttggatagaaatgataaggaaatttgtaacagagacccttgaagatggctctaggctaaatagtaagcaactgaacagattgctgggagtatcctggaggttaatgcaaatacagccaaacagagaggacacagagactcttattaaggcagtttatacattatatcagcagaggggccttatccttccagttcggactttgttattgaagtttttcagtaaaatctatcagacagaagaactgagatcttgtagattcagatatcgtagtaaagtgttatcccgttggctggctggcttaccattgcaacttgctcatcttggctcccgaaatcctgagctctctacacagcttatcgatatcattcataccgctgcagcacgagcaaataaagaattactaaaaagtttacaagctactgccctccgaatttatgatccacaagaaggtgctgtggtggttctccctgcagactctcagcagcgtttggttcagcttgtatatttcctacccagtctgccggctgatttgctttctcggttaagtcgttgctgtattatgggaagactcagttcaagtttggctgccatgcttatcgggatactgcacatgagatcatcattttctgggtggaagtattcagctaaagactggttgatgagtgatgtagactatttcagcttcttattttccacacttacagggttttcgaaagaggagttgacttggcttcagagccttcgaggagttcctcatgtcatccagacacagctttcccctgtgcttctctaccttacagatttggatcaatttttacaccactgggatgtaacagaggcagtttttcacagtttattggttattcctgcccgaagtcagaactttgacatcttgcaaagtgccatcagtaagcatttggttgggttgactgtaattcctgacagcacggctggctgtgtttttggtgttatctgtaagctcctggatcatacttgtgtagttagtgagactctactgccatttctggcttcttgttgctacagtcttctttattttctgctcactatagagaaaggggaagcagaacatctaagaaagagggacaagctgtggggggtctgtgtctccatcctggctctcttgcctcgagtcctcaggttgatgctgcagagcctgcgggtgaacagagttgggcctgaggagctgcctgttgtgggccagctgcttcgactgctgcttcagcatgcacccctcaggactcatatgttgaccaatgcgatcttggtgcagcagatcatcaagaatatcacgacattgaagagtggaagtgttcaggaacagtggctcacagacttacattactgcttcaacgtgtatatcactgggcatccccaagggcccagtgcactggctacagtgtattgaagaggccatagtacctcctgtttgaagttgtttattcacatctatcttatttgaagaaaaagactgatgtaatagatctttgtcattaaagctgaacttttaaagaagtttacgaaaaaaaaaa

SEQ ID NO: 450 - DNA, 3016 bp, Homo sapiens
tttgcggagcttcaggtgactgggcgggttcgcctggtttcgggtccgagagagttttagcccggagtgtgtgaatcgggccccacttccccgactctggtcctggccggcgtcccttggagtaggaggaacgatggtttcctaaaacccatgtcgagaatgactaaaaaaagaaaacgccaacatgattttcaaaaagtaaaattgaaagttggtaaaaagaagcccaagttacaaaatgctactcctacaaactttaaaacaaagactatacatctgcctgagcaactcaaagaggatggaacacttccaacaaacaatagaaaacttaacataaaggatttgctgtcacagatgcatcactacaatgctggggttaaacaaagtgctcttcttggacttaaagaccttttgtctcaatacccatttataattgatgcacacctttcaaacatattaagtgaagtgactgctgtgtttacagataaagatgctaatgtacgattagcagcagttcaacttcttcaattcctggcccccaaaatacgagctgaacaaatttctccattttttcctttggtaagtgcccatctctctagtgccatgactcacattactgaaggaattcaggaggactctttaaaagttttggacattctgctggaacagtacccagctctaattactggccgtagcagcatattgcttaagaattttgtagaacttatttctcatcagcagctgtccaaaggactgataaatagagacagatcccagtcctggatactttctgtaaatcctaatcggagactcacttctcagcaatggaggctgaaagtcttagtgagactcagtaaattccttcaggccttggcagatggatccagtaggttgagagaaagtgaaggacttcaggaacagaaagaaaatccccatgccactagcaactccatttttatcaactggaaggaacatgccaacgaccagcaacacatccaggtttatgaaaatgggggttcacagccaaatgtcagttcacagttcaggctacggtatctggttggaggactgagtggtgtggatgaaggcctgtcatctactgaaaacctgaaaggatttattgagataataattccattgctaattgaatgctgggttgaagctgtacctccacaactagctactcctgttgggaatggtatagaacgagaacctctacaggttatgcagcaagttcttaatattatttcccttctgtggaaactctctaaacaacaggatgaaacccataaattggagtcatggcttcgaaagaactaccttattgattttaaacaccattttatgagtcgttttccatatgtcttaaaagaaataaccaagcacaaaaggaaagagccaaataaaagcatcaagcattgcacagttctctccaataacatagatcatctcttactgaatttaacactgtctgatatcatggtctccctggcaaatgcgtcaactttgcagaaggattgcagttggatagaaatgataaggaaatttgtaacagagacccttgaagatggctctaggctaaatagtaagcaactgaacagattgctgggagtatcctggaggttaatgcaaatacagccaaacagagaggacacagagactcttattaaggcagtttatacattatatcagcagaggggccttatccttccagttcggactttgttattgaagtttttcagtaaaatctatcagacagaagaactgagatcttgtagattcagatatcgtagtaaagtgttatcccgttggctggctggcttaccattgcaacttgctcatcttggctcccgaaatcctgagctctctacacagcttatcgatatcattcataccgctgcagcacgagcaaataaagaattactaaaaagtttacaagctactgccctccgaatttatgatccacaagaaggtgctgtggtggttctccctgcagactctcagcagcgtttggttcagcttgtatatttcctacccagtctgccggctgatttgctttctcggttaagtcgttgctgtattatgggaagactcagttcaagtttggctgccatgcttatcgggatactgcacatgagatcatcattttctgggtggaagtattcagctaaagactggttgatgagtgatgtagactatttcagcttcttattttccacacttacagggttttcgaaagaggagttgacttggcttcagagccttcgaggagttcctcatgtcatccagacacagctttcccctgtgcttctctaccttacagatttggatcaatttttacaccactgggatgtaacagaggcagtttttcacagtttattggttattcctgcccgaagtcagaactttgacatcttgcaaagtgccatcagtaagcatttggttgggttgactgtaattcctgacagcacggctggctgtgtttttggtgttatctgtaagctcctggatcatacttgtgtagttagtgagactctactgccatttctggcttcttgttgctacagtcttctttattttctgctcactatagagaaaggggaagcagaacatctaagaaagaggttgatgctgcagagcctgcgggtgaacagagttgggcctgaggagctgcctgttgtgggccagctgcttcgactgctgcttcagcatgcacccctcaggactcatatgttgaccaatgcgatcttggtgcagcagatcatcaagaatatcacgacattgaagagtggaagtgttcaggaacagtggctcacagacttacattactgcttcaacgtgtatatcactgggcatccccaagggcccagtgcactggctacagtgtattgaagaggccatagtacctcctgtttgaagttgtttattcacatctatcttatttgaagaaaaagactgatgtaatagatctttgtcattaaagctgaacttttaaagaagtttacgaaaaaaaaaa

SEQ ID NO: 451 - DNA, 2699 bp, Homo sapiens
gatttccgggcggcggaaggagacgcggccgcgtgaggacgaggctatttgaaaacacgctccgggagctagagcctgaggtcggcggcgcacgctgttgccccgtgggcttctgctccctcgcttgtcttctcgggcttctcgccccggccgcggccgggtcctcagtagtcgagaatgactaaaaaaagaaaacgccaacatgattttcaaaaagtaaaattgaaagttggtaaaaagaagcccaagttacaaaatgctactcctacaaactttaaaacaaagactatacatctgcctgagcaactcaaagaggatggaacacttccaacaaacaatagaaaacttaacataaaggatttgctgtcacagatgcatcactacaatgctggggttaaacaaagtgctcttcttggacttaaagaccttttgtctcaatacccatttataattgatgcacacctttcaaacatattaagtgaagtgactgctgtgtttacagataaagatgctaatgtacgattagcagcagttcaacttcttcaattcctggcccccaaaatacgagctgaacaaatttctccattttttcctttggtaagtgcccatctctctagtgccatgactcacattactgaaggaattcaggaggactctttaaaagttttggacattctgctggaacagtacccagctctaattactggccgtagcagcatattgcttaagaattttgtagaacttatttctcatcagcagctgtccaaaggactgataaatagagacagatcccagtcctggatactttctgtaaatcctaatcggagactcacttctcagcaatggaggctgaaagtcttagtgagactcagtaaattccttcaggccttggcagatggatccagtaggttgagagaaagtgaaggacttcaggaacagaaagaaaatccccatgccactagcaactccatttttatcaactggaaggaacatgccaacgaccagcaacacatccaggtttatgaaaatgggggttcacagccaaatgtcagttcacagttcaggctacggtatctggttggaggactgagtggtgtggatgaaggcctgtcatctactgaaaacctgaaaggatttattgagataataattccattgctaattgaatgctgggttgaagctgtacctccacaactagctactcctgttgggaatggtatagaacgagaacctctacaggttatgcagcaagttcttaatattatttcccttctgtggaaactctctaaacaacaggatgaaacccataaattggagtcatggcttcgaaagaactaccttattgattttaaacaccattttatgagtcgttttccatatgtcttaaaagaaataaccaagcacaaaaggaaagagccaaataaaagatatcgtagtaaagtgttatcccgttggctggctggcttaccattgcaacttgctcatcttggctcccgaaatcctgagctctctacacagcttatcgatatcattcataccgctgcagcacgagcaaataaagaattactaaaaagtttacaagctactgccctccgaatttatgatccacaagaaggtgctgtggtggttctccctgcagactctcagcagcgtttggttcagcttgtatatttcctacccagtctgccggctgatttgctttctcggttaagtcgttgctgtattatgggaagactcagttcaagtttggctgccatgcttatcgggatactgcacatgagatcatcattttctgggtggaagtattcagctaaagactggttgatgagtgatgtagactatttcagcttcttattttccacacttacagggttttcgaaagaggagttgacttggcttcagagccttcgaggagttcctcatgtcatccagacacagctttcccctgtgcttctctaccttacagatttggatcaatttttacaccactgggatgtaacagaggcagtttttcacagtttattggttattcctgcccgaagtcagaactttgacatcttgcaaagtgccatcagtaagcatttggttgggttgactgtaattcctgacagcacggctggctgtgtttttggtgttatctgtaagctcctggatcatacttgtgtagttagtgagactctactgccatttctggcttcttgttgctacagtcttctttattttctgctcactatagagaaaggggaagcagaacatctaagaaagagggacaagctgtggggggtctgtgtctccatcctggctctcttgcctcgagtcctcaggttgatgctgcagagcctgcgggtgaacagagttgggcctgaggagctgcctgttgtgggccagctgcttcgactgctgcttcagcatgcacccctcaggactcatatgttgaccaatgcgatcttggtgcagcagatcatcaagaatatcacgacattgaagagtggaagtgttcaggaacagtggctcacagacttacattactgcttcaacgtgtatatcactgggcatccccaagggcccagtgcactggctacagtgtattgaagaggccatagtacctcctgtttgaagttgtttattcacatctatcttatttgaagaaaaagactgatgtaatagatctttgtcattaaagctgaacttttaaagaa

SEQ ID NO: 452 - DNA, 2892 bp, Homo sapiens
gatttccgggcggcggaaggagacgcggccgcgtgaggacgaggctatttgaaaacacgctccgggagctagagcctgaggtcggcggcgcacgctgttgccccgtgggcttctgctccctcgcttgtcttctcgggcttctcgccccggccgcggccgggtcctcagtagtcgagaatgactaaaaaaagaaaacgccaacatgattttcaaaaagtaaaattgaaagttggtaaaaagaagcccaagttacaaaatgctactcctacaaactttaaaacaaagactatacatctgcctgagcaactcaaagaggatggaacacttccaacaaacaatagaaaacttaacataaaggatttgctgtcacagatgcatcactacaatgctggggttaaacaaagtgctcttcttggacttaaagaccttttgtctcaatacccatttataattgatgcacacctttcaaacatattaagtgaagtgactgctgtgtttacagataaagatgctaatgtacgattagcagcagttcaacttcttcaattcctggcccccaaaatacgagctgaacaaatttctccattttttcctttggtaagtgcccatctctctagtgccatgactcacattactgaaggaattcaggaggactctttaaaagttttggacattctgctggaacagtacccagctctaattactggccgtagcagcatattgcttaagaattttgtagaacttatttctcatcagcagctgtccaaaggactgataaatagagacagatcccagtcctggatactttctgtaaatcctaatcggagactcacttctcagcaatggaggctgaaagtcttagtgagactcagtaaattccttcaggccttggcagatggatccagtaggttgagagaaagtgaaggacttcaggaacagaaagaaaatccccatgccactagcaactccatttttatcaactggaaggaacatgccaacgaccagcaacacatccaggtttatgaaaatgggggttcacagccaaatgtcagttcacagttcaggctacggtatctggttggaggactgagtggtgtggatgaaggcctgtcatctactgaaaacctgaaaggatttattgagataataattccattgctaattgaatgctgggttgaagctgtacctccacaactagctactcctgttgggaatggtatagaacgagaacctctacaggttatgcagcaagttcttaatattatttcccttctgtggaaactctctaaacaacaggatgaaacccataaattggagtcatggcttcgaaagaactaccttattgattttaaacaccattttatgagtcgttttccatatgtcttaaaagaaataaccaagcacaaaaggaaagagccaaataaaagcatcaagcattgcacagttctctccaataacatagatcatctcttactgaatttaacactgtctgatatcatggtctccctggcaaatgcgtcaactttgcagaaggattgcagttggatagaaatgataaggaaatttgtaacagagacccttgaagatggctctaggctaaatagtaagcaactgaacagattgctgggagtatcctggaggttaatgcaaatacagccaaacagagaggacacagagactcttattaaggcagtttatacattatatcagcagaggggccttatccttccagttcggactttgttattgaagtttttcagtaaaatctatcagacagaagaactgagatcttgtagattcagatatcgtagtaaagtgttatcccgttggctggctggcttaccattgcaacttgctcatcttggctcccgaaatcctgagctctctacacagcttatcgatatcattcataccgctgcagcacgagcaaataaagaattactaaaaagtttacaagctactgccctccgaatttatgatccacaagaaggtgctgtggtggttctccctgcagactctcagcagcgtttggttcagcttgtatatttcctacccagtctgccggctgatttgctttctcggttaagtcgttgctgtattatgggaagactcagttcaagtttggctgccatgcttatcgggatactgcacatgagatcatcattttctgggtggaagtattcagctaaagactggttgatgagtgatgtagactatttcagcttcttattttccacacttacagggttttcgaaagaggagttgacttggcttcagagccttcgaggagttcctcatgtcatccagacacagctttcccctgtgcttctctaccttacagatttggatcaatttttacaccactgggatgtaacagaggcagtttttcacagtttattggttattcctgcccgaagtcagaactttgacatcttgcaaagtgccatcagtaagcatttgggacaagctgtggggggtctgtgtctccatcctggctctcttgcctcgagtcctcaggttgatgctgcagagcctgcgggtgaacagagttgggcctgaggagctgcctgttgtgggccagctgcttcgactgctgcttcagcatgcacccctcaggactcatatgttgaccaatgcgatcttggtgcagcagatcatcaagaatatcacgacattgaagagtggaagtgttcaggaacagtggctcacagacttacattactgcttcaacgtgtatatcactgggcatccccaagggcccagtgcactggctacagtgtattgaagaggccatagtacctcctgtttgaagttgtttattcacatctatcttatttgaagaaaaagactgatgtaatagatctttgtcattaaagctgaacttttaaagaa

SEQ ID NO: 453 - DNA, 3087 bp, Homo sapiens
gatttccgggcggcggaaggagacgcggccgcgtgaggacgaggctatttgaaaacacgctccgggagctagagcctgaggtcggcggcgcacgctgttgccccgtgggcttctgctccctcgcttgtcttctcgggcttctcgccccggccgcggccgggtcctcagtagtcgagaatgactaaaaaaagaaaacgccaacatgattttcaaaaagtaaaattgaaagttggtaaaaagaagcccaagttacaaaatgctactcctacaaactttaaaacaaagactatacatctgcctgagcaactcaaagaggatggaacacttccaacaaacaatagaaaacttaacataaaggatttgctgtcacagatgcatcactacaatgctggggttaaacaaagtgctcttcttggacttaaagaccttttgtctcaatacccatttataattgatgcacacctttcaaacatattaagtgaagtgactgctgtgtttacagataaagatgctaatgtacgattagcagcagttcaacttcttcaattcctggcccccaaaatacgagctgaacaaatttctccattttttcctttggtaagtgcccatctctctagtgccatgactcacattactgaaggaattcaggaggactctttaaaagttttggacattctgctggaacagtacccagctctaattactggccgtagcagcatattgcttaagaattttgtagaacttatttctcatcagcagctgtccaaaggactgataaatagagacagatcccagtcctggatactttctgtaaatcctaatcggagactcacttctcagcaatggaggctgaaagtcttagtgagactcagtaaattccttcaggccttggcagatggatccagtaggttgagagaaagtgaaggacttcaggaacagaaagaaaatccccatgccactagcaactccatttttatcaactggaaggaacatgccaacgaccagcaacacatccaggtttatgaaaatgggggttcacagccaaatgtcagttcacagttcaggctacggtatctggttggaggactgagtggtgtggatgaaggcctgtcatctactgaaaacctgaaaggatttattgagataataattccattgctaattgaatgctgggttgaagctgtacctccacaactagctactcctgttgggaatggtatagaacgagaacctctacaggttatgcagcaagttcttaatattatttcccttctgtggaaactctctaaacaacaggatgaaacccataaattggagtcatggcttcgaaagaactaccttattgattttaaacaccattttatgagtcgttttccatatgtcttaaaagaaataaccaagcacaaaaggaaagagccaaataaaagcatcaagcattgcacagttctctccaataacatagatcatctcttactgaatttaacactgtctgatatcatggtctccctggcaaatgcgtcaactttgcagaaggattgcagttggatagaaatgataaggaaatttgtaacagagacccttgaagatggctctaggctaaatagtaagcaactgaacagattgctgggagtatcctggaggttaatgcaaatacagccaaacagagaggacacagagactcttattaaggcagtttatacattatatcagcagaggggccttatccttccagttcggactttgttattgaagtttttcagtaaaatctatcagacagaagaactgagatcttgtagattcagatatcgtagtaaagtgttatcccgttggctggctggcttaccattgcaacttgctcatcttggctcccgaaatcctgagctctctacacagcttatcgatatcattcataccgctgcagcacgagcaaataaagaattactaaaaagtttacaagctactgccctccgaatttatgatccacaagaaggtgctgtggtggttctccctgcagactctcagcagcgtttggttcagcttgtatatttcctacccagtctgccggctgatttgctttctcggttaagtcgttgctgtattatgggaagactcagttcaagtttggctgccatgcttatcgggatactgcacatgaggtagcatgctcaaatcatcattttctgggtggaagtattcagctaaagactggttgatgagtgatgtagactatttcagcttcttattttccacacttacagggttttcgaaagaggagttgacttggcttcagagccttcgaggagttcctcatgtcatccagacacagctttcccctgtgcttctctaccttacagatttggatcaatttttacaccactgggatgtaacagaggcagtttttcacagtttattggttattcctgcccgaagtcagaactttgacatcttgcaaagtgccatcagtaagcatttggttgggttgactgtaattcctgacagcacggctggctgtgtttttggtgttatctgtaagctcctggatcatacttgtgtagttagtgagactctactgccatttctggcttcttgttgctacagtcttctttattttctgctcactatagagaaaggggaagcagaacatctaagaaagagggacaagctgtggggggtctgtgtctccatcctggctctcttgcctcgagtcctcaggttgatgctgcagagcctgcgggtgaacagagttgggcctgaggagctgcctgttgtgggccagctgcttcgactgctgcttcagcatgcacccctcaggactcatatgttgaccaatgcgatcttggtgcagcagatcatcaagaatatcacgacattgaagagtggaagtgttcaggaacagtggctcacagacttacattactgcttcaacgtgtatatcactgggcatccccaagggcccagtgcactggctacagtgtattgaagaggccatagtacctcctgtttgaagttgtttattcacatctatcttatttgaagaaaaagactgatgtaatagatctttgtcattaaagctgaacttttaaagaa

SEQ ID NO: 454 - DNA, 2601 bp, Homo sapiens
gatttccgggcggcggaaggagacgcggccgcgtgaggacgaggctatttgaaaacacgctccgggagctagagcctgaggtcggcggcgcacgctgttgccccgtgggcttctgctccctcgcttgtcttctcgggcttctcgccccggccgcggccgggtcctcagtagtcgagaatgactaaaaaaagaaaacgccaacatgattttcaaaaagtaaaattgaaagttggtaaaaagaagcccaagttacaaaatgctactcctacaaactttaaaacaaagactatacatctgcctgagcaactcaaagaggatggaacacttccaacaaacaatagaaaacttaacataaaggatttgctgtcacagatgcatcactacaatgctggggttaaacaaagtgctcttcttggacttaaagaccttttgtctcaatacccatttataattgatgcacacctttcaaacatattaagtgaagtgactgctgtgtttacagataaagatgctaatgtacgattagcagcagttcaacttcttcaattcctggcccccaaaatacgagctgaacaaatttctccattttttcctttggtatctggttggaggactgagtggtgtggatgaaggcctgtcatctactgaaaacctgaaaggatttattgagataataattccattgctaattgaatgctgggttgaagctgtacctccacaactagctactcctgttgggaatggtatagaacgagaacctctacaggttatgcagcaagttcttaatattatttcccttctgtggaaactctctaaacaacaggatgaaacccataaattggagtcatggcttcgaaagaactaccttattgattttaaacaccattttatgagtcgttttccatatgtcttaaaagaaataaccaagcacaaaaggaaagagccaaataaaagcatcaagcattgcacagttctctccaataacatagatcatctcttactgaatttaacactgtctgatatcatggtctccctggcaaatgcgtcaactttgcagaaggattgcagttggatagaaatgataaggaaatttgtaacagagacccttgaagatggctctaggctaaatagtaagcaactgaacagattgctgggagtatcctggaggttaatgcaaatacagccaaacagagaggacacagagactcttattaaggcagtttatacattatatcagcagaggggccttatccttccagttcggactttgttattgaagtttttcagtaaaatctatcagacagaagaactgagatcttgtagattcagatatcgtagtaaagtgttatcccgttggctggctggcttaccattgcaacttgctcatcttggctcccgaaatcctgagctctctacacagcttatcgatatcattcataccgctgcagcacgagcaaataaagaattactaaaaagtttacaagctactgccctccgaatttatgatccacaagaaggtgctgtggtggttctccctgcagactctcagcagcgtttggttcagcttgtatatttcctacccagtctgccggctgatttgctttctcggttaagtcgttgctgtattatgggaagactcagttcaagtttggctgccatgcttatcgggatactgcacatgagatcatcattttctgggtggaagtattcagctaaagactggttgatgagtgatgtagactatttcagcttcttattttccacacttacagggttttcgaaagaggagttgacttggcttcagagccttcgaggagttcctcatgtcatccagacacagctttcccctgtgcttctctaccttacagatttggatcaatttttacaccactgggatgtaacagaggcagtttttcacagtttattggttattcctgcccgaagtcagaactttgacatcttgcaaagtgccatcagtaagcatttggttgggttgactgtaattcctgacagcacggctggctgtgtttttggtgttatctgtaagctcctggatcatacttgtgtagttagtgagactctactgccatttctggcttcttgttgctacagtcttctttattttctgctcactatagagaaaggggaagcagaacatctaagaaagagggacaagctgtggggggtctgtgtctccatcctggctctcttgcctcgagtcctcaggttgatgctgcagagcctgcgggtgaacagagttgggcctgaggagctgcctgttgtgggccagctgcttcgactgctgcttcagcatgcacccctcaggactcatatgttgaccaatgcgatcttggtgcagcagatcatcaagaatatcacgacattgaagagtggaagtgttcaggaacagtggctcacagacttacattactgcttcaacgtgtatatcactgggcatccccaagggcccagtgcactggctacagtgtattgaagaggccatagtacctcctgtttgaagttgtttattcacatctatcttatttgaagaaaaagactgatgtaatagatctttgtcattaaagctgaacttttaaagaa

SEQ ID NO: 455 - DNA, 5663 bp, Homo sapiens
ccagctacgagtggcagcaagaaggcaattcctggctggcggttggcatctaagcaggcatcaggatgttgggctgggtccagagggtgctgcctcagcccccagggacccctcggaagaccaagatgcaggaggaagaggaagtggaaccagagccagagatggaggcggaggtggaaccagaaccgaatcctgaggaggccgagacagagtccgagtccatgccccccgaagagtcattcaaggaggaggaagtggctgtggcagacccaagccctcaggagaccaaggaggctgcccttacttccaccatatccctccgggcccagggcgctgagatttctgaaatgaatagtcccagccgcagggtactgacctggctcatgaagggcgtagagaaggtgatcccgcagcctgttcacagcatcacggaggacccggctcagatcctggggcatggcagcactggggacacagggtgcacagatgaacccaatgaggcccttgaggcccaagacactaggcctgggctgcggctgcttctgtggctggagcagaatctggaaagagtgcttcctcagccccccaaatcctctgaggtctggagagatgagcctgcagttgctacaggtgctgcctcagacccagcgcctccaggacgcccccaggaaatggggcccaagctgcaggcccgggagaccccctccctgcccacacccatccccctgcagcccaaggaggaacccaaggaggcaccagctccagagccccagcccggctcccaggcccagacctcctccctgccaccaaccagggaccctgccaggctggtggcatgggtcctgcacaggctggagatggccttgccgcagccagtgctacatgggaaaataggggaacaggagcctgactcccctgggatatgtgatgtgcagaccatcagcatccttcctggaggacaagtggagcctgaccttgtcctagaggaggttgaaccgccctgggaggatgcccaccaggatgtcagtaccagcccacagggtacagaggtggttccagcttatgaagaagagaacaaagctgtggagaagatgcccagagagctgtcccggattgaagaggagaaagaagatgaggaggaggaagaggaagaggaggaggaggaggaagaggaggaggtgactgaggtgctgctggatagctgtgtggtgtcgcaggtgggcgtgggccagagtgaagaagacgggacccggccccagagcacttcagatcagaagctgtgggaggaagttggggaggaggccaagaaggaggctgaagagaaggccaaggaggaggccgaggaggtggctgaagaggaggctgaaaaggagccccaggactgggcggagaccaaggaggagcctgaggctgaggccgaggctgccagttcaggagtgcctgccacgaaacagcacccagaagtgcaggtggaagatactgatgctgatagctgccccctcatggcagaagagaatccaccctcaaccgtgttgccgccaccgtctcctgccaaatcagacacccttatagtcccaagctcagcctcggggacacacaggaagaagctgccctctgaggatgatgaggctgaagagctcaaggcgttgtcaccagcagagtccccagtggttgcctggtctgaccccaccaccccgaaggacactgatggccaggaccgtgcggcctccacggccagcacaaatagcgccatcatcaacgaccggctccaggagctggtgaagctcttcaaggagcggacagagaaagtgaaggagaaactcattgaccctgacgtcacctctgatgaggagagccccaagccctccccagccaagaaagccccagagccagctccagacacaaagcccgctgaagccgagccagtggaagaggagcactattgcgacatgctctgctgcaagttcaaacaccgcccctggaagaagtaccagtttccccagagcattgacccgctgaccaacctgatgtatgtcctatggctgttcttcgtggtgatggcctggaattggaactgttggctgattcccgtgcgctgggccttcccctaccagaccccggacaacatccaccactggctgctgatggattacctatgcgacctcatctacttcctggacatcaccgtgttccagacacgcctgcagtttgtcagaggcggggacatcattacggacaaaaaggacatgcgaaataactacctgaagtctcgccgcttcaagatggacctgctcagcctcctgcccttggattttctctatttgaaagtcggtgtgaaccccctcctccgcctgccccgctgtttaaagtacatggccttcttcgagtttaacagccgcctggaatccatcctcagcaaagcctacgtgtacagggtcatcaggaccacagcctaccttctctacagcctgcatttgaattcctgtctttattactgggcatcggcctatcagggcctcggctccactcactgggtttacgatggcgtgggaaacagttatattcgctgttactactttgctgtgaagaccctcatcaccatcggggggctgcctgaccccaagacactctttgaaattgtcttccagctgctgaattatttcacgggcgtctttgctttctctgtgatgatcggacagatgagagatgtggtaggggccgccaccgccggacagacctactaccgcagctgcatggacagcacggtgaagtacatgaatttctacaagatccccaagtccgtgcagaaccgcgtcaagacctggtacgagtacacctggcactcgcaaggcatgctggatgagtcagagctgatggtgcagcttccagacaagatgcggctggacctcgccatcgacgtgaactacaacatcgttagcaaagtcgcactctttcagggctgtgaccggcagatgatctttgacatgctgaagaggcttcgctctgttgtctacctgcccaacgactatgtgtgcaagaagggggagatcggccgtgagatgtacatcatccaggcagggcaagtgcaggtcttgggcggccctgatgggaaatctgtgctggtgacgctgaaagctggatctgtgtttggagaaataagcttgctggctgttgggggcgggaaccggcgcacggccaacgtggtggcgcacgggtttaccaacctcttcatcctggataagaaggacctgaatgagattttggtgcattatcctgagtctcagaagttactccggaagaaagccaggcgcatgctgagaagcaacaataagcccaaggaggagaagagcgtgctgatccttccaccccgggcgggcaccccaaagctcttcaacgctgccctcgctatgacaggaaagatgggtggcaagggggcaaaaggcggcaaacttgctcacctccgggcccggctcaaagaactggccgcgctggaggcggctgcaaagcagcaagagttggtggaacaggccaagagctcgcaagacgtcaagggagaggaaggctccgccgccccagaccagcacacgcacccaaaggaggccgccaccgacccacccgcgccccggacgccccccgagcccccggggtctccaccgagctctccaccgcctgcctcccttgggaggccggagggagaggaggaggggccggccgagcccgaagagcactcggtgaggatctgcatgagcccgggcccggagccgggagagcagatcctgtcggtgaagatgccggaggaaagggaggagaaggcggagtaaggtggggtgaggcggatcccgcgcgcagttccagcaggtgtgtccccagcgcccgctgcgcccctgcgccccagcgccccaccttcccccacggctcaagagaagatgcttttccgtagtcgtgacctcagtggctgcagctctgaccgtcccgccagcacgccagccccgactcagctcctcgcggggctgggcctgagctcgacaagttgcatcaagtgttcgagtccctgagctctcactatcatttgagagccctaccttttcctgactgttcctctttttaagaacaaaatgattttccacttttaaagttcatgggtgagggataaaatgaggctccaatacatgggaagctttgctgaaaaagtaaagtgttattgaatgtgtggggtttcccctcaggaatttgtctaacacatttcaaggatagaaaatacttcactgccgggcatggtggctcatgcctataatcccagtgctttgggaagccgaagcaggaggatcactggaggccaagagttggagagcagactgggcaacatagcgagacctcatctcaaacaaaaacaaaaacaaacaaaaaaacaatagccaggcgtgatggtgtgcacctgtagtcccagctactggagaggttgaggcaggaggatggcttgagcccaggagtttctggctgcagtgagctggacacagtgagaccctgtctcaaaaaaactaaaagatagccctgcacagtggttcacatctgcaatcccagcagtttgggaagctgagatgggaggattgtttgagaccaggagttcaagaccagcctgggcaacatattgagaccccatctctacaaaacagcagcagaaacaaaagcaaacaacaacaacgtacacaaacaaaaaaacaaagaaaggagggcagcccgagctgttcagctgagaattgccatggttctgagctgagcttgggacgcggttttcctttgcgggcaatcacagtagggggctagatgcccattaaggtagttagtgcttatcttccccagactctattcaattccaatgcaatgccattatctcagaacagatagaagggaaatggacttactggccaggagctgctagcgtttctgcctctgccaggaggaacagcccggtaggagcatcctctgcctgtcatcctgagaaaccccattcgccagcagggatcagtccgttactcacttttgacactctcgctgtagagatggtggcagcaacttcaattaatcctagaaaatgaaatctcccagctgatgacagcacttacattccctaaagctttccagatcgtgtcatgttgcttttatgattcagacaaaaaaaaaaaaagaaaaaagaaaaaaaaagaaaaaagggtcattcagggaatgaatatttatcaagaggattttatttgcataccaaatggctcttgggggagtgagtgattaaaaacaaaatctagtattctagtattaggccatttgtttccacctgcaacagtgaacataaaggacctggaattccaataggtcctgcccattttatataaaattacaggaaaatgtgagctgctcagaggcctttgaaggtttgcaaatgtctgtatgtatttgtccatccactaaaaacaacattcatttccactgtggaaaaatgaaagaatgtgggagtccccaggctggtctaagcatttccaaaccccagagtcagaaacagatttgtctagttgatggcttgtcacgtgatccgggtaatcatcacattgaatatagtgatgattgaccttattattttaccctatttttttaaaaaaaaaaaaaaaaaa

SEQ ID NO: 456 - DNA, 1648 bp, Homo sapiens
ccagctacgagtggcagcaagaaggcaattcctggctggcggttggcatctaagcaggcatcaggatgttgggctgggtccagagggtgctgcctcagcccccagggacccctcggaagaccaagatgcaggaggaagaggaagtggaaccagagccagagatggaggcggaggtggaaccagaaccgaatcctgaggaggccgagacagagtccgagtccatgccccccgaagagtcattcaaggaggaggaagtggctgtggcagacccaagccctcaggagaccaaggaggctgcccttacttccaccatatccctccgggcccagggcgctgagatttctgaaatgaatagtcccagccgcagggtactgacctggctcatgaagggcgtagagaaggtgatcccgcagcctgttcacagcatcacggaggacccggctcagatcctggggcatggcagcactggggacacagggtgcacagatgaacccaatgaggcccttgaggcccaagacactaggcctgggctgcggctgcttctgtggctggagcagaatctggaaagagtgcttcctcagccccccaaatcctctgaggtctggagagatgagcctgcagttgctacaggtgctgcctcagacccagcgcctccaggacgcccccaggaaatggggcccaagctgcaggcccgggagaccccctccctgcccacacccatccccctgcagcccaaggaggaacccaaggaggcaccagctccagagccccagcccggctcccaggcccagacctcctccctgccaccaaccagggaccctgccaggctggtggcatgggtcctgcacaggctggagatggccttgccgcagccagtgctacatgggaaaataggggaacaggagcctgactcccctgggatatgtgatgtgcagaccagggtgatgggagctggaggtctctgaaataagggagaagggaatctgggagagctcagatggacacatggatggaaggaaagaaggatgccctgaagagaagaccttcccgggggaggtggccactgacaccccaccctatttgaacagcgaacccctccctctccacacactcccaggcaggacaaggggagccagagtcacctgcaccagccccagagcctcccagaccagaacaaggggaaggccagccatgggcagcctgcaagatttaggctagacagcaggacttacccccagagggctgtggaaaaggcccatagccgggcgtggtggctcacgcctgtaatcccagcactttgggaggctgaggcaggaggattgcttgagccccgaagttcgagaccaccgtgggcaacacagtgagaccctgtctctaaaaaaccttttttaaattaataaattaaaaagccccatggatggaggactcagtattgagcatctctttgagaggacgcgtgcacagcccccagtgtggtacctggcaccgtcagcacctcgacaggatacagtttttcccagaagaggttctccctaggcctggccacactctctccttccaaggcttggggacaccaatgagcagcaacaaatgttttcattaacattaaaagagtgtaaatgagcacatcaaaaaaaaaaaaaaaaaa

SEQ ID NO: 457 - DNA, 5645 bp, Homo sapiens
ccagctacgagtggcagcaagaaggcaattcctggctggcggttggcatctaagcaggcatcaggatgttgggctgggtccagagggtgctgcctcagcccccagggacccctcggaagaccaagatgcaggaggaagaggaagtggaaccagagccagagatggaggcggaggtggaaccagaaccgaatcctgaggaggccgagacagagtccgagtccatgccccccgaagagtcattcaaggaggaggaagtggctgtggcagacccaagccctcaggagaccaaggaggctgcccttacttccaccatatccctccgggcccagggcgctgagatttctgaaatgaatagtcccagccgcagggtactgacctggctcatgaagggcgtagagaaggtgatcccgcagcctgttcacagcatcacggaggacccggctcagatcctggggcatggcagcactggggacacagggtgcacagatgaacccaatgaggcccttgaggcccaagacactaggcctgggctgcggctgcttctgtggctggagcagaatctggaaagagtgcttcctcagccccccaaatcctctgaggtctggagagatgagcctgcagttgctacagcgcctccaggacgcccccaggaaatggggcccaagctgcaggcccgggagaccccctccctgcccacacccatccccctgcagcccaaggaggaacccaaggaggcaccagctccagagccccagcccggctcccaggcccagacctcctccctgccaccaaccagggaccctgccaggctggtggcatgggtcctgcacaggctggagatggccttgccgcagccagtgctacatgggaaaataggggaacaggagcctgactcccctgggatatgtgatgtgcagaccatcagcatccttcctggaggacaagtggagcctgaccttgtcctagaggaggttgaaccgccctgggaggatgcccaccaggatgtcagtaccagcccacagggtacagaggtggttccagcttatgaagaagagaacaaagctgtggagaagatgcccagagagctgtcccggattgaagaggagaaagaagatgaggaggaggaagaggaagaggaggaggaggaggaagaggaggaggtgactgaggtgctgctggatagctgtgtggtgtcgcaggtgggcgtgggccagagtgaagaagacgggacccggccccagagcacttcagatcagaagctgtgggaggaagttggggaggaggccaagaaggaggctgaagagaaggccaaggaggaggccgaggaggtggctgaagaggaggctgaaaaggagccccaggactgggcggagaccaaggaggagcctgaggctgaggccgaggctgccagttcaggagtgcctgccacgaaacagcacccagaagtgcaggtggaagatactgatgctgatagctgccccctcatggcagaagagaatccaccctcaaccgtgttgccgccaccgtctcctgccaaatcagacacccttatagtcccaagctcagcctcggggacacacaggaagaagctgccctctgaggatgatgaggctgaagagctcaaggcgttgtcaccagcagagtccccagtggttgcctggtctgaccccaccaccccgaaggacactgatggccaggaccgtgcggcctccacggccagcacaaatagcgccatcatcaacgaccggctccaggagctggtgaagctcttcaaggagcggacagagaaagtgaaggagaaactcattgaccctgacgtcacctctgatgaggagagccccaagccctccccagccaagaaagccccagagccagctccagacacaaagcccgctgaagccgagccagtggaagaggagcactattgcgacatgctctgctgcaagttcaaacaccgcccctggaagaagtaccagtttccccagagcattgacccgctgaccaacctgatgtatgtcctatggctgttcttcgtggtgatggcctggaattggaactgttggctgattcccgtgcgctgggccttcccctaccagaccccggacaacatccaccactggctgctgatggattacctatgcgacctcatctacttcctggacatcaccgtgttccagacacgcctgcagtttgtcagaggcggggacatcattacggacaaaaaggacatgcgaaataactacctgaagtctcgccgcttcaagatggacctgctcagcctcctgcccttggattttctctatttgaaagtcggtgtgaaccccctcctccgcctgccccgctgtttaaagtacatggccttcttcgagtttaacagccgcctggaatccatcctcagcaaagcctacgtgtacagggtcatcaggaccacagcctaccttctctacagcctgcatttgaattcctgtctttattactgggcatcggcctatcagggcctcggctccactcactgggtttacgatggcgtgggaaacagttatattcgctgttactactttgctgtgaagaccctcatcaccatcggggggctgcctgaccccaagacactctttgaaattgtcttccagctgctgaattatttcacgggcgtctttgctttctctgtgatgatcggacagatgagagatgtggtaggggccgccaccgccggacagacctactaccgcagctgcatggacagcacggtgaagtacatgaatttctacaagatccccaagtccgtgcagaaccgcgtcaagacctggtacgagtacacctggcactcgcaaggcatgctggatgagtcagagctgatggtgcagcttccagacaagatgcggctggacctcgccatcgacgtgaactacaacatcgttagcaaagtcgcactctttcagggctgtgaccggcagatgatctttgacatgctgaagaggcttcgctctgttgtctacctgcccaacgactatgtgtgcaagaagggggagatcggccgtgagatgtacatcatccaggcagggcaagtgcaggtcttgggcggccctgatgggaaatctgtgctggtgacgctgaaagctggatctgtgtttggagaaataagcttgctggctgttgggggcgggaaccggcgcacggccaacgtggtggcgcacgggtttaccaacctcttcatcctggataagaaggacctgaatgagattttggtgcattatcctgagtctcagaagttactccggaagaaagccaggcgcatgctgagaagcaacaataagcccaaggaggagaagagcgtgctgatccttccaccccgggcgggcaccccaaagctcttcaacgctgccctcgctatgacaggaaagatgggtggcaagggggcaaaaggcggcaaacttgctcacctccgggcccggctcaaagaactggccgcgctggaggcggctgcaaagcagcaagagttggtggaacaggccaagagctcgcaagacgtcaagggagaggaaggctccgccgccccagaccagcacacgcacccaaaggaggccgccaccgacccacccgcgccccggacgccccccgagcccccggggtctccaccgagctctccaccgcctgcctcccttgggaggccggagggagaggaggaggggccggccgagcccgaagagcactcggtgaggatctgcatgagcccgggcccggagccgggagagcagatcctgtcggtgaagatgccggaggaaagggaggagaaggcggagtaaggtggggtgaggcggatcccgcgcgcagttccagcaggtgtgtccccagcgcccgctgcgcccctgcgccccagcgccccaccttcccccacggctcaagagaagatgcttttccgtagtcgtgacctcagtggctgcagctctgaccgtcccgccagcacgccagccccgactcagctcctcgcggggctgggcctgagctcgacaagttgcatcaagtgttcgagtccctgagctctcactatcatttgagagccctaccttttcctgactgttcctctttttaagaacaaaatgattttccacttttaaagttcatgggtgagggataaaatgaggctccaatacatgggaagctttgctgaaaaagtaaagtgttattgaatgtgtggggtttcccctcaggaatttgtctaacacatttcaaggatagaaaatacttcactgccgggcatggtggctcatgcctataatcccagtgctttgggaagccgaagcaggaggatcactggaggccaagagttggagagcagactgggcaacatagcgagacctcatctcaaacaaaaacaaaaacaaacaaaaaaacaatagccaggcgtgatggtgtgcacctgtagtcccagctactggagaggttgaggcaggaggatggcttgagcccaggagtttctggctgcagtgagctggacacagtgagaccctgtctcaaaaaaactaaaagatagccctgcacagtggttcacatctgcaatcccagcagtttgggaagctgagatgggaggattgtttgagaccaggagttcaagaccagcctgggcaacatattgagaccccatctctacaaaacagcagcagaaacaaaagcaaacaacaacaacgtacacaaacaaaaaaacaaagaaaggagggcagcccgagctgttcagctgagaattgccatggttctgagctgagcttgggacgcggttttcctttgcgggcaatcacagtagggggctagatgcccattaaggtagttagtgcttatcttccccagactctattcaattccaatgcaatgccattatctcagaacagatagaagggaaatggacttactggccaggagctgctagcgtttctgcctctgccaggaggaacagcccggtaggagcatcctctgcctgtcatcctgagaaaccccattcgccagcagggatcagtccgttactcacttttgacactctcgctgtagagatggtggcagcaacttcaattaatcctagaaaatgaaatctcccagctgatgacagcacttacattccctaaagctttccagatcgtgtcatgttgcttttatgattcagacaaaaaaaaaaaaagaaaaaagaaaaaaaaagaaaaaagggtcattcagggaatgaatatttatcaagaggattttatttgcataccaaatggctcttgggggagtgagtgattaaaaacaaaatctagtattctagtattaggccatttgtttccacctgcaacagtgaacataaaggacctggaattccaataggtcctgcccattttatataaaattacaggaaaatgtgagctgctcagaggcctttgaaggtttgcaaatgtctgtatgtatttgtccatccactaaaaacaacattcatttccactgtggaaaaatgaaagaatgtgggagtccccaggctggtctaagcatttccaaaccccagagtcagaaacagatttgtctagttgatggcttgtcacgtgatccgggtaatcatcacattgaatatagtgatgattgaccttattattttaccctatttttttaaaaaaaaaaaaaaaaaa

SEQ ID NO: 458 - DNA, 4914 bp, Homo sapiens
cctgcacatctcctcaatctgattagaagcaggaaggattgctggctcctctgccactggagccaccctggctcgggagctgggctcccacttgcatgcaccgacccaggcttgggatgaacgccacagcccccagctgaacccctgcaccatgggcatcctgactggtcccgaccgagagatccaaggtgctgctggatagctgtgtggtgtcgcaggtgggcgtgggccagagtgaagaagacgggacccggccccagagcacttcagatcagaagctgtgggaggaagttggggaggaggccaagaaggaggctgaagagaaggccaaggaggaggccgaggaggtggctgaagaggaggctgaaaaggagccccaggactgggcggagaccaaggaggagcctgaggctgaggccgaggctgccagttcaggagtccccagggtcactcctctgcctgagactctctggccccagcaccatggctacaccatgtcagaacatggagctgaattgcctagtccaggaccagatacctggccaggtggcctctgcctctgccctccaaaacctggtagagcatctccctaatgtgcccagctaccgcatcccaatcacccgcatccctgtcctcacctcccggagaaccagcttgtccaactccagcttcgccaaggagaccaggagctccatccgccaactagtgcctgccacgaaacagcacccagaagtgcaggtggaagatactgatgctgatagctgccccctcatggcagaagagaatccaccctcaaccgtgttgccgccaccgtctcctgccaaatcagacacccttatagtcccaagctcagcctcggggacacacaggaagaagctgccctctgaggatgatgaggctgaagagctcaaggcgttgtcaccagcagagtccccagtggttgcctggtctgaccccaccaccccgaaggacactgatggccaggaccgtgcggcctccacggccagcacaaatagcgccatcatcaacgaccggctccaggagctggtgaagctcttcaaggagcggacagagaaagtgaaggagaaactcattgaccctgacgtcacctctgatgaggagagccccaagccctccccagccaagaaagccccagagccagctccagacacaaagcccgctgaagccgagccagtggaagaggagcactattgcgacatgctctgctgcaagttcaaacaccgcccctggaagaagtaccagtttccccagagcattgacccgctgaccaacctgatgtatgtcctatggctgttcttcgtggtgatggcctggaattggaactgttggctgattcccgtgcgctgggccttcccctaccagaccccggacaacatccaccactggctgctgatggattacctatgcgacctcatctacttcctggacatcaccgtgttccagacacgcctgcagtttgtcagaggcggggacatcattacggacaaaaaggacatgcgaaataactacctgaagtctcgccgcttcaagatggacctgctcagcctcctgcccttggattttctctatttgaaagtcggtgtgaaccccctcctccgcctgccccgctgtttaaagtacatggccttcttcgagtttaacagccgcctggaatccatcctcagcaaagcctacgtgtacagggtcatcaggaccacagcctaccttctctacagcctgcatttgaattcctgtctttattactgggcatcggcctatcagggcctcggctccactcactgggtttacgatggcgtgggaaacagttatattcgctgttactactttgctgtgaagaccctcatcaccatcggggggctgcctgaccccaagacactctttgaaattgtcttccagctgctgaattatttcacgggcgtctttgctttctctgtgatgatcggacagatgagagatgtggtaggggccgccaccgccggacagacctactaccgcagctgcatggacagcacggtgaagtacatgaatttctacaagatccccaagtccgtgcagaaccgcgtcaagacctggtacgagtacacctggcactcgcaaggcatgctggatgagtcagagctgatggtgcagcttccagacaagatgcggctggacctcgccatcgacgtgaactacaacatcgttagcaaagtcgcactctttcagggctgtgaccggcagatgatctttgacatgctgaagaggcttcgctctgttgtctacctgcccaacgactatgtgtgcaagaagggggagatcggccgtgagatgtacatcatccaggcagggcaagtgcaggtcttgggcggccctgatgggaaatctgtgctggtgacgctgaaagctggatctgtgtttggagaaataagcttgctggctgttgggggcgggaaccggcgcacggccaacgtggtggcgcacgggtttaccaacctcttcatcctggataagaaggacctgaatgagattttggtgcattatcctgagtctcagaagttactccggaagaaagccaggcgcatgctgagaagcaacaataagcccaaggaggagaagagcgtgctgatccttccaccccgggcgggcaccccaaagctcttcaacgctgccctcgctatgacaggaaagatgggtggcaagggggcaaaaggcggcaaacttgctcacctccgggcccggctcaaagaactggccgcgctggaggcggctgcaaagcagcaagagttggtggaacaggccaagagctcgcaagacgtcaagggagaggaaggctccgccgccccagaccagcacacgcacccaaaggaggccgccaccgacccacccgcgccccggacgccccccgagcccccggggtctccaccgagctctccaccgcctgcctcccttgggaggccggagggagaggaggaggggccggccgagcccgaagagcactcggtgaggatctgcatgagcccgggcccggagccgggagagcagatcctgtcggtgaagatgccggaggaaagggaggagaaggcggagtaaggtggggtgaggcggatcccgcgcgcagttccagcaggtgtgtccccagcgcccgctgcgcccctgcgccccagcgccccaccttcccccacggctcaagagaagatgcttttccgtagtcgtgacctcagtggctgcagctctgaccgtcccgccagcacgccagccccgactcagctcctcgcggggctgggcctgagctcgacaagttgcatcaagtgttcgagtccctgagctctcactatcatttgagagccctaccttttcctgactgttcctctttttaagaacaaaatgattttccacttttaaagttcatgggtgagggataaaatgaggctccaatacatgggaagctttgctgaaaaagtaaagtgttattgaatgtgtggggtttcccctcaggaatttgtctaacacatttcaaggatagaaaatacttcactgccgggcatggtggctcatgcctataatcccagtgctttgggaagccgaagcaggaggatcactggaggccaagagttggagagcagactgggcaacatagcgagacctcatctcaaacaaaaacaaaaacaaacaaaaaaacaatagccaggcgtgatggtgtgcacctgtagtcccagctactggagaggttgaggcaggaggatggcttgagcccaggagtttctggctgcagtgagctggacacagtgagaccctgtctcaaaaaaactaaaagatagccctgcacagtggttcacatctgcaatcccagcagtttgggaagctgagatgggaggattgtttgagaccaggagttcaagaccagcctgggcaacatattgagaccccatctctacaaaacagcagcagaaacaaaagcaaacaacaacaacgtacacaaacaaaaaaacaaagaaaggagggcagcccgagctgttcagctgagaattgccatggttctgagctgagcttgggacgcggttttcctttgcgggcaatcacagtagggggctagatgcccattaaggtagttagtgcttatcttccccagactctattcaattccaatgcaatgccattatctcagaacagatagaagggaaatggacttactggccaggagctgctagcgtttctgcctctgccaggaggaacagcccggtaggagcatcctctgcctgtcatcctgagaaaccccattcgccagcagggatcagtccgttactcacttttgacactctcgctgtagagatggtggcagcaacttcaattaatcctagaaaatgaaatctcccagctgatgacagcacttacattccctaaagctttccagatcgtgtcatgttgcttttatgattcagacaaaaaaaaaaaaagaaaaaagaaaaaaaaagaaaaaagggtcattcagggaatgaatatttatcaagaggattttatttgcataccaaatggctcttgggggagtgagtgattaaaaacaaaatctagtattctagtattaggccatttgtttccacctgcaacagtgaacataaaggacctggaattccaataggtcctgcccattttatataaaattacaggaaaatgtgagctgctcagaggcctttgaaggtttgcaaatgtctgtatgtatttgtccatccactaaaaacaacattcatttccactgtggaaaaatgaaagaatgtgggagtccccaggctggtctaagcatttccaaaccccagagtcagaaacagatttgtctagttgatggcttgtcacgtgatccgggtaatcatcacattgaatatagtgatgattgaccttattattttaccctattttttt

SEQ ID NO: 459 - DNA, 7313 bp, Homo sapiens
agttctcaggctcacattcccaccacccacctctgagcccagccctccctagcatcaccacttccatcccattcctcagccaagagccaggaatcctgattccagatcccacgcttccctgcctccctcaggtcccagctcttgctcctgcctgtttgcctggaaatggccacgcttctccttctccttggggtgctggtggtaagcccagacgctctggggagcacaacagcagtgcagacacccacctccggagagcctttggtctctactagcgagcccctgagctcaaagatgtacaccacttcaataacaagtgaccctaaggccgacagcactggggaccagacctcagccctacctccctcaacttccatcaatgagggatcccctctttggacttccattggtgccagcactggttcccctttacctgagccaacaacctaccaggaagtttccatcaagatgtcatcagtgccccaggaaacccctcatgcaaccagtcatcctgctgttcccataacagcaaactctctaggatcccacaccgtgacaggtggaaccataacaacgaactctccagaaacctccagtaggaccagtggagcccctgttaccacggcagctagctctctggagacctccagaggcacctctggaccccctcttaccatggcaactgtctctctggagacttccaaaggcacctctggaccccctgttaccatggcaactgactctctggagacctccactgggaccactggaccccctgttaccatgacaactggctctctggagccctccagcggggccagtggaccccaggtctctagcgtaaaactatctacaatgatgtctccaacgacctccaccaacgcaagcactgtgcccttccggaacccagatgagaactcacgaggcatgctgccagtggctgtgcttgtggccctgctggcggtcatagtcctcgtggctctgctcctgctgtggcgccggcggcagaagcggcggactggggccctcgtgctgagcagaggcggcaagcgtaacggggtggtggacgcctgggctgggccagcccaggtccctgaggagggggccgtgacagtgaccgtgggagggtccgggggcgacaagggctctgggttccccgatggggaggggtctagccgtcggcccacgctcaccactttctttggcagacggaagtctcgccagggctccctggcgatggaggagctgaagtctgggtcaggccccagcctcaaaggggaggaggagccactggtggccagtgaggatggggctgtggacgccccagctcctgatgagcccgaagggggagacggggctgccccttaagtgtcggtgaatagtgaggctggaggccggaatctcagccagcctccagcaccttccctctcaccatcccactgccccctcgctcccatgtttccacccggcaccctgatcctcacccgaatctcctttttttttttcttttgagacagagtttcgctttgtcgcccaggctggagtgcaatgcacgatctcagttcactgcaacctctgcctcctaagttcaggcgattctcctgcctcagcttcccgagtaactgagattacaggcacccaccaccatgcccagctgcttttttgtatttttggtagagatggggtttcaccatgttggctaggctggtctcaaactcctgacctcaggtgatctacctgcctcagcctcccaaagtgctgagattacagacatgagcctccgcgccttgcctcctcacccacctcttcactctgaatcctcatgaggcttctcagccctggatttcctgctgccatcctcacccagcacccacaactagcgcctgggcagggcagggctggcacctctcaacgtctgtggactgaatgaataaaccctcctcatccacccctatttatctccatcaccatttccccctctttcttgttcctggaaacggctgctgagtctccatcggccaaacttatctgccctgtgatttctttgacaattctccttttcccccagaacccaccctgggttgaccagagtctgggaagaaggacaagagaacccggcaaactccctcctaggattaactttgtaaagcacccttgccctgtagctgcaagggctgtggaacctgggcagcccgcaaccacctttagctctgggccccccaggccagcctggagcatggctgggtggggccaccagcccatgctctcaggcgggcctgtgatctttcccagggcacatggactgtaggctggccctggcccacaccaccacactctccccagccatggacagaggcagccagaggcctcacggtttctcctccgagtttctggctgggtgtagttctcagaaaccccagtgcctgcgtgtgtccactcgtgggtgtggtttgtgtgcaagagctgaggatttggcgatgcttgggaggggtagttgtgggtacagacggtgtgggggtgggaagtggtgcagagactgaagagggtcaacctgggcatgggggacacagggactgctgagaacgtgcgtgtcatctttgctctgatggggtggacatagcagaaaatctaactctgtctgtagccccatacagaatgccagggtgagcacagtggctggtgcctttaatcccagcactttggaaagttgaggcaggaggatcgcttgagcccaggagttcgagtctgaagtgagctgtgattgcaccactgcacttcagcctgggcaacagagtgagcccctgtctcaaaaaagaaaagaaaaagaaagccaggcttcatggaaagatcgtatgtgtgacccaaatatgagttcttcagctcagccatggtaatcccttccttgaagtctccatttctgcagtacacatgcatgtgcgctctctctctctctctctctctcacacacacacacacacacacacacacacgcgcgcgcgcgcgcgctctcctgcgaacagaggcagggggagaggggtttgccctggtctcggggactggtctggctggcgcttccccactgcacgtttccaggtttagtttgtctgtgtctcctcttccatcccaggggctgagccccttccatcctccaagaggaaccagtgagagtgagtgaaggaggggcctggagccagggacttcccctgtggggcctgggtggagaggggagaactcaatggtgctgcctttgagaccagcccaggctacagcccaggagcacacatgggccagggcagttggtatttcccgaggacaaagaggaaattttcaaagaggaagttgttgagttagagcttgcggtggctgagagcagacaggttgacctgcaaaaaaagacaggggaggcatgtgagtgtgacagccctgctctgtggcctgggcaggagatgggggaaagggtcaggtgggggatgggctcgtgcagtgggagaggagacggagggagggagcgggaaggggcttgcttagtgggtgggaagagctgagctcggatggaaccagcttctaccagccaggctgggcacccactgggctgcatctggtggccttttctgattgctatttggactcactgcagctgcagaatgacagaggccatgtccaaaatcccttagagacactgttgtcttagagttgttaaaataagagcccccatatcaggtttagaaaatactgtcaccgaacgaacgtcgctgtcctcagctccacctccctttcctttgacagatatggttgttttctaagccaggactggttttagtcaggtcctgggcgaatcctgaaaaaaagaggtagtacgggtaaggaaggcacccaacagggctttcacaatccagaaaatatcaaaatataagtgttaaaagagaggcacaggccgggtgcggtggctcacgcctgtaatctcagcactttgggaggccaaggtgggcagatcatgaggtcaggagtttgagaccagcctggccaatatgatgaaaccccgtttctactaaaaatacaaaagttagccaggcatggtggtgtgctcctgtaatcccagctacttaggaggctgaggccagagaattgcttgaaccctggagtcagaggttgcagtgagccgggatcatgccactgtactccaggctgggtgacaaagtgagactgtctcaaaaaataaaaataaataaaataaataaaagagaggcacaaacagtgttatgaatgcaccaaggaaaatggtgcattcataactctcaggtgaagcctaccaagccatgcgtgtgtgcacatatgtgtgtacgtgtgcatgtgcgtgcgtgcatgtgcgtgcgtgcatgtgcctgtgtgtgtatgtgtgcacatgtgtgtgcgcatgtgtgtgtgtgcgcgcatgtgtgtgtgcatgcatgttctcccatgcatgtgtactgtggcaagggagactttgaggaagagattccagtggctgagcagaagggctcgcattgccctggcgaaaggttggaaggcttcacctgagagtgtgtcgtggcctttgtcatatccactgcttgattcctttctttaaaaattatttttattgttttctacatatgagaaccaccacacctggctaatttttgtattttttgtagagatggggtttcaccatgttgtcccggctggtctcaaactcccgggcacaagagatccacctgcctcagcctcccaaaatgctgggactataggcatgagccactgcacccagccactgcttcattcctggtggctgctgtgcctggcatgttgcagatcctccatgaatatgcatttgaatgaatgaatgaatgaatgaatgaatgaatggagatgacgcctcagagattctttcttttgagatgaggtctcattctgtcacccagactagagggcagtggtgcaatcacagctcaccacagcctcaacctcctgggcctcccaagtagctgcgatcacaggtgtgcaccaacatgcccagctaatttttttttttaatttttaatttgtacagacagggtcttgctgtgttgcccaggctggtctcaaactcctgggctcaagtggtcctcccacctaagcttccccaaatactgggattataggtgtgagccactgtgcccaggcttgcctcagatatttgaaggctgggaaggattttgcaaagctgggaaaaggaaaaggcattcccagcagaggggatagcaggtggaaatacataattaaaaaaaaaaaacgtggagcagatccagcgcagtggctcatgcctgtaatcccagcactttgggaggcagagcagggaggattgcttgagtctaggagttcaagaccagcctgggtaacatagaaagaccctgtctctacaaaaacacaaaaaattagccaggcgtggtggtgcatgcctgtagtaccagctacttgagaagctgaggcaggaggactgcttgaagccaggagtttgagaccagcctgggcaacatagtgagaccccgtgtctacaaaaagtaaacatttatatatatattttttaaagtggagcagttcaatatagagtcttttttgaacaaacgtgaaatagatgtcttttttttttttttgagatggagttttcactcttgttacccaggctggagtgcaatggcgtgatcttggctcaccagaacctccgcctcctgggttcaaacaattctcctgcctcagcctcccaggtagctgggattacaggcatgcaccaccaaacccggataattttgtatttttagtagagatggggtttcaccatgttggtcaagctggtcttgaactcccgacctctgctgatccgtatgcctcggcctcccaaagtgctgggattacatgcgtgagccaccgtgcccgacaatagatgtcttttaattttctggaggaaaaagcaaagcaaaagaagcagtggatattttaagactaaaaaggaaaacaaaaaaaggagatagagcaggccagacgtggtggctcaacgtctgtaatcccagcactttgggaggccgaggcaggtggatcacctgaggtcaggagttcaagaccagcctgaccaacatggtgaaaccctgtttcaaaatacaaaaaattagctgggcgtggtggcgggcacctgtaatcccagctacttgggaggctgaggcaggagaatcccttgaacccaggaggtggaggttgcagtgagccgagatcacgccattgcactccagcctgggcgacaagtaaaaaactccatctcaaaaaaaaaaaaggagatagagcaaggaacagtaagaaaatagttgggtgcagtggctatgcggtggcactataggaggctgaggcgggcagatcacctgaggtcaggagttggagaccagcctgggcaacatagacccctatctctacaaaaaatttgaaatatgaaaaattagccaggtgtagtggtgtgcgcctgtggtaccagctactcaagaggcgaaggcagggaagattgcttgagcccaggagtttgaggctatagtgagctgtgatcatgccactgcactccagcctgggcaatagtgtgagactctgtctcaaaagaaagaacatggccaggcgtggtggctcacacctgtaatcccagcactttgggaggccgaggcagtcagatcatgaggccagtttgaaaccagcctggccaacatggtgaaaccctgtctctactaaaaatacaaaaattagccaggcgtggtggcatgcccccgtaatcccagctacttgggggtctgaggcagaagaattgcttgaaaccgggaggcagaggttgcagtgagccgagatcgtgtcattgcactctagtctgggcgacagagcaagactccgtcttggaaaaaaatttaaaaaaagaaaatataaaatatggtataagattaaatatattagttatgaaaataattgtaaatggcttattgaacttatagtcagtaaaaatcatgtttttgaaaattatgtaatgactttggaaaataccagcaatataatgttaagtggggaaaaaagcaagttactcctctgtaatacatatgattttagttttgtaataaaaattcccaaccatatatgcacttatagggaaacaaaggacccatcgcaaatgttttccatgctgatctccaaagtggtgagtttatgtgtgatttttattttgtttatgctcttctgtattttccgaatttcatacaataaatatctgttacttttacaatatgaaaaaa

SEQ ID NO: 460 - DNA, 7280 bp, Homo sapiens
cctttccccttggggccctgtccttcccagtcttgccccagcctcgggaggtggtggagtgacctggccccagtgctgcgtccttatcagccgagccggtcccagctcttgctcctgcctgtttgcctggaaatggccacgcttctccttctccttggggtgctggtggtaagcccagacgctctggggagcacaacagcagtgcagacacccacctccggagagcctttggtctctactagcgagcccctgagctcaaagatgtacaccacttcaataacaagtgaccctaaggccgacagcactggggaccagacctcagccctacctccctcaacttccatcaatgagggatcccctctttggacttccattggtgccagcactggttcccctttacctgagccaacaacctaccaggaagtttccatcaagatgtcatcagtgccccaggaaacccctcatgcaaccagtcatcctgctgttcccataacagcaaactctctaggatcccacaccgtgacaggtggaaccataacaacgaactctccagaaacctccagtaggaccagtggagcccctgttaccacggcagctagctctctggagacctccagaggcacctctggaccccctcttaccatggcaactgtctctctggagacttccaaaggcacctctggaccccctgttaccatggcaactgactctctggagacctccactgggaccactggaccccctgttaccatgacaactggctctctggagccctccagcggggccagtggaccccaggtctctagcgtaaaactatctacaatgatgtctccaacgacctccaccaacgcaagcactgtgcccttccggaacccagatgagaactcacgaggcatgctgccagtggctgtgcttgtggccctgctggcggtcatagtcctcgtggctctgctcctgctgtggcgccggcggcagaagcggcggactggggccctcgtgctgagcagaggcggcaagcgtaacggggtggtggacgcctgggctgggccagcccaggtccctgaggagggggccgtgacagtgaccgtgggagggtccgggggcgacaagggctctgggttccccgatggggaggggtctagccgtcggcccacgctcaccactttctttggcagacggaagtctcgccagggctccctggcgatggaggagctgaagtctgggtcaggccccagcctcaaaggggaggaggagccactggtggccagtgaggatggggctgtggacgccccagctcctgatgagcccgaagggggagacggggctgccccttaagtgtcggtgaatagtgaggctggaggccggaatctcagccagcctccagcaccttccctctcaccatcccactgccccctcgctcccatgtttccacccggcaccctgatcctcacccgaatctcctttttttttttcttttgagacagagtttcgctttgtcgcccaggctggagtgcaatgcacgatctcagttcactgcaacctctgcctcctaagttcaggcgattctcctgcctcagcttcccgagtaactgagattacaggcacccaccaccatgcccagctgcttttttgtatttttggtagagatggggtttcaccatgttggctaggctggtctcaaactcctgacctcaggtgatctacctgcctcagcctcccaaagtgctgagattacagacatgagcctccgcgccttgcctcctcacccacctcttcactctgaatcctcatgaggcttctcagccctggatttcctgctgccatcctcacccagcacccacaactagcgcctgggcagggcagggctggcacctctcaacgtctgtggactgaatgaataaaccctcctcatccacccctatttatctccatcaccatttccccctctttcttgttcctggaaacggctgctgagtctccatcggccaaacttatctgccctgtgatttctttgacaattctccttttcccccagaacccaccctgggttgaccagagtctgggaagaaggacaagagaacccggcaaactccctcctaggattaactttgtaaagcacccttgccctgtagctgcaagggctgtggaacctgggcagcccgcaaccacctttagctctgggccccccaggccagcctggagcatggctgggtggggccaccagcccatgctctcaggcgggcctgtgatctttcccagggcacatggactgtaggctggccctggcccacaccaccacactctccccagccatggacagaggcagccagaggcctcacggtttctcctccgagtttctggctgggtgtagttctcagaaaccccagtgcctgcgtgtgtccactcgtgggtgtggtttgtgtgcaagagctgaggatttggcgatgcttgggaggggtagttgtgggtacagacggtgtgggggtgggaagtggtgcagagactgaagagggtcaacctgggcatgggggacacagggactgctgagaacgtgcgtgtcatctttgctctgatggggtggacatagcagaaaatctaactctgtctgtagccccatacagaatgccagggtgagcacagtggctggtgcctttaatcccagcactttggaaagttgaggcaggaggatcgcttgagcccaggagttcgagtctgaagtgagctgtgattgcaccactgcacttcagcctgggcaacagagtgagcccctgtctcaaaaaagaaaagaaaaagaaagccaggcttcatggaaagatcgtatgtgtgacccaaatatgagttcttcagctcagccatggtaatcccttccttgaagtctccatttctgcagtacacatgcatgtgcgctctctctctctctctctctctcacacacacacacacacacacacacacacgcgcgcgcgcgcgcgctctcctgcgaacagaggcagggggagaggggtttgccctggtctcggggactggtctggctggcgcttccccactgcacgtttccaggtttagtttgtctgtgtctcctcttccatcccaggggctgagccccttccatcctccaagaggaaccagtgagagtgagtgaaggaggggcctggagccagggacttcccctgtggggcctgggtggagaggggagaactcaatggtgctgcctttgagaccagcccaggctacagcccaggagcacacatgggccagggcagttggtatttcccgaggacaaagaggaaattttcaaagaggaagttgttgagttagagcttgcggtggctgagagcagacaggttgacctgcaaaaaaagacaggggaggcatgtgagtgtgacagccctgctctgtggcctgggcaggagatgggggaaagggtcaggtgggggatgggctcgtgcagtgggagaggagacggagggagggagcgggaaggggcttgcttagtgggtgggaagagctgagctcggatggaaccagcttctaccagccaggctgggcacccactgggctgcatctggtggccttttctgattgctatttggactcactgcagctgcagaatgacagaggccatgtccaaaatcccttagagacactgttgtcttagagttgttaaaataagagcccccatatcaggtttagaaaatactgtcaccgaacgaacgtcgctgtcctcagctccacctccctttcctttgacagatatggttgttttctaagccaggactggttttagtcaggtcctgggcgaatcctgaaaaaaagaggtagtacgggtaaggaaggcacccaacagggctttcacaatccagaaaatatcaaaatataagtgttaaaagagaggcacaggccgggtgcggtggctcacgcctgtaatctcagcactttgggaggccaaggtgggcagatcatgaggtcaggagtttgagaccagcctggccaatatgatgaaaccccgtttctactaaaaatacaaaagttagccaggcatggtggtgtgctcctgtaatcccagctacttaggaggctgaggccagagaattgcttgaaccctggagtcagaggttgcagtgagccgggatcatgccactgtactccaggctgggtgacaaagtgagactgtctcaaaaaataaaaataaataaaataaataaaagagaggcacaaacagtgttatgaatgcaccaaggaaaatggtgcattcataactctcaggtgaagcctaccaagccatgcgtgtgtgcacatatgtgtgtacgtgtgcatgtgcgtgcgtgcatgtgcgtgcgtgcatgtgcctgtgtgtgtatgtgtgcacatgtgtgtgcgcatgtgtgtgtgtgcgcgcatgtgtgtgtgcatgcatgttctcccatgcatgtgtactgtggcaagggagactttgaggaagagattccagtggctgagcagaagggctcgcattgccctggcgaaaggttggaaggcttcacctgagagtgtgtcgtggcctttgtcatatccactgcttgattcctttctttaaaaattatttttattgttttctacatatgagaaccaccacacctggctaatttttgtattttttgtagagatggggtttcaccatgttgtcccggctggtctcaaactcccgggcacaagagatccacctgcctcagcctcccaaaatgctgggactataggcatgagccactgcacccagccactgcttcattcctggtggctgctgtgcctggcatgttgcagatcctccatgaatatgcatttgaatgaatgaatgaatgaatgaatgaatgaatggagatgacgcctcagagattctttcttttgagatgaggtctcattctgtcacccagactagagggcagtggtgcaatcacagctcaccacagcctcaacctcctgggcctcccaagtagctgcgatcacaggtgtgcaccaacatgcccagctaatttttttttttaatttttaatttgtacagacagggtcttgctgtgttgcccaggctggtctcaaactcctgggctcaagtggtcctcccacctaagcttccccaaatactgggattataggtgtgagccactgtgcccaggcttgcctcagatatttgaaggctgggaaggattttgcaaagctgggaaaaggaaaaggcattcccagcagaggggatagcaggtggaaatacataattaaaaaaaaaaaacgtggagcagatccagcgcagtggctcatgcctgtaatcccagcactttgggaggcagagcagggaggattgcttgagtctaggagttcaagaccagcctgggtaacatagaaagaccctgtctctacaaaaacacaaaaaattagccaggcgtggtggtgcatgcctgtagtaccagctacttgagaagctgaggcaggaggactgcttgaagccaggagtttgagaccagcctgggcaacatagtgagaccccgtgtctacaaaaagtaaacatttatatatatattttttaaagtggagcagttcaatatagagtcttttttgaacaaacgtgaaatagatgtcttttttttttttttgagatggagttttcactcttgttacccaggctggagtgcaatggcgtgatcttggctcaccagaacctccgcctcctgggttcaaacaattctcctgcctcagcctcccaggtagctgggattacaggcatgcaccaccaaacccggataattttgtatttttagtagagatggggtttcaccatgttggtcaagctggtcttgaactcccgacctctgctgatccgtatgcctcggcctcccaaagtgctgggattacatgcgtgagccaccgtgcccgacaatagatgtcttttaattttctggaggaaaaagcaaagcaaaagaagcagtggatattttaagactaaaaaggaaaacaaaaaaaggagatagagcaggccagacgtggtggctcaacgtctgtaatcccagcactttgggaggccgaggcaggtggatcacctgaggtcaggagttcaagaccagcctgaccaacatggtgaaaccctgtttcaaaatacaaaaaattagctgggcgtggtggcgggcacctgtaatcccagctacttgggaggctgaggcaggagaatcccttgaacccaggaggtggaggttgcagtgagccgagatcacgccattgcactccagcctgggcgacaagtaaaaaactccatctcaaaaaaaaaaaaggagatagagcaaggaacagtaagaaaatagttgggtgcagtggctatgcggtggcactataggaggctgaggcgggcagatcacctgaggtcaggagttggagaccagcctgggcaacatagacccctatctctacaaaaaatttgaaatatgaaaaattagccaggtgtagtggtgtgcgcctgtggtaccagctactcaagaggcgaaggcagggaagattgcttgagcccaggagtttgaggctatagtgagctgtgatcatgccactgcactccagcctgggcaatagtgtgagactctgtctcaaaagaaagaacatggccaggcgtggtggctcacacctgtaatcccagcactttgggaggccgaggcagtcagatcatgaggccagtttgaaaccagcctggccaacatggtgaaaccctgtctctactaaaaatacaaaaattagccaggcgtggtggcatgcccccgtaatcccagctacttgggggtctgaggcagaagaattgcttgaaaccgggaggcagaggttgcagtgagccgagatcgtgtcattgcactctagtctgggcgacagagcaagactccgtcttggaaaaaaatttaaaaaaagaaaatataaaatatggtataagattaaatatattagttatgaaaataattgtaaatggcttattgaacttatagtcagtaaaaatcatgtttttgaaaattatgtaatgactttggaaaataccagcaatataatgttaagtggggaaaaaagcaagttactcctctgtaatacatatgattttagttttgtaataaaaattcccaaccatatatgcacttatagggaaacaaaggacccatcgcaaatgttttccatgctgatctccaaagtggtgagtttatgtgtgatttttattttgtttatgctcttctgtattttccgaatttcatacaataaatatctgttacttttacaatatgaaaaaa

SEQ ID NO: 461 - DNA, 1438 bp, Homo sapiens
ccccatctctactaaaaaaaaaaaaaaaaaaaggatttgaagtcctggccggagcaattaggcaagggataaaaaggcacctaaggcccttttgcaataagaagccagatggataaaggaagtgctggtcaccctggaggtgtactggtttggggaaggtccccggcccccacagccctctggggagcctcaccctggctctccccactcacctcagccctcaggcagcccctccacagggcccctctcctgcctggacagctctgctggtctccccgtcccctggagaagaacaaggccatgggtcggcccctgctgctgcccctgctgctcctgctgcagccgccagcatttctgcagcctggtggctccacaggatctggtccaagctacctttatggggtcactcaaccaaaacacctctcagcctccatgggtggctctgtggaaatccccttctccttctattacccctgggagttagccatagttcccaacgtgagaatatcctggagacggggccacttccacgggcagtccttctacagcacaaggccgccttccattcacaaggattatgtgaaccggctctttctgaactggacagagggtcaggagagcggcttcctcaggatctcaaacctgcggaaggaggaccagtctgtgtatttctgccgagtcgagctggacacccggagatcagggaggcagcagttgcagtccatcaaggggaccaaactcaccatcacccaggctgtcacaaccaccaccacctggaggcccagcagcacaaccaccatagccggcctcagggtcacagaaagcaaagggcactcagaatcatggcacctaagtctggacactgccatcagggttgcattggctgtcgctgtgctcaaaactgtcattttgggactgctgtgcctcctcctcctgtggtggaggagaaggaaaggtagcagggcgccaagcagtgacttctgaccaacagagtgtggggagaagggatgtgtattagccccggaggacgtgatgtgagacccgcttgtgagtcctccacactcgttccccattggcaagatacatggagagcaccctgaggacctttaaaaggcaaagccgcaaggcagaaggaggctgggtccctgaatcaccgactggaggagagttacctacaagagccttcatccaggagcatccacactgcaatgatataggaatgaggtctgaactccactgaattaaaccactggcatttgggggctgtttattatagcagtgcaaagagttcctttatcctccccaaggatggaaaaatacaatttattttgcttaccatacaccccttttctcctcgtccacattttccaatctgtatggtggctgtcttctatggcagaaggttttggggaataaatagcgtgaaatgctgctgaca

SEQ ID NO: 462 - DNA, 4357 bp, Homo sapiens
gggaagaaaggagttggggcaaaacaggaggcgtttccctacccgcatacatccccgtccccgagacacccaatccccccacccccagcctgcccgcgcctcccgcccccagctcctcgccctggggacagctggcagccccgcgcggaccagacacaaagccgatcaatcccggaggcgtgggggcggagggacgacccgccggggctttcccgggcgctgctctcctcctgctgccccctcgctaggacccggcggacgcctcgtctggttttcacgccctctagcccctacccccacacccccaaaacagaacagacccccatccctgggctggaggacccgcctcttggcagccagctgagaaggcgccccggggagggggaaactgacatcccatctagagccgtccctcctcttcctcccctcccgactctctgctcctttcccgccccagaagttcaagggcccccggcctcctgcgctcctgccgccgggaccctcgacctcctcagagcagccggctgccgccccgggaagatggcgaggaggagccgccaccgcctcctcctgctgctgctgcgctacctggtggtcgccctgggctatcataaggcctatgggttttctgccccaaaagaccaacaagtagtcacagcagtagagtaccaagaggctattttagcctgcaaaaccccaaagaagactgtttcctccagattagagtggaagaaactgggtcggagtgtctcctttgtctactatcaacagactcttcaaggtgattttaaaaatcgagctgagatgatagatttcaatatccggatcaaaaatgtgacaagaagtgatgcggggaaatatcgttgtgaagttagtgccccatctgagcaaggccaaaacctggaagaggatacagtcactctggaagtattagtggctccagcagttccatcatgtgaagtaccctcttctgctctgagtggaactgtggtagagctacgatgtcaagacaaagaagggaatccagctcctgaatacacatggtttaaggatggcatccgtttgctagaaaatcccagacttggctcccaaagcaccaacagctcatacacaatgaatacaaaaactggaactctgcaatttaatactgtttccaaactggacactggagaatattcctgtgaagcccgcaattctgttggatatcgcaggtgtcctgggaaacgaatgcaagtagatgatctcaacataagtggcatcatagcagccgtagtagttgtggccttagtgatttccgtttgtggccttggtgtatgctatgctcagaggaaaggctacttttcaaaagaaacctccttccagaagagtaattcttcatctaaagccacgacaatgagtgaaaatgatttcaagcacacaaaatcctttataatttaaagactccactttagagatacaccaaagccaccgttgttacacaagttattaaactattataaaactctgctttgtccgacatttgcaaagaggtacacgaggaaatggaattggtatttcattttaattttcatgactactaactcacctgaacttgctattttaaacaaatagttctgtcgacacctaaaatataatctggcttcttgtgtctggactaagttaaaagaattaaaatactttgtaatgtcctgggctttgggaaatgttaaccacgtcctaacttctagagaacgttactaaaatataacatactgattgtgaagtcaatccacaggtcatgaaaatataaatcagactctgcacgagagtctgatttagggggtccaacaaatactctgacagatgcaaaaggaacctctggtctcatttctgccagaatcctcttttctcccctaatatcatccttattctgatgctcgttcatcactaacacacccacagaaaggaggaagcgggatgggtcttatgcccaaggatttgcactttgtgtttacttccattcctgggaactaaaagcaacatcaaaagaaatgcctaatggctggagcccacaggtgtgcaccacaggatttgcctggtgtgtgtcactgatttcttcattaaacgtaatttagatggtcaaacacaaacccaagtggcttatttcacccctactgctgcttgccactgcttccttcttgtaagatttctttgaagaggatcagtgactttgacatcagaactcaccactggagcctacacaagtttgcagatacctttccctgcaggagtggtgacttcacatctttctgtctctaaaaattgtgcagtgacattccgggccaagtcccttagtcaggggttgacaattctgcttttggacaaggagggatgtggagggaagaagtaatagtctaccaggaaaatgagacgaaaaagctcagtatgactccctgcatctggtacccctcttgaaacacagtgggcacatgagcaatggctcaaacgaaaagtggatctaatgtgggtttctcaaccgatgaaccacaaaagcttccagctactattacaatgtgaaaattccaatgatccgtttaccagagcaattagactatgttaaaaattcatatcatttgtaacttcttttaattactgaattgatattaaaaacaaaatatggctagggcatgtcctattcttctgggcaaatgtggatgaaaaggtcacttgctacctttgacaactatgaacatgatggttaatcttctttctttttttttttttttttttgagacggagtctcactctgtcgcccaggctggagtacagtggcacaatcttggctcactgcaacctccgcctcccctccgcctcccagattcaagcacttctcctgcctcagcctcccaagtagctgagattataggcgtgtaccaccacacctggctaatttttgtattttagtagagaagggtttcaccatgttggccaggctggtctcaaacctctgacctcaaatgatccacccccatcagcctcccaaagtgctgggattataggcatgagccactgcactgggcaggttaatcttctttcaaaagagtctgctctttctacccaattggcgaagcaaatccccaggattcaccgaacaaatggattaagcacccactgagtgcctagcatgtgcctggacaccaggccaccgggaagatgctccccctttgacttgtctatgacatgctatgtctctcaccagatcccttcctggaggtcgggcttctgtaacatggctctgcccccaaaataaaattttcaccacgagtcagggatcggcaaacattttctgtaaagagccagaaagtagatattttaagtcataaggtccctgttaacaactacttgactctgccattgtagcacaaaggcagccacagacaaaacaagcaagtagtcatgtctgtgttccaataagactttatttacaaaaacagcaggcacagacaagatttggcccacaggcatagattcccaactcatggtggtgaagtacagaaaaaaacacctgtctacaagcttttgtaagaaatcaggctaaatgttacctatgttttggttggaagatttctttggtttgaggaatgctttcctcttgcattggcatgccaagaggatagatgactctgaaagacgcctcttcagacatacctgtcatcacacaagatcaacttcttcagtttaaatgacacaaatccatattgtggaaggaaaatatgtagtgccttagcttcactaatagttgtaaaacttctttttaagacatcaaaggctagaggattcattttatgcagtgcgaacatctaataacactctctgtgtcaaatatatattgtacattaccttaaactattgtaatagctaggtaaaaatccttgtataaaagaatgttttcccccacacaaagggcagagtattgagcactaatttcctattaaaagtatatatatgtatctgtgggtcactggtgtccagacttgtatttgcatttgtgtttacttgaggaacttgaacactaacaactggtaaaatcccattgtaattcttacagcattttgactttattttcctgcagtgaattgtgttgtgtaaagattagggctttaaaatcttattagcaagctttgttttgttttaattattgttgctgttgtaactagatttaatttatttttagttggaggtttgacctaagtctggaccaattgattgcttttcaatacaactttgcaaagaacttcctttttccacaggtggctttgttcgattaaagtctacactaataaaaataaaaaaaaaaaaaaaaaaaaaaaaaaaaaaa

SEQ ID NO: 463 - DNA, 4249 bp, Homo sapiens
gggaagaaaggagttggggcaaaacaggaggcgtttccctacccgcatacatccccgtccccgagacacccaatccccccacccccagcctgcccgcgcctcccgcccccagctcctcgccctggggacagctggcagccccgcgcggaccagacacaaagccgatcaatcccggaggcgtgggggcggagggacgacccgccggggctttcccgggcgctgctctcctcctgctgccccctcgctaggacccggcggacgcctcgtctggttttcacgccctctagcccctacccccacacccccaaaacagaacagacccccatccctgggctggaggacccgcctcttggcagccagctgagaaggcgccccggggagggggaaactgacatcccatctagagccgtccctcctcttcctcccctcccgactctctgctcctttcccgccccagaagttcaagggcccccggcctcctgcgctcctgccgccgggaccctcgacctcctcagagcagccggctgccgccccgggaagatggcgaggaggagccgccaccgcctcctcctgctgctgctgcgctacctggtggtcgccctgggctatcataaggcctatgggttttctgccccaaaagaccaacaagtagtcacagcagtagagtaccaaggtgattttaaaaatcgagctgagatgatagatttcaatatccggatcaaaaatgtgacaagaagtgatgcggggaaatatcgttgtgaagttagtgccccatctgagcaaggccaaaacctggaagaggatacagtcactctggaagtattagtggctccagcagttccatcatgtgaagtaccctcttctgctctgagtggaactgtggtagagctacgatgtcaagacaaagaagggaatccagctcctgaatacacatggtttaaggatggcatccgtttgctagaaaatcccagacttggctcccaaagcaccaacagctcatacacaatgaatacaaaaactggaactctgcaatttaatactgtttccaaactggacactggagaatattcctgtgaagcccgcaattctgttggatatcgcaggtgtcctgggaaacgaatgcaagtagatgatctcaacataagtggcatcatagcagccgtagtagttgtggccttagtgatttccgtttgtggccttggtgtatgctatgctcagaggaaaggctacttttcaaaagaaacctccttccagaagagtaattcttcatctaaagccacgacaatgagtgaaaatgatttcaagcacacaaaatcctttataatttaaagactccactttagagatacaccaaagccaccgttgttacacaagttattaaactattataaaactctgctttgtccgacatttgcaaagaggtacacgaggaaatggaattggtatttcattttaattttcatgactactaactcacctgaacttgctattttaaacaaatagttctgtcgacacctaaaatataatctggcttcttgtgtctggactaagttaaaagaattaaaatactttgtaatgtcctgggctttgggaaatgttaaccacgtcctaacttctagagaacgttactaaaatataacatactgattgtgaagtcaatccacaggtcatgaaaatataaatcagactctgcacgagagtctgatttagggggtccaacaaatactctgacagatgcaaaaggaacctctggtctcatttctgccagaatcctcttttctcccctaatatcatccttattctgatgctcgttcatcactaacacacccacagaaaggaggaagcgggatgggtcttatgcccaaggatttgcactttgtgtttacttccattcctgggaactaaaagcaacatcaaaagaaatgcctaatggctggagcccacaggtgtgcaccacaggatttgcctggtgtgtgtcactgatttcttcattaaacgtaatttagatggtcaaacacaaacccaagtggcttatttcacccctactgctgcttgccactgcttccttcttgtaagatttctttgaagaggatcagtgactttgacatcagaactcaccactggagcctacacaagtttgcagatacctttccctgcaggagtggtgacttcacatctttctgtctctaaaaattgtgcagtgacattccgggccaagtcccttagtcaggggttgacaattctgcttttggacaaggagggatgtggagggaagaagtaatagtctaccaggaaaatgagacgaaaaagctcagtatgactccctgcatctggtacccctcttgaaacacagtgggcacatgagcaatggctcaaacgaaaagtggatctaatgtgggtttctcaaccgatgaaccacaaaagcttccagctactattacaatgtgaaaattccaatgatccgtttaccagagcaattagactatgttaaaaattcatatcatttgtaacttcttttaattactgaattgatattaaaaacaaaatatggctagggcatgtcctattcttctgggcaaatgtggatgaaaaggtcacttgctacctttgacaactatgaacatgatggttaatcttctttctttttttttttttttttttgagacggagtctcactctgtcgcccaggctggagtacagtggcacaatcttggctcactgcaacctccgcctcccctccgcctcccagattcaagcacttctcctgcctcagcctcccaagtagctgagattataggcgtgtaccaccacacctggctaatttttgtattttagtagagaagggtttcaccatgttggccaggctggtctcaaacctctgacctcaaatgatccacccccatcagcctcccaaagtgctgggattataggcatgagccactgcactgggcaggttaatcttctttcaaaagagtctgctctttctacccaattggcgaagcaaatccccaggattcaccgaacaaatggattaagcacccactgagtgcctagcatgtgcctggacaccaggccaccgggaagatgctccccctttgacttgtctatgacatgctatgtctctcaccagatcccttcctggaggtcgggcttctgtaacatggctctgcccccaaaataaaattttcaccacgagtcagggatcggcaaacattttctgtaaagagccagaaagtagatattttaagtcataaggtccctgttaacaactacttgactctgccattgtagcacaaaggcagccacagacaaaacaagcaagtagtcatgtctgtgttccaataagactttatttacaaaaacagcaggcacagacaagatttggcccacaggcatagattcccaactcatggtggtgaagtacagaaaaaaacacctgtctacaagcttttgtaagaaatcaggctaaatgttacctatgttttggttggaagatttctttggtttgaggaatgctttcctcttgcattggcatgccaagaggatagatgactctgaaagacgcctcttcagacatacctgtcatcacacaagatcaacttcttcagtttaaatgacacaaatccatattgtggaaggaaaatatgtagtgccttagcttcactaatagttgtaaaacttctttttaagacatcaaaggctagaggattcattttatgcagtgcgaacatctaataacactctctgtgtcaaatatatattgtacattaccttaaactattgtaatagctaggtaaaaatccttgtataaaagaatgttttcccccacacaaagggcagagtattgagcactaatttcctattaaaagtatatatatgtatctgtgggtcactggtgtccagacttgtatttgcatttgtgtttacttgaggaacttgaacactaacaactggtaaaatcccattgtaattcttacagcattttgactttattttcctgcagtgaattgtgttgtgtaaagattagggctttaaaatcttattagcaagctttgttttgttttaattattgttgctgttgtaactagatttaatttatttttagttggaggtttgacctaagtctggaccaattgattgcttttcaatacaactttgcaaagaacttcctttttccacaggtggctttgttcgattaaagtctacactaataaaaataaaaaaaaaaaaaaaaaaaaaaaaaaaaaaa

SEQ ID NO: 464 - DNA, 1747 bp, Homo sapiens
gggaagaaaggagttggggcaaaacaggaggcgtttccctacccgcatacatccccgtccccgagacacccaatccccccacccccagcctgcccgcgcctcccgcccccagctcctcgccctggggacagctggcagccccgcgcggaccagacacaaagccgatcaatcccggaggcgtgggggcggagggacgacccgccggggctttcccgggcgctgctctcctcctgctgccccctcgctaggacccggcggacgcctcgtctggttttcacgccctctagcccctacccccacacccccaaaacagaacagacccccatccctgggctggaggacccgcctcttggcagccagctgagaaggcgccccggggagggggaaactgacatcccatctagagccgtccctcctcttcctcccctcccgactctctgctcctttcccgccccagaagttcaagggcccccggcctcctgcgctcctgccgccgggaccctcgacctcctcagagcagccggctgccgccccgggaagatggcgaggaggagccgccaccgcctcctcctgctgctgctgcgctacctggtggtcgccctgggctatcataaggcctatgggttttctgccccaaaagaccaacaagtagtcacagcagtagagtaccaagaggctattttagcctgcaaaaccccaaagaagactgtttcctccagattagagtggaagaaactgggtcggagtgtctcctttgtctactatcaacagactcttcaaggtgattttaaaaatcgagctgagatgatagatttcaatatccggatcaaaaatgtgacaagaagtgatgcggggaaatatcgttgtgaagttagtgccccatctgagcaaggccaaaacctggaagaggatacagtcactctggaagtattagtggctccagcagttccatcatgtgaagtaccctcttctgctctgagtggaactgtggtagagctacgatgtcaagacaaagaagggaatccagctcctgaatacacatggtttaaggatggcatccgtttgctagaaaatcccagacttggctcccaaagcaccaacagctcatacacaatgaatacaaaaactggaactctgcaatttaatactgtttccaaactggacactggagaatattcctgtgaagcccgcaattctgttggatatcgcaggtgtcctgggaaacgaatgcaagtagatgatctcaacataagtggcatcatagcagccgtagtagttgtggccttagtgatttccgtttgtggccttggtgtatgctatgctcagaggaaaggctacttttcaaaagaaacctccttccagaagagtaattcttcatctaaagccacgacaatgagtgaaaatgtgcagtggctcacgcctgtaatcccagcactttggaaggccgcggcgggcggatcacgaggtcaggagttctagaccagtctggccaatatggtgaaaccccatctctactaaaatacaaaaattagctgggcatggtggcatgtgcctgcagttccagctgcttgggagacaggagaatcacttgaacccgggaggcggaggttgcagtgagctgagatcacgccactgcagtccagcctgggtaacagagcaagattccatctcaaaaaataaaataaataaataaataaatactggtttttacctgtagaattcttacaataaatatagcttgatattc

SEQ ID NO: 465 - DNA, 4353 bp, Homo sapiens
gggaagaaaggagttggggcaaaacaggaggcgtttccctacccgcatacatccccgtccccgagacacccaatccccccacccccagcctgcccgcgcctcccgcccccagctcctcgccctggggacagctggcagccccgcgcggaccagacacaaagccgatcaatcccggaggcgtgggggcggagggacgacccgccggggctttcccgggcgctgctctcctcctgctgccccctcgctaggacccggcggacgcctcgtctggttttcacgccctctagcccctacccccacacccccaaaacagaacagacccccatccctgggctggaggacccgcctcttggcagccagctgagaaggcgccccggggagggggaaactgacatcccatctagagccgtccctcctcttcctcccctcccgactctctgctcctttcccgccccagaagttcaagggcccccggcctcctgcgctcctgccgccgggaccctcgacctcctcagagcagccggctgccgccccgggaagatggcgaggaggagccgccaccgcctcctcctgctgctgctgcgctacctggtggtcgccctgggctatcataaggcctatgggttttctgccccaaaagaccaacaagtagtcacagcagtagagtaccaagaggctattttagcctgcaaaaccccaaagaagactgtttcctccagattagagtggaagaaactgggtcggagtgtctcctttgtctactatcaacagactcttcaaggtgattttaaaaatcgagctgagatgatagatttcaatatccggatcaaaaatgtgacaagaagtgatgcggggaaatatcgttgtgaagttagtgccccatctgagcaaggccaaaacctggaagaggatacagtcactctggaagtattagtggctccagcagttccatcatgtgaagtaccctcttctgctctgagtggaactgtggtagagctacgatgtcaagacaaagaagggaatccagctcctgaatacacatggtttaaggatggcatccgtttgctagaaaatcccagacttggctcccaaagcaccaacagctcatacacaatgaatacaaaaactggaactctgcaatttaatactgtttccaaactggacactggagaatattcctgtgaagcccgcaattctgttggatatcgcaggtgtcctgggaaacgaatgcaaatgatctcaacataagtggcatcatagcagccgtagtagttgtggccttagtgatttccgtttgtggccttggtgtatgctatgctcagaggaaaggctacttttcaaaagaaacctccttccagaagagtaattcttcatctaaagccacgacaatgagtgaaaatgatttcaagcacacaaaatcctttataatttaaagactccactttagagatacaccaaagccaccgttgttacacaagttattaaactattataaaactctgctttgtccgacatttgcaaagaggtacacgaggaaatggaattggtatttcattttaattttcatgactactaactcacctgaacttgctattttaaacaaatagttctgtcgacacctaaaatataatctggcttcttgtgtctggactaagttaaaagaattaaaatactttgtaatgtcctgggctttgggaaatgttaaccacgtcctaacttctagagaacgttactaaaatataacatactgattgtgaagtcaatccacaggtcatgaaaatataaatcagactctgcacgagagtctgatttagggggtccaacaaatactctgacagatgcaaaaggaacctctggtctcatttctgccagaatcctcttttctcccctaatatcatccttattctgatgctcgttcatcactaacacacccacagaaaggaggaagcgggatgggtcttatgcccaaggatttgcactttgtgtttacttccattcctgggaactaaaagcaacatcaaaagaaatgcctaatggctggagcccacaggtgtgcaccacaggatttgcctggtgtgtgtcactgatttcttcattaaacgtaatttagatggtcaaacacaaacccaagtggcttatttcacccctactgctgcttgccactgcttccttcttgtaagatttctttgaagaggatcagtgactttgacatcagaactcaccactggagcctacacaagtttgcagatacctttccctgcaggagtggtgacttcacatctttctgtctctaaaaattgtgcagtgacattccgggccaagtcccttagtcaggggttgacaattctgcttttggacaaggagggatgtggagggaagaagtaatagtctaccaggaaaatgagacgaaaaagctcagtatgactccctgcatctggtacccctcttgaaacacagtgggcacatgagcaatggctcaaacgaaaagtggatctaatgtgggtttctcaaccgatgaaccacaaaagcttccagctactattacaatgtgaaaattccaatgatccgtttaccagagcaattagactatgttaaaaattcatatcatttgtaacttcttttaattactgaattgatattaaaaacaaaatatggctagggcatgtcctattcttctgggcaaatgtggatgaaaaggtcacttgctacctttgacaactatgaacatgatggttaatcttctttctttttttttttttttttttgagacggagtctcactctgtcgcccaggctggagtacagtggcacaatcttggctcactgcaacctccgcctcccctccgcctcccagattcaagcacttctcctgcctcagcctcccaagtagctgagattataggcgtgtaccaccacacctggctaatttttgtattttagtagagaagggtttcaccatgttggccaggctggtctcaaacctctgacctcaaatgatccacccccatcagcctcccaaagtgctgggattataggcatgagccactgcactgggcaggttaatcttctttcaaaagagtctgctctttctacccaattggcgaagcaaatccccaggattcaccgaacaaatggattaagcacccactgagtgcctagcatgtgcctggacaccaggccaccgggaagatgctccccctttgacttgtctatgacatgctatgtctctcaccagatcccttcctggaggtcgggcttctgtaacatggctctgcccccaaaataaaattttcaccacgagtcagggatcggcaaacattttctgtaaagagccagaaagtagatattttaagtcataaggtccctgttaacaactacttgactctgccattgtagcacaaaggcagccacagacaaaacaagcaagtagtcatgtctgtgttccaataagactttatttacaaaaacagcaggcacagacaagatttggcccacaggcatagattcccaactcatggtggtgaagtacagaaaaaaacacctgtctacaagcttttgtaagaaatcaggctaaatgttacctatgttttggttggaagatttctttggtttgaggaatgctttcctcttgcattggcatgccaagaggatagatgactctgaaagacgcctcttcagacatacctgtcatcacacaagatcaacttcttcagtttaaatgacacaaatccatattgtggaaggaaaatatgtagtgccttagcttcactaatagttgtaaaacttctttttaagacatcaaaggctagaggattcattttatgcagtgcgaacatctaataacactctctgtgtcaaatatatattgtacattaccttaaactattgtaatagctaggtaaaaatccttgtataaaagaatgttttcccccacacaaagggcagagtattgagcactaatttcctattaaaagtatatatatgtatctgtgggtcactggtgtccagacttgtatttgcatttgtgtttacttgaggaacttgaacactaacaactggtaaaatcccattgtaattcttacagcattttgactttattttcctgcagtgaattgtgttgtgtaaagattagggctttaaaatcttattagcaagctttgttttgttttaattattgttgctgttgtaactagatttaatttatttttagttggaggtttgacctaagtctggaccaattgattgcttttcaatacaactttgcaaagaacttcctttttccacaggtggctttgttcgattaaagtctacactaataaaaataaaaaaaaaaaaaaaaaaaaaaaaaaaaaaa

SEQ ID NO: 466 - DNA, 4101 bp, Homo sapiens
cctggggacagctggcagccccgcgcggaccagacacaaagccgatcaatcccggaggcgtgggggcggagggacgacccgccggggctttcccgggcgctgctctcctcctgctgccccctcgctaggacccggcggacgcctcgtctggttttcacgccctctagcccctacccccacacccccaaaacagaacagacccccatccctgggctggaggacccgcctcttggcagccagctgagaaggcgccccggggagggggaaactgacatcccatctagagccgtccctcctcttcctcccctcccgactctctgctcctttcccgccccagaagttcaagggcccccggcctcctgcgctcctgccgccgggaccctcgacctcctcagagcagccggctgccgccccgggaagatggcgaggaggagccgccaccgcctcctcctgctgctgctgcgctacctggtggtcgccctgggctatcataaggcctatgggttttctgccccaaaagaccaacaagtagtcacagcagtagagtaccaagaggctattttagcctgcaaaaccccaaagaagactgtttcctccagattagagtggaagaaactgggtcggagtgtctcctttgtctactatcaacagactcttcaaggtgattttaaaaatcgagctgagatgatagatttcaatatccggatcaaaaatgtgacaagaagtgatgcggggaaatatcgttgtgaagttagtgccccatctgagcaaggccaaaacctggaagaggatacagtcactctggaagtattagtggctccagcagttccatcatgtgaagtaccctcttctgctctgagtggaactgtggtagagctacgatgtcaagacaaagaagggaatccagctcctgaatacacatggtttaaggatggcatccgtttgctagaaaatcccagacttggctcccaaagcaccaacagctcatacacaatgaatacaaaaactggaactctgcaatttaatactgtttccaaactggacactggagaatattcctgtgaagcccgcaattctgttggatatcgcaggtgtcctgggaaacgaatgcaagtagatgatctcaacataagtggcatcatagcagccgtagtagttgtggccttagtgatttccgtttgtggccttggtgtatgctatgctcagaggaaaggctacttttcaaaagaaacctccttccaatctggcagacctaactttggctctatgggcgtagagagaagatggatgacaaactatctgaggctatggcagctgggagtggagaagatatactgaagccatggcttcagacagtttgtcatctcctaattcctttgaagaatcatctgccattgacttcctgttcccagatttctggctcaatcctggtctctcagtctcgaagagtaattcttcatctaaagccacgacaatgagtgaaaatgatttcaagcacacaaaatcctttataatttaaagactccactttagagatacaccaaagccaccgttgttacacaagttattaaactattataaaactctgctttgtccgacatttgcaaagaggtacacgaggaaatggaattggtatttcattttaattttcatgactactaactcacctgaacttgctattttaaacaaatagttctgtcgacacctaaaatataatctggcttcttgtgtctggactaagttaaaagaattaaaatactttgtaatgtcctgggctttgggaaatgttaaccacgtcctaacttctagagaacgttactaaaatataacatactgattgtgaagtcaatccacaggtcatgaaaatataaatcagactctgcacgagagtctgatttagggggtccaacaaatactctgacagatgcaaaaggaacctctggtctcatttctgccagaatcctcttttctcccctaatatcatccttattctgatgctcgttcatcactaacacacccacagaaaggaggaagcgggatgggtcttatgcccaaggatttgcactttgtgtttacttccattcctgggaactaaaagcaacatcaaaagaaatgcctaatggctggagcccacaggtgtgcaccacaggatttgcctggtgtgtgtcactgatttcttcattaaacgtaatttagatggtcaaacacaaacccaagtggcttatttcacccctactgctgcttgccactgcttccttcttgtaagatttctttgaagaggatcagtgactttgacatcagaactcaccactggagcctacacaagtttgcagatacctttccctgcaggagtggtgacttcacatctttctgtctctaaaaattgtgcagtgacattccgggccaagtcccttagtcaggggttgacaattctgcttttggacaaggagggatgtggagggaagaagtaatagtctaccaggaaaatgagacgaaaaagctcagtatgactccctgcatctggtacccctcttgaaacacagtgggcacatgagcaatggctcaaacgaaaagtggatctaatgtgggtttctcaaccgatgaaccacaaaagcttccagctactattacaatgtgaaaattccaatgatccgtttaccagagcaattagactatgttaaaaattcatatcatttgtaacttcttttaattactgaattgatattaaaaacaaaatatggctagggcatgtcctattcttctgggcaaatgtggatgaaaaggtcacttgctacctttgacaactatgaacatgatggttaatcttctttctttttttttttttttttttgagacggagtctcactctgtcgcccaggctggagtacagtggcacaatcttggctcactgcaacctccgcctcccctccgcctcccagattcaagcacttctcctgcctcagcctcccaagtagctgagattataggcgtgtaccaccacacctggctaatttttgtattttagtagagaagggtttcaccatgttggccaggctggtctcaaacctctgacctcaaatgatccacccccatcagcctcccaaagtgctgggattataggcatgagccactgcactgggcaggttaatcttctttcaaaagagtctgctctttctacccaattggcgaagcaaatccccaggattcaccgaacaaatggattaagcacccactgagtgcctagcatgtgcctggacaccaggccaccgggaagatgctccccctttgacttgtctatgacatgctatgtctctcaccagatcccttcctggaggtcgggcttctgtaacatggctctgcccccaaaataaaattttcaccacgagtcagggatcggcaaacattttctgtaaagagccagaaagtagatattttaagtcataaggtccctgttaacaactacttgactctgccattgtagcacaaaggcagccacagacaaaacaagcaagtagtcatgtctgtgttccaataagactttatttacaaaaacagcaggcacagacaagatttggcccacaggcatagattcccaactcatggtggtgaagtacagaaaaaaacacctgtctacaagcttttgtaagaaatcaggctaaatgttacctatgttttggttggaagatttctttggtttgaggaatgctttcctcttgcattggcatgccaagaggatagatgactctgaaagacgcctcttcagacatacctgtcatcacacaagatcaacttcttcagtttaaatgacacaaatccatattgtggaaggaaaatatgtagtgccttagcttcactaatagttgtaaaacttctttttaagacatcaaaggctagaggattcattttatgcagtgcgaacatctaataacactctctgtgtcaaatatatattgtacattaccttaaactattgtaatagctaggtaaaaatccttgtataaaagaatgttttcccccacacaaagggcagagtattgagcactaatttcctattaaaagtatatatatgtatctgtgggtcactggtgtccagacttgtat

SEQ ID NO: 467 - DNA, 2809 bp, Homo sapiens
acgcgcgccctgcggagcccgcccaactccggcgagccgggcctgcgcctactcctcctcctcctctcccggcggcggctgcggcggaggcgccgactcggccttgcgcccgccctcaggcccgcgcgggcggcgcagcgaggccccgggcggcgggtggtggctgccaggcggctcggccgcgggcgctgcccggccccggcgagcggagggcggagcgcggcgccggagccgagggcgcgccgcggagggggtgctgggccgcgctgtgcccggccgggcggcggctgcaagaggaggccggaggcgagcgcggggccggcggtgggcgcgcagggcggctcgcagctcgcagccggggccgggccaggcgtccaggcaggtgatcggtgtggcggcggcggcggcggcggccccagactccctccggagttcttcttggggctgatgtccgcaaatatgcagaattaccggccgggtcgctcctgaagccagcgcggggagcgagcgcggcggcggccagcaccgggaacgcaccgaggaagaagcccagcccccgccctccgccccttccgtccccaccccctacccggcggcccaggaggctccccgcgctgcgggcgcgcactccctgtttctcctcctcctggctggcgctgcctgcctctccgcactcactgctcgcgccgggcgcgctccgccagctccgtgctccccgcgccaccctcctccgggccgcgctccctaagggatggtactgaatttcgccgccacaggagaccggctggagcgcccgccccgcggcctcgcctctcctccgagcagccagcgcctcgggacgcgatgaggaccttggcttgcctgctgctcctcggctgcggatacctcgcccatgttctggccgaggaagccgagatcccccgcgaggtgatcgagaggctggcccgcagtcagatccacagcatccgggacctccagcgactcctggagatagactccgtagggagtgaggattctttggacaccagcctgagagctcacggggtccatgccactaagcatgtgcccgagaagcggcccctgcccattcggaggaagagaagcatcgaggaagctgtccccgctgtctgcaagaccaggacggtcatttacgagattcctcggagtcaggtcgaccccacgtccgccaacttcctgatctggcccccgtgcgtggaggtgaaacgctgcaccggctgctgcaacacgagcagtgtcaagtgccagccctcccgcgtccaccaccgcagcgtcaaggtggccaaggtggaatacgtcaggaagaagccaaaattaaaagaagtccaggtgaggttagaggagcatttggagtgcgcctgcgcgaccacaagcctgaatccggattatcgggaagaggacacgggaaggcctagggagtcaggtaaaaaacggaaaagaaaaaggttaaaacccacctaaagcagccaaccagatgtgaggtgaggatgagccgcagccctttcctgggacatggatgtacatggcgtgttacattcctgaacctactatgtacggtgctttattgccagtgtgcggtctttgttctcctccgtgaaaaactgtgtccgagaacactcgggagaacaaagagacagtgcacatttgtttaatgtgacatcaaagcaagtattgtagcactcggtgaagcagtaagaagcttccttgtcaaaaagagagagagagaaagagagagagaaaacaaaaccacaaatgacaaaaacaaaacggactcacaaaaatatctaaactcgatgagatggagggtcgccccgtgggatggaagtgcagaggtctcagcagactggatttctgtccgggtggtcacaggtgcttttttgccgaggatgcagagcctgctttgggaacgactccagaggggtgctggtgggctctgcaggggcccgcaggaagcaggaatgtcttggaaaccgccacgcgaactttagaaaccacacctcctcgctgtagtatttaagcccatacagaaaccttcctgagagccttaagtggtttttttttttgtttttgttttgttttttttttttttgtttttttttttttttttttacaccataaagtgattattaagctttcctttttactctttggctagctttttttttttttttttttttttaattatctcttggatgacatttacaccgataacacacaggctgctgtaactgtcaggacagtgcgacggtatttttcctagcaagatgcaaactaatgagatgtattaaaataaacatggtatacctacctatgcatcatttcctaaatgtttctggctttgtgtttctcccttaccctgctttatttgttaatttaagccattttgaaagaactatgcgtcaaccaatcgtacgccgtccctgcggcacctgccccagagcccgtttgtggctgagtgacaacttgttccccgcagtgcacacctagaatgctgtgttcccacgcggcacgtgagatgcattgccgcttctgtctgtgttgttggtgtgccctggtgccgtggtggcggtcactccctctgctgccagtgtttggacagaacccaaattctttatttttggtaagatattgtgctttacctgtattaacagaaatgtgtgtgtgtggtttgtttttttgtaaaggtgaagtttgtatgtttacctaatattacctgttttgtatacctgagagcctgctatgttctttttttgttgatccaaaattaaaaaaaaaaataccaccaacaaaa

SEQ ID NO: 468 - DNA, 2740 bp, Homo sapiens
acgcgcgccctgcggagcccgcccaactccggcgagccgggcctgcgcctactcctcctcctcctctcccggcggcggctgcggcggaggcgccgactcggccttgcgcccgccctcaggcccgcgcgggcggcgcagcgaggccccgggcggcgggtggtggctgccaggcggctcggccgcgggcgctgcccggccccggcgagcggagggcggagcgcggcgccggagccgagggcgcgccgcggagggggtgctgggccgcgctgtgcccggccgggcggcggctgcaagaggaggccggaggcgagcgcggggccggcggtgggcgcgcagggcggctcgcagctcgcagccggggccgggccaggcgtccaggcaggtgatcggtgtggcggcggcggcggcggcggccccagactccctccggagttcttcttggggctgatgtccgcaaatatgcagaattaccggccgggtcgctcctgaagccagcgcggggagcgagcgcggcggcggccagcaccgggaacgcaccgaggaagaagcccagcccccgccctccgccccttccgtccccaccccctacccggcggcccaggaggctccccgcgctgcgggcgcgcactccctgtttctcctcctcctggctggcgctgcctgcctctccgcactcactgctcgcgccgggcgcgctccgccagctccgtgctccccgcgccaccctcctccgggccgcgctccctaagggatggtactgaatttcgccgccacaggagaccggctggagcgcccgccccgcggcctcgcctctcctccgagcagccagcgcctcgggacgcgatgaggaccttggcttgcctgctgctcctcggctgcggatacctcgcccatgttctggccgaggaagccgagatcccccgcgaggtgatcgagaggctggcccgcagtcagatccacagcatccgggacctccagcgactcctggagatagactccgtagggagtgaggattctttggacaccagcctgagagctcacggggtccatgccactaagcatgtgcccgagaagcggcccctgcccattcggaggaagagaagcatcgaggaagctgtccccgctgtctgcaagaccaggacggtcatttacgagattcctcggagtcaggtcgaccccacgtccgccaacttcctgatctggcccccgtgcgtggaggtgaaacgctgcaccggctgctgcaacacgagcagtgtcaagtgccagccctcccgcgtccaccaccgcagcgtcaaggtggccaaggtggaatacgtcaggaagaagccaaaattaaaagaagtccaggtgaggttagaggagcatttggagtgcgcctgcgcgaccacaagcctgaatccggattatcgggaagaggacacggatgtgaggtgaggatgagccgcagccctttcctgggacatggatgtacatggcgtgttacattcctgaacctactatgtacggtgctttattgccagtgtgcggtctttgttctcctccgtgaaaaactgtgtccgagaacactcgggagaacaaagagacagtgcacatttgtttaatgtgacatcaaagcaagtattgtagcactcggtgaagcagtaagaagcttccttgtcaaaaagagagagagagaaagagagagagaaaacaaaaccacaaatgacaaaaacaaaacggactcacaaaaatatctaaactcgatgagatggagggtcgccccgtgggatggaagtgcagaggtctcagcagactggatttctgtccgggtggtcacaggtgcttttttgccgaggatgcagagcctgctttgggaacgactccagaggggtgctggtgggctctgcaggggcccgcaggaagcaggaatgtcttggaaaccgccacgcgaactttagaaaccacacctcctcgctgtagtatttaagcccatacagaaaccttcctgagagccttaagtggtttttttttttgtttttgttttgttttttttttttttgtttttttttttttttttttacaccataaagtgattattaagctttcctttttactctttggctagctttttttttttttttttttttttaattatctcttggatgacatttacaccgataacacacaggctgctgtaactgtcaggacagtgcgacggtatttttcctagcaagatgcaaactaatgagatgtattaaaataaacatggtatacctacctatgcatcatttcctaaatgtttctggctttgtgtttctcccttaccctgctttatttgttaatttaagccattttgaaagaactatgcgtcaaccaatcgtacgccgtccctgcggcacctgccccagagcccgtttgtggctgagtgacaacttgttccccgcagtgcacacctagaatgctgtgttcccacgcggcacgtgagatgcattgccgcttctgtctgtgttgttggtgtgccctggtgccgtggtggcggtcactccctctgctgccagtgtttggacagaacccaaattctttatttttggtaagatattgtgctttacctgtattaacagaaatgtgtgtgtgtggtttgtttttttgtaaaggtgaagtttgtatgtttacctaatattacctgttttgtatacctgagagcctgctatgttctttttttgttgatccaaaattaaaaaaaaaaataccaccaacaaaa

SEQ ID NO: 469 - DNA, 2301 bp, Homo sapiens
acggatcccgacgcgggaggctcagaacccgggggaccctcaccggtggctcctttcccttccatcccctcgacttcccggctcagggcgcggccctgccttcggcgcgggagtgggggactggggggcgcggggtcccagggtggggacgaggcgggctgcaggccctttccccgactggagctcgctcccaagtggaaatgtgggtggagggtcctcattcagatgccccaggcctcggatcctgggcgggggcgcgtggcagccgccaggagaccggctggagcgcccgccccgcggcctcgcctctcctccgagcagccagcgcctcgggacgcgatgaggaccttggcttgcctgctgctcctcggctgcggatacctcgcccatgttctggccgaggaagccgagatcccccgcgaggtgatcgagaggctggcccgcagtcagatccacagcatccgggacctccagcgactcctggagatagactccggagtgaggattctttggacaccagcctgagagctcacggggtccatgccactaagcatgtgcccgagaagcggcccctgcccattcggaggaagagaagcatcgaggaagctgtccccgctgtctgcaagaccaggacggtcatttacgagattcctcggagtcaggtcgaccccacgtccgccaacttcctgatctggcccccgtgcgtggaggtgaaacgctgcaccggctgctgcaacacgagcagtgtcaagtgccagccctcccgcgtccaccaccgcagcgtcaaggtggccaaggtggaatacgtcaggaagaagccaaaattaaaagaagtccaggtgaggttagaggagcatttggagtgcgcctgcgcgaccacaagcctgaatccggattatcgggaagaggacacgggaaggcctagggagtcaggtaaaaaacggaaaagaaaaaggttaaaacccacctaaagcagccaaccagatgtgaggtgaggatgagccgcagccctttcctgggacatggatgtacatggcgtgttacattcctgaacctactatgtacggtgctttattgccagtgtgcggtctttgttctcctccgtgaaaaactgtgtccgagaacactcgggagaacaaagagacagtgcacatttgtttaatgtgacatcaaagcaagtattgtagcactcggtgaagcagtaagaagcttccttgtcaaaaagagagagagagaaagagagagagaaaacaaaaccacaaatgacaaaaacaaaacggactcacaaaaatatctaaactcgatgagatggagggtcgccccgtgggatggaagtgcagaggtctcagcagactggatttctgtccgggtggtcacaggtgcttttttgccgaggatgcagagcctgctttgggaacgactccagaggggtgctggtgggctctgcaggggcccgcaggaagcaggaatgtcttggaaaccgccacgcgaactttagaaaccacacctcctcgctgtagtatttaagcccatacagaaaccttcctgagagccttaagtggtttttttttttgtttttgttttgttttttttttttttgtttttttttttttttttttacaccataaagtgattattaagctttcctttttactctttggctagctttttttttttttttttttttttaattatctcttggatgacatttacaccgataacacacaggctgctgtaactgtcaggacagtgcgacggtatttttcctagcaagatgcaaactaatgagatgtattaaaataaacatggtatacctacctatgcatcatttcctaaatgtttctggctttgtgtttctcccttaccctgctttatttgttaatttaagccattttgaaagaactatgcgtcaaccaatcgtacgccgtccctgcggcacctgccccagagcccgtttgtggctgagtgacaacttgttccccgcagtgcacacctagaatgctgtgttcccacgcggcacgtgagatgcattgccgcttctgtctgtgttgttggtgtgccctggtgccgtggtggcggtcactccctctgctgccagtgtttggacagaacccaaattctttatttttggtaagatattgtgctttacctgtattaacagaaatgtgtgtgtgtggtttgtttttttgtaaaggtgaagtttgtatgtttacctaatattacctgttttgtatacctgagagcctgctatgttctttttttgttgatccaaaattaaaaaaaaaaataccaccaacaaaa

SEQ ID NO: 470 - DNA, 2305 bp, Homo sapiens
acggatcccgacgcgggaggctcagaacccgggggaccctcaccggtggctcctttcccttccatcccctcgacttcccggctcagggcgcggccctgccttcggcgcgggagtgggggactggggggcgcggggtcccagggtggggacgaggcgggctgcaggccctttccccgactggagctcgctcccaagtggaaatgtgggtggagggtcctcattcagatgccccaggcctcggatcctgggcgggggcgcgtggcagccgccaggagaccggctggagcgcccgccccgcggcctcgcctctcctccgagcagccagcgcctcgggacgcgatgaggaccttggcttgcctgctgctcctcggctgcggatacctcgcccatgttctggccgaggaagccgagatcccccgcgaggtgatcgagaggctggcccgcagtcagatccacagcatccgggacctccagcgactcctggagatagactccgtagggagtgaggattctttggacaccagcctgagagctcacggggtccatgccactaagcatgtgcccgagaagcggcccctgcccattcggaggaagagaagcatcgaggaagctgtccccgctgtctgcaagaccaggacggtcatttacgagattcctcggagtcaggtcgaccccacgtccgccaacttcctgatctggcccccgtgcgtggaggtgaaacgctgcaccggctgctgcaacacgagcagtgtcaagtgccagccctcccgcgtccaccaccgcagcgtcaaggtggccaaggtggaatacgtcaggaagaagccaaaattaaaagaagtccaggtgaggttagaggagcatttggagtgcgcctgcgcgaccacaagcctgaatccggattatcgggaagaggacacgggaaggcctagggagtcaggtaaaaaacggaaaagaaaaaggttaaaacccacctaaagcagccaaccagatgtgaggtgaggatgagccgcagccctttcctgggacatggatgtacatggcgtgttacattcctgaacctactatgtacggtgctttattgccagtgtgcggtctttgttctcctccgtgaaaaactgtgtccgagaacactcgggagaacaaagagacagtgcacatttgtttaatgtgacatcaaagcaagtattgtagcactcggtgaagcagtaagaagcttccttgtcaaaaagagagagagagaaagagagagagaaaacaaaaccacaaatgacaaaaacaaaacggactcacaaaaatatctaaactcgatgagatggagggtcgccccgtgggatggaagtgcagaggtctcagcagactggatttctgtccgggtggtcacaggtgcttttttgccgaggatgcagagcctgctttgggaacgactccagaggggtgctggtgggctctgcaggggcccgcaggaagcaggaatgtcttggaaaccgccacgcgaactttagaaaccacacctcctcgctgtagtatttaagcccatacagaaaccttcctgagagccttaagtggtttttttttttgtttttgttttgttttttttttttttgtttttttttttttttttttacaccataaagtgattattaagctttcctttttactctttggctagctttttttttttttttttttttttaattatctcttggatgacatttacaccgataacacacaggctgctgtaactgtcaggacagtgcgacggtatttttcctagcaagatgcaaactaatgagatgtattaaaataaacatggtatacctacctatgcatcatttcctaaatgtttctggctttgtgtttctcccttaccctgctttatttgttaatttaagccattttgaaagaactatgcgtcaaccaatcgtacgccgtccctgcggcacctgccccagagcccgtttgtggctgagtgacaacttgttccccgcagtgcacacctagaatgctgtgttcccacgcggcacgtgagatgcattgccgcttctgtctgtgttgttggtgtgccctggtgccgtggtggcggtcactccctctgctgccagtgtttggacagaacccaaattctttatttttggtaagatattgtgctttacctgtattaacagaaatgtgtgtgtgtggtttgtttttttgtaaaggtgaagtttgtatgtttacctaatattacctgttttgtatacctgagagcctgctatgttctttttttgttgatccaaaattaaaaaaaaaaataccaccaacaaaa

SEQ ID NO: 471 - DNA, 2232 bp, Homo sapiens
acggatcccgacgcgggaggctcagaacccgggggaccctcaccggtggctcctttcccttccatcccctcgacttcccggctcagggcgcggccctgccttcggcgcgggagtgggggactggggggcgcggggtcccagggtggggacgaggcgggctgcaggccctttccccgactggagctcgctcccaagtggaaatgtgggtggagggtcctcattcagatgccccaggcctcggatcctgggcgggggcgcgtggcagccgccaggagaccggctggagcgcccgccccgcggcctcgcctctcctccgagcagccagcgcctcgggacgcgatgaggaccttggcttgcctgctgctcctcggctgcggatacctcgcccatgttctggccgaggaagccgagatcccccgcgaggtgatcgagaggctggcccgcagtcagatccacagcatccgggacctccagcgactcctggagatagactccggagtgaggattctttggacaccagcctgagagctcacggggtccatgccactaagcatgtgcccgagaagcggcccctgcccattcggaggaagagaagcatcgaggaagctgtccccgctgtctgcaagaccaggacggtcatttacgagattcctcggagtcaggtcgaccccacgtccgccaacttcctgatctggcccccgtgcgtggaggtgaaacgctgcaccggctgctgcaacacgagcagtgtcaagtgccagccctcccgcgtccaccaccgcagcgtcaaggtggccaaggtggaatacgtcaggaagaagccaaaattaaaagaagtccaggtgaggttagaggagcatttggagtgcgcctgcgcgaccacaagcctgaatccggattatcgggaagaggacacggatgtgaggtgaggatgagccgcagccctttcctgggacatggatgtacatggcgtgttacattcctgaacctactatgtacggtgctttattgccagtgtgcggtctttgttctcctccgtgaaaaactgtgtccgagaacactcgggagaacaaagagacagtgcacatttgtttaatgtgacatcaaagcaagtattgtagcactcggtgaagcagtaagaagcttccttgtcaaaaagagagagagagaaagagagagagaaaacaaaaccacaaatgacaaaaacaaaacggactcacaaaaatatctaaactcgatgagatggagggtcgccccgtgggatggaagtgcagaggtctcagcagactggatttctgtccgggtggtcacaggtgcttttttgccgaggatgcagagcctgctttgggaacgactccagaggggtgctggtgggctctgcaggggcccgcaggaagcaggaatgtcttggaaaccgccacgcgaactttagaaaccacacctcctcgctgtagtatttaagcccatacagaaaccttcctgagagccttaagtggtttttttttttgtttttgttttgttttttttttttttgtttttttttttttttttttacaccataaagtgattattaagctttcctttttactctttggctagctttttttttttttttttttttttaattatctcttggatgacatttacaccgataacacacaggctgctgtaactgtcaggacagtgcgacggtatttttcctagcaagatgcaaactaatgagatgtattaaaataaacatggtatacctacctatgcatcatttcctaaatgtttctggctttgtgtttctcccttaccctgctttatttgttaatttaagccattttgaaagaactatgcgtcaaccaatcgtacgccgtccctgcggcacctgccccagagcccgtttgtggctgagtgacaacttgttccccgcagtgcacacctagaatgctgtgttcccacgcggcacgtgagatgcattgccgcttctgtctgtgttgttggtgtgccctggtgccgtggtggcggtcactccctctgctgccagtgtttggacagaacccaaattctttatttttggtaagatattgtgctttacctgtattaacagaaatgtgtgtgtgtggtttgtttttttgtaaaggtgaagtttgtatgtttacctaatattacctgttttgtatacctgagagcctgctatgttctttttttgttgatccaaaattaaaaaaaaaaataccaccaacaaaa

SEQ ID NO: 472 - DNA, 2236 bp, Homo sapiens
acggatcccgacgcgggaggctcagaacccgggggaccctcaccggtggctcctttcccttccatcccctcgacttcccggctcagggcgcggccctgccttcggcgcgggagtgggggactggggggcgcggggtcccagggtggggacgaggcgggctgcaggccctttccccgactggagctcgctcccaagtggaaatgtgggtggagggtcctcattcagatgccccaggcctcggatcctgggcgggggcgcgtggcagccgccaggagaccggctggagcgcccgccccgcggcctcgcctctcctccgagcagccagcgcctcgggacgcgatgaggaccttggcttgcctgctgctcctcggctgcggatacctcgcccatgttctggccgaggaagccgagatcccccgcgaggtgatcgagaggctggcccgcagtcagatccacagcatccgggacctccagcgactcctggagatagactccgtagggagtgaggattctttggacaccagcctgagagctcacggggtccatgccactaagcatgtgcccgagaagcggcccctgcccattcggaggaagagaagcatcgaggaagctgtccccgctgtctgcaagaccaggacggtcatttacgagattcctcggagtcaggtcgaccccacgtccgccaacttcctgatctggcccccgtgcgtggaggtgaaacgctgcaccggctgctgcaacacgagcagtgtcaagtgccagccctcccgcgtccaccaccgcagcgtcaaggtggccaaggtggaatacgtcaggaagaagccaaaattaaaagaagtccaggtgaggttagaggagcatttggagtgcgcctgcgcgaccacaagcctgaatccggattatcgggaagaggacacggatgtgaggtgaggatgagccgcagccctttcctgggacatggatgtacatggcgtgttacattcctgaacctactatgtacggtgctttattgccagtgtgcggtctttgttctcctccgtgaaaaactgtgtccgagaacactcgggagaacaaagagacagtgcacatttgtttaatgtgacatcaaagcaagtattgtagcactcggtgaagcagtaagaagcttccttgtcaaaaagagagagagagaaagagagagagaaaacaaaaccacaaatgacaaaaacaaaacggactcacaaaaatatctaaactcgatgagatggagggtcgccccgtgggatggaagtgcagaggtctcagcagactggatttctgtccgggtggtcacaggtgcttttttgccgaggatgcagagcctgctttgggaacgactccagaggggtgctggtgggctctgcaggggcccgcaggaagcaggaatgtcttggaaaccgccacgcgaactttagaaaccacacctcctcgctgtagtatttaagcccatacagaaaccttcctgagagccttaagtggtttttttttttgtttttgttttgttttttttttttttgtttttttttttttttttttacaccataaagtgattattaagctttcctttttactctttggctagctttttttttttttttttttttttaattatctcttggatgacatttacaccgataacacacaggctgctgtaactgtcaggacagtgcgacggtatttttcctagcaagatgcaaactaatgagatgtattaaaataaacatggtatacctacctatgcatcatttcctaaatgtttctggctttgtgtttctcccttaccctgctttatttgttaatttaagccattttgaaagaactatgcgtcaaccaatcgtacgccgtccctgcggcacctgccccagagcccgtttgtggctgagtgacaacttgttccccgcagtgcacacctagaatgctgtgttcccacgcggcacgtgagatgcattgccgcttctgtctgtgttgttggtgtgccctggtgccgtggtggcggtcactccctctgctgccagtgtttggacagaacccaaattctttatttttggtaagatattgtgctttacctgtattaacagaaatgtgtgtgtgtggtttgtttttttgtaaaggtgaagtttgtatgtttacctaatattacctgttttgtatacctgagagcctgctatgttctttttttgttgatccaaaattaaaaaaaaaaataccaccaacaaaa

SEQ ID NO: 473 - DNA, 2055 bp, Homo sapiens
atccccatccccatccccgggagctttgctgtgatgaatgactttccacagcccccgtcgtgggaacttagtgcttcaggctccccagcgacccccgactctccttaaaaatcggggaggggagtgggggaggccagaggaagccgagatcccccgcgaggtgatcgagaggctggcccgcagtcagatccacagcatccgggacctccagcgactcctggagatagactccgtagggagtgaggattctttggacaccagcctgagagctcacggggtccatgccactaagcatgtgcccgagaagcggcccctgcccattcggaggaagagaagcatcgaggaagctgtccccgctgtctgcaagaccaggacggtcatttacgagattcctcggagtcaggtcgaccccacgtccgccaacttcctgatctggcccccgtgcgtggaggtgaaacgctgcaccggctgctgcaacacgagcagtgtcaagtgccagccctcccgcgtccaccaccgcagcgtcaaggtggccaaggtggaatacgtcaggaagaagccaaaattaaaagaagtccaggtgaggttagaggagcatttggagtgcgcctgcgcgaccacaagcctgaatccggattatcgggaagaggacacgggaaggcctagggagtcaggtaaaaaacggaaaagaaaaaggttaaaacccacctaaagcagccaaccagatgtgaggtgaggatgagccgcagccctttcctgggacatggatgtacatggcgtgttacattcctgaacctactatgtacggtgctttattgccagtgtgcggtctttgttctcctccgtgaaaaactgtgtccgagaacactcgggagaacaaagagacagtgcacatttgtttaatgtgacatcaaagcaagtattgtagcactcggtgaagcagtaagaagcttccttgtcaaaaagagagagagagaaagagagagagaaaacaaaaccacaaatgacaaaaacaaaacggactcacaaaaatatctaaactcgatgagatggagggtcgccccgtgggatggaagtgcagaggtctcagcagactggatttctgtccgggtggtcacaggtgcttttttgccgaggatgcagagcctgctttgggaacgactccagaggggtgctggtgggctctgcaggggcccgcaggaagcaggaatgtcttggaaaccgccacgcgaactttagaaaccacacctcctcgctgtagtatttaagcccatacagaaaccttcctgagagccttaagtggtttttttttttgtttttgttttgttttttttttttttgtttttttttttttttttttacaccataaagtgattattaagctttcctttttactctttggctagctttttttttttttttttttttttaattatctcttggatgacatttacaccgataacacacaggctgctgtaactgtcaggacagtgcgacggtatttttcctagcaagatgcaaactaatgagatgtattaaaataaacatggtatacctacctatgcatcatttcctaaatgtttctggctttgtgtttctcccttaccctgctttatttgttaatttaagccattttgaaagaactatgcgtcaaccaatcgtacgccgtccctgcggcacctgccccagagcccgtttgtggctgagtgacaacttgttccccgcagtgcacacctagaatgctgtgttcccacgcggcacgtgagatgcattgccgcttctgtctgtgttgttggtgtgccctggtgccgtggtggcggtcactccctctgctgccagtgtttggacagaacccaaattctttatttttggtaagatattgtgctttacctgtattaacagaaatgtgtgtgtgtggtttgtttttttgtaaaggtgaagtttgtatgtttacctaatattacctgttttgtatacctgagagcctgctatgttctttttttgttgatccaaaattaaaaaaaaaaataccaccaacaaaacccgtggacgtga

SEQ ID NO: 474 - DNA, 2022 bp, Homo sapiens
cgtgactctcgccgacccgtgacgcattttaacttgatctttctagatgttgatctcactattaaatcagaaactttcggccccctcgctgccccctagaccttctgaagccgagatcccccgcgaggtgatcgagaggctggcccgcagtcagatccacagcatccgggacctccagcgactcctggagatagactccgtagggagtgaggattctttggacaccagcctgagagctcacggggtccatgccactaagcatgtgcccgagaagcggcccctgcccattcggaggaagagaagcatcgaggaagctgtccccgctgtctgcaagaccaggacggtcatttacgagattcctcggagtcaggtcgaccccacgtccgccaacttcctgatctggcccccgtgcgtggaggtgaaacgctgcaccggctgctgcaacacgagcagtgtcaagtgccagccctcccgcgtccaccaccgcagcgtcaaggtggccaaggtggaatacgtcaggaagaagccaaaattaaaagaagtccaggtgaggttagaggagcatttggagtgcgcctgcgcgaccacaagcctgaatccggattatcgggaagaggacacgggaaggcctagggagtcaggtaaaaaacggaaaagaaaaaggttaaaacccacctaaagcagccaaccagatgtgaggtgaggatgagccgcagccctttcctgggacatggatgtacatggcgtgttacattcctgaacctactatgtacggtgctttattgccagtgtgcggtctttgttctcctccgtgaaaaactgtgtccgagaacactcgggagaacaaagagacagtgcacatttgtttaatgtgacatcaaagcaagtattgtagcactcggtgaagcagtaagaagcttccttgtcaaaaagagagagagagaaagagagagagaaaacaaaaccacaaatgacaaaaacaaaacggactcacaaaaatatctaaactcgatgagatggagggtcgccccgtgggatggaagtgcagaggtctcagcagactggatttctgtccgggtggtcacaggtgcttttttgccgaggatgcagagcctgctttgggaacgactccagaggggtgctggtgggctctgcaggggcccgcaggaagcaggaatgtcttggaaaccgccacgcgaactttagaaaccacacctcctcgctgtagtatttaagcccatacagaaaccttcctgagagccttaagtggtttttttttttgtttttgttttgttttttttttttttgtttttttttttttttttttacaccataaagtgattattaagctttcctttttactctttggctagctttttttttttttttttttttttaattatctcttggatgacatttacaccgataacacacaggctgctgtaactgtcaggacagtgcgacggtatttttcctagcaagatgcaaactaatgagatgtattaaaataaacatggtatacctacctatgcatcatttcctaaatgtttctggctttgtgtttctcccttaccctgctttatttgttaatttaagccattttgaaagaactatgcgtcaaccaatcgtacgccgtccctgcggcacctgccccagagcccgtttgtggctgagtgacaacttgttccccgcagtgcacacctagaatgctgtgttcccacgcggcacgtgagatgcattgccgcttctgtctgtgttgttggtgtgccctggtgccgtggtggcggtcactccctctgctgccagtgtttggacagaacccaaattctttatttttggtaagatattgtgctttacctgtattaacagaaatgtgtgtgtgtggtttgtttttttgtaaaggtgaagtttgtatgtttacctaatattacctgttttgtatacctgagagcctgctatgttctttttttgttgatccaaaattaaaaaaaaaaataccaccaacaaaacccgtggacgtga

SEQ ID NO: 475 - DNA, 3402 bp, Homo sapiens
cacttccgccccgggcgcggctcgggccacgcccacctgtcctgcagcactggatgctttgtgagttggggattgttgcgtcccatatctggacccagaagggacttccctgctcggctggctctcggtttctctgctttcctccggagaaataacagcgtcttccgcgccgcgcatggagcctcccggccgccgcgagtgtccctttccttcctggcgctttcctgggttgcttctggcggccatggtgttgctgctgtactccttctccgatgcctgtgaggagccaccaacatttgaagctatggagctcattggtaaaccaaaaccctactatgagattggtgaacgagtagattataagtgtaaaaaaggatacttctatatacctcctcttgccacccatactatttgtgatcggaatcatacatggctacctgtctcagatgacgcctgttatagagaaacatgtccatatatacgggatcctttaaatggccaagcagtccctgcaaatgggacttacgagtttggttatcagatgcactttatttgtaatgagggttattacttaattggtgaagaaattctatattgtgaacttaaaggatcagtagcaatttggagcggtaagcccccaatatgtgaaaaggttttgtgtacaccacctccaaaaataaaaaatggaaaacacacctttagtgaagtagaagtatttgagtatcttgatgcagtaacttatagttgtgatcctgcacctggaccagatccattttcacttattggagagagcacgatttattgtggtgacaattcagtgtggagtcgtgctgctccagagtgtaaagtggtcaaatgtcgatttccagtagtcgaaaatggaaaacagatatcaggatttggaaaaaaattttactacaaagcaacagttatgtttgaatgcgataagggtttttacctcgatggcagcgacacaattgtctgtgacagtaacagtacttgggatcccccagttccaaagtgtcttaaagtgctgcctccatctagtacaaaacctccagctttgagtcattcagtgtcgacttcttccactacaaaatctccagcgtccagtgcctcaggtcctaggcctacttacaagcctccagtctcaaattatccaggatatcctaaacctgaggaaggaatacttgacagtttggatgtttgggtcattgctgtgattgttattgccatagttgttggagttgcagtaatttgtgttgtcccgtacagatatcttcaaaggaggaagaagaaaggcacatacctaactgatgagacccacagagaagtaaaatttacttctctctgagaaggagagatgagagaaaggtttgcttttatcattaaaaggaaagcagatggtggagctgaatatgccacttaccagactaaatcaaccactccagcagagcagagaggctgaatagattccacaacctggtttgccagttcatcttttgactctattaaaatcttcaatagttgttattctgtagtttcactctcatgagtgcaactgtggcttagctaatattgcaatgtggcttgaatgtaggtagcatcctttgatgcttctttgaaacttgtatgaatttgggtatgaacagattgcctgctttcccttaaataacacttagatttattggaccagtcagcacagcatgcctggttgtattaaagcagggatatgctgtattttataaaattggcaaaattagagaaatatagttcacaatgaaattatattttctttgtaaagaaagtggcttgaaatcttttttgttcaaagattaatgccaactcttaagattattctttcaccaactatagaatgtattttatatatcgttcattgtaaaaagcccttaaaaatatgtgtatactactttggctcttgtgcataaaaacaagaacactgaaaattgggaatatgcacaaacttggcttctttaaccaagaatattattggaaaattctctaaaagttaatagggtaaattctctattttttgtaatgtgttcggtgatttcagaaagctagaaagtgtatgtgtggcatttgttttcactttttaaaacatccctaactgatcgaatatatcagtaatttcagaatcagatgcatcctttcataagaagtgagaggactctgacagccataacaggagtgccacttcatggtgcgaagtgaacactgtagtcttgttgttttcccaaagagaactccgtatgttctcttaggttgagtaacccactctgaattctggttacatgtgtttttctctccctccttaaataaagagaggggttaaacatgccctctaaaagtaggtggttttgaagagaataaattcatcagataacctcaagtcacatgagaatcttagtccatttacattgccttggctagtaaaagccatctatgtatatgtcttacctcatctcctaaaaggcagagtacaaagtaagccatgtatctcaggaaggtaacttcattttgtctatttgctgttgattgtaccaagggatggaagaagtaaatatagctcaggtagcactttatactcaggcagatctcagccctctactgagtcccttagccaagcagtttctttcaaagaagccagcaggcgaaaagcagggactgccactgcatttcatatcacactgttaaaagttgtgttttgaaattttatgtttagttgcacaaattgggccaaagaaacattgccttgaggaagatatgattggaaaatcaagagtgtagaagaataaatactgttttactgtccaaagacatgtttatagtgctctgtaaatgttcctttcctttgtagtctctggcaagatgctttaggaagataaaagtttgaggagaacaaacaggaattctgaattaagcacagagttgaagtttatacccgtttcacatgcttttcaagaatgtcgcaattactaagaagcagataatggtgttttttagaaacctaattgaagtatattcaaccaaatactttaatgtataaaataaatattatacaatatacttgtatagcagtttctgcttcacatttgattttttcaaatttaatatttatattagagatctatatatgtataaatatgtattttgtcaaatttgttacttaaatatatagagaccagttttctctggaagtttgtttaaatgacagaagcgtatatgaattcaagaaaatttaagctgcaaaaatgtatttgctataaaatgagaagtctcactgatagaggttctttattgctcattttttaaaaaatggactcttgaaatctgttaaaataaaattgtacatttggagatgtttcatgaaaaaaaaaa

SEQ ID NO: 476 - DNA, 3309 bp, Homo sapiens
cacttccgccccgggcgcggctcgggccacgcccacctgtcctgcagcactggatgctttgtgagttggggattgttgcgtcccatatctggacccagaagggacttccctgctcggctggctctcggtttctctgctttcctccggagaaataacagcgtcttccgcgccgcgcatggagcctcccggccgccgcgagtgtccctttccttcctggcgctttcctgggttgcttctggcggccatggtgttgctgctgtactccttctccgatgcctgtgaggagccaccaacatttgaagctatggagctcattggtaaaccaaaaccctactatgagattggtgaacgagtagattataagtgtaaaaaaggatacttctatatacctcctcttgccacccatactatttgtgatcggaatcatacatggctacctgtctcagatgacgcctgttatagagaaacatgtccatatatacgggatcctttaaatggccaagcagtccctgcaaatgggacttacgagtttggttatcagatgcactttatttgtaatgagggttattacttaattggtgaagaaattctatattgtgaacttaaaggatcagtagcaatttggagcggtaagcccccaatatgtgaaaaggttttgtgtacaccacctccaaaaataaaaaatggaaaacacacctttagtgaagtagaagtatttgagtatcttgatgcagtaacttatagttgtgatcctgcacctggaccagatccattttcacttattggagagagcacgatttattgtggtgacaattcagtgtggagtcgtgctgctccagagtgtaaagtggtcaaatgtcgatttccagtagtcgaaaatggaaaacagatatcaggatttggaaaaaaattttactacaaagcaacagttatgtttgaatgcgataagggtttttacctcgatggcagcgacacaattgtctgtgacagtaacagtacttgggatcccccagttccaaagtgtcttaaagtgctgcctccatctagtacaaaacctccagctttgagtcattcagtgtcgacttcttccactacaaaatctccagcgtccagtgcctcaggtcctaggcctacttacaagcctccagtctcaaattatccaggatatcctaaacctgaggaaggaatacttgacagtttggatgtttgggtcattgctgtgattgttattgccatagttgttggagttgcagtaatttgtgttgtcccgtacagatatcttcaaaggaggaagaagaaagggaaagcagatggtggagctgaatatgccacttaccagactaaatcaaccactccagcagagcagagaggctgaatagattccacaacctggtttgccagttcatcttttgactctattaaaatcttcaatagttgttattctgtagtttcactctcatgagtgcaactgtggcttagctaatattgcaatgtggcttgaatgtaggtagcatcctttgatgcttctttgaaacttgtatgaatttgggtatgaacagattgcctgctttcccttaaataacacttagatttattggaccagtcagcacagcatgcctggttgtattaaagcagggatatgctgtattttataaaattggcaaaattagagaaatatagttcacaatgaaattatattttctttgtaaagaaagtggcttgaaatcttttttgttcaaagattaatgccaactcttaagattattctttcaccaactatagaatgtattttatatatcgttcattgtaaaaagcccttaaaaatatgtgtatactactttggctcttgtgcataaaaacaagaacactgaaaattgggaatatgcacaaacttggcttctttaaccaagaatattattggaaaattctctaaaagttaatagggtaaattctctattttttgtaatgtgttcggtgatttcagaaagctagaaagtgtatgtgtggcatttgttttcactttttaaaacatccctaactgatcgaatatatcagtaatttcagaatcagatgcatcctttcataagaagtgagaggactctgacagccataacaggagtgccacttcatggtgcgaagtgaacactgtagtcttgttgttttcccaaagagaactccgtatgttctcttaggttgagtaacccactctgaattctggttacatgtgtttttctctccctccttaaataaagagaggggttaaacatgccctctaaaagtaggtggttttgaagagaataaattcatcagataacctcaagtcacatgagaatcttagtccatttacattgccttggctagtaaaagccatctatgtatatgtcttacctcatctcctaaaaggcagagtacaaagtaagccatgtatctcaggaaggtaacttcattttgtctatttgctgttgattgtaccaagggatggaagaagtaaatatagctcaggtagcactttatactcaggcagatctcagccctctactgagtcccttagccaagcagtttctttcaaagaagccagcaggcgaaaagcagggactgccactgcatttcatatcacactgttaaaagttgtgttttgaaattttatgtttagttgcacaaattgggccaaagaaacattgccttgaggaagatatgattggaaaatcaagagtgtagaagaataaatactgttttactgtccaaagacatgtttatagtgctctgtaaatgttcctttcctttgtagtctctggcaagatgctttaggaagataaaagtttgaggagaacaaacaggaattctgaattaagcacagagttgaagtttatacccgtttcacatgcttttcaagaatgtcgcaattactaagaagcagataatggtgttttttagaaacctaattgaagtatattcaaccaaatactttaatgtataaaataaatattatacaatatacttgtatagcagtttctgcttcacatttgattttttcaaatttaatatttatattagagatctatatatgtataaatatgtattttgtcaaatttgttacttaaatatatagagaccagttttctctggaagtttgtttaaatgacagaagcgtatatgaattcaagaaaatttaagctgcaaaaatgtatttgctataaaatgagaagtctcactgatagaggttctttattgctcattttttaaaaaatggactcttgaaatctgttaaaataaaattgtacatttggagatgtttcatgaaaaaaaaaa

SEQ ID NO: 477 - DNA, 3357 bp, Homo sapiens
cacttccgccccgggcgcggctcgggccacgcccacctgtcctgcagcactggatgctttgtgagttggggattgttgcgtcccatatctggacccagaagggacttccctgctcggctggctctcggtttctctgctttcctccggagaaataacagcgtcttccgcgccgcgcatggagcctcccggccgccgcgagtgtccctttccttcctggcgctttcctgggttgcttctggcggccatggtgttgctgctgtactccttctccgatgcctgtgaggagccaccaacatttgaagctatggagctcattggtaaaccaaaaccctactatgagattggtgaacgagtagattataagtgtaaaaaaggatacttctatatacctcctcttgccacccatactatttgtgatcggaatcatacatggctacctgtctcagatgacgcctgttatagagaaacatgtccatatatacgggatcctttaaatggccaagcagtccctgcaaatgggacttacgagtttggttatcagatgcactttatttgtaatgagggttattacttaattggtgaagaaattctatattgtgaacttaaaggatcagtagcaatttggagcggtaagcccccaatatgtgaaaaggttttgtgtacaccacctccaaaaataaaaaatggaaaacacacctttagtgaagtagaagtatttgagtatcttgatgcagtaacttatagttgtgatcctgcacctggaccagatccattttcacttattggagagagcacgatttattgtggtgacaattcagtgtggagtcgtgctgctccagagtgtaaagtggtcaaatgtcgatttccagtagtcgaaaatggaaaacagatatcaggatttggaaaaaaattttactacaaagcaacagttatgtttgaatgcgataagggtttttacctcgatggcagcgacacaattgtctgtgacagtaacagtacttgggatcccccagttccaaagtgtcttaaagtgtcgacttcttccactacaaaatctccagcgtccagtgcctcaggtcctaggcctacttacaagcctccagtctcaaattatccaggatatcctaaacctgaggaaggaatacttgacagtttggatgtttgggtcattgctgtgattgttattgccatagttgttggagttgcagtaatttgtgttgtcccgtacagatatcttcaaaggaggaagaagaaaggcacatacctaactgatgagacccacagagaagtaaaatttacttctctctgagaaggagagatgagagaaaggtttgcttttatcattaaaaggaaagcagatggtggagctgaatatgccacttaccagactaaatcaaccactccagcagagcagagaggctgaatagattccacaacctggtttgccagttcatcttttgactctattaaaatcttcaatagttgttattctgtagtttcactctcatgagtgcaactgtggcttagctaatattgcaatgtggcttgaatgtaggtagcatcctttgatgcttctttgaaacttgtatgaatttgggtatgaacagattgcctgctttcccttaaataacacttagatttattggaccagtcagcacagcatgcctggttgtattaaagcagggatatgctgtattttataaaattggcaaaattagagaaatatagttcacaatgaaattatattttctttgtaaagaaagtggcttgaaatcttttttgttcaaagattaatgccaactcttaagattattctttcaccaactatagaatgtattttatatatcgttcattgtaaaaagcccttaaaaatatgtgtatactactttggctcttgtgcataaaaacaagaacactgaaaattgggaatatgcacaaacttggcttctttaaccaagaatattattggaaaattctctaaaagttaatagggtaaattctctattttttgtaatgtgttcggtgatttcagaaagctagaaagtgtatgtgtggcatttgttttcactttttaaaacatccctaactgatcgaatatatcagtaatttcagaatcagatgcatcctttcataagaagtgagaggactctgacagccataacaggagtgccacttcatggtgcgaagtgaacactgtagtcttgttgttttcccaaagagaactccgtatgttctcttaggttgagtaacccactctgaattctggttacatgtgtttttctctccctccttaaataaagagaggggttaaacatgccctctaaaagtaggtggttttgaagagaataaattcatcagataacctcaagtcacatgagaatcttagtccatttacattgccttggctagtaaaagccatctatgtatatgtcttacctcatctcctaaaaggcagagtacaaagtaagccatgtatctcaggaaggtaacttcattttgtctatttgctgttgattgtaccaagggatggaagaagtaaatatagctcaggtagcactttatactcaggcagatctcagccctctactgagtcccttagccaagcagtttctttcaaagaagccagcaggcgaaaagcagggactgccactgcatttcatatcacactgttaaaagttgtgttttgaaattttatgtttagttgcacaaattgggccaaagaaacattgccttgaggaagatatgattggaaaatcaagagtgtagaagaataaatactgttttactgtccaaagacatgtttatagtgctctgtaaatgttcctttcctttgtagtctctggcaagatgctttaggaagataaaagtttgaggagaacaaacaggaattctgaattaagcacagagttgaagtttatacccgtttcacatgcttttcaagaatgtcgcaattactaagaagcagataatggtgttttttagaaacctaattgaagtatattcaaccaaatactttaatgtataaaataaatattatacaatatacttgtatagcagtttctgcttcacatttgattttttcaaatttaatatttatattagagatctatatatgtataaatatgtattttgtcaaatttgttacttaaatatatagagaccagttttctctggaagtttgtttaaatgacagaagcgtatatgaattcaagaaaatttaagctgcaaaaatgtatttgctataaaatgagaagtctcactgatagaggttctttattgctcattttttaaaaaatggactcttgaaatctgttaaaataaaattgtacatttggagatgtttcatgaaaaaaaaaa

SEQ ID NO: 478 - DNA, 3264 bp, Homo sapiens
cacttccgccccgggcgcggctcgggccacgcccacctgtcctgcagcactggatgctttgtgagttggggattgttgcgtcccatatctggacccagaagggacttccctgctcggctggctctcggtttctctgctttcctccggagaaataacagcgtcttccgcgccgcgcatggagcctcccggccgccgcgagtgtccctttccttcctggcgctttcctgggttgcttctggcggccatggtgttgctgctgtactccttctccgatgcctgtgaggagccaccaacatttgaagctatggagctcattggtaaaccaaaaccctactatgagattggtgaacgagtagattataagtgtaaaaaaggatacttctatatacctcctcttgccacccatactatttgtgatcggaatcatacatggctacctgtctcagatgacgcctgttatagagaaacatgtccatatatacgggatcctttaaatggccaagcagtccctgcaaatgggacttacgagtttggttatcagatgcactttatttgtaatgagggttattacttaattggtgaagaaattctatattgtgaacttaaaggatcagtagcaatttggagcggtaagcccccaatatgtgaaaaggttttgtgtacaccacctccaaaaataaaaaatggaaaacacacctttagtgaagtagaagtatttgagtatcttgatgcagtaacttatagttgtgatcctgcacctggaccagatccattttcacttattggagagagcacgatttattgtggtgacaattcagtgtggagtcgtgctgctccagagtgtaaagtggtcaaatgtcgatttccagtagtcgaaaatggaaaacagatatcaggatttggaaaaaaattttactacaaagcaacagttatgtttgaatgcgataagggtttttacctcgatggcagcgacacaattgtctgtgacagtaacagtacttgggatcccccagttccaaagtgtcttaaagtgtcgacttcttccactacaaaatctccagcgtccagtgcctcaggtcctaggcctacttacaagcctccagtctcaaattatccaggatatcctaaacctgaggaaggaatacttgacagtttggatgtttgggtcattgctgtgattgttattgccatagttgttggagttgcagtaatttgtgttgtcccgtacagatatcttcaaaggaggaagaagaaagggaaagcagatggtggagctgaatatgccacttaccagactaaatcaaccactccagcagagcagagaggctgaatagattccacaacctggtttgccagttcatcttttgactctattaaaatcttcaatagttgttattctgtagtttcactctcatgagtgcaactgtggcttagctaatattgcaatgtggcttgaatgtaggtagcatcctttgatgcttctttgaaacttgtatgaatttgggtatgaacagattgcctgctttcccttaaataacacttagatttattggaccagtcagcacagcatgcctggttgtattaaagcagggatatgctgtattttataaaattggcaaaattagagaaatatagttcacaatgaaattatattttctttgtaaagaaagtggcttgaaatcttttttgttcaaagattaatgccaactcttaagattattctttcaccaactatagaatgtattttatatatcgttcattgtaaaaagcccttaaaaatatgtgtatactactttggctcttgtgcataaaaacaagaacactgaaaattgggaatatgcacaaacttggcttctttaaccaagaatattattggaaaattctctaaaagttaatagggtaaattctctattttttgtaatgtgttcggtgatttcagaaagctagaaagtgtatgtgtggcatttgttttcactttttaaaacatccctaactgatcgaatatatcagtaatttcagaatcagatgcatcctttcataagaagtgagaggactctgacagccataacaggagtgccacttcatggtgcgaagtgaacactgtagtcttgttgttttcccaaagagaactccgtatgttctcttaggttgagtaacccactctgaattctggttacatgtgtttttctctccctccttaaataaagagaggggttaaacatgccctctaaaagtaggtggttttgaagagaataaattcatcagataacctcaagtcacatgagaatcttagtccatttacattgccttggctagtaaaagccatctatgtatatgtcttacctcatctcctaaaaggcagagtacaaagtaagccatgtatctcaggaaggtaacttcattttgtctatttgctgttgattgtaccaagggatggaagaagtaaatatagctcaggtagcactttatactcaggcagatctcagccctctactgagtcccttagccaagcagtttctttcaaagaagccagcaggcgaaaagcagggactgccactgcatttcatatcacactgttaaaagttgtgttttgaaattttatgtttagttgcacaaattgggccaaagaaacattgccttgaggaagatatgattggaaaatcaagagtgtagaagaataaatactgttttactgtccaaagacatgtttatagtgctctgtaaatgttcctttcctttgtagtctctggcaagatgctttaggaagataaaagtttgaggagaacaaacaggaattctgaattaagcacagagttgaagtttatacccgtttcacatgcttttcaagaatgtcgcaattactaagaagcagataatggtgttttttagaaacctaattgaagtatattcaaccaaatactttaatgtataaaataaatattatacaatatacttgtatagcagtttctgcttcacatttgattttttcaaatttaatatttatattagagatctatatatgtataaatatgtattttgtcaaatttgttacttaaatatatagagaccagttttctctggaagtttgtttaaatgacagaagcgtatatgaattcaagaaaatttaagctgcaaaaatgtatttgctataaaatgagaagtctcactgatagaggttctttattgctcattttttaaaaaatggactcttgaaatctgttaaaataaaattgtacatttggagatgtttcatgaaaaaaaaaa

SEQ ID NO: 479 - DNA, 3312 bp, Homo sapiens
cacttccgccccgggcgcggctcgggccacgcccacctgtcctgcagcactggatgctttgtgagttggggattgttgcgtcccatatctggacccagaagggacttccctgctcggctggctctcggtttctctgctttcctccggagaaataacagcgtcttccgcgccgcgcatggagcctcccggccgccgcgagtgtccctttccttcctggcgctttcctgggttgcttctggcggccatggtgttgctgctgtactccttctccgatgcctgtgaggagccaccaacatttgaagctatggagctcattggtaaaccaaaaccctactatgagattggtgaacgagtagattataagtgtaaaaaaggatacttctatatacctcctcttgccacccatactatttgtgatcggaatcatacatggctacctgtctcagatgacgcctgttatagagaaacatgtccatatatacgggatcctttaaatggccaagcagtccctgcaaatgggacttacgagtttggttatcagatgcactttatttgtaatgagggttattacttaattggtgaagaaattctatattgtgaacttaaaggatcagtagcaatttggagcggtaagcccccaatatgtgaaaaggttttgtgtacaccacctccaaaaataaaaaatggaaaacacacctttagtgaagtagaagtatttgagtatcttgatgcagtaacttatagttgtgatcctgcacctggaccagatccattttcacttattggagagagcacgatttattgtggtgacaattcagtgtggagtcgtgctgctccagagtgtaaagtggtcaaatgtcgatttccagtagtcgaaaatggaaaacagatatcaggatttggaaaaaaattttactacaaagcaacagttatgtttgaatgcgataagggtttttacctcgatggcagcgacacaattgtctgtgacagtaacagtacttgggatcccccagttccaaagtgtcttaaaggtcctaggcctacttacaagcctccagtctcaaattatccaggatatcctaaacctgaggaaggaatacttgacagtttggatgtttgggtcattgctgtgattgttattgccatagttgttggagttgcagtaatttgtgttgtcccgtacagatatcttcaaaggaggaagaagaaaggcacatacctaactgatgagacccacagagaagtaaaatttacttctctctgagaaggagagatgagagaaaggtttgcttttatcattaaaaggaaagcagatggtggagctgaatatgccacttaccagactaaatcaaccactccagcagagcagagaggctgaatagattccacaacctggtttgccagttcatcttttgactctattaaaatcttcaatagttgttattctgtagtttcactctcatgagtgcaactgtggcttagctaatattgcaatgtggcttgaatgtaggtagcatcctttgatgcttctttgaaacttgtatgaatttgggtatgaacagattgcctgctttcccttaaataacacttagatttattggaccagtcagcacagcatgcctggttgtattaaagcagggatatgctgtattttataaaattggcaaaattagagaaatatagttcacaatgaaattatattttctttgtaaagaaagtggcttgaaatcttttttgttcaaagattaatgccaactcttaagattattctttcaccaactatagaatgtattttatatatcgttcattgtaaaaagcccttaaaaatatgtgtatactactttggctcttgtgcataaaaacaagaacactgaaaattgggaatatgcacaaacttggcttctttaaccaagaatattattggaaaattctctaaaagttaatagggtaaattctctattttttgtaatgtgttcggtgatttcagaaagctagaaagtgtatgtgtggcatttgttttcactttttaaaacatccctaactgatcgaatatatcagtaatttcagaatcagatgcatcctttcataagaagtgagaggactctgacagccataacaggagtgccacttcatggtgcgaagtgaacactgtagtcttgttgttttcccaaagagaactccgtatgttctcttaggttgagtaacccactctgaattctggttacatgtgtttttctctccctccttaaataaagagaggggttaaacatgccctctaaaagtaggtggttttgaagagaataaattcatcagataacctcaagtcacatgagaatcttagtccatttacattgccttggctagtaaaagccatctatgtatatgtcttacctcatctcctaaaaggcagagtacaaagtaagccatgtatctcaggaaggtaacttcattttgtctatttgctgttgattgtaccaagggatggaagaagtaaatatagctcaggtagcactttatactcaggcagatctcagccctctactgagtcccttagccaagcagtttctttcaaagaagccagcaggcgaaaagcagggactgccactgcatttcatatcacactgttaaaagttgtgttttgaaattttatgtttagttgcacaaattgggccaaagaaacattgccttgaggaagatatgattggaaaatcaagagtgtagaagaataaatactgttttactgtccaaagacatgtttatagtgctctgtaaatgttcctttcctttgtagtctctggcaagatgctttaggaagataaaagtttgaggagaacaaacaggaattctgaattaagcacagagttgaagtttatacccgtttcacatgcttttcaagaatgtcgcaattactaagaagcagataatggtgttttttagaaacctaattgaagtatattcaaccaaatactttaatgtataaaataaatattatacaatatacttgtatagcagtttctgcttcacatttgattttttcaaatttaatatttatattagagatctatatatgtataaatatgtattttgtcaaatttgttacttaaatatatagagaccagttttctctggaagtttgtttaaatgacagaagcgtatatgaattcaagaaaatttaagctgcaaaaatgtatttgctataaaatgagaagtctcactgatagaggttctttattgctcattttttaaaaaatggactcttgaaatctgttaaaataaaattgtacatttggagatgtttcatgaaaaaaaaaa

SEQ ID NO: 480 - DNA, 3219 bp, Homo sapiens
cacttccgccccgggcgcggctcgggccacgcccacctgtcctgcagcactggatgctttgtgagttggggattgttgcgtcccatatctggacccagaagggacttccctgctcggctggctctcggtttctctgctttcctccggagaaataacagcgtcttccgcgccgcgcatggagcctcccggccgccgcgagtgtccctttccttcctggcgctttcctgggttgcttctggcggccatggtgttgctgctgtactccttctccgatgcctgtgaggagccaccaacatttgaagctatggagctcattggtaaaccaaaaccctactatgagattggtgaacgagtagattataagtgtaaaaaaggatacttctatatacctcctcttgccacccatactatttgtgatcggaatcatacatggctacctgtctcagatgacgcctgttatagagaaacatgtccatatatacgggatcctttaaatggccaagcagtccctgcaaatgggacttacgagtttggttatcagatgcactttatttgtaatgagggttattacttaattggtgaagaaattctatattgtgaacttaaaggatcagtagcaatttggagcggtaagcccccaatatgtgaaaaggttttgtgtacaccacctccaaaaataaaaaatggaaaacacacctttagtgaagtagaagtatttgagtatcttgatgcagtaacttatagttgtgatcctgcacctggaccagatccattttcacttattggagagagcacgatttattgtggtgacaattcagtgtggagtcgtgctgctccagagtgtaaagtggtcaaatgtcgatttccagtagtcgaaaatggaaaacagatatcaggatttggaaaaaaattttactacaaagcaacagttatgtttgaatgcgataagggtttttacctcgatggcagcgacacaattgtctgtgacagtaacagtacttgggatcccccagttccaaagtgtcttaaaggtcctaggcctacttacaagcctccagtctcaaattatccaggatatcctaaacctgaggaaggaatacttgacagtttggatgtttgggtcattgctgtgattgttattgccatagttgttggagttgcagtaatttgtgttgtcccgtacagatatcttcaaaggaggaagaagaaagggaaagcagatggtggagctgaatatgccacttaccagactaaatcaaccactccagcagagcagagaggctgaatagattccacaacctggtttgccagttcatcttttgactctattaaaatcttcaatagttgttattctgtagtttcactctcatgagtgcaactgtggcttagctaatattgcaatgtggcttgaatgtaggtagcatcctttgatgcttctttgaaacttgtatgaatttgggtatgaacagattgcctgctttcccttaaataacacttagatttattggaccagtcagcacagcatgcctggttgtattaaagcagggatatgctgtattttataaaattggcaaaattagagaaatatagttcacaatgaaattatattttctttgtaaagaaagtggcttgaaatcttttttgttcaaagattaatgccaactcttaagattattctttcaccaactatagaatgtattttatatatcgttcattgtaaaaagcccttaaaaatatgtgtatactactttggctcttgtgcataaaaacaagaacactgaaaattgggaatatgcacaaacttggcttctttaaccaagaatattattggaaaattctctaaaagttaatagggtaaattctctattttttgtaatgtgttcggtgatttcagaaagctagaaagtgtatgtgtggcatttgttttcactttttaaaacatccctaactgatcgaatatatcagtaatttcagaatcagatgcatcctttcataagaagtgagaggactctgacagccataacaggagtgccacttcatggtgcgaagtgaacactgtagtcttgttgttttcccaaagagaactccgtatgttctcttaggttgagtaacccactctgaattctggttacatgtgtttttctctccctccttaaataaagagaggggttaaacatgccctctaaaagtaggtggttttgaagagaataaattcatcagataacctcaagtcacatgagaatcttagtccatttacattgccttggctagtaaaagccatctatgtatatgtcttacctcatctcctaaaaggcagagtacaaagtaagccatgtatctcaggaaggtaacttcattttgtctatttgctgttgattgtaccaagggatggaagaagtaaatatagctcaggtagcactttatactcaggcagatctcagccctctactgagtcccttagccaagcagtttctttcaaagaagccagcaggcgaaaagcagggactgccactgcatttcatatcacactgttaaaagttgtgttttgaaattttatgtttagttgcacaaattgggccaaagaaacattgccttgaggaagatatgattggaaaatcaagagtgtagaagaataaatactgttttactgtccaaagacatgtttatagtgctctgtaaatgttcctttcctttgtagtctctggcaagatgctttaggaagataaaagtttgaggagaacaaacaggaattctgaattaagcacagagttgaagtttatacccgtttcacatgcttttcaagaatgtcgcaattactaagaagcagataatggtgttttttagaaacctaattgaagtatattcaaccaaatactttaatgtataaaataaatattatacaatatacttgtatagcagtttctgcttcacatttgattttttcaaatttaatatttatattagagatctatatatgtataaatatgtattttgtcaaatttgttacttaaatatatagagaccagttttctctggaagtttgtttaaatgacagaagcgtatatgaattcaagaaaatttaagctgcaaaaatgtatttgctataaaatgagaagtctcactgatagaggttctttattgctcattttttaaaaaatggactcttgaaatctgttaaaataaaattgtacatttggagatgtttcatgaaaaaaaaaa

SEQ ID NO: 481 - DNA, 3177 bp, Homo sapiens
cacttccgccccgggcgcggctcgggccacgcccacctgtcctgcagcactggatgctttgtgagttggggattgttgcgtcccatatctggacccagaagggacttccctgctcggctggctctcggtttctctgctttcctccggagaaataacagcgtcttccgcgccgcgcatggagcctcccggccgccgcgagtgtccctttccttcctggcgctttcctgggttgcttctggcggccatggtgttgctgctgtactccttctccgatgcctgtgaggagccaccaacatttgaagctatggagctcattggtaaaccaaaaccctactatgagattggtgaacgagtagattataagtgtaaaaaaggatacttctatatacctcctcttgccacccatactatttgtgatcggaatcatacatggctacctgtctcagatgacgcctgttatagagaaacatgtccatatatacgggatcctttaaatggccaagcagtccctgcaaatgggacttacgagtttggttatcagatgcactttatttgtaatgagggttattacttaattggtgaagaaattctatattgtgaacttaaaggatcagtagcaatttggagcggtaagcccccaatatgtgaaaaggttttgtgtacaccacctccaaaaataaaaaatggaaaacacacctttagtgaagtagaagtatttgagtatcttgatgcagtaacttatagttgtgatcctgcacctggaccagatccattttcacttattggagagagcacgatttattgtggtgacaattcagtgtggagtcgtgctgctccagagtgtaaagtggtcaaatgtcgatttccagtagtcgaaaatggaaaacagatatcaggatttggaaaaaaattttactacaaagcaacagttatgtttgaatgcgataagggtttttacctcgatggcagcgacacaattgtctgtgacagtaacagtacttgggatcccccagttccaaagtgtcttaaaggatatcctaaacctgaggaaggaatacttgacagtttggatgtttgggtcattgctgtgattgttattgccatagttgttggagttgcagtaatttgtgttgtcccgtacagatatcttcaaaggaggaagaagaaagggaaagcagatggtggagctgaatatgccacttaccagactaaatcaaccactccagcagagcagagaggctgaatagattccacaacctggtttgccagttcatcttttgactctattaaaatcttcaatagttgttattctgtagtttcactctcatgagtgcaactgtggcttagctaatattgcaatgtggcttgaatgtaggtagcatcctttgatgcttctttgaaacttgtatgaatttgggtatgaacagattgcctgctttcccttaaataacacttagatttattggaccagtcagcacagcatgcctggttgtattaaagcagggatatgctgtattttataaaattggcaaaattagagaaatatagttcacaatgaaattatattttctttgtaaagaaagtggcttgaaatcttttttgttcaaagattaatgccaactcttaagattattctttcaccaactatagaatgtattttatatatcgttcattgtaaaaagcccttaaaaatatgtgtatactactttggctcttgtgcataaaaacaagaacactgaaaattgggaatatgcacaaacttggcttctttaaccaagaatattattggaaaattctctaaaagttaatagggtaaattctctattttttgtaatgtgttcggtgatttcagaaagctagaaagtgtatgtgtggcatttgttttcactttttaaaacatccctaactgatcgaatatatcagtaatttcagaatcagatgcatcctttcataagaagtgagaggactctgacagccataacaggagtgccacttcatggtgcgaagtgaacactgtagtcttgttgttttcccaaagagaactccgtatgttctcttaggttgagtaacccactctgaattctggttacatgtgtttttctctccctccttaaataaagagaggggttaaacatgccctctaaaagtaggtggttttgaagagaataaattcatcagataacctcaagtcacatgagaatcttagtccatttacattgccttggctagtaaaagccatctatgtatatgtcttacctcatctcctaaaaggcagagtacaaagtaagccatgtatctcaggaaggtaacttcattttgtctatttgctgttgattgtaccaagggatggaagaagtaaatatagctcaggtagcactttatactcaggcagatctcagccctctactgagtcccttagccaagcagtttctttcaaagaagccagcaggcgaaaagcagggactgccactgcatttcatatcacactgttaaaagttgtgttttgaaattttatgtttagttgcacaaattgggccaaagaaacattgccttgaggaagatatgattggaaaatcaagagtgtagaagaataaatactgttttactgtccaaagacatgtttatagtgctctgtaaatgttcctttcctttgtagtctctggcaagatgctttaggaagataaaagtttgaggagaacaaacaggaattctgaattaagcacagagttgaagtttatacccgtttcacatgcttttcaagaatgtcgcaattactaagaagcagataatggtgttttttagaaacctaattgaagtatattcaaccaaatactttaatgtataaaataaatattatacaatatacttgtatagcagtttctgcttcacatttgattttttcaaatttaatatttatattagagatctatatatgtataaatatgtattttgtcaaatttgttacttaaatatatagagaccagttttctctggaagtttgtttaaatgacagaagcgtatatgaattcaagaaaatttaagctgcaaaaatgtatttgctataaaatgagaagtctcactgatagaggttctttattgctcattttttaaaaaatggactcttgaaatctgttaaaataaaattgtacatttggagatgtttcatgaaaaaaaaaa

SEQ ID NO: 482 - DNA, 3155 bp, Homo sapiens
cacttccgccccgggcgcggctcgggccacgcccacctgtcctgcagcactggatgctttgtgagttggggattgttgcgtcccatatctggacccagaagggacttccctgctcggctggctctcggtttctctgctttcctccggagaaataacagcgtcttccgcgccgcgcatggagcctcccggccgccgcgagtgtccctttccttcctggcgctttcctgggttgcttctggcggccatggtgttgctgctgtactccttctccgatgcctgtgaggagccaccaacatttgaagctatggagctcattggtaaaccaaaaccctactatgagattggtgaacgagtagattataagtgtaaaaaaggatacttctatatacctcctcttgccacccatactatttgtgatcggaatcatacatggctacctgtctcagatgacgcctgttatagagaaacatgtccatatatacgggatcctttaaatggccaagcagtccctgcaaatgggacttacgagtttggttatcagatgcactttatttgtaatgagggttattacttaattggtgaagaaattctatattgtgaacttaaaggatcagtagcaatttggagcggtaagcccccaatatgtgaaaaggttttgtgtacaccacctccaaaaataaaaaatggaaaacacacctttagtgaagtagaagtatttgagtatcttgatgcagtaacttatagttgtgatcctgcacctggaccagatccattttcacttattggagagagcacgatttattgtggtgacaattcagtgtggagtcgtgctgctccagagtgtaaagtggtcaaatgtcgatttccagtagtcgaaaatggaaaacagatatcaggatttggaaaaaaattttactacaaagcaacagttatgtttgaatgcgataagggtttttacctcgatggcagcgacacaattgtctgtgacagtaacagtacttgggatcccccagttccaaagtgtcttaaaggtcctaggcctacttacaagcctccagtctcaaattatccaggatatcctaaacctgaggaaggaatacttgacagtttggatgtttgggtcattgctgtgattgttattgccataggaaagcagatggtggagctgaatatgccacttaccagactaaatcaaccactccagcagagcagagaggctgaatagattccacaacctggtttgccagttcatcttttgactctattaaaatcttcaatagttgttattctgtagtttcactctcatgagtgcaactgtggcttagctaatattgcaatgtggcttgaatgtaggtagcatcctttgatgcttctttgaaacttgtatgaatttgggtatgaacagattgcctgctttcccttaaataacacttagatttattggaccagtcagcacagcatgcctggttgtattaaagcagggatatgctgtattttataaaattggcaaaattagagaaatatagttcacaatgaaattatattttctttgtaaagaaagtggcttgaaatcttttttgttcaaagattaatgccaactcttaagattattctttcaccaactatagaatgtattttatatatcgttcattgtaaaaagcccttaaaaatatgtgtatactactttggctcttgtgcataaaaacaagaacactgaaaattgggaatatgcacaaacttggcttctttaaccaagaatattattggaaaattctctaaaagttaatagggtaaattctctattttttgtaatgtgttcggtgatttcagaaagctagaaagtgtatgtgtggcatttgttttcactttttaaaacatccctaactgatcgaatatatcagtaatttcagaatcagatgcatcctttcataagaagtgagaggactctgacagccataacaggagtgccacttcatggtgcgaagtgaacactgtagtcttgttgttttcccaaagagaactccgtatgttctcttaggttgagtaacccactctgaattctggttacatgtgtttttctctccctccttaaataaagagaggggttaaacatgccctctaaaagtaggtggttttgaagagaataaattcatcagataacctcaagtcacatgagaatcttagtccatttacattgccttggctagtaaaagccatctatgtatatgtcttacctcatctcctaaaaggcagagtacaaagtaagccatgtatctcaggaaggtaacttcattttgtctatttgctgttgattgtaccaagggatggaagaagtaaatatagctcaggtagcactttatactcaggcagatctcagccctctactgagtcccttagccaagcagtttctttcaaagaagccagcaggcgaaaagcagggactgccactgcatttcatatcacactgttaaaagttgtgttttgaaattttatgtttagttgcacaaattgggccaaagaaacattgccttgaggaagatatgattggaaaatcaagagtgtagaagaataaatactgttttactgtccaaagacatgtttatagtgctctgtaaatgttcctttcctttgtagtctctggcaagatgctttaggaagataaaagtttgaggagaacaaacaggaattctgaattaagcacagagttgaagtttatacccgtttcacatgcttttcaagaatgtcgcaattactaagaagcagataatggtgttttttagaaacctaattgaagtatattcaaccaaatactttaatgtataaaataaatattatacaatatacttgtatagcagtttctgcttcacatttgattttttcaaatttaatatttatattagagatctatatatgtataaatatgtattttgtcaaatttgttacttaaatatatagagaccagttttctctggaagtttgtttaaatgacagaagcgtatatgaattcaagaaaatttaagctgcaaaaatgtatttgctataaaatgagaagtctcactgatagaggttctttattgctcattttttaaaaaatggactcttgaaatctgttaaaataaaattgtacatttggagatgtttcatgaaaaaaaaaa

SEQ ID NO: 483 - DNA, 3253 bp, Homo sapiens
cacttccgccccgggcgcggctcgggccacgcccacctgtcctgcagcactggatgctttgtgagttggggattgttgcgtcccatatctggacccagaagggacttccctgctcggctggctctcggtttctctgctttcctccggagaaataacagcgtcttccgcgccgcgcatggagcctcccggccgccgcgagtgtccctttccttcctggcgctttcctgggttgcttctggcggccatggtgttgctgctgtactccttctccgatgcctgtgaggagccaccaacatttgaagctatggagctcattggtaaaccaaaaccctactatgagattggtgaacgagtagattataagtgtaaaaaaggatacttctatatacctcctcttgccacccatactatttgtgatcggaatcatacatggctacctgtctcagatgacgcctgttatagagaaacatgtccatatatacgggatcctttaaatggccaagcagtccctgcaaatgggacttacgagtttggttatcagatgcactttatttgtaatgagggttattacttaattggtgaagaaattctatattgtgaacttaaaggatcagtagcaatttggagcggtaagcccccaatatgtgaaaaggttttgtgtacaccacctccaaaaataaaaaatggaaaacacacctttagtgaagtagaagtatttgagtatcttgatgcagtaacttatagttgtgatcctgcacctggaccagatccattttcacttattggagagagcacgatttattgtggtgacaattcagtgtggagtcgtgctgctccagagtgtaaagtggtcaaatgtcgatttccagtagtcgaaaatggaaaacagatatcaggatttggaaaaaaattttactacaaagcaacagttatgtttgaatgcgataagggtttttacctcgatggcagcgacacaattgtctgtgacagtaacagtacttgggatcccccagttccaaagtgtcttaaagtgctgcctccatctagtacaaaacctccagctttgagtcattcagtgtcgacttcttccactacaaaatctccagcgtccagtgcctcaggatatcctaaacctgaggaaggaatacttgacagtttggatgtttgggtcattgctgtgattgttattgccatagttgttggagttgcagtaatttgtgttgtcccgtacagatatcttcaaaggaggaagaagaaagggaaagcagatggtggagctgaatatgccacttaccagactaaatcaaccactccagcagagcagagaggctgaatagattccacaacctggtttgccagttcatcttttgactctattaaaatcttcaatagttgttattctgtagtttcactctcatgagtgcaactgtggcttagctaatattgcaatgtggcttgaatgtaggtagcatcctttgatgcttctttgaaacttgtatgaatttgggtatgaacagattgcctgctttcccttaaataacacttagatttattggaccagtcagcacagcatgcctggttgtattaaagcagggatatgctgtattttataaaattggcaaaattagagaaatatagttcacaatgaaattatattttctttgtaaagaaagtggcttgaaatcttttttgttcaaagattaatgccaactcttaagattattctttcaccaactatagaatgtattttatatatcgttcattgtaaaaagcccttaaaaatatgtgtatactactttggctcttgtgcataaaaacaagaacactgaaaattgggaatatgcacaaacttggcttctttaaccaagaatattattggaaaattctctaaaagttaatagggtaaattctctattttttgtaatgtgttcggtgatttcagaaagctagaaagtgtatgtgtggcatttgttttcactttttaaaacatccctaactgatcgaatatatcagtaatttcagaatcagatgcatcctttcataagaagtgagaggactctgacagccataacaggagtgccacttcatggtgcgaagtgaacactgtagtcttgttgttttcccaaagagaactccgtatgttctcttaggttgagtaacccactctgaattctggttacatgtgtttttctctccctccttaaataaagagaggggttaaacatgccctctaaaagtaggtggttttgaagagaataaattcatcagataacctcaagtcacatgagaatcttagtccatttacattgccttggctagtaaaagccatctatgtatatgtcttacctcatctcctaaaaggcagagtacaaagtaagccatgtatctcaggaaggtaacttcattttgtctatttgctgttgattgtaccaagggatggaagaagtaaatatagctcaggtagcactttatactcaggcagatctcagccctctactgagtcccttagccaagcagtttctttcaaagaagccagcaggcgaaaagcagggactgccactgcatttcatatcacactgttaaaagttgtgttttgaaattttatgtttagttgcacaaattgggccaaagaaacattgccttgaggaagatatgattggaaaatcaagagtgtagaagaataaatactgttttactgtccaaagacatgtttatagtgctctgtaaatgttcctttcctttgtagtctctggcaagatgctttaggaagataaaagtttgaggagaacaaacaggaattctgaattaagcacagagttgaagtttatacccgtttcacatgcttttcaagaatgtcgcaattactaagaagcagataatggtgttttttagaaacctaattgaagtatattcaaccaaatactttaatgtataaaataaatattatacaatatacttgtatagcagtttctgcttcacatttgattttttcaaatttaatatttatattagagatctatatatgtataaatatgtattttgtcaaatttgttacttaaatatatagagaccagttttctctggaagtttgtttaaatgacagaagcgtatatgaattcaagaaaatttaagctgcaaaaatgtatttgctataaaatgagaagtctcactgatagaggttctttattgctcattttttaaaaaatggactcttgaaatctgttaaaataaaattgtacatttggagatgttt

SEQ ID NO: 484 - DNA, 3208 bp, Homo sapiens
cacttccgccccgggcgcggctcgggccacgcccacctgtcctgcagcactggatgctttgtgagttggggattgttgcgtcccatatctggacccagaagggacttccctgctcggctggctctcggtttctctgctttcctccggagaaataacagcgtcttccgcgccgcgcatggagcctcccggccgccgcgagtgtccctttccttcctggcgctttcctgggttgcttctggcggccatggtgttgctgctgtactccttctccgatgcctgtgaggagccaccaacatttgaagctatggagctcattggtaaaccaaaaccctactatgagattggtgaacgagtagattataagtgtaaaaaaggatacttctatatacctcctcttgccacccatactatttgtgatcggaatcatacatggctacctgtctcagatgacgcctgttatagagaaacatgtccatatatacgggatcctttaaatggccaagcagtccctgcaaatgggacttacgagtttggttatcagatgcactttatttgtaatgagggttattacttaattggtgaagaaattctatattgtgaacttaaaggatcagtagcaatttggagcggtaagcccccaatatgtgaaaaggttttgtgtacaccacctccaaaaataaaaaatggaaaacacacctttagtgaagtagaagtatttgagtatcttgatgcagtaacttatagttgtgatcctgcacctggaccagatccattttcacttattggagagagcacgatttattgtggtgacaattcagtgtggagtcgtgctgctccagagtgtaaagtggtcaaatgtcgatttccagtagtcgaaaatggaaaacagatatcaggatttggaaaaaaattttactacaaagcaacagttatgtttgaatgcgataagggtttttacctcgatggcagcgacacaattgtctgtgacagtaacagtacttgggatcccccagttccaaagtgtcttaaagtgtcgacttcttccactacaaaatctccagcgtccagtgcctcaggatatcctaaacctgaggaaggaatacttgacagtttggatgtttgggtcattgctgtgattgttattgccatagttgttggagttgcagtaatttgtgttgtcccgtacagatatcttcaaaggaggaagaagaaagggaaagcagatggtggagctgaatatgccacttaccagactaaatcaaccactccagcagagcagagaggctgaatagattccacaacctggtttgccagttcatcttttgactctattaaaatcttcaatagttgttattctgtagtttcactctcatgagtgcaactgtggcttagctaatattgcaatgtggcttgaatgtaggtagcatcctttgatgcttctttgaaacttgtatgaatttgggtatgaacagattgcctgctttcccttaaataacacttagatttattggaccagtcagcacagcatgcctggttgtattaaagcagggatatgctgtattttataaaattggcaaaattagagaaatatagttcacaatgaaattatattttctttgtaaagaaagtggcttgaaatcttttttgttcaaagattaatgccaactcttaagattattctttcaccaactatagaatgtattttatatatcgttcattgtaaaaagcccttaaaaatatgtgtatactactttggctcttgtgcataaaaacaagaacactgaaaattgggaatatgcacaaacttggcttctttaaccaagaatattattggaaaattctctaaaagttaatagggtaaattctctattttttgtaatgtgttcggtgatttcagaaagctagaaagtgtatgtgtggcatttgttttcactttttaaaacatccctaactgatcgaatatatcagtaatttcagaatcagatgcatcctttcataagaagtgagaggactctgacagccataacaggagtgccacttcatggtgcgaagtgaacactgtagtcttgttgttttcccaaagagaactccgtatgttctcttaggttgagtaacccactctgaattctggttacatgtgtttttctctccctccttaaataaagagaggggttaaacatgccctctaaaagtaggtggttttgaagagaataaattcatcagataacctcaagtcacatgagaatcttagtccatttacattgccttggctagtaaaagccatctatgtatatgtcttacctcatctcctaaaaggcagagtacaaagtaagccatgtatctcaggaaggtaacttcattttgtctatttgctgttgattgtaccaagggatggaagaagtaaatatagctcaggtagcactttatactcaggcagatctcagccctctactgagtcccttagccaagcagtttctttcaaagaagccagcaggcgaaaagcagggactgccactgcatttcatatcacactgttaaaagttgtgttttgaaattttatgtttagttgcacaaattgggccaaagaaacattgccttgaggaagatatgattggaaaatcaagagtgtagaagaataaatactgttttactgtccaaagacatgtttatagtgctctgtaaatgttcctttcctttgtagtctctggcaagatgctttaggaagataaaagtttgaggagaacaaacaggaattctgaattaagcacagagttgaagtttatacccgtttcacatgcttttcaagaatgtcgcaattactaagaagcagataatggtgttttttagaaacctaattgaagtatattcaaccaaatactttaatgtataaaataaatattatacaatatacttgtatagcagtttctgcttcacatttgattttttcaaatttaatatttatattagagatctatatatgtataaatatgtattttgtcaaatttgttacttaaatatatagagaccagttttctctggaagtttgtttaaatgacagaagcgtatatgaattcaagaaaatttaagctgcaaaaatgtatttgctataaaatgagaagtctcactgatagaggttctttattgctcattttttaaaaaatggactcttgaaatctgttaaaataaaattgtacatttggagatgttt

SEQ ID NO: 485 - DNA, 3346 bp, Homo sapiens
cacttccgccccgggcgcggctcgggccacgcccacctgtcctgcagcactggatgctttgtgagttggggattgttgcgtcccatatctggacccagaagggacttccctgctcggctggctctcggtttctctgctttcctccggagaaataacagcgtcttccgcgccgcgcatggagcctcccggccgccgcgagtgtccctttccttcctggcgctttcctgggttgcttctggcggccatggtgttgctgctgtactccttctccgatgcctgtgaggagccaccaacatttgaagctatggagctcattggtaaaccaaaaccctactatgagattggtgaacgagtagattataagtgtaaaaaaggatacttctatatacctcctcttgccacccatactatttgtgatcggaatcatacatggctacctgtctcagatgacgcctgttatagagaaacatgtccatatatacgggatcctttaaatggccaagcagtccctgcaaatgggacttacgagtttggttatcagatgcactttatttgtaatgagggttattacttaattggtgaagaaattctatattgtgaacttaaaggatcagtagcaatttggagcggtaagcccccaatatgtgaaaaggttttgtgtacaccacctccaaaaataaaaaatggaaaacacacctttagtgaagtagaagtatttgagtatcttgatgcagtaacttatagttgtgatcctgcacctggaccagatccattttcacttattggagagagcacgatttattgtggtgacaattcagtgtggagtcgtgctgctccagagtgtaaagtggtcaaatgtcgatttccagtagtcgaaaatggaaaacagatatcaggatttggaaaaaaattttactacaaagcaacagttatgtttgaatgcgataagggtttttacctcgatggcagcgacacaattgtctgtgacagtaacagtacttgggatcccccagttccaaagtgtcttaaagtgctgcctccatctagtacaaaacctccagctttgagtcattcagtgtcgacttcttccactacaaaatctccagcgtccagtgcctcaggatatcctaaacctgaggaaggaatacttgacagtttggatgtttgggtcattgctgtgattgttattgccatagttgttggagttgcagtaatttgtgttgtcccgtacagatatcttcaaaggaggaagaagaaaggcacatacctaactgatgagacccacagagaagtaaaatttacttctctctgagaaggagagatgagagaaaggtttgcttttatcattaaaaggaaagcagatggtggagctgaatatgccacttaccagactaaatcaaccactccagcagagcagagaggctgaatagattccacaacctggtttgccagttcatcttttgactctattaaaatcttcaatagttgttattctgtagtttcactctcatgagtgcaactgtggcttagctaatattgcaatgtggcttgaatgtaggtagcatcctttgatgcttctttgaaacttgtatgaatttgggtatgaacagattgcctgctttcccttaaataacacttagatttattggaccagtcagcacagcatgcctggttgtattaaagcagggatatgctgtattttataaaattggcaaaattagagaaatatagttcacaatgaaattatattttctttgtaaagaaagtggcttgaaatcttttttgttcaaagattaatgccaactcttaagattattctttcaccaactatagaatgtattttatatatcgttcattgtaaaaagcccttaaaaatatgtgtatactactttggctcttgtgcataaaaacaagaacactgaaaattgggaatatgcacaaacttggcttctttaaccaagaatattattggaaaattctctaaaagttaatagggtaaattctctattttttgtaatgtgttcggtgatttcagaaagctagaaagtgtatgtgtggcatttgttttcactttttaaaacatccctaactgatcgaatatatcagtaatttcagaatcagatgcatcctttcataagaagtgagaggactctgacagccataacaggagtgccacttcatggtgcgaagtgaacactgtagtcttgttgttttcccaaagagaactccgtatgttctcttaggttgagtaacccactctgaattctggttacatgtgtttttctctccctccttaaataaagagaggggttaaacatgccctctaaaagtaggtggttttgaagagaataaattcatcagataacctcaagtcacatgagaatcttagtccatttacattgccttggctagtaaaagccatctatgtatatgtcttacctcatctcctaaaaggcagagtacaaagtaagccatgtatctcaggaaggtaacttcattttgtctatttgctgttgattgtaccaagggatggaagaagtaaatatagctcaggtagcactttatactcaggcagatctcagccctctactgagtcccttagccaagcagtttctttcaaagaagccagcaggcgaaaagcagggactgccactgcatttcatatcacactgttaaaagttgtgttttgaaattttatgtttagttgcacaaattgggccaaagaaacattgccttgaggaagatatgattggaaaatcaagagtgtagaagaataaatactgttttactgtccaaagacatgtttatagtgctctgtaaatgttcctttcctttgtagtctctggcaagatgctttaggaagataaaagtttgaggagaacaaacaggaattctgaattaagcacagagttgaagtttatacccgtttcacatgcttttcaagaatgtcgcaattactaagaagcagataatggtgttttttagaaacctaattgaagtatattcaaccaaatactttaatgtataaaataaatattatacaatatacttgtatagcagtttctgcttcacatttgattttttcaaatttaatatttatattagagatctatatatgtataaatatgtattttgtcaaatttgttacttaaatatatagagaccagttttctctggaagtttgtttaaatgacagaagcgtatatgaattcaagaaaatttaagctgcaaaaatgtatttgctataaaatgagaagtctcactgatagaggttctttattgctcattttttaaaaaatggactcttgaaatctgttaaaataaaattgtacatttggagatgttt

SEQ ID NO: 486 - DNA, 3301 bp, Homo sapiens
cacttccgccccgggcgcggctcgggccacgcccacctgtcctgcagcactggatgctttgtgagttggggattgttgcgtcccatatctggacccagaagggacttccctgctcggctggctctcggtttctctgctttcctccggagaaataacagcgtcttccgcgccgcgcatggagcctcccggccgccgcgagtgtccctttccttcctggcgctttcctgggttgcttctggcggccatggtgttgctgctgtactccttctccgatgcctgtgaggagccaccaacatttgaagctatggagctcattggtaaaccaaaaccctactatgagattggtgaacgagtagattataagtgtaaaaaaggatacttctatatacctcctcttgccacccatactatttgtgatcggaatcatacatggctacctgtctcagatgacgcctgttatagagaaacatgtccatatatacgggatcctttaaatggccaagcagtccctgcaaatgggacttacgagtttggttatcagatgcactttatttgtaatgagggttattacttaattggtgaagaaattctatattgtgaacttaaaggatcagtagcaatttggagcggtaagcccccaatatgtgaaaaggttttgtgtacaccacctccaaaaataaaaaatggaaaacacacctttagtgaagtagaagtatttgagtatcttgatgcagtaacttatagttgtgatcctgcacctggaccagatccattttcacttattggagagagcacgatttattgtggtgacaattcagtgtggagtcgtgctgctccagagtgtaaagtggtcaaatgtcgatttccagtagtcgaaaatggaaaacagatatcaggatttggaaaaaaattttactacaaagcaacagttatgtttgaatgcgataagggtttttacctcgatggcagcgacacaattgtctgtgacagtaacagtacttgggatcccccagttccaaagtgtcttaaagtgtcgacttcttccactacaaaatctccagcgtccagtgcctcaggatatcctaaacctgaggaaggaatacttgacagtttggatgtttgggtcattgctgtgattgttattgccatagttgttggagttgcagtaatttgtgttgtcccgtacagatatcttcaaaggaggaagaagaaaggcacatacctaactgatgagacccacagagaagtaaaatttacttctctctgagaaggagagatgagagaaaggtttgcttttatcattaaaaggaaagcagatggtggagctgaatatgccacttaccagactaaatcaaccactccagcagagcagagaggctgaatagattccacaacctggtttgccagttcatcttttgactctattaaaatcttcaatagttgttattctgtagtttcactctcatgagtgcaactgtggcttagctaatattgcaatgtggcttgaatgtaggtagcatcctttgatgcttctttgaaacttgtatgaatttgggtatgaacagattgcctgctttcccttaaataacacttagatttattggaccagtcagcacagcatgcctggttgtattaaagcagggatatgctgtattttataaaattggcaaaattagagaaatatagttcacaatgaaattatattttctttgtaaagaaagtggcttgaaatcttttttgttcaaagattaatgccaactcttaagattattctttcaccaactatagaatgtattttatatatcgttcattgtaaaaagcccttaaaaatatgtgtatactactttggctcttgtgcataaaaacaagaacactgaaaattgggaatatgcacaaacttggcttctttaaccaagaatattattggaaaattctctaaaagttaatagggtaaattctctattttttgtaatgtgttcggtgatttcagaaagctagaaagtgtatgtgtggcatttgttttcactttttaaaacatccctaactgatcgaatatatcagtaatttcagaatcagatgcatcctttcataagaagtgagaggactctgacagccataacaggagtgccacttcatggtgcgaagtgaacactgtagtcttgttgttttcccaaagagaactccgtatgttctcttaggttgagtaacccactctgaattctggttacatgtgtttttctctccctccttaaataaagagaggggttaaacatgccctctaaaagtaggtggttttgaagagaataaattcatcagataacctcaagtcacatgagaatcttagtccatttacattgccttggctagtaaaagccatctatgtatatgtcttacctcatctcctaaaaggcagagtacaaagtaagccatgtatctcaggaaggtaacttcattttgtctatttgctgttgattgtaccaagggatggaagaagtaaatatagctcaggtagcactttatactcaggcagatctcagccctctactgagtcccttagccaagcagtttctttcaaagaagccagcaggcgaaaagcagggactgccactgcatttcatatcacactgttaaaagttgtgttttgaaattttatgtttagttgcacaaattgggccaaagaaacattgccttgaggaagatatgattggaaaatcaagagtgtagaagaataaatactgttttactgtccaaagacatgtttatagtgctctgtaaatgttcctttcctttgtagtctctggcaagatgctttaggaagataaaagtttgaggagaacaaacaggaattctgaattaagcacagagttgaagtttatacccgtttcacatgcttttcaagaatgtcgcaattactaagaagcagataatggtgttttttagaaacctaattgaagtatattcaaccaaatactttaatgtataaaataaatattatacaatatacttgtatagcagtttctgcttcacatttgattttttcaaatttaatatttatattagagatctatatatgtataaatatgtattttgtcaaatttgttacttaaatatatagagaccagttttctctggaagtttgtttaaatgacagaagcgtatatgaattcaagaaaatttaagctgcaaaaatgtatttgctataaaatgagaagtctcactgatagaggttctttattgctcattttttaaaaaatggactcttgaaatctgttaaaataaaattgtacatttggagatgttt

SEQ ID NO: 487 - DNA, 3256 bp, Homo sapiens
cacttccgccccgggcgcggctcgggccacgcccacctgtcctgcagcactggatgctttgtgagttggggattgttgcgtcccatatctggacccagaagggacttccctgctcggctggctctcggtttctctgctttcctccggagaaataacagcgtcttccgcgccgcgcatggagcctcccggccgccgcgagtgtccctttccttcctggcgctttcctgggttgcttctggcggccatggtgttgctgctgtactccttctccgatgcctgtgaggagccaccaacatttgaagctatggagctcattggtaaaccaaaaccctactatgagattggtgaacgagtagattataagtgtaaaaaaggatacttctatatacctcctcttgccacccatactatttgtgatcggaatcatacatggctacctgtctcagatgacgcctgttatagagaaacatgtccatatatacgggatcctttaaatggccaagcagtccctgcaaatgggacttacgagtttggttatcagatgcactttatttgtaatgagggttattacttaattggtgaagaaattctatattgtgaacttaaaggatcagtagcaatttggagcggtaagcccccaatatgtgaaaaggttttgtgtacaccacctccaaaaataaaaaatggaaaacacacctttagtgaagtagaagtatttgagtatcttgatgcagtaacttatagttgtgatcctgcacctggaccagatccattttcacttattggagagagcacgatttattgtggtgacaattcagtgtggagtcgtgctgctccagagtgtaaagtggtcaaatgtcgatttccagtagtcgaaaatggaaaacagatatcaggatttggaaaaaaattttactacaaagcaacagttatgtttgaatgcgataagggtttttacctcgatggcagcgacacaattgtctgtgacagtaacagtacttgggatcccccagttccaaagtgtcttaaaggatatcctaaacctgaggaaggaatacttgacagtttggatgtttgggtcattgctgtgattgttattgccatagttgttggagttgcagtaatttgtgttgtcccgtacagatatcttcaaaggaggaagaagaaaggcacatacctaactgatgagacccacagagaagtaaaatttacttctctctgagaaggagagatgagagaaaggtttgcttttatcattaaaaggaaagcagatggtggagctgaatatgccacttaccagactaaatcaaccactccagcagagcagagaggctgaatagattccacaacctggtttgccagttcatcttttgactctattaaaatcttcaatagttgttattctgtagtttcactctcatgagtgcaactgtggcttagctaatattgcaatgtggcttgaatgtaggtagcatcctttgatgcttctttgaaacttgtatgaatttgggtatgaacagattgcctgctttcccttaaataacacttagatttattggaccagtcagcacagcatgcctggttgtattaaagcagggatatgctgtattttataaaattggcaaaattagagaaatatagttcacaatgaaattatattttctttgtaaagaaagtggcttgaaatcttttttgttcaaagattaatgccaactcttaagattattctttcaccaactatagaatgtattttatatatcgttcattgtaaaaagcccttaaaaatatgtgtatactactttggctcttgtgcataaaaacaagaacactgaaaattgggaatatgcacaaacttggcttctttaaccaagaatattattggaaaattctctaaaagttaatagggtaaattctctattttttgtaatgtgttcggtgatttcagaaagctagaaagtgtatgtgtggcatttgttttcactttttaaaacatccctaactgatcgaatatatcagtaatttcagaatcagatgcatcctttcataagaagtgagaggactctgacagccataacaggagtgccacttcatggtgcgaagtgaacactgtagtcttgttgttttcccaaagagaactccgtatgttctcttaggttgagtaacccactctgaattctggttacatgtgtttttctctccctccttaaataaagagaggggttaaacatgccctctaaaagtaggtggttttgaagagaataaattcatcagataacctcaagtcacatgagaatcttagtccatttacattgccttggctagtaaaagccatctatgtatatgtcttacctcatctcctaaaaggcagagtacaaagtaagccatgtatctcaggaaggtaacttcattttgtctatttgctgttgattgtaccaagggatggaagaagtaaatatagctcaggtagcactttatactcaggcagatctcagccctctactgagtcccttagccaagcagtttctttcaaagaagccagcaggcgaaaagcagggactgccactgcatttcatatcacactgttaaaagttgtgttttgaaattttatgtttagttgcacaaattgggccaaagaaacattgccttgaggaagatatgattggaaaatcaagagtgtagaagaataaatactgttttactgtccaaagacatgtttatagtgctctgtaaatgttcctttcctttgtagtctctggcaagatgctttaggaagataaaagtttgaggagaacaaacaggaattctgaattaagcacagagttgaagtttatacccgtttcacatgcttttcaagaatgtcgcaattactaagaagcagataatggtgttttttagaaacctaattgaagtatattcaaccaaatactttaatgtataaaataaatattatacaatatacttgtatagcagtttctgcttcacatttgattttttcaaatttaatatttatattagagatctatatatgtataaatatgtattttgtcaaatttgttacttaaatatatagagaccagttttctctggaagtttgtttaaatgacagaagcgtatatgaattcaagaaaatttaagctgcaaaaatgtatttgctataaaatgagaagtctcactgatagaggttctttattgctcattttttaaaaaatggactcttgaaatctgttaaaataaaattgtacatttggagatgttt

SEQ ID NO: 488 - DNA, 4244 bp, Homo sapiens
cacttccgccccgggcgcggctcgggccacgcccacctgtcctgcagcactggatgctttgtgagttggggattgttgcgtcccatatctggacccagaagggacttccctgctcggctggctctcggtttctctgctttcctccggagaaataacagcgtcttccgcgccgcgcatggagcctcccggccgccgcgagtgtccctttccttcctggcgctttcctgggttgcttctggcggccatggtgttgctgctgtactccttctccgatgcctgtgaggagccaccaacatttgaagctatggagctcattggtaaaccaaaaccctactatgagattggtgaacgagtagattataagtgtaaaaaaggatacttctatatacctcctcttgccacccatactatttgtgatcggaatcatacatggctacctgtctcagatgacgcctgttatagagaaacatgtccatatatacgggatcctttaaatggccaagcagtccctgcaaatgggacttacgagtttggttatcagatgcactttatttgtaatgagggttattacttaattggtgaagaaattctatattgtgaacttaaaggatcagtagcaatttggagcggtaagcccccaatatgtgaaaaggttttgtgtacaccacctccaaaaataaaaaatggaaaacacacctttagtgaagtagaagtatttgagtatcttgatgcagtaacttatagttgtgatcctgcacctggaccagatccattttcacttattggagagagcacgatttattgtggtgacaattcagtgtggagtcgtgctgctccagagtgtaaagtggtcaaatgtcgatttccagtagtcgaaaatggaaaacagatatcaggatttggaaaaaaattttactacaaagcaacagttatgtttgaatgcgataagggtttttacctcgatggcagcgacacaattgtctgtgacagtaacagtacttgggatcccccagttccaaagtgtcttaaagtgctgcctccatctagtacaaaacctccagctttgagtcattcagtgtcgacttcttccactacaaaatctccagcgtccagtgcctcaggtttagtaatttcctgcttatagtttttcaaaaatcctttaaattcctggtgattttttataaaatccttcaaatttctggtgatgttcacttatttttagtaatgaaaggagggaggacatttgtatagccattttagttgttatacatagtgattctaaaattatttgccataatctgatataaacaggaatatgaccttgggaaagttgtataaattttgaatgtgtttatatatatatgtttacattatatatagagaaattgatttagtaccttccttattgggtattagtaaggtataagtgggatgcatttaaagcacttagcacagtgcctggtgtagagaaagctcttagagctagccaatatgacttatcctacacttaaattaatgttagggaaggggaaggttcatgtatgtttgttagtatgtgtgtgtgttaatatgttaatatgtttgtttgttaatatgtatgttttgtgtcatcaactttgctattttattcttttcagaagtgatctgttgacacctttactgagtttgttcctattgcaggactctttcatttcctggaatgcaactagtttgagtcttctgatgtaaaacatttaaacagggaaatttctgctgtcctcagaacaagatctgtatttctgcctcttccctacccacccctcttccacacctcataatgttatttattttttttctctttagtgggcagttttatctggcaatagcaactcaattttatagcaactgaaaggcaggaaaagtccttatttactgaaataaaatagaagacttttgcagggactcctggtcaaccactgtgcttatgactggagagattattttgatatgatggaaggaattatcctgatttcagcactaccatctctggtttcactttgcttccagcagaagcaagagacaatagtaattgtcctaggcctacttacaagcctccagtctcaaattatccaggatatcctaaacctgaggaaggaatacttgacagtttggatgtttgggtcattgctgtgattgttattgccatagttgttggagttgcagtaatttgtgttgtcccgtacagatatcttcaaaggaggaagaagaaagggaaagcagatggtggagctgaatatgccacttaccagactaaatcaaccactccagcagagcagagaggctgaatagattccacaacctggtttgccagttcatcttttgactctattaaaatcttcaatagttgttattctgtagtttcactctcatgagtgcaactgtggcttagctaatattgcaatgtggcttgaatgtaggtagcatcctttgatgcttctttgaaacttgtatgaatttgggtatgaacagattgcctgctttcccttaaataacacttagatttattggaccagtcagcacagcatgcctggttgtattaaagcagggatatgctgtattttataaaattggcaaaattagagaaatatagttcacaatgaaattatattttctttgtaaagaaagtggcttgaaatcttttttgttcaaagattaatgccaactcttaagattattctttcaccaactatagaatgtattttatatatcgttcattgtaaaaagcccttaaaaatatgtgtatactactttggctcttgtgcataaaaacaagaacactgaaaattgggaatatgcacaaacttggcttctttaaccaagaatattattggaaaattctctaaaagttaatagggtaaattctctattttttgtaatgtgttcggtgatttcagaaagctagaaagtgtatgtgtggcatttgttttcactttttaaaacatccctaactgatcgaatatatcagtaatttcagaatcagatgcatcctttcataagaagtgagaggactctgacagccataacaggagtgccacttcatggtgcgaagtgaacactgtagtcttgttgttttcccaaagagaactccgtatgttctcttaggttgagtaacccactctgaattctggttacatgtgtttttctctccctccttaaataaagagaggggttaaacatgccctctaaaagtaggtggttttgaagagaataaattcatcagataacctcaagtcacatgagaatcttagtccatttacattgccttggctagtaaaagccatctatgtatatgtcttacctcatctcctaaaaggcagagtacaaagtaagccatgtatctcaggaaggtaacttcattttgtctatttgctgttgattgtaccaagggatggaagaagtaaatatagctcaggtagcactttatactcaggcagatctcagccctctactgagtcccttagccaagcagtttctttcaaagaagccagcaggcgaaaagcagggactgccactgcatttcatatcacactgttaaaagttgtgttttgaaattttatgtttagttgcacaaattgggccaaagaaacattgccttgaggaagatatgattggaaaatcaagagtgtagaagaataaatactgttttactgtccaaagacatgtttatagtgctctgtaaatgttcctttcctttgtagtctctggcaagatgctttaggaagataaaagtttgaggagaacaaacaggaattctgaattaagcacagagttgaagtttatacccgtttcacatgcttttcaagaatgtcgcaattactaagaagcagataatggtgttttttagaaacctaattgaagtatattcaaccaaatactttaatgtataaaataaatattatacaatatacttgtatagcagtttctgcttcacatttgattttttcaaatttaatatttatattagagatctatatatgtataaatatgtattttgtcaaatttgttacttaaatatatagagaccagttttctctggaagtttgtttaaatgacagaagcgtatatgaattcaagaaaatttaagctgcaaaaatgtatttgctataaaatgagaagtctcactgatagaggttctttattgctcattttttaaaaaatggactcttgaaatctgttaaaataaaattgtacatttggagatgttt

SEQ ID NO: 489 - DNA, 5550 bp, Homo sapiens
cacttccgccccgggcgcggctcgggccacgcccacctgtcctgcagcactggatgctttgtgagttggggattgttgcgtcccatatctggacccagaagggacttccctgctcggctggctctcggtttctctgctttcctccggagaaataacagcgtcttccgcgccgcgcatggagcctcccggccgccgcgagtgtccctttccttcctggcgctttcctgggttgcttctggcggccatggtgttgctgctgtactccttctccgatgcctgtgaggagccaccaacatttgaagctatggagctcattggtaaaccaaaaccctactatgagattggtgaacgagtagattataagtgtaaaaaaggatacttctatatacctcctcttgccacccatactatttgtgatcggaatcatacatggctacctgtctcagatgacgcctgttatagagaaacatgtccatatatacgggatcctttaaatggccaagcagtccctgcaaatgggacttacgagtttggttatcagatgcactttatttgtaatgagggttattacttaattggtgaagaaattctatattgtgaacttaaaggatcagtagcaatttggagcggtaagcccccaatatgtgaaaaggttttgtgtacaccacctccaaaaataaaaaatggaaaacacacctttagtgaagtagaagtatttgagtatcttgatgcagtaacttatagttgtgatcctgcacctggaccagatccattttcacttattggagagagcacgatttattgtggtgacaattcagtgtggagtcgtgctgctccagagtgtaaagtggtcaaatgtcgatttccagtagtcgaaaatggaaaacagatatcaggatttggaaaaaaattttactacaaagcaacagttatgtttgaatgcgataagggtttttacctcgatggcagcgacacaattgtctgtgacagtaacagtacttgggatcccccagttccaaagtgtcttaaagtgtcgacttcttccactacaaaatctccagcgtccagtgcctcaggtttagtaatttcctgcttatagtttttcaaaaatcctttaaattcctggtgattttttataaaatccttcaaatttctggtgatgttcacttatttttagtaatgaaaggagggaggacatttgtatagccattttagttgttatacatagtgattctaaaattatttgccataatctgatataaacaggaatatgaccttgggaaagttgtataaattttgaatgtgtttatatatatatgtttacattatatatagagaaattgatttagtaccttccttattgggtattagtaaggtataagtgggatgcatttaaagcacttagcacagtgcctggtgtagagaaagctcttagagctagccaatatgacttatcctacacttaaattaatgttagggaaggggaaggttcatgtatgtttgttagtatgtgtgtgtgttaatatgttaatatgtttgtttgttaatatgtatgttttgtgtcatcaactttgctattttattcttttcagaagtgatctgttgacacctttactgagtttgttcctattgcaggactctttcatttcctggaatgcaactagtttgagtcttctgatgtaaaacatttaaacagggaaatttctgctgtcctcagaacaagatctgtatttctgcctcttccctacccacccctcttccacacctcataatgttatttattttttttctctttagtgggcagttttatctggcaatagcaactcaattttatagcaactgaaaggcaggaaaagtccttatttactgaaataaaatagaagacttttgcagggactcctggtcaaccactgtgcttatgactggagagattattttgatatgatggaaggaattatcctgatttcagcactaccatctctggtttcactttgcttccagcagaagcaagagacaatagtaattgtgggtagcacttcagtctgggcagactgtgcttagttaacatcatttctgtggtcttcagtttccctttagtataatgtgagtgttgaactgaaatctcaatcactggcttctaatttggttatatatttcctatctccctaatattttaaaggatcgaagagaattatgcatgttaacatagtaattaagataccttcttataggctgggtggggtagctcacacctgtaataccagaactttgggaggccgaggtgggtggatcacgaggtcagaagttcaagaccagcctggctaagttggtgaaaccccatctctactaaaaatacaaaaattagcggggtgcggtggcaggcacttgtaatcccagctgctcgggaggccgaggcaggagaatcgcttgaacccagtgggcagaggttgcagtgagccaagatcatgccactgcactccagcctgggtgacagagtgagactctgtctcaaaacaaaaaccttcttataattcctgtaagagcttggtaactggtagcctcctgagttgagtgctgtagggtttgaggggcaggaagagatgagttttttagtggactgatacatgagcaaaacaagattgcatgtgaaatttatactcagtgaggcatccgggcttaactcacatgctcctagtgggtatatgcactaatactacgtttgttgatacagtcttttgaaagagttgatgataagcatttcataaagtatttataaaacactggtatagcttagtgttggagagcagaagagagaattgcttgggattgtcaatgatttcttatcatctgctagaggaagactaaataacaacatcatgatgttaaggtagatctaaatgtgttaacaagaagaaaagttgaggaagtcctaagtggaaaagagaaagatgtaaattatgtagtatcatactacttacagtttttaaaaagatacatatgtttaccccaagcacattccctttttttttttttgagacagagtcttgctctgtcacccaggatggcgtgcagtggcgcggtcttggctcactgcaacctccgcctcccgggttcaagcggttctcctgccacctcagactcccaagtagctggtattacaggcacccaccactatgccggctaattttttgtatttttagtagagacggggtttctccatgatggcctggctagtctcgaactcctgacctcaagtgattcacctgcctcggcctcccacagtgctgggattacaggcgtgagccaccacacccatcctcacattactttcatgatggttatcttctaagatttccattataaaatacagagtgtggtcctaggcctacttacaagcctccagtctcaaattatccaggatatcctaaacctgaggaaggaatacttgacagtttggatgtttgggtcattgctgtgattgttattgccatagttgttggagttgcagtaatttgtgttgtcccgtacagatatcttcaaaggaggaagaagaaagggaaagcagatggtggagctgaatatgccacttaccagactaaatcaaccactccagcagagcagagaggctgaatagattccacaacctggtttgccagttcatcttttgactctattaaaatcttcaatagttgttattctgtagtttcactctcatgagtgcaactgtggcttagctaatattgcaatgtggcttgaatgtaggtagcatcctttgatgcttctttgaaacttgtatgaatttgggtatgaacagattgcctgctttcccttaaataacacttagatttattggaccagtcagcacagcatgcctggttgtattaaagcagggatatgctgtattttataaaattggcaaaattagagaaatatagttcacaatgaaattatattttctttgtaaagaaagtggcttgaaatcttttttgttcaaagattaatgccaactcttaagattattctttcaccaactatagaatgtattttatatatcgttcattgtaaaaagcccttaaaaatatgtgtatactactttggctcttgtgcataaaaacaagaacactgaaaattgggaatatgcacaaacttggcttctttaaccaagaatattattggaaaattctctaaaagttaatagggtaaattctctattttttgtaatgtgttcggtgatttcagaaagctagaaagtgtatgtgtggcatttgttttcactttttaaaacatccctaactgatcgaatatatcagtaatttcagaatcagatgcatcctttcataagaagtgagaggactctgacagccataacaggagtgccacttcatggtgcgaagtgaacactgtagtcttgttgttttcccaaagagaactccgtatgttctcttaggttgagtaacccactctgaattctggttacatgtgtttttctctccctccttaaataaagagaggggttaaacatgccctctaaaagtaggtggttttgaagagaataaattcatcagataacctcaagtcacatgagaatcttagtccatttacattgccttggctagtaaaagccatctatgtatatgtcttacctcatctcctaaaaggcagagtacaaagtaagccatgtatctcaggaaggtaacttcattttgtctatttgctgttgattgtaccaagggatggaagaagtaaatatagctcaggtagcactttatactcaggcagatctcagccctctactgagtcccttagccaagcagtttctttcaaagaagccagcaggcgaaaagcagggactgccactgcatttcatatcacactgttaaaagttgtgttttgaaattttatgtttagttgcacaaattgggccaaagaaacattgccttgaggaagatatgattggaaaatcaagagtgtagaagaataaatactgttttactgtccaaagacatgtttatagtgctctgtaaatgttcctttcctttgtagtctctggcaagatgctttaggaagataaaagtttgaggagaacaaacaggaattctgaattaagcacagagttgaagtttatacccgtttcacatgcttttcaagaatgtcgcaattactaagaagcagataatggtgttttttagaaacctaattgaagtatattcaaccaaatactttaatgtataaaataaatattatacaatatacttgtatagcagtttctgcttcacatttgattttttcaaatttaatatttatattagagatctatatatgtataaatatgtattttgtcaaatttgttacttaaatatatagagaccagttttctctggaagtttgtttaaatgacagaagcgtatatgaattcaagaaaatttaagctgcaaaaatgtatttgctataaaatgagaagtctcactgatagaggttctttattgctcattttttaaaaaatggactcttgaaatctgttaaaataaaattgtacatttggagatgttt

SEQ ID NO: 490 - DNA, 433 bp, Homo sapiens
agaggagtcaaccctgaggaggaaaaagtagtatgatttgctggcgtcacccctctgctccgtgcgggcgcggcgaatggcaggtcccgaggtcgcagcttccactggcgcgggttgagttccctgttgcccttggtctcggggtcgctgtaggcgctgaggctgcagctatcatggtgaacttacttcagattgtgcgggaccactgggttcatgttcttgtccctatgggatttgtcattggatgttatttagacagaaagagtgatgaacggctaactgccttccggaacaagagtatgttatttaaaagggaattgcaacccagtgaagaagttacctggaagtaaagactggctagattatcgaatgttcacattttaaagttctgagagaaataaaaacatgaagaatctgaaaaaaaaaaaaaaaa

SEQ ID NO: 491 - DNA, 1783 bp, Homo sapiens
agttgtctttggtagtttttttgcactaacttcaggagccagctcgtgatctcaggatgtatggaaaaataatctttgtattactattgtcaggaattgtgagcatatcagcatcaagtaccactggtgtggcaatgcacacttcaacctcttcttcagtcacaaagagttacatctcatcacagacaaatgggataacactcattaattggtgggcgatggctcgtgttatttttgaggtgatgcttgttgttgttggaatgatcatcttaatttcttactgtattcgatgactgataaaggttttcatgcctctgggattgagattagaggaagaaagcaaagaaaggacatttttttacttcactgttcatggtgtaattgtgtgcctgacggctgtagctactaacttggcttacgttgactggctactaagggactctaggagtcagaaactaaatgctgagtctctcaaaggcgtagagagaatttcagagggccttaccatgacatgaggattaaactccagttctgcccgattctcatcacgaaatccttatcccatgcctcattgtgtttggtgtccccttgcctaggggacagtcctcctgggtaagatcagcaagataactcttcagtcacattccatttgatactttgaatactctgaggtccttacccaccaaatggatggaattcagctgctcaatcactgcctttctcagaactcggttgtccaaccacaattccctttcccttaggatagggctatattggcaaaatgccgcccgaacagactgctgacagtaaaccaaatattagtttctctcaccttcttgaaggcatttacagtctttgtaagcttttctcctagattttccctttcctgttcctgcttagattctaagaatgaagtgcatccttctccttttcttcattaggtgaagtgggatttacccattaccatatattcaccaccaggtcactgacgagagactccagtgaatcgctttccctctgcattcctctccttgtacagactagagggtcacattgtgtaaagcctaacatagccctgcaaagagatctggccccagcagtgaacacaaactcagtaattctctttagagtgaggtggtaatcagtgcctcttggtttcagccgtggtcctagtggctacttatggaagaataggaatagttccacaacatcctgtaacattggcttacctgtatattatatgccacccgtaaccataaaaacaccaggatttaggttccttgaaggtaatgactatgggtccctctctgtggaagaatactgaatagaagagagaaatcactcaatatgtggaatgactgatatggtttggctgtgttcccactcaaatctcatcttgaattgtagttccaataatccccacatgtcatgggaggaacccagtgggaggtacttgaatcattgcggtggtttcccctgtgctattctcatgatagtgagtaaattctcacataatctgatagttttataaaggagcttcccccttcactcagctctcattcttctccttcctgccactatgtaagaaagatgtgtttgtttcccctttggtcatgattgtaagtatcctgagaccttcccagccatgcaaaactgtagatcaataaaacctctttcctttataaattaaaaaaaaaaaaaaaaaaaaaaaaaaaaaaaaaaaaaaaaaaaaaaaaaaaaaaaaaaaaaaaaaaaaaaaaaaaaaaaaaaaaaaaaaaaaaaa

SEQ ID NO: 492 - DNA, 511 bp, Homo sapiens
agttgtctttggtagtttttttgcactaacttcaggagccagctcgtgatctcaggatgtatggaaaaataatctttgtattactattgtcaggaattgtgagcatatcagcatcaagtaccactggtgtggcaatgcacacttcaacctcttcttcagtcacaaagagttacatctcatcacagacaaatgggataacactcattaattggtgggcgatggctcgtgttatttttgaggtgatgcttgttgttgttggaatgatcatcttaatttcttactgtattcgatgactgataaaggcatgaggatgtggcctgcatgctgcctgatcttgcctagaaccagctgcacctgctgttctcttgcttatgcaaactggctgcacctgctattcctttgcttatgccccaacccttggctatcctaactccctgttctcctgcctattactgtattctctacttctaaataaaaataaaacaaaatacaaattaaaaaaaaaaaaaaa

SEQ ID NO: 493 - DNA, 5616 bp, Homo sapiens
cgggaaggaagtgaccagcgactgagcggcggccggcgcgtttagcgccctgaacatgcggcagtccctgcgggcgaccccaggctccggacaggcagcggcggaggcggcggctccggagggaaggaggcggcggcgccggcggaggtggcggcggaggtggcggcggagacggccggcgcccggcgcggagccctagcgaggcagttcagcgcggcctcgggcctggtcgagaaggatgctgtcccgacagaaaaccaaaaacgaagtgtccaagccggccgaggtgcaggggaagtacgtgaagaaggagacgtcgcctctgcttcggaatcttatgccttcattcatccagcatggtccaaaaattccaggacgaactgatatctgtcttccagattcaagccctaatgccttttcaacttctggagatggagtagtttcaagaaaccagagtttccttagaactccaattcaaagaacacctcataaaataatgagaagagaaagcaacagattatctgcaccttcttatcttgccagaagtctagcagatgtccctagagagtatggttcttctcagtcatttgtaacggaagttagttttgctgttgaaaatggagactctggttcccgatattattattcagacaattttgttgatggtcagagaaagcggccacttggagatcgtgcacatgaagactacagatattatgaatacaaccatgatctcttccaaagaatgccacagaatcaggggaggcatgcttcaggtagcttaacattataaataatatagtagtttatatttattgacatgtcaattaaaaagatgttcttttctagattttcttgggacacggacaaatactactagcgaaatatttttccactttgctcgtcctgcttaagcctgtgtgcaaatagttgttaatctacactgaatggaagagtccttgtgaccatttattttattaactcatgttatataaacttggtacttatctcaaggctgtctagtctcttaatgctgtgacccttgaaaacctagagaatttaatgtctccagttgggctgaatttaggtttaggtttggtagaataatgggaagggtaaatcttcagagacacttgactgagtcctcagagacacttgacgaacttgggaaaggaaagaagaataggaacaactgggcatggtcagtgataccctgagcaatcacattacttcgctagatcctgcactttttctctgaacaaaaagtagttcaagaattatttcctgagttgatcaaaaagacttatagtcatatggttaattatgtgttgagcatgtctttttattatttttgtaacagacaaaaaatattaccatataatttaagaaaagaaggtactttccatatctcctgagttggagatacttctgaaaggagcagaagagatgggagaaatgtacagttctactttattcctgaagtcctggttttaccagataaaattaagtgagaggaaaattaaactttcttgtccgattgtttttttctaccaagttatagactttaaattttggcaggataaaaataaaatgtgagacagatttactttttggctcacataacttcaaataagacgacttaaaaatggtttggagcattagtattttgactgtagaaaaaaattattcatttagtattaactgtttatgtgtctagcgttttccttgggtctgttggtctctgctttctggtaccttatttgtctagtatcttatttgtggaaacaaaaccaatctatacacaatagtcacagaacaattgttacactttgtgatactaactgtaagtgcaacagggaatcagaagagagatgagtataggctggaatacttaaagagatgattggaggacttggagtgggccttgagcttggcctttagattaacaggggccagaagaaggacattttacatggaaaattgggaatagcacaatgaaaacagagtaggcatggtttaaatataaggaacagtgtagttctgcctggtttgaagaaataagatgtaaggtcgagtggagatttgtggttcaacaataggcttagatttgagtcaagtggaagctcttgcacatttcagaaagacaagtgattttatgaaagcagtgtttaaagattagttttgtactagaattaagggtagattcctagagaaaagaggattgcaggtaccagtgggtaccagtggtaataggaaaaggcaaatctaggatgctttggaaggaaaaatgagaattagagtttaggagaaagcagatcactgaagttttaaaaataatgtggaatagttggtaagaacaacttattttatgaaagctgacatcggagtctcactggaacattgtagaggagaggttttctaggcatgtggaaatgcagtaagaggcatgggtaaaagcaccttttagtttttaaggaattaggttaaagaattagctgcatgcttgtgtttattttggttatttctgatatacagttctgaacctcaggagtaatttgttatctaactaaaatagtaagttttaaaaataaagctcatttatattttcttctagaataataactgcttattacgggaaatttgcaaaatgcagtaacgtaaaggcaaagtacctgtccaccagagatcctcttagtatgttattttcttcatctttttccatgccaaattctttttttacatggatgtgattatataatattttgtacagttttctgttctttttacttgaatgattttcttcatgttgtatactttttatgagtggttttaatgactgcataatcttccatttggtgcatattcagtggttaatgaggacttgacctatacttcagaaatttggaaagaggagaagtgggacatgcccaaattaatgggacttggccactaacggggtttgaaggacaaaggagagggaagagtcagataggattagcatagcacatgactgcctaagagatgctcacaaaaataaatggctgaatgagtgaatgaacccagcggttttaaatctggaggcttaagacagtttttggtagctgagggagaacagaaatagctatgtttactgttaatatagaatatgtgttattctttgcactcacctttcccacctatattgcagacgccactgatagcttgtaatacttttctacctgaggtttaagtatgtaaacatgaagaattaataacaagttaaactcttgttttgaaaatctaatttgccaaatataattgaggaaatactataagaactaaatctctactgatcctctcttaggagcaatttgacataatatttgtaagtttaaagacagactttaaaacaactttccggtcacaacttcaaaataaagtacaagttaattgcaaaaaaataaataaataaaaataaaataaaataaaataagaatgctaatatctgttctgcctctctaacagggttattttgagtgttagatttatcttacttgtagttgtttttttattttaaaaaaattttgaaatgataaactaacaaaggtcagggaaagttcttagactactctggcaaggcaggctggacaattctaaggcgatgaggtaccaaggaggctagtagtataaaccacagtgcctcaactttcctgcccctcccctgttctccactcctccatgcaaaacatgaaaagcacacttctccactggcagatcagactagcatgcaaccatcttcaggaataatctaagcctgaaatagttgagaggcgcttaacaacttgcatcatttaaaatgcctcccctgcctatcagctgatgatggccacaggaaggtgggcctggaagataacagctagcaggctaaggccagacactgacacttgcagttgtctttggtagtttttttgcactaacttcaggagccagctcgtgatctcaggatgtatggaaaaataatctttgtattactattgtcaggaattgtgagcatatcagcatcaagtaccactggtgtggcaatgcacacttcaacctcttcttcagtcacaaagagttacatctcatcacagacaaatgggataacactcattaattggtgggcgatggctcgtgttatttttgaggtgatgcttgttgttgttggaatgatcatcttaatttcttactgtattcgatgactgataaaggttttcatgcctctgggattgagattagaggaagaaagcaaagaaaggacatttttttacttcactgttcatggtgtaattgtgtgcctgacggctgtagctactaacttggcttacgttgactggctactaagggactctaggagtcagaaactaaatgctgagtctctcaaaggcgtagagagaatttcagagggccttaccatgacatgaggattaaactccagttctgcccgattctcatcacgaaatccttatcccatgcctcattgtgtttggtgtccccttgcctaggggacagtcctcctgggtaagatcagcaagataactcttcagtcacattccatttgatactttgaatactctgaggtccttacccaccaaatggatggaattcagctgctcaatcactgcctttctcagaactcggttgtccaaccacaattccctttcccttaggatagggctatattggcaaaatgccgcccgaacagactgctgacagtaaaccaaatattagtttctctcaccttcttgaaggcatttacagtctttgtaagcttttctcctagattttccctttcctgttcctgcttagattctaagaatgaagtgcatccttctccttttcttcattaggtgaagtgggatttacccattaccatatattcaccaccaggtcactgacgagagactccagtgaatcgctttccctctgcattcctctccttgtacagactagagggtcacattgtgtaaagcctaacatagccctgcaaagagatctggccccagcagtgaacacaaactcagtaattctctttagagtgaggtggtaatcagtgcctcttggtttcagccgtggtcctagtggctacttatggaagaataggaatagttccacaacatcctgtaacattggcttacctgtatattatatgccacccgtaaccataaaaacaccaggatttaggttccttgaaggtaatgactatgggtccctctctgtggaagaatactgaatagaagagagaaatcactcaatatgtggaatgactgatatggtttggctgtgttcccactcaaatctcatcttgaattgtagttccaataatccccacatgtcatgggaggaacccagtgggaggtacttgaatcattgcggtggtttcccctgtgctattctcatgatagtgagtaaattctcacataatctgatagttttataaaggagcttcccccttcactcagctctcattcttctccttcctgccactatgtaagaaagatgtgtttgtttcccctttggtcatgattgtaagtatcctgagaccttcccagccatgcaaaactgtagatcaataaaacctctttcctttataaatta

SEQ ID NO: 494 - DNA, 4424 bp, Homo sapiens
cgggaaggaagtgaccagcgactgagcggcggccggcgcgtttagcgccctgaacatgcggcagtccctgcgggcgaccccaggctccggacaggcagcggcggaggcggcggctccggagggaaggaggcggcggcgccggcggaggtggcggcggaggtggcggcggagacggccggcgcccggcgcggagccctagcgaggcagttcagcgcggcctcgggcctggtcgagaaggatgctgtcccgacagaaaaccaaaaacgaagtgtccaagccggccgaggtgcaggggaagtacgtgaagaaggagacgtcgcctctgcttcggaatcttatgccttcattcatccagcatggtccaaaaattccaggacgaactgatatctgtcttccagattcaagccctaatgccttttcaacttctggagatggagtagtttcaagaaaccagagtttccttagaactccaattcaaagaacacctcataaaataatgagaagagaaagcaacagattatctgcaccttcttatcttgccagaagtctagcagatgtccctagagagtatggttcttctcagtcatttgtaacggaagttagttttgctgttgaaaatggagactctggttcccgatattattattcagacaattttgttgatggtcagagaaagcggccacttggagatcgtgcacatgaagactacagatattatgaatacaaccatgatctcttccaaagaatgccacagaatcaggggaggcatgcttcaggtagcttaacattataaataatatagtagtttatatttattgacatgtcaattaaaaagatgttcttttctagattttcttgggacacggacaaatactactagcgaaatatttttccactttgctcgtcctgcttaagcctgtgtgcaaatagttgttaatctacactgaatggaagagtccttgtgaccatttattttattaactcatgttatataaacttggtacttatctcaaggctgtctagtctcttaatgctgtgacccttgaaaacctagagaatttaatgtctccagttgggctgaatttaggtttaggtttggtagaataatgggaagggtaaatcttcagagacacttgactgagtcctcagagacacttgacgaacttgggaaaggaaagaagaataggaacaactgggcatggtcagtgataccctgagcaatcacattacttcgctagatcctgcactttttctctgaacaaaaagtagttcaagaattatttcctgagttgatcaaaaagacttatagtcatatggttaattatgtgttgagcatgtctttttattatttttgtaacagacaaaaaatattaccatataatttaagaaaagaaggtactttccatatctcctgagttggagatacttctgaaaggagcagaagagatgggagaaatgtacagttctactttattcctgaagtcctggttttaccagataaaattaagtgagaggaaaattaaactttcttgtccgattgtttttttctaccaagttatagactttaaattttggcaggataaaaataaaatgtgagacagatttactttttggctcacataacttcaaataagacgacttaaaaatggtttggagcattagtattttgactgtagaaaaaaattattcatttagtattaactgtttatgtgtctagcgttttccttgggtctgttggtctctgctttctggtaccttatttgtctagtatcttatttgtggaaacaaaaccaatctatacacaatagtcacagaacaattgttacactttgtgatactaactgtaagtgcaacagggaatcagaagagagatgagtataggctggaatacttaaagagatgattggaggacttggagtgggccttgagcttggcctttagattaacaggggccagaagaaggacattttacatggaaaattgggaatagcacaatgaaaacagagtaggcatggtttaaatataaggaacagtgtagttctgcctggtttgaagaaataagatgtaaggtcgagtggagatttgtggttcaacaataggcttagatttgagtcaagtggaagctcttgcacatttcagaaagacaagtgattttatgaaagcagtgtttaaagattagttttgtactagaattaagggtagattcctagagaaaagaggattgcaggtaccagtgggtaccagtggtaataggaaaaggcaaatctaggatgctttggaaggaaaaatgagaattagagtttaggagaaagcagatcactgaagttttaaaaataatgtggaatagttggtaagaacaacttattttatgaaagctgacatcggagtctcactggaacattgtagaggagaggttttctaggcatgtggaaatgcagtaagaggcatgggtaaaagcaccttttagtttttaaggaattaggttaaagaattagctgcatgcttgtgtttattttggttatttctgatatacagttctgaacctcaggagtaatttgttatctaactaaaatagtaagttttaaaaataaagctcatttatattttcttctagaataataactgcttattacgggaaatttgcaaaatgcagtaacgtaaaggcaaagtacctgtccaccagagatcctcttagtatgttattttcttcatctttttccatgccaaattctttttttacatggatgtgattatataatattttgtacagttttctgttctttttacttgaatgattttcttcatgttgtatactttttatgagtggttttaatgactgcataatcttccatttggtgcatattcagtggttaatgaggacttgacctatacttcagaaatttggaaagaggagaagtgggacatgcccaaattaatgggacttggccactaacggggtttgaaggacaaaggagagggaagagtcagataggattagcatagcacatgactgcctaagagatgctcacaaaaataaatggctgaatgagtgaatgaacccagcggttttaaatctggaggcttaagacagtttttggtagctgagggagaacagaaatagctatgtttactgttaatatagaatatgtgttattctttgcactcacctttcccacctatattgcagacgccactgatagcttgtaatacttttctacctgaggtttaagtatgtaaacatgaagaattaataacaagttaaactcttgttttgaaaatctaatttgccaaatataattgaggaaatactataagaactaaatctctactgatcctctcttaggagcaatttgacataatatttgtaagtttaaagacagactttaaaacaactttccggtcacaacttcaaaataaagtacaagttaattgcaaaaaaataaataaataaaaataaaataaaataaaataagaatgctaatatctgttctgcctctctaacagggttattttgagtgttagatttatcttacttgtagttgtttttttattttaaaaaaattttgaaatgataaactaacaaaggtcagggaaagttcttagactactctggcaaggcaggctggacaattctaaggcgatgaggtaccaaggaggctagtagtataaaccacagtgcctcaactttcctgcccctcccctgttctccactcctccatgcaaaacatgaaaagcacacttctccactggcagatcagactagcatgcaaccatcttcaggaataatctaagcctgaaatagttgagaggcgcttaacaacttgcatcatttaaaatgcctcccctgcctatcagctgatgatggccacaggaaggtgggcctggaagataacagctagcaggctaaggccagacactgacacttgcagttgtctttggtagtttttttgcactaacttcaggagccagctcgtgatctcaggatgtatggaaaaataatctttgtattactattgtcaggaattgtgagcatatcagcatcaagtaccactggtgtggcaatgcacacttcaacctcttcttcagtcacaaagagttacatctcatcacagacaaatgggataacactcattaattggtgggcgatggctcgtgttatttttgaggtgatgcttgttgttgttggaatgatcatcttaatttcttactgtattcgatgactgataaaggcatgaggatgtggcctgcatgctgcctgatcttgcctagaaccagctgcacctgctgttctcttgcttatgcaaactggctgcacctgctattcctttgcttatgccccaacccttggctatcctaactccctgttctcctgcctattactgtattctctacttctaaataaaaataaaacaaaatacaaatta

SEQ ID NO: 495 - DNA, 3510 bp, Homo sapiens
agccacgtggcggcggggcggggaccgggcgggccgggcgctgggagctggctgtcccaggagcagagcagtctccctgtccagatcaccaggatccctgcttgctggagaatgacccagatgtcccaggtgcaggagctcttccatgaggcagcccagcaggatgccctggcccagccccagccctggtggaagacccagctgttcatgtgggagcctgtgctgtttgggacctgggatggtgtgttcacatcctgcatgatcaacatctttggggttgtgctcttcctgaggactggctggctggtgggaaacacaggagtgctcctgggcatgttcctggtgtccttcgtcatcctggtggccctcgtcacggtgctgtctggcattggcgtcggggagcgcagcagcatcggcagcggtggcgtctactccatgatctcctcggtcctgggtgggcagacgggaggcaccatcgggctgctctatgtgtttggacagtgtgttgcaggtgccatgtatatcaccggctttgctgaatccatctcggatttgctgggcctcgggaatatctgggctgtgcgaggaatttcagttgcggtgcttctggccttgctgggcattaacctcgcaggtgtcaaatggataatccgcctccagctgctgttgctgttcctgctggccgtgtccacactggactttgtggtgggttctttcacccacctggacccagaacatggtttcattggatattcacccgaactgctacagaacaacacgctgcccgattacagcccgggggaatcttttttcactgtctttggggttttcttcccagcggctacaggagtcatggccggcttcaacatggggggcgacctcagggagcctgccgccagcattcccctgggctccctggcagctgttggcatctcgtggtttctgtacatcgtcttcgtcttcctcctgggcgccatctgcactcgagaggcccttcgctatgacttcctgatagcggaaaaggtatccctcatgggcttcctgttccttttgggcttatacatctcgtccctggcttcctgcatgggaggactttatggagctccccgcatcctgcagtgcattgcccaggagaaagtgatccctgcacttgcctgtctgggacaagggaaggggccaaacaaaacacccgtggctgccatctgcctgaccagcttggtgaccatggcctttgtttttgtgggtcaagtgaacgttctggcccccatcgtcaccatcaacttcatgctgacatacgttgcagtggactactcttacttctccctgtccatgtgttcctgcagcctgaccccggtgcctgagccggtgctcagggagggcgcagaaggcctccactgctctgagcacctgctcttagagaaagctcccagttacggctctgagggacctgcccaaagagtcttggagggcacgctactggaattcaccaaggacatggatcagctcctccagctaaccaggaagcttgagagtagccagcccaggcaaggagagggtaacaggaccccagaaagtcagaagaggaaaagcaagaaggccaccaagcagaccctacaagatagcttcctcttggacctcaaatcccctccttctttccctgtcgagatctctgacaggttgcccgctgcctcctgggaggggcaggagtcctgctggaacaagcagacttccaagagcgaagggactcagcctgagggaacatatggagagcaacttgttcctgagctgtgcaaccaatcagagtccagtggagaagatttcttcctgaagtccaggctccaagaacaagatgtctggagaagatccacttctttctatacccacatgtgcaacccctgggtctccctgttgggggctgttgggtcccttctcatcatgtttgtgatacagtgggtgtataccctggttaacatgggtgttgctgccatcgtgtatttctacattggccgggccagtccagggcttcaccttggatcagcctccaacttcagctttttccggtggatgaggtctctcttgctcccctcctgcaggagcttgcggtcccctcaggagcagatcatcttggcgccgtccctggctaaggttgacatggagatgactcagctcacccaggagaatgcagacttcgccactcgggatcgctaccaccactcctccctcgtgaaccgggagcagctgatgcctcactactagatgcagtgctgggaccttcctcttttggagctgtcccatgtacagtggacccaagctcaggaccttcgtggagctgcttctccaacctgagaaactcaagacccatcctcccgctgtcactttggacaatggaaatctacattttcttttccctttttttttttttttgagacagagtctcgccctgtcacccaggctggagtccagtggcacaatcttggctcactgcaacctctgcttcccgagttcaagcaattctcctgcctcagcctcctgagtagctgggattataggcatgcaccaccacacccagctattttttgtatttttactggagacagggtttcaccatgttggccaggctggtctcgaactcctgacctcgtgatccacccgtctcagcctcccaaagtactgggattacaggcgtgagccaccatgcctggccagaaatctatgttttcttagaacatgtggaagaaggaaaaagacaaaaaaggaaatctggattctgaggaccacgtctcacccagggtgacatcaggaatggtgctagcctctgcaacacgacacccagtctgaagagctctatacaggtactaagactagcaggggacaccaagactctgcacaaccagattgcttgtgcagagggccacaataagtgtatgttttatattttattgtattatttattcaaaaataaataatacactcacatgtttccacacccaaaagatatatagagtgaaaagtctccctccaatccttattctccacctgctcagttcctgtctaccctggcctagaggtaaccactattctcatccgtacatccagcatttctttatggatatacaagcaaatgggaatgtagagtctcacattctctctttatacacaaaagttagcacgttatacacatgttctgcaccttgcttttttcccttaacaatctatcttggagacatttcatatcaattcatatgccatttgttcatttttttcattgtataaatgtgttataatttatttcgccagttccacaatgatgagcatttggattctttccaatcttttgcaatgacaatcagctctgcagtgaataatcttgtacaaatgtgcaagcataaagtgtatctctaggataaattcccaaaagtggaattgcaggatcaaaaggtacatgcatttgtaaactattattgtttagtgagggtctttttaattaaagaattaacatgaattgcctaa

SEQ ID NO: 496 - DNA, 3449 bp, Homo sapiens
tccagagcagtctccctgtccagatcaccaggatccctgcttgctggagaatgacccagatgtcccaggtgcaggagctcttccatgaggcagcccagcaggatgccctggcccagccccagccctggtggaagacccagctgttcatgtgggagcctgtgctgtttgggacctgggatggtgtgttcacatcctgcatgatcaacatctttggggttgtgctcttcctgaggactggctggctggtgggaaacacaggagtgctcctgggcatgttcctggtgtccttcgtcatcctggtggccctcgtcacggtgctgtctggcattggcgtcggggagcgcagcagcatcggcagcggtggcgtctactccatgatctcctcggtcctgggtgggcagacgggaggcaccatcgggctgctctatgtgtttggacagtgtgttgcaggtgccatgtatatcaccggctttgctgaatccatctcggatttgctgggcctcgggaatatctgggctgtgcgaggaatttcagttgcggtgcttctggccttgctgggcattaacctcgcaggtgtcaaatggataatccgcctccagctgctgttgctgttcctgctggccgtgtccacactggactttgtggtgggttctttcacccacctggacccagaacatggtttcattggatattcacccgaactgctacagaacaacacgctgcccgattacagcccgggggaatcttttttcactgtctttggggttttcttcccagcggctacaggagtcatggccggcttcaacatggggggcgacctcagggagcctgccgccagcattcccctgggctccctggcagctgttggcatctcgtggtttctgtacatcgtcttcgtcttcctcctgggcgccatctgcactcgagaggcccttcgctatgacttcctgatagcggaaaaggtatccctcatgggcttcctgttccttttgggcttatacatctcgtccctggcttcctgcatgggaggactttatggagctccccgcatcctgcagtgcattgcccaggagaaagtgatccctgcacttgcctgtctgggacaagggaaggggccaaacaaaacacccgtggctgccatctgcctgaccagcttggtgaccatggcctttgtttttgtgggtcaagtgaacgttctggcccccatcgtcaccatcaacttcatgctgacatacgttgcagtggactactcttacttctccctgtccatgtgttcctgcagcctgaccccggtgcctgagccggtgctcagggagggcgcagaaggcctccactgctctgagcacctgctcttagagaaagctcccagttacggctctgagggacctgcccaaagagtcttggagggcacgctactggaattcaccaaggacatggatcagctcctccagctaaccaggaagcttgagagtagccagcccaggcaaggagagggtaacaggaccccagaaagtcagaagaggaaaagcaagaaggccaccaagcagaccctacaagatagcttcctcttggacctcaaatcccctccttctttccctgtcgagatctctgacaggttgcccgctgcctcctgggaggggcaggagtcctgctggaacaagcagacttccaagagcgaagggactcagcctgagggaacatatggagagcaacttgttcctgagctgtgcaaccaatcagagtccagtggagaagatttcttcctgaagtccaggctccaagaacaagatgtctggagaagatccacttctttctatacccacatgtgcaacccctgggtctccctgttgggggctgttgggtcccttctcatcatgtttgtgatacagtgggtgtataccctggttaacatgggtgttgctgccatcgtgtatttctacattggccgggccagtccagggcttcaccttggatcagcctccaacttcagctttttccggtggatgaggtctctcttgctcccctcctgcaggagcttgcggtcccctcaggagcagatcatcttggcgccgtccctggctaaggttgacatggagatgactcagctcacccaggagaatgcagacttcgccactcgggatcgctaccaccactcctccctcgtgaaccgggagcagctgatgcctcactactagatgcagtgctgggaccttcctcttttggagctgtcccatgtacagtggacccaagctcaggaccttcgtggagctgcttctccaacctgagaaactcaagacccatcctcccgctgtcactttggacaatggaaatctacattttcttttccctttttttttttttttgagacagagtctcgccctgtcacccaggctggagtccagtggcacaatcttggctcactgcaacctctgcttcccgagttcaagcaattctcctgcctcagcctcctgagtagctgggattataggcatgcaccaccacacccagctattttttgtatttttactggagacagggtttcaccatgttggccaggctggtctcgaactcctgacctcgtgatccacccgtctcagcctcccaaagtactgggattacaggcgtgagccaccatgcctggccagaaatctatgttttcttagaacatgtggaagaaggaaaaagacaaaaaaggaaatctggattctgaggaccacgtctcacccagggtgacatcaggaatggtgctagcctctgcaacacgacacccagtctgaagagctctatacaggtactaagactagcaggggacaccaagactctgcacaaccagattgcttgtgcagagggccacaataagtgtatgttttatattttattgtattatttattcaaaaataaataatacactcacatgtttccacacccaaaagatatatagagtgaaaagtctccctccaatccttattctccacctgctcagttcctgtctaccctggcctagaggtaaccactattctcatccgtacatccagcatttctttatggatatacaagcaaatgggaatgtagagtctcacattctctctttatacacaaaagttagcacgttatacacatgttctgcaccttgcttttttcccttaacaatctatcttggagacatttcatatcaattcatatgccatttgttcatttttttcattgtataaatgtgttataatttatttcgccagttccacaatgatgagcatttggattctttccaatcttttgcaatgacaatcagctctgcagtgaataatcttgtacaaatgtgcaagcataaagtgtatctctaggataaattcccaaaagtggaattgcaggatcaaaaggtacatgcatttgtaaactattattgtttagtgagggtctttttaattaaagaattaacatgaattgcctaa

SEQ ID NO: 497 - DNA, 3614 bp, Homo sapiens
ggacccctgctctgaccgcaggtgggtgcttgtcttgcttacggagggctcccgatgaaccgagtcacgttttgtaaccacattaacggaccattcaaagtcgaatcctaggcttttcgaggcagttagtgggtcccaacggctgcaggcggggccggcgggggcgcagcggcccgggaggtgcgtggttgagcgaagccgcggggcccaaccgcagtcgcggggtctgggaggaagcagtaccttgaagagaaattggagagggagtcaattcctaggatagcagagagatggacaacagacagaatgtcaccccagctctgatctttgccatcacagttgctacaatcggctctttccagtttggctacaacactggggtcatcaatgctcctgagacgatcataaaggaatttatcaataaaactttgacggacaaggcaaatgcccctccctctgaggtgctgctcacgaatctctggtccttgtctgtggccatattttccgtcgggggtatgatcggctccttttccgtcggactctttgttaaccgctttggcaggcgcaattcaatgctgattgtcaacctgttggctgccactggtggctgccttatgggactgtgtaaaatagctgagtcagttgaaatgctgatcctgggccgcttggttattggcctcttctgcggactctgcacaggttttgtgcccatgtacattggagagatctcgcctactgccctgaggggtgcctttggcactctcaaccagctgggcatagttattggaattctggtggcccagatctttggtctggaactcatccttgggtctgaagagctatggccggtgctattaggctttaccatccttccagctatcctgcaaagtgcagcccttccatgttgccctgaaagtcccagatttttgctcattaacagaaaaaaagaggagaatgctacgcggatcctccagcggttgtggggcacccaggatgtatcccaagacatccaggagatgaaagatgagagtgcaaggatgtcacaagaaaagcaagtcaccgtgctggagctctttagagtgtccagctaccgacagcccatcatcatttccattgtgctccagctctctcagcagctctctgggatcaatgctgtgttctattactcaacaggaatcttcaaggatgcaggtgttcaacagcccatctatgccaccatcagcgcgggtgtggttaatactatcttcactttactttctctatttctggtggaaagggcaggaagaaggactctgcatatgataggccttggagggatggctttttgttccacgctcatgactgtttctttgttattaaagaatcactataatgggatgagctttgtctgtattggggctatcttggtctttgtggcctgttttgaaattggaccaggccccattccctggtttattgtggccgaactcttcagccagggcccccgcccagctgcgatggcagtggccggctgctccaactggacctccaacttcctagtcggattgctcttcccctctgctgcttactatttaggagcctacgtttttattatcttcaccggcttcctcattaccttcttggcctttaccttcttcaaagtccctgagacccgtggcaggacttttgaggatatcacacgggcctttgaagggcaggcacacggtgcagatagatctgggaaggacggcgtcatggggatgaacagcatcgagcctgctaaggagaccaccaccaatgtctaagtcatgcctccttccacctccctcccggcatgggaaagccacctctccctcaacaagggagagactttatcaggatgaacccaggactgcttctgaatgctgctacttgatttctttctcatcccacgcactccatgagcaccccaaggctgcagtttgttggatcttcaatggctttttaaattttatttcctggacatcctcttctgcttaggagagaccgagtgaacctaccttcatttcaggagggattggccgcttggcacatgacaactttgccagcttttcctcccttgggttctgatattgccgcactagaggatataggagaggaaaagtaaggtgcagttgccccaacctcagacttaccaggaagcagatacatatgagtgtggaagccggagggtgtttatgtaagagcaccttcctcacttccatacagctctacgcggcaaattaacttgagttttatttatcttatcctctggtttaattacataaatatttattttttaagtgtaattttgccaaataataaaaacagaaggaaattgagattagagggaggtgtttaaagagaggttatagagtaaaagatttgatgctggagaggttaaggtgcaataagaattcagggagaaatgttgttcattattggagggtaaatgatgtggtgcctgaggtctgtacattacctcttaacaatttctgtccttcagatggaaactctttgatttctcagaaaagttgtatgcctatttaataaagctactcatttcctttggaactttatctttaagataatagtttacatgtagtagtacttgaaatctaggattattaactaatatgggcattgtagttaatggcggttgatgggttctaattttggatggagtccagggaagagaaagtgatttctagaaagcctgttcccctcactggacgaaataactccttgtagtagtctcattacttttgaagtaatcccgccacctatctagtgggagagccatccaaatgagaaacctaaaataattggttcttggtagagattcattatttctccactttgttctttaggagattttaggtgttgattttctgttttattttaactcatacctttaaaggaattccccaaagaatgtttacagcaaacttggaatttgtaacctcagctctgggagaggatttttttctgagcgattattatctaaagtgtgttgttgctttaggctcacggcacgcttgcgtatgtctgttaccatgtcactgtggtcctatgccgaatgccctcaggggacttgaatctttccaataaaccaggtttagacagtatgagtcaatgtgcagtgcagcccacacttgagaggatgaatgtatgtgcactgtcactttgctctgggtggaagtatgttattgttgacttattttctctgtgtttgttcctacagcccctttttcatatgttgctcagtctccctttcccttcttggtgcttacacatctcagaccctttagccaaacccttgccagtgacagtattttggttctcagttctcactgttccctctgctcctggagcctttgaataaaaatgcacgtagctatggagtggggtttagctggaaaggtggccttccaacttcacgtcaacttctggctcctcagtttggcagtaaggcagggaagttgttttcctatttctcactgagaagattgtgaatatttccatatggattttccattattgtttgtttgattctttgttttaaaataaaaattctgaatgtacatgacaaaaaaaaaaaaaaaaaaaaaaaaaaa

SEQ ID NO: 498 - DNA, 4368 bp, Homo sapiens
ggacccctgctctgaccgcaggtgggtgcttgtcttgcttacggagggctcccgatgaaccgagtcacgttttgtaaccacattaacggaccattcaaagtcgaatcctaggcttttcgaggcagttagtgggtcccaacggctgcaggcggggccggcgggggcgcagcggcccgggaggtgcgtggttgagcgaagccgcggggcccaaccgcagtcgcggggtctgggaggagacctgaatgaaatgagggagccttgggagcatgatccaggcggagggaactggattcgggaggaggaactgccttggccttgaaagatacctaccaggagttcaagtgctgtgcgggtgcatcagctttgtagatttgtgcaagatgaaaattggaattgtcttaggaaattatggatcattcatttattcagtgctggattcattcagtgatttatgtctgaagtgtgacagaaggggagtaaggccaagtgtccttgccctctattggagattctgcctcccctgggacagatggcttcttgagcacactcccacgatgggtggctgctctggtacatctcatccacttcttcatctgtgaagctgtcacccatggtggtgagcagctcctggaggtggtcctcatgaatgaaacctgaggattcctcgttgaagcaggtattcatccatggggttcttccgcggtgaagccagcttgtcgtgctgtcccccttgtcattgaagccatcatggttctggtcaatcatgttgaaagcctccttaaactcctggatgtggaactggtcgaacatcacgaagacattggatgtggccccttgtgctgtggtcgcttcttggtggtcttggctttggtccacttgctgaacattttggcttcaggaagcagtaccttgaagagaaattggagagggagtcaattcctaggatagcagagagatggacaacagacagaatagatggagtttcacaatggtggccatgtgtctggaattggtgggttcttggtctcactgacttcaagaatgaagccgcacaccctcgcagtcaccccagctctgatctttgccatcacagttgctacaatcggctctttccagtttggctacaacactggggtcatcaatgctcctgagacgatcataaaggaatttatcaataaaactttgacggacaaggcaaatgcccctccctctgaggtgctgctcacgaatctctggtccttgtctgtggccatattttccgtcgggggtatgatcggctccttttccgtcggactctttgttaaccgctttggcaggcgcaattcaatgctgattgtcaacctgttggctgccactggtggctgccttatgggactgtgtaaaatagctgagtcagttgaaatgctgatcctgggccgcttggttattggcctcttctgcggactctgcacaggttttgtgcccatgtacattggagagatctcgcctactgccctgaggggtgcctttggcactctcaaccagctgggcatagttattggaattctggtggcccagatctttggtctggaactcatccttgggtctgaagagctatggccggtgctattaggctttaccatccttccagctatcctgcaaagtgcagcccttccatgttgccctgaaagtcccagatttttgctcattaacagaaaaaaagaggagaatgctacgcggatcctccagcggttgtggggcacccaggatgtatcccaagacatccaggagatgaaagatgagagtgcaaggatgtcacaagaaaagcaagtcaccgtgctggagctctttagagtgtccagctaccgacagcccatcatcatttccattgtgctccagctctctcagcagctctctgggatcaatgctgtgttctattactcaacaggaatcttcaaggatgcaggtgttcaacagcccatctatgccaccatcagcgcgggtgtggttaatactatcttcactttactttctctatttctggtggaaagggcaggaagaaggactctgcatatgataggccttggagggatggctttttgttccacgctcatgactgtttctttgttattaaagaatcactataatgggatgagctttgtctgtattggggctatcttggtctttgtggcctgttttgaaattggaccaggccccattccctggtttattgtggccgaactcttcagccagggcccccgcccagctgcgatggcagtggccggctgctccaactggacctccaacttcctagtcggattgctcttcccctctgctgcttactatttaggagcctacgtttttattatcttcaccggcttcctcattaccttcttggcctttaccttcttcaaagtccctgagacccgtggcaggacttttgaggatatcacacgggcctttgaagggcaggcacacggtgcagatagatctgggaaggacggcgtcatggggatgaacagcatcgagcctgctaaggagaccaccaccaatgtctaagtcatgcctccttccacctccctcccggcatgggaaagccacctctccctcaacaagggagagactttatcaggatgaacccaggactgcttctgaatgctgctacttgatttctttctcatcccacgcactccatgagcaccccaaggctgcagtttgttggatcttcaatggctttttaaattttatttcctggacatcctcttctgcttaggagagaccgagtgaacctaccttcatttcaggagggattggccgcttggcacatgacaactttgccagcttttcctcccttgggttctgatattgccgcactagaggatataggagaggaaaagtaaggtgcagttgccccaacctcagacttaccaggaagcagatacatatgagtgtggaagccggagggtgtttatgtaagagcaccttcctcacttccatacagctctacgcggcaaattaacttgagttttatttatcttatcctctggtttaattacataaatatttattttttaagtgtaattttgccaaataataaaaacagaaggaaattgagattagagggaggtgtttaaagagaggttatagagtaaaagatttgatgctggagaggttaaggtgcaataagaattcagggagaaatgttgttcattattggagggtaaatgatgtggtgcctgaggtctgtacattacctcttaacaatttctgtccttcagatggaaactctttgatttctcagaaaagttgtatgcctatttaataaagctactcatttcctttggaactttatctttaagataatagtttacatgtagtagtacttgaaatctaggattattaactaatatgggcattgtagttaatggcggttgatgggttctaattttggatggagtccagggaagagaaagtgatttctagaaagcctgttcccctcactggacgaaataactccttgtagtagtctcattacttttgaagtaatcccgccacctatctagtgggagagccatccaaatgagaaacctaaaataattggttcttggtagagattcattatttctccactttgttctttaggagattttaggtgttgattttctgttttattttaactcatacctttaaaggaattccccaaagaatgtttacagcaaacttggaatttgtaacctcagctctgggagaggatttttttctgagcgattattatctaaagtgtgttgttgctttaggctcacggcacgcttgcgtatgtctgttaccatgtcactgtggtcctatgccgaatgccctcaggggacttgaatctttccaataaaccaggtttagacagtatgagtcaatgtgcagtgcagcccacacttgagaggatgaatgtatgtgcactgtcactttgctctgggtggaagtatgttattgttgacttattttctctgtgtttgttcctacagcccctttttcatatgttgctcagtctccctttcccttcttggtgcttacacatctcagaccctttagccaaacccttgccagtgacagtattttggttctcagttctcactgttccctctgctcctggagcctttgaataaaaatgcacgtagctatggagtggggtttagctggaaaggtggccttccaacttcacgtcaacttctggctcctcagtttggcagtaaggcagggaagttgttttcctatttctcactgagaagattgtgaatatttccatatggattttccattattgtttgtttgattctttgttttaaaataaaaattctgaatgtacatgacaaaaaaaaaaaaaaaaaaaaaaaaaaa

SEQ ID NO: 499 - DNA, 3453 bp, Homo sapiens
ggacccctgctctgaccgcaggtgggtgcttgtcttgcttacggagggctcccgatgaaccgagtcacgttttgtaaccacattaacggaccattcaaagtcgaatcctaggcttttcgaggcagttagtgggtcccaacggctgcaggcggggccggcgggggcgcagcggcccgggaggtgcgtggttgagcgaagccgcggggcccaaccgcagtcgcggggtctgggaggaagcagtaccttgaagagaaattggagagggagtcaattcctaggatagcagagagatggacaacagacagaatgtcaccccagctctgatctttgccatcacagttgctacaatcggctctttccagtttggctacaacactggggtcatcaatgctcctgagacggcgcaattcaatgctgattgtcaacctgttggctgccactggtggctgccttatgggactgtgtaaaatagctgagtcagttgaaatgctgatcctgggccgcttggttattggcctcttctgcggactctgcacaggttttgtgcccatgtacattggagagatctcgcctactgccctgaggggtgcctttggcactctcaaccagctgggcatagttattggaattctggtggcccagatctttggtctggaactcatccttgggtctgaagagctatggccggtgctattaggctttaccatccttccagctatcctgcaaagtgcagcccttccatgttgccctgaaagtcccagatttttgctcattaacagaaaaaaagaggagaatgctacgcggatcctccagcggttgtggggcacccaggatgtatcccaagacatccaggagatgaaagatgagagtgcaaggatgtcacaagaaaagcaagtcaccgtgctggagctctttagagtgtccagctaccgacagcccatcatcatttccattgtgctccagctctctcagcagctctctgggatcaatgctgtgttctattactcaacaggaatcttcaaggatgcaggtgttcaacagcccatctatgccaccatcagcgcgggtgtggttaatactatcttcactttactttctctatttctggtggaaagggcaggaagaaggactctgcatatgataggccttggagggatggctttttgttccacgctcatgactgtttctttgttattaaagaatcactataatgggatgagctttgtctgtattggggctatcttggtctttgtggcctgttttgaaattggaccaggccccattccctggtttattgtggccgaactcttcagccagggcccccgcccagctgcgatggcagtggccggctgctccaactggacctccaacttcctagtcggattgctcttcccctctgctgcttactatttaggagcctacgtttttattatcttcaccggcttcctcattaccttcttggcctttaccttcttcaaagtccctgagacccgtggcaggacttttgaggatatcacacgggcctttgaagggcaggcacacggtgcagatagatctgggaaggacggcgtcatggggatgaacagcatcgagcctgctaaggagaccaccaccaatgtctaagtcatgcctccttccacctccctcccggcatgggaaagccacctctccctcaacaagggagagactttatcaggatgaacccaggactgcttctgaatgctgctacttgatttctttctcatcccacgcactccatgagcaccccaaggctgcagtttgttggatcttcaatggctttttaaattttatttcctggacatcctcttctgcttaggagagaccgagtgaacctaccttcatttcaggagggattggccgcttggcacatgacaactttgccagcttttcctcccttgggttctgatattgccgcactagaggatataggagaggaaaagtaaggtgcagttgccccaacctcagacttaccaggaagcagatacatatgagtgtggaagccggagggtgtttatgtaagagcaccttcctcacttccatacagctctacgcggcaaattaacttgagttttatttatcttatcctctggtttaattacataaatatttattttttaagtgtaattttgccaaataataaaaacagaaggaaattgagattagagggaggtgtttaaagagaggttatagagtaaaagatttgatgctggagaggttaaggtgcaataagaattcagggagaaatgttgttcattattggagggtaaatgatgtggtgcctgaggtctgtacattacctcttaacaatttctgtccttcagatggaaactctttgatttctcagaaaagttgtatgcctatttaataaagctactcatttcctttggaactttatctttaagataatagtttacatgtagtagtacttgaaatctaggattattaactaatatgggcattgtagttaatggcggttgatgggttctaattttggatggagtccagggaagagaaagtgatttctagaaagcctgttcccctcactggacgaaataactccttgtagtagtctcattacttttgaagtaatcccgccacctatctagtgggagagccatccaaatgagaaacctaaaataattggttcttggtagagattcattatttctccactttgttctttaggagattttaggtgttgattttctgttttattttaactcatacctttaaaggaattccccaaagaatgtttacagcaaacttggaatttgtaacctcagctctgggagaggatttttttctgagcgattattatctaaagtgtgttgttgctttaggctcacggcacgcttgcgtatgtctgttaccatgtcactgtggtcctatgccgaatgccctcaggggacttgaatctttccaataaaccaggtttagacagtatgagtcaatgtgcagtgcagcccacacttgagaggatgaatgtatgtgcactgtcactttgctctgggtggaagtatgttattgttgacttattttctctgtgtttgttcctacagcccctttttcatatgttgctcagtctccctttcccttcttggtgcttacacatctcagaccctttagccaaacccttgccagtgacagtattttggttctcagttctcactgttccctctgctcctggagcctttgaataaaaatgcacgtagctatggagtggggtttagctggaaaggtggccttccaacttcacgtcaacttctggctcctcagtttggcagtaaggcagggaagttgttttcctatttctcactgagaagattgtgaatatttccatatggattttccattattgtttgtttgattctttgttttaaaataaaaattctgaatgtacatgacaaaaaaaaaaaaaaaaaaaaaaaaaaa

SEQ ID NO: 500 - DNA, 3912 bp, Homo sapiens
ggacccctgctctgaccgcaggtgggtgcttgtcttgcttacggagggctcccgatgaaccgagtcacgttttgtaaccacattaacggaccattcaaagtcgaatcctaggcttttcgaggcagttagtgggtcccaacggctgcaggcggggccggcgggggcgcagcggcccgggaggtgcgtggttgagcgaagccgcggggcccaaccgcagtcgcggggtctgggagccctctattggagattctgcctcccctgggacagatggcttcttgagcacactcccacgatgggtggctgctctgggtattcatccatggggttcttccgcggtgaagccagcttgtcgtgctgtcccccttgtcattgaagccatcatggttctggtcaatcatgttgaaagcctccttaaactcctggatgtggaactggtcgaacatcacgaagacattggatgtggccccttgtgctgtggtcgcttcttggtggtcttggctttggtccacttgctgaacattttggcttcaggaagcagtaccttgaagagaaattggagagggagtcaattcctaggatagcagagagatggacaacagacagaatgtcaccccagctctgatctttgccatcacagttgctacaatcggctctttccagtttggctacaacactggggtcatcaatgctcctgagacgatcataaaggaatttatcaataaaactttgacggacaaggcaaatgcccctccctctgaggtgctgctcacgaatctctggtccttgtctgtggccatattttccgtcgggggtatgatcggctccttttccgtcggactctttgttaaccgctttggcaggcgcaattcaatgctgattgtcaacctgttggctgccactggtggctgccttatgggactgtgtaaaatagctgagtcagttgaaatgctgatcctgggccgcttggttattggcctcttctgcggactctgcacaggttttgtgcccatgtacattggagagatctcgcctactgccctgaggggtgcctttggcactctcaaccagctgggcatagttattggaattctggtggcccagatctttggtctggaactcatccttgggtctgaagagctatggccggtgctattaggctttaccatccttccagctatcctgcaaagtgcagcccttccatgttgccctgaaagtcccagatttttgctcattaacagaaaaaaagaggagaatgctacgcggatcctccagcggttgtggggcacccaggatgtatcccaagacatccaggagatgaaagatgagagtgcaaggatgtcacaagaaaagcaagtcaccgtgctggagctctttagagtgtccagctaccgacagcccatcatcatttccattgtgctccagctctctcagcagctctctgggatcaatgctgtgttctattactcaacaggaatcttcaaggatgcaggtgttcaacagcccatctatgccaccatcagcgcgggtgtggttaatactatcttcactttactttctctatttctggtggaaagggcaggaagaaggactctgcatatgataggccttggagggatggctttttgttccacgctcatgactgtttctttgttattaaagaatcactataatgggatgagctttgtctgtattggggctatcttggtctttgtggcctgttttgaaattggaccaggccccattccctggtttattgtggccgaactcttcagccagggcccccgcccagctgcgatggcagtggccggctgctccaactggacctccaacttcctagtcggattgctcttcccctctgctgcttactatttaggagcctacgtttttattatcttcaccggcttcctcattaccttcttggcctttaccttcttcaaagtccctgagacccgtggcaggacttttgaggatatcacacgggcctttgaagggcaggcacacggtgcagatagatctgggaaggacggcgtcatggggatgaacagcatcgagcctgctaaggagaccaccaccaatgtctaagtcatgcctccttccacctccctcccggcatgggaaagccacctctccctcaacaagggagagactttatcaggatgaacccaggactgcttctgaatgctgctacttgatttctttctcatcccacgcactccatgagcaccccaaggctgcagtttgttggatcttcaatggctttttaaattttatttcctggacatcctcttctgcttaggagagaccgagtgaacctaccttcatttcaggagggattggccgcttggcacatgacaactttgccagcttttcctcccttgggttctgatattgccgcactagaggatataggagaggaaaagtaaggtgcagttgccccaacctcagacttaccaggaagcagatacatatgagtgtggaagccggagggtgtttatgtaagagcaccttcctcacttccatacagctctacgcggcaaattaacttgagttttatttatcttatcctctggtttaattacataaatatttattttttaagtgtaattttgccaaataataaaaacagaaggaaattgagattagagggaggtgtttaaagagaggttatagagtaaaagatttgatgctggagaggttaaggtgcaataagaattcagggagaaatgttgttcattattggagggtaaatgatgtggtgcctgaggtctgtacattacctcttaacaatttctgtccttcagatggaaactctttgatttctcagaaaagttgtatgcctatttaataaagctactcatttcctttggaactttatctttaagataatagtttacatgtagtagtacttgaaatctaggattattaactaatatgggcattgtagttaatggcggttgatgggttctaattttggatggagtccagggaagagaaagtgatttctagaaagcctgttcccctcactggacgaaataactccttgtagtagtctcattacttttgaagtaatcccgccacctatctagtgggagagccatccaaatgagaaacctaaaataattggttcttggtagagattcattatttctccactttgttctttaggagattttaggtgttgattttctgttttattttaactcatacctttaaaggaattccccaaagaatgtttacagcaaacttggaatttgtaacctcagctctgggagaggatttttttctgagcgattattatctaaagtgtgttgttgctttaggctcacggcacgcttgcgtatgtctgttaccatgtcactgtggtcctatgccgaatgccctcaggggacttgaatctttccaataaaccaggtttagacagtatgagtcaatgtgcagtgcagcccacacttgagaggatgaatgtatgtgcactgtcactttgctctgggtggaagtatgttattgttgacttattttctctgtgtttgttcctacagcccctttttcatatgttgctcagtctccctttcccttcttggtgcttacacatctcagaccctttagccaaacccttgccagtgacagtattttggttctcagttctcactgttccctctgctcctggagcctttgaataaaaatgcacgtagctatggagtggggtttagctggaaaggtggccttccaacttcacgtcaacttctggctcctcagtttggcagtaaggcagggaagttgttttcctatttctcactgagaagattgtgaatatttccatatggattttccattattgtttgtttgattctttgttttaaaataaaaattctgaatgtacatgacaaaaaaaaaaaaaaaaaaaaaaaaaaa

SEQ ID NO: 501 - DNA, 3650 bp, Homo sapiens
ggacccctgctctgaccgcaggtgggtgcttgtcttgcttacggagggctcccgatgaaccgagtcacgttttgtaaccacattaacggaccattcaaagtcgaatcctaggcttttcgaggcagttagtgggtcccaacggctgcaggcggggccggcgggggcgcagcggcccgggaggaagcagtaccttgaagagaaattggagagggagtcaattcctaggatagcagagagatggacaacagacagaatagatggagtttcacaatggtggccatgtgtctggaattggtgggttcttggtctcactgacttcaagaatgaagccgcacaccctcgcagtcaccccagctctgatctttgccatcacagttgctacaatcggctctttccagtttggctacaacactggggtcatcaatgctcctgagacgatcataaaggaatttatcaataaaactttgacggacaaggcaaatgcccctccctctgaggtgctgctcacgaatctctggtccttgtctgtggccatattttccgtcgggggtatgatcggctccttttccgtcggactctttgttaaccgctttggcaggcgcaattcaatgctgattgtcaacctgttggctgccactggtggctgccttatgggactgtgtaaaatagctgagtcagttgaaatgctgatcctgggccgcttggttattggcctcttctgcggactctgcacaggttttgtgcccatgtacattggagagatctcgcctactgccctgaggggtgcctttggcactctcaaccagctgggcatagttattggaattctggtggcccagatctttggtctggaactcatccttgggtctgaagagctatggccggtgctattaggctttaccatccttccagctatcctgcaaagtgcagcccttccatgttgccctgaaagtcccagatttttgctcattaacagaaaaaaagaggagaatgctacgcggatcctccagcggttgtggggcacccaggatgtatcccaagacatccaggagatgaaagatgagagtgcaaggatgtcacaagaaaagcaagtcaccgtgctggagctctttagagtgtccagctaccgacagcccatcatcatttccattgtgctccagctctctcagcagctctctgggatcaatgctgtgttctattactcaacaggaatcttcaaggatgcaggtgttcaacagcccatctatgccaccatcagcgcgggtgtggttaatactatcttcactttactttctctatttctggtggaaagggcaggaagaaggactctgcatatgataggccttggagggatggctttttgttccacgctcatgactgtttctttgttattaaagaatcactataatgggatgagctttgtctgtattggggctatcttggtctttgtggcctgttttgaaattggaccaggccccattccctggtttattgtggccgaactcttcagccagggcccccgcccagctgcgatggcagtggccggctgctccaactggacctccaacttcctagtcggattgctcttcccctctgctgcttactatttaggagcctacgtttttattatcttcaccggcttcctcattaccttcttggcctttaccttcttcaaagtccctgagacccgtggcaggacttttgaggatatcacacgggcctttgaagggcaggcacacggtgcagatagatctgggaaggacggcgtcatggggatgaacagcatcgagcctgctaaggagaccaccaccaatgtctaagtcatgcctccttccacctccctcccggcatgggaaagccacctctccctcaacaagggagagactttatcaggatgaacccaggactgcttctgaatgctgctacttgatttctttctcatcccacgcactccatgagcaccccaaggctgcagtttgttggatcttcaatggctttttaaattttatttcctggacatcctcttctgcttaggagagaccgagtgaacctaccttcatttcaggagggattggccgcttggcacatgacaactttgccagcttttcctcccttgggttctgatattgccgcactagaggatataggagaggaaaagtaaggtgcagttgccccaacctcagacttaccaggaagcagatacatatgagtgtggaagccggagggtgtttatgtaagagcaccttcctcacttccatacagctctacgcggcaaattaacttgagttttatttatcttatcctctggtttaattacataaatatttattttttaagtgtaattttgccaaataataaaaacagaaggaaattgagattagagggaggtgtttaaagagaggttatagagtaaaagatttgatgctggagaggttaaggtgcaataagaattcagggagaaatgttgttcattattggagggtaaatgatgtggtgcctgaggtctgtacattacctcttaacaatttctgtccttcagatggaaactctttgatttctcagaaaagttgtatgcctatttaataaagctactcatttcctttggaactttatctttaagataatagtttacatgtagtagtacttgaaatctaggattattaactaatatgggcattgtagttaatggcggttgatgggttctaattttggatggagtccagggaagagaaagtgatttctagaaagcctgttcccctcactggacgaaataactccttgtagtagtctcattacttttgaagtaatcccgccacctatctagtgggagagccatccaaatgagaaacctaaaataattggttcttggtagagattcattatttctccactttgttctttaggagattttaggtgttgattttctgttttattttaactcatacctttaaaggaattccccaaagaatgtttacagcaaacttggaatttgtaacctcagctctgggagaggatttttttctgagcgattattatctaaagtgtgttgttgctttaggctcacggcacgcttgcgtatgtctgttaccatgtcactgtggtcctatgccgaatgccctcaggggacttgaatctttccaataaaccaggtttagacagtatgagtcaatgtgcagtgcagcccacacttgagaggatgaatgtatgtgcactgtcactttgctctgggtggaagtatgttattgttgacttattttctctgtgtttgttcctacagcccctttttcatatgttgctcagtctccctttcccttcttggtgcttacacatctcagaccctttagccaaacccttgccagtgacagtattttggttctcagttctcactgttccctctgctcctggagcctttgaataaaaatgcacgtagctatggagtggggtttagctggaaaggtggccttccaacttcacgtcaacttctggctcctcagtttggcagtaaggcagggaagttgttttcctatttctcactgagaagattgtgaatatttccatatggattttccattattgtttgtttgattctttgttttaaaataaaaattctgaatgtacatgacaaaaaaaaaaaaaaaaaaaaaaaaaaa

SEQ ID NO: 502 - DNA, 3507 bp, Homo sapiens
gcactctgctcctgggtctgcactgggagcagctggctttgctcccacacaacctgacttttgttcacaatgcaaagactccaactgttgagagtagaagtactgctgggtgtgaaacaaggagatgaaatgcggcatttctttttttcttctcagacctccactctggagaagagtcagaatgggggcgtcggggaggaggtcaccccagctctgatctttgccatcacagttgctacaatcggctctttccagtttggctacaacactggggtcatcaatgctcctgagacgatcataaaggaatttatcaataaaactttgacggacaaggcaaatgcccctccctctgaggtgctgctcacgaatctctggtccttgtctgtggccatattttccgtcgggggtatgatcggctccttttccgtcggactctttgttaaccgctttggcaggcgcaattcaatgctgattgtcaacctgttggctgccactggtggctgccttatgggactgtgtaaaatagctgagtcagttgaaatgctgatcctgggccgcttggttattggcctcttctgcggactctgcacaggttttgtgcccatgtacattggagagatctcgcctactgccctgaggggtgcctttggcactctcaaccagctgggcatagttattggaattctggtggcccagatctttggtctggaactcatccttgggtctgaagagctatggccggtgctattaggctttaccatccttccagctatcctgcaaagtgcagcccttccatgttgccctgaaagtcccagatttttgctcattaacagaaaaaaagaggagaatgctacgcggatcctccagcggttgtggggcacccaggatgtatcccaagacatccaggagatgaaagatgagagtgcaaggatgtcacaagaaaagcaagtcaccgtgctggagctctttagagtgtccagctaccgacagcccatcatcatttccattgtgctccagctctctcagcagctctctgggatcaatgctgtgttctattactcaacaggaatcttcaaggatgcaggtgttcaacagcccatctatgccaccatcagcgcgggtgtggttaatactatcttcactttactttctctatttctggtggaaagggcaggaagaaggactctgcatatgataggccttggagggatggctttttgttccacgctcatgactgtttctttgttattaaagaatcactataatgggatgagctttgtctgtattggggctatcttggtctttgtggcctgttttgaaattggaccaggccccattccctggtttattgtggccgaactcttcagccagggcccccgcccagctgcgatggcagtggccggctgctccaactggacctccaacttcctagtcggattgctcttcccctctgctgcttactatttaggagcctacgtttttattatcttcaccggcttcctcattaccttcttggcctttaccttcttcaaagtccctgagacccgtggcaggacttttgaggatatcacacgggcctttgaagggcaggcacacggtgcagatagatctgggaaggacggcgtcatggggatgaacagcatcgagcctgctaaggagaccaccaccaatgtctaagtcatgcctccttccacctccctcccggcatgggaaagccacctctccctcaacaagggagagactttatcaggatgaacccaggactgcttctgaatgctgctacttgatttctttctcatcccacgcactccatgagcaccccaaggctgcagtttgttggatcttcaatggctttttaaattttatttcctggacatcctcttctgcttaggagagaccgagtgaacctaccttcatttcaggagggattggccgcttggcacatgacaactttgccagcttttcctcccttgggttctgatattgccgcactagaggatataggagaggaaaagtaaggtgcagttgccccaacctcagacttaccaggaagcagatacatatgagtgtggaagccggagggtgtttatgtaagagcaccttcctcacttccatacagctctacgcggcaaattaacttgagttttatttatcttatcctctggtttaattacataaatatttattttttaagtgtaattttgccaaataataaaaacagaaggaaattgagattagagggaggtgtttaaagagaggttatagagtaaaagatttgatgctggagaggttaaggtgcaataagaattcagggagaaatgttgttcattattggagggtaaatgatgtggtgcctgaggtctgtacattacctcttaacaatttctgtccttcagatggaaactctttgatttctcagaaaagttgtatgcctatttaataaagctactcatttcctttggaactttatctttaagataatagtttacatgtagtagtacttgaaatctaggattattaactaatatgggcattgtagttaatggcggttgatgggttctaattttggatggagtccagggaagagaaagtgatttctagaaagcctgttcccctcactggacgaaataactccttgtagtagtctcattacttttgaagtaatcccgccacctatctagtgggagagccatccaaatgagaaacctaaaataattggttcttggtagagattcattatttctccactttgttctttaggagattttaggtgttgattttctgttttattttaactcatacctttaaaggaattccccaaagaatgtttacagcaaacttggaatttgtaacctcagctctgggagaggatttttttctgagcgattattatctaaagtgtgttgttgctttaggctcacggcacgcttgcgtatgtctgttaccatgtcactgtggtcctatgccgaatgccctcaggggacttgaatctttccaataaaccaggtttagacagtatgagtcaatgtgcagtgcagcccacacttgagaggatgaatgtatgtgcactgtcactttgctctgggtggaagtatgttattgttgacttattttctctgtgtttgttcctacagcccctttttcatatgttgctcagtctccctttcccttcttggtgcttacacatctcagaccctttagccaaacccttgccagtgacagtattttggttctcagttctcactgttccctctgctcctggagcctttgaataaaaatgcacgtagctatggagtggggtttagctggaaaggtggccttccaacttcacgtcaacttctggctcctcagtttggcagtaaggcagggaagttgttttcctatttctcactgagaagattgtgaatatttccatatggattttccattattgtttgtttgattctttgttttaaaataaaaattctgaatgtacatgacaaaaaaaaaaaaaaaaaaaaaaaaaaa

SEQ ID NO: 503 - DNA, 3774 bp, Homo sapiens
agtcgcggggtctgggagccctctattggagattctgcctcccctgggacagatggcttcttgagcacactcccacgatgggtggctgctctggtacatctcatccacttcttcatctgtgaagctgtcacccatggtggtgagcagctcctggaggtggtcctcatgaatgaaacctgaggattcctcgttgaagcaggtattcatccatggggttcttccgcggtgaagccagcttgtcgtgctgtcccccttgtcattgaagccatcatggttctggtcaatcatgttgaaagcctccttaaactcctggatgtggaactggtcgaacatcacgaagacattggatgtggccccttgtgctgtggtcgcttcttggtggtcttggctttggtccacttgctgaacattttggcttcaggaagcagtaccttgaagagaaattggagagggagtcaattcctaggatagcagagagatggacaacagacagaatgtcaccccagctctgatctttgccatcacagttgctacaatcggctctttccagtttggctacaacactggggtcatcaatgctcctgagacgatcataaaggaatttatcaataaaactttgacggacaaggcaaatgcccctccctctgaggtgctgctcacgaatctctggtccttgtctgtggccatattttccgtcgggggtatgatcggctccttttccgtcggactctttgttaaccgctttggcaggcgcaattcaatgctgattgtcaacctgttggctgccactggtggctgccttatgggactgtgtaaaatagctgagtcagttgaaatgctgatcctgggccgcttggttattggcctcttctgcggactctgcacaggttttgtgcccatgtacattggagagatctcgcctactgccctgaggggtgcctttggcactctcaaccagctgggcatagttattggaattctggtggcccagatctttggtctggaactcatccttgggtctgaagagctatggccggtgctattaggctttaccatccttccagctatcctgcaaagtgcagcccttccatgttgccctgaaagtcccagatttttgctcattaacagaaaaaaagaggagaatgctacgcggatcctccagcggttgtggggcacccaggatgtatcccaagacatccaggagatgaaagatgagagtgcaaggatgtcacaagaaaagcaagtcaccgtgctggagctctttagagtgtccagctaccgacagcccatcatcatttccattgtgctccagctctctcagcagctctctgggatcaatgctgtgttctattactcaacaggaatcttcaaggatgcaggtgttcaacagcccatctatgccaccatcagcgcgggtgtggttaatactatcttcactttactttctctatttctggtggaaagggcaggaagaaggactctgcatatgataggccttggagggatggctttttgttccacgctcatgactgtttctttgttattaaagaatcactataatgggatgagctttgtctgtattggggctatcttggtctttgtggcctgttttgaaattggaccaggccccattccctggtttattgtggccgaactcttcagccagggcccccgcccagctgcgatggcagtggccggctgctccaactggacctccaacttcctagtcggattgctcttcccctctgctgcttactatttaggagcctacgtttttattatcttcaccggcttcctcattaccttcttggcctttaccttcttcaaagtccctgagacccgtggcaggacttttgaggatatcacacgggcctttgaagggcaggcacacggtgcagatagatctgggaaggacggcgtcatggggatgaacagcatcgagcctgctaaggagaccaccaccaatgtctaagtcatgcctccttccacctccctcccggcatgggaaagccacctctccctcaacaagggagagactttatcaggatgaacccaggactgcttctgaatgctgctacttgatttctttctcatcccacgcactccatgagcaccccaaggctgcagtttgttggatcttcaatggctttttaaattttatttcctggacatcctcttctgcttaggagagaccgagtgaacctaccttcatttcaggagggattggccgcttggcacatgacaactttgccagcttttcctcccttgggttctgatattgccgcactagaggatataggagaggaaaagtaaggtgcagttgccccaacctcagacttaccaggaagcagatacatatgagtgtggaagccggagggtgtttatgtaagagcaccttcctcacttccatacagctctacgcggcaaattaacttgagttttatttatcttatcctctggtttaattacataaatatttattttttaagtgtaattttgccaaataataaaaacagaaggaaattgagattagagggaggtgtttaaagagaggttatagagtaaaagatttgatgctggagaggttaaggtgcaataagaattcagggagaaatgttgttcattattggagggtaaatgatgtggtgcctgaggtctgtacattacctcttaacaatttctgtccttcagatggaaactctttgatttctcagaaaagttgtatgcctatttaataaagctactcatttcctttggaactttatctttaagataatagtttacatgtagtagtacttgaaatctaggattattaactaatatgggcattgtagttaatggcggttgatgggttctaattttggatggagtccagggaagagaaagtgatttctagaaagcctgttcccctcactggacgaaataactccttgtagtagtctcattacttttgaagtaatcccgccacctatctagtgggagagccatccaaatgagaaacctaaaataattggttcttggtagagattcattatttctccactttgttctttaggagattttaggtgttgattttctgttttattttaactcatacctttaaaggaattccccaaagaatgtttacagcaaacttggaatttgtaacctcagctctgggagaggatttttttctgagcgattattatctaaagtgtgttgttgctttaggctcacggcacgcttgcgtatgtctgttaccatgtcactgtggtcctatgccgaatgccctcaggggacttgaatctttccaataaaccaggtttagacagtatgagtcaatgtgcagtgcagcccacacttgagaggatgaatgtatgtgcactgtcactttgctctgggtggaagtatgttattgttgacttattttctctgtgtttgttcctacagcccctttttcatatgttgctcagtctccctttcccttcttggtgcttacacatctcagaccctttagccaaacccttgccagtgacagtattttggttctcagttctcactgttccctctgctcctggagcctttgaataaaaatgcacgtagctatggagtggggtttagctggaaaggtggccttccaacttcacgtcaacttctggctcctcagtttggcagtaaggcagggaagttgttttcctatttctcactgagaagattgtgaatatttccatatggattttccattattgtttgtttgattctttgttttaaaataaaaattctgaatgtacatga

SEQ ID NO: 504 - DNA, 3519 bp, Homo sapiens
cggctgcaggcggggccggcgggggcgcagcggcccgggaggtgcgtggttgagcgaagccgcggggcccaaccgcagtcgcggggtctgggaggaagcagtaccttgaagagaaattggagagggagtcaattcctaggatagcagagagatggacaacagacagaatggaggttcctttctgtgcacgtcagaagatgacaggcaagaaaacaaagtggaaaacaataaggaagtgaaggtcaccccagctctgatctttgccatcacagttgctacaatcggctctttccagtttggctacaacactggggtcatcaatgctcctgagacgatcataaaggaatttatcaataaaactttgacggacaaggcaaatgcccctccctctgaggtgctgctcacgaatctctggtccttgtctgtggccatattttccgtcgggggtatgatcggctccttttccgtcggactctttgttaaccgctttggcaggcgcaattcaatgctgattgtcaacctgttggctgccactggtggctgccttatgggactgtgtaaaatagctgagtcagttgaaatgctgatcctgggccgcttggttattggcctcttctgcggactctgcacaggttttgtgcccatgtacattggagagatctcgcctactgccctgaggggtgcctttggcactctcaaccagctgggcatagttattggaattctggtggcccagatctttggtctggaactcatccttgggtctgaagagctatggccggtgctattaggctttaccatccttccagctatcctgcaaagtgcagcccttccatgttgccctgaaagtcccagatttttgctcattaacagaaaaaaagaggagaatgctacgcggatcctccagcggttgtggggcacccaggatgtatcccaagacatccaggagatgaaagatgagagtgcaaggatgtcacaagaaaagcaagtcaccgtgctggagctctttagagtgtccagctaccgacagcccatcatcatttccattgtgctccagctctctcagcagctctctgggatcaatgctgtgttctattactcaacaggaatcttcaaggatgcaggtgttcaacagcccatctatgccaccatcagcgcgggtgtggttaatactatcttcactttactttctctatttctggtggaaagggcaggaagaaggactctgcatatgataggccttggagggatggctttttgttccacgctcatgactgtttctttgttattaaagaatcactataatgggatgagctttgtctgtattggggctatcttggtctttgtggcctgttttgaaattggaccaggccccattccctggtttattgtggccgaactcttcagccagggcccccgcccagctgcgatggcagtggccggctgctccaactggacctccaacttcctagtcggattgctcttcccctctgctgcttactatttaggagcctacgtttttattatcttcaccggcttcctcattaccttcttggcctttaccttcttcaaagtccctgagacccgtggcaggacttttgaggatatcacacgggcctttgaagggcaggcacacggtgcagatagatctgggaaggacggcgtcatggggatgaacagcatcgagcctgctaaggagaccaccaccaatgtctaagtcatgcctccttccacctccctcccggcatgggaaagccacctctccctcaacaagggagagactttatcaggatgaacccaggactgcttctgaatgctgctacttgatttctttctcatcccacgcactccatgagcaccccaaggctgcagtttgttggatcttcaatggctttttaaattttatttcctggacatcctcttctgcttaggagagaccgagtgaacctaccttcatttcaggagggattggccgcttggcacatgacaactttgccagcttttcctcccttgggttctgatattgccgcactagaggatataggagaggaaaagtaaggtgcagttgccccaacctcagacttaccaggaagcagatacatatgagtgtggaagccggagggtgtttatgtaagagcaccttcctcacttccatacagctctacgcggcaaattaacttgagttttatttatcttatcctctggtttaattacataaatatttattttttaagtgtaattttgccaaataataaaaacagaaggaaattgagattagagggaggtgtttaaagagaggttatagagtaaaagatttgatgctggagaggttaaggtgcaataagaattcagggagaaatgttgttcattattggagggtaaatgatgtggtgcctgaggtctgtacattacctcttaacaatttctgtccttcagatggaaactctttgatttctcagaaaagttgtatgcctatttaataaagctactcatttcctttggaactttatctttaagataatagtttacatgtagtagtacttgaaatctaggattattaactaatatgggcattgtagttaatggcggttgatgggttctaattttggatggagtccagggaagagaaagtgatttctagaaagcctgttcccctcactggacgaaataactccttgtagtagtctcattacttttgaagtaatcccgccacctatctagtgggagagccatccaaatgagaaacctaaaataattggttcttggtagagattcattatttctccactttgttctttaggagattttaggtgttgattttctgttttattttaactcatacctttaaaggaattccccaaagaatgtttacagcaaacttggaatttgtaacctcagctctgggagaggatttttttctgagcgattattatctaaagtgtgttgttgctttaggctcacggcacgcttgcgtatgtctgttaccatgtcactgtggtcctatgccgaatgccctcaggggacttgaatctttccaataaaccaggtttagacagtatgagtcaatgtgcagtgcagcccacacttgagaggatgaatgtatgtgcactgtcactttgctctgggtggaagtatgttattgttgacttattttctctgtgtttgttcctacagcccctttttcatatgttgctcagtctccctttcccttcttggtgcttacacatctcagaccctttagccaaacccttgccagtgacagtattttggttctcagttctcactgttccctctgctcctggagcctttgaataaaaatgcacgtagctatggagtggggtttagctggaaaggtggccttccaacttcacgtcaacttctggctcctcagtttggcagtaaggcagggaagttgttttcctatttctcactgagaagattgtgaatatttccatatggattttccattattgtttgtttgattctttgttttaaaataaaaattctgaatgtacatga
